(19) United States
(12) Patent Application Publication
(10) Pub. No.: US 2004/0214272 A1
(43) Pub. Date: Oct. 28, 2004

(54) Nucleic acid molecules and other molecules associated with plants

(76) Inventors: Thomas J La Rosa, (US); Yihua Zhou, (US); David Kovalic, (US); Yongwei Cao, (US)

Correspondence Address: Lawrence M. Lavin, Jr., Monsanto Company, Patent Department, E2NA, 800 N. Lindbergh Boulevard, St. Louis, MO, 63167, US

(21) Appl. No.: 10/425,115

(22) Filed: Apr. 28, 2003

(51) Int. Cl. C07H 21/04; A01H 1/00; C12N 15/82; C12N 5/04

(52) U.S. Cl. 435/69.1; 435/419; 435/468; 530/370; 536/23.6; 800/278

(57) ABSTRACT

Polynucleotides useful for improvement of plants are provided. In particular, polynucleotide sequences are provided from plant sources. Polypeptides encoded by the polynucleotide sequences are also provided. The disclosed polynucleotides and polypeptides find use in production of transgenic plants to produce plants having improved properties.

[0001] This application claims the benefit of U.S. applications Ser. No. 09/198,779 filed Nov. 24, 1998, Ser. No. 09/227,586 filed Jan. 8, 1999, Ser. No. 09/229,413 filed Jan. 12, 1999, Ser. No. 09/233,218 filed Jan. 20, 1999, Ser. No. 09/237,183 filed Jan. 26, 1999, Ser. No. 09/252,974 filed Feb. 19, 1999, Ser. No. 09/262,979 filed Mar. 4, 1999, Ser. No. 09/267,199 filed Mar. 12, 1999, Ser. No. 09/300,482 filed Apr. 28, 1999, Ser. No. 09/304,517 filed May 6, 1999, Ser. No. 09/371,146 filed Aug. 9, 1999, Ser. No. 09/394,745 filed Sep. 15, 1999, Ser. No. 09/534,859 filed Mar. 29, 2000, Ser. No. 09/553,094 filed Apr. 18, 2000, Ser. No. 09/565,386 filed May 4, 2000, Ser. No. 09/606,977 filed Jun. 28, 2000, Ser. No. 09/619,643 filed Jul. 19, 2000, Ser. No. 09/654,617 filed Sep. 5, 2000, Ser. No. 09/684,016 filed Oct. 10, 2000, Ser. No. 09/692,257 filed Oct. 19, 2000, Ser. No. 09/696,664 filed Oct. 25, 2000, Ser. No. 09/733,089 filed Dec. 11, 2000, Ser. No. 09/733,370 filed Feb. 1, 2001, Ser. No. 09/816,660 filed Mar. 26, 2001, Ser. No. 09/826,019 filed Apr. 5, 2001, Ser. No. 09/849,526 filed May 7, 2001, Ser. No. 09/861,478 filed May 18, 2001, Ser. No. 09/865,419 filed May 29, 2001, Ser. No. 09/865,439 filed May 29, 2001, Ser. No. 09/873,402 filed Jun. 5, 2001, Ser. No. 09/922,293 filed Aug. 6, 2001, Ser. No. 09/938,294 filed Aug. 24, 2001, Ser. No. 09/955,216 filed Sep. 19, 2001, Ser. No. 09/985,678 filed Nov. 5, 2001, Ser. No. 09/987,899 filed Nov. 16, 2001, Ser. No. 10/155,881 filed May 22, 2002, Ser. No. 10/219,999 filed Aug. 15, 2002, 60/066,873 filed Nov. 25, 1997, 60/071,064 filed Jan. 9, 1998, 60/071,479 filed Jan. 13, 1998, 60/072,027 filed Jan. 21, 1998, 60/072,888 filed Jan. 27, 1998, 60/076,709 filed Mar. 4, 1998, 60/076,912 filed Mar. 6, 1998, 60/078,031 filed Mar. 16, 1998, 60/083,390 filed Apr. 29, 1998, 60/084,684 filed May 8, 1998, 60/085,057 filed May 8, 1998, 60/085,245 filed May 13, 1998, 60/085,429 filed May 8, 1998, 60/085,533 filed May 15, 1998, 60/085,940 filed May 19, 1998, 60/086,339 filed May 21, 1998, 60/086,594 filed May 22, 1998, 60/086,608 filed May 22, 1998, 60/087,422 filed Jun. 1, 1998, 60/087,631 filed Jun. 2, 1998, 60/087,762 filed Jun. 2, 1998, 60/087,972 filed Jun. 4, 1998, 60/087,973 filed Jun. 4, 1998, 60/088,441 filed Jun. 8, 1998, 60/089,627 filed Jun. 16, 1998, 60/089,789 filed Jun. 18, 1998, 60/090,170 filed Jun. 22, 1998, 60/090,856 filed Jun. 26, 1998, 60/090,928 filed Jun. 26, 1998, 60/091,035 filed Jun. 29, 1998, 60/091,247 filed Jun. 30, 1998, 60/091,405 filed Jun. 30, 1998, 60/092,036 filed Jul. 8, 1998, 60/099,667 filed Sep. 9, 1998, 60/100,963 filed Sep. 17, 1998, 60/101,343 filed Sep. 22, 1998, 60/101,344 filed Sep. 22, 1998, 60/101,347 filed Sep. 22, 1998, 60/101,508 filed Sep. 22, 1998, 60/101,707 filed Sep. 25, 1998, 60/101,708 filed Sep. 25, 1998, 60/101,709 filed Sep. 25, 1998, 60/104,119 filed Oct. 13, 1998, 60/104,121 filed Oct. 13, 1998, 60/104,122 filed Oct. 13, 1998, 60/104,123 filed Oct. 13, 1998, 60/104,124 filed Oct. 13, 1998, 60/104,126 filed Oct. 13, 1998, 60/104,127 filed Oct. 13, 1998, 60/104,128 filed Oct. 13, 1998, 60/110,108 filed Nov. 25, 1998, 60/110,109 filed Nov. 25, 1998, 60/111,033 filed Dec. 4, 1998, 60/111,742 filed Dec. 10, 1998, 60/112,807 filed Dec. 18, 1998, 60/130,177 filed Apr. 20, 1999, 60/130,178 filed Apr. 20, 1999, 60/130,179 filed Apr. 20, 1999, 60/130,180 filed Apr. 20, 1999, 60/130,181 filed Apr. 20, 1999, 60/132,860 filed May 7, 1999, 60/141,233 filed Jun. 29, 1999, 60/145,146 filed Jul. 22, 1999, 60/145,147 filed Jul. 22, 1999, 60/145,148 filed Jul. 22, 1999, 60/145,485 filed Jul. 23, 1999, 60/146,904 filed Aug. 2, 1999, 60/146,905 filed Aug. 2, 1999, 60/146,907 filed Aug. 2, 1999, 60/161,619 filed Oct. 26, 1999, 60/162,747 filed Oct. 28, 1999, 60/179,730 filed Feb. 2, 2000, 60/202,214 filed May 8, 2000, 60/207,458 filed May 30, 2000, 60/208,063 filed May 31, 2000, 60/209,830 filed Jun. 6, 2000, 60/228,466 filed Aug. 29, 2000, 60/312,544 filed Aug. 15, 2001, 60/324,109 filed Sep. 21, 2001, 60/365,301 filed Mar. 15, 2002, 60/391,786 filed Jun. 25, 2002, 60/392,018 filed Jun. 26, 2002, and 60/396,665 filed Jul. 18, 2002 hereby incorporated by reference herein in their entirety.

### INCORPORATION OF SEQUENCE LISTING

[0002] Two copies of the sequence listing (Seq. Listing Copy 1 and Seq. Listing Copy 2) and a computer-readable form of the sequence listing, all on CD-ROMs, each containing the file named pa_{—}00559.rpt, which is 413,135,224 bytes (measured in MS-DOS) and was created on Apr. 28, 2003, are herein incorporated by reference.

### INCORPORATION OF TABLE

[0003] Two copies of Table 1 (Table 1 Copy 1 and Table 1 Copy 2) all on CD-ROMs, each containing the file named pa_{—}00559.txt, which is 78,505,800 bytes (measured in MS-DOS) and was created on Apr. 25, 2003, are herein incorporated by reference.

### FIELD OF THE INVENTION

[0004] Disclosed herein are inventions in the field of plant biochemistry and genetics. More specifically polynucleotides for use in plant improvement are provided, in particular, sequences from Zea mays and the polypeptides encoded by such cDNAs are disclosed. Methods of using the polynucleotides for production of transgenic plants with improved biological characteristics are disclosed.

### BACKGROUND OF THE INVENTION

[0005] The ability to develop transgenic plants with improved traits depends in part on the identification of genes that are useful for production of transformed plants for expression of novel polypeptides. In this regard, the discovery of the polynucleotide sequences of such genes, and the polypeptide encoding regions of genes, is needed. Molecules comprising such polynucleotides may be used, for example, in DNA constructs useful for imparting unique genetic properties into transgenic plants.

### SUMMARY OF THE INVENTION

[0006] This invention provides isolated and purified polynucleotides comprising DNA sequences and the polypeptides encoded by such molecules from Zea mays. Polynucleotide sequences of the present invention are provided in the attached Sequence Listing as SEQ ID NO: 1 through SEQ ID NO: 184,663. Polypeptides of the present invention are provided as SEQ ID NO: 184,664 through SEQ ID NO: 369,326. Preferred subsets of the polynucleotides and polypeptides of this invention are useful for improvement of one or more important properties in plants.

[0007] The present invention also provides fragments of the polynucleotides of the present invention for use, for example as probes or molecular markers. Such fragments comprise at least 15 consecutive nucleotides in a sequence selected from the group consisting of SEQ ID NO:1 through SEQ ID NO: 184,663 and complements thereof. Polynucleotide fragments of the present invention are useful as primers for PCR amplification and in hybridization assays such as transcription profiling assays or marker assays, e.g. high throughput assays where the oligonucleotides are provided in high-density arrays on a substrate. The present invention also provides homologs of the polynucleotide and polypeptides of the present invention.

[0008] This invention also provides DNA constructs comprising polynucleotides provided herein. Of particular interest are recombinant DNA constructs, wherein said constructs comprise a polynucleotide selected from the group consisting of:

[0009] (a) a polynucleotide comprising a nucleic acid sequence selected from the group consisting of SEQ ID NO: 1 through SEQ ID NO: 184,663;

[0010] (b) a polynucleotide encoding a polypeptide having an amino acid sequence selected from the group consisting of SEQ ID NO: 184,664 through SEQ ID NO: 369,326;

[0011] (c) a polynucleotide comprising a nucleic acid sequence complementary to a nucleic acid sequence selected from the group consisting of SEQ ID NO: 1 through SEQ ID NO: 184,663;

[0012] (d) a polynucleotide having at least 70% sequence identity to a polynucleotide of (a), (b) or (c);

[0013] (e) a polynucleotide encoding a polypeptide having at least 80% sequence identity to a polypeptide having an amino acid sequence selected from the group consisting of SEQ ID NO: 184,664 through SEQ ID NO: 369,326;

[0014] (f) a polynucleotide comprising a promoter functional in a plant cell, operably joined to a coding sequence for a polypeptide having at least 80% sequence identity to a polypeptide having an amino acid sequence selected from the group consisting of SEQ ID NO: 184,664 through SEQ ID NO: 369,326, wherein said encoded polypeptide is a functional homolog of said polypeptide having an amino acid sequence selected from the group consisting of SEQ ID NO: 184,664 through SEQ ID NO: 369,326; and

[0015] (g) a polynucleotide comprising a promoter functional in a plant cell, operably joined to a coding sequence for a polypeptide having an amino acid sequence selected from the group consisting of SEQ ID NO: 184,664 through SEQ ID NO: 369,326, wherein transcription of said coding sequence produces an RNA molecule having sufficient complementarity to a polynucleotide encoding said polypeptide to result in decreased expression of said polypeptide when said construct is expressed in a plant cell.

[0016] Such constructs are useful for production of transgenic plants having at least one improved property as the result of expression of a polypeptide of this invention. Improved properties of interest include yield, disease resistance, growth rate, stress tolerance and others as set forth in more detail herein.

[0017] The present invention also provides a method of modifying plant protein activity by inserting into cells of said plant an antisense construct comprising a promoter which functions in plant cells, a polynucleotide comprising a polypeptide coding sequence operably linked to said promoter, wherein said protein coding sequence is oriented such that transcription from said promoter produces an RNA molecule having sufficient complementarity to a polynucleotide encoding said polypeptide to result in decreased expression of said polypeptide when said construct is expressed in a plant cell.

[0018] This invention also provides a transformed organism, particularly a transformed plant, preferably a transformed crop plant, comprising a recombinant DNA construct of the present invention.

### DETAILED DESCRIPTION OF THE INVENTION

[0019] The present invention provides polynucleotides, or nucleic acid molecules, representing plant DNA sequences and the polypeptides encoded by such polynucleotides. The polynucleotides and polypeptides of the present invention find a number of uses, for example in recombinant DNA constructs, in physical arrays of molecules, and for use as plant breeding markers. In addition, the nucleotide and amino acid sequences of the polynucleotides and polypeptides find use in computer based storage and analysis systems.

[0020] Depending on the intended use, the polynucleotides of the present invention may be present in the form of DNA, such as cDNA or genomic DNA, or as RNA, for example mRNA. The polynucleotides of the present invention may be single or double stranded and may represent the coding, or sense strand of a gene, or the non-coding, antisense, strand.

[0021] The polynucleotides of the present invention find particular use in generation of transgenic plants to provide for increased or decreased expression of the polypeptides encoded by the cDNA polynucleotides provided herein. As a result of such biotechnological applications, plants, particularly crop plants, having improved properties are obtained. Crop plants of interest in the present invention include, but are not limited to soy, cotton, canola, maize, wheat, sunflower, sorghum, alfalfa, barley, millet, rice, tobacco, fruit and vegetable crops, and turf grass. Of particular interest are uses of the disclosed polynucleotides to provide plants having improved yield resulting from improved utilization of key biochemical compounds, such as nitrogen, phosphorous and carbohydrate, or resulting from improved responses to environmental stresses, such as cold, heat, drought, salt, and attack by pests or pathogens. Polynucleotides of the present invention may also be used to provide plants having improved growth and development, and ultimately increased yield, as the result of modified expression of plant growth regulators or modification of cell cycle or photosynthesis pathways. Other traits of interest that may be modified in plants using polynucleotides of the present invention include flavonoid content, seed oil and protein quantity and quality, herbicide tolerance, and rate of homologous recombination.

[0022] The term “isolated” is used herein in reference to purified polynucleotide or polypeptide molecules. As used herein, “purified” refers to a polynucleotide or polypeptide molecule separated from substantially all other molecules normally associated with it in its native state. More preferably, a substantially purified molecule is the predominant species present in a preparation. A substantially purified molecule may be greater than 60% free, preferably 75% free, more preferably 90% free, and most preferably 95% free from the other molecules (exclusive of solvent) present in the natural mixture. The term “isolated” is also used herein in reference to polynucleotide molecules that are separated from nucleic acids which normally flank the polynucleotide in nature. Thus, polynucleotides fused to regulatory or coding sequences with which they are not normally associated, for example as the result of recombinant techniques, are considered isolated herein. Such molecules are considered isolated even when present, for example in the chromosome of a host cell, or in a nucleic acid solution. The terms “isolated” and “purified” as used herein are not intended to encompass molecules present in their native state.

[0023] As used herein a “transgenic” organism is one whose genome has been altered by the incorporation of foreign genetic material or additional copies of native genetic material, e.g. by transformation or recombination.

[0024] It is understood that the molecules of the invention may be labeled with reagents that facilitate detection of the molecule. As used herein, a label can be any reagent that facilitates detection, including fluorescent labels, chemical labels, or modified bases, including nucleotides with radioactive elements, e.g. ³²P, ³³P, ³⁵S or ¹²⁵I such as ³²P deoxycytidine-5′-triphosphate (³²PdCTP).

[0025] Polynucleotides of the present invention are capable of specifically hybridizing to other polynucleotides under certain circumstances. As used herein, two polynucleotides are said to be capable of specifically hybridizing to one another if the two molecules are capable of forming an anti-parallel, double-stranded nucleic acid structure. A nucleic acid molecule is said to be the “complement” of another nucleic acid molecule if the molecules exhibit complete complementarity. As used herein, molecules are said to exhibit “complete complete complementarity” when every nucleotide in each of the molecules is complementary to the corresponding nucleotide of the other. Two molecules are said to be “minimally complementary” if they can hybridize to one another with sufficient stability to permit them to remain annealed to one another under at least conventional “low-stringency” conditions. Similarly, the molecules are said to be “complementary” if they can hybridize to one another with sufficient stability to permit them to remain annealed to one another under conventional “high-stringency” conditions. Conventional stringency conditions are known to those skilled in the art and can be found, for example in Molecular Cloning. A Laboratory Manual, 3^{rd} edition Volumes 1, 2, and 3. J. F. Sambrook, D. W. Russell, and N. Irwin, Cold Spring Harbor laboratory Press, 2000.

[0026] Departures from complete complementarity are therefore permissible, as long as such departures do not completely preclude the capacity of the molecules to form a double-stranded structure. Thus, in order for a nucleic acid molecule to serve as a primer or probe it need only be sufficiently complementary in sequence to be able to form a stable double-stranded structure under the particular solvent and salt concentrations employed. Appropriate stringency conditions which promote DNA hybridization are, for example, 6.0× sodium chloride/sodium citrate (SSC) at about 45° C., followed by a wash of 2.0×SSC at 50° C. Such conditions are known to those skilled in the art and can be found, for example in Current Protocols in Molecular Biology, John Wiley & Sons, N.Y. (1989). Salt concentration and temperature in the wash step can be adjusted to alter hybridization stringency. For example, conditions may vary from low stringency of about 2.0×SSC at 40° C. to moderately stringent conditions of about 2.0×SSC at 50° C. to high stringency conditions of about 0.2×SSC at 50° C.

[0027] As used herein “sequence identity” refers to the extent to which two optimally aligned polynucleotide or peptide sequences are invariant throughout a window of alignment of components, e.g. nucleotides or amino acids. An “identity fraction” for aligned segments of a test sequence and a reference sequence is the number of identical components which are shared by the two aligned sequences divided by the total number of components in the reference sequence segment, i.e. the entire reference sequence or a smaller defined part of the reference sequence. “Percent identity” is the identity fraction times 100. Comparison of sequences to determine percent identity can be accomplished by a number of well-known methods, including for example by using mathematical algorithms, such as those in the BLAST suite of sequence analysis programs.

[0028] Polynucleotides—This invention provides polynucleotides comprising regions that encode polypeptides. The encoded polypeptides may be the complete protein encoded by the gene represented by the polynucleotide, or may be fragments of the encoded protein. Preferably, polynucleotides provided herein encode polypeptides constituting a substantial portion of the complete protein, and more preferentially, constituting a sufficient portion of the complete protein to provide the relevant biological activity.

[0029] Of particular interest are polynucleotides of the present invention that encode polypeptides involved in one or more important biological functions in plants. Such polynucleotides may be expressed in transgenic plants to produce plants having improved phenotypic properties and/or improved response to stressful environmental conditions. See, for example, Table 1 for a list of improved plant properties and responses and the SEQ ID NO: 1 through SEQ ID NO: 184,663 representing the polynucleotides that may be expressed in transgenic plants to impart such improvements.

[0030] Polynucleotides of the present invention are generally used to impart such biological properties by providing for enhanced protein activity in a transgenic organism, preferably a transgenic plant, although in some cases, improved properties are obtained by providing for reduced protein activity in a transgenic plant. Reduced protein activity and enhanced protein activity are measured by reference to a wild type cell or organism and can be determined by direct or indirect measurement. Direct measurement of protein activity might include an analytical assay for the protein, per se, or enzymatic product of protein activity. Indirect assay might include measurement of a property affected by the protein. Enhanced protein activity can be achieved in a number of ways, for example by overproduction of mRNA encoding the protein or by gene shuffling. One skilled in the are will know methods to achieve overproduction of mRNA, for example by providing increased copies of the native gene or by introducing a construct having a heterologous promoter linked to the gene into a target cell or organism. Reduced protein activity can be achieved by a variety of mechanisms including antisense, mutation or knockout. Antisense RNA will reduce the level of expressed protein resulting in reduced protein activity as compared to wild type activity levels. A mutation in the gene encoding a protein may reduce the level of expressed protein and/or interfere with the function of expressed protein to cause reduced protein activity.

[0031] The polynucleotides of this invention represent cDNA sequences from Zea maize (corn). Nucleic acid sequences of the polynucleotides of the present invention are provided herein as SEQ ID NO: 1 through SEQ ID NO: 184,663.

[0032] A subset of the nucleic molecules of this invention includes fragments of the disclosed polynucleotides consisting of oligonucleotides of at least 15, preferably at least 16 or 17, more preferably at least 1 8 or 19, and even more preferably at least 20 or more, consecutive nucleotides. Such oligonucleotides are fragments of the larger molecules having a sequence selected from the group of polynucleotide sequences consisting of SEQ ID NO: 1 through SEQ ID NO: 184,663, and find use, for example as probes and primers for detection of the polynucleotides of the present invention.

[0033] Also of interest in the present invention are variants of the polynucleotides provided herein. Such variants may be naturally occurring, including homologous polynucleotides from the same or a different species, or may be non-natural variants, for example polynucleotides synthesized using chemical synthesis methods, or generated using recombinant DNA techniques. With respect to nucleotide sequences, degeneracy of the genetic code provides the possibility to substitute at least one base of the protein encoding sequence of a gene with a different base without causing the amino acid sequence of the polypeptide produced from the gene to be changed. Hence, the DNA of the present invention may also have any base sequence that has been changed from SEQ ID NO: 1 through SEQ ID NO: 184,663 by substitution in accordance with degeneracy of the genetic code. References describing codon usage include: Carels et al., J. Mol. Evol. 46: 45 (1998) and Fennoy et al., Nucl. Acids Res. 21(23): 5294 (1993).

[0034] Polynucleotides of the present invention that are variants of the polynucleotides provided herein will generally demonstrate significant identity with the polynucleotides provided herein. Of particular interest are polynucleotide homologs having at least about 60% sequence identity, at least about 70% sequence identity, at least about 80% sequence identity, at least about 85% sequence identity, and more preferably at least about 90%, 95% or even greater, such as 98% or 99% sequence identity with polynucleotide sequences described herein.

[0035] Protein and Polypetide Molecules—This invention also provides polypeptides encoded by polynucleotides of the present invention. Amino acid sequences of the polypeptides of the present invention are provided herein as SEQ ID NO: 184,664 through SEQ ID NO: 369,326.

[0036] As used herein, the term “polypeptide” means an unbranched chain of amino acid residues that are covalently linked by an amide linkage between the carboxyl group of one amino acid and the amino group of another. The term polypeptide can encompass whole proteins (i.e. a functional protein encoded by a particular gene), as well as fragments of proteins. Of particular interest are polypeptides of the present invention which represent whole proteins or a sufficient portion of the entire protein to impart the relevant biological activity of the protein. The term “protein” also includes molecules consisting of one or more polypeptide chains. Thus, a polypeptide of the present invention may also constitute an entire gene product, but only a portion of a functional oligomeric protein having multiple polypeptide chains.

[0037] Of particular interest in the present invention are polypeptides involved in one or more important biological properties in plants. Such polypeptides may be produced in transgenic plants to provide plants having improved phenotypic properties and/or improved response to stressful environmental conditions. In some cases, decreased expression of such polypeptides may be desired, such decreased expression being obtained by use of the polynucleotide sequences provided herein, for example in antisense or cosuppression methods. See, Table 1 for a list of improved plant properties and responses and SEQ ID NO: 184,664 through SEQ ID NO: 369,326 for the polypeptides whose expression may be altered in transgenic plants to impart such improvements. A summary of such improved properties and polypeptides of interest for increased or decreased expression is provided below.

[0038] Yield/Nitrogen: Yield improvement by improved nitrogen flow, sensing, uptake, storage and/or transport. Polypeptides useful for imparting such properties include those involved in aspartate and glutamate biosynthesis, polypeptides involved in aspartate and glutamate transport, polypeptides associated with the TOR (Target of Rapamycin) pathway, nitrate transporters, ammonium transporters, chlorate transporters and polypeptides involved in tetrapyrrole biosynthesis.

[0039] Yield/Carbohydrate: Yield improvement by effects on carbohydrate metabolism, for example by increased sucrose production and/or transport. Polypeptides useful for improved yield by effects on carbohydrate metabolism include polypeptides involved in sucrose or starch metabolism, carbon assimilation or carbohydrate transport, including, for example sucrose transporters or glucose/hexose transporters, enzymes involved in glycolysis/gluconeogenesis, the pentose phosphate cycle, or raffinose biosynthesis, and polypeptides involved in glucose signaling, such as SNF1 complex proteins.

[0040] Yield/Photosynthesis: Yield improvement resulting from increased photosynthesis. Polypeptides useful for increasing the rate of photosynthesis include phytochrome, photosystem I and II proteins, electron carriers, ATP synthase, NADH dehydrogenase and cytochrome oxidase.

[0041] Yield/Phosphorus: Yield improvement resulting from increased phosphorus uptake, transport or utilization. Polypeptides useful for improving yield in this manner include phosphatases and phosphate transporters.

[0042] Yield/Stress tolerance: Yield improvement resulting from improved plant growth and development by helping plants to tolerate stressful growth conditions. Polypeptides useful for improved stress tolerance under a variety of stress conditions include polypeptides involved in gene regulation, such as serine/threonine-protein kinases, MAP kinases, MAP kinase kinases, and MAP kinase kinase kinases; polypeptides that act as receptors for signal transduction and regulation, such as receptor protein kinases; intracellular signaling proteins, such as protein phosphatases, GTP binding proteins, and phospholipid signaling proteins; polypeptides involved in arginine biosynthesis; polypeptides involved in ATP metabolism, including for example ATPase, adenylate transporters, and polypeptides involved in ATP synthesis and transport; polypeptides involved in glycine betaine, jasmonic acid, flavonoid or steroid biosynthesis; and hemoglobin. Enhanced or reduced activity of such polypeptides in tralisgenic plants will provide changes in the ability of a plant to respond to a variety of environmental stresses, such as chemical stress, drought stress and pest stress.

[0043] Cold tolerance: Polypeptides of interest for improving plant tolerance to cold or freezing temperatures include polypeptides involved in biosynthesis of trehalose or raffinose, polypeptides encoded by cold induced genes, fatty acyl desaturases and other polypeptides involved in glycerolipid or membrane lipid biosynthesis, which find use in modification of membrane fatty acid composition, alternative oxidase, calcium-dependent protein kinases, LEA proteins and uncoupling protein.

[0044] Heat tolerance: Polypeptides of interest for improving plant tolerance to heat include polypeptides involved in biosynthesis of trehalose, polypeptides involved in glycerolipid biosynthesis or membrane lipid metabolism (for altering membrane fatty acid composition), heat shock proteins and mitochondrial NDK.

[0045] Osmotic tolerance: Polypeptides of interest for improving plant tolerance to extreme osmotic conditions include polypeptides involved in proline biosynthesis.

[0046] Drought tolerance: Polypeptides of interest for improving plant tolerance to drought conditions include aquaporins, polypeptides involved in biosynthesis of trehalose or wax, LEA proteins and invertase.

[0047] Pathogen or pest tolerance: Polypeptides of interest for improving plant tolerance to effects of plant pests or pathogens include proteases, polypeptides involved in anthocyanin biosynthesis, polypeptides involved in cell wall metabolism, including cellulases, glucosidases, pectin methylesterase, pectinase, polygalacturonase, chitinase, chitosanase, and cellulose synthase, and polypeptides involved in biosynthesis of terpenoids or indole for production of bioactive metabolites to provide defense against herbivorous insects.

[0048] Cell cycle modification: Polypeptides encoding cell cycle enzymes and regulators of the cell cycle pathway are useful for manipulating growth rate in plants to provide early vigor and accelerated maturation leading to improved yield. Improvements in quality traits, such as seed oil content, may also be obtained by expression of cell cycle enzymes and cell cycle regulators. Polypeptides of interest for modification of cell cycle pathway include cyclins and EIF5alpha pathway proteins, polypeptides involved in polyamine metabolism, polypeptides which act as regulators of the cell cycle pathway, including cyclin-dependent kinases (CDKs), CDK-activating kinases, CDK-inhibitors, Rb and Rb-binding proteins, and transcription factors that activate genes involved in cell proliferation and division, such as the E2F family of transcription factors, proteins involved in degradation of cyclins, such as cullins, and plant homologs of tumor suppressor polypeptides.

[0049] Seed protein yield/content: Polypeptides useful for providing increased seed protein quantity and/or quality include polypeptides involved in the metabolism of amino acids in plants, particularly polypeptides involved in biosynthesis of methionine/cysteine and lysine, amino acid transporters, amino acid efflux carriers, seed storage proteins, proteases, and polypeptides involved in phytic acid metabolism.

[0050] Seed oil yield/content: Polypcptides useful for providing increased seed oil quantity and/or quality include polypeptides involved in fatty acid and glycerolipid biosynthesis, beta-oxidation enzymes, enzymes involved in biosynthesis of nutritional compounds, such as carotenoids and tocopherols, and polypeptides that increase embryo size or number or thickness of aleurone.

[0051] Disease response in plants: Polypeptides useful for imparting improved disease responses to plants include polypeptides encoded by cercosporin induced genes, antifungal proteins and proteins encoded by R-genes or SAR genes. Expression of such polypeptides in transgenic plants will provide an increase in disease resistance ability of plants.

[0052] Galactomannanan biosynthesis: Polypeptides involved in production of galactomannans are of interest for providing plants having increased and/or modified reserve polysaccharides for use in food, pharmaceutical, cosmetic, paper and paint industries.

[0053] Flavonoid/isoflavonoid metabolism in plants: Polypeptides of interest for modification of flavonoid/isoflavonoid metabolism in plants include cinnamate-4-hydroxylase, chalcone synthase and flavonol synthase. Enhanced or reduced activity of such polypeptides in transgenic plants will provide changes in the quantity and/or speed of flavonoid metabolism in plants and may improve disease resistance by enhancing synthesis of protective secondary metabolites or improving signaling pathways governing disease resistance.

[0054] Plant growth regulators: Polypeptides involved in production of substances that regulate the growth of various plant tissues are of interest in the present invention and may be used to provide transgenic plants having altered morphologies and improved plant growth and development profiles leading to improvements in yield and stress response. Of particular interest are polypeptides involved in the biosynthesis of plant growth hormones, such as gibberellins, cytokinins, auxins, ethylene and abscisic acid, and other proteins involved in the activity and/or transport of such polypeptides, including for example, cytokinin oxidase, cytokinin/purine permeases, F-box proteins, G-proteins and phytosulfokines.

[0055] Herbicide tolerance: Polypeptides of interest for producing plants having tolerance to plant herbicides include polypeptides involved in the shikimate pathway, which are of interest for providing glyphosate tolerant plants. Such polypeptides include polypeptides involved in biosynthesis of chorismate, phenylalanine, tyrosine and tryptophan.

[0056] Transcription factors in plants: Transcription factors play a key role in plant growth and development by controlling the expression of one or more genes in temporal, spatial and physiological specific patterns. Enhanced or reduced activity of such polypeptides in transgenic plants will provide significant changes in gene transcription patterns and provide a variety of beneficial effects in plant growth, development and response to environmental conditions. Transcription factors of interest include, but are not limited to myb transcription factors, including helix-turn-helix proteins, homeodomain transcription factors, leucine zipper transcription factors, MADS transcription factors, transcription factors having AP2 domains, zinc finger transcription factors, CCAAT binding transcription factors, ethylene responsive transcription factors, transcription initiation factors and UV damaged DNA binding proteins.

[0057] Homologous recombination: Increasing the rate of homologous recombination in plants is useful for accelerating the introgression of transgenes into breeding varieties by backerossing, and to enhance the conventional breeding process by allowing rare recombinants between closely linked genes in phase repulsion to be identified more easily. Polypeptides useful for expression in plants to provide increased homologous recombination include polypeptides involved in mitosis and/or meiosis, including for example, resolvases and polypeptide members of the RAD52 epistasis group.

[0058] Lignin biosynthesis: Polypeptides involved in lignin biosynthesis are of interest for increasing plants' resistance to lodging and for increasing the usefulness of plant materials as biofuels.

[0059] The function of polypeptides of the present invention is determined by comparison of the amino acid sequence of the novel polypeptides to amino acid sequences of known polypeptides. A variety of homology based search algorithms are available to compare a query sequence to a protein database, including for example, BLAST, FASTA, and Smith-Waterman. In the present application, BLASTX and BLASTP algorithms are used to provide protein function information. A number of values are examined in order to assess the confidence of the function assignment. Useful measurements include “E-value” (also shown as “hit_p”), “percent identity”, “percent query coverage”, and “percent hit coverage”.

[0060] In BLAST, E-value, or expectation value, represents the number of different alignments with scores equivalent to or better than the raw alignment score, S, that are expected to occur in a database search by chance. The lower the E value, the more significant the match. Because database size is an element in E-value calculations, E-values obtained by BLASTing against public databases, such as GenBank, have generally increased over time for any given query/entry match. In setting criteria for confidence of polypeptide function prediction, a “high” BLAST match is considered herein as having an E-value for the top BLAST hit provided ill Table 1 of less than 1E-30; a medium BLASTX E-value is 1E-30 to 1E-8; and a low BLASTX E-value is greater than 1E-8. The top BLASTX hit and corresponding E values are provided in columns six and seven of table 1.

[0061] Percent identity refers to the percentage of identically matched amino acid residues that exist along the length of that portion of the sequences which is aligned by the BLAST algorithm. In setting criteria for confidence of polypeptide function prediction, a “high” BLAST match is considered herein as having percent identity for the top BLAST hit provided in Table 1 of at least 70%; a medium percent identity value is 35% to 70%; and a low percent identity is less than 35%.

[0062] Of particular interest in protein function assignment in the present invention is the use of combinations of E-values, percent identity, query coverage and hit coverage. Query coverage refers to the percent of the query sequence that is represented in the BLAST alignment. Hit coverage refers to the percent of the database entry that is represented in the BLAST alignment. In the present invention, function of a query polypeptide is inferred from function of a protein homolog where either (1) hit_p<1e-30 or % identity>35% AND query_coverage>50% AND hit_coverage>50%, or (2) hit_p<1e-8 AND query_coverage>70% AND hit_coverage>70%.

[0063] A further aspect of the invention comprises functional homologs which differ in one or more amino acids from those of a polypeptide provided herein as the result of one or more conservative amino acid substitutions. It is well known in the art that one or more amino acids in a native sequence can be substituted with at least one other amino acid, the charge and polarity of which are similar to that of the native amino acid, resulting in a silent change. For instance, valine is a conservative substitute for alanine and threonine is a conservative substitute for serine. Conservative substitutions for an amino acid within the native polypeptide sequence can be selected from other members of the class to which the naturally occurring amino acid belongs. Amino acids can be divided into the following four groups: (1) acidic amino acids, (2) basic amino acids, (3) neutral polar amino acids, and (4) neutral nonpolar amino acids. Representative amino acids within these various groups include, but are not limited to: (1) acidic (negatively charged) amino acids such as aspartic acid and glutamic acid; (2) basic positively charged) amino acids such as arginine, histidine, and lysine; (3) neutral polar amino acids such as glycine, serine, threonine, cysteine, tyrosine, asparagine, and glutamine; and (4) neutral nonpolar (hydrophobic) amino acids such as alanine, leucine, isoleucine, valine, proline, phenylalanine, tryptophan, and methionine. Conserved substitutes for an amino acid within a native amino acid sequence can be selected from other members of the group to which the naturally occurring amino acid belongs. For example, a group of amino acids having aliphatic side chains is glycine, alanine, valine, leucine, and isoleucine; a group of amino acids having aliphatic-hydroxyl side chains is serine and threonine; a group of amino acids having amide-containing side chains is asparagine and gultamine; a group of amino acids having aromatic side chains is phenylalanine, tyrosine, and tryptophan; a group of amino acids having basic side chains is lysine, arginine, and histidine; and a group of amino acids having sulfur-containing side chains is cysteine and methionine. Naturally conservative amino acids substitution groups are: valine-leucine, valine-isoleucine, phenylalanine-tyrosine, lysine-arginine, alanine-valine, aspartic acid-glutamic acid, and asparagine-glutamine. A further aspect of the invention comprises polypeptides which differ in one or more amino acids from those of a soy protein sequence as the result of deletion or insertion of one or more amino acids in a native sequence.

[0064] Also of interest in the present invention are functional homologs of the polypeptides provided herein which have the same function as a polypeptide provided herein, but with increased or decreased activity or altered specificity. Such variations in protein activity may exist naturally in polypeptides encoded by related genes, for example in a related polypeptide encodes by a different allele or in a different species, or can be achieved by mutagenesis. Naturally occurring variant polypeptides may be obtained by well known nucleic acid or protein screening methods using DNA or antibody probes, for example by screening libraries for genes encoding related polypeptides, or in the case of expression libraries, by screening directly for variant polypeptides. Screening methods for obtaining a modified protein or enzymatic activity of interest by mutagenesis are disclosed in U.S. Pat. No. 5,939,250. An alternative approach to the generation of variants uses random recombination techniques such as “DNA shuffling” as disclosed in U.S. Pat. Nos. 5,605,793; 5,811,238; 5,830,721 and 5,837,458; and International Applications WO 98/31837 and WO 99/65927, all of which are incorporated herein by reference. An alternative method of molecular evolution involves a staggered extension process (StEP) for in vitro mutagenesis and recombination of nucleic acid molecule sequences, as disclosed in U.S. Pat. 5,965,408 and International Application WO 98/42832, both of which are incorporated herein by reference.

[0065] Polypeptides of the present invention that are variants of the polypeptides provided herein will generally demonstrate significant identity with the polypeptides provided herein. Of particular interest are polypeptides having at least about 35% sequence identity, at least about 50% sequence identity, at least about 60% sequence identity, at least about 70% sequence identity, at least about 80% sequence identity, and more preferably at least about 85%, 90%, 95% or even greater, sequence identity with polypeptide sequences described herein. Of particular interest in the present invention are polypeptides having amino acid sequences provided herein (reference polypeptides) and functional homologs of such reference polypeptides, wherein such functional homologs comprises at least 50 consecutive amino acids having at least 90% identity to a 50 amino acid polypeptide fragment of said reference polypeptide.

[0066] Recombinant DNA Constructs—The present invention also encompasses the use of polynucleotides of the present invention in recombinant constructs, i.e. constructs comprising polynucleotides that are constructed or modified outside of cells and that join nucleic acids that are not found joined in nature. Using methods known to those of ordinary skill in the art, polypeptide encoding sequences of this invention can be inserted into recombinant DNA constructs that can be introduced into a host cell of choice for expression of the encoded protein, or to provide for reduction of expression of the encoded protein, for example by antisense or cosuppression methods. Potential host cells include both prokaryotic and eukaryotic cells. Of particular interest in the present invention is the use of the polynucleotides of the present invention for preparation of constructs for use in plant transformation.

[0067] In plant transformation, exogenous genetic material is transferred into a plant cell. By “exogenous” it is meant that a nucleic acid molecule, for example a recombinant DNA construct comprising a polynueleotide of the present invention, is produced outside the organism, e.g. plant, into which it is introduced. An exogenous nucleic acid molecule can have a naturally occurring or non-naturally occurring nucleotide sequence. One skilled in the art recognizes that an exogenous nucleic acid molecule can be derived from the same species into which it is introduced or from a different species. Such exogenous genetic material may be transferred into either monocot or dicot plants including, but not limited to, soy, cotton, canola, maize, teosinte, wheat, rice and Arabidopsis plants. Transformed plant cells comprising such exogenous genetic material may be regenerated to produce whole transformed plants.

[0068] Exogenous genetic material may be transferred into a plant cell by the use of a DNA vector or construct designed for such a purpose. A construct can comprise a number of sequence elements, including promoters, encoding regions, and selectable markers. Vectors are available which have been designed to replicate in both E. coli and A. lumefaciens and have all of the features required for transferring large inserts of DNA into plant chromosomes. Design of such vectors is generally within the skill of the art.

[0069] A construct will generally include a plant promoter to direct transcription of the protein-encoding region or the antisense sequence of choice. Numerous promoters, which are active in plant cells, have been described in the literature. These include the nopaline synthase (NOS) promoter and octopine synthase (OCS) promoters carried on tumor-inducing plasmids of Agrobacterium tumefaciens or caulimovirus promoters such as the Cauliflower Mosaic Virus (CaMV) 19S or 35S promoter (U.S. Pat. No. 5,352,605), and the Figwort Mosaic Virus (FMV) 35S-promoter (U.S. Pat. No. 5,378,619). These promoters and numerous others have been used to create recombinant vectors for expression in plants. Any promoter known or found to cause transcription of DNA in plant cells can be used in the present invention. Other useful promoters are described, for example, in U.S. Pat. No. 5,378,619; 5,391,725; 5,428,147; 5,447,858; 5,608,44; 5,614,399; 5,633,441; and 5,633,435, all of which are incorporated herein by reference.

[0070] In addition, promoter enhancers, such as the CaMV 35S enhancer or a tissue specific enhancer, may be used to enhance gene transcription levels. Enhancers often are found 5′ to the start of transcription in a promoter that functions in eukaryotic cells, but can often be inserted in the forward or reverse orientation 5′ or 3′ to the coding sequence. In some instances, these 5′ enhancing elements are introns. Deemed to be particularly useful as enhancers are the 5′ introns of the rice actin 1 and rice actin 2 genes. Examples of other enhancers which could be used in accordance with the invention include elements from octopine synthase genes, the maize alcohol dehydrogenase gene intron 1, elements from the maize shrunken 1 gene, the sucrose synthase intron, the TMV omega element, and promoters from non-plant eukaryotes.

[0071] DNA constructs can also contain one or more 5′ non-translated leader sequences which serve to enhance polypeptide production from the resulting mRNA transcripts. Such sequences may be derived from the promoter selected to express the gene or can be specifically modified to increase translation of the mRNA. Such regions may also be obtained from viral RNAs, from suitable eukaryotic genes, or from a synthetic gene sequence. For a review of optimizing expression of transgenes, see Koziel et al. (1996) Plant Mol. Biol. 32:393-405).

[0072] Constructs and vectors may also include, with the coding region of interest, a nucleic acid sequence that acts, in whole or in part, to terminate transcription of that region. One type of 3′ untranslated sequence which may be used is a 3′ UTR from the nopaline synthase gene (nos 3′) of Agrobacterium lumefaciens. Other 3′ termination regions of interest include those from a gene encoding the small subunit of a ribulose-1,5-bisphosphate carboxylase-oxygenase (rbcS), and more specifically, from a rice rbcS gene (U.S. Pat. No. 6426446), the 3′ UTR for the T7 transcript of Agrobacterium lumefaciens, the 3′ end of the protease inhibitor 1 or 11 genes from potato or tomato, and the 3′ region isolated from Cauliflower Mosaic Virus. Alternatively, one also could use a gamma coixin, oleosin 3 or other 3′ UTRs from the genus Coix (PCT Publication WO 99/58659).

[0073] Constructs and vectors may also include a selectable marker. Selectable markers may be used to select for plants or plant cells that contain the exogenous genetic material. Useful selectable marker genes include those conferring resistance to antibiotics such as kanamycin (nptII), hygromycin B (aph IV) and gentamycin (aac3 and aacC4) or resistance to herbicides such as glufosinate (bar or pat) and glyphosate (EPSPS). Examples of such selectable markers are illustrated in U.S. Pat. Nos. 5,550,318; 5,633,435; 5,780,708 and 6,118,047, all of which are incorporated herein by reference.

[0074] Constructs and vectors may also include a screenable marker. Screenable markers may be used to monitor transformation. Exemplary screenable markers include genes expressing a colored or fluorescent protein such as a luciferase or green fluorescent protein (GFP), a β-glucuronidase or uidA gene (GUS) which encodes an enzyme for which various chromogenic substrates are known or an R-locus gene, which encodes a product that regulates the production of anthocyanin pigments (red color) in plant tissues. Other possible selectable and/or screenable marker genes will be apparent to those of skill in the art.

[0075] Constructs and vectors may also include a transit peptide for targeting of a gene target to a plant organelle, particularly to a chloroplast, leucoplast or other plastid organelle (U.S. Pat. No. 5,188,642).

[0076] For use in Agrobacterium mediated transformation methods, constructs of the present invention will also include T-DNA border regions flanking the DNA to be inserted into the plant genome to provide for transfer of the DNA into the plant host chromosome as discussed in more detail below. An exemplary plasmid that finds use in such transformation methods is pMON18365, a T-DNA vector that can be used to clone exogenous genes and transfer them into plants using Agrobacterium-mediated transformation. See U.S. patent application Ser. No. 20030024014, herein incorporated by reference. This vector contains the left border and right border sequences necessary for Agrobacteriumtransformation. The plasmid also has origins of replication for maintaining the plasmid in both E. coli and Agrobacterium tumefaciens strains.

[0077] A candidate gene is prepared for insertion into the T-DNA vector, for example using well-known gene cloning techniques such as PCR. Restriction sites may be introduced onto each end of the gene to facilitate cloning. For example, candidate genes may be amplified by PCR techniques using a set of primers. Both the amplified DNA and the cloning vector are cut with the same restriction enzymes, for example, NotI and PstI. The resulting fragments are gel-purified, ligated together, and transformed into E. coli. Plasmid DNA containing the vector with inserted gene may be isolated from E. coli cells selected for spectinomycin resistance, and the presence of the desired insert verified by digestion with the appropriate restriction enzymes. Undigested plasmid may then be transformed into Agrobacterium lumefaciens using techniques well known to those in the art, and transformed Agrobacteriumcells containing the vector of interest selected based on spectinomycin resistance. These and other similar constructs useful for plant transformation may be readily prepared by one skilled in the art.

[0078] Transformation Methods and Transgenic Plants—Methods and compositions for transforming bacteria and other microorganisms are known in the art. See for example Molecular Cloning: A laboratory Manual, 3^{rd} edition Volumes 1, 2, and 3. J. F. Sambrook, D. W. Russell, and N. Irwin, Cold Spring Harbor Laboratory Press, 2000.

[0079] Technology for introduction of DNA into cells is well known to those of skill in the art. Methods and materials for transforming plants by introducing a transgenic DNA construct into a plant genome in the practice of this invention can include any of the well-known and demonstrated methods including electroporation as illustrated in U.S. Pat. No. 5,384,253, microprojectile bombardment as illustrated in U.S. Pat. Nos. 5,015,580; 5,550,318; 5,538,880; 6,160,208; 6,399,861 and 6,403,865, Agrobacterium-mediated transformation as illustrated in U.S. Pat. Nos. 5,635,055; 5,824,877; 5,591,616; 5,981,840 and 6,384,301, and protoplast transformation as illustrated in U.S. Pat. Nos. 5,508,184, all of which are incorporated herein by reference.

[0080] Any of the polynucleotides of the present invention may be introduced into a plant cell in a permanent or transient manner in combination with other genetic elements such as vectors, promoters enhancers etc. Further any of the polynucleotides of the present invention may be introduced into a plant cell in a manner that allows for production of the polypeptide or fragment thereof encoded by the polynucleotide in the plant cell, or in a manner that provides for decreased expression of an endogenous gene and concomitant decreased production of protein.

[0081] It is also to be understood that two different transgenic plants can also be mated to produce offspring that contain two independently segregating added, exogenous genes. Selfing of appropriate progeny can produce plants that are homozygous for both added, exogenous genes that encode a polypeptide of interest. Back-crossing to a parental plant and out-crossing with a non-transgenic plant are also contemplated, as is vegetative propagation.

[0082] Expression of the polynucleotides of the present invention and the concomitant production of polypeptides encoded by the polynucleotides is of interest for production of transgenic plants having improved properties, particularly, improved properties which result in crop plant yield improvement. Expression of polypeptides of the present invention in plant cells may be evaluated by specifically identifying the protein products of the introduced genes or evaluating the phenotypic changes brought about by their expression. It is noted that when the polypeptide being produced in a transgenic plant is native to the target plant species, quantitative analyses comparing the transformed plant to wild type plants may be required to demonstrate increased expression of the polypeptide of this invention.

[0083] Assays for the production and identification of specific proteins make use of various physical-chemical, structural, functional, or other properties of the proteins. Unique physical-chemical or structural properties allow the proteins to be separated and identified by electrophoretic procedures, such as native or denaturing gel electrophoresis or isoelectric focusing, or by chromatographic techniques such as ion exchange or gel exclusion chromatography. The unique structures of individual proteins offer opportunities for use of specific antibodies to detect their presence in formats such as an ELISA assay. Combinations of approaches may be employed with even greater specificity such as western blotting in which antibodies are used to locate individual gene products that have been separated by electrophoretic techniques. Additional techniques may be employed to absolutely confirm the identity of the product of interest such as evaluation by amino acid sequencing following purification. Although these are among the most commonly employed, other procedures may be additionally used.

[0084] Assay procedures may also be used to identify the expression of proteins by their functionality, particularly where the expressed protein is an enzyme capable of catalyzing chemical reactions involving specific substrates and products. These reactions may be measured, for example in plant extracts, by providing and quantifying the loss of substrates or the generation of products of the reactions by physical and/or chemical procedures.

[0085] In many cases, the expression of a gene product is determined by evaluating the phenotypic results of its expression. Such evaluations may be simply as visual observations, or may involve assays. Such assays may take many forms including but not limited to analyzing changes in the chemical composition, morphology, or physiological properties of the plant. Chemical composition may be altered by expression of genes encoding enzymes or storage proteins which change amino acid composition and may be detected by amino acid analysis, or by enzymes which change starch quantity which may be analyzed by near infrared reflectance spectrometry. Morphological changes may include greater stature or thicker stalks.

[0086] Plants with decreased expression of a gene of interest can also be achieved through the use of polynucleotides of the present invention, for example by expression of antisense nucleic acids, or by identification of plants transformed with sense expression constructs that exhibit cosuppression effects.

[0087] Antisense approaches are a way of preventing or reducing gene function by targeting the genetic material as disclosed in U.S. Pat. Nos. 4,801,540; 5,107,065; 5,759,829; 5,910,444; 6,184,439; and 6,198,026, all of which are incorporated herein by reference. The objective of the antisense approach is to use a sequence complementary to the target gene to block its expression and create a mutant cell line or organism in which the level of a single chosen protein is selectively reduced or abolished. Antisense techniques have several advantages over other ‘reverse genetic’ approaches. The site of inactivation and its developmental effect can be manipulated by the choice of promoter for antisense genes or by the timing of external application or microinjection. Antisense can manipulate its specificity by selecting either unique regions of the target gene or regions where it shares homology to other related genes.

[0088] The principle of regulation by antisense RNA is that RNA that is complementary to the target mRNA is introduced into cells, resulting in specific RNA:RNA duplexes being foried by base pairing between the antisense substrate and the target. Under one embodiment, the process involves the introduction and expression of an antisense gene sequence. Such a sequence is one in which part or all of the normal gene sequences are placed under a promoter in inverted orientation so that the ‘wrong’ or complementary strand is transcribed into a noncoding antisense RNA that hybridizes with the target mRNA and interferes with its expression. An antisense vector is constructed by standard procedures and introduced into cells by transformation, transfection, electroporation, microinjection, infection, etc. The type of transformation and choice of vector will determine whether expression is transient or stable. The promoter used for the antisense gene may influence the level, timing, tissue, specificity, or inducibility of the antisense inhibition.

[0089] As used herein “gene suppression” means any of the well-known methods for suppressing expression of protein from a gene including sense suppression, anti-sense suppression and RNAi suppression. In suppressing genes to provide plants with a desirable phenotype, anti-sense and RNAi gene suppression methods are preferred. More particularly, for a description of anti-sense regulation of gene expression in plant cells see U.S. Pat. No. 5,107,065 and for a description of RNAi gene suppression in plants by transcription of a dsRNA see U.S. Pat. No. 6,506,559, U.S. Patent Application Publication No. 2002/0168707 A1, and U.S. patent applications Ser. No. 09/423,143 (see WO 98/53083), Ser. No. 09/127,735 (see WO 99/53050) and Ser. No. 09/084,942 (see WO 99/61631), all of which are incorporated herein by reference. Suppression of an gene by RNAi can be achieved using a recombinant DNA construct having a promoter operably linked to a DNA element comprising a sense and anti-sense element of a segment of genomic DNA of the gene, e.g., a segment of at least about 23 nucleotides, more preferably about 50 to 200 nucleotides where the sense and anti-sense DNA components can be directly linked or joined by an intron or artificial DNA segment that can form a loop when the transcribed RNA hybridizes to form a hairpin structure. For example, genomic DNA from a polymorphic locus of SEQ ID NO: 1 through SEQ ID NO: 184,663 can be used in a recombinant construct for suppression of a cognate gene by RNAi suppression.

[0090] Insertion mutations created by transposable elements may also prevent gene function. For example, in many dicot plants, transformation with the T-DNA of Agrobacterium may be readily achieved and large numbers of transform ants can be rapidly obtained. Also, some species have lines with active transposable elements that can efficiently be used for the generation of large numbers of insertion mutations, while some other species lack such options. Mutant plants produced by Agrobacteriumor transposon mutagenesis and having altered expression of a polypeptide of interest can be identified using the polynucleotides of the present invention. For example, a large population of mutated plants may be screened with polynucleotides encoding the polypeptide of interest to detect mutated plants having an insertion in the gene encoding the polypeptide of interest.

[0091] Polynucleotides of the present invention may be used in site-directed mutagenesis. Site-directed mutagenesis may be utilized to modify nucleic acid sequences, particularly as it is a technique that allows one or more of the amino acids encoded by a nucleic acid molecule to be altered (e.g., a threonine to be replaced by a methionine). Three basic methods for site-directed mutagenesis are often employed. These are cassette mutagenesis, primer extension, and methods based upon PCR.

[0092] In addition to the above discussed procedures, practitioners are familiar with the standard resource materials which describe specific conditions and procedures for the construction, manipulation and isolation of macromolecules (e.g., DNA molecules, plasmids, etc.), generation of recombinant organisms and the screening and isolating of clones.

[0093] Arrays—The polynucleotide or polypeptide molecules of this invention may also be used to prepare arrays of target molecules arranged on a surface of a substrate. The target molecules are preferably known molecules, e.g. polynucleotides (including oligonucleotides) or polypeptides, which are capable of binding to specific probes, such as complementary nucleic acids or specific antibodies. The target molecules are preferably immobilized, e.g. by covalent or non-covalent bonding, to the surface in small amounts of substantially purified and isolated molecules in a grid pattern. By immobilized is meant that the target molecules maintain their position relative to the solid support under hybridization and washing conditions. Target molecules are deposited in small footprint, isolated quantities of “spotted elements” of preferably single-stranded polynucleotide preferably arranged in rectangular grids in a density of about 30 to 100 or more, e.g. up to about 1000, spotted elements per square centimeter. In addition in preferred embodiments arrays comprise at least about 100 or more, e.g. at least about 1000 to 5000, distinct target polynucleotides per unit substrate. Where detection of transcription for a large number of genes is desired, the economics of arrays favors a high density design criteria provided that the target molecules are sufficiently separated so that the intensity of the indicia of a binding event associated with highly expressed probe molecules does not overwhelm and mask the indicia of neighboring binding events. For high-density microarrays each spotted element may contain up to about 10⁷ or more copies of the target molecule, e.g. single stranded cDNA, on glass substrates or nylon substrates.

[0094] Arrays of this invention can be prepared with molecules from a single species, preferably a plant species, or with molecules from other species, particularly other plant species. Arrays with target molecules from a single species can be used with probe molecules from the same species or a different species due to the ability of cross species homologous genes to hybridize. It is generally preferred for high stringency hybridization that the target and probe molecules are from the same species.

[0095] In preferred aspects of this invention the organism of interest is a plant and the target molecules are polynucleotides or oligonucleotides with nucleic acid sequences having at least 80 percent sequence identity to a corresponding sequence of the same length in a polynucleotide having a sequence selected from the group consisting of SEQ ID NO: 1 through SEQ ID NO: 184,663 or complements thereof. In other preferred aspects of the invention at least 10% of the target molecules on an array have at least 15, more preferably at least 20, consecutive nucleotides of sequence having at least 80%, more preferably up to 100%, identity with a corresponding sequence of the same length in a polynucleotide having a sequence selected from the group consisting of SEQ IT) NO: 1 through SEQ ID NO: 184,663 or complements or fragments thereof.

[0096] Such arrays are useful in a variety of applications, including gene discovery, genomic research, molecular breeding and bioactive compound screening. One important use of arrays is in the analysis of differential gene transcription, e.g. transcription profiling where the production of mRNA in different cells, normally a cell of interest and a control, is compared and discrepancies in gene expression are identified. In such assays, the presence of discrepancies indicates a difference in gene expression levels in the cells being compared. Such information is useful for the identification of the types of genes expressed in a particular cell or tissue type in a known environment. Such applications generally involve the following steps: (a) preparation of probe, e.g. attaching a label to a plurality of expressed molecules; (b) contact of probe with the array wider conditions sufficient for probe to bind with corresponding target, e.g. by hybridization or specific binding; (c) removal of unbound probe from the array; and (d) detection of bound probe.

[0097] A probe may be prepared with RNA extracted from a given cell line or tissue. The probe may be produced by reverse transcription of mRNA or total RNA and labeled with radioactive or fluorescent labeling. A probe is typically a mixture containing many different sequences in various amounts, corresponding to the numbers of copies of the original mRNA species extracted from the sample.

[0098] The initial RNA sample for probe preparation will typically be derived from a physiological source. The physiological source may be selected from a variety of organisms, with physiological sources of interest including single celled organisms such as yeast and multicellular organisms, including plants and animals, particularly plants, where the physiological sources from multicellular organisms may be derived from particular organs or tissues of the multicellular organism, or from isolated cells derived from an organ, or tissue of the organism. The physiological sources may also be multicellular organisms at different developmental stages (e.g., 10-day-old seedlings), or organisms grown under different environmental conditions (e.g., drought-stressed plants) or treated with chemicals.

[0099] In preparing the RNA probe, the physiological source may be subjected to a number of different processing steps, where such processing steps might include tissue homogenation, cell isolation and cytoplasmic extraction, nucleic acid extraction and the like, where such processing steps are known to the those of skill in the art. Methods of isolating RNA from cells, tissues, organs or whole organisms are known to those of skill in the art.

[0100] Computer Based Systems and Methods—The sequence of the molecules of this invention can be provided in a variety of media to facilitate use thereof. Such media can also provide a subset thereof in a form that allows a skilled artisan to examine the sequences. In a preferred embodiment, 20, preferably 50, more preferably 100, even more preferably 200 or more of the polynucleotide and/or the polypeptide sequences of the present invention can be recorded on computer readable media. As used herein, “computer readable media” refers to any medium that can be read and accessed directly by a computer. Such media include, but are not limited to: magnetic storage media, such as floppy discs, hard disc, storage medium, and magnetic tape: optical storage media such as CD-ROM; electrical storage media such as RAM and ROM; and hybrids of these categories such as magnetic/optical storage media. A skilled artisan can readily appreciate how any of the presently known computer readable media can be used to create a manufacture comprising a computer readable medium having recorded thereon a nucleotide sequence of the present invention.

[0101] As used herein, “recorded” refers to a process for storing information on computer readable media. A skilled artisan can readily adopt any of the presently known methods for recording information on computer readable media to generate media comprising the nucleotide sequence information of the present invention. A variety of data storage structures are available to a skilled artisan for creating a computer readable medium having recorded thereon a nucleotide sequence of the present invention. The choice of the data storage structure will generally be based on the means chosen to access the stored information. In addition, a variety of data processor programs and formats can be used to store the nucleotide sequence information of the present invention on computer readable media. The sequence information can be represented in a word processing text file, formatted in commercially-available software such as WordPerfect and Microsoft Word, or represented in the form of an ASCII file, stored in a database application, such as DB2, Sybase, Oracle, or the like. A skilled artisan can readily adapt any number of data processor structuring formats (e.g., text file or database) in order to obtain a computer readable medium having recorded thereon the nucleotide sequence information of the present invention.

[0102] By providing one or more of polynucleotide or polypeptide sequences of the present invention in a computer readable medium, a skilled artisan can routinely access the sequence information for a variety of purposes. The examples which follow demonstrate how software which implements the BLAST and BLAZE search algorithms on a Sybase system can be used to identify open reading frames (ORFs) within the genome that contain homology to ORFs or polypeptides from other organisms. Such ORFs are polypeptide encoding fragments within the sequences of the present invention and are useful in producing commercially important polypeptides such as enzymes used in amino acid biosynthesis, metabolism, transcription, translation, RNA processing, nucleic acid and a protein degradation, protein modification, and DNA replication, restriction, modification, recombination, and repair.

[0103] The present invention further provides systems, particularly computer-based systems, which contain the sequence information described herein. Such systems are designed to identify commercially important fragments of the nucleic acid molecule of the present invention. As used herein, “a computer-based system” refers to the hardware, software, and memory used to analyze the sequence information of the present invention. A skilled artisan can readily appreciate that any one of the currently available computer-based systems are suitable for use in the present invention.

[0104] As indicated above, the computer-based systems of the present invention comprise a database having stored therein a nucleotide sequence of the present invention and the necessary hardware and software for supporting and implementing a homology search. As used herein, “database” refers to memory system that can store searchable nucleotide sequence information. As used herein “query sequence” is a nucleic acid sequence, or an amino acid sequence, or a nucleic acid sequence corresponding to an amino acid sequence, or an amino acid sequence corresponding to a nucleic acid sequence, that is used to query a collection of nucleic acid or amino acid sequences. As used herein, “homology search” refers to one or more programs which are implemented on the computer-based system to compare a query sequence, i.e., gene or peptide or a conserved region (motif), with the sequence information stored within the database. Homology searches are used to identify segments and/or regions of the sequence of the present invention that match a particular query sequence. A variety of known searching algorithms are incorporated into commercially available software for conducting homology searches of databases and computer readable media comprising sequences of molecules of the present invention.

[0105] Commonly preferred sequence length of a query sequence is from about 10 to 100 or more amino acids or from about 20 to 300 or more nucleotide residues. There are a variety of motifs known in the art. Protein motifs include, but are not limited to, enzymatic active sites and signal sequences. An amino acid query is converted to all of the nucleic acid sequences that encode that amino acid sequence by a software program, such as TBLASTN, which is then used to search the database. Nucleic acid query sequences that are motifs include, but are not limited to, promoter sequences, cis elements, hairpin structures and inducible expression elements (protein binding sequences).

[0106] Thus, the present invention further provides an input device for receiving a query sequence, a memory for storing sequences (the query sequences of the present invention and sequences identified using a homology search as described above) and an output device for outputting the identified homologous sequences. A variety of structural formats for the input and output presentations can be used to input and output information in the computer-based systems of the present invention. A preferred format for an output presentation ranks fragments of the sequence of the present invention by varying degrees of homology to the query sequence. Such presentation provides a skilled artisan with a ranking of sequences that contain various amounts of the query sequence and identifies the degree of homology contained in the identified fragment.

[0107] Having now generally described the invention, the same will be more readily understood through reference to the following examples which are provided by way of illustration, and are not intended to be limiting of the present invention, unless specified.

### EXAMPLE 1

[0108] A cDNA library is generated from maize tissue. Tissue is harvested and immediately frozen in liquid nitrogen. The harvested tissue is stored at −80° C. until preparation of total RNA. The total RNA is purified using Trizol reagent from Invitrogen Corporation (Invitrogen Corporation, Carlsbad, Calif., U.S.A.), essentially as recommended by the manufacturer. Poly A+ RNA (mRNA) is purified using magnetic oligo dT beads essentially as recommended by the manufacturer (Dynabeads, Dynal Biotech, Oslow, Norway).

[0109] Construction of plant cDNA libraries is well known in the art and a number of cloning strategies exist. A number of cDNA library construction kits are commercially available. cDNA libraries are prepared using the Superscript™ Plasmid System for cDNA synthesis and Plasmid Cloning (Invitrogen Corporation, Carlsbad, Calif., U.S.A.), as described in the Superscript II cDNA library synthesis protocol. The cDNA libraries are quality controlled for a good insert:vector ratio.

[0110] The cDNA libraries are plated on LB agar containing the appropriate antibiotics for selection and incubated at 37° for a sufficient time to allow the growth of individual colonies. Single colonies are individually placed in each well of a 96-well microtiter plates containing LB liquid including the selective antibiotics. The plates are incubated overnight at approximately 37° C. with gentle shaking to promote growth of the cultures. The plasmid DNA is isolated from each clone using Qiaprep plasmid isolation kits, using the conditions recommended by the manufacturer (Qiagen Inc., Valencia, Calif. U.S.A.).

[0111] The template plasmid DNA clones are used for subsequent sequencing. Sequences of polynucleotides may be obtained by a number of sequencing techniques known in the art, including fluorescence-based sequencing methodologies. These methods have the detection, automation, and instrumentation capability necessary for the analysis of large volumes of sequence data. With these types of automated systems, fluorescent dye-labeled sequence reaction products are detected and data entered directly into the computer, producing a chromatogram that is subsequently viewed, stored, and analyzed using the corresponding software programs. These methods are known to those of skill in the art and have been described and reviewed.

### EXAMPLE 2

[0112] The open reading frame in each polynucleotide sequence is identified by a combination of predictive and homology based methods. The longest open reading frame (ORF) is determined, and the top BLAST match is identified by BLASTX against NCBI. The top BLAST hit is then compared to the predicted ORF, with the BLAST hit given precedence in the case of discrepancies.

[0113] Functions of polypeptides encoded by the polynucleotide sequences of the present invention are determined using a hierarchical classification tool, termed FunCAT, for Functional Categories Annotation Tool. Most categories collected in FunCAT are classified by function, although other criteria are used, for example, cellular localization or temporal process. The assignment of a functional category to a query sequence is based on BLASTX sequence search results, which compare two protein sequences. FunCAT assigns categories by iteratively scanning through all blast hits, starting with the most significant match, and reporting the first category assignment for each FunCAT source classification scheme. In the present invention, function of a query polypeptide is inferred from the function of a protein homolog where either (1) hit_p<1e-30 or % identity>35% AND query_coverage>50% AND hit_coverage>50%, or (2) hit_p<1e-8 AND query_coverage>70% AND hit_coverage>70%.

[0114] Functional assignments from five public classification schemes, GO_BP, GO_CC, GO_MF, KEGG, and EC, and one internal Monsanto classification scheme, POI, are provided in Table 1. The column under the heading “CAT_TYPE” indicates the source of the classification. GO_BP=Gene Ontology Consortium—biological process; GO_CC=Gene Ontology Consortium—cellular component; GO_MF=Gene Ontology Consortium—molecular function; KEGG=KEGG functional hierarchy; EC=Enzyme Classification from ENZYME data bank release 25.0; POI=Pathways of interest. The column under the heading “CAT_DESC” provides the name of the subcategory into which the query sequence was classified. The column under the heading “PRODUCT_HIT_DESC” provides a description of the BLAST hit to the query sequences that led to the specific classification. The column under the heading “HIT_E” provides the e-value for the BLAST hit. It is noted that the e-value in the HIT_E column may differ from the e-value based on the top BLAST hit provided in the E_VALUE column since these calculations were done on different days, and database size is an element in E-value calculations. E-values obtained by BLASTing against public databases, such as GenBank, will generally increase over time for any given query/entry match.

[0115] Sequences useful for producing transgenic plants having improved biological properties are identified from their FunCAT annotations and are also provided in Table 1. A biological property of particular interest is plant yield. Plant yield may be improved by alteration of a variety of plant pathways, including those involving nitrogen, carbohydrate, or phosphorus utilization and/or uptake. Plant yield may also be improved by alteration of a plant's photosynthetic capacity or by improving a plant's ability to tolerate a variety of environmental stresses, including cold, heat, drought and osmotic stresses. Other biological properties of interest that may be improved using sequences of the present invention include pathogen or pest tolerance, herbicide tolerance, disease resistance, growth rate (for example by modification of cell cycle, by expression of transcription factors, or expression of growth regulators), seed oil and/or protein yield and quality, rate and control of recombination, and lignin content.

[0116] Polynucleotide sequences are provided herein as SEQ ID NO: 1 through SEQ 11) NO: 184,663, and the translated polypeptide sequences for these polynucleotide sequences are provided as SEQ ID NO: 184,664 through SEQ ID NO: 369,326. Descriptions of each of these polynucleotide and polypeptide sequences are provided in Table 1.

[0117] Table 1 Column Descriptions

[0118] SEQ_NUM provides the SEQ ID NO for the listed polynucleotide sequences.

[0119] CONTIG_ID provides an arbitrary sequence name taken from the name of the clone from which the cDNA sequence was obtained.

[0120] PROTEIN_NUM provides the SEQ ID NO for the translated polypeptide sequence

[0121] NCBI_GI provides the GenBank ID number for the top BLAST hit for the sequence. The top BLAST hit is indicated by the National Center for Biotechnology Information GenBank Identifier number.

[0122] NCBI_GI_DESCRIPTION refers to the description of the GenBank top BLAST hit for the sequence.

[0123] E_VALUE provides the expectation value for the top BLAST match.

[0124] MATCH_LENGTH provides the length of the sequence which is aligned in the top BLAST match

[0125] TOP_HIT_PCT_IDENT refers to the percentage of identically matched nucleotides (or residues) that exist along the length of that portion of the sequences which is aligned in the top BLAST match.

[0126] CAT_TYPE indicates the classification scheme used to classify the sequence. GO_BP=Gene Ontology Consortium—biological process; GO_CC=Gene Ontology Consortium—cellular component; GO_MF=Gene Ontology Consortium—molecular function; KEGG=KEGG functional hierarchy (KFGG=Kyoto Encyclopedia of Genes and Genomes);

[0127] EC=Enzyme Classification from ENZYME data bank release 25.0; POI=Pathways of Interest.

[0128] CAT_DESC provides the classification scheme subcategory to which the query sequence was assigned.

[0129] PRODUCT_CAT_DESC provides the FunCAT annotation category to which the query sequence was assigned.

[0130] PRODUCT_CAT_DESC provides the description of the BLAST hit which resulted in assignment of the sequence to the function category provided in the cat_desc column.

[0131] HIT_E provides the E value for the BLAST hit in the hit_desc column.

[0132] PCT_IDENT refers to the percentage of identically matched nucleotides (or residues) that exist along the length of that portion of the sequences which is aligned in the BLAST match provided in hit_desc.

[0133] QRY_RANGE lists the range of the query sequence aligned with the hit.

[0134] HIT_RANGE lists the range of the hit sequence aligned with the query.

[0135] QRY_CVRG provides the percent of query sequence length that matches to the hit (NCBI) sequence in the BLAST match (% qry cvrg=(match length/query total length)×100).

[0136] HIT_CVRG provides the percent of hit sequence length that matches to the query sequence in the match generated using BLAST (% hit cvrg (match length/hit total length)×100).

[0137] All publications and patent applications cited herein are incorporated by reference in their entirely to the same extent as if each individual publication or patent application was specifically and individually indicated to be incorporated by reference.

[0138] Although the foregoing invention has been described in some detail by way of illustration and example for purposes of clarity of understanding, it will be obvious that certain changes and modifications may be practiced within the scope of the appended claims.

1) A recombinant DNA construct comprising a polynucleotide selected from the group consisting of a polynucleotide comprising a nucleic acid sequence selected from the group consisting of SEQ ID NO: 1 through SEQ ID NO: 184,663.

2) A recombinant DNA construct comprising a polynucleotide selected from the group consisting of a polynucleotide encoding a polypeptide having an amino acid sequence selected from the group consisting of SEQ ID NO: 184,664 through SEQ ID NO: 369,326.

3) A method of producing a plant having an improved property, wherein said method comprises transforming a plant with a recombinant construct comprising a promoter region functional in a plant cell operably joined to a polynucleotide comprising coding sequence for a polypeptide associated with said property, and growing said transformed plant, wherein said polypeptide is selected from the group consisting of:
a) a polypeptide useful for improving plant cold tolerance, wherein said polypeptide comprises a sequence identified as such in Table 1;
b) a polypeptide useful for manipulating growth rate in plant cells by modification of the cell cycle pathway, wherein said polypeptide comprises a sequence identified as such in Table 1;
c) a polypeptide useful for improving plant drought tolerance, wherein said polypeptide comprises a sequence identified as such in Table 1;
d) a polypeptide useful for providing increased resistance to plant disease, wherein said polypeptide comprises a sequence identified as such in Table 1;
e) a polypeptide useful for galactomannan production, wherein said polynucleotide comprises a sequence identified as such in Table 1;
f) a polypeptide useful for production of plant growth regulators, wherein said polypeptide comprises a sequence identified as such in Table 1;
g) a polypeptide useful for improving plant heat tolerance, wherein said polypeptide comprises a sequence identified as such in Table 1;
h) a polypeptide useful for improving plant tolerance to herbicides, wherein said polypeptide comprises a sequence identified as such in Table 1;
i) a polypeptide useful for increasing the rate of homologous recombination in plants,wherein said polypeptide comprises a sequence identified as such in Table 1;
j) a polypeptide useful for lignin production, wherein said polypeptide comprises a sequence identified as such in Table 1;
k) a polypeptide useful for improving plant tolerance to extreme osmotic conditions, wherein said polypeptide comprises a sequence identified as such in Table 1;
l) a polypeptide useful for improving plant tolerance to pathogens or pests, wherein said polypeptide comprises a sequence identified as such in Table 1;
m) a polypeptide useful for yield improvement by modification of photosynthesis, wherein said polynucleotide comprises a sequence identified as such in Table 1;
n) a polypeptide useful for modifying seed oil yield and/or content, wherein said polypeptide comprises a sequence identified as such in Table 1;
o) a polypeptide useful for modifying seed protein yield and/or content, wherein said polypeptide comprises a sequence identified as such in Table 1;
p) a polypeptide encoding a plant transcription factor, wherein said polypeptide comprises a sequence identified as such in Table 1;
q) a polypeptide useful for yield improvement by modification of carbohydrate use and/or uptake, wherein said polypeptide comprises a sequence identified as such in Table 1;
r) a polypeptide useful for yield improvement by modification of nitrogen use and/or uptake, wherein said polypeptide comprises a sequence identified as such in Table 1;
s) a polypeptide useful for yield improvement by modification of phosphorus use and/or uptake, wherein said polypeptide comprises a sequence identified as such in Table 1; and
t) a polypeptide useful for yield improvement by providing improved plant growth and development under at least one stress condition, wherein said polypeptide comprises a sequence identified as such in Table 1.

The application's sequence listing, which the Patent Office published only in electronic form, follows.

SEQUENCE LISTING (369326 sequences)

SEQ ID NO: 1 - DNA, 666 bp, Zea mays
  Clone ID: MRT4577_100000C.1
ccggacacccgcaatcttcaatgctccccagcaatccctagcagaagccttccatcctcactcgctcgatggcccgcacgaagcagacggcgaggaagtccacgcggcgggcaagcgcgccgaggaagcagctggcgactaaggcggcccgcaagtctgcccctgcgaccggcggagtgaagaagccccaccgcttccgccccggcaccgctcgcgctccgggagatccgcaagtaccagaagagcacggagctgctgatccgcaagctgccgttccagcgcctggtgcgggagatcgcgcaggacttcaagaccgacctacgcttccagagctctgctgtctccgcgctgcaggaggcggctgaggcctaccttgtcgggctcttcgaggacaccaacctctgcgccatccacgccaagcgcgtcaccatcatgcccaaggacatccagcttgcccgccgcatccgcggggagagggcctaagcgtcatattttctgtcatcagtgcccgatcagaagatgtagagatatgctgggttctgtagtttgggttactgtcgaatcatcgagtgttgggctggtcactgctgtaacttaaaaaattatcatgatgcatatgaaatggcaatgaactctgttatcaaaaaaaaaaaaaaaaaagcggcc

SEQ ID NO: 2 - DNA, 450 bp, Zea mays
  unsure (1)..(450): unsure at all n locations
  Clone ID: MRT4577_100001C.1
aatctctctgtccaatttccaaagtcaactcctttttggtttttgttttactttctgattgccggtgctctactgtggaacaacaactacacacacacacaaaaaaaaacaattttctgtctatatatatattaaggatccaaattagggagagaccaaagaggaaattaataacaatcaattcaacaacgaatggagattgaagaagcgagtcgtgaaagtggacatgttgcgtgcggatcatggattcgccgcccgaagaaagtaaactgggttcttatcgctaaagcttccaaacgccgnggctcatctgtttattgtgctgctctcctcaacatcttctgttttgaccccattactgcttctctttcctcctatcctttggcaacacacacgcttaaggatagtgatggtgatcctgtggctgcttcagngcaccctggtggggat

SEQ ID NO: 3 - DNA, 284 bp, Zea mays
  Clone ID: MRT4577_100002C.1
gcaatctgccactggacagatggtgggatctgaagatccaaagccgcaagccgaaaattttgttgctgcacctgtagtgctggatgcagtcaggcaagtagaaattgaactggagtccaaaactactgttgacagtgtcaggcgaacaaggctatagcacagagcagactgctcaagtggaagctctaattgaagcgtcatgtggacaacttaaggtgggaaggcaaattccagaagatggatctattgcttgtacaactactgagcactctatggttgtcgat

SEQ ID NO: 4 - DNA, 170 bp, Zea mays
  unsure (1)..(170): unsure at all n locations
  Clone ID: MRT4577_100003C.1
atggatgtattaactggtgcttgagctacctatcccccgtgngctctgaagaggtacgaaaacgagagnnagcgcggccccctggaccggacaccgtaccaatcatctggaagctggagtggctaacgttgnncgacgggtgaaagacctggacgcctgcgacgactgca

SEQ ID NO: 5 - DNA, 241 bp, Zea mays
  unsure (1)..(241): unsure at all n locations
  Clone ID: MRT4577_100004C.1
caagagccagcagaggaggggggaaacnnggcagagaagacagagagcncgacggcaaccgagccaagngagccaagcngngcgggcnngaaaaagaagaagaaacangnggaanccgacncnncncgaaccgagacgcagcagggcgangacacangcacacnaccaagcnagacaggacgaagaaggagaagggaccgagcccgcnggngccgccgccaccagacacccgcgcgaagga

SEQ ID NO: 6 - DNA, 283 bp, Zea mays
  Clone ID: MRT4577_100005C.1
ccaacaaaaacacaccgggagtgaattctttctactccggaaaaaaattcccctctttctttgcccttgaacaaaaaaaccccaccctaccttattttgtgagtatacaaactgtcccacttccattttaaattcatttcccagttatgttctatggtggcaccaacatcctattccatgccttcacaaaaacgggcccggtggtttccctagtggaaggctaccgttgccacaaaaaaaaacacaataacctctctctttgtttggcaccaaaaaacaagcc

SEQ ID NO: 7 - DNA, 172 bp, Zea mays
  Clone ID: MRT4577_100007C.1
ggcgacccacgcgttcgggactatgtaccatggagccctcctttgctcacggtccacccaagcatcgggggagatctgggcgttggacacatttgactgcatgcctaccgacgtggtggggttctcgtaacaggatatagcgcagctgtcgctcattcagaggtttctcgcc

SEQ ID NO: 8 - DNA, 887 bp, Zea mays
  Clone ID: MRT4577_100008C.1
gctgatcaccatattcattactttgatttacgtaatccaagtgcgcctgtccatgttttggggggcacaagaaagcagtatcgtatgtcaaattcttatctaacaatgagcttgcatctgcatcaacagatagcacgttacgtttatgggatgtcaaggataatttgccggtacggacattcagagggcacaaaaatgaaaagaacttcgttggattgtctgtgaacaatgagtatattgcttgtggaagtgaaacaaatgaggtttttgtttatcacaaggctatctcaaaaccagcagcaagccatagatttgtatcctctgacctggatgatgccgatgatgatcctggttcttatttcattagtgctgtctgctggaagagtgatagccccaccatgttagctgctaacagtcagggaaccataaaagttcatgtacttgctccttgatctcgtggagggcgttcaagagatttacagccagcgcgtgtatgtcgtactgtccaggtgttccctttcgtgccattatattccccaaaagcgagaatggaggcattattgatctccggttagggcatgaatttttgtagacgatggccagctgacgtagggttttgaggtaccagaatgtgcataatcatgtttatgttgtacaggtgtaaatcagccaagttattgattacaagtgtgacatgagaaatacacattaataaaaactccagctcggttgtacagagattgtgtttgaacccagaaattcatgtggttatgtcgtttgataatataaaaaaaaaaaaaaaaaaacctagccgctaggccttttttttgtcagctggccttgataattttctggatatctaatgaaaaaacgatgtcaataacaag

SEQ ID NO: 9 - DNA, 228 bp, Zea mays
  Clone ID: MRT4577_100009C.1
acgcgtaccgtataaagtgcaatttcacgcagttaccatctgttggtatctcactaggagctgaaaaagaggcgaaaacctctgggctgactgaagaagtacctgaggataggatagctgtgcaggcttccgatgcggtctagctaaattgtaaccagaatagcaggactagcacgactacgccgaatgacaatgtgatccacgaccattctagtgacacatgatcat

SEQ ID NO: 10 - DNA, 356 bp, Zea mays
  Clone ID: MRT4577_10000C.1
atgttcactgttattttttttttccagaaacacaagcaacatttagtattacacactcgtttgttgaagctcatatggcagacccaacataacatctataaataactatattggaggcaagataacaccgggcataaaaactatgcatgactctttcataggggactcaagggacacataattcccacacagcctgccatataccgcaacacaggattccagatagtatggatagttgttgctgtcctaaaagtccaaaaaaaaaggctttttttagaaccatccagactgaatctaacacacatacccacaataaaaggggggtaaacaaaattcaacaagatgccattttaaac

SEQ ID NO: 11 - DNA, 214 bp, Zea mays
  Clone ID: MRT4577_100010C.1
cgataccataccaatagcatcacagcagtagcagcacagctccctcccccgtcctctccaaatctcgccggattccgtccaccgccaagccctcgcatctgccgcaggttcgtgtctgtgcccgagcgtggtgctctgccgaggaagctgatcgcgcaccccagccccagccggccgccgcccatcccaagccgacggaccgtcgtcgccccca

SEQ ID NO: 12 - DNA, 336 bp, Zea mays
  Clone ID: MRT4577_100011C.1
atatgggtcctgtgatacgcgaacactaaaaaggagcggggtctgggttccaatctaagccaccacacaggaaggtaccctccgccgcttcacgatccctacaaatgtcgggtatgcgcaacaatccactcaaggaggtggacaccgacctcatccaccaccccagacgaaacctcgctgctcgccgaggatactatgcctctcctaatctcgaacgaggacctgaataagctcttaatccttgtcgagcggacggacacgggacaactcttctactgttgacggcgcaccacgcatcaagatcgcaagcttgtgacgcatactggggatccacta

SEQ ID NO: 13 - DNA, 374 bp, Zea mays
  Clone ID: MRT4577_100012C.1
cggctcgagcaagaatcgccaccgactacttaaagggaagagttgtcgaaacctcctatgctgaattgagcgacaaccaagacagctggagaaagatcaagctctccatcgaagatatccaaggaagagcctgcatgaccaacttccacgctatggatatgaccagagacagactctgccaattcatcagaaaatggcaaaccttgatcgacgctaactgcgaagccaagaccaatgatggttatgttttgagagtcttcgttactgctttcaccggcagacaacaaaaccaagccagaaagaccagttatgcccaacaccaacaaatcaagttgatcagaaagaagatcgtcgacatcatcaccgctgaagct

SEQ ID NO: 14 - DNA, 585 bp, Zea mays
  Clone ID: MRT4577_100013C.1
attgggtacctcgaggccggccgggaacatctttctccatcatgcgagcttcaagtgttcgctacgtcatcactgcaataaaaaaagcagaccgcaatgatggagcagaaccatggttcctctcctccacggacttcaccgacaaggccgagaacgtgccggctgcgtccgccttcgcggagggccgcgcgacgatgcgcaagacgtggaagaaggccaagccagcgacgacgtccgggagcccgtggtacggccccgaccgagcgctgtatctgaggccattgtccggagagccaccgagctacctgacgtgcgagatcactggagactacaggtggaacaccgtaccttctgtcggcaggacccgcaaacgttcgacaagaaacgacagctggaggtgatacactcccgctgggacatgctgggcgcgctcgactgtgtcttccccgagctgctcggccgcgactgctgtcaagttcgcttaggccgtgtgattcaaagtcgcatcccagatcttcagagagggagtactgaactatctcgtcaacccgagcctcatccacgcgcacagcatccttgctatct

SEQ ID NO: 15 - DNA, 189 bp, Zea mays
  Clone ID: MRT4577_100014C.1
ggtgttttttgttgcaacgcacggtcattcacctagtatagggaataatcacagtgcgtgaaactaatccagaggataacactgtacatgatacaaactacattccgtacaaacatggcaaagggtttaccatagcttatatgcatgcatgtatttccgtgatgcgctaatgccctcttggtgagggac

SEQ ID NO: 16 - DNA, 196 bp, Zea mays
  Clone ID: MRT4577_100015C.1
ggccttctggactgccccagtcgtttgtaagatccatgtttacccaggatctgctaactggcgcgtgcacgagctccgtccctgccccgtccgaggcggaggacggggacaggacgtctctgcatgactctgcgaacgctgctgaagaactgtaccgactccaggacacctttttaccgcgtgacccttgcgagaa

SEQ ID NO: 17 - DNA, 834 bp, Zea mays
  Clone ID: MRT4577_100016C.1
gccggccgggccgtcttagatttgttggcgcttctgataatgtttgtcttcctcggccctcacgacctcgctcgtcgctgcccccgcacacccgcgcttcttccgtccctcccgctaaatccttccgtccctcccgccaaatcgcgccatttagtctccaaatccattcgctgcgcgcaaaatctaagccaccatcctaaatcgcccccaaatcccaaaccctagaagcaaaacgcgttgaggcgtcaatccaagaggacctctgcaccaacgcctctggagatcccgccgcaaggggctccgcccgttcaaccaccaagggctcagcccatcctcccgcctggcttcccgtccatggttggacccggcacttggtttgccccacgtccaccgcagtccatggtgagctcttctgtaccatcaggcagcaatggaggctctgcagttcctcgttctttggctgagaatgttgctgacactgatgtacaagcatgaacaatataatgcttttgatgtggtgatgctgctgttctacttccatccttccagtgactgctggttgatgcaaatcggatggctactcctatttaccaaagttctaattatggttgtgtgccttctttcatcattttcatctatttaccaaagttccaattatggctgcgtgccttctttcaacattttcatgtaattcaataacaatggctttgtgccttgtatcgttgttttcatttagatcaataactatggctttatgccttttattatttaaagagtactgttgtaatgggcaattgttgatgttgacgtgaaaaaaaaaaaaaaaaagcggcc

SEQ ID NO: 18 - DNA, 323 bp, Zea mays
  Clone ID: MRT4577_100017C.1
aaaacaaacaaactccccataaaatcacccccctgcaggcgccggtttgatttgaacattacaatggctgggggccccccttttatttttacaggggccccccaccccctttggttttcttcgggccctattgcataaaaacaagacaggggccggggccacccccccttaaagggccccccggccggggggtttttgccccctcccctggcctaaaggcacattcccgaaagggcctggggcttttctggctcttttgaagaccttccatggctttattaccaccgcaaacccccttttcctgtttgggggggaaagaaacc

SEQ ID NO: 19 - DNA, 388 bp, Zea mays
  Clone ID: MRT4577_100018C.1
atctattaactattatcacacacaaactactccaaatcagaacctttacgcgcaacctttctactatgcattgtagcttccgggatcttacaaaggatctgcttccttaatgccccaagcattaaatggatcatgccagatattacgtctctgtgagggcttgcttattatcacatatggcgaccgtaaggaccagagttagaaatcgggaggggatactgtacaccaactgaggtctttccaatggatctcttttacactatatcctgactactattaataaccactccagctgatctagcctcatgcggtacctgagattcttatgaactacgttcccgtcttgtgactgttgcaaccagactgaactacactgaactacgcaggc

SEQ ID NO: 20 - DNA, 917 bp, Zea mays
  Clone ID: MRT4577_100019C.1
ggccgggaatcctgtccggatcacaaagacgtagctacccccctcccgcgtccgtcgaattcgcctccgccgcctgctcgatccggtgggaactcgccgctgccgggttgttttcgctgggtgattaaggctcgggattcgagatctacgcgagtcgcgggcaagcagccatgagcgaggtgttcgagggctacgagcggcagtactgcgaggcctccgcctcgctctcccgcaagtgcaccgctgcctccgccctcgatggggagaagaagaagcagaagctgtccgagatccaatccggcgttgaggaagctgaatcgctgattcgtaagatggacctggaggcaaggagcctacagcctagcattaaggctggtttgcttgcaaagctgagggagtataaatctgacctcaacaacgtcaagagtgagcttaagaggatctcagcgcccaatgctaggcaggctacccgggaggagctcctggagtctggaatggctgatactctcgcgttgcacggagttgatgacaacattggcaagagcaagaagatcctggctgcaatgtcaaagaggatggataggaacaagtggatcattgggggaattatcacggctctcgttctggccatccttctcatactccacttcaagctcgctaattaagcctgcctgcaggtaggtccccccctacatatctgtgttcagtaattgtgtgatatgagttgtctgaatgccgtgtattgagcaacacgcagctctccgagcgtcatttgttccccctcaaacctgtaaactcaaaatggcttattctgtgtatagttagttattcccaactatgtaaaatgtctaaagagtaaaaaaaataatacttggtgttgagtctcatgtgcacatcgcacgttgttctgtcatgtt

SEQ ID NO: 21 - DNA, 561 bp, Zea mays
  Clone ID: MRT4577_10001C.1
tttaaaatctttttttttttttttttttttttttttttcacccttatattataggggaggggctgtttgttatgtaaaaatggaaaatacccccttttaaatttctttttacaaaaattaaacttataacaatacagtcccaaaggggacaaataaactaaaaacagcctaatttttaacatgccttcttctttaccaacctgttcaattaggggggataaaactttcaaacctgaaaggccctaaatttatacatacagttccctttttccggggcacgttatacaacaccacggcccatgtgtttgtgtccccccacaggcttaaccatccacctacaatgccgggggggggggggggccctaagcctccggggccttgttttttttgggggggtcaagaaacccaacttacaggtccaagggccccgtgtcccaccggggaattgctggtctcccccccccttcggccatggccctaacaaagaacacaaactgccgccatttgtccccttcaaaaaccgttttgttcatccccaggtacttaaacgcggccaggccg

SEQ ID NO: 22 - DNA, 756 bp, Zea mays
  unsure (1)..(756): unsure at all n locations
  Clone ID: MRT4577_100020C.1
cgtagtctaccccctcccgcgtccgtcgaattcgcctccgccgcctgctcgatccggtgggatttcgccgctgccgggttgttttcgctggggtgattaaggctcgggattcgagatctacgcgagtcgcgggcaagcagccatgagcgaggtgttcgagatctacgagcggcagtactgcaccgctgcctccgccctcgatggggagaagaagaagcagaagctgtccgagatccaatccggcgttgaggaagctgaatcgctgattcgtaagatggacctggaggcaaggaacctacagcctancattaaggctggnttgcttgcaaagctganggagtataaatctgacctcaacaacnncaagagngaccttaanannatctcancgcccaangctaggcacgcctaccccccaggaccccccggacccnggaaccgccnnacctccccccgcccccgtcccccccncccccccaccccccccncccccccnnnnccccccccccccccccctccccccnccnnncccccccnccccccccccccccccccccccccccccccccccccccccccccncccccccccccccccccccccacnnccccccccccccctcccncccccccccccangncccncgcccncccccccccccccccccnncctcccctccctccccctccncccccccccccccccctccgccccgccccntccgtcccccccccccccccctacccccctcccctc

SEQ ID NO: 23 - DNA, 712 bp, Zea mays
  Clone ID: MRT4577_100021C.1
ccttactccgatccttggctgacggccctgttattcaggcctccgcgacgcgcgctctggcaaagggcaccacatttgaggatgtcatctccatggtaaagggggtgatacctgatctgtcctgccctgtagcgcttttcacatattacaacccgatcctgaagcgtggtgtccccaacttcatgagtattgttaaagaagctggggtacacggtgctattgacaacaccgactacaccaaatgaaagaatggagaaaattgcacaggcttcagaaggatttatttatcttgtaagcactgttggagttactggtacacgtgcaaatgtaagcggcaaggtgcaatctcttcttcaggatatcaagaaggtgacagaaaaacccgtggctgttggctttggtgtgtcgactccagagcatgtccggcagattgcaggatggggcgcagatggtgtgattatcggtagcgcagtgatgaagacgttggaggaagctgcttctccagaagaaggattgaagaagctagaagagttcgccaagaacctgaaggccgcattgccgtgaaccaaccattttcgttagcaaagaaattaagattttttttttcctttcaatcttggctttcagggttgttggttgttgtgtagtgaaaataattgtgtccctatgttgaatgctcaaatgaataaatcaagatcccatatattatatt

SEQ ID NO: 24 - DNA, 1159 bp, Zea mays
  Clone ID: MRT4577_100022C.1
cattgggtacctcgaggccggccggggcaacactggtctcccgggcctaccacgcagatctcctttgtatcggcctcggcaatcctgaccggatcaacaaagacgtagctacccccctcccgcgtccgtcgaattcgcctccgccgcctgctcgatccggtgggaactcgccgctgccgggttgttttcgctgggtgattaaggctcgggattcgagatctacgcgagtcgcgggcaagcagccatgagcgaggtgttcgagggctacgagcggcagtactgcgaggcctccgcctcgctctcccgcaagtgcaccgctgcctccgccctcgatggggagaagaagaagcagaagctgtccgagatccaatccggcgttgaggaagctgaatcgctgattcgtaagatggacctggaggcaaggagcctacagcctagcattaaggctggtttgcttgcaaagctgagggagtataaatctgacctcaacaacgtcaagagtgagcttaagaggatctcagcgcccaatgctaggcaggctacccgggaggagctcctggagtctggaatggctgatactctcgcggtgtctactgatcagagggggagattgatgatgacaactgaaagactgaatcagtcaactgacagaattaaagagagccgaagaactatgttggagacagaagagcttggtgtgtcaattcttcaggaccttcaccaacagcgacagtcactactacatgctcatactactttgcacggagttgatgacaacattggcaagagcaagaagatcctggctgcaatgtcaaagaggatggataggaacaagtggatcattgggggaattatcacggctctcgttctggccatccttctcatactctacttcaagctcgctaattaagcctctgcctgcaggtaggttccccctacatatctgtgttcagtaattgtgtgatatgagttgtctgaatgccgtgtattgagcaacacgcagctctccgagcgtcatttgttccccctcaaacctgtaaactcaaaatggcttattctgtgtatagtctgttattcccaactatgtaaaatgtctaaagagtaaaaaaaaaaaactttgtgtgaaaaaaaaaaaaagggcggccgccaccgcggtgga

SEQ ID NO: 25 - DNA, 1060 bp, Zea mays
  unsure (1)..(1060): unsure at all n locations
  Clone ID: MRT4577_100023C.1
tcctctagagcggccgccgctgtggcggaggacaagcgcagcatctccggcaccttcgccgagctcaggcagcaggggaagactgccttgattcccttcatcactgctggagaccctgacttggccaccacagcaaaagcactcaggatccttgatgcgtgtggttcagacgtgatcgaactgggtgtgccttactccgatccattggctgacggccctgttattcaggcctccgcgacgcgcgctctggcaaagggcaccacatttgaggatgtcatctccatggtaaagggggtgatacctgatctgtcctgccctgtagcgcttttcacatattacaacccgatcctgaagcgtggtgtccccaacttcatgagtattgttaaagaagctggggtacacggtcttgtggtaccagatgttcctttggaagagacagatgtcttgaggagtgaggctgccaaaaacaacctagagctggtgctattgacaacaccgactacaccaaatgaaagaatggagaaaattgcacaggcttcagaaggatttatttatcttgtaagcactgttggagttactggtacacgtgcaaatgtaagcggcaaggtgcaatctcttcttcaggatatcaagaaggtgacagaaaaacccgtggctgttggctttggtgtgtcgactccagagcatgtccggcagattgcaggatggggcgcagatggtgtgattatcggtagcgcagtgatgaagacgttggaggaagctgcttctccagaagaaggattgaagaagctagaagagttcgccaagaacctgaaggccgcattgccgtgaaccaaccattttcgttagcaaagaaattaagatttttttttcctttcaatcttggctttcagggttgttggttgttgtgtagtgaaaataattgtgtccctatgttgaatgctcaaatgaataaatcaagcggacgcgtgggatcccatataaaaaaaaaaaaaaaaaaaagaaaaaaaaaaaaaaaaaaaaaaaagggcggccactcgcgtnctagcccacgcgaccg

SEQ ID NO: 26 - DNA, 1281 bp, Zea mays
  Clone ID: MRT4577_100024C.1
gggtacctcgaggcggcgggcagcggattcttcgccctcgcttctactcccaatcctccgtgattttacgtcgatcaccccgccaatgacctttccttctggcggttcctcgctttgctccgctccgaggtcagcagggtgaggcagaccaaccaggggccacggcagcagggcaggggcacttggctccagcctcctactcatcgcgtatgctagaacatgtttggtgacgtattgagctcgttcagctttgagaaagatttcccgtcgccgagccacgcgggtcgagtacccgtcgaactcgccgctgtcggatcgttctcgcttggggcgatcaagctaacgggatttgaggagatctaggccagccgcgggcagcagccatcagccatgagcgaggtgttcgagggctacgagcggcagtactgcgaggcctccgcctcgctctcccgcaagtgcaccgctgcatccgccctcgatggagagaggaagaagcagaagctctccgagatccagtccggcgttgaggaagctgaatcgctgattcggaagatggacctggaggcaaggagcctacagcctagcattaaggctggtttgcttgcaaagctgagggagtataaatctgacctcaacaacgtcaagagtgagctcaagaggatatctgcgcccaatgccaggcaggctacccgggaggagctcctggagtctggaatggctgatactctcgcggtgtctactgatcagaggggaagattgatgatgacaactgaaagactgaatcagtccactgacagaattaaagagagccgaagaactatgttggagacagaagaacttggtgtctcgattcttcaggaccttcaccaacagaggcagtcactactacatgctcatactactttgcacggagttgatgataacattggcaagagcaagaagatcctggctgcaatgtcaaagaggatggataggaacaagtggatcattgggggaatcatcacggctctcgctctggccatccttttcatactctacttcaagctcgctcattaagcttgcctgcaggtaggttccttccacatatctgtgctcagtaattgtgtgataagagttgtctgaatgctgtgtattgagcgacacacggctcttgaagcatcatttattccctcccaaacctgtaaacttaacgtggttcatgttgtgtacagtcagatacgtccaactatgtaaacctaacgcacgttgttctgtcgtgctaactaaactagagaggttagt

SEQ ID NO: 27 - DNA, 350 bp, Zea mays
  Clone ID: MRT4577_100025C.1
aacaacgtgggcgcggcggccgggttcgttcgtatagggcaggaaactcggcaggaagcatgctcccgatcagtggatctgtctccgcctccgcctccgccaccggaggggcgaaggcgcggatgatcacgagctgcagcggctgccgcgtcctgcgcaagggctgcaccgacgcctgcaccatccgcccctgcctgcagtggatggagaaccccgaggcgcaggccaacgccaccttcttcctcgccaagttctacggccgggcggggctgctcaacctgatcgccgccgcgccagacgacgccgactcccgcgcgtcggtcttccgctccctgctctacgaggcgtgc

SEQ ID NO: 28 - DNA, 1817 bp, Zea mays
  Clone ID: MRT4577_100026C.1
ccctcgcgtccgcccacgcgtgcgcgaattcgcctccgccgcctgctcgatccggggggaactcgccgctgccgggttgtattcggtgggcgattaaggctggggattcgagatctacgcgagtcgcgggcacgcagccatgagcgaggattcggctcgagctgatatgcttgggactcaattcaatcctgtggttaaatcggacatgtaaactctatttatttccttgtggattgtgtcgaaaaaaaaaaaagcaaaaaaaaaaacaagcaaaaacaacaaaaaacaaaaaaaaaaaggtgtgtcaattcttcaccaacagcgacagtatcagccattctgttttggggacccccttgggtaactccggggcgcggcaatgtgctaatctcttctgcatttgggcacggcaatcctgacccgaccctccagatttcccgtcgccgagccacgcggatcgagtacccgtcgaactcgccgctgtcggatcgagtacccgtcgaactcgccgctgtcggatcgttctcgcttggggcgatcaagctaacgggatttgaggagatctaggccagccgcgggcagcagccatcagccatgagcgaggtgttcgagggctacgagcggcagtactgcgaggcctccgcctcgctctcccgcaagtgcacggctgcatccgccctcgatggagagaggaagaagcagaagctctccgagatccagtccggcgttgaggaagctgaatcgctgattcggaagatggacctggaggcaaggagcctacagcctagcattaaggctggtttgcttgcaaagctgagggagtataaatctgacctcaacaacgtcaagagtgagctcaagaggatatctgcgcccaatgccaggcaggctacccgggaggagctcctggagtctggaatggctgatactctcgcggtgtctactgatcagaggggaagattgatgatgacaactgaaagactgaatcagtccactgacagaattaaagagagccgaagaactatgttggagacagaagaacttggtgtctcgattcttcaggaccttcaccaacagaggcagtcactactacatgctcatactactttgcacggagttgatgataacattggcaagagcaagaagatcctggctgcaatgtcaaagaggatggataggaacaagtggatcattgggggaatcatcacggctctcgctctggccatccttttcatactctacttcaagctcgctcattaagcttgcctgcaggtaggttccttccacatatctgtgctcagtaattgtgtgataagagttgtctgaatgctgtgtattgagcgacacacggctcttgaagcatcatttattccctcccaaacctgtaaacttaacgtggttcatgttgtgtacagtcagatacgtccaactatgtaaacctaacgcacgttgttctgtcgtgctaactaaactagagaggttagtaaagcagtacttcgtatgtaactgttgtgtgtgcatcggtctattcgaactgctgtggctgtgggccttggaatttattgtgattagacaaaaaaaaaaaaaaaaaaaaaaaaaaaaaaaaaaaaaaaaaggtcggttgaatgaagcccgtgtatttagcaacacccagctctccgagcgtcatttgttccccctcaaacctgtaaactcaaaatggcttattctgtgtatagtcagttattcccaactatgtaaaatgtttaaagagtaaaaaaaaaatacttggtgttgagtaatcccctttgtgttgaaaaaaaaaaaaaaaaaacaaa

SEQ ID NO: 29 - DNA, 626 bp, Zea mays
  Clone ID: MRT4577_100027C.1
ttttcgattgggtaccgggtcttccctccgatttttttttttttttttttttttttttttttttttttttttttttttttttttttttttttttttttttttttttaaaaaaaaaatggttcccccaaaacttttcaaaggggggaagtttactttcccttccggggcgggggggccaatctgacccaaaaagggcggccttaagggtttcacaagggttccaaactaccccaaggggggggggggggccctgttaaaagctaaccttgggggttatggccaagggaacgtttgctttcccccataaacgggacccctttttttcacaaatggggggaccaaggggccttaaccccaaaaaattcagccgggcaaaaagaaagttttccccctcaaccgggggggaaaaggggagctcccgggggggggcaatctgccctccttcccccagggggggattgccccaaaattgtttttttaaccctggggcagggggtaatctggggcggggaaaaaaacccctcctgcgcccagaagggggcgcacccttgcccaaaaaaaaaaggctcgcgggggggggaaaccccccggaccctccttgcccccccccaaaaaccccctcgggg

SEQ ID NO: 30 - DNA, 214 bp, Zea mays
  Clone ID: MRT4577_100028C.1
atcacttcctagaacagccagaacatttgtggtctatttctctgttagtgtttaaccaaccatctgttctaaaagaagggctgaactgatggaaggaatgctgttagcctgagactcaggaagacaacttctgcagggtcactccctgcttctggaggaaagagaaggagggcagtgctccagtggtacagaagtgagacataatggaatcagg

SEQ ID NO: 31 - DNA, 402 bp, Zea mays
  Clone ID: MRT4577_100029C.1
ttgttttttttttttttttctgtttttttttcttggttttttttttttttttcttttttttttttttccggggaaaatcgattccttaggggtcatttttttccatgcccttttaaattcgaacttgggtttttgggaacaacaaagtttgtttttttttttttcccccaccacacacaacacaattgggaggggtcctgcctttcccccttgtggggcccccccccccccaacaaggggccgatgccccctttacctgggttttcctccgtttaaaaaaaacccaaatgtgtaccgggtggggccacagtttcttctaacccccaacataaaaaagaccccggggccgggtttttactcctatttttttacaggtccttcctgggccccattttccctttt

SEQ ID NO: 32 - DNA, 462 bp, Zea mays
  unsure (1)..(462): unsure at all n locations
  Clone ID: MRT4577_10002C.1
ccgggctttttttttttttttttttttttttttgttttttttttcggttttttttttttttttttttttttggggcctcaacccggggttgggtttttcggcgggaggcccccccccgcggcccccttgcttttgggcccgccgttgctgtccaaacgaaggacggggcttccgatcctagcatttttcagcccggggggggggggacagcccacagggcacgggggccagggactcggcaacgggggagctgcgagctagagcagaggctgaccagccaaagcatcatcggcaagctcaactcgacccgctaggaacgaaaggagcagagaggggctggacagtncggcccggngagctgagcagggagaaaaaccccnngagcagagcgcgacactggagcacacccggcccgggcgagcggggcaccggngccggagagccnncccccccccgancgcc

SEQ ID NO: 33 - DNA, 434 bp, Zea mays
  Clone ID: MRT4577_100030C.1
gctgtttcatgtccattggcgccaatttacactcctaccagcaacgtcgtgtgcctgatgctggatgtaattagcagggacatattatatctcgccgactaacactactagcccattgtttcatgcttagacagtgaggacattacactgaagaaacatgacatccgctcttactatccttgcccctttgactctggcgccacccttctatatcattacgcagaagcaacatgaatactctggtacccatcctagactattttcccgggtgccccccttctatatatatgaatctcttgctctagccatgagggggaaccatcttatgctatctttctccatcctctggaacatactataaactttcttggtccccaaaagatgaatcgacaaattttgccccaaaagcccacttcctggtaactttctttaaa

SEQ ID NO: 34 - DNA, 341 bp, Zea mays
  Clone ID: MRT4577_100031C.1
gatggcaaaacccgagcctaaacccgaaccataagcagaggcccatgcaaaagcagaacctttgccttaacggaatccactgacagatcgtaagcccgagcgcataccatatgctgtgcgtggacacattccacctgcagctatcaactgaggaagtggctgttaacaattattgtagggtttagatagactgccgtgttgcatcgggcttttgtaggtgctgatgctagttgtatgtatcctatctttgctttgtcatttgctgtgtgttatgctaatatatgatcttagtgcagataagctggttgcgtgtataaaaaaaaaaaagaagggcgtttcga

SEQ ID NO: 35 - DNA, 245 bp, Zea mays
  Clone ID: MRT4577_100032C.1
tcggacgagactggagtggcctgaagacggaggtctactatgaatgcatactgatcctgtgtcgggggcggttcgagttgttcacggcggtctaacttggtagatgcgtcagagacatggtgacaacggctagtatatctgtcggtctgaaagcgtggcgtaagacacgcatgccagtgttgttggctcgatactgtggaccacatggggctcaggcatccgttggcaaagttggcagagtgcga

SEQ ID NO: 36 - DNA, 1011 bp, Zea mays
  Clone ID: MRT4577_100033C.1
agttgctgttcataagtttattatctatatctgaaaaaatcatagaaaattgctgggtttagctctcagcagcccgctcctgagctctgaggaagcttgccttcttttgagctacccgatccttcttctgagcaagggacattttgggacggttccacctcttctttttaacttctttcttgggcttcttttcatagactggattctctcgtatagcagcatgagctttcttatacatctcctccatcatgtctggagttacgctgttctttatgtattgagagaactgtttcttgtaagcatcttcatcttcttccattaagtagcgcatgtaatctgcaacattctggcccatgatgtgcttccgatgtacttctgcattaaattccttgctttcagaatcataaccagggaatcgtttggtactgtgagggatagacaagcctccatccacagctcccttcagggcaccaaaaaactttattgccagtggtagttctggcaaggcctgcatccaaatagcaggtgaaggcacctggctgaccatcaatgctttccacattgtattcatcaccagtcacctccacttggccttcatagatcttgtccatgccaaacctattgagaagcctgcgggccagcagcaggccagtacaatatgctgcagcataatttgtcaggccaaccttcacaccatattttggcagttcgtgtgcatacgctgcgcagactatcatatccccctctatacgggcataagcaatctgacaaatgatatctctgtttgtcacacgaactatcatcctgtatttgggtgtgttgtatttatttttatcttgtatcaccaagcgtttccgagcataataatcagttttaccctctcgtcgtcttctaaatttcacttggtatctcttaaagtaggccttattcttaacaactttaacaaacccgatctgcggaacagagaccggcgtccgctgctcgacagagacctgcaggcccagcggcgca

SEQ ID NO: 37 - DNA, 2696 bp, Zea mays
  Clone ID: MRT4577_100034C.1
aattcggcacgaggagaattggaagagggatttttctatctgaatatcatgatgagactgaagagcccttacaaccatatgaacctccaaaagtatttcaatggcgatcagaatttggaagtgaacttttaaagttgaggctggagggataccaatggagtacaccttttagtatcaatgctaatggagttatgtgtgtgctcatgaacagcacaacaggaaatgatcaggcttttgtcagggtaaatgtgagaagtggaacaaaaagttcacggcatgaagttgtatttcagcttgattgctggtccagcccatacagggtggagaatcgctccatgttcttgcctatacggtttcggcagtttggtggtgatgatcattcatggcgtaatctgcttccgaattcatcagcttccttctttttggaggacctgagcagaaggcatctattggaagttttggttgatggaactgaccctatgaactccatgacatatgacatcaatgtcgtaatggatcatcagccccttactaattcagatgcccttaagaaggccttacgtgtcactgtcttgaaggaggggaaattgaatgttattcaaattattgattggctgccagataatagaaatcgaggacagataactgaaaggatgttatcaccaatctttcagccatcagaggtcgactatgggcagtcatctcctgatctggatagtgaatttcatgttactttggaactaacggagcttggcatttctgtaattgaccatatgcctgaggaagttctttacctctcagtgcagcaactgttacttgcatactcatctggaattggctctggagtaaatcggctcaaaatgcggatgcattggattcaagttgataatcaattaccatttgttcctatgcctgtacttttctgtcctcaaaagattgaaaatcagtcagactatattttcaagttctctatgacagttcagaccaacaattctcttgatttttgtgtctatccttatgtcggtgtccaggttcctgagaattgtgtgttctttgttaacatccatgaaccaatcatttggcgcctccatgagatgattcaacacctaaaattcgataggatatatagcaatcaaccttcagctgtttcagtggaccccatactgaaaattgggcttctgaacatctccgagatccgatttagagtgtcaatggcaatgtccccaagccaaaggccaaggggagtatttgggttctggtcgtcgttgatgactgcattgggaaacatggagcatatgccggtccgtatagctcaaagataccgggaggaattgtgcatgcggcaaagtgcacttatgaactctgctatatctaacattcaaaaggatcttcttagccaacctcttcagctactttccggtgttgatattcttggtaatgcgagtagcgctctgagtaacatgagcaaggggatagctgcattgtctatggacaagaaattcattcagggccggatgagacaggatagcaaaggtgtggaagactttggggatgtcataagagatggaggtggtgctcttgcaaaaggcatcttcagaggtgtcacaggcatattgacaaagcccatcgagggtgcaaaatcttctggtgttgaaggttttgtgcaaggagttggaaagggtataattggcgcagctgcacaaccagttagcggagttcttgatcttttatcaaaaactactgaaggtgccaatgcggtaaaaatgaaaatatcatcagcgataatggctgaggagcagttgctgcgtaggcgtcttcctcgagctattggtgggaatagtttgctctatccttatgacggacacaaagctactggccaggctatcttgcatctagctgaatgtgctacattccttggtcaaattgatatttttaaaatccgaggaaagtttgcttctaccgatgcttatgaggatcattttttacttcctaaggggaagatttttttaatcactcacagaagagtactattgcttcagttaccaatgatgacccagcgtaagttcaatcctacgaaggatccttgttcagtaatatgggatgtattatgggatgatttggtaacagtggagatgacccatgggaaaaaagatcctccagattcctggccttctaagcttattttatacttgaaagctaaaccttcaaattcgaaggaaattgttcgtttggtcaagtgtaatcgaggttcagatcaagcatctatcatttactcggcaattgacaaagcttataaagcttacggtccaaactcgttgaaggaattcttgagatggaaggtaccaaggccatatgcccctcgcaatagtagtggccgaagtatccaagacttatcatttggttaaaaggtcaacacaaatgcacactttagtgttaaacacagtagaatcttaggatgaaggtattttaggttgacacttttggttaccaggcaaatgatatattctacatatacactataggtatcagaggataggtactttgccttcatgtaaatagatatattttaggaggcgccggtattcatgtaaatgtgaacatctctgttataaagaaaaaaaataataatgcaaattatgcaagattcattgctgctgtcttgttgcaatgtttaatgtgttctcttgcgattgtct

SEQ ID NO: 38 - DNA, 335 bp, Zea mays
  Clone ID: MRT4577_100035C.1
ttttctttttttttgttttttttttggggggaaaaacataacagcccctttataaaggtccctgtttcctagggggaatagcccaatttttacatggccccgtttccccccttaacaattacgaacaaggggaaaaattccctaagtttagctttgcccgtttataattttcatggaccctaaaagtttttttcttttacccaaaattatttttaaaaaaccggggggtcaccttaaacccccgattcgggaagggcccccccttttgttttattcaggcacttcaaagggggggggtataccttgggggaagccccttaaaacactggttggac

SEQ ID NO: 39 - DNA, 1299 bp, Zea mays
  Clone ID: MRT4577_100036C.1
atggatggcgggcctcagctcaatagcaggaactcatggtcgtggcaccacccagcctgcagcagcagcagcagcgccggtttgcagcccactcggtccatggcctctgttggaatctgggacactctcaaacacgaagagccgagtttattcctaacagcctcggctgccgcggcgcggacgttgaccagggcgagatcacctgggatcatcctggccaggcacgacgccggcgcaggagatctgggtgatcagcgccctcttcttccatacaccttacgccactccaatctccctctccactccccattgaaggacaccaggaaaccaaggttacggactcaccagcgaggagtcggtaacaatttggtatcagaattatttagtttctggtccgagctttttcaccttgctggggtcaagttgttacttagttccgcgtttcacccccagaccgatggacagtcggaagtggttaacagaattattgtgatgtacttacgctgcttggcaggtgatcggccaaaaacttggttacaatggcttccatgggctgaattttgttacaatacgtcataccagactgtggtcaagtgcactccattcaggattgtatatggccgggaccctccaacaatgctttcttatacacctgggacagccagagtagctgccgtcgatcagcaacttcaggatcgagatgttttcttggcagacatcaaacaaaggctaatccaagctcaggtaacaatgaagcaggcgcaggacagtggccgtcgagatgtgcagtatgctgtcggcgattgggtttggctgcgtctgcaccaaaggtcggcagtgggtgtcactccagcagcaacatccaaattaggacctaggttctatgggccatatcaaattctgcaacgcattggagaggtcgcctataagctacagctgccaaccaatgcaagaatccatgatgtttttcatgtggcacttctcaagaaattccaaggggagcccccatccgcactagtacccttaccaacgattctgcatggcaaggtacttccggttccagcacaagtagtgaaggctcgtttaaatagaggtgtttgggagttactggtccagtggcttggacgtgagccggctgatgctacatgggaacaatgtaatgagttcaagagaagatatccagaaatacaactcgaggacgggttgtttgtcggagaggagggaaatgttatagatgcttttgtgggccgccaattcacaaggcgcagaaataggaaagaggagataagtcaggaatag

SEQ ID NO: 40 - DNA, 775 bp, Zea mays
  unsure (1)..(775): unsure at all n locations
  Clone ID: MRT4577_100037C.1
cataacatcgcattccggtgcctggtttttcgtactgcagtcatgataacagagttcagtgattcagtcatcgatgtcctacactgcggctcaaaccagagatgaagcatcgatgcaggaacagcaaagaaaatatatttcaagcctagcacactgtgggtgctctagagcacaatatttagttacctgacttgaacataagagggcaagtgttgcactgtctcaagaatatgtgcttgcaacttcaaacattctactaaaaccgtgtcccttaatatagcgcaaatctccaacttatattatcctattattcgtctgctaccagttctacatttctactaaaccctagtcaaattgctttgctctcaagtcttagtgtgtgcccgatttccatctttcctctcaactatttgttctggcattgaagtgatttgaccaaagtgactaagaggtatcacggaacgcgaggtccgttgttgcagatgaaacctcctaaaacttggatgtacttgtacaggcgcctggaattagagaatctgcttaaacctggctctagtttgaactggcatggcattatatatttctgaggattgaaaaccacctttacagatacctggaattgagtggttctgctttaacctggcatgccatgataatgattgtgaagataaaaaaacgtcaaacatttgtggggttggntgggaatctncacaagacgagtggaatcaaagatatagatgccgtgtgttttcttatttgacatcccagatactga

SEQ ID NO: 41 - DNA, 358 bp, Zea mays
  Clone ID: MRT4577_100038C.1
tcccacgcgtccgagccgccggggctcctgggtcctcagtccgaagcgaactctgcctccgcatccaccgacatcatgagccgcgatcgctacttgcaccgcctcctcgacctccacctacacgccaacgacgaccccttcttccccttccctacccctgcctagtcctgcccctacatctccgtctcctacgcccaccaccggttcctcctagacgaccaccccttctacccaacctgctgcccggtcggcggcatcacctcccgctccccgatcgacgacaccttagacctcgacctgctgcttccgctccacgccgtcgtctccgcgcccacgtgcgcggacttcgacttcgacc

SEQ ID NO: 42 - DNA, 426 bp, Zea mays
  unsure (1)..(426): unsure at all n locations
  Clone ID: MRT4577_100039C.1
cactcttcctcgacttctttcattgattcttgaagatatctatcttcttttgcaccacaatgtctacagtntctttcaacttcggatcaagcttccgctgctgctcaagctgcaagttctcttcaatccattttctctctgtccttttcagcaagaagtaccctgacctttatgagactagcaccgcctctcattccaccttcatcctcttcgtttcccctgataatatattccctcccttattctttttattcctctttattattttttttatctttttattctacttttatttttttttcttgttttctactcttttaacttcttttcttatttatcttcttttttatatttttttattattttttatttttttttatttattttttttttttttatatctttataattttaattatttttttt

SEQ ID NO: 43 - DNA, 816 bp, Zea mays
  unsure (1)..(816): unsure at all n locations
  Clone ID: MRT4577_10003C.1
atgccaactgtgtgactgaaataccaaatgccagttatataagccaatatggaaggcctcaagtcgtagaggagccatggattcttgaatcaattgtgtctgcaaagaaaccagttgcaaaagtcaaagataagaaagggcaaaagaagcttgtaaattataagcacactttgagtggagttagtaaaaacatgcatgaacagtatcagcctgttgaagagccatggttatttcaatctatattggaactaaatgaaactatcgttcttgctgatggaaaagtagaagcaagggacattatcagaaaattaaggaaaatagaaaaacctttaacgcctttggatgagagtaaaccgactggtggtgaaccgtcatcaagagttatacttatgaattcctctgtctgcactatgcagagaattgcagtattagaagatggaaaactagttgaactcttgctggaacccatcaagaacaatgtacagtgtgatagtatttatctaggtgtagtaacaaagctcgttcctcatatgggaggagcatttgtagatattggaatttcaaggccttcacttatgagcataaagcaaaaccgagatccttttgtgtatcctcaagtttttaagaaccgaggaacagatcacgttggtgattattgtaatgaagagaaccttncagcttatgaaaacgatgatgatatgagtgacgacgagtttgcagatgaagaagctcatgatggttcatcattttcagttgagaatgttacagataacaatgtcgatgatgatgaagttgacagcatttctggttatgacg

SEQ ID NO: 44 - DNA, 182 bp, Zea mays
  Clone ID: MRT4577_100040C.1
gccacacctgcgcccacggaagcagatgagaggcttgagactgcatatctattgtcctggaggaacaaaacgagatggaaggccgccgctgatagtattgggactaacgcatcgaatgatgaatttctcgcagccaccgcaagtgaacatctgaatgaaccttactcataccctagactatg

SEQ ID NO: 45 - DNA, 464 bp, Zea mays
  Clone ID: MRT4577_100041C.1
ggaaaaaaaaaattaacccgggttataggcaggtttcgggaaaaagggaacgggccccatattgggatacatggccccaaaaagcaaaatcatagatctggggtcctatatagaagaaggaccaccgggatcccttgggggatgggaaatttccacactaaaaaatccccacctttttttacccccccccaacagccaaggggatgggaaaaccacatgactttaaaacgagggatcttttctccgctctgaaaaggggccaaaaaacccgggcctggagaatttacacggcccacgggaactttaaacgggactttttttaccagcaaaaatctaaaaggacttgggcccatcaaataaaaaaaaaaagctaaggcatcgtatgaaaccgggggtggggggattatctggacattgggggaagtggaaaaactttgaaccccgcacccttgcaggcttttaaa

SEQ ID NO: 46 - DNA, 469 bp, Zea mays
  unsure (1)..(469): unsure at all n locations
  Clone ID: MRT4577_100042C.1
gccggccgggctgcgaagtcggcgtacgtacgaacgaacctacacagcaagaacccctaacaggaacactgtccactgcgcgcgcgaaggtaggttaattaacctccatggcctcgctcggcatcgtatcagcgaacgccgtgcgcataaaggtgatcatgcgtacctccatctccggaaggaatccaccgtttcctggtcaggangccgatacatacttacgccctgcgcttccgccgaggcgttccatgacgaagaccaaacgatctactttgaccatgacgacatttgtaacagctatggacagagagaacactaccattgtggcgcttgctcgccctaccacccatgacaaaaggagcccttagagaccatcaatgatccgtactgccctaaaggtctgctgcacaagatcctgctgctgtgccaatgctcacgtctggtctatcacatttgcaccagcttgctc

SEQ ID NO: 47 - DNA, 660 bp, Zea mays
  Clone ID: MRT4577_100043C.1
ctgcagtgtgctgcattcttggtggaaactggaagagtggatgggcagcggctttgtgtaactggagaatctgctggtggattcacaactttagcctgccttgctttcagacagaccttcaaggctggttcgtctttatatgggatagctgacctagcgtccttgagggcaggaatgcacaagtttgaagcatactacattgataaccttgtgggtaataaacaagcttactttgggagatctcctataaacttcgttgaaaacttttcatgtccagtgattttgtttcaagggttggaagacacggttgtatcaccagatcaggcaacaaaaatatacaaagccataaaggacaagggccttcccgttgctttggttgagtacgaaggggaacaacatggcttccgcaaggctgagaacatcaaatttaccttggagcaggagatggtgttcttggcaagattagtgggaaagttcaaggtgcctgatgacataactccaatcaagattgaaaacttcgattaggccttgtactcacgtttcaaacgtcaattacctgccatcaactgctgaagtggtcaacttggtgcacctgtgcggcagacttgccattcgcagctgttctttcaactgaactctagggctctaggctgttgttac

SEQ ID NO: 48 - DNA, 293 bp, Zea mays
  Clone ID: MRT4577_100044C.1
aatgttaccagctttcaacatcacacgcacagtagcgcaccaacaacggcctacgaactggggcgctcactaatgcttcctggcctgtgctcatggcgctctacgcgagcgcttctaatgcattgattattcgatactgttgacttgcttcatgctccattcttacaaacatccttgtatcaaatgcttgaaagccctattgacacacacttctgcatgcatctaggcttcaacacgcgcttgttaccatcgtcttacttcatcctacaacaaacgtgcgacatctatcattg

SEQ ID NO: 49 - DNA, 566 bp, Zea mays
  Clone ID: MRT4577_100045C.1
tgtacgccctggcaggaccgcggaattcccggccgggtccgacgcgtccgacgccttgttattcttaccatcttacacattcacacaaaaaatgcaactgttaccttgcaagagtaatagctttataagtgtatttacttgagcattttatatttggttgcatctgatccaaagcagttgtgtttatattttgttcaattcatatttctcttatcatcatcatcattcgtaaacaaaaacagacaatgctattgcagcaagggcatgacatcattctgtctggttttttcagaaccttgcaacaattacatgtatttgtttactggtattaatgtctttatataggaattaaccttctttctaatcgattctgcatgttggccccctgcaatgaacaaaaaaacatctctaaattttcagcaacttggatttgaattacaagaggtacgtttgcataatacatctacacttcgtccattttaattttggctcattaattcattttatttgccattgagaaaaagtgaaatatttagttctgattttcacaacgcatgattatttaa

SEQ ID NO: 50 - DNA, 382 bp, Zea mays
  Clone ID: MRT4577_100046C.1
gcgtgcggagccgggcctgaatatattgccgggtcgacttgctactagtgggcggccgccctgatttcggacgtggtaagttgaccacagacaccaacacgcacgtttccacgcatgcaatggcaaccttcgcatgtcaggccatggagcacgcgtcgagcgccaagctcaccgacaagcgaggagcggggctcctttggaagcatgcgcctggagcgaatgtgcccctgggtcaagatggcgcaccacactcacccatgcggcggggcaggatgaaacagatcttccgtgctgtggcaggggacccgtggctggaccacctctacgaggggccgaagacagggcagatcaacatgttgatctccagagccgagttccagta

SEQ ID NO: 51 - DNA, 271 bp, Zea mays
  unsure (1)..(271): unsure at all n locations
  Clone ID: MRT4577_100047C.1
ctctcgaaccctagtccctgctccatcttagccgccgccaatcccttaccggggctccgcaacccgcctgagacgagcaagaagcagatgcgtcggacaagggccgatggccgcggctatcgggatcgatggaggagcgacgaactctcgcggacgcgggtggcagcacgacccgtgctgagatcattggcaacgacaagggncaccgncntacggggggggacggggcctncaccgacctgcgagcggcttatgggagatgcggccaaga

SEQ ID NO: 52 - DNA, 343 bp, Zea mays
  unsure (1)..(343): unsure at all n locations
  Clone ID: MRT4577_100048C.1
tgtattcggcaccaggcggctgcttcttctgcagggcaccaatccaccacctcctggcaccgcgcgggcccaaccaaccacaccgcagcgcagcaatggggggcaacggcgccatcggggagagcgacccgctgaactggggcgcggcggcggcggagctggccgggagccacctggactaggtnaagcgcatggtgttttctgcccggcagcccgtggtgaagatcgagggctccaccctccgcgtgggccagggggccgccgtcncctccggcaaggacgcgtccggcgtcggccggnagctcgacaaggaggcccgcccccgnnnnnaggggggggggga

SEQ ID NO: 53 - DNA, 610 bp, Zea mays
  Clone ID: MRT4577_100049C.1
ctctctcttggctaatctcccgccgccggtgcagctcggtcgctccgtcgctggaggcgcgagaggaagggggaaagatgaagacaactaagggagggaaagtcatgaatcccaccgacgccttccgcaaggagcagcgcaggaaggagcttaagcggaacaaaaaagaaagaaagaaggtacgggaggttggcattttgaaaaaggacccagatgctataaaggatcagattgagaagttggaaaagatgaaggctgatggtgctctggataaggctaggaaacataagaaaagacagcttgaggatacttataatcttgttgtgaagaaaaggaaggaatatgaagaaaagatgaaagaaaagggtgagcaaccagttatgttcagccatcttggaccaccaaagagacggcctgcagcagacgaagatgacagagctaaaaaccctatgcctgaggattctgtttactatcacccaaccttgaacccatctggggcaccaccacctggcaaacctcctatgtacaaatcatcgataggaccaaggattccactgccttcctcagttggtgctggggcttcatcttccatgacagaatctgaagaagc

SEQ ID NO: 54 - DNA, 553 bp, Zea mays
  Clone ID: MRT4577_10004C.1
ctcacttgagagaatatgtggggcagctaattttggtagtaccaggaagcatgggaaaaagaatcagaagaaaacagctctatccaatctggtcaagactcttgaggaatgtggactatctaagcacaggccaatgagtcatgagtggggagatgagctggcagcaccaagtccattgttcttggagcagtcatatgattctgcacatttattacagcaaataaactctcagaaaatgctggaagatgttagcatcaatcattccacactattgaacacagataactggaagcatgcaaatcagcaatacttcaaatgtttagcaatgatgcaacaacttcgacaggtttctttgaaggttaacaaagatctaggtttggaagaggttaacaaggctatgtcatttatgagtcatctgttgactgtgttgcctgaacaacgacatcttgcttataatctatttgatcaacggaaccaattcaagcatgctattttcttattaggctctggaggaaagaggaaatctctatcatcaagccaaaatgtgctgctg

SEQ ID NO: 55 - DNA, 214 bp, Zea mays
  Clone ID: MRT4577_100050C.1
gggggccacacataaaaccggttttacttttttttgaacacaatttttgacccctgccgagaaaacgaagcgggttccggattacaggaacaccccttttttgacgtagccccacccccaccaccttttttcccttaggctcacacttttactcaccaaaaggaaggagtttccaagggccgggggaggggctcatttttgggaaccataaaaa

SEQ ID NO: 56 - DNA, 249 bp, Zea mays
  Clone ID: MRT4577_100051C.1
tttttctttcctcccgcatccccaaatccgcgggtgcggcgtcatttgttcaggggctggggatcgtcttataccttaactaaaatgatagagatcttgcacatccagggagggcaatgtggcaaccagatcgttgccaagtacttttaggtcgtgtgtgactaacacggtattgacactacaggttgcttcactggcactcttgaccttaagttgttgcgcgatcaatgttcactacaatgaggcctc

SEQ ID NO: 57 - DNA, 171 bp, Zea mays
  Clone ID: MRT4577_100052C.1
aagtctgcatagacaactgaccactgcttgcacgtttcgacagtctctgcactcggttgatcagcagctgagtctctaaatgagcccaccggcctcatctcactgtcaagcttacgcacatgctctccatgcgaaacttctacatcaggggcactaaggtgcgctacgtgc

SEQ ID NO: 58 - DNA, 1568 bp, Zea mays
  Clone ID: MRT4577_100053C.1
ggccggccggaaaaaaaaaaaaaaaaaaaagggtgttaattaaacacgttcccatcaaactaacaaccatggcgcaccaggatgccggtgtcggcggcaaagatcaccgcgagctgcaggcgcagcacaccaccgacaccgaggagctgctggcagcccaccgcgagctttggagccatgccctgggctacgtcaagtccatggcgctcaaatgcgcattggaccttggcatccccgataccatccaacgctacggcggaggcgccaccgtaggcgaactcgccgccgccagcaacctccccgcatccagcctccccttcctgcgtcgactcatgcggacgctgacagccatgcgcatcttcgcggtccaccgtgatgacgatcccagcgacgaccctgctgatgatgcagccgccgttgtctcgtaccagctcacggcgacctcccgcctgctcgtcaacggtggctcctatttcagcatacgcccaaacatttccgcccttgtccatcagggtgccgtctcccccatgttcagcatgagcgagtggatgaagcagcaccaccaccacgcgcccgacatgactctccacgagatggtgcacggcgaacccgtgtgggagtctttccgagccaaccccgcgatcagagcctggttctacgacgccatggacgccgatgcccgcctcgtcatgcacgtcgtgcttagcgagtgccctgccgtcttccacggcctcgcttcgctcgtcgacgtcggcggcggccatggcacagccgcggctgccatcgccagggccttcccacacatcaagtgtaccgtcatggacctccctcacgttgtcgctgaggctcccgcgggcactggactgtgcttcctcgccggcgtgggcgcgtgtatgcttcgattcgttctgtgcatctttctgcagtggattctgcatgattgggatgatgcgaagtgcattaagataatggaacggtgcaaggaagcaatcggtggcaaagaaaggggagggaaagtcattataatcgacaccgtgattggatctaggccaaatgaggaagatatgatacgcagggaggctcaagtcctgtgtgatctaggtatgatgacaacgtcgaacggagctgagcgagaggagcacgagtggagaaggatcttcctagcagctggatttcgtgactacaaaatcacagacacacgaggtatcccgtcaatcatcgaggtctatccatagtgagaattgagagagagagagagagagagagcatcttatcctatcctttatacgtataaatccttattaattgcaaaaaagctcaattctcagccttccataccatctcaagtggcattagtactagcagctagccatcagattatgttgtatcagcatcatcatcaagccattcattgtcgatcctctatctgatatgcgtcgatgtctgcactgttggaatacggtctgaattctgacatgagttttataaagatttgtttcatggactgcagtccgttcatcctatatatctcttataaatcgacatggaaagaaagatgacatcgttgt

SEQ ID NO: 59 - DNA, 588 bp, Zea mays
  Clone ID: MRT4577_100054C.1
aaagaaacagaagtaatttcgaatcattattccgctacgacaaatctgtccccgagcaggacattggagaaccatctggtctaaatctggaaaagaagaatgtcggggacaagcctccctgctcaagctgtgaagctaaaggtgccttgctgtgtgcaacgtgcgctggttcaggcttgtacgtcgactcgatactagagagccagggaatcatcgtgaaagtcagatgcctaggttgcggtggaactgggaacatcatgtgctccaaatgtggaggccgtgggcatacatgaacgcaaaagcttgcaccttgcagatcaaaggagttgactctatggagaattttctgtgttacatgttacggtgtgctgagctagctgctgtagctacatcgagacatgcttttattttgttcccctcattccgtgcttaaaagcatgatgcgtcataggatttcatgtgatgttgtaatcgtaaaggtgtaatggtatgtgaaagacacacttcgttcatggaggagaatgagagattaaattcagttgtgctagtactcctgtgcattaaaattttactcaaacgctctgcttc

SEQ ID NO: 60 - DNA, 828 bp, Zea mays
  Clone ID: MRT4577_100055C.1
cggggagtcccccatcttgcgcgcgcctccgctgctgcgactgcgagcccaagaaaaatttcctctacgagtgcatggaggtgtccgctgggctccggccgccgcccgtcgctgcggcagcgtcgctccttggctgtcggtccgcgtcggtgccgccgcgcgtggcggcttcccattcggtgcggtccgtgtcccgcgcggttaagatcagagcagctgcaattaacggcctccaaagaaacagaagtaatctcgaatcattattctgctacgacaaatctgtccccgagcaggacattggagaaccatctggtctaaatctggaaaagaagaatgtcggggacaagcctccctgctcaagctgtgaagctaaaggtgccttgctgtgtgcaacgtgcgctggttcaggcttgtacgtcgactcgatactagagagccagggaatcatcgtgaaagtcagatgcctaggttgcggtggaactgggaacatcatgtgctccaaatgtggaggccgtgggcatacataacatgaacgcaaaagcttgcaccttgcagatcaaaggagttgactctatggagaattttctctgtgttacatgttacggtgtgctgagctagctgctgtagctacatcgagacatgctttagaaggctaagttaatgaactatcctcttttactttttttttgttccccacttcccctcattccgtgcttaaaagcatgatgcgtcatgggatttcatgtgatgttgtaatcgtaaaggtgtaatggtatgtgaaagacacacttcgtacatggaggagaatgagagattaaattcagttgt

SEQ ID NO: 61 - DNA, 371 bp, Zea mays
  Clone ID: MRT4577_100056C.1
cccacgcgtacggcagcagcctaccactgtaccatccgaccgatcaaccaaagtaagccgggcgtaaacagccagacaaccggcactgactcactagctaggtgcaactggtacacaagccatcgtgaacgctatgtactgtgaatccatccatcctctcagtcgaccttcgaccgctagctgatctatacgacgtaacagactagcacgcagcagctaataatggcgctgggcctagcactgcgtacggttatgaggcgctcgggcagtaactactcgcgcgttgcggatgcagcactgcgcctctacgtctccgggtcgtcggctgcttacactgcgcagaaacggcagctcgacaactggcttatcct

SEQ ID NO: 62 - DNA, 219 bp, Zea mays
  Clone ID: MRT4577_100057C.1
ctttcaaccatgccctggccacggcaagggcgagcaagtgtggatctagcctgccgcagatggtgcgacgcagccccggccacgtgcggctctggcgcgagcgaatcctcggacgcggacggagcaccgagagcggtaacactgacgagcgagcaggcgccgctaaagaagcgcaacaccgtcgacttccacaggcgaatgaagcaaggccgttcgatg

SEQ ID NO: 63 - DNA, 219 bp, Zea mays
  Clone ID: MRT4577_100059C.1
ggtcccggattagcaggcccgccccgcccttcgctacaggcagccagggatgtatctggacggactgacgacggagaatctgggtggatggtcggggcaaaccactcttggttcttgaaaagggatgtggaatagaaaaacacaaggtgtggtgacggaaaaccatatataaattttggtgagataaaccaccacccctttttaggggcctttgggggg

SEQ ID NO: 64 - DNA, 281 bp, Zea mays
  Clone ID: MRT4577_10005C.1
cccacgcgttcgtccacgcgtatcgcggacgcgtgtggcgagttcctcgcgtaacacatagtattcggatctagttactacatatccgggccctaagacgactggtgtttccgccctcagcaagtttaagtacgttgttgcgctgggtgcgtgccgcgttcggttatttttgtatcgaaccggatcaggatgccaaactttaaacgcacattattttgccccattgtggcctatcccgaccgctgagcttaggcccgaccgcgtacatatctttatgatca

SEQ ID NO: 65 - DNA, 1327 bp, Zea mays
  unsure (1)..(1327): unsure at all n locations
  Clone ID: MRT4577_100060C.1
ccggccggatcggctttgctcagactctcttcacagatatttatatataacgagcgcagctagctatgatggctagagcctgacagaattgacaacctatagatagaggctaagctagggtgcgaaccaccggatctagatgagctaggcagtgagaatgacacgtttgagagaaaaggatccggctgtacaatcgctcataggtgtcgcggatgcggtggacggaggagctgtaccgcttgttcgtcgaggccgtctagtgcctcggtggccaggacgaatgaactccgaatagaattcttcagctgatgggcgcgaagggagctaccatatctcatatcaagagccatcttcagatgtacagaggctccatctcctgcagtagcagtacccatcatcagtccagcctccagaagtcttacatcaaccgctagcgagcaacaactagcgcgtgttcttcacgcgtgaagattgtgcgtcacaggaaggcaacgctccagcttcagacaagaacatctataccaccacgctccgtggttgcggccagtactcatcaccgtaccaaataccttcgctacagcaagtgttcacaagctgttaacaaaagagagggcgtgtttggagctccgacgtgctatcaacagagaaccggccgggtattaggccaagtcacactaggaagcacgagacgcagcagcacacgggatgcgacctcacgctgtcgatcgggctgtgggaggacgcgagcagcagcgacgacgccgacggctcgagctccatcagcgaggagctgctgcctgctccggtagcgggcggcgctcgccgcgtcgccgccgtagtgaaggaggaggaggagagcaagccggcggctctgaacctggacctgaccatctcgtcgtcctggctggcctgacgacgcacgccggcggccggctggcggtgttatgcgtacgtggccggcgtaggtacaaatacgtacatactatacgtggactcttgcagatcgagcagcagactgtgtgatcagggcatcggtactaggactgtatattttcgtgtcgtcctgcccactccgttctagtcactctttttttttcttattagatcatctgtacaacattttcgggtccgttcgattaggaacggccgcctgggcttcagacgacggtgggtgaggaatttctgcggccctttttccttgtccggngagaaggcgctgtatacctcagttcctcacatgtcatcgtctgatcgattgagcatatacagtatgttattagttctggcaaaaaaaaaaaaaaaaaaggggcggccctcgagctccagc

SEQ ID NO: 66 - DNA, 310 bp, Zea mays
  Clone ID: MRT4577_100061C.1
gggggtttagtacaatgatatggggttattccatcgactggcaaaatattagagagcagaaaccccaacggaggcgtgacttggcaccgcacaatgttctgtggagcataacaccatcgggagacaggggaactagccttatatcctacacaatcgtacagaatgggtgcaacaaaatggcaggcacctgatgacactgggaaggaacaaaatcttaaacgaaagtgatcggcagtaataaacactgctactggcagaaggtccgttcctgtgaaactcaagcaaagattcttgcagggcgtacactgac

SEQ ID NO: 67 - DNA, 522 bp, Zea mays
  Clone ID: MRT4577_100062C.1
ttttatttttttattattctcttgttttcttctgttgtttccctgccgaaccaaaggccttagaattaactggtatagaccaacgggcttaatgcttcttgcacaagcccggttcacgacacaagcaccaggtgtggtggggcaaagattatacgccgtcttggcaggcccaaccttgagctcctaccggtggtggcatacagggcactttcgctggcaactaaaagccggtaaggggctgatgatcctgataacccggcacactggaacattcagcctgacttgttcttgggaaccccccaccccaagacccctggttcgacggccttatagcgctcaggaacaaagtgagatgaactgcaccgttgacggtaaaaaattaaaaaaaatggccgccgtttaggaccccaccgatcttggccacccgcctgggggcattccggttttccccccccaaggtaaggaggccatttggggttttgcgggccccgggggagcggtcggtgaaaatttttttgggac

SEQ ID NO: 68 - DNA, 887 bp, Zea mays
  Clone ID: MRT4577_100063C.1
ccgagtggctctctccttgtgctgtggcggcggcggcgcccggctctgctcggacggactccatcgaaggcgctcggctcccctcgggctgcacctgccacggccggccctctgactgcaccgacggtgcccgccccccctcggcatccaccagcggtgcccggctccaaggagcactgctgtgaggaaggccatccattttgtcaacctgcggacagctggaaggtctagtggaaacctggctatgaactccgtaccgaaaccagcacttgggtccgaaacatcttggagggaggattttgctgtgggggataaggatgctgtggtcattgttgatcatgggtcaagacgccaagaatccaatctcatgctaaatgactttgttgagatgttccgggcgaagactagctatagtattgttgaggctgctcatatggagctagcggagcctactataaaggatgcttttggagaatgtgtgcaacaaggagcatcacgagttattgtcagtccatatttcctttcccctggacgacactggaagcaagacattcctgctttagcagcagaggcatcaaaggagcactcaaatataccctatattgtcactgcccctcttgggctgcatgagcttatggtggatatcatgaatgatcgcatcaagtactgcctgcgacatgttgcgggtgatgtcgatgagtgtacagtgtgtgctggaaccggaaagtgccgcctgtactcctgatggagcatacctgggaggcacatcgatactgttaccatttattatgagatctggagaatacgagatctgaccatattctgagcagatcgtcagaattgacaagtgcccaaattagtatgctgtgcatgcttgcgaacatcaa

SEQ ID NO: 69 - DNA, 838 bp, Zea mays
  unsure (1)..(838): unsure at all n locations
  Clone ID: MRT4577_100064C.1
gggtacctcgaggccggccctctgactgctcgacggtgcccgccccccctcggcattcccagcggtgcccggctccaagtccccgccgccactccgaccgtcctctagcagctccgtccggtggtccggccagctgcctagctccctccgaccgtccggccagcaccgcctcctgctcgcggtctcgcccagctcctccgccctccgctgagacgcagatcttggtgcggcagggcaccacagaggctgtgcgtgtgctggtggcctggtgctagcaaccgaggagcactgctgtgaggaaggccatccattttgtcaacctgcggacagctggaaggtctagtggaaacctggctatgaactccgtaccgaaaccagcacttgggtccgaaacatcttggagggaggattttgctgtgggggataaggatgctgtggtcattgttgatcatgggtcaagacgccaagaatccaatctcatgctaaatgactttgttgagatgttccgggcgaagactagctatagtattgttgaggctgctcatatggagctagcggagcctactataaaggatgcttttggaaaatgtgtgcaacaaggagcatcacgagttattgtcagtccatatttcctttcccctggacgacactggaagcaagacattcctgctttagcagcagaggcatcaaaggagcactcaaatataccctatattgtcactgcccctcttgngctgcatgagcttatggtggatatcatgaatgatcgcatcaagtactgcctgcgacatgttgcgggtgatgtcgatgagtgtacagtgtgtgctggaaccggaaa

SEQ ID NO: 70 - DNA, 544 bp, Zea mays
  unsure (1)..(544): unsure at all n locations
  Clone ID: MRT4577_100065C.1
cctctcctcgccacgcctcctcctccagtcctccctttcgtcgtcgcttccctccccttcccgttcgaatcctctgaccaccgcagagcctcccccctgaggaaaccctagcgcagccgccgaccgccgccgacccgtagcatggcgtccccggcccggcccgtcgccgcgtccgtctccggcgccttcggcctctcgcccgaccccaagcgctgctccttcgaccaggcgctccggcacaaggagcggccggttcgttcattgctcgttgccggggatgggggtgcaccgtgctgccttgttctggtttgtgccaacggttgcggggttatcgtctgcgttgcgtgtaactgcggatatggatcttcgttggccgcttttgaagcctagggtttgggttctgccttttcttttcctggttattctggcccgttggagtcaaaggagtggacgagttagccagttgaggtttctcgtttgtatcggncgacttttttatacaaattcgtggggctcttgctaccactagggtagcatgccaatt

SEQ ID NO: 71 - DNA, 911 bp, Zea mays
  Clone ID: MRT4577_100066C.1
aattcggcacgaggctcaacacaagcgccccccctcgccgcagtcccgccgttacatggcccgctctgttcccctttccggcgcccgcgacggactgcgacgagcggatagatagatctgtgccccgtccctgtctcgccatcctcctttctcctcctccactccctatcgactatcgagcagagcgaatccttagcggggaagtctttccgagctcagggagtggggtttaaaacgcggctcgacgaaaggaaggccgcactcgctgctgctgctggtcgcttgctttcggtggcgagcgtctcggtaaagcggcgtcggcgtcggaggcggcggcagagactggacttgcttgctccttgctgcgcagtgtagtgctgtgctaccttggagacaggatcctgccgcagggactcataattgatcagtgtgccccaacataagagcgaaacgtgactgagtttgccagctcccccttcatccactgtggtcgctcgtctgctaatgcccgcatcggaggattgctcacggatatgcttctggtgatgggcaacccggggcgctcgcggcagttgtcagcgctggttgcttccgccgccatcttgctgtcactgtctgcgttgccaatttgtcggccctacacctacgagcaagatgtgtttgcgataaacggcttgtacacggcacttggagcaccacagctgcctaattggacttcaaatggtggtgacccctgcaatgaaggctggcaaggtgtttcatgtgtagcatcaaatataacctccataattctcagcggtgcaaatttaggtggacagctgggcaacactttggggaattttacatcattaatcaccttggatctcagcaacaacaatattggagggaccataccagatggtctaccactc

SEQ ID NO: 72 - DNA, 1573 bp, Zea mays
  Clone ID: MRT4577_100067C.1
cgaaacgtttcacgtgagcaaacctgggcgtattcctctctctttcctcatcctcatccgagtggctctctccttgtgctgtggcggcggcggcgcccggctctgctcggacggactccaccgaaggcgctcggctcccctcgggctccacctgcgacggccggccctctgactgcaccgacggtgcccgccccccctcggcatccaccagcggtgcccggctccaagtccccgccgccactccgaccgtcctctagcagctccgtccggtggtccggccagctgcctagctccctccgaccgtccggccagcaccgcctcctgctcgcggcctcgcccagctcctccgccctccgctgagacgcagatcttggtgcggcagggcgctacgggggcggggtggtgctgttgtgcgtgtgctggtggcctggtgctagcaaccgagggccagtggccagtgtccagcctgccagctcagcccggcggcaagcgcccagcggctggctcgggcagcggccagtggccaacagccgacaaccatacctcgtttcttcggcgtcctccgccactgccccccagctatgcaccctgttccagtcccctcccagccctttaccgcaactcctgcaaaaaaacttgtttcaaggagcactgctgtgaggaaggccatccattttgtcaacctgtggacagctggaaggtctagtggaaacctggctatgaactccgtaccaaaacccgcccctgggtccgaaacatctgggagggaggattttgctgtgggggataaggatgctgtggtcattgttgatcatgggtcaagacgccaagaatccaatctcatgctaaatgactttgttgagatgttccgggcgaagactagctataggattgttgagcctgctcatatggagctagcggagcctactataaaggatgcttttggaaaatgtgtgcaacaaggagcatcccgagttattatcagtccatatttcctttcccctggacgacactggaagcaagacattcctgctttagcagcagtggcatcaaaggagcactcaaatataccctatattgtcactgcccctcttgggctgcatgagcttatggtggatatcatgaatgatcgcatcaagtactgcctgcgacatgttgcgggtgatgtcgatgagtgtacagtgtgtgccggaactggaaagtgccgcatgtactcctgatggagcatacctgggaattgtttctggagaatacgagatctgacgagtgtatatctaggtccgctgtgtaccgtgaaaccaaaagcttgtacagttcattctgaacagatcgtcagaattagacaagtgccaaattagttatgctgtgcatgcttgcgaacatcaatagtgatagagattcattagctaatcttgagtttatttacataacgaacaaactcagtcaagtgctctgatatttccattcacatgtaatctatattcctgctaccttgtagttgaattagacttattgccttaacatggatcaaatgagaatataatgtaaaaaaaaaaaaaaaaaaaggccccta

SEQ ID NO: 73 - DNA, 176 bp, Zea mays
  Clone ID: MRT4577_100068C.1
gcgggggtttaacgcaacgtgatgccttcaaccataggggcggtaactggggaacggcggttgtttaattacgcctggggcccaggattttttgccggcgacgagcacctgccagctgcaggggtatgggaatggaggtcgttgggactattccaccaccagctgaggtgaaagta

SEQ ID NO: 74 - DNA, 3782 bp, Zea mays
  unsure (1)..(3782): unsure at all n locations
  Clone ID: MRT4577_100069C.1
cctcgtcgcagtcccgccgttacatggcccgctctgttcccctttccggcgcccgcgacggactgcgacgagcggatagatagatctgtgccccgtccctgtctcgccatcctcctttctcctcctccactccctatcgactatcgagcagagcgaatccttagcggggaagtctttccgagctcagggagtggggtttaaaacgcggctcgacgaaaggaaggccgcactcgctgctgctgctggtcgcttgctttcggtggcgagcgtctcggtaaagcggcgtctgcgtcggaggcggcggcagagactggacttgcttgctccttgctgcgcagtgtagtgctgtgctaccttggagacaggatcctgccgcagggactcataaccctcccggccccccgcgcggccgcccccgcgtcccctctccgtcagccgtgcctttcgctgctacgttgcatatagtagagcccgtgtttgcttgggaatgggcggattgctttgttgccgtccttctgcatcccccgcacccggcggcactgcggtctgtacacgccttaattcgttatgaagcacctgaactctgttcagtgggaacaagatgtgaacggattgttttttggtaaagagatgttaagcggacgtcctcgattgatgcacgtaaacccaatcgagaagcgaaatcacgaactgaacaacatctagtacgatgggccacttctcaactctatgatattgatgccataacgaagatggttgatccttccattcgaggactatgttctgataaggcattatcccgttttgatgactgtgccccaacataagagcgaaacgtgactgagtttgccagctcacccttcaacgacggtggtcgctcgtctgctaatgcccgcatcggaggattgctcacggatatgcttctggtgatgggcaacccggggcgctcgcggcagttgtcagcgctggttgcttccgccgccatcttgctgtcactgtccgcgttgccaatttgtcggccctacacctacgagcaagatgtgtttgcgataaacggcttgtacacggcacttggagcaccacagctgcctaattggacttcaaatggtggtgacccctgcaatgaaggctggcaaggtgtttcatgtgtagcgtcaaatataacctccataattctcagcggtgcaaatttaggtggacagctgggcaacactttggggaattttacatcattaatcaccttggatctcagcaacaacaatattggagggaccataccagatggtctaccactcacaatgcagagatttttcctttcagctaaccaactaagtggtagccttccaagtacattgtcatcccttacacttttgacaagcatgtcactcaatagcaatcatttgactggagcgataccagatgtattttcagcactcactggacttgcaaatttagatttttctgataacaatttgaccggtccgttgccaccttcaatgggaaatttgacatcattgactagcctacatattcagaacaatcaaatatctggaactcttaatgtgttgcaagatctccctttccaagatttgaacgttgaaaacaaccttttctctggtcccgtgcctgtgaaattactgaacttgccaaacttcaagaaggatgggaacccattcaatacaagcatagctccatctgcgcagcctcccatcgcgccaacaccattaccgtctatcccaccttcgtcagggcatgtcccctcaaaagaacctgcacattcttctagtgttccaggtggtagtacttcaggatcaggaaaacatactacactcaaattagttggatatattcttattggagtggtattagcagtagttcttgtgctaattgcaatgtactgtttatccaagtacaaagaaaaaaggtcgagagatgatatttatatgaaaaacaagataggaagggtacctcagaagcttggagagcctaaaatcaaggagccaccattaaaactcaagaataatgctgagaaagcttcgaatgttgtttctgatggaagagaggagcataagttaaaagtgccaacatcagaaacttcaaatgtggtttatgatccaagtccaagggatgggcagaacttagattcatcaccgacagctgtacctttggctgttacaatgaataaaaaagagcatgtgattgatatggaaaaggctgataattttgttgaggaccaactgcatcctccgcagccaatggcactgcggactgaaaaagtcactgtcaatcccagtgtacgtacaagaaggggaagagtaccttcagttgaaaaggtggaatcgacgactactgtcaagtccttttccattgcatcccttcaacaatataccaatagtttcagtgaggaaaatatcataagagacagcaggtttggtaaggtgtatctggcaaagcttcctgatggagagctactggaaattttgaagattgactcttctaactcaaaagtgccagtagatgcctttcttgagctagttgtgaggatttctgaactgaggcatcctaacatacttggtcttgttggatactgtgcggagtttgagcagcgattacttgtctatgagtactgtagcaagatgaccctacatgatgaacttcgtcatgtggatgactcaagcaagccattatcgtggaatgctcgcctccaagttgcttcagaggcagcaaaagcattgcaacatcttcatgacggttgccaaccaccagttgtacaccagaattttgaaccctctgttgttctgctcaacagcaccttagttgtgcatatttctgaatgtggccttgcatcactagcatcaaaatcagtttctcagttgtctgtacacaccttattccattatgaagcacctgaagtgcatgaatctggatcagtaagcgatcgaagtgatgtttacagcttcggtgtagttatgttggagcttctaacaggacgtaaaccttatgacagttcgtatccacgagctgaacaacatctagtacgatgggccacttctcaactctatgatattgatgccataacgaagatggttgatccttccattcgaggacaatgttctgataaggcattatcccgttttgctgacattattagccgctgcattcagcatgaaccagaattcaggccaccaatgtctgaagttgtccaagacttaactcgcatggtaagtaatgtatcaagggcttccatgtaggctatcccttaaacaatggtaaaatgtggaggtccgtccttatagaaattagaattcgaggacgcacctcgttctggagcttcttgctagattcagttctctctggccatgattcaagatgcctttgacgaccattgatgcggtagtaggatattttggccaatgcaaaatgggtggaacacagtggcaggatgcagagactgcaccacgttttgtccactgccagtaatgctcctctgaatctctggtcaatttatagttcaaagctattgttgtaattctgtagtctgcactctgcacaatatatttcttagtgcccagttccagatcacgtggtgtgattatgcgtggttatctagaccatatgtaaataccaagaagttaaacaaatgtattatagcgtgcttgtttgaggaatgagaaagtacatcttcttactcctcactttattatttgatttgttaaatgaaatgagttggtccatcaaaaaaaaaaaaaaaaaaaaaaaaaaaaccgaggaggnggccggta

SEQ ID NO: 75 - DNA, 253 bp, Zea mays
  Clone ID: MRT4577_10006C.1
cgacccacgagtacaaactactaccgcaagttcttttacaagctcttctatggacagttcacactggcccatgtggatgagttaatggacgaggctcttaccattgattactcatgtgattcagccatgcctttcttacagcaaagataccttcttgaagcgtctgaaactctgttaccgacaagaacttcactctacgacgattatgactaataagaacaagacaaggaggaactttctacggaaattgatg

SEQ ID NO: 76 - DNA, 208 bp, Zea mays
  Clone ID: MRT4577_100070C.1
atacagtaaccagatacaaaaggaacgggatgctataaaactcttttgacgaataatacattttttttgttgacacctatcaacctatactacaaggttcagtacatctagctttaaataaccattattgcgtctagtaagctgcatgattgatgacttgcatgcatactaaggctatatatacgaacaaaatttgataatttacata

SEQ ID NO: 77 - DNA, 368 bp, Zea mays
  Clone ID: MRT4577_100071C.1
cccacgcgtccgcccacgcgtccgcactaatccaagacaaaacatggctgtgaatgtgagaaccatgtggtcgtcgatgcgggctcaggttgcgatggttgtggcgttggtgttcttggtgagcggagcatggtgcgttcctgataaagggcctccaggtaagaacatcagggctacctatggcatggactgcctggtcgctacagcgacatggtttggcaaggttactgatgccggacatgaccataatggtggcggatttggatgcgcggacgtgaataaggccgactggactagtactggcacatgccgagtccatggtcattcaaaggatgccttgtgccgtgattcctgcttcgagatgatct

SEQ ID NO: 78 - DNA, 625 bp, Zea mays
  Clone ID: MRT4577_100072C.1
ggccgcttttttttttttttttttgcttccttggttcaaccaggagattactccaaaacacaaaccaagagtagatgaatttcctaaaacgctagcgtttcatacccccgagggtgtctaacagaaacgctagcagattgaatgaaagtatacagtcaccacaacaatgacacgatggcaaggtctagccaccagtgtcacaaatattggtgactattatcaccaaacacaagctgaggactctctttcaatccctgctacatactgaaagacatacaaaaagtgaaaaaaaactaagagttggaatgaagttcaagagggattttcagccctactgcctggccaaccacggataaccatgccggtaaatattgcaccaagatgatccttatcagtcgcttcagtttcttcgagaagtagcttcatccaaccactggttgcacaggggtgcagggccagccatggcttgcttaaatgggggtgctcctcttgagtaataaacgtccactttgatggatcagatttctggcttgggatcctttctccgcggagaaggcatcgcaattgcgcacagtgtaatagtagtcgatcagctggggaaagggtcctcatttcccccggcagg

SEQ ID NO: 79 - DNA, 109 bp, Zea mays
  Clone ID: MRT4577_100073C.1
tttcaaaacagaaaaggccggtgtgctttttctggcctccgatccaccggcgattttagtactggaatcaatggcaaagaaaggaaatgagctcagctcagctgctgtg

SEQ ID NO: 80 - DNA, 481 bp, Zea mays
  Clone ID: MRT4577_100074C.1
agcagtggtaacaacgcagagtacttttttttttttttttttttttttttttttggactttcttcgaacgaaatgttttgaaaaagttttgatattgcacgttgtatcttcatttttcccacataggtttttaaatgggataccaaagaaatcacacctattattctctaaactcatctatgatctttctttcccaaaaggatacatatgtatgtttaaattgaacaataatactcgaatcaggaacccaactgtatcagtcgactaggagttgaaacagatccgcacgcgtttaacggggctgatttgcccattgcaacatgaaaaaatattcaacaattcaaagattcacttcagtcatttaataattgatgaaatatagcagttacaaacattcaagtatttgatgtttacttagtcaaggcacgctgcggaagagcttgatagctactactttacttagtactctctccgtttcttt

SEQ ID NO: 81 - DNA, 131 bp, Zea mays
  Clone ID: MRT4577_100075C.1
ccaatcccacccaggcccttgcaagagctgcagtcgtgcaacaaaagcaggagtgggatcccagaccccccggagtcccgcatcacagactggcagggagggaaccgagatgtgggcggtcgtgccggtgg

SEQ ID NO: 82 - DNA, 246 bp, Zea mays
  Clone ID: MRT4577_100076C.1
taggagcagaatgataggtcataacttaaaggcattggtgataacactatttcggtcaatgatacgcacatggtaaactgaattcggcatagctactgtgcatataagcatatctgtgattaatgcttatatctggatggggatccctgttggaagccagtctttgcagtacaggttaagctccatttctcaatcacagttctgtcattttcatctgtgggagataatgaaatctgattcagattt

SEQ ID NO: 83 - DNA, 474 bp, Zea mays
  unsure (1)..(474): unsure at all n locations
  Clone ID: MRT4577_100077C.1
cgcggctgcaaaacgcgtttccccgncttctcccaatnntccttcgcgcccggccgcccgcttctcacccgtnaccgacgcaccaccatgnnagggagnntgcatttgcgatccacaatcgnggccaggcccggtattccaggtacggnaaacgcgtgnctgggnnagctgtacnntgccttgagcatgngcagttcaggctgacggtacagatgcccggtngacaanngactcattgggggagggtgcatgatgcnnntttcaacacctnntcttcagtgagaacnttggtgctgggaaaagcacgctgccnnccgtgctgtnnttttgttgacccnnntgaacccacnntgtcatcgatgaagggtgaggaaactggctacctatccgccagcttcntttccaccctgnnagcagctcatnncagtgggaagggaggnanntgcagccaaccaaactttgnncccgtggtca

SEQ ID NO: 84 - DNA, 909 bp, Zea mays
  Clone ID: MRT4577_100078C.1
aaaatggacaaaagaatgttcacccaaatggctcgacgagaaatatacaaagttttacgaactagtcgctctgatttttctttatccatttgctgggcatagttttggtattgattagggttttccataattagtagtttaaaaccgctttgacaaaatactatagttgttaaacttcttttttctctttatattacaaggtaatagaaaaatatttattaacttttatttctaaatagaactttagcaaaaatgtttaatgactagtatttacctgacagaacccggaaccaaggtcagttatcacaatcagcaactacagatcaaacaaaaatcccggcaggtcattacccgcttagcggagatcgacttgctagtgctctttcccggcgtgcagttaaccgatgtggcgatcgccgttttgatggatcagggcattgaaaccatttttttgcggcgggatggtcaatttcggggccgtttacaggggcagtttgccaccaatcccctcacccgcattgcccaatatcgggtgctggactccacgtttggcacagccttagcccaacggttaattttaggtaaggtgaccaatcaacgggccatcctccaacgtcgtcaccgagacacggggaaaaaaaataatgccctggcggaggcgatcgacctgattggggcctatcgtttatcattgcgctccggtcttggtaattcttcccgagatcaattaatgggcattgagggcatttgtgctaaacattactatcaggtttttcaattttgcctaccggaaggctggtcttttacggggcggaatcgtcgtccccccaaagatcccgtgaatgcgttactcagttggggctatggagtgctactggctcgggtattttctgccatcgtccaggcagg

SEQ ID NO: 85 - DNA, 364 bp, Zea mays
  Clone ID: MRT4577_100079C.1
acagcacggaaaaaaacgatgattcacatcataaacacgctgcgccgcggagcgggaggcgatttagtggttacaaccatagctaaactatttaataatcactttacaaagctcaatgcgcacaaacattatatgctcgacaagcttggcgaatcttttgcttccaagccatcttctgtgacctcacaaatacaggacgtgcctatctctgatcctcatcatcaggaacagtctcaaatattctctgaactacccatgggatatttttatcctaatgcaacaccatgtactcttgattgcaaagtcacaattcacaaaacctaccctgctgagtttacttgatgaaatttatcatccctaaaac

SEQ ID NO: 86 - DNA, 700 bp, Zea mays
  Clone ID: MRT4577_10007C.1
ctcgagtttttttttttttttttttttttttttttttttttttttttttttttttttttttttttttttttccaaacaaaaaccaaatccgttttttaaacctggaaaaaaatttcccgccccaggattttcccaaggttgcctccaggggcgttcggcaaaataccttgttttttttggggggaaaaaaccagggatccttttttaaaccccaaggaaccggttaaggttacctaccaccaaaccccccagggggaccggacctttggggtctccttggacaaaagaaaaggggtgccccccttttaacccagggtttccaaaaaaccggcaaaggggggctgaaatttcctaacccagaacccaaagaacagggttcccaaaaggccggaaaacccccagcctttttccaaagttggattggccccccaattttcccccctaggggccataatggaaatcctggatttgaaccggcccaacacccatcctaagccttttggttccccccttttaaaaaacaaaaccccccccgggcctgggaaaacggaccccaaaaattttttcctaaaaacccccttttatggtaccagccccggaaggcttaattacccccaagttggggggggggcccaaaaagggtggccccatttttaaagaaaaaaaatttttcaaattttggggcctcccaaatttttaa

SEQ ID NO: 87 - DNA, 456 bp, Zea mays
  Clone ID: MRT4577_100080C.1
aaacgggccaacaaaaaaaaaaaaaattaaaaaaaacccaaaattataacccgggacggggggggggagaaatcccccttgttattaaaaaaaaaataaaaaataaaaaaaaaaaaacaaaaaaaagggggggaaaaccaaaaaaacatttatttattaattttaaagggcctggaaccccaccaaaaaaaaaagggggggggccaaaaaaaaagttgggttttttttgtaacccagggccaactttaggggggtaaaagggcccggggggggccccaaaaaacgggtgaaaacccgggaggcggcccctggggaaattgggggaaacttgggccagttttgggagggaaaacttccggtttgggtaaaaaaaaggccccccccccggggtaaggggcggacccgggggccaccccggaaattccgggaccgggacctgggggggaaccagttttc

SEQ ID NO: 88 - DNA, 1090 bp, Zea mays
  Clone ID: MRT4577_100081C.1
aagatcatgaaaagacctggttcccaatgggaagagctaaagattcctcgcaggtaatataccactgtcgcccaggcatatccatgtacgattgaggtggacagtggactggttattggcaagaaataaaattacgaaccattataaaatctgacaaacattgcccctcttgtttcagcattcaatcagttatctgcctgaacctgccaagcttctctggaggattgaatccatggggaacaccttacgttgacgatgggcttatcgaggttgtcggcttccgtgatgcctggcatgggctcatcttgctggctcctaatggccatggaactcgtctagcgcaggtggaaggaactagtctgctctgtcagcactcagcggctcggcacacagtgcgcctaactaggaaaggaaactgaagatttggtgatgagtgtattttggtttcaggcccaccgaatccgtttcgagttccacaagggagcagccgagcacacgttcatgaggatcgacggggagccatggaagcagcctctccccaaggaggacgacaccgtggtggtggagatctccaacctccgtcaggtggccatgctggccaacgacccgtgcaggtccaagagcgtgaacgagccgtcctccccgtcgtgccacggccatgaggacgacgacagcaacagcctggaggacgaggacgaggacgagtgggaggacgggaggaagaagttcggtgcggcggccaccttcaagatccccgacgaggtggacatcgctcatctcagttagaacctagaaaccccgccggctgcttctgcgtcggttggtggtgctgactgctgagtctgtgcatttcagagtgtttgctgcttgctacagcctacagtgctactgctccctttttttttgttgttttttttttttggttgcctccacgagctcagatttcagaagctaaccactgctgttggtgaaactgctcgttatgatcccccattgttctgtaaattttcaagttttagcagccatgtgtatttcactggctgataatttttttgtgtgctacgtaatttgaaacgtggaaacgacttgt

SEQ ID NO: 89 - DNA, 2580 bp, Zea mays
  unsure (1)..(2580): unsure at all n locations
  Clone ID: MRT4577_100082C.1
tcgccgggttgaaacgttgttatattccttacatgatattggtcatttaggttattgtttggtgggcgggtctcatgagaggtgttgtgtctattgtgttggcttacaataaggttaatcttgtgtttggtctatctggtttgagctttggtctggaattatgttactgcttttgtttcctctatccattccaaaacataggacattttttgttgtcgtaagggaaaaattctctaactttgacagagtttatagaaaaacaaaccaacatcaacagccttcatttcttaatcttatatagaagttgcagtattttagtctaatagatggacatgttttaaattttgaggcattgaaacaatttgcatcatgaaggcgttcgacttaatgtttccaaggttctgtggcagtgcgaggcattttgggaggtggtgagcgcctcgcttggcaccttcattttcgtgatgatgctgtccttcaggctgcagtgccacacaagttcgtttggtgtaggtgctgcttgatttttggcggtgcatgccgggtgttcgacaatgtttctgaggttttgtggcagtgcgaggcattttgggagggacatcatcatgcccaacttgaagtcgtccgtgaccacaacagcgagcgcggtggagtacatggatgaagtattgaaggcggtgtcgtcaggtagtaccttcttcccactcatgacactacctcgtagcaaacaagtctagatgttgttgttacagctgttcaacacgggcaaggtgctgttttccaatgtggtcgtcgacggcggcatgttcgtcttggccctcctcacctaccgcagcttcttcgcggcgccatcattctccctgtccgtctgattttctatcaggttgctcgatcgtcgtcaatataatccgtgtcaacaaattttaatcttggttcataagtaaagaacagaaaaggaaaacctagatgtctataattatacgtacatcaaatctaatgattttaggtacatattttctgtttgccattgcaaaatctaatcacgtgaatttatcagttccaatcggggctatgtctatgtactcttatttttgtccagaacccttatgtaaggggaagtggaaagaaatggattggcacactgctggatggatcttcctcaatacgtttatcgaccgccgccgccgacgacggaggagcagcacctctcgtctgtccaccgctgaccgctcgtttgtcagcctagcaccggggtgcatgaacgcccagtatatgctacagcaccgccgcccctggccctgccgcctgcgccggtcgttgccctgtgcactccgcgggcctcgggaatggccaaccaggacattgatagttggcatatcatcatgaggatgtgaattccacaggaaggcccatgtgatcctattgctcccttagatcttccacattcgttgcatgctttccaccgcgtatcagcttgtgactctctcaatttggagggataccacacattccgtggaggattctggaattattttagcttgggaatggatgcacaagtatcctatgaattccactctgaaaggaagagaaatccagagaagttcagacaccagctaagaaatcagggtacatatgctaagcttggatttaagcattccctaaaccatctttcatcgaggaacatttctcaacttgcaaaggtgaagatcatgaaaagacctggttcccaatgggaagagctgaagattcctcgcagcattcaatcagttatctgcctcaacctgccaagcttctctggaggattgaatccatggggaacacctggcactaggaaagcacaagacagagacctgactgcaccttacgttgacgatgggcttatcgaggttgtcggcttccgtgatgcctggcatgggctcatcttgctggctcctaatggccatggaactcgtctagcgcaggcccaccgaatccgtttcgagttccacaagggagcagccgagcacacgttcatgaggatcgacggggagccatggaagcagcctctccccaaggaggacgacaccgtggtggtggagatctccaacctccgtcaggtggccatgctggccagcgacccgtgcaggtccaagagcgtgaacgagccgtcctccccgtcgtgccacggccatgaggacgacgacagcaacagcctggaggacgaggacgaggacgagtgggaggacgggaggaagaagttcggtgcggcggccaccttcaagatccccgacgaggtcgacatcgctcatctcagttagaatctagaaaccccgccggctgcttctgcgtcggttggtggtgcggagtctgtgcatttcagagcgtttgctgctactgctcccttttttttttttgtttttttggttgcctccacgagctcagatttcagaagctaaccactgccgttgatgaaactgctcgttatgatcccccattgttctgtaaattttcaagttttagcagccttgtgtatttcactggctgataatttttttgtgtgctacgtaatttgaaacgtggaaacgatttttggagcggnag

SEQ ID NO: 90 - DNA, 2090 bp, Zea mays
  Clone ID: MRT4577_100083C.1
aataagtgtagttagcatagtggtgtaagtgctatattttaaacttggtggtcaaagttcgagtcttggtgatcattattttaaaaaaaaaaaaaaaaaaaaaaaaaaaaaaaaaaaaaaaaaaaaaaaaaaaaaaaaaaaaaaaaagaacggaggtccttttcttctttctcgtctgcttcctccttccctcgtcgtcctcgcgtcgcctccttcggccctccctattaatacctgcctcctcacaaccaggtcctgtcctcggggagccgaatccacacggaccacaccaaaggacgcgggggacgccccggattcttcggattccaggatggaactacacagaaatagcactaatggttcctgcctcagtgcatgtgggccactgacagactactacattcctgattacatactgaagccggcctatgaaccggtcactgttgataatgtgccatgttgtcctgtggtagtcttcatcaactctagaagtggtggccaactgggaagcagtctgataaaaacataccgtgaacttctcaatgaagcgcaggtttttgatctctcagaagagtctcctgataaggttctacatagattatacagcaactttgaaaggctcaagtctagtggtgaccatgttgctactcaaattcagaagagcttaaggctaattgttgctggtggtgacggtacagcaagttggctgcttggagtagttagtgacctgaaactatcacatccacctcctgttgctaccgtacctcttgggactggaaacaacctccctttttcatttggatggggaaagaagaatcccgctactgaccaggcagcagtgaaatcattcctgggtcaagtaaaaggagcaagagaaatgaatatcgatagctggcatatcatcatgaggatgcgaattccacaggaaggcccatgtgatcctattgctcccttagatcttccacattcgttgcatgctttccaccgcgtatcagtttgtgactctctcaatttggagggataccacacattccgtggaggattctggaattattttagcttgggaatggatgcacaagtatcctatgaattccactctgaaaggaagagaaatccagagaagttcagacaccagctaagaaaccagggtacatacgctaagcttggatttaagcattccctaaaccatctttcatcgaggaacatttctcaacttgcaaaggtgaagatcatgaaaagacctggttcccagtgggaagagctaaagattcctcgcagcattcaatcagttatctgcctcaacctgccaagcttctctggaggattgaatccatggggaacacctggcactaggaaagcacaagacagagacctgactgcaccttacgttgacgatgggcttatcgaggttgtcggcttccgtgatgcctggcatgggctcatcttgctggctcctaatggccatggaactcgtctagcgcaggcccaccgaatccgtttcgagttccacaagggagcagccgagcacacgttcatgaggatcgacggggagccatggaagcagcctctccccaaggaggacgacaccgtggtggtggagatctccaacctccgtcaggtggccatgctggccaacgacccgtgcaggtccaagagcgtgaacgagccgtcctccccgtcgtgccacggccatgaggacaacgacagcaacagcctggaggacgaggacgaggacgagtgggaggacgggaggaagaagttcggtgcggcggccaccttcaagatccccgacgaggtggacatcgctcatctcagttagaacctagaaaccccgccggctgcttctgcgtcggttggtggtgctgactgctgagtctgtgcatttcagagagtttgctgcttgctacagcctacagtgctactgccccctttttttttttgttttttggttgcctccacgagctcagatttcagaagctaaccactgctgttggcgaaaaaaaaaaaaaaaaaagcggctgctcgttatgatcccccattgttctgtaaattttcaagttttagcagccatgtgtatttcactggctgat

SEQ ID NO: 91 - DNA, 1864 bp, Zea mays
  Clone ID: MRT4577_100084C.1
ccggccgggaaccagccgacaacccaagagttgcagaacctctcgaacggaggtcctgtcctcggggagccgaatccacacggaccacaccagaggacgcgggggacgccccggattcttcggattccaggatggaactacacagaaatagcactaatggttcctgcctcagtgcatgtgggccactgacagactactacattcctgattacatactgaagccggcctatgaaccggtcactgttgataatgtgccatgttgtcctgtggtagtcttcatcaactctagaagtggtggccaactgggaagcagtctgataaaaacataccgtgaacttctcaatgaagcgcaggtttttgatctctcagaagagtctcctgataaggttctacatagattatacagcaactttgaaaggctcaagtctagtggtgaccatgttgctactcaaattcagaagagcttaaggctaattgttgctggtggtgacggtacagcaagttggctgcttggagtagttagtgacctgaaactatcacatccacctcctgttgctaccgtacctcttgggactggaaacaacctccctttttcatttggatgggggaaaaagaatcccgctactgaccaggcagcagtgaaatcattcctggatcaagtaaaaggagcaacccacgcgtccggagaaatgaatatcgatagctggcatatcatcatgaggatgcgaattccacaggaaggcccatgtgatcctattgctcccttagatcttccacattcgttgcatgctttccaccgcgtatcagcttgtgactctctcaatttggagggataccacacattccgtggaggattctggaattattttagcttgggaatggatgcacaagtatcctatgaattccactctgaaaggaagagaaatccagagaagttcagacaccagctaagaaatcagggtacatatgctaagcttggatttaagcattccctaaaccatctttcatcgaggaacatttctcaacttgcaaaggtgaagatcatgaaaagacctggttcccaatgggaagagctgaagattcctcgcagcattcaatcagttatctgcctcaacctgccaagcttctctggaggattgaatccatggggaacacctggcactaggaaagcacaagacagagacctgactgcaccttacgttgacgatgggcttatcgaggttgtcggcttccgtgatgcctggtatgggctcatcttgctctctcctattggtcatggaactcgtctagcgcaggcccatcggatccgtttcgagttccacaagggagcagcggagcacacgttcatgaggatcgacggggagccatggaagcagcctctccccaaggaggacgacaccgtggtggtggagatctccaacctccgtcaggtggccatgctggccagcgacccgtgcaggtccaagagcgtgaacgagccgtcctccccgtcgtgccacggccatgaggacgacgacagcaacagcctggaggacgaggacgaggacgagtgggaggacgggaggaagaagttcggtgcggcggccaccttcaagatccccgacgaggtggacatcgctcatctcagttagaatctagaaaccccgccggctgcttctgcgtcggttggtggtgctgagtctgtgcatttcagagcgttgcatttcagagcgtttgctgcttgctacagcctacagtgctactgctcccttttttgttttgttttttttggttgcctccacgagctcagatttcagaagctaaccactgctgttggcgaaaaaaaaaaaaaaaaaaggggcggcaaaaaaaatcccccattgtt

SEQ ID NO: 92 - DNA, 291 bp, Zea mays
  Clone ID: MRT4577_100085C.1
ggtaactcccattgaaacttaaaaacagagcttgggcggagctgttgagttgttttgtctgctagactgggagacagtgattgcggcaagggggaaggagaaacttccggacggaattttttttcatccaaaaaacacccggcaacggggagcaagatgaattgtttaaagcacttggtttcaccaggccggtaaaccattttgcatccacccggacttggggtcgactcggggcccctccaggcaggagaccagccaccgttttttctcctcctactacttctccttttc

SEQ ID NO: 93 - DNA, 121 bp, Zea mays
  Clone ID: MRT4577_100086C.1
cgtgttcacggctttcatcatactgttatactagatccaaagtattcagacggcagtcagcgaagttatccaaagccagctgtgtatcaggtgtgtgccctggcccacatagattttaggg

SEQ ID NO: 94 - DNA, 319 bp, Zea mays
  Clone ID: MRT4577_100087C.1
tataaagtgaaattttttttctaggttaatcatctctgccggtttttaactaatcttgcctaatataaacatctaaattttcaaggatatttctaatgtggacttaatattctctgatgacatccattacatgtttatcagctgacaactattcacgttgatttgacaggaaaaccaaaatccaggaatggcatagctgcctccaacttcaagaatttaaaaaagcaaaggtttaaaccttctgcactctcaacacgagcagattttctatactaaactgactatcacacaattttgtgctaatatcgcttgagacatc

SEQ ID NO: 95 - DNA, 136 bp, Zea mays
  unsure (1)..(136): unsure at all n locations
  Clone ID: MRT4577_100088C.1
aaataactttttgcgccnccatancagcccagggggcttataaacccgagcggcagcacgaccatgtttaaagagaacctccatatccacattctagctattagcaccacctacactcatacaatcggcacctata

SEQ ID NO: 96 - DNA, 525 bp, Zea mays
  Clone ID: MRT4577_100089C.1
cgtgctgcagccgcaactgtcgatgaccgatccagatgcaagtgcggtaacgagattcgggaaggtctcgaccaaggatgctaccctggcacgatgggctgaaccagggtggaccatcccaccacgccagggcgtgtccattcagtgggatagtcgctacctatcacaaggggacacgccgagggcggcttccatgccgccgcgcaatatccgccggggcatgaccccctacacagcaagtgccagggggacttccctaatctgacagactgaatagactacccaacggggcacgctgtgtggctctcttacaaatgttgcggcgacgcccgcgacacgcgagaagtacgccccgcagtgcctctgctacatcatccaacagacgcacacggggtcgcaacacaagtagcagtacgctcggtactgctgcttacaagcagactaataactgctgcccgccgcctgcaacctccccaactccaacaagtatctctgcatcaccctgctgaacctaaaaccatgctc

SEQ ID NO: 97 - DNA, 152 bp, Zea mays
  Clone ID: MRT4577_10008C.1
ctcattcacatgcacattgcgcactctatcactggctactgaggagaaccgccatacccacgccgatgtactaacggcacataccgactatgactggtcagtctttattacctgactcccctgttaatgaagtgcgccgtgtagctagggat

SEQ ID NO: 98 - DNA, 306 bp, Zea mays
  unsure (1)..(306): unsure at all n locations
  Clone ID: MRT4577_100090C.1
gctgaccacccgcccgccgacacacacaaagggggccagttaagcaaggaaccccccgatcccccaccgggaggnccgccgcccggaactcggggaggccgccgcgagagccgcacccggcaacgaggcagacaggaggccccggcaggaggcagccggaggagaggacagccagccggagaagaacgcggcgaccaaggagccgaggccggagcagagggccgggaaggccgacaaggacgccgacgagcacgcgaacgggccgaccggcagcaagggcaacccaacccgcgcgcgcgggcacca

SEQ ID NO: 99 - DNA, 233 bp, Zea mays
  Clone ID: MRT4577_100091C.1
gaccacgcgtccgcccacgcgtccgcccggttccgcgtgcctttccccacctaatctcgcggctctcgccaaccagttcaagggttccggtcccgggttgctaaaccgcccccgccggcaatttcaaaccaagggggaaaggcaaaccccttaaagggcccaaaggccacaagaaagggtttcaacaaacaggtcttggacatctgcagaagaaaaaagattaggaaaaagca

SEQ ID NO: 100 - DNA, 771 bp, Zea mays
  Clone ID: MRT4577_100092C.1
cattgggtacctcgaggccggccgagaggcccacgctttgttaacaaagaattccctcatatgcgccgtcgccgccggcggcgttcatctcgctcgagaggtgatgccaccgatgaactacgcgagatctaatgatagagaatcgcttttcacatcctggggtctgctgcgtgtgtgagtgtttcgaaaggcacaagctcgacatctgggccagatccgcgaggaggctcgcgcactgcctcgttgcacaactagatcctgcaggaccaatgcgcccactgttcgagccgaacgatgtgatcaacagcaccgggagccccgacaagtactgtagcccccaccccaagaccggcgtggtcgacccggcggcggtggaccccaagctgaacgctggtggtgctgcttactccgactgggatgatgcacgtgctcatatcccgtatcgataccgcggtctagaccgctcgatgacttttcgagacactcccactcctaccagatccccctggcctgttgatttcctgataatctgctgcttcctcatacttgctccctggagacatccctcctccatctccaacgctgcgctctgactcacctgcaccaatgcctgttcttactgctgctgatgatcccccgacctcagctatcgggtttgagggctatgataagctccttgaaatcacattctctgacgaacctgactttgtggacccccatgtcagcggtttgcgtgccgtctccaggtccagaatgactctgttctggatc

SEQ ID NO: 101 - DNA, 235 bp, Zea mays
  Clone ID: MRT4577_100093C.1
agcagtggtaacaacgcagagtacgggggtggtgacacttattttcagtgaccttttagtacttctagactagtcatagcacagcaccaaaactttgcaatacaaaatcttacaaaaattatgtaaaccatattcatgcaagtcccaatgcatgtagtatagatgcacagtagttacatagaaaaaaaaaaaaaaaaaaaaaaaaaaaaagtactctgcgttgttaccactgctt

SEQ ID NO: 102 - DNA, 311 bp, Zea mays
  Clone ID: MRT4577_100094C.1
actagtgcgagattaatatgcttattaggatgagatggatccatgaagataagacggaatctcttgcggttagcaagatctattaggatatgatagaatcttattgaaataagatggatctattaatattagaaagactattgtctgataagatgggtctattgaaataagagagaatcttttaagaatagaaggatctatatgaaatagatgatctccgctgtttaggtatcttatggactctatctatgattatatgtatatgcacatgtaattatggacattactccacaacccatcacactcaatta

SEQ ID NO: 103 - DNA, 179 bp, Zea mays
  unsure (1)..(179): unsure at all n locations
  Clone ID: MRT4577_100096C.1
tgtctgatcgttctggncggaaagagcgctgcaggtggtgtgcgtgctcaacgccgccttcggcctcctcaccgcgctgtccccgaactactgggcctacgcggcgctgcgcctcctcacgggcttcagcgcggggagcgtgggcgtgctggncttcgtcctggccaccgagcccgtcg

SEQ ID NO: 104 - DNA, 204 bp, Zea mays
  unsure (1)..(204): unsure at all n locations
  Clone ID: MRT4577_100097C.1
aacaaacgggccatctatgcagnccttacatacaggggaaccaatcctatgtgtttagaaaacggaagctaaggaagatcacagttcaaaaaaagatccaactagccatcagaatcttcatcatcgctgggctgtgcggaaatttcaaactctccatcactggcataagcgtggataggagcatcacataattgttttgggccg

SEQ ID NO: 105 - DNA, 203 bp, Zea mays
  Clone ID: MRT4577_100098C.1
ctgactcgtgggaaaaaaaaataaataaactaataataacacgacaaaaaaaacctagacaaggaaaaaaccaaacgaataaaacaaagaaactactgaaccaagaaatacaacgggcggcagccttacaaaatccatgctgacgtactctttcatcaaccgtgatagtctccggtagtcacgctcctaaactcaaagttctt

SEQ ID NO: 106 - DNA, 384 bp, Zea mays
  Clone ID: MRT4577_100099C.1
tctgcgaacattaatagagggtagagcagactaggatccaaaatatacccgacatactacccatgtttctggttgtgaagcaagggagtaatgatggacggagcgatggacgtggcggcagtggccgccgccgtgctcctgtgcctgcatctgcccctgcatgtgccagggcaggtgcaagtgcagttctacaacacgagctacaacaacagctagtccatggtccaccacgtggtgcccaaggcgttggccaacgacttcggcatcgactccggcctcatccgcctccttatccaccactttttccacaagtgctgcgatacgtgctggcatgtgtacctgctcaacaactctgccgagaatgacgcgcagcccaacaacccg

SEQ ID NO: 107 - DNA, 922 bp, Zea mays
  Clone ID: MRT4577_10009C.1
ctcgaggccggccgggaacgcttcgcccgtgatgcgctcaacccccggctgagtccaacgccgccaccgtgtcggcacgagggtcgcctccccttgcaccgcagtccggagaccgggacggccccgccgtcacagccggcggtcgagcggaagggtgacgagacccgacgaggctccgtaggtggtaggccccgtcttcctctacgtcctccctccgtctcgagaaccagatgtccgagctccgcaggcggcaagccccttcttcctccacgccctcccctcaccggcgcgggggagcaccgcctcagcccggccctgctctccgccctccgcttccgcccgccgcgcctccccgggtgcgtcgtggatctggagacctgcaccaccacggcatgcgacgactaccccaaccaccgtggatccacgctgtctccggcgccgtcgacccgacaacacctcgtctctctctatgtgtttcgtggggtcactgtgctgaaaatcaggaagaccccaatggttgtgtcaaatccgaaagaagttttagactctagagtatgaactgaacccacttgaactggagtttccaagaggagaggagcttctttacttgattggaacttggttctcttattaatatgatcatcttcttctttgctattcgatttgctgttccaaggaaagatttactttgcagaagagcctgtacggcggtcagatcgacacatggaggaacaaccgcgagctcctctcagcaagcaagctttctggtatggagctgaacgacactcttccaagtctgacgatggacttgagcaacactacttgcacgattcaattccttacagctgccatcaaaccttacctacctatgatgactaatggtttgtgcatgcttcaagtttcaactatatatctactactc

SEQ ID NO: 108 - DNA, 270 bp, Zea mays
  Clone ID: MRT4577_1000C.1
tacaggtacagcacggctgtctgctatactagcctaacgttttggatcctgtgatcccgtgctggcggtcatcgtcagggcggacaactactacatcgaatgcgagccgatcgtggacctggaccaacggtagcgctctactgagacacagtcctacgaagatctctatgacaacctctgcgactgcggcgattggacccgcagccgctacacggcccccgtccacgtggactacgagaaggcggacgatcatcggcaagccccgcaagc

SEQ ID NO: 109 - DNA, 299 bp, Zea mays
  Clone ID: MRT4577_100100C.1
aaaactcatacgacagtctacaaaatcagttttaaaacatcacgacaaagacaaaaaaggtgctatgctaggtcggtacaaagcaccacagaatggtgctgcgcgacatactgcaggggatcacgaatccggcgatccgtatgctggccactaatggcagcaatgagcgcatctctgctctcatgtacgaggatacccgaatcgtgctcgatatgctacttgataacgtcatgcttgactccatgacctacaccgagcacgccagtcgtatgaccatcaccggcatagatgccaactac

SEQ ID NO: 110 - DNA, 1449 bp, Zea mays
  Clone ID: MRT4577_100101C.1
gcagccataaaatgcctaacaattcaggtgattgtcatgtagtgggtttaaacacaagatgccacggttggcatcacaaaggaaatacaatatcatgcaaaggtgaaaaaacaaacaaacctgcaaagtcaggcaaagaagatcggcaagcctctcgagggtaacccttgcatagtacttggatacaaccaagatattctgaagagagcaagagatcagattcaatggacaagcatagagcaaaataactagaccaaacacaaagtaaccaatacatgttcgataatcctcagcctcaaatcttctgaagctttggcacccaaagctcccccaagatccttctccttctcatattcctccttgaagaattcccacagacttgtccactgtatcacctccatggtgaccagctgcttcagtaataacctgaaatttgggatttctgaaaggtttttatcctctagtgtagcattgagaaggcttgattgcataggatcatgaggtgctagcaccaagtaccaacagatcttcctaagaatcggtatccactttgttggatcctcttttattgctggaatatcataaatagccttgtaacaacggcagatttccaagtaatcattgttgtgagagtaataacgaatcatcagttcgtagtagacgcgcttcaattctagaagggaaggaatatctgcaggagcatcctgaacaatactgtcaccttcctttggtttctttttttcctttgatggatctgcgtcaaatactctagtactgattttcctggataaaatttgtgctctgacaaaatcttgccgatccaggcatagccggacctgctcaagaatgaaagcaattttctccgtctttgccatagagccaaatgtttcaacagcaacttcttgcatcaaatcagcagcctcgtaaatttgtccctgctcctctttaatttttgcaagccttttgatcaatcttgctctctctatctcaacatagattttgccagcagagacactgctcagtgtttttattagctcgatgcttgtgtcaatgcctggtgtcaaatcaatgtactccattgctttctgaaccatagcagtaatagcctgcttaagctggcctctcctcttagataggagaacgatctggtcgtttagcgtcttccacgcgccggccttgtagcagagctcgacgatgtcgatgacggccttccgagtgccggcgacatctccggccagcctcatctgcttctcgacattcaggagcgactctatcgccgcatcaaggttggtaccgtcgccctccatggtcgggatcgcggggaagctgcggaggaggagacgggtgaggcggcgaggagatctattggacaaactgcgaggacatcaagtctcttctcctttctctcccacactttgtaccgccgctgcttcccagtccgataacaac

SEQ ID NO: 111 - DNA, 354 bp, Zea mays
  unsure (1)..(354): unsure at all n locations
  Clone ID: MRT4577_100102C.1
caacccaacaggacacacagacgcngaccaagncacacnngcnnnccacaccgcacacaaacccacaaacgccngcgcttgcnaccggggggggggggngcaacacnngaccngaangaaagcnaccgcngcngnggangggcgggggcaaaggcgaggngagcccagaccccgcnccgnacccccangcgcacacccaccccgaacaccaaaaaccgcggaggaggaagagcngaaaagcccgccaaccagagggaccaagagcgagcgccggaaagaaccagacccccaggcgccggcccaggaggacaaaacaaaaagaaaaacgacaagaacggcaagacgaggaacggg

SEQ ID NO: 112 - DNA, 483 bp, Zea mays
  unsure (1)..(483): unsure at all n locations
  Clone ID: MRT4577_100103C.1
tcgagcggccgcccgggcaggtacaagctttttttttttttgttcttaccattagggcacaacagctgcagcaactcgtgctacctcagatcaaccaagtaactttggcaaacctttctccatactctaagcaacaacaattttttccattcaaccaactgtatacactgaaccctagcgggcatctacaagagcgtctattacggtcgaggccgctggctacggccgactgtcagaggcaaaaaattgttgtatttgtaacaaagaggggggggtggccacagactgttagttgtagggcaaaaaccgactctgctttagccagaagctgaacaaaccggcttccttcttgacacaaaaacaattggtgtctttctaccagcagtttgcgggtaaccccgcaaccctcttacaactacaacaaatggtgcgctttgtccaacttgctntgacagacccagcgggccttctaccaacaacaca

SEQ ID NO: 113 - DNA, 1670 bp, Zea mays
  Clone ID: MRT4577_100104C.1
aaaaaaaaaaaaggggcatctacttttttttttcaggactaggtatctgattgcagatctaggaatccgaaaaatattcagcgagtcaaagcaaatttgcggggacactggccgtgcccaacaacaacaaaaaaccccccctcctgttacggtaactcatgaacagcacgggtttcaaaacctaaaccaaaagagttaaacttttaacgccgtcttgtggatcatggtctctttatgtatctcgtggcagctcttctcaacgaggtccagaagcttctcaaggctcgtggcccatgagttcagtgtgccattgctgtcttgggtcgtccggaagctgacaactcccatcggcctgtcgatctttgccactagagatttcgagttaaccatgtctgagagatgcttctctgcctcctgcaaagtcaggcaaagaagatcagcaagcctctcgagggtaacccttgcatagtacttggatacaaccaagatattatgttcgataatcctcagcctcaaatcttctgaagctttggcacccaaagctcccccaagaagatccttctccttctcatattcctccttgaagaattcccacagacttgtccactgtatcacctccatggtgaccagctgcttcagtaataacctgaaatttgggatttctgaaaggtttttatcctctagtgtagcattgagaaggcttgattgcataggatcatgaggtgctagcaccaagtaccaacagatcttcctaagaatcggtatccactttgttggatcctcttttattgctggaatatcataaatagccttgtaacaacggcagatttccaagtaatcattgttgtgagagtaataacgaatcatcagttcgtagtagacgcgcttcaattctagaagggaaggaatatctgcaggagcatcctgaacaatactgtcaccttcctttggtttctttttttcctttgatggatctgcgtcaaatactctagtactgattttcctggataaaatttgtgctctgacaaaatcttgccgatccaggcatagccggacctgctcaagaatgaaagcaattttctccgtctttgccatagagccaaatgtttcaacagcaacttcttgcatcaaatcagcagcctcgtaaatttgtccctgctcctctttaatttttgcaagccttttgatcaatcttgctctctctatctcaacatagattttgccagcagagacactgctcagtgtttttattagctcgatgcttgtgtcaatgcctggtgtcaaatcaatgtactccattgctttctgaaccatagcagtaatagcctgcttaagctggcctctcctcttagataggagaacgatctggtcgtttagcgtcttccacgcgccggccttgtagcagagctcgacgatgtcgatgacggccttccgagtgccggcgacatctccggccagcctcatctgcttctcgacattcaggagcgactctatcgccgcatcaaggttggtaccgtcgccctccatggtcgggatcgcggggaagctgcggaggaggagacgggtgaggcggcgaggagatctattggacaaactgcgaggacatcaagtctcttctcctttctctcccacactttgtaccgccgctgcttcccagtccgataacaaat

SEQ ID NO: 114 - DNA, 286 bp, Zea mays
  unsure (1)..(286): unsure at all n locations
  Clone ID: MRT4577_100105C.1
gccggccggttccgggtcaaaataccntggtgggcataaataatgagaatgaaccatctaatcctacaacgacaatgatgactgatatttatgcagcagcagcatctattgctaatacaaaagaaaactaaattgatatcacaagaatacccctttcctttcactgatcctattccttcttttctctcatactcaaaagttttaaattcctcactttctttttgcttacccattctttttattgttaatcactgtaaaataaaaaaaaaaaaaaaaaaggccccta

SEQ ID NO: 115 - DNA, 279 bp, Zea mays
  Clone ID: MRT4577_100106C.1
cccttcctgacccggaaaaccgtacactcgctatggcgccggcagctgcgcctacctggactccatgctcaactgcagcttgtccaagtggcacccttttccggttcttggaaccgggttcttggcccggcggacccttgtgggctttcttcttcgcgccggctaacttttcaaggattcaaccactttaaccgggccttgtgccaacacaaacatgcagtccgagggcatgatgcaagatttcatcagcaaaatctcgtttggggcttaaaggtagga

SEQ ID NO: 116 - DNA, 343 bp, Zea mays
  Clone ID: MRT4577_100107C.1
aagcgctagtaagagtacaacatgagtagtactgagacttctggtgcacttcagcttctgttgacatgaaaacatcaagttacaggattttgatattacaatacgttgtttctgtgttcgacatcattgatgatatcaatcgatcctgtgacaagttactgatctcggagcttccactgtatatgcaacaaattaggccttatggtcggatgtcctctgctcgtgtcagaataccattggtaacactcccatcacgtgagactgccaatgtccaaaggtacatgacatgagctaaggtgtactgttgtctttgctgacattgttgttagaaccctaagatgtc

SEQ ID NO: 117 - DNA, 204 bp, Zea mays
  Clone ID: MRT4577_100108C.1
caattattggttggggtgttaccaccatggggaaacaaagaatctcttggacttattatactatcttccaaaatcattactttaacaagagttttatttattatactctcgttgctagtactttgtttacctctcataagagcatacttattacacttctgtttgtattcttaatggagctctttactttcaggaatcttacat

SEQ ID NO: 118 - DNA, 265 bp, Zea mays
  Clone ID: MRT4577_100109C.1
ccttcttttttttttggtcttgattttttttatatatgtttcctttttatctttttcttaaacctggcgcccatgaaccacaagccaccgtattaattgtgaaggggcccatgcaaaagagcataaaatctcaaaaacagcggtcgataagcagaactcagaggcttcaccttatagtgcaccgcgccttaggtgcccacagagctccgagagacttaacaatatcttgtgaataacaaacaaaacactggcgggggggggcaat

SEQ ID NO: 119 - DNA, 263 bp, Zea mays
  Clone ID: MRT4577_10010C.1
gggggaaagacaaatttttttttgattttttaatttccgggcaaacacacccttccaaaattttacggccaaaaacccttttaagcccaaaagatttggaatgggctcccgaaacatacaggggggcttactgggctttgggaaggtggaaaccggtctttttttttttttccaaggaaatttctcccttggtaaaaaccgggggcaggtggaatacaagggggggggagataaatgcttttttttcgggcgcgcgggggggc

SEQ ID NO: 120 - DNA, 380 bp, Zea mays
  Clone ID: MRT4577_100110C.1
gcgcgcctttctttttttttttttttttttttttttttttttagggggggatgtttttttttgtttgaaaactctttttttgccccataaacccttggttttcaccgaactaaatccatagtaccaagaatacaatgggggttgggaaataacattacagctaaaaaccgttttgaaacaacaaatgaactaaaacgctgcataagttacactggcctggtgagacttgtctgcatggcacaaggaacaaaggaaagagcgccaaaagagactcttaaagggacgcctggctgtttactagaagccaccaaagcgagaaagggtgccatgaaacaaaaaaaacccttttggagaaagcccccaaggggtcttcatattgc

SEQ ID NO: 121 - DNA, 428 bp, Zea mays
  unsure (1)..(428): unsure at all n locations
  Clone ID: MRT4577_100111C.1
ggcgcgccnntcaaccttattacttctccaagtgcgtanaggtccttccgacggcgtcttcgggcggcgggcccaagggcgcgggggggccatcctcctacagggtggtcatcttgccccactccgcagtggcctttggtggttcttatttttagacgacacccctacccaacccgatcggggggagagcacgagactccaggtccatccatcactgcaaaagccgacactacccatgaatctcggcacctgctcccccctttctctctctctcaaaaggtgctggtggagccctctctccttttttctaccaccaaccatggatgaggcgcaaggtggggaggtaaagggtggaaccattttcgttgcttctggattttgttggtattaggaagctgttcaagacacggatcacaaattttttacaa

SEQ ID NO: 122 - DNA, 402 bp, Zea mays
  Clone ID: MRT4577_100112C.1
ccggccgaaatcttcaagctgcacacctgtcttcagcgagtgagtgggtgaaaaattatctgcggagaccagtgttcatctctcacctgccatggtttgcccatatgctgaatggcgaccatatgataggaattaaaccacctcgtcgaaactggaatgatgaaaacaaaatgaaatttccgaatcacgttctgatcagaaagctgctacaacgtctggaaatcaagcggatgtatgtatctaactaaagggtgtaaagaagtgaatagaaactcctcagtgcgaatgagtaaagaggcggtgcatgtaaccacttgcaagtgtttttgagagaaatgtatacacttctgggatagcgtaaagaggatgaatcttataagggtggttggtctaaaaagaaaa

SEQ ID NO: 123 - DNA, 1430 bp, Zea mays
  Clone ID: MRT4577_100113C.1
ttgggtacctcgaggccggccgggaaacgaatcgaactagcaccaccacatcagcggtgccgcctcatcttccttccctctcgtcatggcgcaactcccttgccccgccgccgccgccgccgctaatgtagcggccgggaaagaagagactaccacctgggaggacgcgctggacctggatgactccgacatctgcttcgttccccctcccctcccctactcattcgacgccaccgcctcccagccccagcaggacaaacccccgcaccctttccaccaccagccccaccgcatccccggccccactgccgccgtccaggacacgattcttccccgctccgccccccgtccgcctctctcatcgagacgcggggacgccgacttcctgctgcccccgtggctctgcgctctccagttccttgggaaggaccgcgcgtgggaacggccggggatcaggacgattaaggacaacaaggaattgattcgagcacctttggtggctggggtggtgacgttgtgcaggccaaacgggctcggagatctcttcttggttctaaaggatccaaccgactcaatcggtgcttcagttcacaagaaagttcttttggaggagaataatggccatgatatctcaattgggtgtgctgttgtttttattaaggtagctgttttccgtccgtctgacaagttgtgctacctcaatgttaccaaaggaaaagtgatcaaggtttttagtaaaaattgtgctgccccagctaagcaagtgatttcaccaaatactgctgaaagaagtcaaggcgaagattctgccagcaatacaatgacgagaattttaggtcgtgaagacatgatgcccagtaacgagatgacagttactgatgtttctcatgaacacagtgcaacacctgattcaactaattgcacttcaacgtgggatatttatggtaggtttagtttgggaagtaacaaggaagataaattgctggtaggagatccacataacaagcatacatcaagctgcagtactgatgggcatccccagcaaaatttgagtattccaaacactataggttgcttctcaaccccgaaagaaaatgttaataccagcagcggatcacatctcaaacgcaaaaaggttgtatcagaatggacagatgagcagctttctgaactgtttgctgactactagcattgtagtatatatctgataaacgagttgttagatttctagaagtcaatgtattgcagttatattactgatgtgagctttgtaagaacttgacaagttttgtacagttgcacctatagcatctagagctgtgtatggttgttgtccagctcacttttctgaaacggttgtcatgccggtctttcattgtaacaattttatgaatctgccttctgataattgaactaaagataattgtgtc

SEQ ID NO: 124 - DNA, 283 bp, Zea mays
  Clone ID: MRT4577_100114C.1
cctcgaggccggccgggactgacgatctcgcatggtctccctctgctctgcctgtccgtcaccgtcccttccttctccgcaccatcgccatcccgcggcgtgctcagaaggaggaacttcaccgtgtgcggctctctccgctaggccaccgtcaccggctccgcggcaatggctgccagcgccctgctctgccagagatgacatagcctcaggaggcgcctagatggcgacaggcgacccggcgtcggcgtcgagcaaaggcaagtcatcggcgacgaagcct

SEQ ID NO: 125 - DNA, 334 bp, Zea mays
  Clone ID: MRT4577_100115C.1
agcatctctcaaaccgggtaaaattaaaaaccaaactgggggtctttattggttatacatatattatggactaattacgaggaccatgggcccccaatgaaaaaaaatggacccgttatttcgttacttttcccaccaaaacccgagggcgggggggagaagaagaaaaattttggcaggcaaacaatttgggtgggcccaacacaaaaaatttcccacgggcaaacacggggtgtacccctgaatgttcacggcgttcaaaaaaggtagcccaagacacacccggggaagggcccaacggtaaccgccggggcggtcatggacccgggggact

SEQ ID NO: 126 - DNA, 451 bp, Zea mays
  Clone ID: MRT4577_100116C.1
gttacagcctttgcctggaaggaccaagaagaagaagaacagtatacgtgccacacaagccaagagaagatggggcgcgggaggacggagatgaagaagatccagaacgatgtgtcacggcgggccaccttcggcaagcgccgccgcggcctgctgaagaaggcgcacgagctcgccgtactctgcggcgtcgacctcggcctcctcgtcttcgacgacgacggcgccggcaagctgttcgactactgcgcccctaacacaagctggagcgagctaattgagcgctacgagagcatcaccaaacaccagttccagttccagggccaggggatacatcatgatgatcatcagcagcaaccgtcggcggatatcatcgcagggctgaggcgtgagggtgaccatctggaggccagcgtgacgaggcagaccggagaaaacctgtcatccactg

SEQ ID NO: 127 - DNA, 309 bp, Zea mays
  Clone ID: MRT4577_100117C.1
ctccaggaaaaaaaaacttccccaacactcaacagatggggcttaggggtcgtgtcggcaccatattcaaacacctttgggaatcgaaaacacaatcttttttggcctttttccaaaccctctttaagggggtgcccaaaattgaaaggctaatttgcaatttttggaactgctaacataaccctggggtcgaaccaaccccacaaagcttgggtctcccggaatccgttcttgccataacttttaagtgggccccagacgaaggtgaaaaaaaaaaccggcagttaacgaacaggcacgtttcacatt

SEQ ID NO: 128 - DNA, 725 bp, Zea mays
  Clone ID: MRT4577_100118C.1
ggtgccggattcccgggatgacttgaactgcaaagattttactatgtagtggaacctcaagggctgggggtgatatagtagtaatgataagaaacaatttttttttttgcttagtgtactgtctgtccatttcactgctgtcagctactcagctgtttggcatcagagaaacgtcctttaaaatgttcactgtgctagctacaaatacaaggctgaattggtatgtatgtggaatgtgccaagttggtatctttcacttctaacgagatttcctaagcagatggtgattcccttctttatgtttgcttgtccttttattttcagttaacttgaacttaggtttagtttgtccacaagcctgagactttggctatttaggtttttccgttaacttttcgcgaatgtggaatgagataggaaaccttgtttgttaggcttaataattttgattacaatcatgtgaaagttttactgaaaattgaattgttctttgataaacctcagggctgcatgattgtcaggaattcctcgtcctccagaacttgtattcgtcagtggacaactgaacgggtcagtcggtctttgtaaatttagttgggcattagttgaagtccgtgtacagtatttatcttggccaagttgatgtagtttagttgaagtcagtgtacagtatttatcttggccaagttgatgtagttgtggtgctaattatattcagttttgat

SEQ ID NO: 129 - DNA, 448 bp, Zea mays
  unsure (1)..(448): unsure at all n locations
  Clone ID: MRT4577_100119C.1
cccactcgtccgaccacgcatcacgccacgcgtccgcaggctcatcacaccaaccaacaagatgaaattgcgcagtactgtcgtctccgccctgaacatgtccgggcccgaaacggaccgcaaggtgctgcgcaacggcatccagaagagcaccaggacggtgatgcgcgacatcatgcagcggatcacgaagacgcgcatccggaggctgatgcaccaggacaccctgaagcgcatctagatgctcatgtacaacgagacccgcgacgtgctcaagaacttcctgcacaacctcatgcggaacgccgtcacctacaccgagcactcacgccttaagaccgagagccgcatggtctacggctacgcgctttagcgctaccgccgcaccctctaccgnttctgcggctatgcctgccgtgccgcgcttaggctgctctgcgggtctgga

SEQ ID NO: 130 - DNA, 850 bp, Zea mays
  Clone ID: MRT4577_10011C.1
caaccgccactgcccgtgatgcgctcaaacccccggctgagtccaacgccgccaccgtggtctctgcagagtcgcctccccttgcaccgcagtccggagaccgggacggccccgccgtcacagccggcggtcgagcggaagggtgacgagacctgacgaggctccgtaggtggcaggccccgtcttcctctacgtcctccctccgtctcgagaaccagatgtccgagctccgcaggcggcaagccccttcttcctccacgccctcccctcaccggcgcgggggagcaccgcctcagcccggccctgctctccgccctccgcttccgcccgccgcgcctccccgggtgcgtcgtggatctggagacctgcaccaccacggcatgcgacgactaccccaaccaccgtggatccacgctgtctccggcgccgtcgacccgacaacacctcgtctctctctatgtgtttcgtggggtcactgtgctgaaaatcaggaagaccccaatggttgtgtcaaatccgaaagaagttttagactctagagtatgaactgaacccacttgaactggagtttccaagaggagaggaggtcacaaagcttctttacttgattggaacttggtttctcttattaatatgatcatcttcttctttgctattcgatttgctgttccaaggaaaggtatgccataagcctatgatgactaatgttttgtgcatgcttcaagtttcaactatatatctactactctataaggacccaatgtgggcatccacattgcttcatcgtgcctccgccattttccaacgcccgccattcacggctatggaaagcaccattccaaaatccttc

SEQ ID NO: 131 - DNA, 173 bp, Zea mays
  Clone ID: MRT4577_100120C.1
cccacgcgtccgcccacgcgtccgcggacgcgtggggtactgttcacgctgacttgtacttgctcgtgcgtcacgcttgtacttttatcttctgtcaaaccaaaggtacatttgtaattcaatattgtttatatttttccatgataatataatgaggataaattgacagtgct

SEQ ID NO: 132 - DNA, 295 bp, Zea mays
  Clone ID: MRT4577_100121C.1
gtcctgaacttactctgtagaccaggctggccagacctcaaactcgagatccacatgcctctgtctccagagtgctaggattaaaggcgtgagcaccattgcctggctccaaattgggacattgtttaatggtgggaccttgcaggaccaagggctgggttacagttgtctttggagttgattactaactgtgacagagaggatttttctcataaaaagattttgggctcagtgtcttttgtaagtgcctagatatgtaagctggctgtgcacagaaagtcttatgatgacggtg

SEQ ID NO: 133 - DNA, 688 bp, Zea mays
  unsure (1)..(688): unsure at all n locations
  Clone ID: MRT4577_100122C.1
ccggccgggcccatcaaacattcgagctccccccgcctggacgcgcctacgacaaggcgactgccgccgccgaggccgccaacgacgaggttgccgccaaatcctccacgacgtatgtcttcactgcgacggacacgctcacctaagacgtccctggatgtcggattcgccggcggaagcgcagcccccgcgatcgtcgaggacgacgtctccgccccatcaaccgcggagccccgtcgatctcgctggaattgtggctccgatcccatccggtctatttgctcgcacacgcaagagtgacccggattaggcccgcccgcctcctcaaccgccacctctgtccacgatttcgtcgtcaaggatgcgagcggtcgtagacctcaccacctacaagtaaggggaaggttcttatcatcattaacattgcatcccactggtatgaatcatctgaagcagaaccttacctaaccttcttactattgtcatttactcatcgtttggcccattggaataatgtatcaataaggccgttggtgtcttctactacctggaatcatttgttcctgcttgatataaaataatgcttttatttgtgtttacttatttcactgtcagacatagacatnctttgtttacactatttagaaaaacattattttgcaaaaaaaaaaaaaaaaaatttgcggcc

SEQ ID NO: 134 - DNA, 210 bp, Zea mays
  Clone ID: MRT4577_100123C.1
cgccaccgcccgctgggaggtgaatagaaatcgtgtgtatcgtagggttgcgcgaatcgccgtctccagcaaccaatccccaaccctcgagctatctaactatcccgatcccgatctcctaccatggtgtccgatgccagcaagaagaaagccgcgcagaagaaggccgccgccgccgcaaagaggggagccaagtccagcgccgctgcc

SEQ ID NO: 135 - DNA, 434 bp, Zea mays
  Clone ID: MRT4577_100124C.1
cccaactgagcggtaaggacattaccgagctcattgctgcaggcagggagaagtttgcttcagtcccatgtggcggtggcggcgtggctgtcgcggcagctgcgcctgctgctggcggagctgctcctgcagctgaggcgaagaaagaagagaaggtggaagagaaggaagaaagtgatgatgacatgggcttcagcctcttcgattaagctgtgttgtcatcagagtattcttttgagtcgtggaaccagaggaaaatcatagtcatgtttggagactttaaccttgttttatgttggaaagtacttgaaagactcctgtctttttatgtggtaattcagctgtaggttgctatgctggttggggtttccaggtgaaccagagtttttctatcctatattatgaatcggttaccagaagtttcttgattgttc

SEQ ID NO: 136 - DNA, 141 bp, Zea mays
  Clone ID: MRT4577_100125C.1
ctctggcaaaactatcgtgctaataatctaacatcttggaagcttataccaaagaaagaaacaattcatgtaaaacttgtgacctccatggattttcaaacaataaaaatgggtaacctctagcatgcatgcatgcaagag

SEQ ID NO: 137 - DNA, 229 bp, Zea mays
  Clone ID: MRT4577_100126C.1
actcgccagctcgcacatcaaaacacttcagtcaagcctccaagcaacagcgtcggacatggtatacagagggatacgccgagagtaggtcgtgcccgcgctcgcgcacgggcggtcacacactgcaagaaattcagagtcacacgtctcagcccgggcaacacacacacatgcacacgcgcacgctctgtgccgaacaggtcagagacacacactgacggcagtcaca

SEQ ID NO: 138 - DNA, 192 bp, Zea mays
  Clone ID: MRT4577_100127C.1
gccacgcgtcggcactatgtatttttgtcttgtcttgatcaagtcggtatcatcccgatttcgtggtgctgtagcatcgatgcgagttctccattgctgcgatgtccggcattgcagatgcccgctcttggtattgctgagcaccaatcgcaaactggtctgtgctgattgaatcgcttatgggtccccaat

SEQ ID NO: 139 - DNA, 549 bp, Zea mays
  Clone ID: MRT4577_100128C.1
ggccgcttttttttttttttttggcaataacacttcaataacaatagagctttaacaagcaaggggttttttttttttttttttttttttttttttttttttttttttttttttttttttttttttttttttgggattacgaaaaagttttattcagggcacgagcttatgggcgaaattcggacagggggggggggggggcccgtacgtcccctagccaaggacgaggaccctgcccaatcacagacatacataaggcccccaggcgggcccaaacgggcggggatgccggccccccgggctgctcaattagcccggggggggaagctccccctgggctcggggaccccgccggggcagggggggagggcccccccgaccctgggctcgcgcaccacaaaaccggggcccccggggggaccatggggggggggggggttggccccggcccgggcaaccgggtcaaccccctcgaacttttccttgacaacgggctggtggaccccccccccgggggggccaaaaccggccggggccaccgaccttacc

SEQ ID NO: 140 - DNA, 278 bp, Zea mays
  unsure (1)..(278): unsure at all n locations
  Clone ID: MRT4577_100129C.1
tctgcaaaatcgccctttaccacggccgcccgggcgaggcacagagctatattttttatttgtgtgatgtttttgtgtgttctattcttttttgtaggccgtcagctatccgttatggtaatcctatgtagcttccgaccttgtaattgtttttttttgttgttttccttttggcttgtggtggggggggggatcnaagtgcctttcgctgcttttttttttgatggggggcgctgctatgccgtggatctgcttttttnatacttcggggggggggg

SEQ ID NO: 141 - DNA, 798 bp, Zea mays
  Clone ID: MRT4577_10012C.1
ctgctctctgccctccgcttccgcccgccgcgcctccccgggtgcgtcgtggatctggagacctgcaccaccacggcatgcgacgactaccccaaccaccgtggatccacgctgtctccggcgccgtcgacccgacaacacctcgtctctctctatgtgtttcgtggggtcactgtgctgaaaatcaggaagaccccaatggttgtgtcaaatccgaaagaagttttagactctagagtatgaactgaacccacttgaactggagtttccaagaggagaggaggtcacaaagcttctttacttgattggaacttggtttctcttattaatatgatcatcttcttctttgctattcgatttgctgttccaaggaaagatttactttgcagaagagcctgtacggcggtcagatcgacacatggaggaacaaccgtggtgaggagctcctcttcaccagcagcaagcaagctttctggtatggagctgaacgacactcttggctatcagttgtcaagtctgcaggctctgaaaacgatggacttgagcaacaactacttgcacgattcaattccttaccagctgccatcaaaccttacctatctgaacctggcgaaaaacaacttctctggtaatcttccgtactccatatccaacttggtctcgcttgagtacctgaaatcggagaactgtttggaagcctcagttcactcgcagaactgtaaggcatactgaaccgctgttttcgtacgcaagctcgacttgagtattgtgataatggttcagagatcgaggaagtcc

SEQ ID NO: 142 - DNA, 792 bp, Zea mays
  unsure (1)..(792): unsure at all n locations
  Clone ID: MRT4577_100130C.1
ccggccgggagagaaccccaaccggtaccaatcttcgttctcccctttctcgttcttgcacccaactttcgtccacccatcatctgaccttgttgcgacgtccctcctcgcctcttctgcagcggcagtagtgatcatggtgaaggaagaggaggaggtcatggcagaggcagcaggaggtggacgcggcggctacatggacctgctcggtctcggggaagaggactacctgctgtgcctgtccccttcctcctcctacttcactcccagtgtcgtctccgtcaccggcgccacgatcaccaccaccaccactcccgccgcgccgtcgcctacctgctgcgcctactacctggacctggctcccgctcaccaccacacgctgggcttcgctgaccgagagcagcagtaccatggcgacgacggcgccctcggcttccagcactccggcgacgatcgcgcggttccggcggctgttccgcacaagtccagcacaaccaccgagtgctcctcctccgtctcctccatgtcgtcctcgccgcctgcgaccgcagtctcggccgtctccagctcaaagccgcaggctcccaagaagaagggatcaaggagcagcagtgaccagagaaaggctgcgtccgccgctgctcctgctacggctgctggtgctacgaacaagaggcccanggtgaggaagggagaggctcggcgagaggatcatagctctgcagcagctggtctctccgttcggaaagtctgatacggcttcccgtctgcacgaggcgctgggatacatac

SEQ ID NO: 143 - DNA, 526 bp, Zea mays
  Clone ID: MRT4577_100131C.1
cgtgcgctccgcaggccgggcctcgccagagatcatcgccgaggaagacgagaaatcgtgcaagagcaacgccgcactggaagccgacatcgagcagatcaaggccaccgtgctgtctctccacaccgacctcacaaagctaagagaatccaccttgtccatggcagacgcacattcccagatactagccgagatccacgcaaagctcgacggcgtcacgccgcggcgacagacgaacttcgaaccaaggtctgagctgctgctgaagaaggccaccagaggaggcagcagcaacagttcttcgtcttccaaggagcagagctaccaataccagtggcaggctgacgtgctgatgaaccatttcattgaggtgcctcttgattttgggcttggccgtcgcgattagaaaagttttgatcaactcctaacgtgtaagcaatgccatggtcagttctgtcagtgcaaaatttggttttgctggttttattagctcttatttaatcaggcattgtaataataatatata

SEQ ID NO: 144 - DNA, 534 bp, Zea mays
  Clone ID: MRT4577_100132C.1
aaaggccgcaaattattgtttcacctttcgttcatctcagaagagatgctatatattattattacaatgcctgattaaataaagagctaataaaaacagcaaaaacaaattttgcactgacagaactgaccatggcattgcttacacgttaggagttaatcaaaacttttctaatcgcgacggccaagcccaaaatcaagaggcacctaaacagtgacatggatgcagcggccttcatcagaggtctaacaacggtagtagcagagaaggtgagaccacgtacctcaatgaaatggttcatcagcacgtcagcctgccactggtattggtagctctgctccttggaagacgaagaactgttgctgctgcctcctctggtggccttcttcagcagcagctcagaccttggttcgaagttcgtctgtcgccgcggcgtgacgccgtcgagctttgcgtggatctcggctagtatctgggaatgtgcgtctgccatggacaaggtggattctcttagctttgtgagggtcggtgtgg

SEQ ID NO: 145 - DNA, 222 bp, Zea mays
  Clone ID: MRT4577_100133C.1
aaaaaaaaaggaacccctttcttttattggataaagggggtttacaattttttgaaacacaggaaactcttaccctaatgggccgggggcccaacaggggggcccgcccacctacatttaggaacacacactttaacattcaccggaattgcaacgggggcaccccacaccataagactgaaaccgaagcccaagggtggagcccaccagttgaaatccccc

SEQ ID NO: 146 - DNA, 1202 bp, Zea mays
  Clone ID: MRT4577_100134C.1
ccggaaaaagaagcagcagcctctgccgttcgttttatacgcttacccgacgacaggcgaccggccggcagctatagccctgcagttagtagcatctcgtttcagagctcagaggagggaggaggaagaagaagcagcagcaaggcatggattgctgcatctgcagccccgtggcgtccgtgtacaggctgccaaggaacgccatctgcgctccctgccaccaaggcgccaaggccatcatcggtttcctcgacagggatggtgagcgggaagaggacgacggcggtggccgttctgtccagctccagcctcgcggctcggccaaggggctgagagatgcgtgggagcaggtgaaggagatgagagccagggaggaggagaccaggcagagagctgccttcctccagcacggcttcgcgtcggcgtggaaggagggaatccacaccgacatcgtcgtcaaacctggcaccggtcccgcgattccagcccacaaggccatcctggccgcgcggtcggaggtgttccggcacatgctgtccggcgacgaccgctgcaaggcccccgccggcggctccatctcgctcccggagctctcccacgacgacctgtccctcctgctcgccttcctctacacaggcgctctggaggcgccaggagaaggaggaggagaggccagccaggaccaggagcggcagctgcacgcgctcctcgtcgcggccgacaagtacgacgtgccgttcctgaggcgggcatgcgaggcgcggctggcggcgggcgtggcgccccggaacgcgctgcggacgcttgaggtcgccgagctgagctccagcgccgcgctcatggagcgcgccatgggcgccgtcgtggagcacgccgaggaggtcgtgttctcggcggagtacgagcggttcgccgcacggaacgcggggctgtgcgtcgagatcacccgcgcgctgctggccaggatgccgacgccggcgaggagtgatggcccgtgcttagagcttggaagcagctgatgcatgcagttgtattgcaaatttgtatcagatgatgatggatcggaaagaatactactcttgtttcagtttcgagtcacgacaatatgtaattgtaaacgcataagttcttctgaaacacgggcgagcacgatgagctagactgcaagaacaacacaggtcgacgcggccgcgaattcggat

SEQ ID NO: 147 - DNA, 714 bp, Zea mays
  Clone ID: MRT4577_100135C.1
cctcgaggcggcgggaggctccctacctccttatctagctacgatatcccttgaccgctcactatagaagcatttgaggtgggagccatgtgtgaggagaatcacctccaccagctggttcaccaccgtgaggcagaggatgaggagggcgcctcctgcgagggcgactactacaagaaggagaagcaccacaagcgcatggagaagctcggagagctcgttgctatcgctgtcggcgcgtacgccctctgtcgcgatcaatgacgagggcaaaaaggacccggagaacgagcgcgtacaccgtatcaaggaggaggcgggcgacgacgccgccgagagctccgccgatatcgccttccactgagcaccacgataacagggacggcaggaagcgcgcgccacaactgatccgtcgacatgactgcctcagtcgagacatcagcactatcgtctggagtgctgtgtcatctgatctcccagcctcgtcttcgtctactgcgtgccggctaggcctagatctgaggctatgagctaccgatatttgcacggacgtaggaactgtgttggtcctcggcgctcttgtagctagatcaaatcgggtcttcaataagcgcgagtgagagcatatatctccatatttcagatttatctgctcttatgtttgatcgagagatgttctgaataatgagaatctgcggtggtccatgtaaacga

SEQ ID NO: 148 - DNA, 238 bp, Zea mays
  Clone ID: MRT4577_100136C.1
tttagtaattttgtatgttttgcatatttttattaattttattgttagatatttcatttctttgttgcatttgaatgggatcatttttccatcattttttattagtggctactccttctggggtcaagctatttatttttgtgtttgataacttttttgaactctttcattaatactccctagttgattctcttctaagtagccaatcattcttaagtatgattaatggtgatttttc

SEQ ID NO: 149 - DNA, 235 bp, Zea mays
  Clone ID: MRT4577_100137C.1
gcggaaaaaaaaaaaaaaaaaaaaaaggaagaagaaaaaaaaaaataaaatggtcggtggggatgtctaccggaaaccggggcaaggttaatagggtggcggggctttaccgtgtatataacatatcttgattggaattattggttatcgtgggctatgctttccgactttaaaattctatgaagccagttagtcacactggcatgccttaagacaacttttataacaatattac

SEQ ID NO: 150 - DNA, 167 bp, Zea mays
  Clone ID: MRT4577_100138C.1
aattcggctcgagaaattaacaacattagctttgtagggaaaaatatatcctgttgatgggagggaccttcaaatcgagcgtgtggaactaacttcaggcagaccaaccaagaacaatccctgtttgattggagagcctggtgacggaaaaactgcaattgctgaaa

SEQ ID NO: 151 - DNA, 642 bp, Zea mays
  Clone ID: MRT4577_100139C.1
cacgcctgcgtgtaccgggctcctattacacggtcgacctatgctttctttttattctaaaaacacaccatgtcgaagcagcactttcgacgtcctatcagcaacggatgccaagatgtgggccctatttgcgcttacatgccctttgagtgagcacaacagaggcgctcattattggacaggttcacttgctgctaatgacattataaccacaggtcctgccaccatttgctttaatgggtcttcgaacgtacagaccagcgagcctacacgctacaactagtgcttgcagtgagcgccttacaacaaccactcgcccaattgcgacaccaatacttggcacattgaaccctactgaccattgcaacgcaacagcaacgacaacaaactaggctgctgccatacactgaaccacctagccgaggagaaccctgtgacctacttgcagcaccttgtgcttgcatagcaaccctattgctatggcgaacgtagctgcataccagctacaccatcggttgcagacagagatgcgcagtgctcagtcaactaggcatggtgaaccctgcctgctacctacaactacttatcatgtagcccggtcgcggtgggcaatgcacctacgtacctacaacgacagatgct

SEQ ID NO: 152 - DNA, 687 bp, Zea mays
  Clone ID: MRT4577_10013C.1
ccggccgggttactattcaccagaaatcaagcgataaatctgtcgccatgggtcaaggtcgccgcatgaagaagcagggcatgcccgatgtcctcgacgaatcgctagtaaccaggaagcgaaaagatgcgcccgtcgccgtaaacccagagcgcaagaagaggagtaggacagctgcaagagaagctaaggaagccaaggcgaaggcgacacccaagacgagagtagctggaaagcccgtcaagcagcctctcaagacggctgctgctgtcgtaaacggagcgaaagcaaagtcaaagaagtcagcacctcagccgccatcggatgacgaagaggatgtctcagacattgacgactctgatatggagaacatcaacgtcactgggctcgatgccctcggtagcgcgtccgaagacgaagacgacgaggagatgaacgacgacgaattcgactcggacgttgtggactcggacgacgacatcagaaggggtgcggccatgtggtcagacgacgacgatgaggaggatgctgaagagaagctcacagccgctaacattgccggattgtccacacgcttggatatgcagaaggcgatcgaggaagcggaggcgcaagctgagttggaagagaacaacatgcagacaaaccttgccaatgagcgacccaagattctggaggatgaagaga

SEQ ID NO: 153 - DNA, 770 bp, Zea mays
  Clone ID: MRT4577_100140C.1
gtcgtcgtcgtaagctgcagctagtgtggactggagatccaccactccaccagtccggtccatctgctggacctcgattggtttcttcttacctaggaacatccggggatgtcgactcctgcgaggaagaggctgatgagggatttcaagcggttgatgcaggaccctccggccggcataagtggcgccccgcaggataacaacataatgctgtggaatgctgtcatatttggacctgatgataccccgtgggatggagatatcctgcagaatcagtggagtccgatatatgatgtagctgcgatactcacgtcaatccagtcattgttgtgcgatccaaacccgaattcgcccgctaactctgaagccgcccgcatgttcagcgagaacaagcgagagtacaaccgcaaagttcgggaggtcgtggagcagagctggacggcggactgatgatgccctgtgttgcgtcgcgctgtgctgcgcagctgctcactgcgccccgcgtccgtccattccataccaaaaaaagaaaatggcaaagccgaactcagctgttgctgctttcgttgccctgtgtcaagacgactgcttctctatgaacattttaccttcctgtgctgtatctggaatacaaacttaattatctctagcactgtggcaacatcttatcttatatgaaatttcctccgggaaaacgagaatgatttgcttgggtgattatttcatgaccagccaggttgctgtactaaactatggtacttatttcagct

SEQ ID NO: 154 - DNA, 176 bp, Zea mays
  Clone ID: MRT4577_100141C.1
gtctctcttccgcctgcgctgtgatatcatgcagggggcttattttctcgccagtggcgttcaaccccgcgttagtaatatcacgcatcaaggaacatggcattatacgggcgttgcaatgaaactacgaaagggagtagatgaaaaaaacaagtcgtcaactcaaatgacaagga

SEQ ID NO: 155 - DNA, 572 bp, Zea mays
  Clone ID: MRT4577_100142C.1
gtatgataccccgtgggtatggaggtacgttcaagctgactctccagtttaatgaagaatatccaaacaagccaccaaccgtgcgatttgtttctaggatgtttcatcctaacatttatgctgatggaagcatatgcttagatatcctgcagaatcagtggagtccaatatatgatgtagctgctatactcacatcaatccagtcattgttgtgcgatccaaacccgaattcgcccgctaactctgaagctgcccgcatgttcagcgagaacaagcgagagtacaaccgcaaagtgcgggaagtcgtggagcagagctggacggcggactgatgcgttccgctgcgctgagcagctgctcactgcgctccgcatccgtccattccatacccccccaaaaaaaatatggcgagatgtttgtgcttgtaatgtaactaaggccgaattcagctgttactgctgttctcctgtgctaagacgcttctctatcatggcttgaccggtggagattgctctgtctcaaatcaagttttttatcttgtgctggatctggaatacaaacttaattactct

SEQ ID NO: 156 - DNA, 1091 bp, Zea mays
  Clone ID: MRT4577_100143C.1
ttgggtacctcgaggcacgagctctaaaaactcctagcggaaaaaggacaggcaaacagtcgcccctccgttgggacctaattcacgcgtttcagggctcctcccatttcgtcggcttcgtttgtcgtcgtcgtaagctgcagctagtgtggactggagatccaccactccaccagtccggtccatctgctggacctcgattggtttcttcttacctaggaacatccggggatgtcgactcctgcgaggaagaggctgatgagggatttcaagcggttgatgcaggaccctccggccggcataagtggcgccccgcaggataacaacataatgctgtggaatgctgtcatatttggacctgatgataccccgtgggatggaggtacgtttaagctgactctccagtttaatgaagaatatccaaacaaaccaccaactgtgcgatttgtttctaggatgttccatcctaacatttatgctgatggaagcatatgcttagatatcctgcagaatcagtggagtccgatatatgatgtagctgcgatactcacgtcaatccagtcattgttgtgcgatccaaacccgaattcgcccgctaactctgaagccgcccgcatgttcagcgagaacaagcgagagtacaaccgcaaagttcgggaggtcgtggagcagagctggacggcggactgatgatgccctgtgttgcgtcgcgctgtgctgcgcagctgctcactgcgccccgcgtccgtccattccataccaaaaaaagaaaatggcaaagccgaactcagctgttgctgctttcgttgccctgtgtcaagacgactgcttctctatgaacattttaccttcctgtgctgtatctggaatacaaacttaattatctctagcactgtggcaacatcttatcttatatgaaatttcctccgggaaaacgagaatgatttgcttgggtgattatttcatgaccagccaggttgctgtactaaactatggtacttatttcagctaattttgaatttgaactgctgtcttaaaaaaaagaaaaaaaaaaaaaaaaaagcgtctcatccatatttacaagattgcat

SEQ ID NO: 157 - DNA, 377 bp, Zea mays
  unsure (1)..(377): unsure at all n locations
  Clone ID: MRT4577_100144C.1
cgtcttacaaacgccggcgctaactcttgcccgagcccgacagattcgtaattgcccataccgtccaccgatcgaccttgacgccagtcttggtcttttncgaaggcgtcgcgcgcggttgtttgagaggagaggaggaagatgagggagtgtatntncgttcacatngtttaatccgtgtatncaagtnggaaacgtgtggggggagttttactgtcttgagcatggnattcagtctgatggtcaagtgggtggagacatgaccgtgggatattaggatgatgtctttagtatttttttgaggtagattggtgttgggaatgttgttttttgtgctgtgttggttgttgttgaagttattgtggtggatgaggtgg

SEQ ID NO: 158 - DNA, 400 bp, Zea mays
  Clone ID: MRT4577_100145C.1
gacgtcaaaatcattgcttctagtcttctgtaatctgcgaaacagtcttgtacgttcctttcttttgttgaacacaacggtacaaacccaataagaaagaaagaaagaagaagaatgaaaaacaatgaatggcggattttacaaatggcaccatatcgactccccgcacaaacccagcacgggcagcccccatccagcgcgcgcgacaccagccaccacgggaccacccttccattccatgggggcagatcggcgtccgcgtcggcacggccggcggcaacccgagcgcacggcttcgctgtgcgccagtgcccccgcgctgcgctgttctttgaccagagctttcgccttacgcgcatgtgcgtgcgtgtccgttacgggggtgggttgctgccgctgt

SEQ ID NO: 159 - DNA, 347 bp, Zea mays
  Clone ID: MRT4577_100146C.1
ggtggcttggcttctcctccccctgcggatcggttacgggttcgagaggttctgcggagttctggttcgggggtgagcgcatccatagggtggtggcggatgttggcaccgctgcttcgtcgtggggcctggactgggccacggacgaccactccctcaacagcgccttcacgcaccgtacaggcgaggacctctagttcaaaaacatactggatcgggagacgcataggtcccgcggcttgggattagtacccttcaccacggtggacgtgatgcagaacgccatcgagggcatgatcggtaaggagctgcacggccacacacatgaccgttaacgtagcccatgc

SEQ ID NO: 160 - DNA, 262 bp, Zea mays
  Clone ID: MRT4577_100147C.1
ggactacaaccacaggctgacaccagggggggtttttaaggacctcgtggcttcaaacgagcagatgatcaacacctaccttaacacactcgttaacggccttcacagcaacgaggaagccgtgcagatcctgttctcattcagaaccaccacctacagagatttccagtgcaccatggacaaggagacgtaagacaagtgtaaaggacatcctggggtgctcgggattactcgctgattgctacactgacgtgaacaacaa

SEQ ID NO: 161 - DNA, 336 bp, Zea mays
  unsure (1)..(336): unsure at all n locations
  Clone ID: MRT4577_100148C.1
cccccccccctcccccccccacccccccccccccccccccccccccccccttccccctccccacccgcaccagatatcgccaagcgggttttttttaaantgcaccctaaaggcgcataccatcatcacgcctggtttagtccataccactcgtctgcgctggccgtgccacggcctgcctaggaaacctaagctgggcattcactccctgtggacctggccagtggcaaatctcccggcccatcgtgagggccttttttatcccccttcttaacccccagcggctccggaaggccttccggcaccccttaaccttggtgggcctctgggcccctt

SEQ ID NO: 162 - DNA, 413 bp, Zea mays
  Clone ID: MRT4577_100149C.1
tgcagatcatttggctcaaataattggtagtccaacggtcacgatacttgttggggtgtgggatttctgtgggtgctgttgtctagctttatctatgttgtggttgcttttacatgtggttgtagggtaagtttggcaatcaaaaatccctgtagcgaagaactgatatttaaaactgggggcaggtcagaaatcattccgactgtttggttggagcacgccgttgtgcaactgcacgcgtggagttttaaatccagccttgtttggttctcttctctacccatgcaggctcatcggatgcaagatatgtcattcggccaggctccacagatacgccggtggagcgcgtattggcgcgtgcaggctccaagcttgccgcccgcatgcagcagcgccaaatacaaaatattatt

SEQ ID NO: 163 - DNA, 625 bp, Zea mays
  Clone ID: MRT4577_10014C.1
gtaggcaaacaatatatattatatagccgatactagctacctcatattccaaattgtccttatacatcagacaacatcacacccaatttattaggaaactctcaatttaagccaatacaaaaaacatagagattacaccccatgattcatcaactatggtacttgactgcatcaacagaaagcttttggcaacttctgataaaaccaaacagcctacagctagcaatgaccacgatacagtagtctatttgtatttgtatgtggaagttaatctctgctccaagtattcgtcgctcctaataggcgggtatcttggtggatttgcctcgctgcaacaactttctatgcatgtaaccaccatatctgggcttggccaaacaaagaaagccactgaataccgctctttgccaaccatcaaaacacgatgcagggttgacctataaacattatttgtccacctttctagcaaatcaccaatgttcacaacaagtgccccatcaatgtgatgaacatcttcccagagctggggacggccatccttgtccctgcatatctgcaggccaggggtgccatctgttgaaagaagagttaacattccataatccgtatgagcgtttgcaccatg

SEQ ID NO: 164 - DNA, 143 bp, Zea mays
  Clone ID: MRT4577_100150C.1
gaccaaagcatttgggggttttaacccttccatagagggatttgatcactgttaaagcgaaacaatttcactggatatccaccggccacaccattactaaaacttattacacctaaagggaccaaactgacaaaatgtaaacc

SEQ ID NO: 165 - DNA, 795 bp, Zea mays
  Clone ID: MRT4577_100151C.1
ctcctcgccagtcgcctcccgcctccctgctcctgctgccggcaacggcggtggtatcgcctctcggcctctcctcagtcctcaccccagcggaagcgcgggcctgactccgtccgacctcgccgtctcggccccgagggcggggataggccggcagggcgagcccgacgctacgccacgccgcgccaccatgccgctgccgctggccaaggcgaggagggggtcctccccgcagccgtcaccgcagcccgcgcggtcctcctgcaggtcgcagctggagcaggacgtgaagaggccgcgcaaggcgctgcaggacgagacggctctgcacgccgtgctcgagggcgccctgggccgcgccgccgtcacgctcgccgacatggcctacctccccaccaacgcgcaggagctgctctcgaccatctgcatcctcgagacggcggtcacgaagctggaggaggagatggtctccctgcatttccagctcactcaggagaggaacgagagacggctcgtcgagtaccgcctcaagcacctgcccccgccgccgtccgcttgctcctgccactccgggaaactcggaccagacgaccccacaggcgaaaaatgcagtagccaagcggaggaggtttaccctcgcgccgtcttgcatgaacaggctgtgaaactgcagaggcagatctctgtcaagagcttcgcccatcctaaccagctttccgaggacatcgtccggtgcatgaggaacattttatttcgctgtcagatcctgcagggactcctcaggaactcgaacat

SEQ ID NO: 166 - DNA, 196 bp, Zea mays
  Clone ID: MRT4577_100152C.1
acctgcatcagactccccatacctgatacaccctgagggcggcggaattaggagaggagtgatgaggaggtgctacacctctgcagctgctcaatatagggtgtcggggcggaactatcccaagagcggcccccgcatgcgctatcaggtaccgcgaacgacacccatagcctccacgagccggcgccctattatg

SEQ ID NO: 167 - DNA, 136 bp, Zea mays
  Clone ID: MRT4577_100153C.1
acatggcagggagatcgggatacgcgaccatgtgggatagcgcacgccagaccatgcgaacgatcggccatgagaaggacagcacccgtaaaatggcctggacgttggcggtcttctctaggctgccgccctctga

SEQ ID NO: 168 - DNA, 441 bp, Zea mays
  Clone ID: MRT4577_100154C.1
cccggggaatcgaaatcttaaattgacctaaaaattatttggatttctttcccatatttaacccaattgtttttttccccatcgttttttttataaaaaaactcccccccccaccccgagggctgaattttttcataaaaaaccccccaccgccttcggctttagggaaaaaaaaattcgttttggcaaaacccctataatgagtagcatttgctgctgcccaataaaccaactttaaaaggggatcccatcctccataaggcctgaaattcagtttcataacggtttcctcgtagaaccccccgcgaatttcatttaaaactttttgggctttaaaaacaaacaaatgtatgcctttttgggctttaaaaacccccccaaatttaaaaaaaccaacggggggaactttttttgcgagttttttcaccccctttttttttt

SEQ ID NO: 169 - DNA, 191 bp, Zea mays
  Clone ID: MRT4577_100155C.1
ccctcctttttttttttttatatactttaagggtggttttttatcagagatcggcggaacacccccgccagaaagccacaagcgctaccgcgggcccaagccagacgaacacggacgaaaaccacccacagaaaacagcagcacgctaagacaggaagccaccccggaaaaagggtgccaaaaaacaagca

SEQ ID NO: 170 - DNA, 427 bp, Zea mays
  Clone ID: MRT4577_100156C.1
ggaaaatttggcggtcttgtggcgcccatggctgtgtaagaacccggccgtgacggaaggtggcggaggacgagccctcggagaagctgttcccgcggggaagtccccgctggaagaacccaggctgtgaatcggctacctgctggctagtcctgcggcaaggacggcggcgacaagtaagggtactaagaagggcactactagcgtgagagacctacaagagtacctcttcaccgtcctgaagcacgtgcacccctacatcatgatgtactgcaacgccatgtgcatcatgaacttcttcatcaacgacatgttacagaagctggacgagatggccgtcatgcttgcccggtacaacatgaaggccaccatcacctcccgtgtcatccagtacctccgttcgacttgtcctccgcggtgagctcgc

SEQ ID NO: 171 - DNA, 840 bp, Zea mays
  unsure (1)..(840): unsure at all n locations
  Clone ID: MRT4577_100157C.1
ccatatcaatcaaccagaccaaaaatggcgcagctgcaggagacgtacgcgtgctcgccggcgacggagcgcgggcgcgggatcctgctggcgggggacgccaagacggagaccatcgcctactgctccggccgcagcgtcatcttccgccgcctcgacgcgccgctcgacgcgtgggcctacacggagcacgcctacccgaccaccgtcgcccgcttctcccccaacggcgagtgggtcgcctccgccgacgcctcgggatgcgtccgcgtctggggccgcaacggtgaccgcgccctcaaggccgagttccgccccatcaccggccgcgtcgacgacctccgatggtcccccgacggcatgcgcatcgtcgtttccggggacggcaagggcaagtccctcgtccgcgccttcatgtgggactctgggagcactgttggtgaatttgatgggcactctaagagagttttgagttgcgatttcaagccaacccgaccattccgcattgtcacatgtggtgaagattttctggcaaactactatgaaggacaccattcaaattcaaacattccataagggatcacactaactttgttaactgtatccggtattcacctgatggaaccaagtttatcactgtgagttcagataagaagggtttaatatatgatggcaaaactggagataagattggagagctatccagtgaaggcagtcacacaggcagcatatatgctgttagctggagtcctgacagtaacaagttctaacagtttctgctgataaactgcgaagtatgggatatcgntgaggatggaagtgggacgttgaacagaactt

SEQ ID NO: 172 - DNA, 407 bp, Zea mays
  Clone ID: MRT4577_100158C.1
ggccgcttttttttttttttttttcgtgggtttttttttttttttttatttttttttttttttttttttttttttttttttttttttttttttttttttttttttatttccagtaattttttttttttttacaaaaaccacccaagtactggggctctctattatatccaaccccaatgggggggggggggtttaaaccaataacaagattaaaaatttctatttgttccttccctgttattttgaaggcagaactccccgcgcgcgaggttttaatatataatatccgttttttttgctgttaaaaaaaaaaacggggtcttcttttagctttatataaaaatataatgttgcccgaatttcttttttgacctttgaaattggatccacccctttaaaaataaaaa

SEQ ID NO: 173 - DNA, 308 bp, Zea mays
  Clone ID: MRT4577_100159C.1
gctggcgggactaggaaggagacaagtgaactcagagaagaactaccgcggcgggcgagcattgcaagccgagctgcaggggcccggagcggagaccggacgacggagacgtcgcttgcgatgtcgggggcaggatccgccgccgaaaccgccgtcgtcggcgtcgtcgcaagcgtccctagccagcagcagagcagtcaccgcgccgcggcgccgtccgtcccgtcgtcctaccccgtctgggagaacgagcggtaacgcggctgcagctttacgacgtcatcgtcgtcgctctgccacctgcccta

SEQ ID NO: 174 - DNA, 1636 bp, Zea mays
  Clone ID: MRT4577_10015C.1
acgaaaggccatgctccatcatcatcgccccttcgtgggccccacgcccgcttcggttggagacggcccatacggtccaccgagaaccgtgtccacgccagctcttcctcctcctcccctactctgacctatcggccaatgtcgacaaagaaaatggcaagcccccgcccggcctgtcttattcaggatcgcaaggagtggtaaacccgacctcgccgatgcatccagtgcggccgcgagcagtggtccctcgcgtgcctagctccccggcagctaacctgaatatcggaggggactactgggcagctccgggttgtgcggctgtccctgcagggcacgggaaagcgccagctggatcagctacctttcagcccattggtttcctcgagctgaaccagctgacgccaacaccacgaccctcgaaggcttcaaaggcgtcagaacaagatcaacctccagctaccaccacatccagtggaacagcttcagtgtaccctgaatcgcccagctttcaggcctactcagcaattccaccgcatgcgttcttcccccctaccgttgctgcaaatccacaggcccatccatacatgtggggggctcagcccatagtgccaccttacgggacaccgccgccaccaccttatgtgatgtatccacctggaacagtatatgcccatccctctacacctcctgccatgcatccatttggccattatcctatgccaacaaatgggcatgttgaaactcatggagctgcgccaagcgctccggaaatttcagggaaaagcgagcctggccgaacgtctgctccatccgccaacgggattacctcgcacagtgagagtggaagcgagagtgagagcgaaggaagtgacgacaattctcaaaacgattcacactcaaaggacaatgatgggaaggaagatggcaattctcagaacggcatgtcttattcaggatcgcaaggagtggtaaaccaaaccatggcgatgcttccaatgcaaccgggtgcaatggtcggaggagttcctagctccacggcagctaacctgaatatcggagtggactactgggcagctccgggttctgcggctgtccccgcagcgcacggcaaagcgccagctggttcagctcgaggagaccaatgggatgaaagggagctcaagaagcagaagcggaagcaatccaacagagagtccgctcgcagatcccggctgcgcaaacaggctgagtgcgaggagcttgggcaacgtgctgaggctctgaggtcggagaactcctcgcttagggccgagctcgagcggatcagaaaggagtacgaacagctactttcacagaacgcttccctaaaggaaaagctgggggctgccagtagtgattcgcttcctgatatgaacgaacagaacgaccagaacgacggcgacggcggctacaggaagcagcctgattccgatggccaccagcctgggagcgagtcctgacccgtttttagctcaggattcttttggaatgcacattgcttatatattcattctcttgaacgttgtggaacgcagcataggaaggaaatccaactttaattagaatcgatacgctgtcatccctcatgcatggcgggagaggtcaggagagggtt

SEQ ID NO: 175 - DNA, 3795 bp, Zea mays
  Clone ID: MRT4577_100160C.1
atgtcaggagaacacgccaaaagggagatggtcaccggggagaagcccggatcttcgagaaagaagaatgaagaaaggactccatcgaaggaggccagcgacaagcataaggagcacaaggaggaatccgccggctccatcaagtcacataagaagggtgacaagaagaaaaataagatgaagaaggtggtctactacgagaccgattcttcctcaccctcaacctctggcgccgagtccatatcttcgaagcgccaagagcgtaagaagtataattattgtatgtggagtgataaaataaggcaccatctaacctcactccacgaaagtatttgggatattgttgagtttggagcacaggaggagtacaacaaggtgcaaggatttaagagtgctaaagaaatttgggacgtccttaagacgacacataaatgggacgaggtgaccaaaatcaccaagcgcgaaacgatcaagggagaactcggtcgatccatcctcaataaaggagaagagccacaagcaatgtacaaccggctcaagacgatggtcaaccaagtccgcaacctcgggagcaccaagtgggatgaccatgaaatggtcaaggttattctaagatctcttatcttacgtaaccccactcaagtgcaactaatccatggagatcctagatataaacagatgtctcccaaggaggtgatcgacaagtttgtgagttttgaacttatgatcaaagactccaaacatattgtcaccttggagcaaggcgccacctccacacccgaggtgcatcccattgcattcgaggcaacggaagaaaagaaggaagagtctacaccaacaagtagactcccaatcgatgccttcaagcttgacaacaaggagatggctcttatcatcaagagcttccggcaaatcctcaaacaaaggaaagggaaggactacaaaccccgttcaaagagggtctgctataggtgtggtaagtccagtcattttattgctaaatgtccatatacaagtgatagtgacagggacgacgacaagaaagggaagaagaagatggagaagagaagatactacaacaagaagaagggaggcgaggcgcacatgggatgggaatgggactccgacgagagctccaccgactcctcctccgacgaggacgccgcaaacattgccatcaacaaaggtcttctcttccccaacgtcggccacaaattcctcatggctaaggatagcaaaaataagaagatacattctacagataccccaaaatacagtacttccgatgacgagggtagctctagtgataatgatgatgatttgacttctcttgttgcaaaccttaccaaagagcaaaagaagaaaattaatgaattaatagaaaccattaatgagaaggatgatatattggaatgccaagaggacttgctcgttaaggaaaataaaaaaattgttaagttaaaagatgcttatgctcttgaagtagaaaaatgccaaaacttgactaaagagcgagttacatgcaatgattcaattccttgtcttagaactaaaaatgctagtttaactgctaagattgaagaattgaatacttgcaaagttcctacatctattgttgagcgtgttactatttgcactagatgtatagatattaatgttgatgctatgaatgatcaccttgctatgattaaagaacaaaatgatcacatagctaaattaaatgctaaaactgtcgagcatgagcttgagaacaaaaaatttaaatttgctcgtagtatgctttataatgggagacgccctgacattaaggatgaggtttatgcatccgacggaacaagttggataatcgacaataggtgcgcaaaccatatgacaggggagaaaagcatgttctcctcatatgagaaaaacgatgatccccaaagagcaatcacattcggggatagaaatcaaggtttggtcaaagatgatgaagaggctccatgtgtcgcactaaggaacttgtccattagagttgtgtgtccaaaagaacccgaagagccttcacaagcacaagatcaaccatcatcttccatacaagcatctccaccaactcaagatgagggaatggctcaagaaggagatgatcaagacaatgagccaccgcaagaggaggacattgatcaagggggagatgaagatgatcaagacaaggaagatgatcaagagattcaggatcaaataccaccgcacccaagagtccaccaagcaattcaaagagatcaccccatcaactccatacttggtgacatccacaagggggtaaccactcgatctcgagttgctcatttttgtgaacattactcttttgtgtcttttattgagccatacaggatagaggatgcacttagagatcccaactgggtggtgacaatgcaagaggagctcaacaaattcatgaggaatgaggtatggcatttagttccatgtcctaaccaaaatgttgtaggtaccaagtgggtattccgcaataaacaagatgagcatgacgtggtgactaggaacaaagctcggcttactgccaaaggatattcacaagttgaaggtttggattttgatgaaacctttgcacccgtagctaggcttgagtcaattcgtatattactcccctatgttacttaccatggctttaaggtatttcaaatggacgtgaaaagtgccttccgcaatggcccttttaaggaagaggtgtatgttgagcaacctcccgactttgaagatagtgagtatcctacacatgtttataagctctcaaaggcgctttatgggctcaaacaagccccaagagcatggtatgaatgtctaagagactttcttttcactaatggctttgaagtcggaaaaaatgaccctactctctttactaaaacaattgacaaagacttgtttatatgccaaatttatgttgatgatattatttttaggtctactaacaagtcatcatgtgaagagtttagtaggattatgatacataaattcgagatgtctatgatgggggagttaaaatattttcttggattccaaatcaagcacctccaagagggcaccttcatttaccaaactaagtacattcaagatattctcaagaagtttggaatgaagaacgccaaacctatcaagactcccatgggaacaaatgggcatctcgacctcgacacaggaggtaaatctattgatcaaaaggtatatcggtcgatgataggatccttactctatttatatgcttcacgaccggatattacgctttctgtatgcatgtgtgcaaggttccaggccaatcctaaggaaatccaccttagggttgtgaaaataatcatgagatatttagtttacactcctaagtttgggctatggtacttggtacccaagggatctacctttgatctaatcgggtattctgatgcagactatgccggatgtaaaattgatagaaagagcacatcaggaacttgtcagtttctagggagatccctggtgtcttgggcctcaaagaaacaaaattcagtagctctatcaactgccgaagccgagtatattgctgcaggacattgttgtgcacaattactctggatgaggcaaacccttagggactatggatacaaattgagcaaagtccctctcctatgtgataatgagagtgcaatctgcatggcggataatcccgttgaacacagccacactaagcagatagacatctggtatcactttctgagagatcaccaacaaaaggggggacatcgaaattgcctatgttag

SEQ ID NO: 176 - DNA, 464 bp, Zea mays
  Clone ID: MRT4577_100161C.1
ccaacccgggggacacaacacaggtccttaaaatttaaggggatttcattgtcgattccacacgataattggtctgctaaaaaatataggaaacagtccttgtggatgataaaaaaaaaaagccaaaacttgcagtagtttgacaaaaacagcatttttagtcgtcaaagaggctgaagcccatttccttgtccgatctccttttaaggttccggagccttttttttttctttgggagaatttgaggccccgaatcccacaataaaaccggggggggaacaaaaaatttggttgggttcttggggccctctcttttttttcacattgggggaccaaatttttttttttaaaaacacaaaaaactttttttccccataaataaaaggggggcacaacagggggggggtttctcttcccgggggggggggttcactacaccccccatattttattttttttttttt

SEQ ID NO: 177 - DNA, 709 bp, Zea mays
  Clone ID: MRT4577_100162C.1
gtttccttctccgttctcaccgtcacctccgcctccgctgccagccgccgccgtctcggtcatgtcgatcttcgagtcaacgccagcgccatgaagacgatgaccggggaagaactgcttcacgatcaccatgtaccgccgcctctccgtgcagctgtctaccatctccaccgacttcaggacggatgattcaagtgtccacgcatgagcttctacatagggttctcgtgactcgccaccgacgcccacacgttgcattgccgcgtgttgttcaggtactggatggaccagatgagagagtagatggacatgaagccccaagcctttgccagccttgtttccgacctcctctatgagagaaggttagtgccctacttctgaccaacacgtattggtgcactattagacatgcaggagccgattatatgtactatgaactgcttggtcgccgaggtactattgaaagaaactgaggcctcctgaactgcttcaaaaatgctctatgggggttgagagacttcggataggctcctcgtgtgacgcacagacacttccaagcatatgtccgctgcattgcaaggatctgctagatagctctgcctcgaggaatggccgtgttatgcaacgtgtaagaaagttgtgtgacatcaacatagtaatcacttcctaccgagtagtatcacattttgttgccttgacttgtctactg

SEQ ID NO: 178 - DNA, 254 bp, Zea mays
  Clone ID: MRT4577_100163C.1
tttgttttttttaaattcttttttgggtttccaaaacactccctggtacacaaattttgacccttacctttcaatgccgaagaaaaggcgccaccccaacctaaaaaaaaacccggctttcaatctccaaattttaaaaggggggggccgccctacatttttctgcccccaaaaagccacttttcattttaggccacacaccaaaaacccgaaacaagagtttaaacactctttacccccagctttaactgaaa

SEQ ID NO: 179 - DNA, 362 bp, Zea mays
  Clone ID: MRT4577_100164C.1
atgttctttgttgttgttctctactatcttgggactgtgggggattttttttttttgaggcccaacaaaatattcttttaggagcacaaatttgaagttttgtaaaggcggggggcctaagagatcaagagcaacgaggcttataaattactttatggttcccaaagaccgctctcaaagagatttatcttctacaggggatgccatatccacaatttggaaagccatggtaatttgcacttgcattgcaaaaacatatactgttcgaccaccagctcaaagcatgtgaaacgcagggggggaacaccccgcacagcatatatatggggtcattcaaaaaatgagaacaacttgtgtcaaca

SEQ ID NO: 180 - DNA, 1164 bp, Zea mays
  Clone ID: MRT4577_100165C.1
ccctttttttttttttttttttttttttttttagcctttacatgacgtatttataaagtttactgcgcaaccgaagcttaaatggctccatacttggatccatccatccccacggctgcatttgcaacaaacaagaggcaccagggggggcgagggaacaaaagcttacacatatttacaaagggcgcaaaacaagccaggcagctaattatggcgtgtggccgtgtgtacctttttgtactttagggtcacttgtctacgttcaccagactgatccggagaaggaataccgtgtgaacagctccacggttaaggatggcgaaaaactctgctccctcagccacggtgagctcacctagagagattcggtggcactcgtattcgtcgggcaaccggaaaccatagaaccacctaatgaccaggttcacacaaactaccctttctgctactcggtgagcttggagtgctttactgacttcagttggcagcacatgcaaagatgcgatcgagtagtgcagtccaataaggttgattatcgcactatgattccttgagaacaagaaaaactggacatcgaggaatcctatatcaggtatcaaggccaaatcagcaatagctttcagatagtattcggattcaagtgactcattatttaagctgctgcccacaaattcaaccacattagatattgcaacagccattcttctgtgctggctgatgtagagagctttccatccctgcacaggggacgccgacgccacggcagatggccagcggcagcggaagaggcgctcccagatgcagtcagcgtcgcaggctctgcgccaggagcgcgagcagccgccgagcgcgcagacgtcggcctcctggaggcaggaggcgacggctacggcgatgtcctcggggaggtcggcccacctccccaccggcgagagctccatctcgcctcgcgcgatccccctttcgctgcagcgactgtactgtacgtcggccccggccggcttggggaggcgggcagcgacgctatggcggatttctgggggagagcaaggcgagagggggcaggagacagcggcatttcggaggtctgggaagttggaggtcggcgtgtccattatcggcgtacctaagctcgttgaacatgttagcgatggcaatatggat

SEQ ID NO: 181 - DNA, 101 bp, Zea mays
  Clone ID: MRT4577_100166C.1
gtccgcaggcagcgcagcctcaacccgtcgccttggcaagcaaccccttggtcttggcggaaggcttcttcttcttctggccaacggcttggtcggcaacc

SEQ ID NO: 182 - DNA, 882 bp, Zea mays
  Clone ID: MRT4577_100167C.1
atgaacgtatgtgagctcactcttgctgtctcacacccccccacacaggtcaagaacagtgagattgtggcgctcgacaagataactatgccgatcaccttcggctatgttcacaacacaaggactgaacaggttgtcttcgacattgtcgatatggactatccctacaatgcaatcatcggtcgagggacgctgaatgccttcgaagcaatactccacccaacatatctgtgcatgaagataccttctgaccaagggcctatcgctgtgcatggaagccaagaggctgccaggagggccgaagggagctggacagattcgaaggccatccataacatagatgaagccgaagctcatcaacagtataaacataaaagagacaaggctgcttcagcagatcaaccaaagcccatgcttctgtgcgaagacatagccgagcagaaggtgctgctggggtcccaattgtctgatgaactggagacgactttgttgaggtttctgttcaacaacaaggatgtttttgcctggtcagccaatgacctttgtggtgtcaacagagatgtcattgagcactcactcaatgtagacccgaccattagaccaaggaagcagaagcttcagaagatgtccgatgacaaagctgaaggtgcaagaaatgaagtcaaaagactcctgagtgccagagtaattagagaggtgacatatctagaatggctagccaatactgtgatggtaaagaaggccaatggaaagtggagaatgtatattgattttacagatctcaacaaggcatgcccgaaggatgagttccccatgccaagaatagactcccttgtggatgcagcagccacttcgaagctcatgagtttactggactgctag

SEQ ID NO: 183 - DNA, 945 bp, Zea mays
  Clone ID: MRT4577_100168C.1
atggcggcgcagatgcccttcctggcgctgctccagggcgcaggcgtcgtggtggaggcggaggcggaggagcagcagcagcagcacgagcacgacgggcgcaagcggcaggccttcgcgcgcgccgtctccaaactcgacctgctcgagagctgtctcacgcaggcggtggatcccgcggcggaggcgtgtgcgcccgtggccagcaggacgaccgagaggcggaggaagcggccgaggacccgcgcgcgagctgcgccaccgccggagaagcgcagcaagcccgaggaggccgagagccagcggatgacgcacatcgccgtggagcgcaaccggcggcgcctcatgaacgaccacctggcctcgctccgctccctcatcccctcccgctacatcccccgcgtgagccatgcaatgcaaagcccatgcatgcatgctgcgttccgtttcgatctgacgacgcaacggttacatgcaatgcagggcgaccaggcgacggtggtgggcggtgcgatcgactacgtgaagcagctggagcagcggctggtggcgctgcaggcggccgcgggcgcgcggcgcggcagcagtgccgcgtcggacgacggcgtgttcctcgtgtccccgcagtacgcgagctactcgggctcgcgcggcggcggcggcggcctcggcgtggacgtggaggcgacgggcgcggtgggcgggcacgtgcgcgtgcgcgtagcggggaggcggtggcccggccggctcgtgcgcgccgtcgccgcgctggagggcctccgcctcgcggtcttgcacctcgccgtcacctccgtcgggcgtgacgccgtcgtgtgctgcttcaacctcaagatggaggaagggtgcgaggtggcaacggcggacgaggtggcgacggtggtgcaccagatcttcgcctgctccgccgctggcgcatgctgctga

SEQ ID NO: 184 - DNA, 915 bp, Zea mays
  unsure (1)..(915): unsure at all n locations
  Clone ID: MRT4577_100169C.1
aaanaagagcttttggatataaacggcatcggcaagacaaagctcaagaagtacggggaccgtgtgcttgcaaccatcgaggacttcctgagcaaacacccaaatccaaggagaaacatcagcggcagtggcggcaaagagcactccgaggcggcaaagaagcgaaggggctccaccgcgagctctgcggtgagctgcggtgacgatgactttgaggaacccacgggccagtccaagaagcgcgcggccaagacgcgaactgtctccgacgccgcgagcatggtccacggcgcccgctgcatcgatgccgatctggatggacctgaggtggtggatgtggacgagcattgcagcgtcccgaagcccgtggcgtctggcagagttctgcccaagtgggcacccgccaaagccaaatccaagggtagcagcgttcctccctctaacttattccatgaatttggatacgccaagtagagtacactgtaccagtagggaataggaatgtaggcttgcacatatgtatgtggtcgtctagggataggtcgtcgagcacatgcagcgaggcagtggggtgtgaacggtttttgtgatgcagatgtacattggaactgtggcgtcgaatgtacgcccagctggtagtgtagtgtaggtgtgtagcacgcgtcaagatatacgagaggaggagcaagagttccacttgcttctgtggacagcatcgcggtagttgcagtgtcggcaacctgttactcgtaacatctcttcgacgcgagtactgcgtggccgttatcttttgcgcacgcactaaacatgtgccgcgtgtaccatcaagcaactgtttggtgtatgacgattgacggtaaagttagaattaaaatcaccgtcaccttccgatggctaatgtaatgttgtatgttg

SEQ ID NO: 185 - DNA, 326 bp, Zea mays
  Clone ID: MRT4577_10016C.1
tatggagggaggaaagagaagaatacgatccgctagcgtgtgcgtggcgacgagatgtggaggaagcgagtgggcgccctccttcttcgttctacacgaactttttcctcggccttctcggcctgccatagccgccgtcaccatcttctgcccatggaggaacctgtgtgctctcaaccagtcttgccagagcttttcacctcccagtgctggaagtgattgggggccatacccagataccctttattggtttttgccttacgagggcctgggattgagaaaagaacaccaacgcactaatactggtttcccttttggatttttcc

SEQ ID NO: 186 - DNA, 507 bp, Zea mays
  Clone ID: MRT4577_100170C.1
acgtacacagatctaattctcgaatgattatctgcggcaaaccctttctgacgtgacccaatggcagacgtctcgccgccgatcgtcatgaacacaccaagattggatcaaatacatcaatgacgtacctcaacaaagtgatcaatgagggtaccctgccatgccgcctgccaaaactcaagtcacatgggagacgctgcctccagcattcccttagagcattgacatacctgatcttctgacccgccataatacaaactcctctttactccactggcgtgtggactgatagaaccaactatggtgatcgcatccattgcattgggctgtatgactgctgccacctgatatttaatgacactcatgatgactgcctccatgaggatgtagaggacgatcatattgcatgctcttggtgatggacttgaccttaatgacccactcctgaaaatggaacgctgtggcaagaagaaatgagagatacaagccgagacaccgaagtcttac

SEQ ID NO: 187 - DNA, 349 bp, Zea mays
  unsure (1)..(349): unsure at all n locations
  Clone ID: MRT4577_100171C.1
gtgcacggnacgccccaccacctccagccccgcgcccgccgccacctcctctcgccgccgggaccagcccgcggcctcccagccgcaccaggaaggggtcgattcctccgacgccgcgcctccggcggacgccgcggcgccggagcagccggcggccgagaagcctgagaaggtcaagcgggagcggcggtcgcggtcgtcgcgctggggaggcaccgaggcggcggttcacgcatgtgttgctccagagagaccgctgtgtatattatgatgaatgggcttgggtaggttcctgtgtgtgatactactgttgggcctgattttgagagtaatgctatcgtaggctatg

SEQ ID NO: 188 - DNA, 422 bp, Zea mays
  Clone ID: MRT4577_100172C.1
cggacgcgtgggcggacgcgtgggcggctccgcgcgctagtatatggaggcgtgagcgccctggtcgtgctctttacctcccgaatttccgtgaaaactccaccgctcgtgcagtcgtgtgtgcagttgtgtcgcgccgctggtgaaacccctccacgccggtgttccatcccctgcgcgtggtcatgtgggtgtaccagcgtccgggagatccgtccgtgccctcgggacgagctaggcgaccccgaatcggggggaattccacaccgtagtgcgagacatgagcagaactacctgtctccgtggtcggctcgcttgcgcaggcaattcctaacgagccagtgactgatgatccaggtgttcagcaggtataggttgctgagcatgagctcattgaaggagaaagaacatgtggcccagga

SEQ ID NO: 189 - DNA, 414 bp, Zea mays
  Clone ID: MRT4577_100173C.1
aacaggaatcgctaatattatcaaataaaacaaacccggatccccttaaatttttgtcccggatgaacgatccgggaaaagcattcatttttttgttgtgcttattattcaaacatataaactacctacaagctcattcttaatgcactatgctcttcgcagttactcggagggcttgtttccccccgcgaaattccatgggcttttggagacccctttaataggggccaatttaaactatgcttccgtaacgagggtggcggcaaatcccttttgaacctccctcgggccacccggcaggtcctttaggccgcctttcagttggggttccgggcccgggggtaacgccccctccataagaatctccacagccgcccaccagaaataccccagaattccccccacctccccaaa

SEQ ID NO: 190 - DNA, 1157 bp, Zea mays
  Clone ID: MRT4577_100174C.1
ataatgaatggtgatctaacaatttaaacaaagacaaattgtgttttgtcagaagatgatgaaccacctcgttcatcaaaccaacacactgctaattaatgttgatggttggatttatcgaacaaaaaaaataaaatggtctcacgatgagtcattcatatagcaagggattcctcaaataataacaccacaaaaaaagtttgaaggatcccttactgctactgcgtgtcatcatgctagttagctatctttatctcttgaaagtaggcggtcttctgacttttgtagcttgctcgaacgcataagcgatctcaatcaacctcggctcgtagccctggagcccaccgaagcagatcgcgaaggggactccttgctcatcgtaccccgccggcacggcgatgcccggatagcccccgacggcgagaacagaggaggcgtcgctgttgggcgccacgatcgcatccaggcggcgttccttcatcagcttctccagcccattggtggagatctccctcagccgccggatggcagctctctcccttgtgccgatgccgttggtcttctccgcggcgatcagatccggctgcccaaaatctttgagcctctcctctacaggatgcgcttcgttgaatgctatgacttgtgcgagggagcggactggagagtacagtaggcccgacaagtaagccttgatgcttatcttgaactctgcagccatgagcaggatctcttgctcacccagatcagtgaaatttgttgcgatgtcaagatccatgatcacgacggcgccttgttgcctcattgtatcgagatgcttctcatagaccgccagttgcgtatcatcgtatccttgaaaaaacacgtcggggacaccgatcctcttgcccctcagtccgttggtcctcaggaactgcgtgtaacccccgtgtgggatgtatttggacgctgctccggtggcttcagcgtcaagctcgtcgtagccgacaatgacgtccaacacacggacggcgtccgaaactgtgcgacacattggtccaatagtgtctgaagaggcgtgatggggatgacaccggatcggctcgtcaacccaacaggagcgctcggagtagcgccatggagacagatctagatcccggccggcctcgaggtacccaatg

SEQ ID NO: 191 - DNA, 676 bp, Zea mays
  Clone ID: MRT4577_100175C.1
ccttcgaccgacggcaacaacctccattgatccattcactatactcctactacaacgtgcttcgctagccagagctgcaaaccaaccaactggggaagatctacctacccaatcactccctccaccatggccgcgcccgcgcccaccgtcgccaagtcgccgccggcgctcgtgcccccggcggggccgaccccgggaggcacgctcccgctctcctccatcgacaagaccgccgccgtccgcgtcatggttgacttcatccaggtcttccagtccgcaccctcctccgccgacgaccaggtggccgccatgcgccagggcttcgccagggcgctcgtcccctactacccggtggccggccgcatcgccgagccgtccccgggcgagcccctcgtcgactgcaccggcgagggcgtctggttcgtggaggccgccgccagctgctcgctcgccgacgtcaacggcctcgaggaccgcccgctcgccatccccaaggccgacctcatcccccgccctcccgccgaccacaagctcgaggaccagatcctcctcgcgcagatcaccaagttcagctgcggcgggtacgccgtcggcatttgcttcagccacctggtgttcgacgggcagggcgcggcgcagttcctcacggccgtcggcgagatggcgcgggggctcc

SEQ ID NO: 192 - DNA, 533 bp, Zea mays
  Clone ID: MRT4577_100176C.1
ggggggtgggggttttttttttttttttttgttttttttttttttttttttttttttttttttttttttttttttttttttttttttttttttttttttaaacaaaaaaaggggggggtcttttttgctaaacccccctttaggggggggggggggggggggacacaatttttaaattgcaaacccccctaatggcatgggggggggagggattttttggggggggggagggggccaagccccacattgggggggggttttgggacggtgccaaaattgccccccccctttgggtagcttggggagaaccacaaaaccaaaaaggggggggggggcgccccccccggattatggattgaaccatgttttaaatcgcctgggaaatggtttggggcccaaaccgcctaaaaacaaaacaacattgggggtgaaatacctggcagcttcttgggtgtttaaaacgggattgggaaaaagggattacaaaaggggggaactggtgccttaggaattcaaaacaattttttaaattt

SEQ ID NO: 193 - DNA, 197 bp, Zea mays
  Clone ID: MRT4577_100177C.1
gggggctggcacaccatggtaccccaggcactttatatatatatttaggaatcacagcatttggacgagctcaaaaaagttacatgggtacgggggcaatcacacttaagttacatggggggctattcataaaggtatatgctaggatggtcttttttggatttaccattacccggaaattgggaaaggaaaggttg

SEQ ID NO: 194 - DNA, 268 bp, Zea mays
  Clone ID: MRT4577_100178C.1
tattgtgagaattcttaattcaagagttatagggagggacttatgtcaccacaaacagaaactaaagcaggtgttggatttaaagctggtgttaaagattataaattgacttactacaccccagagtatgaaactaaggatactgatatcttggcagcattccgagtaagtcctcagcctggggttccgcccgaagaagcaggggctgcagtagctgccgaatcttctactggcacatggacaactgtttggactgatggacttacca

SEQ ID NO: 195 - DNA, 337 bp, Zea mays
  Clone ID: MRT4577_100179C.1
gatgggaaatttacatagggatattaaaatgagcgagccaagagttcaagacccgttcgctgtgaaccgcgacaggtttccttagtgcctcttcacagaatcaacacaaatttattcttcctaattcctggacaaagaaatttacggttgataacaacacaactgcttcatcctcaactgtgttcttaacagaacattatccttgaatcctttaatcagtatagtacaagagcaaggatttttcacattccccacaaatgtgtccttttctttttacgagacattacttatggacaagttactgatgagccttgaccatttttaatccaaggcatta

SEQ ID NO: 196 - DNA, 580 bp, Zea mays
  Clone ID: MRT4577_10017C.1
cggagtggactactgggcagctccgggttctgcggctgtccccgcagcgcacggcaaagcgccagctggttcagctcgaggagaccaatgggaaaaatacatcctactcaccacagactgtgtttgtatcacgtgcaaattgttcaggatgaaagggagctcaagaagcagaagcggaagcaatccaacagagagtccgctcgcagatcccggctgcgcaaacaggctgagtgcgaggagcttgggcaacgtgctgaggctctgaggtcggagaactcctcgctcagggccgagctcgagcggatcagaaaggagtacgaacagctactttcacagaacgcttccctaaaggaaaagctgggggctgccagtagtgattcgcttcctgatatgaacgaacagaacgacggcgacggagacggcggctacaggaagcagcctgattccgatggccaccagcctgggagcgagtcctgacccgtttttagctcaggattcttttggaatgcacattgcttatatattcattctcttgaacgttgtggaacgcagcataggaaggaaatccaactttaattag

SEQ ID NO: 197 - DNA, 1456 bp, Zea mays
  Clone ID: MRT4577_100180C.1
acatttttttttttttttttatttctaaagtccttattctttttttcttgatttattttcttttttatttttcttgataggaaatttacataataatattaaaatgagcgagccaagagttcaagacccgttcgctgtgaaccgcgacaggtttccttagtgcctctgtacattgggacaggacataaattattcgatcctgatcgtacatacacacatttgggaacacgtattttatcaaataaatttgtgtcggcctggtaccttcacagtatcaacacaaatttattcttcctaattcctggacaaagaaatttacggatgataacaacacaactgcttcatcctcaactgtgttcttaacagaacatcatccttgaatcctttaatcagtatagtacaagagcaaggatttttcacattccccacaaatgtgtacttttcttctacgagaacatactcatagacaagatcagatgagcctagacaattttcagtcaagtcatcaactgaattgatagctccaccaccacgtgatagctcgaagagcaataatcccgctctagcaaagagatccagagatggagggtcaatgcccttctgattgatcaccacagttttttatcaactcggctccggctgggatgaaaagaccgccctctcaatattatattaagaagagactgaaacatggtcccgtccgaaaaaaaaccccgaactctgcccccggccttaacgggccgatcaacaggccactctgcaacggcccagacggagggtggcgcgcaggatatcgacccccgagaccgggcgggacacaacgaggggattattttaaccaagcccgaaattcgcccccgagagagatcgaacccgggacctggagttgctacttggaagccttaaccacagtttttatcacctccatcacaaacctttcttccacatatcccaccacataaatagatcaattggtgaggtcttgtatagggcagtgtacctttcttccacatatcccaccacacaatgccttggccatcaatagttccattctcacctcaacctttccatcatgggaggaggtaaagcaaagggcgattgtaaccacgaagtcagtagcttctttatggaagcctgacacttgagatttgactgatggatgatgaatctttcatccatagcaaatagatcagctaatgtgtcacacttggcttctaaccgggcttcaatctccctagccaaagatctttgataataaaccctgttcgcagacatcgatggctgccctggttgcatctggacttgaggaacaaaggggtccgataggaacatatacttgaggaactgaaacctgcattggcgcatccactacatgctccattctcctttgttcctttctccagcagcaattagccagtcaggtcggagttgtaggggaccaagggaatgaagtatt

SEQ ID NO: 198 - DNA, 393 bp, Zea mays
  Clone ID: MRT4577_100181C.1
cggtcgcgtgggcggacgcgtgggcaagcatttaggatacacggatgtaaactagaggccagtatacattgaacactcaccggaaccaaaagaaaagggagtactactagtcgatcacagtcaatatctgaacatgtagtttgtatatctctgcactcaattaatcctcatacacaaagaggacatgaagtattacatatttatgaagcgaacctctacaaatcgcccgtgtggataaatatgaacctagacatttgaaattagaattttgtttttagatagaatatctcatggatacgtaacccactaaatttccgtcgtgtgcatcaatataggatacgtattgaattgaatacgtgatacaatacctacccggggtatcggggtaacact

SEQ ID NO: 199 - DNA, 627 bp, Zea mays
  Clone ID: MRT4577_100182C.1
ttgggaccctcgaggccggccggggaatccattggtgactgctcgaggcaacagcgcaaacgggaccacagacagagtgcgcttcgaggacttttttttttgacataactactaggagaggaggagatggaggtcaccatcacctgtgtgtacgttaggcacaccttcgacagcctccttgaccccaccggcgaggcggacgcgattcttaacgacctttgctacatcaggggggacgaacccaacgacgcatcccctggaatatatgaagctcttgtacttgtggcatggaggtctgattatcttggcaagggtgttcttcatgatgtcaaccctgtaacacaacattattggaccagcgattgttggaaagtaccccactgaacagggtgagactgactgcttcatgggccaacagcttgaccaaacctcctatgagtgctgatgatgcaaacaccacgcttggagctgatgacctccttgagggttcacttgctgagtgcaaagctcggagctatggttgaacaagatgtcctctttaccatcacatctgaaatctttgtggcaacaaaactctgcatgctccctgtacctgcctttaatgtgactataggacgtcctcatgct

SEQ ID NO: 200 - DNA, 297 bp, Zea mays
  Clone ID: MRT4577_100183C.1
atggttgactggcaagacttcctcctccgacgccccccggtggctgatcccaccagttaccagagtcttgctggggcactgcagtacctcgtcttcacccaaccagacatcacctacactgtccagcagcggcaactagccgttttccgctctagcgccgaggccgtgtaccgcgctgtggctaacggcgtcgccgaggcggcatggcttcgtcagttcgccaacatcttcaccaagggccttcctacgtcggtgtttgaggagtttcggcccagtctcaacatatgtcgtggctag

SEQ ID NO: 201 - DNA, 393 bp, Zea mays
  unsure (1)..(393): unsure at all n locations
  Clone ID: MRT4577_100184C.1
aggaaaacaacatgaatgaaattaaaagatttaacaaggaaagacnccagggttgggtggagatgtttttgggctttgtatccgatcaggccacatactcggaccattttgctagcatatggacaaaggtagcagaagaaacaaaaggatatgcaaaaagcagcagttgaagtacgatgttcatatacaggtgaatttgagctgttattgtgcagcgtgaaaatagctacaccattgagaatcatgcgaccggcgtatagactgacaggaccacactctccattaccgaagggacacatttctatggacttttctgggaattggtatctccagcaatggatcgaatcttgcacgagctacaggcgtacaaagtactaaaaagaaagagctggc

SEQ ID NO: 202 - DNA, 148 bp, Zea mays
  Clone ID: MRT4577_100185C.1
cagaccgaaacctccgccctagacagagcagggatccagtttctcctcgccatgggaatacacctccgacttatcagggaaacaagtacataactcattttgttgcggcaggaccgattgtcgcacccatgggtacagcagcggtcac

SEQ ID NO: 203 - DNA, 267 bp, Zea mays
  Clone ID: MRT4577_100186C.1
gtccatgaaacctcggtccctggagggccttttacaaaccatcgttggctagttccaaacaaaccgaggtggataagcatcttttctgccccccagggggattttcttatcaaccatattgtggtcccacctttggcaagccatatgtcaaaacatctttttctttgctgggttcaaaaacccctgacccagttggggagacaccctttttttaatcctaactgccccacctcattacgaaaatgttttgcccccccctgtttcccc

SEQ ID NO: 204 - DNA, 325 bp, Zea mays
  Clone ID: MRT4577_100188C.1
cgatgtgggcaggcggatacgacccatgaagcagccgctgctagcggattacatcaccgaagtcgctagtggcagcaccaatcctaggcacatataacaatacagaccattggaacgcaacagcagacagcaattactaccagcactgacacatctatgcatggtgaaccctgccgcctacttgcaaatcggtggctagcattagaccgacctgctctcagcaaacagaggtgtaaaccagacacaacaacagctgcaacagtttctgccagggctcaccaaactaggcatggtgaaccctgccgatacctacaacataacaact

SEQ ID NO: 205 - DNA, 857 bp, Zea mays
  Clone ID: MRT4577_100189C.1
gtgcagcatattacccatgcatggacatattgtatgagtgctatgaagacgtctcttctggaagtgagattagaagtgtggtgttggcggggaggtgattttatgagaaggaagggctccctgctttccctatgggaaaaattgatcaaacacgaatgtggaaggtgggtgaaagggtccgttcaaccaggccacatggtgatcttggcccactgcatcccttcactgctggagtgtatgttgcactaatgatggctcagattgaggtccttaggaagaagggccactcttactcagagataattaacgagagcctgatcgagtccgtggactcgttgaacccgttcatgcatgcccgtggtgtggccttcatggtcgataactgctccacaactgctcgtttgggatctaggaagtgggcaccacgcttcgattacatcttgactcaacaggcgtttgtgactgttgacaagaaagcaccgatcaaccaagacctcatcagcaacttcatgtctgaccctgtccacggtgccatcgaagtctgcgctcagctgaggcccactgttgacatctcagtgaccgctgatgctgatttcgtgcgcccagagcttcgacagtcttcataagcttgtatggatccgcagtgtggctgcaatggctagtttgtaagaacttaaatatgcctgggcttttgaactcttagattgtgcctgtattgctcatgtttgaggaccagaaaaataaactcttggcgatgtggtactgttgtgatttgcaagaataaaaataaatggttccaactaaatgtctggttcgctatatatgcccttttttatgcgaaataaaaagtccgggat

SEQ ID NO: 206 - DNA, 384 bp, Zea mays
  Clone ID: MRT4577_10018C.1
cccacgcgtccggccctagtacctgcgcaaggtcccgacgaggcgcccctctatgcatccgccatacatagccgggtggggcagctctcatagactaggctggatgtggagccggacgctgaggtggcttaggatgatgtggcactaagtttggactccacgcacaatgcgtttaaagatgcgatggatgagtgggactcacacactgctgccagatcgattgatgatatggatgcatacctgcaacatctgagaaaggatgtacccatggtacagcattgcaatcataatgcatctgttgagactagtgtcactgcagatacaacactgaatgacatgattcaattggatgttggaatccaaatgcttgaatatgtgattact

SEQ ID NO: 207 - DNA, 235 bp, Zea mays
  Clone ID: MRT4577_100190C.1
ctagttcagatcgctagccgccgccctttttttttgaccgggtttgtgaccggacaaaatctgagtccttcgacactatcgatcgaggtctaaaggccgcagacgtccctaaaagattctctggaattccgagcagcctaattaagacccttgattcagcagtcggatgggaaagtggcttccggtttcacagtggattaaagagttggtattgccaaccttgacgctgacaaac

SEQ ID NO: 208 - DNA, 334 bp, Zea mays
  unsure (1)..(334): unsure at all n locations
  Clone ID: MRT4577_100191C.1
gggggggcgggggggagcacaccaacaaccaggggggggagagaagacccacaaaaacaggggggggaanggccaaggngacgcgggcaaggggaccaccacaggacaccnnancnacaagcgaggaggcaangacaagcgagagaacgagaggnaggaggaggggggggangaaangaanaagcggnccaaaaagnacgcgngggggcgggacaagcacaaggcngagcgagagagaggnancaccaaaangaaagcncngnggaagagngagaccaccaagnacnacngcacgggcanagaagccccnggacaccgngacangannaagaac

SEQ ID NO: 209 - DNA, 417 bp, Zea mays
  Clone ID: MRT4577_100192C.1
ggccgcttttttttttttttttttggcttttttttttttttttttctttttttttttttttttttttatagagagatatagagatctgtttacacaattactgtatgcatttcaatctgcagcaaacaaaaaaagtagagcacccagtacggcctgcgaaccggctgagaccaaacaacactttaaatgggggggcaccctggagcctcctgaaaccaaggctgaaaacacccactctcggtagaactttaagttgaggttagaaaaaacagaggggggacaaaaccccttcccgaataaaatcaggggcacagttagaggatccctccaagggacaaaattatttgaaaaaaaaaagaagagaacgagataccgctgtccttaaaaaagaaaaacaccttggcacataatttaaaa

SEQ ID NO: 210 - DNA, 552 bp, Zea mays
  Clone ID: MRT4577_100193C.1
ggagggccacccatccttcacaaaaaattcaagtttgcaacatcacaaacgccaaatttacaaacacaacaaacccccggggggggggtttaagcccccttcacatactaaacgaaaaaatccaaccagggttttcctgactgggggatcatcaaacagcctcacaagtcggagggtaatagtttatctaaaagttcatacccagggaaccttgtttcaaagggatcaaccttgtccaaaaggaggtttgacatcccagttttcctttaaaacagggaaaacgggcgatcaccaccttgcatggccccctgggttataaactgatcagttttttccaaaaaaaagcaggcaaaagcctttgcccggaaaaggggctcaacattaccggttaccctgtaaagggaaaaaaacccataggctttcccgtttacaccggggcatattccgactcttttaaaaagccctgggttccaaacaacctaaaaagcctttgaagttgattgcttgaaaaaatcatcatggaaaaccttttatgctttaccaaggggtaaa

SEQ ID NO: 211 - DNA, 418 bp, Zea mays
  unsure (1)..(418): unsure at all n locations
  Clone ID: MRT4577_100194C.1
acccccgggggncgactctatagaaaancnagaaccaacctcgcaaaagatactgttaaacacgaaccaaacacnaccccagaggggggcccanacacgaggcaacagcgggcaaccaaaccacccaagaaagaacagcacagaaaaggacgaaacacggaagcaagagccgaaagcgaaaaacacccaccccccaacagcgcacacaacgaagcgcaaaacaggccaccaaggaacaaacagaagccccgccaaagagccgaagcaaccacccggacaccacgacaggacaaagacgacccaacgaacgcccaagcgaacgagcacgaaggcaaagaaagacgcgaaagaaaagcgcaaacgaacgccaaacacacgcagacgaagccacacccagacccggcaaccccccacgaac

SEQ ID NO: 212 - DNA, 250 bp, Zea mays
  Clone ID: MRT4577_100195C.1
cgtctctcctcttccgttcctctcctgcctccagctctcgactgtctctgagccgcacaactgaactgcgcgattgcgctccgcgctcctcgtctccgtcctcgccgcgtgcgctcgtgctcgcgctcgcccgcgcggactcctcctcgtcgccgctcctacaccaccgcgtacgacgagctccgcgtccggggcttcccgctcggcctgctcccggccaacgtgcggggctacacggctcgactccggc

SEQ ID NO: 213 - DNA, 391 bp, Zea mays
  unsure (1)..(391): unsure at all n locations
  Clone ID: MRT4577_100197C.1
ccctttttttatcacccnnacaaaanaacaaaagggtggtttttttaatgtttctgcggttttttccgcaaaaaaaaaccggcggggacaaaaacagggggacaaaacaagccaacaaaaggaaaaggcaaaacaaaacccggaaaaagaagcaacccaaggcaaggcaaaaaacctagaacaaaacaaacccaaaacttgggggtctaaaacccaaactgggaaaaaccttaaaaaaaaaaattttttccgaaggaaaaaatcccccccgcaaggaaaccaagggggccagcttaaccaaaccgcccctagggggaaaagaaccccaaaaaaacagcccaaaacgaaaacccaaccgaggcaaaacccgcaacgccttgggcgcccaagc

SEQ ID NO: 214 - DNA, 1400 bp, Zea mays
  Clone ID: MRT4577_100198C.1
attcggctcgagagggagggttgttgtagacagcctaaccccttctccatccgacggcggacaccagcttccctccgcccgcccacatccctgctgtgtgctgcgcctccccgcctgatcttgtcgcgcccgagagaccgcgcgccagggaacgtcggccgccggagcctggcctgcattccgggggcagcgagaggatgttgcgttgcgcatacacgcagcggcggtgggcgcaccgccgggggggcttcgtaaccggcagcaccggttggtccaagccgccaccgccgggcctcggccgcgccgcgggggttggtacgaagaagtcggagtggtggacggtggacggggagatgcacgagatcggggaaagcgtgccgcatcgcgagcgcttcgccatcccgcgggacaacctccctaaccgccgccgcaagcagatgcgggagcaattcatgcgccgcacccgcctcgttctcaaagactcggaacacgaaacatggtgcaaaaattacatggaattataccaagaacttagagaaaactgggaaaggttgtactgggacgaaggttattcaaaaaagattgccgaatctcatgctaattatgactctgccgaagaagatgatattgacttctcgccatacagcaggagaaggcagtccaatgtagaaccaaacaaggaccttggcttcggggtgaacaaacgaggtgaaacgtgggaaagggttactcaaattcgtgacaaatttgaatatgacagagaaaggagaatgagagaacgagcatttgctcccatgaacactgagaacaattatgctcggcgtgacccaagatttagaagccaggatgattcaagttttgctcatacgaacttgagtgatgattttggcttgcatgttcaaacttttggaaaccgttctgatcaaagttatgaaaatgagtcaaatttcaggaataagcgtgattcaagtttccaacatgaaccaagtgacagaaaccagcgtaatttaaatatccaaaacgaaccaagtttcagaaaccaccgatatccagatttccaaaaccaaggtggcacaagaagtcagacatttgatgagtagagggtgaaaaaaaagtggctactgatttgctggcaacgtgagcatgctggttttgctgatttctgtggtggctcgtatgagatgttgtaatttattctaaaatgattggtgtaagaaactatctcttgtggtagctggttgcaacaaaatagaaaggaagagatctgctgttataatcttgtaatatacgttggctacttactaagccaaaaaccgtaggcattggattttgggcttgcacgttgctgagcaagttaaaagttggaataatgaggctaatttccaaatctgcctttgcaa

SEQ ID NO: 215 - DNA, 938 bp, Zea mays
  Clone ID: MRT4577_100199C.1
ggaggccacgccgcggccgcgccgccgacggctcgctgcggacggaggtgtccgtgacgcatgccgagcgcgggtagctcgaggttgtggtccggtgccgggaccggcccaagctgctgttcgacaccgtgtgccccatcacggacatgaagtacgtggtgcaccacggcaccgtgagcgctgagcccggcggcggcgcgtaccaggagtactacatccgccacgtcgacggccacgccatccggtgcgaggacgagcagcagcgcctcgtgcggtgcctggctgccgccatcgagcgacgcaccgccgacggacttgagctggaggtgcggacgggagaccgcgcgggcctgctctcggacatcacccgcatcttccgggagaacgggctcaccattcgccgcgccgagatctcgtcctccgacggcgaggccgtggacacgttctacctatccgacccgcaaggcctccccgtggagaccaagaccatcgaggccatccgtgcacaaatcggcgaggccacgctgagggtgaggaacaactcgttcggtaccggggaccacgccgacgtggccggcgctggcacgacggcgttcatcttcgggaacctgtttaagttctacaggccgttccagagcttcagcctcatcaaactctactcgtgatgcgcacttgggtagcaattttttcacatgttttagatagtttttactgtggttagctgttctgctctggagattttccaatagtgtgtaaatatggctatggatgatgatggcgatatatacggatacagtccagtgtaagtatatagttaggcaaggttatgtagctgcattgcatggttaggaagaatgatagttttattgtagctctatagcttccaacaagttagtgtataacagcatctctaagagactctttatttttagctctct

SEQ ID NO: 216 - DNA, 509 bp, Zea mays
  Clone ID: MRT4577_10019C.1
aaaaacaacaaacttatccaggattggccaaagttgggggaaaacccccaacacaaaaaaccgggccctttttaaacccacccctgccccaaacagaaaatccttcaacaccctccttagggggggggccccaaacaacccaggcccttggggggttaaaacaacccttgatttacggccccccccggaaacggaccacaggggggggggggctctcttttggaaggtggaagccggcaagggggcgcccatcctccagttgttggccggaaaaaacaaaaccctgttggcccgggggaagcccctccttgcccggaatcttccccttaacatgggggagggggcccgacctctaaacccccagggttagggtttttccagccagggccttaacaaaaatcggcaaccccccccgggggggaaaaaaaaggggaaggggcctctccttcgggatgttgaaccccggaaaagtgcggccatcctccagttgtttgcccgaaaaaataaaa

SEQ ID NO: 217 - DNA, 501 bp, Zea mays
  unsure (1)..(501): unsure at all n locations
  Clone ID: MRT4577_1001C.1
gtccccacaatcaccgcagcggccagatcccacctcggctactcccgccctggctcctcgccgcaatcaccgcagcggccagatccgacctcgcccagcccatggcacacgcccgagctgcccgcgtcccccaaaatccgccccagatcctccatcgtcgacagagcgtgcaacctcaatcttcaccacatcgcggcgattgcgtccacgcccccgcctcgcgccctcgtgttgaccgccccgcccccaccgcgtacatcaagccgaggagccaacaccgcacccccgcgtgcgtccctgcccccgcgcagtccggaggtccgtgcccgctccacccctcagagatttctccctcgccgaggagctggaggcgacggtggcgtggctacgtcaggagaaggaggttgcagaggacgccacgcgctacggttccgctccagtgtcgngcactcctcgcgcctncgnttnccgtgggcgtncaggtagctgcgcctggagctg

SEQ ID NO: 218 - DNA, 331 bp, Zea mays
  Clone ID: MRT4577_100200C.1
attctcccaatccgcgcgacggaaacacgccaaaccacaaccttatctcttttttcggcctgtaccgccccctctatcggacggatcggtcagctatcgaccacagcgaagctctgacgacggattcggagataggccgtcctcaggatttctcgcgccaacaactgctggattgttgtcagaagagcattgaggatgggagaaagcgtaattttactacaggatctgctggagtatacatgcaaaatggagctgaaatgatgattgcctcggatattccagaaagggactggttcctctatgacttgaacttgggcggcgacacgggcga

SEQ ID NO: 219 - DNA, 1987 bp, Zea mays
  unsure (1)..(1987): unsure at all n locations
  Clone ID: MRT4577_100201C.1
tcgaggcncggcnncgggccggacatctacaactaaagctgcagctagctgcattatacgtgctcgagggaatcaaaagttgagcctctcccatctcaatcaaatctacaggggagtagctcttgctcttggcttcgctggctaacaatccgtgaactgaacaccttccgcctcccggcctccttctccctgcccggtgctgaagaaccctgccatccccggaactggatcgatctgccgccaactctgaaaatccatccgatccatcctctttgtcgtccaagtctactccccgatggacattatttaccaggacagcagttgtcttgccctagagcaggcgctacatgatgaaggcgtgggaccaatcgacctacctttcatgcttctcagggccatcacaaaagatttctctgatactcaactaattggcaggggtgggttcggagaggtttacaagggagtgcttccaaatgggatggtcgtcgccgtgaagaagcttcttgacaagatcgatgtcctagaggcgaatttccaaagcgaggttgcttgtctcatagaggtcaagcacaagaacatagtccgatgtctagggtactcatccgagacgcaacatgtgagggcaccgtacgaaggaagatttgtctgggcagacctgcgccaaaggttgttttgcttcgaatacctaagcaaagggagccttgccgattgtctgaccggggcatcttttgcacttcattggagtgtgcgctaccaaataatcaaggcgatttgtgagggtgtgggttatcttcaccagcacaatattattcacatggaccctcagaacctcaaaatatacttcttgacgataacatgttgccaagattcggggattttgatctgtcaacgcgcttaagtgaaaatcagagcacgatcattactaaaagtgtaaatgtgacgccgccaatgtctccagagagatttggattttgccattataaagaataggcttcacgaaattgccactggtctcgcaagtgacacctataatcaaagagatgcaatgcaatcacattcaaggcggacatatacagtctaggtgttataatcattgagattctgacggggcataaggaatgcaccagtgttgacaaggtgcttgaaagttggacggacatgtttcagacattaggaagccatccactactagaacaagtagaagtatgcgctgagatagcgataaattgcatgaacgatgacccgagcaacaggcctaccatacaggatattatctccagtatcgatgaaacggacgctcgaagtgtcacaagttcttcaccaggagggcaggttattaccatggccggcagcgaaagcagcagcagtaggagcaggtcgccatgcgcgtcgtgcaggatgctgcgccagcagtgcacacaggagtgcgtgttcgcgccctacttccccgccgaggaacctcacaagttcgccatcgtccacaaggttttcggtggcagcaatgtcttcaagttactgcaggagctgcctgcccaccagagaggggatgcggtgagcagtatggtttatgaggccaacgttcgcaccagggaccctgtctatggctgcgtgggcgccatctccgtgctccagcaacagatctcccagctccagatgcagctctccatggcccgtgctgagaccttaacatcagcattgcagcaacagatggatgtcaatggtagcctactcagtcaaaatagctttgacagatatggcaatggtgacctgaaacctgactccccgcctgaaattcttccattggaggatgacgatgaggaagtttcttccccaatgtctccagagagatttggattttttcattataaagaataggcttcacaaaattgccactggtctcgcatttcatagactcaggtagtcagatggacccaccgttcataaactaagtgacaattataatcaaagagatgatctttcgagtgac

SEQ ID NO: 220 - DNA, 1390 bp, Zea mays
  Clone ID: MRT4577_100202C.1
aaacgagccggccgggattagaaaactaaaagtgcagctagctgcattatacgtgctcgagggaatcaaaagttgagtctctcccatctcaatcaaatctacaggggagtagctcttgctcttggcttcgctggctaacaatccgtgaactgaacaccttccgcctcccggcctccttctccctgcccggtgctgaagaaccctgccggagatttgtttgttcctgcggtgttatttcccccccccaaaatctgttggtcttattttccgctctcccacaatcgcttttccttagatccccggaactggatcgatctgccgccaactctaaaaatccatccgatccatcctctttgtcgtccaagtctactccccgatggacattatttaccaggacagcagttgtcttgccctagagcaggcgctacatgatgaaggcgtgggaccaatcgacctacctttcatgcttctcagggccatcacaaaagatttctctgatactcaactaattggcaggggtgggttcggagaggtttacaagggagtgcttccaaatgggatggtcgtcgccgtgaagaagcttcttgacaagatcgatgtcctagaggcgaatttccaaagcgaggttgcttgtctcatagaggtcaagcacaggaacatagtccgatgtctagggtactcatccgagacgcaacatgtgagggcaccgtaccaaggaagatttgtctgggcagacctacgccaaaggttgttttgcttcgaatacctaagcaaagggagccttgccgattgtctgaccggggcatcttttgcacttcagtggagtgtgcgctaccaaataatcaaggggatttgtgagggtgtgggttatcttcaccagcacaatattattcacatggacctcaaacctcaaaatatacttcttgacgataacatggtgccaaaaatcgcggattttggtctgtccaggcgcttaagtgaaaatcagagcaggatcattactaaaacaataattgggacgccgtaggctacctaattacctccgagcatcttttttgatttgtcaacagctcagttgaatacccgttatttgatttaccactcactacatcaatattttttattcttcacgcagggggtatttggcacctgaatttctgagcagcaatgcaatcacattcaggacatatacagtcttgttataatcactgctgacggggcataaaatgcaccagtgttgacggtgcttgaaagctatgttcattaagcgatgtgataacatccatcagtcgtcacaaacatctcatctttcttacatagcaaatgttttgagcactactatatatacattttcctggcttgtgtccgtgttaaggtttgcatcgttctg

SEQ ID NO: 221 - DNA, 124 bp, Zea mays
  Clone ID: MRT4577_100203C.1
acggcaacagcatatggtgagatcgaatactgtatagacctagtcatcatccgtagcagcctgttcttttaaaccagacatggactgaacaaaacttgagcaccatgaatcctagcaaaaaata

SEQ ID NO: 222 - DNA, 144 bp, Zea mays
  unsure (1)..(144): unsure at all n locations
  Clone ID: MRT4577_100204C.1
gaaaaacgggccgacccacacaaacggcatggttttcgtcaacaaaacccaatttcaaatcttttgtagcttcatacgctgctgccgcgtttttctaaaaggaacgtgggcctacctaaacacantcttcaacattacataaat

SEQ ID NO: 223 - DNA, 210 bp, Zea mays
  unsure (1)..(210): unsure at all n locations
  Clone ID: MRT4577_100205C.1
actaatgctagngntcgcncngtaggggcggttacaacaggaaccctaaacgccgccaccgccgccccctctccctcaccccctctcaccgccgtcggcgctcgtcggtgggcaaatcccgttggtggccgacgatggcgggatctggcgctcgcgctggtcgggcacgcccctcgcagtggtgggtgttgtggagtttttgcctgcgac

SEQ ID NO: 224 - DNA, 213 bp, Zea mays
  Clone ID: MRT4577_100206C.1
cgcgggggagcctgacccttacgccttcgctcgcgccgacgccgccagcgccggcacctgcacctccagcagaaactctggcgtgatgaagcctaggtgtggttaacgcaggcgcaggatcgtattatttcttcttggcaggactcttggtgcgcggggcgccgtgtggcttcttcctctccacactcgtgatctcttcaccatcagcgtgtg

SEQ ID NO: 225 - DNA, 267 bp, Zea mays
  Clone ID: MRT4577_100207C.1
tcggcctgtgtagaacctataacattggcgccactcaccagtgcaatcgacatctgtaggcatggactgcagacgaggcgagccgcaaggggaataagggagcggacgatcgcaaggcatgatgttgcaagaagaagattattactcatgtccttagggccgggctgtagttcattgtttgtctactaggtcgatacctgcactaatgccaggactcgcaacgcgtgggcactgacgctcaagtttacctagctgacggactggagt

SEQ ID NO: 226 - DNA, 2317 bp, Zea mays
  Clone ID: MRT4577_100208C.1
cctcgaggccggccgggaccgggttggatggagattacatactcgaatagtcagccagccagccggcttgaacgtgcagttttcccctataaaacggccccgacccgtccagtgcccgggcgggccaatccaatccaaaccgtcccttgtccctctcttcctcgaaacgcagctatggggactcggccgcggggggtcgtcctcgcgccatgggcggtggtgctggtgctggtgctcgcgcttcgtctggcaggcgcgtcgcatgtgatccaccgcagcctggaggccgaggcggcgccgtcggtcccggcctccattgtcagccccctgctcaggacggggtaccatttccagccgccaatgaactggatcaacgaccccaacgctccgctgtactacaaaggatggtatcacctgttctaccagtacaaccccaagggcgcggtatggggcaacatcgtgtgggcgcactcggtgtcgcgcgacctgatcaactgggtggcgctggagcccgccatctaccccagcatcccgtccgacaagtacggctgctggtcgggctcggcgacgatcctggaggacggcacgccggcgatcctgtacacggggatcgaccggccggacatcaactaccaggtgcaggtgctggcgctccccaaggacgcgtccgacccgctgctccgcgagtgggagaagccggaggagtacaacccggtggcgacgccggcggccggcggcatcaacgcgacgcagttccgcgacccgacgacggcgtggcggcacgcggggccactggcggatgctggtgggcagcgtgcgcggcgcgcgcgggatggcgctggtgtaccggagccgggacttcaggacgtggaccaaggccaagcacccgctgcactcggcggcgctgacggggatgtgggagtgccccgacttcttcccggtgtccgggccggggctgcaggccggcctcgacacctccgcgcccggaaggaagtacgtgctcaagagcagcctcgacctcacccgctacgactactacaccatcgggtcgtacgacggcggcaaggaccggtactaccccgacgaccccgccggcgactaccaccaccgccgccgctacgactacggcaactactacgcgtccaagacgttctacgaccccgtggagcgccgccgcgtgctgctcgggtgggccaacgagtccgacagcgtccccgacgacaaggccaagggctgggccggcatccatgcgatcccaaggaagatctggctggaccccaccgggaagcagctgctgcagtggcccatccacgaggtcgagaagctcagggggaaggccgtcagtgtggacgccaagctggtcaagcccggcgaccattttgaggtcacaggcatcgcaacttatcaggctgacgtggaggtgagcttcgagctggagctggaggcggggacgagcctgctggagaaggcggaggcgttcgacccggcgtacgacgacgacgcgcagaagctgtgcggagtcaagggcgcggacgccaggggcggcgtggggccattcggcctctgggtgctggcctccgccgacctgcaggagcggacggccgtcttcttcagggtcttcagggacggacacggcaagcccaaggtgctcatgtgcaccgaccccaccaagtcgtctcttagtccggatctgtacaagccgaccttcgcgggcttcgtcgacgccgacatctccagcggcaagatcacccttagaagcttgatcgatcggtccgtggtcgagagcttcggcgcgggaggcaagacgtgcatcctgtcacgggtgtacccgtccatcgccgtcgggaaggacgctcacctctacgttttcaacaacggcgaggtggacgtcacggtgtccggcctgaccgcctgggagatgaagaaaccgctgatgaacggcgcctgaaattgaagggaaaaaacaaaagtctatccggccgccacgtgactttctttattttcgttcttcttcttcttcgtcaacacacgtctctgccgccaaaggagaaattgattgatttcaacgtacgtatgtgtacgtctgctgccgatcgaaagagaattggattattataaaattgtttgaggccggtccttccattttctcgtccttaattcctctggcatgcaggatcagtgaccgacgacttgtagtttgcttgagcatgttgtttacgctgctagcttcttgttgtacgatacacatatacaacaatatgacacgatgaataaaaaaagcggccgcgaatttaaaaaaaaaaaaaaaaaatgaggc

SEQ ID NO: 227 - DNA, 190 bp, Zea mays
  Clone ID: MRT4577_100209C.1
gttcccagttctcgctctctcttgcccatccgccacctctgcgtgctcatctcggctcctgtactcgcacctacctctctgcctggttgctcctgcgcctgatccttatgtccccagtcgagattcctatacccgagaggaggcacaggcacctgcgcgagctgcatctgcaaatcgtcgtccccagatg

SEQ ID NO: 228 - DNA, 575 bp, Zea mays
  Clone ID: MRT4577_10020C.1
ggaggtcggtgacgacgagagcatggaggtccaggtccagcagagaggatcccctgcccccgcggcagagctggaggtctccctccgcgagttcaccatgtcggacgcggaggcgttcatgtcgtgggcgtccgaccctcgcgtggtccgcttccagcgccgcgacgcctacgagcatgtggccctggctgctgcggctggaggccgtggcggacgtggacaacccggcgtcgcagcgcgtactggagaaggccgggttcgccagggagggcgtgctgcggaagtacgtcctgctcaagggccagcccagggacatggtcatgttcagcatcgtcgtcgagacggagcaggacaaaccggatgggccatagatcgccgcgatgctatgggctcctggcctttcgctgctgcgcatacggcatacgtcacgtatgtagtgtaacgttctaggcagccatgtatcatgtactgtatgtatggtgatagtataccaccgtgtgtatgtgataatctgaaaggaaataggaaaatgaataatcgtaccaaaaaaaaaaaaaaaaaaggcccctagggcc

SEQ ID NO: 229 - DNA, 378 bp, Zea mays
  Clone ID: MRT4577_100210C.1
gaaacacaaacacccaaaaggaacgggggcggcccccccattccattttctgtaacccaaacaaaaaccaaaggcccgcggggccggggggggttcataaacagaaatgggcccccaccaagacaaataattccaacaccggcagatgaaggaaggggagcaagattgcggcaaaaaggcaccgaccgggggccccaaagggcggaggaaaaaataaggacccttgtaaaggggccgacgaaccccgtaagccttttttaggggtcaattaaccccgaaacaccacgggaacggccattggagacaggggagcccaccccccccctaggggggaaatcaggggaactctccaggggtgggcccacaaacccccgcggg

SEQ ID NO: 230 - DNA, 880 bp, Zea mays
  Clone ID: MRT4577_100211C.1
cggacgcgtgggcggacgcgtgggaggtgagcttcgagctggagctggaggcggggacgagcctgctggagaaggcggaggcgttcgacccggcgtacgacgacgacgcgcagaagctgtgcggcgtcaagggcgcggacgccaggggcggcgtggggccattcggcctctgggtgctggcctccgccgaccttcaggagcggacggccgtcttcttcagggtcttcagggacggacacggcaagcccaaggtgctcatgtgcaccgaccccaccaagtcgtctcttagtccggatctgtacaagccgaccttcgcgggcttcgtcgacgccgacatcttcagcggcaagattgctcttagaagcttgatcgatcggtccgtggtcgagagcttcggcgaaaaaggaaggacttgcatcctgtcacgggtctacccgtccatcgccattggaaaggaggctcacctctacgttttcaacaacggtgacgtggacgtcaaggtgtcaagcttgacagcgtgggagatgaagaaaccgctcatgaacggcgcctaatagaagcgtgaatgacttgattcgtttttcttcaacgacgaccgtaccattgctgccagaaatactactattgattattattagttaattagttaattgttgaggtccttcagttttcgcccttcatcatctgcacaagtgacgactagtagtttgagttggtttacttccattggctggatgattcttcttcttatgtgtgtacacacacggatgggagtataggcattacgtgctcagctgtccggcaaagagaaattgattacgcttcttcttgtattgtacaataatatgagatgaataaaaggctgctaatttacagtgtc

SEQ ID NO: 231 - DNA, 2724 bp, Zea mays
  Clone ID: MRT4577_100212C.1
ccttgtccctctcttcctcgaaacgcagctatggggactcggccgcggggggtcgtcctcgcgccatgggcggtggtgctggtgctcgcgcttcgtctggctggcgcgtcgcatgtgatccaccgcagcctggaggccgaggcgccgccgtcggtcccggcctccattgtcagccccctgctcaggacggggtaccatttccagccgccaatgaactggatcaacgaccccaacgctccgctgtactacaaaggatggtatcacctgttctaccagtacaaccccaagggcgcggtatggggcaacatcgtgtgggcgcactcggtgtcgcgcgacctgatcaactgggtggcgctggagcccgccatctaccccagcatcccgtccgacaagtacggctgctggtcgggctcggcgacgatcctggaggacggcacgccggcgatcctgtacacggggatcgaccggccggacatcaactaccaggtgcaggtgctggcgctccccaaggacgcgtccgacccgctgctccgcgagtgggagaagccggaggagtacaacccggtggcgacgccggcggccggcatcaacgcgacgcagttccgcgacccgacgacggcgtggcggcacgcggggcactggcggatgctggtgggcagcgtgcgcggcgcgcgcgggatggcgctggtgtaccggagccgggacttcaggacgtggaccaaggccaagcacccgctgcactcggcggcgctgacggggatgtgggagtgccccgacttcttcccggtgtccgggccggggatgcaggccggcctcgacacctccgcgcccggaaggaagtacgtgctcaagagcagcctcgacctcacccgctacgactactacaccatcgggtcgtacgacggcggcaaggaccggtactaccccgacgaccccgccggcgactaccaccaccgccgccgctacgactacggcaactactacgcgtccaagacgttctacgaccccgtggagcgccgccgcgtgctgctcgggtgggccaacgagtccgacagcgtccccgacgacaaggccaagggctgggccggcatccatgcgatcccaaggaagatctggctggaccccaccgggaagcagctgctgcagtggcccatccacgaggtcgagaagctcagggggaaggccgtcagtgtggacgccaagctggtcaagcccggcgaccattttgaggtcacaggcatcgcaacttatcaggttagttttatactctagctacgttttgaattccatggatcataaaactgtttttttttacttagtaactagtggcaagctaaggccggcgcccggcggtaacatgtgtgcgtgcgcgcgcacacagctggtcacctgtcaagcttcgattcgcagcttgtcggtagtatacactacactagtactagcagggtatctgtctagccagcccagctgccaagatccaatggtccatgcatgcctgttgtcggcggccgtaaaataatccctgctaggctgctacgttacacacacagccacttgccagcgacaccacggcgcttcgttcgttttctcttctctttcacctctgccgtgcgcgtagtttacgtcgtgcacttgtttctgatttgaagtccggaaacaaacaatgaaacaatcttctgccacacacacacacacacacacacgcacacgtacctgtcgcgtaagaaatcgcggacatgacatgaggaggaggagaatcttccggtgcaatgaaacgcacacgtatgcaagcacgttgttttgatgttgtgatgatggcaggctgacgtggaggtgagcttcgagctggaggcggggacaagcctgctggacaaggcggaggcgttcgacccggcgtacgacgacgacgcgcagaagctgtgcggcgtcaagggcgcggacgccaggggcggcgtggggccattcggcctctgggtgctggcctccgccgacctgcaggagcggacggccgtcttcttcagggtcttcagggacggacacggcaagcccaaggtgctcatgtgcaccgaccccaccaagtcgtctcttagtccggatctgtacaagccgaccttcgcgggcttcgtcgacgccgacatctccagcggcaagattgcccttagaagcttgatcgatcggtccgtggtcgagagcttcggcgcgggaggcaagacgtgcatcctgtcacgggtgtacccgtccatcgccgtcgggaaggacgctcacctctacgttttcaacaacggcgaggtggacgtcacggtgtccggcctgaccgcctgggagatgaagaaaccgctgatgaacggcgcctgaaattgaagggaggaaaaaaagtctatcatccggccgccacgtgactttctttattttcgttcttcttcttcttcgtcaacacacgtctctgccgccaaaggagaaattgatttatttcaacgtacgtatgtgtacgtctgctgccgaaagagaattgggttattaaaattgtttgaggcaggtccttccattttctcgtccttaattcctctggcaggagtgaccgacgacttgtagtagtttgcttgagcatgttgtttacgctgctagcttcttgttgtacgatacatacatgacgaataaaaaaaatgctgctaattttacagtgtcaacaacaagcaacgagagcgttgctccctcttttctccc

SEQ ID NO: 232 - DNA, 454 bp, Zea mays
  Clone ID: MRT4577_100213C.1
attgggacctcaggcggcgggacgcctcgcctctccgctcctcgacagaccaatggcggctgctgcgtcctccgctctgcacgccgttggcgccgtcgcctccgccaagcctagatccgtcgcccccggtacttgtactccccccccgaaagctaatctgcttaccctgtcgcctccgccgcgccgcgccaaccggcgggtgactgccctgaccgatctgcgtcgctcgtgcagcggtggcgacgaggaggagcgtgcgcgtggcgcccgcggccaagcgaggaccaggctcgggaggaggcaggctcgtggctcgcagcgccgttgcagttacgtcttgctgtgcctcttgatgtgctctctccactctacctgatgcgctcccgctctctgcgtcgggctgatctgtttaacctgtgggattgttgtgcgtgcgcaggccaaggcggatgag

SEQ ID NO: 233 - DNA, 330 bp, Zea mays
  Clone ID: MRT4577_100214C.1
ctcagacactctacatatatactgtgcgcgtgtatcatggtatacggagccgaaagctggagcttgcaatggcgggagacaacgacctgatagcgctcggcgtgaggacgagcccgatcgtgatccgggtacgcatcgagctcaacctgaagggcctggcgtacgtacgcggaggaggacctcagcaacaagagcagcgctcctgctgaggtccaacccggagcacatgagcgtgccggagctgcttcacgccgagcgcgccataaacgagtccgaggtgatacatgcagacatcgactaggagtgatcggggacagggcctgacgtact

SEQ ID NO: 234 - DNA, 154 bp, Zea mays
  Clone ID: MRT4577_100215C.1
gggggaacaaacaaacgtttccgtatatccgatgaaaaaaaaacagccgttattgtgttcagggtggtaccggccagcagagagtttgaagaaccacgccatggacacaaagatcaatgttgtcgctgaccgggttatataggtgcctgaacca

SEQ ID NO: 235 - DNA, 527 bp, Zea mays
  Clone ID: MRT4577_100217C.1
tgttcccgttcctttcgcttttagtacctgaccagcctgaccagggggtgggggcacggggacccggcgcagcggccgtcgttcgcgtccgtctgccgcgtcctccgctacgtgaagcggttcgtggtcatgaacgtgaaccccgcccccgcggagcagccagacgcggtggtgccgccgcccgtgccggcggtggactacctcgacatcgaggcgagcctgcagaggaggttcccggcgtggcagcccgggtctgggaacgcggcgccgcgggtctccgacgtgccgttccagatgttcgcgtacagggtggcggagaaggagaggagccgggcggccatcctgcacatcggcggcggcaagggcgcctccgactccagcagcgacggaaactcgctgtgcggggacgagagcggcggcacggtgctgtctgaagccgaggctctgaccgtgtcgagccgcggcgccaccaccacgcggtcgctgccggaaccggctggcaacaggaaagtggatgggagcagggt

SEQ ID NO: 236 - DNA, 721 bp, Zea mays
  unsure (1)..(721): unsure at all n locations
  Clone ID: MRT4577_100219C.1
atttatcggcagaattggacggnacattgaagattacaagtgctcatggctagttgtgcaagcccttgagcgtgctgatgagagccaaaagcgcattctatttgtaagtcggctgcagacctctttgaaacgattagaagtttgttgtctaaaggtttatacaattgatggctctgcaggaaaattatggcaagaaagatccagcctgtgtggcaaaagtgaagaacctctacaaagaacttgacctagaggcggtatttcaggagtacgagaatgagagctacaagaagctgattgcagacattgaagcccagccaagcattgcggttcagaaagtgctgaaatccttcttgcacaagatctacaagaggcagaagtagggtgctcttggataaacgagctcaggagtcgttactccttcgcatgcttgacataaccggacttcctcacctggttgctctagtatgatgtggagcgtctagttaaaaaaaatcgatgtagtatgaagcaccttgctgctctgaatattaacaggcaattaaggcaaggtgctgtttcggtttggtggaccgcatgttgcagataataaattagttgttttgtcatttgcgtctctatcgactttgctagtttgcttcttttggccaccgcccaactagtcgctttcaagagaaaaaaaaaaaaaaaaaaaaaaaaaaaaaaaaataaaaaattcacctct

SEQ ID NO: 237 - DNA, 353 bp, Zea mays
  Clone ID: MRT4577_10021C.1
ggaaaggacaaaaaaaaataaggggattcagggcataacccaaccgggaaaatttatggcaggggaggccccaaagaactaaacgggggcatttgtttaccacaaaccgaacatgcatgttttgaacaatgggggataaagcaccacccaccaggggggggagcgggggcccataaggaaaaacctccgggggcctcccttctgggggcgtctggggggatgttcattccccccccgtcctgggggaggagaacgtcccggaccaccgagcccttgaaaaaacaattccccactgaaagaatggggggaaacttgcccgggccaactacccgggtgttctaaagcttgatgtt

SEQ ID NO: 238 - DNA, 712 bp, Zea mays
  Clone ID: MRT4577_100220C.1
ctagttcgtcctggtggggtgattgtttattcaacgtgtactataaatccaggggagaatgaggctttggtgagatatgcattggatacctacaaatttctttcactagtatcacagtacccgaaagttggagggcctggtattgttggttcgtgcgagctgttcaacaagacatatactgaggaatggttgagagaggatgaagctgaccttgttcagaggtttgatccgtcatcatcagtggataccattggtttcttcatcgcgaaatttgatgttggagagaaagatgaataaacaaacgtgactgaaattccaatgtttggcattcacaacttacgctagggatatcagcattgaattttctgcaatcagatggctcacgtatacccatggagtggaatgcagcgtgccccctgaaattttgtttgccagtgtttgatattttcttttgttcgaagaacattgttcattatggtgaaatgatggggcaaattagattcaagctcctgtagtcccgtttccaagaaaaaagttaccgggtacccgtatccgtccgggtgtaccgggtattttctgggtattggtcctcccattccgtcctgtatctagggagcatttaaccgggtagcaccagcaaaattgtcctgatttaatattcgatatttggtttggctaaaaaaaaaaatataaaagggcggccgcccacttt

SEQ ID NO: 239 - DNA, 241 bp, Zea mays
  Clone ID: MRT4577_100221C.1
ctgagaggtgctgcagatccgagctcgccatacagtgacctctacactaggggcccgaggtggagaactgggaccagcaaggcaccatggcgcagaaggcccaactcagtgacgatgagaagctacacttagtggaccaaaactttatcaacagcccagtgtcccatgctgactgagacgccacgagactcgtctggctcccctcggagaagcaggctttcaaagcagccagcattaagga

SEQ ID NO: 240 - DNA, 211 bp, Zea mays
  Clone ID: MRT4577_100222C.1
gtgaatttggctttgctacctcaatttgcaggtgtgtgtttgcctttataaactgttgcaaatggcagtaatatatttgtgagtaagagcaatatttaaacatttttacacacatcggtgttggaaaattgccattttaggccacaattttgaaaaatttttggactgacttccacagagtgttttgccaccggtagctcatcaattaaac

SEQ ID NO: 241 - DNA, 216 bp, Zea mays
  Clone ID: MRT4577_100223C.1
atggctgggcgattcggcctggcgcgcggcggcgcggcggttgccgctagcctgcagcacgagagcgttgatacgcacttgatgaaggtgctaccgactctgatcttgactgatttgaaggagttgggggttgccaaatggacaggtgcaagaggaaagaatagcgagaaaaggggaaactacactaaggccatcgaaagacaatgggagcgataa

SEQ ID NO: 242 - DNA, 382 bp, Zea mays
  Clone ID: MRT4577_100224C.1
aaaaaaatccctcaccttatacaatcatattcgaggcccaaaaggggccccccccaagtagcatcacaacagggcatttcgggaaacaaaaaaaaaaacgttttgcataactggtccaaaacagtacaaagcttaagcttttttaaaacaaaaacatgcatgggaacctccccaataaactataaaaaaacaaaacccggcccattatcccccattttctgccaaaggggaacccaccttaaaaaaaaaggtcttcgcgggcgggggaatccataaccctaagggctttaaccctcccgccttatttaggggtggccatggtaccgattgaaacctcgaccgcggggtttctttatcccaaaaaccttagtcctttttgggg

SEQ ID NO: 243 - DNA, 888 bp, Zea mays
  unsure (1)..(888): unsure at all n locations
  Clone ID: MRT4577_100225C.1
ccggccgggcttctcttcgccgggactcacccacctttctctcttcttcttccgtcaatttacacgcggtcgcaagtcctacactagttctccctcgttctccccccacctctccacatccatcacaatgactgtccccaacggctccgcaaagggtaacaccttcctcttcacttccgagtccgtcggtgagggccaccccgacaagatctgcgatcaagtctccgatgccatcctcgatgcctgcctcaaggaggaccctctctccaaggtcgcctgcgagaccgccgccaagaccggtatgatcatggtctttggtgagatcaccacaaaggcacacctcgactaccagaagattatccgcaatgccatcaaggacatcggctacgactcttcggagaagggcttcgactacaagacctgcaacgttctcgttgctattgagcagcagtcgcccgacattgctcagggtctccactacgaggaggctcttgagaagctcggtgccggtgaccagggtatcatgttcggctatgccaccgacgagacccctgagctccttcctctgaccgtcctcctctcccacaagctcaatgctgccatgacctccgcccgcaaggacggctccctgccatggctccgacccgacaccaagacccaggtcaccattgagtacgctcacgatggcggtgccgtcattcccctccgtgtcgacactgttgtcgtctctgcccagcacagcgaggacatcaccaccgagaagctcccgtgaggagatcaggagaagatcatncagaaggtcatccccgccaacatgcttgatgacnagaccgtctacacatccaaccctctggttctttcatcattggtggtccccagggtgatgct

SEQ ID NO: 244 - DNA, 383 bp, Zea mays
  Clone ID: MRT4577_100226C.1
attggatgacctatatatgtaaattacgaatgttgttttgtaaaacaatgaaatggcagctacacgaccgaatgctgctaaggtttcttcggttcctctgttcacatctaaactttgcctgcatcagtgtgtgtctcaccagggactttgctggaaccaacaatcaagtttttgagcagtatttgggcacgatccttcaggcttcaactcttcgtttcgcaacctcgacaaagatcactctgccatccaggaactgcaggagatagaacgtgagctacaaacaaattagcctacaagcaccacagactatctctatcacacgagcatccgacgatctggacatctttcaccttcccgtgcatcccttccatggcgcccctggc

SEQ ID NO: 245 - DNA, 568 bp, Zea mays
  Clone ID: MRT4577_100227C.1
ggtaccgggcgcctctctcgagttttttttttttttttttttttttttttttttttttttttttttttttttttttttttttccatccccaacacaaacgggggcatgatttcgggtcccaggacaatcctttactccccttaaaacccaaggtttttaacagccctccgaagggaaaaggatgggccaagcaggccccccaggggtttttggccggttttctccggctttgttacaactaaccccaaggggggtcagcacacagagcagggcccacccccccaaaaaaaatccagtttacgagggaaaactagccccgggagaagccccatttacaaccggggtccgggggggtttttccccgggggcatacccacaaatttccctacctactacacaccattgaaacacacccttttttggtttttccggccactttgacacggggccttttgttttcttaaccattttaaaaggggctaactgactgaacaagttagggcggttttaaaaatcaacagccgaagtcgagggcccgctccgggcttttttggaagccagccctttt

SEQ ID NO: 246 - DNA, 1223 bp, Zea mays
  Clone ID: MRT4577_100228C.1
gcttgtcactcgaggccggccgggatgatagcccatttcttaggtttcggcgcctcagtgggacgaaactcactggctccctctcctcccccagtccgcggcgctcgctccgttcacctcggccgcggcgaccttcgaggcgacgagacgatgctgcggctctcccgcttcctcccctccgcctgcaggaggggttttgatctaaaagaatctctttggagtggttcattgacattccaacaagctgtttccactgcagcaacaaatcttgatgggaacttgtctggcaaaaagtttgcaagttataccgtgttcaagggaaaggctgcactttctatacatcctatactgccaagtttcagcaaattagaatccggaggatctcgagtgagcaaaaatggatcagtaatgctgaccttctttcctgctgttggacaaaggaagtatgactatacaaagaaacagctctttgctctgtcacctactgaagttggaagcctgataagtcttgggcctgctgaatcctgtgaatttttccatgacccatccatgaaatcaagtaatgaaggaacggtgaaaaaatcgctgtcgatcactccacttggcagtgacagtggatactttgttaatataaccgttgtgaacagtgcagagaggactaatgatcgtctttcagtccctatcacaaaagctgagtttgctgtgatccgcacaactctgagttttgcattgccacatattatgggttgggaccaggctttaaccaatcaccatccagctccagctcctccagctagcagcaggcccacggtagagcgtccacacccggattccgaatgggagaggtgaagctcccttttagcggctagacgatggaggcctttgggcaccagtacaagttgctgctgcaaagtatgtgtgcttgaacaatctcttagaacactgtctgccgaccgcattagatttctggaacttaaggctagatgaagcacgatgaaccattgtgtttgttcagtgcatgtataactatatcacgcctactaaaggcatatttctagtcgagacgagctgttttacgcttgctaaaaaaaaaaaaaaaaaaaaaaatacgcatcggcattttacgcatcacacgccaggaccaggatgcattaagagaaaccaaggaaatgggcattttagattaaagtaaaaaaaaaaaaaaaaaaaaaaaaaaaactcga

SEQ ID NO: 247 - DNA, 288 bp, Zea mays
  unsure (1)..(288): unsure at all n locations
  Clone ID: MRT4577_100229C.1
tgtcaagccggaggtcgccnncggtgctccggagaagaggactttccgcaagtacagctaccgcggcatctacctagatgcgctgtttgacatgtccaccgacgacctcgttcagctcttcccagcgcgcgccaggagaaggttccagaggggtttgaagaggaagaccatggcgcttatcaagaagcttcgcaagtgtaaaaaggatgctttttgttgttagaagccatagccagtgatgactcattttcgcaacatgatcattgtctccctagatgattgggagca

SEQ ID NO: 248 - DNA, 743 bp, Zea mays
  Clone ID: MRT4577_10022C.1
aaaaaaaaaaaaagtcgtccctgccctattctcccttaggccgccgccgcccctggtagccgtcgcctctccctgctcctctctctcccaagcggctctccctctctcccctcgcttctctcccctcctcttctccagccgctgccaggcaaccggccgccgagcagcgcagccacccgagccccacgcccgccgcgccaggaaccagcgcccctgctctcgccaggacgccagagacctctctctcccaagcggctctctctcctcgcttctctcccctcctcttctccagccgctgccaggcaaccggccgccgagcagcgcagccacccgagccccacacccgccgcgccaggaaccagcgcccctgctctcgccaggacgccaggaattgctctttctatagcaagtttatgagttcagtttatattccattgaatatttgttgcagtgaagagaaatgagagaaagccttcggttgtagccttcagtttatattccattgaatatttgttgcatccgactcatctctgtttcgattccatccggtttggctcatttttttaatcgagtgtgttgtagttttgtaccctaatgtcgtgggagtgctaccgaagtactgatagcatcactttaatttcattagctccgtcctggcaatcactttgggaaggtggtcagtggaataactttgcttaaaaagcttgaagcagttggtagtgaaactggaaatccttcttatc

SEQ ID NO: 249 - DNA, 464 bp, Zea mays
  Clone ID: MRT4577_100230C.1
cggacgccccgctccaggcgtttgtcgtaggagcagctcgctggcgacctggcggccgggctggctgctgtcactggctctactgcaggctctatcggcggaaggccggcgccttccgctatcggttgcggcgaccgacaccgagagcatcccacagtcactgccatatgacggggacacctggtgcaggaacttcggccgcgggtggcaacagagcatatgcagctgcccacgctgacgacccgacccaacccgaacgtccccggtcactaacgctcgcaccaacgtagttgggcaagtattggggagaagttggtggtaaaccgccatacagtgggaggtcttgtttatatagtgcttgcctattagctgcgactgaagcagcatgattatacatctatggtgggaacatacagaatgcgctcatactggcaatatgagtccattggacctctatcaacgtt

SEQ ID NO: 250 - DNA, 552 bp, Zea mays
  Clone ID: MRT4577_100231C.1
gacgagtaagctatgcacgatagccagatttcagatgtgacattacaaatgccttcttctggcacccaaaagaaacggagcaaattacaggatctaggagatttcatccaaatctactttgtcctaaaacaattggcgaatgtccaatgcaaattggccagcacatactaacatatgctccaaccaaatgaacaccttcatcagttaaaggcagtcaggtcccaagagaaatcagcaatcagtggtcatgacgcagcaacattgggcttcagagattttttcagttttgaggggccaggtctagttcgacttctgttacgttctgccttaatggatgcaatcacagcatctgccccagggccaaggcctttcctgccaactaatttcacccccagtttttcacagaggtagtgcaacctcatgtcatcgcctcctctgacctaccttaactccatagcttgctgtcgtgatagcaatgtgtaaacataaagctgttgttgttggttaaagtgtgactggagctgctgaaacaacaatttgtttgagtggttc

SEQ ID NO: 251 - DNA, 405 bp, Zea mays
  Clone ID: MRT4577_100232C.1
tgtttggtcgccctcgagacgcagggatggtgggagctgtttgcgactgctggggccggcgagagagtgggctaggacctacggtgacagacaccaaggggctgtatgacagccacggggttcacactggccgctgccttgtgctcctcgggcggctgctgcctgactgttcctggccacacaggcggggacatgatccaggttctgaaactcccagcgttaaccacgaagagccggttcggcagtggcctggagggataacaccaggagaaaaccgccaggagcgctgagctcgattacgaggagaacccgtatgagctgctgggcctgagggcgcttgagagctgtgatcacatgaaagtggcctacaagaagaagcccaaggacaccgaggagactggagac

SEQ ID NO: 252 - DNA, 270 bp, Zea mays
  Clone ID: MRT4577_100233C.1
ttggcacgcgacgcaactatcctaagcccgccactctggaagatacaacgctgcacgcctccgaccgatgatatacgatccaatggcaccctcactcctcgccgtcatgtccacgctatccttcctagccagcacaccgaagccgctaggggctgaccacacccgacagcctggactgcgcgtggccgtacttaaaacacgaccctgacaaggagacaccacataacgaccgcatactcacccgtatctagcagatccctgagaaaaccg

SEQ ID NO: 253 - DNA, 116 bp, Zea mays
  Clone ID: MRT4577_100234C.1
ctcgagccgcgaatggtcaaattgtagcacttttggtgcttataatactaataggtgagacgcctgtaaaaaagaaggacatgaatgtgtatgctctggtggtggtgtcatacaac

SEQ ID NO: 254 - DNA, 310 bp, Zea mays
  Clone ID: MRT4577_100235C.1
cggtgtggacgacaacacggtgtcaacaagatatagattggcgaattaaagcattacagctggctgcaaacgctgttcaagaaccaaaagcaacaaaacattatgataaaccgtcttgggaaggtggctctattttcttgccgatgaaaattaaactagacatagcaaaaagcttcaagcagcacattcagagaacttatgccttgggagcagcctgggcagaaaagatagcgcctcctttgctcctcaatgatgcttgagcttgatacccttgcccttgggcagggtcacccacggcttgttgcccttg

SEQ ID NO: 255 - DNA, 187 bp, Zea mays
  Clone ID: MRT4577_100236C.1
aaaaaaaaaaaaaaaaaaaaaaaaaaaaaattaaaaaaaaaaagaaaaacaaaaaaaaaggggaaaagggtcctcagctcttgcggtatccaggtcttactctacccctgcatgcggacctcatagtcgattcaatggatggcacctaatactcaattacactgaggggcagacttacaacgttaca

SEQ ID NO: 256 - DNA, 471 bp, Zea mays
  Clone ID: MRT4577_100237C.1
gaggagacggcggcggccaaacagccagcccccagggtattcgtgttgtctgtctgttctttcatacctcttcccgttcgagtctcaggttatatatttcttattacaagcagcccatcaggcctacacgacccactccggcccaaatacttttacactacgacgctttactcgttgtggacgcggcgctgctccctcctcagactcgccatctgcatctctgtccactgctctgctgtcctggacgccggagctgacattcccccgctcttgaaacgccgcttgtccccaagccggcgcgtgtggaaatcggtcttgtaatgctttcaagacttcccaggttgctaaggattcatccatgccggaccatgtcaccttgacttgcgccactgtcgctccgccctttttgatcagccgactttgtaacactcgaagaggaatctgtagagcgtcagtatgagcgggaagtga

SEQ ID NO: 257 - DNA, 203 bp, Zea mays
  Clone ID: MRT4577_100238C.1
atatgaaaggtccgagcggaacactctttattgatgcttgaacacaaaatcttgacgccgtctataaccctaaggtgtaaaaccaatgtaccaaacattatctcacaatgccaactaaaaatcacaaaatattgaacacagtaattatcataatattctattaattccacatttataacaaagatgttcactgtatcatgaaa

SEQ ID NO: 258 - DNA, 351 bp, Zea mays
  unsure (1)..(351): unsure at all n locations
  Clone ID: MRT4577_100239C.1
ctctttcaaacattccctcattttcggaccaaaaagaagnccacaagtgggtggcttttttggggagtttacccccgtatcaaaccattttggcactttttttttttattactgaaaaaacaaacccccccccattgggtataaaaaattctcaagagcggggtgacccaatctagccccccccaccttcagcccacccccccccccattgaaccacaaaaaacctctccggagcgaaaaaaccccaacccctaatatgaccaccccccccccagttataaaaaaccaacactaaaaacccccacccctaaaacatggacaaccccccccggaaaaaaacccccttttccc

SEQ ID NO: 259 - DNA, 969 bp, Zea mays
  Clone ID: MRT4577_10023C.1
gccatctctacacaccaccttgacttacttattgaattaggtcacacactagtgggcctaatttcaacatacactacacctacatcctttactcctttgtttgtggctatgacccataccaagaccggctacatatacacgatacagctcgagccggagtcgttgaggccggtggcagcgagagcatgcaggtccaggtccaggtccagcagagaggatcccctgcccccacggcggaactagaggtctccctccgcgagttcgccctgtcggacgcggacacgagggcgttcatgtcgtgggcgtccgaccctcgcgtggtccgcttccagcgctgcgatgcctacgagcacgtggactaggcccgccgctacatcaccgaccacgtcctgccgcacccgtggtaccacgccatctgcgccggcgcgggcgcgcccctccccgtggtgggttccatctccgtgaaggctgggcccgccgaggacggggggccgttcagggcgtccgtggggtaccgcctggcgcgcgcgcactgggggcggggcatggcaacgcgcgcggtgcgagcggaggccgcggccatgttcgcggcgcggccctggctgctgcggctggaggctgtggcggacgtggacaacccggcgtcgcagcgcgtgctggagaaggccgggttcgccagggagggcgtgctgcggaagtacgtcctgctcaagggccggcccagggacatggtcatgttcagcatcgtcgtcgagacggagcaggacaaaccggatgggccgtagatcgccgcaatgctatgggctcctggcctttcgctgctgcgcatacgacatacgtcacgtatgaagtgtaacgttccaggcagtcatgtatactgtatgtatgatgatagtataccaccgtgtatatgtgataatctggaaaggaaataggaaaatgaataaccgtcccaccatgggaattggg

SEQ ID NO: 260 - DNA, 623 bp, Zea mays
  Clone ID: MRT4577_100240C.1
ctagtgtacacgtaaggctctgttcggtttctatgaattggagctctggaatggtttctagccgaattgtttatctagtttatataaattttgatgagctagaacgaatcccgattcaatcctggagaaacgaacaggccctaaacagaaactgacagacaacgtttatggtcgcatcgcataaggcaacgaacgaactttagatcagcagggaaacatatggcggcggaggtctactgaacaggtaaacgccttctccatctcgcccaggcagcggtccttctctactcgagaccaaccctggcaacagaacagagcaggtgcatgcagattagtttcagcaaaccggcgaacggaaggagaaaggcgcaaatcacaagaacgaaaaggcaagcaaatcgtagcttcagtcaggggaggccttacggaagcgactcggttaagcctcgaccggacattccgctgcagctgcgacagatcgccctcccattcgtagaactctagctctttctgcagactgagcttctcagcgacctttttgccgatgattcggcctccggaagcatgagcgaagtacacgttgtagaaatggcaaacaaacgccggggctcgtgccgaattgc

SEQ ID NO: 261 - DNA, 117 bp, Zea mays
  Clone ID: MRT4577_100241C.1
gcgtcgctggggtgttgtatggattagcgctgtcattgacttcataccctttattcactggcgataaatccggtcagaccattacaaacgaaaaaaatatggggggagctgatactg

SEQ ID NO: 262 - DNA, 777 bp, Zea mays
  Clone ID: MRT4577_100242C.1
agctcccaaagaagtgcgctcatggaaacgtcactctgtggcgttaccaaccaatgcaaccatcccggcagtccaagaaactggtctgtgcaagaatcttcttcaggagtatgctcagaagatgaattatgctattccatcttatacttgcaacaaacaaggtccatacatatgcaccgtagagattggtggaatacaatacattggtgctacagcacggacaaagaaagaggcagagataaaagctgcccgaactgctcttcttgcaatccaaggccaatcagagggttgtgcaaatggtaccacaaaatatattgttgtgcctggcaaaaggcaaggtaaggagatcgagaaaaagcctgttgaaactccaaaatcacttaagaccaagaaaggtggtttcaagaagcaacggaacaagaataaattcatcaagaagaatggccaagaagttaacgaggaaaaggatgaaactggagtgcccggagatgctcatcattctgatgtccctgtgaagccagctgtaacaacagaagatccattgaccaacactgtaatgatgcaacctgatgaagctgggccattcgaacatgaaccgaccggtgacactgcaatgctgcaacctgatgaagacgcttggccatccgaacctgaaccgaccggtcacactgcaatgctgcaacctgatggcgaagctacaaaagtggaacagggagcaactcagtgacacagcaatgctgcaacctgaagatgaaggtggaaaaagaaaacctgaac

SEQ ID NO: 263 - DNA, 672 bp, Zea mays
  Clone ID: MRT4577_100243C.1
atgaaaggcagtggtcagtggatggatccagcaggcaggagctggtgcatgaacatcgtgttggggccatgcttcgttgcgccgaaggtcttgcgcgaagaagcagcttcggctgaaatcgtccccaggaaatggccgaagcatttgagaacaagtccccaacattggcgcccacctccggtgaactcacttccacttcttgagcttttcgacaccttcggcaagcatcagcttcgtcatgccgccgaagaaggcttcagcaccaggggtaacagcaaagctctctccggccaccagctccaagaggcagaggcgccaggggcttcggaggaagatttggcgatcaaccgagaagaatcttttgcttattctgcgaagcaaaaggaaatagctgaagcagcagcacaacaagcccagccgaagcaggtcatgcatacagcttcgtatcattcgccctacatcccagaatatgagggcaaccatcctgcagtctctgctgcttcggcaagtcagccttcagcttcccggcaacagcctccgcctccacctccgttgcaacaaggccagcagccagaagggagccaatatgctccacatcaaagggacttcagagaacagtccgaagctcgcacggtcaacagcaccgtgccagagtcgaagcacatctattga

SEQ ID NO: 264 - DNA, 1380 bp, Zea mays
  Clone ID: MRT4577_100244C.1
atgccgccgaagaaggcttcaacaacaggagctggcacactgcagtcgctggatcccaatcaggatgttatttctcttagagaagcccgaagccagaaaaggaaggctgtcagtccaacacctccggatgatgatcttgatcaggaaattcaaaatttggagatccttcagcaacaagttcagcgcaggaaggaaaagatggctcgtctagctgatcttcagagacagatagatgaagcttcggaagaggtccgtcatttcgttcaaggcgatcaaacccgaaggcctccacgcagagagcttcatcaggaagatttccgcaatgaagacgactggtatgaagatctccatcatggaaactttgcttttgatgatgcttctcctctttcaacagaattgcaggctacaccttggccacagacttacaagccaccccagcttcccatatatgacggtcactcagacccgaagcaattcctaatgagctacgaggcaacaatatcttcatacggtggcaatacggcagtcatggcaaaatccttcgtcatggcctgcacccaggaccacgaagaataccttcaggcatatgtccgaaggtttctgcgtctaagggcacaggcgccgacagtgcccaatgagattgtcattgaggccatgatcaaggggcttcggccagggccatcagcgcagtattttgccaggaagccaccacaaacgctggagaagctgctccagaagatggatgaatatattcgagctgacaatgattttcgccaaagaagggaggaggccttcagattttctgagatgaccaggggcttcggaggaagattctatccgaggcatgtcagatcaattcataattccaatcaaaatgatgataaggggagccagcagcaaaggccacagtactcctcacaggcttcggggcaacagcaaagctccttccgaccaccagctccaagaggcagaggcgccaggggcttcggcggaagattcggggatcaacccagaagaatattttgcttattctgtggtgaaaacaaaggtcatactaccaggatgtgtcatgttaccattcagaagcaaaaagagatagccgaagctgccgcgcaacaggctcagccgaagcaggtcatgcacactgcttcgtatcattcgccctacatcccagaatatgtgggcaaccatcctgcagtctctgctgcttcggcaagtcagccttcagcttcctggcaacagcccccgcctccacctccgttgcaacaaggccagcagctagaagggagccaatatgctccacatcaaagggacttcagagaacagtccgaagctcgcacggtcaacagcaccgtgccagagtcaaaacacatctattga

SEQ ID NO: 265 - DNA, 1528 bp, Zea mays
  Clone ID: MRT4577_100245C.1
ctcggccgggatgccgccgaagaaggcttcaacaacaggagctggcacactgcagtcgctggatcccaatcaggatgttatttctcttagagaagcccgaagccagaaaaggaaggctgtcagtccaacacctccggatgatgatcttgatcaggaaattcaaaatttggagatccttcagcaacaagttcagcgcaggaaggaaaagatggctcgtctagctgatcttcagagacagatagatgaagcttcggaagaggtccgtcatttcgttcaagatgatcaaacccgaaggcctccacgcagagagcttcatcaggaaaatttccgcaatgaggacgactggtatgaaaatctccatcatggaaactttgcttttgatgatgcttctcctctttcaacagaattgcaggctacaccttggccacagacttacaagccacctcagcttcccatatatgacggtcactcagacccgaagcaattcctaatgagctacgaggcaacaatatcttcatacggtggcaatacggcagtcatggcaaaatccttcgtcatggccgtcagaagtgttgctcagacctggtactcttctcttcggccagggacaatcacttcttggcagaaactgaaagatatgctcataactagtttccaagggtttcaaacaaagccggtcactgctcaggcccttttccagtgcacccaggaccacgaagaataccttcaggcatatgtccgaaggtttctgcgtttaagagcacaagcgccgacagtgcccaatgagattgtcattgaggccatgatcaaggggcttcggccagggccatcagcgcagtattttgccaggaagccaccacaaacgctggagaagctgctccagaagatgaatgaatatattcgagctgacaatgattttcgccaaagaagggaggaggccttcagattttctgagatgaccaggggcttcggaggaagattctatccgaggcatgtcagatcaattcataattccaatcaaaatgatgataaggggagccagcagcaaaggccacagtactcctcacaggcttcggggcaacagcaaagctccttccgaccaccagctccaagaggcagaggcgccaggggcttcggcggaagattcggggatcaacccagaagaatattttgcttattctgtggtgaaaacaaaggtcatactaccaggatgtgccatgttatcattcagaagcaaaaagagatagccgaagctgccgcgcaacaggctcagccgaagcaggtcatgcacactgcttcgtatcattcgccttacatcccagaatatgtaggcaatcaccctgcagcttctgttgcttcggcgagtcagcctcaggcttcctggcaacaacctccgcctccaccaccgctacaacaaggccagcagccagaagggggccaatatactcaaaatcaacgggatttcagagaacagtccgaagctcgcacagttaatagcactgtgccagagtcaaagcacatctattga

SEQ ID NO: 266 - DNA, 1941 bp, Zea mays
  Clone ID: MRT4577_100246C.1
tttttttttttttttttttaagaaagaggataatatatatgatgaacttgtatgctgtcactacacttccactgaggagtagagtacaaaacactagtgatgtggtggttcgcaagacccgacggagtttttaaggcttaagccaagccaccaatgaaacccatcgctttcccttacatgcatgcatgcaaatttgtaacacgagcgttatttgtcgtggattaagcgggacgatatccatatccaaatcgccatgacatcagacggccctagagacgcggaccttgaggccgtgcgccatggagaggatggtcatcatgcggtactgcaccgggtgcccctccagcagccggaagctgtagaagcggaagaggatggccagcgccatcttcatctgcaggtacgccgagtccttgcccaggcagatcctcggccccgcctggaacgccgtgaacttgaacggcgacgcgttgcggaacgcgccatcctcgttgatccaccgctccggccggaagctcgccgcgtcggggccccagttgtactccatccgccccatcgagtagggcacgtacgtcaccatcccgccggccctcaccttcgtcccgtccggcagcacgtcgtcctccaggatccccttggggtcctgagggacggcggggtacaggcggagcgtctcggtgacgcaggcgtggaggtagaccagcttgccgaggctgtcgtaggtgaggaggcccgcgaactgcgccacgcgggcggcgaacgccttgtcgtcggcgtcagcgccgccgcagagcacgagcgtgacgccctcctcgcgcgcgcgctccgcctcgaacgcgcacagctcgcggcgcagcttctcggccacgtccgggtgggacatggccatgtgcgtgaaccacgacagcgtcgtcgccgtcgtgtcccgcccggcgatcacgaagttgagcaccacgtcccggaggctcttatcgtccccgaagccgccgccgtcgtcgccggcctcgcccagctcgatgaaccgtgacaggatgtcgtgcttcatcttctcctgtttgccgctggcccggacctcgacgatctcggccttcctccggcggatcacgctgtaggtgaactcgtccacgagcttgatgctctgcgctaggagggcctctgacccgacgtggaagaacctcttgatgcgccacagcgggtcgatgaaccgcagcgtgatgatgatgttggcggcatcgaacgcctgcgcgaagctgttctcggggagatccggcgacagcgtgccgatctcgaccccgaacccaaccttgcagatggagtccagcgtcatcctcatgtaaagttcctgcatgtccacaactttgcctgccttggatgcctggctcagtatacccgacagcttcagggagtactctctgaacacaatggcgctgaaatccctcaggtttttggaggcgaactcgaaactcgccgtcttcctctgcttcctccacagctcgccgtcggcgttgaagatgccgtcaccgaggagcacgtccatgtaggatctgtacacgattcccttggggtaattggtgaagttagtcttgaggacatgctcgacattcaccgggtcagcgatgtaggtgtaggaagtgaacggcatgtcgacggtcactgtcctgtgccgtgacaggtacccgacaagccagtcgtgcatccggtggtagttcctcagctgctccaccgttgcgccgatgactggccatgatctcgggcctttctgcttcctcaggctccacctctggaccaggatccatgagaggacaaccagaaggagcgcgatgtacttgtgaggccctgctagtgggaagaatggcgatggcgtcgccggcgtgaggtgagcttcctccatggtgctcttgatgaagggtccagtctacaagtgatggatgctatgtagtt

SEQ ID NO: 267 - DNA, 862 bp, Zea mays
  unsure (1)..(862): unsure at all n locations
  Clone ID: MRT4577_100247C.1
cattgggtacctcgaggccggccgggacaactatgcattacagcgctcacgatcccgaccaccccgcgggcggcgacccttgggcttcgtcgcctcaggcgaaccgatcatcttttggccagcctccaactaacgatattccgtcatccccgctgcctgcgcaggcttccccatatggcgagaacagtgagcagtacggctatctgggcgagcaggatgcgcaaagtcggccgagcacggcgcctgagaatggcgatcaatcgcagcaacagcaggcgcacggtcaggacgcgcctcggtcacctcagccgcagcaacagggccaacagggacagcagccacaaaggtatcacggcacgagaccacagcgacaacagcagcaacagtacaagctgcaggccaaggttacaggtcttgagcgcaacggaaagaaggaccccataatacgattcgatgtttacacgaaccttcccaagtttcgcaccacgcaattccgcgatgtccgacgtctacactctgaattcgtgaaactcggcgagcatctcatttccgcatgcccggaagccattgtacctgcagtaccaccggcgactacatcggcaggcgctggaactgatgaagacgaggcacgactcaagatatcaattcagcggtggctcaatattgtgtgcagcaatgaaatactcatacgtgacggggaaatggtcttcttcgtagagagcgactttggctaatagccccgtggtgcggaggaagcaacctgctactggagtgcgccgcaagatgatcaagcagtttgcgccgccgccggacgacacgccagaactcgctgcgncacgaccagtggntaaagccttctact

SEQ ID NO: 268 - DNA, 394 bp, Zea mays
  Clone ID: MRT4577_100248C.1
tcgatcgcggacgagcagctgtagcatgataacactaaccaaacgtgcccatccagggtgactggtccgaggtgcgtggcgttgacccatggtgaataacggcaagtggttaacctccggactgaaagtatccatgccgtaatccaacgaaatcaactaggagaggataacgatgaaatcagctggtatcatcccaacaacggtagatctgaccgcatctacctacctggaagtcaatgtgaacggcgacagcgactccggctgctactgcagatttagccagaccgacgaggtcattatccccgaagccaaccatgagctgagcaagcatgtaaccctggatgatgcccctgctgctgctgctgtctcagcacatgcgtcggttctgccacct

SEQ ID NO: 269 - DNA, 246 bp, Zea mays
  Clone ID: MRT4577_100249C.1
ggggcaggggaacctcatatcaatcccattggacaaaaatagctgcgaacaaaaaccttgctcattcttctctcgttaggcctcatagcgggggcaaacatagggaacaacaggggtaccaacacctaatccgaaggtggaacgggcactgtcactgtcgacagaaccgaacggtttctcggttctatagaaagttaaaatcgctccaccgtggccgggatggggtgagaaatctatttggaacac

SEQ ID NO: 270 - DNA, 202 bp, Zea mays
  Clone ID: MRT4577_10024C.1
ctccttgctacgatgctacggttatgtgggaccacacctcaggacgattcaaacgggtgggctgtcgattgtttaggaaccagcttgatgctcaaagcggcataaatgacttgactggcaagagagttggaaaccctgaaattctctgcaatcgtgcgatgaatggtgctaatgctggtgaagagatacagactctggacac

SEQ ID NO: 271 - DNA, 300 bp, Zea mays
  Clone ID: MRT4577_100250C.1
gatgcgttttagcagacagtttacaggttaatgctatactggcgaacctccagccttgtcgggatgactttgcgacttgacgcgtccagatgaataagcaaatgactctaactgaattgtctgctgctatacatgtggattaccgtgcaagggcaagtaacaatccatcctaccgactcgcagctcatgttgctgagaaccgcggtcattcgaaatttcacaagacgaagaggaactgtccatagaagaatttgaacctacctaatttcaaacagactaataataatgaggaccctatct

SEQ ID NO: 272 - DNA, 193 bp, Zea mays
  unsure (1)..(193): unsure at all n locations
  Clone ID: MRT4577_100251C.1
gtcggncgtgttctgtacactgtcccatgccttgagaacctagagaactccgagctgcaagtaactgcacccactttcaaccacaatacgccgagccgaaccaaagtcgcctcgtctgctctcaacctcacttcttctcttgactatgcgaggggtcgatcccacccccgccgccatccgatccgatggagga

SEQ ID NO: 273 - DNA, 223 bp, Zea mays
  Clone ID: MRT4577_100252C.1
aggcgggaaaaacaacgattggccaacttcaaattacaaaccaagtcaccagagcaatttttgaaatttatacgggggtagtgccaatgaactacatagcattgagggcccccgagagaacacaaaccaatttattgacggggacgggttttaccaatttgtaaatggtttttgattttttacaaaggggtttgtgcaaattaaacagagcccttgagttttt

SEQ ID NO: 274 - DNA, 723 bp, Zea mays
  Clone ID: MRT4577_100253C.1
cctcgagtttttttttttttttttttttttttttttttttttttttttttttttttttttttttttttttttttttttttttttttttttaaaaaaaataaacaaaaattttttttggcgggggacgggccccccctaaaaaaattccccttttggaaggcgggggaaccccccaaaaaaaaccaaaaaattaccggggttaaaacttaccaaccaaccaggggggggggggccccccccacccgggataaaatttaaaaaccagagggggggcaaaaaacccagccatggcaaaatggcccgggggggaaccctccctaagggccctgcccccggtatttttccggcccagggtgggacccattggggttaaaccccctttaagggaaaaaaaaataacccccggggcaccataaaaccccaagaccaattttccccgggttgggaaagggttaaaaccaaaaacaccccgggcccccaattttggttggggctttgattttaaaccccgggcccttaaagaatctttggggccccgggaagaacccatggaaggttttgttccggggacccccctggccctggctaacagggaaacccccccccgggccctgggggtgtttttaacccaaagggtaaacccattcccctgaaaaaaagaaggtttgggagaaaatggcccaaattcaaaaggggttggaaactgggccccccccgtttacc

SEQ ID NO: 275 - DNA, 744 bp, Zea mays
  Clone ID: MRT4577_100254C.1
gtattttgatggctcgttagcagtggtaacaacgcagagtcccgcgaaccatcgagtttttgaacgcaagttgcgcccgaagccttctggcggagggcacgtctgcctgggcgtcacgcaactaattctgtttgggtaaagtcgcatatctaccgctcgcccaatagactcagatagtatagtgtcatcagaaaaagcaaactgcacacatggaaccttatgtgttcttctggcagatatcgtctctattgatggacatctctaattagcttaaggcaatgcatgttatgtccactagagaaaccccatcctgagacactcgcctttccttggaactgccttaattatcgctgatatggatagggttacatgttgctctactcttaaaagtctttcactccgaatctcaggacgagattcatttaagggggagggctgtaacaccccaggtgttatctcccgttaaacaacgattacgaacttaagtatggtatgtcagtgaggataacaatattcatatcctaatcatcttcgtctatcgcgattttaatatcgcatttgtttctgtctatttagactcttcctaaaatttcgcgaatttcggaacgtaattgtactgaaagcttgcgagtcccgtgcccaattaaaattcatcgagtaagcgaatacgaattcggaagctctacctactcttactatttttatcccgagcaaattaatttgaactcgacgaatcaagttttt

SEQ ID NO: 276 - DNA, 652 bp, Zea mays
  Clone ID: MRT4577_100255C.1
cgacagcttctccacctcctgggcgaaccttccggcggccatgtacacgaggaccggagtgccggtggctttgtgcaggttcaggaagtacccacaggctttgggcgtcggacaaggaagccgtcggcctggtcgtttctcacctgaagaagatgctcccggatgccactgaaccgacgcagtacctggtgtcgcgatggggctccgaccccaactccctggggtcctactcgtgcgacctggtcgcgaagccggccgacgtgtgcgcgaggttcgccgcccccgtcgagaacctgcacttcgccggcgaggcggccagtgccgagcactcggggtccgtgcacggcgcctactcgtcgggcatcgccgccgccgaggaatgcaggaagcggctcctggcgctgaagggcatcccggacctggtccaggtcgcggcgtgggaggagatggccggagctgtggctcctctgcagatttgcaggacctgagtgagattggatcactggctgcctttggacattggagtctttttttatatttaccttgaaggccgttgtcttgtctggaataaatcaagattgactggcactgaaagtgtcatcgcgtcactctttcatacttattaaatatcacaagtctgtcctgagatctc

SEQ ID NO: 277 - DNA, 433 bp, Zea mays
  unsure (1)..(433): unsure at all n locations
  Clone ID: MRT4577_100256C.1
tgaggaaggaataatatatntgattagtgttgtctattgtctatcaaatacgtgctaggaagggtatatntgattagtgttgtctattgtctatcaaatacaggtccaagatgggatcaatcaacaaccgctttaataggaacttatttgtgctcctagaatcaatgccatctatttgtgctaaaaagtagataaatcaaaaaataacatctggcaagaacaaactcttaaaacatatgcatataatattttgtacatgaaaatgtcaaaaattataccaggaaaatacctagaatgataaatgaattttgtaangtaaagattcaaattttacaacctttgaccaataattattcgaattatataatagtttagaagaaaaaatttgcatcaatatgaatttgtattcgaagtgtgcatattgaacctttag

SEQ ID NO: 278 - DNA, 2314 bp, Zea mays
  Clone ID: MRT4577_100257C.1
tcgaggccggccggaaaaggccgggccgggtccctcgctgccggcctggcggggaactcccatcccagatcaggattagccgaccacccgccgaaggccagagagaaatatctcatcttctctccaccggatcggttcaatcgagagcgagggagaaagggaggtggtgcgtcgaggggggccgagattttgccggtttggagccagataggggtatgagctgcttcgcgcaccgccgccgctccgacgtcgcccgccgccaggacggcctcctcgtcttcgtcttcttcctctcgattcccatacgtaccagtagttttaatttaagtagtagtaattgtagtagcaatctcttgtaaactgcgctcgcctttgcgtgttcgtggtccttttgcgctttctcgtccctctttctctcaatctctccttattcttctccttccacggcgaagccggcggctggtatggatcccaatggcctcaaaactggaggccttttgctcccgaccatcgagaggcggtgcacgtcgcctccatccgtcattgtcatcggcggtggcatctcgggcgttgcagctgcccgtgccctctccaattcttcatttaaggtgactgttttggaatcgagagatcgtattggcgggcgcattcatactgataactcgtttggatgcccaattgatatgggagcctcatggctacacggcgtgtgcaatgagaatccactggcaccattgataagctatcttgggctgaggttataccgcacaagcgatgataactcagttctgtatgatcatgatttagaaagctatgctctctttgataaggatggtaatcaggtcccaaaggagacagtcgataaagttggagaaacattcgagagaattcttgaagagacggtgaaagtgcgcgatgagcaggaacacgacatgccactgctacaggcaatttctattgtgtttgagaggcacccccatctaaagcttgaagggctagatgatcaggtcttacaatggtgtgtctgccggcttgaggcatggtttgctgcagatgcagatgaaatatctctgaagaactgggatcaggagcgtgttcttactggtggacatggactgatggtaaatgggtactatcctgttattgaagctcttgctcaaggtcttgacatcaggcttaaccaaagggtcaccgaaattacccgccagcacaatggagtcaaggtcactactgaagatggcacaagctacttggccgacgcctgcataatctcagtgccactcggcgtgctcaaggcgaacgtaataaagttcgagcctgagctgccccagtggaagagctccgccatcgccgacctcggcgtgggcaccgagaacaagatcgccatgcacttcgacagggtcttttggcccaacgtcgaggtgctgggaatggtcgggccgacgcccaaagcctgtgggtacttcctgaacctgcacaaagccaccggcaatccggtcctcgtgtacatggccgccggaaggttcgcccaggaggtggagaagctgtcggacaaggaagccgtcggcctggtcgtttctcacctgaagaagatgctcccggatgccactgaaccgacgcagtacctggtgtcgcgatggggctccgaccccaactccctggggtcctactcgtgcgacctggtcgcgaagccggccgacgtgtgcgcgaggttcgccgcccccgtcgagaacctgcacttcgccggcgaggcggccagtgccgagcactcggggtccgtgcacggcgcctactcgtcgggcatcgccgctgccgaggaatgcaggaagcggctcctggcgctgaagggcatcccggacctggtccaggtcgcggcgtgggaggagatggccggagctgtggctcctctgcagatttgcaggacctgagtgagattggatcactggctgcctttggacattggagtggatcgtggatcgcttcgctgctccctgatggttgccgagtctttttttatatttaccttgaaggccgttgtgtcttgtctggaataaatcaagattgactggcactgaaagtgtcatcgcgtcactctttcatacttattaaatatcacaagtctgtcctgagatctcagcctggtgcctgcgtgctgcctttgccttgtatatgacgttttactttcttttagtctcaattattcaattttttttttactaaaaaaaaaaaaaaaaaaaaaaaaaaaaaaaaaaaaaaaaaaagtacaaaaaaaaaaaaaaaaaaaaaaaaaaaaaaaaaaaaaactcgagagggg

SEQ ID NO: 279 - DNA, 2485 bp, Zea mays
  Clone ID: MRT4577_100258C.1
atcaggtatatgcctcgtaagagagacttctggttaagtgtactccctttgattcaagttgtttggatcctaacttcctaggaaggcatctgaaaggatataatccaggtgactaggtcttgagcaatattgcaattatcttaaaaaggatcaactgtagtattctaccagtgtacttgaattgcttcatgcatgtacggtggcagattttagttggatttttcaattctcatggccttgcatggtgctgacagcaagcaaatattgacaggaacacctttttattgtcactgaactactgcgagcaaatctatacgagtttcagaaatataatcaagaatctggtggtgaggtgtattttactttgcctaggatacaggtatgttctgtgtccttcactgagatgttctccccgggaccatgactgctacttataatgatatcatacttgtatataatgagcatttgcaattcaccctgtagtcagcccctagacaaaagttttctaacctgctacacatttaaacagtcgtttaaccattgagctgtaaatgagcaaacttatttgatatcctgaaatggtagccttcgcaaaattgattcagaaagttacaaagttctagcaatttgaaactttgcctttgttgtaggttatagctcggcaatgtttggaggccttggtttacttgcaccgtctgaggatcattcattgtgacctaaagccagaaaatattcttatcaagagctacagtagatgtgaaattaaagtcattgatctgggaagtagttgcttcttgacagacaacttatgtctctatgtccaatcacgctcttatcgagctcctgaggtcattctaggcctaccttataatcagaggattgatatttggtctcttggttgcatcctttctgaattgtatactggtgaagtaagtatgttttatttaattgaaatgcttggtggcttgtaggattgaaactggtctttagtattattttgacaaaactttgaggcctcttttcttgtatgaatgcaataccaacgtataactccaaccagaattagaaattaatcttttttattaatgttgtaagcacatgcgagctggagagttgtggaatgggtgttttgggtgcttcttttccttggaactatatcttctttcctttacatataacaggtattatttcctaacgagcctgtgtccgtaatgcttgctcaaatgattgggataaccggcccaattgacatggaaatgctagaattgggacaggagacacagaagtatttcactgatgattatgacctttttaccgagaatgaggagacagatcagctagagtatttgatcccggagaaatcctccttgcgacaacacatacaatgtcctgattcagagtttgtcgattttctgtcttatctactgcaaattaaccccaggaaaagacctacagctgacgaagcactacagcatccatggctttctttctcgtactaatgagaagccatccggtgctttcttcacatataaaggttactttgtctcctgacatggagccctcataaacttattgaaaaatatcgattttcttggtgtttctcttaattaacgctaatcattactcttttccttctgttgtagaatagccctccttttctgggtgcaggattcttctttttttgtgtcttcagggtaattcttgcgtttccttttttctgggtccaggattctttttttttttgtcttcagggtaattcttggtgtgaagtgtgaacccctgccctggagtgattcatgagtgtatgtaaatatcagaaaattttccgcggagtaactgtacagttgtaagcccactcttgtactcctgatcatgaatgataacatgggaatttcaaaaaaaaaaaaaaaaaaaaaaaaaaaaaaaaaaaaaaaaaaaaaaaaaaaaaaaaaaaaaaaaaaaaaaaaaaaaaaaaaaaaaaaaaaaaaaaaaaaaaaaaaaaaaaaaaaaaaaaaaaaaaaggggggggcccttttaaagaaccaaattttacttccccgggtttgcaaagaaaaattttttttttggggcccccaaaattaatttcccgggccgggttttaaaaacgggggaatgggaaaaaacccgggggttcccaaattaaatccctttgaaaaaaatccccttttccccagtgggggaaaaacaaaaaagcccccccccaatcccctttccaaaaatttccccaccctaaagggaaaagggaacccccccttaaccggcccataaaccccggggggggggggggttccccccaggggaaccgttaattttgcaagcccctaagcccccgcccttttggtttttttcccttcttttttcccaaggttggcgggttttccccgaaaactttaaaatgggggccccctttaagggtcccaattaagggtttaacggcccctcacccccaaaaatttgataaggg

SEQ ID NO: 280 - DNA, 540 bp, Zea mays
  Clone ID: MRT4577_100259C.1
ccgggcatcgaaaccctgcttctatgctaggttctcaggcggcggcaatgccttgtacgtgctcctgaacagcatgaccagacaatgaagacagggcctgtgcgggcagtgcgctgtgtatatggacgtatctcgcgactgacgcatctctagcatgccctggtggaaagcacgagccgttacataaactctcgcaacaaccaaagtgctgcgacacactgcctcttacgcttctttgacctatacacgcatcgcactgactggaagatagcgactcaagaaaccaggctgccataaacgccgcatgaacaccggcactgatgctactcgtgcaataacaaggagaggtgaacgcggcccttgctcagagtgatgctgaacccagaggcctttaaaggacatgaagtagcgcccgctgatagatcaatgatatggtgttcagtactacggcgacgagcagcacatggcacactgacagagcgccgctatactacttatcaagatgcctgagagtgcggaggcttaccttgcttgctacta

SEQ ID NO: 281 - DNA, 278 bp, Zea mays
  Clone ID: MRT4577_10025C.1
ggaccggcccggaatggcccggctggaccaaccgacgcgccggtcgttttccgacccgccagccgcagcggcagggcgggctgagggagcacccgtggcggacccccctgccccagcaaagctcaaaggtgaacaaccgacatggaggaaggccccaacgcgtcagactcgagatgtccaccggagaacgacagagaacaagaggaacagaggggccgtctccgatggctcagagagcaactgtacggtaacgaccgacggggaggaacaagacaaca

SEQ ID NO: 282 - DNA, 417 bp, Zea mays
  Clone ID: MRT4577_100260C.1
agcaactcacacacagtaggagaggagaggaaagaacccagcgatagatcagagtcggggagaaaaatttgcctcctcccatcggaatctagctaattattttctggtccttctcccccatgtaagtctccctctcccatccccgtcgcctgcacctaccggaagcgaagccttctacagttcaggtccatatccgggtcgccgccgtcggctagctctaggcggacatggtggccgcttgccagagcacggcctccacctacgcgcttctgctgctcttgctgtttgccgctgcggtcgccgtctcttcttcctccgggttgcgccgtgtccaggaccaggacagatcggcgctgctccagatcaagaacgccttccctgccgtagacctgctccagcagtggtccccggactcta

SEQ ID NO: 283 - DNA, 328 bp, Zea mays
  unsure (1)..(328): unsure at all n locations
  Clone ID: MRT4577_100261C.1
atacccccctttattttcctttttttaccanaaaaccccaagagacatccagtaaatatatgacatcaaaacccatactacctatagatgaaaatgtacataaggtcaataaatacggcggaaaaaaactacccccacccacaatcaccttgttttggggtaacaaaatcaaccccttttgtacacaatttaaaaggagcccttaacttaaaatgtaacacaagttaaggcacaaaaaaaagttcaaaaaggaaaagcaggcaaaactttttctttccacacaccatcattaaaaacttgataaatgacttctttactctcccctaaa

SEQ ID NO: 284 - DNA, 397 bp, Zea mays
  unsure (1)..(397): unsure at all n locations
  Clone ID: MRT4577_100262C.1
aatttttcctcntttttttttttttttttttttttttttttgtttttttttttttttttttctttttctttttttttttttttttgggcccccttttccaactttttaaccggcgggaataacaattaaaagcccaaattttggggcccgggtttttcaaaaaaccactaattgggggggggtttaacaataacatagggccgggaccccatttttttttgtgggaaacccaaaccccgtttttaacagcccgggctaaaaagggggaaaaaaaaccttttggatttccgggggccatttttgttttggagcctgtttgtttttttttaaaataaaccctttttcaaaaaactgcgtttttgggctaaaacgcccattttgcttcccaaaagggaaa

SEQ ID NO: 285 - DNA, 419 bp, Zea mays
  Clone ID: MRT4577_100263C.1
tacaaccccctaaactgagtcgtattatggcggcaacagcgtctggacccgcccggcctcccgcaagggcaagaagaaggcgaggcagccgggcggcctcggccacggctccggcggccccgccggggccgccagaggctccaaccctaggcccaacgccggcggcgaggaggagttcctcctcgtccccgcgacccgcctcgccgccgagcgctccgacgacgcgcccggccagcctgtgctcctctcccgcgtcttcaagtccgagcggatcgagctctcagaggaccgcctcaccgcggccagcaccaagggattccgcatggtgcgcgcgacccgcggcgttgcggcaggggcgtggtacttcgaggtcaaggtcgtgcacctcggccccaccggccacacccgcctttggatgg

SEQ ID NO: 286 - DNA, 351 bp, Zea mays
  Clone ID: MRT4577_100264C.1
cataaacaaaagttcttttattttaggttatatgtttctaatttatattgggacgaacgaactctactttttattttgataaaatctcacaatatcaatttagcgattagaagtcagcgtgaccgggccatcttgggaatggaatgacatctctgatgttttcaataccggtacagaacatgatgagtctttcaaatccaagtccgaaaccagcgtgggggacggttccgtattttctcaaatctctataccaccagtatgcttctttatctaatttcacttcttcgagtctcttgtctaagacgtcgagtctctcttctctttgagaacctccgcggacgcgtgggcgga

SEQ ID NO: 287 - DNA, 587 bp, Zea mays
  Clone ID: MRT4577_100265C.1
ggccgccccttttttttttttttttttgcaggaaaaaactgcttttatagaaagaaaaaaaagtcactccattagccacaatggtacacaaaaagccatgaacacaccacatctgttttgcgcttgtgcgcactagaccacagggtttaacagtgacatgagctctgctacacacacacacgcacgcaggctttagctattctggatcaccttccgaggaaattctttgacaaaagggttgcacaggtcttgaaacattagttgcagagtgatcacctcacagtagttctcttccaggaaaaacaccgaagcacctgcaggcatttccgcaacaaatacacctgacctgatataacgaagctagtagaacttcgaacctatatagtggggaaacggccgcctttttttcagtgcctggcagctggcacagcccggccggacggaagaagaagccgaggtccgtccgactgtccgaggcaggcagctcaagtggagtggagcgacgtggccagagaaggaaaggaaacggaacggaacctccaaaggaaagggacgtcctttttcacaggtcgaggaagccggtggtg

SEQ ID NO: 288 - DNA, 413 bp, Zea mays
  unsure (1)..(413): unsure at all n locations
  Clone ID: MRT4577_100266C.1
cagcgcaagcagctncctttcgcctgctgggctagtcgagcggcgagcgaggaggcggaggatgggccgnggccggggcgtgagctacgggggcgggcagagctcgctgagctacctcttcggcggcggcggcggcgacgaggccgccggggggcccgccaagccggctgggggggggggggggcgtgcgccggtgccggcggcagcagacggtgagaagctgaaggggatcccgggcggggtacgtggcaaccagagccagaccaacaactacttgagggcgcaggggcagaactgngggaacttnctaacggaccgaccggggagcaaggtgcacgcgggggcgggcggtggttngtgggttgggtaccttttnggagggggagcttgtgggagcaagtgatgtgaggggg

SEQ ID NO: 289 - DNA, 151 bp, Zea mays
  Clone ID: MRT4577_100267C.1
cggttctggttaaccagtgtgtggtgtggtgtggtgtgtactcctaattcctagcagcagttaagcagtgtacatgccattgtggacgtcgataaaccacaagatgagccaatggcgaaggggatagccccactaagcagagtcatgggca

SEQ ID NO: 290 - DNA, 413 bp, Zea mays
  Clone ID: MRT4577_100268C.1
ataacgcgtccggcggcggtggcgtggcggtgggccttttcagcccggtctggcagatcccccgaccggctaccaagcctgcacccgtcccttcagcctcagagccgtttaccgacaggccggcgccgccgtcgccgtggcacaaggagaaaccggccagcgctgctcggaagcctggactgggcagtggcgtccgcgggctgaacttgagcgtgaacttctgcatcgggtaccggaaccaggtcagttgccggcgcgcggacgtcggcaccgcccgcggacccgggcccggaggaggaggcggcggcctagtcggcatcaagggggttttctccaagaaggtgcatagtatagtctgcaaattagagtcatgcaatgattcagtctattgctggtcgcaaaaactttgagct

SEQ ID NO: 291 - DNA, 185 bp, Zea mays
  Clone ID: MRT4577_100269C.1
cggaccctgcgtaggacctccgggctctgccggctcccttgcgaggcctctcgtgtgagctgatggcgtgggggcctcaggtctgcgcccagccgctgatccctgtgaggcctgccactatgccggccgacgctaccttagggcgctggcttgacatggtgccattcttgacgctgtttacctct

SEQ ID NO: 292 - DNA, 680 bp, Zea mays
  Clone ID: MRT4577_10026C.1
gccgccgccgccgggggagtgagcagcagcgtgagcgcgttgccgacggtcgtgcgctgaggggtcaatggggttcgagtcgtcggcggagacggagcggttcctgtgcgagcggctgctggacgcggcgcagcccatagcggagcgcttccgcgcgctcttctccctccgcaacctccgcggcgacggcccccgccacgcgctcctccaagctgcaagggatccctctaacttgcttgcccatgaggctgcatttgcgcttggacaaatgcaggatgttgaagctatccctgcattagagggagttctcaaggatctttcactgcatccaattgtccgccacgaggctgctgaagccctgggagctattggcttggaaaagagcatttccctgttgaaagagagtttagcagctgatcctgccgtggaggtgcaagaaacatgcgagttggctcttagacggatagaagggcagaagaatgctagtggcgctgaaagcacaacaatttcgccttatctatcagttgatccagcactgcctgccaagcaaggactttcagtagaacaactaagggagcttctcctcaacgagcaagaaaagatgtatgaacgttatgcagctctttttgcgcttaggaatgatggcggagattatgctgtttctgctatcattgaatctc

SEQ ID NO: 293 - DNA, 422 bp, Zea mays
  Clone ID: MRT4577_100270C.1
gtcatgttttattattgttgttctattctgttcatgataagactattatgtgtaaaggccaaaattggtaggagaaaaaatataataataatactaagtaataatgttgtgagaatttgtaaaacctttgagacttattagtgcctttccttttcataatcaaataatgatattaaaatggtcgtgtaaccaataagtgaataaaagagtggacatctcatacttatgaaaatgtggtatcattaccaaaataaaataacactaataaataaataaataaataaataaataaataaataaacaaataagtgcacatcatactggagttttattttgtgcatctgaaataagtttgaaattcataatcaagatctgatttgaaatttaaaacaaaaaaacttacaaaagaataggaaaggaaa

SEQ ID NO: 294 - DNA, 260 bp, Zea mays
  Clone ID: MRT4577_100271C.1
ggggggcaaggctttactatcctatatatagatcagacgggcattacatgacacggcactgtacaacacgatgacgatactcatcagcaacacacaactgtacacaagctaagcaacggccacactgcacaccggcgtgtctcaagcagagttgggcctcttgacgacgacgacggggcacttgcagttctgcacgcagtggttgctgacgctgcccatgagcgccctctgcagtaagccgtagccgtggctgcccatga

SEQ ID NO: 295 - DNA, 276 bp, Zea mays
  Clone ID: MRT4577_100272C.1
ctctttttcccgtactaagaatgaaggttgggggtcgactgctaagccatggggcactgggcagtgcagtcctgcgtgatcgctgacgtgtgcagcttgtgcacgttctctcacatcacgaccgttgtgccaaggctcctgttctgccccccggacgccgttcctgggcatatcattgccggaatgcaactggatcaatgtccggcccggactcatcacacaagtgcggtgaacacgatcaccacacgcatggggggacactgacaaaaaacacgc

SEQ ID NO: 296 - DNA, 425 bp, Zea mays
  Clone ID: MRT4577_100273C.1
acgccgcggctggagcccctagagcggcgcgccgctccttttttttttttttttttttttttctttttttttattttttaagagcgaaaccaaggttgaaagcaactttttgcatacctaaccatagagccgttgggtttttatttcatcacatgctcaccgcaccttcagatgcactatgaccaacacacccactcatggtcttaattacaggctaaacacactcccagaccagatgcacgaaaagaacacctgtttattgtccaacaaacctttgcttgctgctcacaaaacctgtctgggacataaccatcattgggacccattgaacttggtcgttccctttgcaatgatagggcccaccttaggattcgttgggtgcttagcaaagattggcaggattgtttaacatacagtgaaaaacc

SEQ ID NO: 297 - DNA, 498 bp, Zea mays
  Clone ID: MRT4577_100274C.1
atgcaccaaccttgggtgcccccgctagaggagacgctggagacgacagaggtgactgaggctagtgacgaacccatggaggagggcgatgacaaggagccaaagcttaaggagtggatcgctcgatccatcacacatgatacatcccccgagtgtcacttccatgaggagctcgactacctattgtaccatgtttttggtccaagtggttgtgagtatggagtcgatgatggcctggacatcaagtattacttgtgtcatccaagtgggagtgaagcaggcgccattgtctcaccactagactatgccttgaacgaactgaagagatctcgtaaggagatctggcagttcggcattgagatggtggagagccgccatagggatcgaggccctcccacttgtgccaaggtccagtacccccaccagtccccgcagcacccacaacacacctacgactccctggcagttgttaaggtttgcctaggagagttgcattag

SEQ ID NO: 298 - DNA, 317 bp, Zea mays
  Clone ID: MRT4577_100275C.1
gcggctggcggtaaacgtattggtgtgttttctgttgagggacagtcatgtttctccagtattacctcaacgagcagggcgatcgcgtctatactctaaagaaatttgaccccatgggacaacagacttgctctgcccatcctgctcggttctccccagatgacaaatactctcgacaccgaatcaccatcaagaaacgcttcaaggtgctcatgacccagcaaccgcgccctgtcctctgagggccccttaatctcttgtctttcccgccccccggcccccctccggactccgtaaccaaactcttcggactgtga

SEQ ID NO: 299 - DNA, 310 bp, Zea mays
  Clone ID: MRT4577_100276C.1
catagacagtgtcaatcatattctacaatataccatcatatggcgaccaagggatttacgggcattatgctccatgctgtttctacatgtcttgttaacgcgacaattatattatcaatgctcacaagcatcctatagctctacatacttgaatcatactttccatcaattatagcttctatatgccaaaacccagatctataaccatatacgctgcaacaagcaatcgtagctagcatcatatctttatcgtccttgaagttcatacaatttcagccctatcttaaggcagtcattgagacaaaccatc

SEQ ID NO: 300 - DNA, 718 bp, Zea mays
  Clone ID: MRT4577_100277C.1
ccgggacgtgcctcatcttcattccttatcctgtacatcgcaagtctttggaaggaaatttctcagcgtgtagcttcatcttcccctccgtgctcggcgtctctggcatgctggtcgaccagcccgtgactccctgcctccctgggacgccgcacggctgcaggccgcggagcagtccacgccaggggcagccgaggaggcggctgggcgaggaggacacgcacgcgcagggcatgctcgtcaagttcggcgacgtgctcgacgtctttgctttcacttgcgtggccgtgctgaagctcctgcaccgcgtgggcatgcgcgcgctctcctctgtgcgggagagcaggctctcttcacgccacgcgcagggcaccgtccagcgtcgccagtcgacttccgccaccttgccggtctggccatggatttccccttctcccctgcgagctccaccagtccgaccccggcgaccacggtcaagtccccagctcctcgtctttgtgcatcgtcgatcgtcacaggccgtcgtgggctctgccccgccgtcgcgcccggggttttagcacatctccctgctccgaccaatttcgcacctcgccgtccatggagccgatcgtcaccagctcacgcgtccagcttcatgttttccctcttcctcccgcgctcagacactagtagaaaagatatcaaagcttacgacactcataaattatcactggca

SEQ ID NO: 301 - DNA, 304 bp, Zea mays
  unsure (1)..(304): unsure at all n locations
  Clone ID: MRT4577_100278C.1
nggacgcgagggggcnggcgcacngccgacggaaccgggcgaccnncaaggggcccaagaagggggacaacacggacgaccggcccaagacggccaccggaaagaaccagcgccgcancgaggcgcagcacaacgagcagccgaccagagccagancgangacccaggagcnagccaagncaggggacgacggaangggaaaacgcaacacaagcgagcnagnnagccaggcggacccgcaaagcgnggcgaggaggacanggccagacggaaccngaanaaacaaacacaggcaacggcncac

SEQ ID NO: 302 - DNA, 454 bp, Zea mays
  Clone ID: MRT4577_100279C.1
cccacgcgtccgactagtcctagcacgggagcggccgccccccatctataactatgcggcagatgaacaggcggctagctgcaggcgatgggcatggctctctctcccttcgtcctggctcctgcttcaatgcctcttggtgaccatctgattccagccttatcctccgtactgggcgcgagcttatgcttctccggcggatttgactggtgaccagcacccttcatgatcgaagacgccaacgatgtccctaatgtgcctaccgtcaccactcccaacctctccgtgacagacctttctgggatagcgaccatatagaacatgcatgggacatttattccttctcaagaggacttcttggatcgaacatatgcacgggcttaggatgtgctaagtgaacaggataaaggttctggagatataccaccataggagaaccccatagagcgcctct

SEQ ID NO: 303 - DNA, 221 bp, Zea mays
  Clone ID: MRT4577_10027C.1
ccaacagggcgtgctatcgcgagacgcactccacatccggggggcactcatgctgaattcttatcgtagaggcgccaagcctcccggcacaaaggataaccaagaatatgaaccccactacgatggtgaaactgacagacactctgaaccctagcaacaaatcataaaggatcaccataatcacaaggacgggctcaaagaacatgacggggaacgagcct

SEQ ID NO: 304 - DNA, 442 bp, Zea mays
  unsure (1)..(442): unsure at all n locations
  Clone ID: MRT4577_100280C.1
gaccatccatcttcctcacgcacaggcgcacaacccttccccgggcagggccacaactccgncgacgccgncaagccaaggcgagatccatggtcacgacgncctacaccgccatcgccggagctctgttgcacgcagagcacgatccgtttccgagcttcggtgaactgacgatcaagctggggggaccccgagatcaagctcttcgagttctacaaggttgaagaccctgagcatctgtttggtgaagaccaaggatgggcatcaggaatatcagcacctgcagnacaagggcttttagaggtgntgggagaggggggtgcagacaatgtgagccaaggctnnnttgaagctacaccctatggaagcactgagcttgggcgggacctacttnaggaatcataggggctatgcaccataagaccgaaaaggcgnggagact

SEQ ID NO: 305 - DNA, 356 bp, Zea mays
  Clone ID: MRT4577_100281C.1
gtccagcgcatatgatgatcagttcaagcagctcatttcggctggaaaagacccggggagggcttactgggaacttgttataaaagatatccaaaaatcctgccaacttttttaggccatctaccattaaacttattgggcttattggtattttttcctaaaagggtcttcttaggtggccaaagacacttaaaggacttgttaaaccggaaaatgggtacacaaaatggtcaaaccccccaaaggctacataaaaaacccaacttcctgaaaaaggggttctttcattcaagaaagtattcgttattgccttaaccgtcaacgcaaccctaattttttcaattgcaaaaaataag

SEQ ID NO: 306 - DNA, 315 bp, Zea mays
  Clone ID: MRT4577_100282C.1
aaaaagccatttttactctaaaaaactaaaatttcccccttcacatttaaagttgccccccccccccccaacttaaaataaattttttgtcccaacactcctccaacaaaaacttccaataataataacctttaccagtcaaacccccaacaaaacttacacccccaatctttaactaacagtgccattcacattgttttccatccttaacccggaaccatttttaaacattattgtcccccttaacaaaactccccccttatattccttcctttccggctgccttcaatttaaaaaaaccccccccccaaggag

SEQ ID NO: 307 - DNA, 357 bp, Zea mays
  Clone ID: MRT4577_100283C.1
atcgagataaatctcaatcaatatatcgcttattggtaggaaacacacgccgctgtgagggcaccattatcgagtacatgtcatatgtaatctaaaagatggcgaccgtccaacgatgggttgctgccacaacaaggcaggggtcatcaaagagaactggttgtatggcaacaattgttgctgctggtggaaggcatgccaccaatgggttagccaccggtaggggattaaggaactgatgacgctgttgcacgtacccatcagatgtcgacacactcatgtggttgaatggaagcagctgttgcaagaagtgggcaagttttgccacagctagctgggtcagagctgtgtacaatc

SEQ ID NO: 308 - DNA, 733 bp, Zea mays
  Clone ID: MRT4577_100284C.1
aaggtaagtgtagaatcaatcagaatgagataagtaggtaagagttgtccatttctatctaggtttcgtcctacagtcaacatttcctctgataccacttctgtcacacccggatttaaggaacaaagccgggtgcatctcatacatgcgccaagaagacaacatatataataacagagtgtatagagataaatgtcataaaacatcagagtatttattacatagcggaagacttattacaaaataaaagaataaatataaaacgaactaaggatcgtcggcgccaatgtcgactgagaaacgccacctagatcagatcaaactcctcgccttgtagctcctcctgaaccacctgctcttctccttcaatgagctcctgctcagctatctctacttgctgaacctcagattccacagtggcttgctcgttggcgaagatgccgtgatgaacaccttccacggcgaggtatggcccgtggcgaatccactgggtcaggtgagggctcccggtgtcctccctgttcccccgcggccaccagtacgcgctcggtacggtcttgcgcgcgcaccggtctgcgtccaggataccgagatgaagcacacgcccccaaatccattggcgcccgtgattccttctcatctccacgaactcgtcaatggcgaccactcatcaccccggtttgcgcgactgtgcacaacgcagcatggctagatgagaatagctcccggccgg

SEQ ID NO: 309 - DNA, 169 bp, Zea mays
  Clone ID: MRT4577_100285C.1
gaagcaacaatttaaacagccataattattcctaataacccggtagcaaggcaggggaattaaccactctaacaacatcaagtgttgaaaaccacaccatactttttacagcacacacctaacaccattgcaggcagactggcgcgcgcttcccaaaaataaggggaag

SEQ ID NO: 310 - DNA, 1165 bp, Zea mays
  unsure (1)..(1165): unsure at all n locations
  Clone ID: MRT4577_100286C.1
agcagtggtaacaacgcagagtcgcggggctaagatgcccgtctatactatttcaatcaatcaaagaagcaaatcagacatttatcaccagaacaatcaaacaacattttaaatagagaaaatagttttaaactttgtcctaggttccctgtctcttaaaaagttcattaattgtaggatcccaaggtgtgaaatccatcttgtcttagagtagaaaagataaagangatcagagtggaacagtagaaggtgagacaggatcaagataagtatagaaagaatcagagtaaggtaagtatagaatgaattagagtaagataagtaggtaagggtttgtccatttctatctaggtttcgtcctacagtcaacatttcctctgataccacttctgtcacacccggttttaaggaacaaagccgggtgcatctcatacatgcgccaaagaagacaacatatataataacagagtgtatagagataaatgtcataaaacatcagagtatttattacatagcggaagacttattcaaaaaaaaaaaaaaaaaaaaaaaacgaactaaggatcgtcggcgccaatgtcaactgagaaacgccacctagatcagatcatactcctcgccttgtggctcctcctgaaccacctgctcttctccttcaatgagctcctgctcagctacttcaacctgctgctcaccaggatcctcagtcacgggctcttcggagatccaagtgatgactggaatgatggccgccggagacgccagatgcggacgacccttcccccggcaagcgctactccaccggcgagcctcacagcggcaatcggcacgagctctctctcacgggtaacagcgcgtttcactctccctccctgatttctctctgcaggcaacgcggtgcatcccgactcgtgggcaactgcggcggcgatgtcatgcgcatggcgatccggggtcttatcccacgacgcggcggactcggtcagtcgttcctcaaatcatgcgtggcggcggagatttcggtcatggccgttgcggaggcgcgggatgacacgcgggtcccagcagcagcggcgtgagtgagatgaatgcgacagacagacgaggtcccatattccagtgaagcagatttgcccaaacggcgtggatggccactgacaggcat

SEQ ID NO: 311 - DNA, 316 bp, Zea mays
  Clone ID: MRT4577_100287C.1
gatgcatgggacgacgtgcggcgagcggaggcccgccatgagcgcgcgctcccgccgcagcagctccgcgcccgccgccgccggcgcgcacttgaccgcgaacagatcccccgacgcctggtcggcggccaggaacacctccgcgcccgacgcgccgcggcccagcgtcctcacccgcgtccacctcccgctcacggccatcgccatgccgcgcgcggttgttgcgatctgcttgcttgcttgctcttcttgtttgtttctcgcgtgctgctgtggtggtggttgtttctgttggccctgacttgtcacggacgct

SEQ ID NO: 312 - DNA, 154 bp, Zea mays
  Clone ID: MRT4577_100288C.1
cttcacgtcacgcgagtcgtcatgcccttgttcggttctaagattctggcccttaaaataaactggccggccatttatcacacctggtcggtcgactcaagcaagccggtctttaggtcactggctgctgacttcaaccattacgctgacagct

SEQ ID NO: 313 - DNA, 1952 bp, Zea mays
  Clone ID: MRT4577_100289C.1
ctcactctctcttggttggtgactagcttgctcttatccgcctgcagtccatggccaccgtcagtctcgcgctctcgctgcgattcgcgccgtcgtcgcgaccgctgagtctccaccgcaggaggcccgacgccgtgacctgccgcgcgaccaccaccacgttccaccggctcgacgccgtcgcagtgagagaggaagagtctaaatttcggagggccgcggcggagggctgtaacttggtgccgatcacgagaagcattttctctgatcatcttactccggtgctcgcgtaccgttgcctagtcaaagaagatgatcgtgaggcgcctagctttctgttcgaatccgtagaacaaggctcagaaggtacaaatatgggaaggtatagcgttgtcgcggcccagcctgctatggaggtattggcgaaggctaacaaagtcacggtgatggaccatgagttgaagtcgaggagggagcacttggtgcctgatcccatgaagattccaaggaccatcatggaacagtggaacccgccgcaagttactgatggcctccctgatgcgttttgtggagggtgggttggattcttctcatacgatacagtgcgttatgttgagacaaagaagcttccttttagcaaggcaccgcatgacgacaggaacattcctgacatgcatttaggcctctataccaacgtcattgtgtttgatcatgttgaaaagaaaatgcatgttatccactgggtgaggacggactgctaccaatctcttgacgaagcatatgaagatgggacaaatcggcttgaatctttgctatcaaaattacattgcttcaacgtcccaacgctttcttctggttctataaaacttaatgttggaggctttggatcggcgacgctaaagtcaaacatgtcaaaagaagagtataaaaatatcgttgtccaagctaaagaacacatcttggctggtgacatttttcaagcagttctaagccagcgcttggagagacggacgttcgcggacccctttgagatctaccgtgcgttgcgcatcgtgaatcctagcccatatatggcctatctacaggcacgaggctgtattctcgtggcatcaagccctgaaattcttacgcgggtacaaaagaggacggtagtcaaccgaccgcttgctggaaccataagaagaggcaaaacaaaggcagaagacaaagttttagaacaattgcttctgagtgatgaaaagcaacgtgctgaacatattatgcttgtagaccttgggcgcaatgatgtcggaaaggtctccaaaccaggttcagtaaaggtggagaaattgatgaatattgaacgatattctcatgtcatgcacatcagctcaaccgtcaccggtgagctacgtgatgatcttacgtgctgggatgcactacgagctgcattgccagttggaacagttagtggagctccaaaggtgagagcaatggagttgatcgacgagctagaagcggacatgcgtgggccgtacagcggtggcttcggagggatttccttcaacggcgacatggacatcgcgctcgcccttcgcaccatcgtcttccccaccgcatcccggttcgacaccatgtactcctacgcgaacgggaagtcacggcaggagtggatcgctcaccttcaggccggagccggcatagtcgccgatagcaagccggatgacgagcaccaggagtgcctgaacaaggctgctggggctgctcgcgccattgacctcgccgaatccacgtttctccaagagtagtcgcctaggcctagctatagtccggaactatgttgttagttgattatggattattgtactggaaaacatatatatgttttatttatttacttggttgaataaaaactcgattgtaataaagttattagtattaaatgtaaaacaaatgaccatctttttagcatc

SEQ ID NO: 314 - DNA, 161 bp, Zea mays
  unsure (1)..(161): unsure at all n locations
  Clone ID: MRT4577_10028C.1
cctcccacctttctcaacaagtacccanccaggggagcctcgagccgtcacaaaaacgagcaagcagggggacctctccacatgcctcctactcctcctgcccaccgactcggtcgccaccaacgttgactactgcactaagaacgactaccttgtaaaga

SEQ ID NO: 315 - DNA, 637 bp, Zea mays
  unsure (1)..(637): unsure at all n locations
  Clone ID: MRT4577_100290C.1
aattcggcacgaggctaccttccaaccatccaagaaacccacacaaggccaacccacgcccacgccgcgccgcgccacgccaaaaggagcccaagaagctgtgatcctgctgccccggaagaagctgcgcagcagtaccaagtagtacgaacaaattggaccggggtagcgcttacttcccgctgcccggtggcagcagcagaaactcggccatggagggggaagcggtgcccaagaacgagaggaaggccgccggcggcggcggcggaggcgttagcaatgacggtggcgcgagcgcgaatgcgaggaggaggtggaagggcggaggcggcaggcatcacccgatcatccaggcctacccggcgctcctgccgttgccgctacacgcgcgtcgcaacggcatcatcgcgctgccgctgccgccgcccgtgctggtctacttgcaccagccgccgccgccgccgctgctgttccccaaggtgccggcgtgctacgggaagcccaccggccccccgctgcttagggggccgccgtggagatcgaggaagccgtcgtcgncgacgnacgccgtaaccgccgagctggtgccgctaccgcacgataccgagctgattcagcacaagtgcttcattcacga

SEQ ID NO: 316 - DNA, 859 bp, Zea mays
  Clone ID: MRT4577_100291C.1
ccggccgggaaaactacctctcgggaactcttctatcttccgacctccgtctccttctccatcaacgtctcttcttttcccctttcccatacacacaccgtaatccacagccatggaggaagaagttgctgctctcgtcattgacaatggttcgggtatgtgcaaggccggtttcgccggtgatgatgctccccgagctgttttcccttccattgtcggtcgcccccgtcaccatggtatcatgatcggtatgggtcagaaggactcttacgttggtgatgaggctcagtccaagcgtggtatcctcacactgcgataccccatcgagcacggtgttgttaccaactgggacgacatggagaagatttggcaccacaccttctacaacgagctgcgtgtcgcccccgaggagcaccccgtcctgctcaccgaggctcccatcaaccccaagtccaaccgtgagaagatgacccagattgtcttcgagaccttcaacgcccccgctttctacgtctctatccaggccgttctgtccctgtacgcctccggtcgtaccaccggtatcgttctggactctggtgatggtgtcactcacgttgtccccatttacgagggtttcgcccttccccacgccattgcccgtgtcgacatggctggtcgtgatcttaccgactacctcatgaagattcttgctgagcgcggttacaccttctccaccactgccgagcgagaaatcgtccgtgacatcaaggagaagctctgctacgtcgcccttgacttcgagcaggagatcagactgctgcccagagctccggcttggagaagcttacgagctccctgacggtcaggttatcaccat

SEQ ID NO: 317 - DNA, 182 bp, Zea mays
  Clone ID: MRT4577_100292C.1
ttttgaattcgagcgacgagccacgcgtcccaacatataacatcatctgacttgtccaacctaccaaatacatttactcttagtggggctaggaatctacatttaaaccaacattcaacggttatcttatgacttaccctattctgataatttaaactacctcaacactgtccaacttactg

SEQ ID NO: 318 - DNA, 420 bp, Zea mays
  Clone ID: MRT4577_100293C.1
attcggctcgaggtttgtctacgtatgccttttgacacattgcaagctgacatactggatgcttgatactgatgtatcatgcaggttgacacaggtgccttcactgatggtaacaaaggggtttactatgcacccaacttgtaacaaataagttgaagcgtaccatcagtgattgacactgatccatctgaagaccctgtagctggaaacgatcatacaaccccgcctaacctagatgagcaccttatgcctgatgggtccggcaatgagcttgagccacacaagtccgactggaaatcagacgccccccctgcgatgagcaatggaaccatttcttaagcagggacaccaccatgccaggatactgtcaacgatggtgccgctcgtacacagtgatctgttgtttaccctaacctccta

SEQ ID NO: 319 - DNA, 794 bp, Zea mays
  unsure (1)..(794): unsure at all n locations
  Clone ID: MRT4577_100295C.1
ccggccgggtgtgctctgaaaggattttccagtgcaagagggagtgtggtgggatgctagattgcgggaagcataagtgtgagagggggtgccatgggggaaagtgtggggaatgcccactccgaggtcgacgcacttgcccgtgtgggaagaaaaattatccaaggttggagtgtgatgcagaggctgccacatgcggatcaacttgtgagaaggtgcttgggtgtggacgacacaggtgccctgagcgctgccatcgtggtccatgtgatgggacttgccgtcttgtggttactaaggcctgccgttgcggggggttgaagaaggaggtgccctgctaccaagaattgacgtgtgaaagaaaatgtcaacgtttgcgaaactgtggtcgccatgcttgtaaacgacgttgctgtgctggagattgcccaccctgctctgagacttgtgataagaaactcagatgtggcaaccataaatgtctctcaccatgccacagaggcgcttgttcaccttgtcctctgatgaagaccatttcttgcgcctgtggaaaaacatgttttgaggttccttgtgggactgagaagaatcagaaaccacccaaatgctcaaagaaatgcaatatacctcgcctttgccgacacaagcttgaatgccggccccacaaatgccactatggagcctgcccaccttgcaagctgatctgcggngaaagatttccatgtgngcacacgtgtaaagaaaggtgtcatggccctatttctcctccaactccgagntcacactgaaaccga

SEQ ID NO: 320 - DNA, 838 bp, Zea mays
  Clone ID: MRT4577_100296C.1
ccgctcgaggggccggccgggccccgggaaaaaaaaaaaaaaaaaaaaaagatcccatacaagccgcagcagcagcggtggccatagtgactagtagtgaacttccaaaacaagtcggcaacgtccgagcacacaatggcgagagggcgggagggcgaggtgaggaccctggtgctgggcaagtacgagctggggcggatgctggggcagggctccttcgccaaggtctactacgcccgcgacctgcgcgacggccagagcgtggccatcaaggtcatcgacaaggcccgcctccgccagacggacggcatggtggagcagctgcgccgggagatctccgtcatgcgcatggtgcgccaccccaacgtcgtcggcatccgggaggtgctcgccagccgccagcgcgtcttcgtcgtcatggagtacgcgcgcggcggcgagctcttcgccaaggtcgcccgcggccggctcaccgaggacgccgcccgcaagtacttccagcagctcgtcgccgccgtcgccttctgccacagccgcggcgtcgcgcaccgggacctcaagcccgagaacctgctgctcgacgaggagggccgcctcaaggtcaccgacttcggcctcgccgcgctgcccgagcagctgcgccacgacggcctgctccacacccagtgcggcaccccggcctacgtccgcgccggaggtgctccgcaagcgcggctacgacggcgcgcgcgccgacatgtggtcctgcggcgtcgtgctctacgtcctgctctgcggcttcctccccttccagcacgacaactacgtcaagatgtaccagaagatcttcaagggcgag

SEQ ID NO: 321 - DNA, 400 bp, Zea mays
  Clone ID: MRT4577_100297C.1
acccactcgatctcaagaatcaacatataaagttcaatcctttaatatcaatacagcaacaattcatatcagcatgttttcactacttatgctccctactctatctacatatgttactaacaccacaattttccctcaatgctcacaagctcctataacttccctttttcccccataccttccatcaattataactacaatatcttaaaacccaactcttcaaccatatacgcttcaacaaacaatctcaactaacaacatacctttataccccttaatatatcaacaatcacctaccctatcttttatacaatcattgatacaaaccatcatatcacaacaactacaacaactcctactaccctttatcaaccaattaactctcacaaaactttctacc

SEQ ID NO: 322 - DNA, 631 bp, Zea mays
  Clone ID: MRT4577_100298C.1
tccggagcagcatgaccatccatcctacttctgactgaccactgttggcgcgagcgtgagtgaccggtacggacaaggcgaacgacgatggcccgcagtcggcgtgtgacaccaggactcactcaccttgcctcgcggatacggcgctgacgcgtcgccggcgccactcacgcggcgatgcgggggcatcgcatacccctgcgccgcatccgcaggagccgtacccaaagtatatggtgcacacctgatcgccccaaggatcttgggccgttctcccagaagacaccgtcatacctgactggcgagtcccccgcaagtataccgtggagcacaccgcgaggcctctcgggcgatgcggacacattcgcgcgcagacgagaactggaggtgatccactcccgtggggcgatgctggaggctgctggactgggtgatcccccagatcctggccaataacggacgacggttccggggagggcatgcggtctggctcgggcgcagatcttctgtgaggctggtgtgcactacctgggaaaccccaaactggtgcacgctgagaacatgcaggccatatgtgcgtgacaggtggcgctcatggcctatgtcgaggacatctacctcaacttcgacc

SEQ ID NO: 323 - DNA, 631 bp, Zea mays
  unsure (1)..(631): unsure at all n locations
  Clone ID: MRT4577_100299C.1
atcaccttcaatcttgtgcgtctgagtatatcacagagacactcttatccaaatcggtcactggttgtgcgaccaccacgtgaagtgcagtgtcctactgcgtgggttgacaggactggttctgcaaagttcctaagccctcctcctgcgaataagactagctcgagatggccggatactgttgctaagatgagatacatgaagtgccacaagctgctaattaagaggctgcacgcacaacataacttggtcatggataagaaatacatttacgatctattgagattgctcttgaatgtcttgatgtacggcacagttggactccatcgataagcatgggaccgtgtacgttcacatcctctatgctttcgacgatgactcggtcttacatgaccacttgatccaaatcttctctaacggaggctacccatacgacgctgacctgatcaacaatcagatctaagaccgctaaaagctcaccatgatcagctgacaaaagggtcagtgggcacgactccnatgaacagatgtgccacatatcgcatgtttacgcatggatcacagcatcgcaacgtgcaccgccgtcgcgcatgtcgagacaacggaccatgaaggcgacctgtactctgga

SEQ ID NO: 324 - DNA, 788 bp, Zea mays
  Clone ID: MRT4577_10029C.1
ctcttctcttaccggcgccgccgccgccgccgggggagtgagcagcagcgtgagcgccgagctgccgtacgactgcgcggaggggtcgccggccggagatggcgttcgagtcgtcggcggagacggagcggttcctgtgcgagcggctgctggacgcggcgcagcccatcgcggagcgcttccgcgcgctcttctccctccgcaacctccgcggcgacggcccccgccaagccctcctccaagctgcaagggatccttccaacttgcttgcacatgaggctgcatttgcacttggacaaatgcaggacgctgaggctatccctgcattagagggagttctcaaggatctttcactgcatccaattgtccgccacgaggctgctgaagccctgggagctattggcttggaaaagagcatttccctgttaaaagagagtttagcagctgatcctgccgtggaggtgcaagaaacatgcgagttggctcttagacggatagaagggcagaagaatgccagtggtgctgaaagcacaacaatttcgccttatctatcagttgatccagcactgcctgccaagcagggactttcggtagagcaactaagggagcttctcctcaacgagcaagaaaagatgtatgaacgttatgcagctctttttgcgcttaggaatgatggcggagattatgctgtttctgctatcattgaatctctaggtgtgaaaagtgctcttctgcgccacgaggtcgcttatgtgttaggtcagctgcagaacaaagcagcttcagat

SEQ ID NO: 325 - DNA, 185 bp, Zea mays
  Clone ID: MRT4577_1002C.1
gacatacctctgactccacctccttgagcttcgccacgtcgcagctcgccggcctctcactctccgcgggcgacgcaactccaaacgccgtcgacttcctcccaaagaagcagcagctcccgaccattgtcgcgcggcgggtgtcgcctttcacgggcaagaagacgaaccgggcgcacaaagtg

SEQ ID NO: 326 - DNA, 369 bp, Zea mays
  Clone ID: MRT4577_100300C.1
aacacgcatccggcggcgcttgctcgggacacgctcgctccagcgatggctacggcaccagttgttgctgacgccgtcatgcctcacatcgtgccacctgtcacggctcccgtaccagatccgcgtttctccggccccaagttcaagctgcattcctagaccgcagttccgacagaagtctttaccaatgaccccacagaggacccaacacacgtatccaacgctggagcctacactgctactgctgagctaacgagatgatagcctcgagctggcaccggagcccgagctcgatcacgatgacgaagtggcggcgccaagctcgctcactgtcgtcgtcgcggacctggtggacgacgggctcgtcat

SEQ ID NO: 327 - DNA, 824 bp, Zea mays
  Clone ID: MRT4577_100301C.1
atctccaattcttcgaagttctcattgggcgccatttttatcgacgatgaagctttgcttacaacatataattggtaccttcagcatttgggtcggtatccactagttcagctcggtcgatagcaatcaggcccaccgatcggtatgcccgctctggccgaacaggacgtcacggatcagtatcgtgactggttggattggatccagtcttatcgagtcgctgtagatgaaataggatgggccattttgatagataaacggtgcaaacagttttgacaggaagcactcactcactgagagagcaaccaaaatacgcttgctgattcctactttgcgatcttggagatgacggtctcgaaggccccgaccagggccttcaccctgctcttcctcgtcttgacgagcctggtcgccgtctcctcgatgaggttgttgtacagcctctggctcttgttcttctccagcgtcttctggtgcctgagcgccaccgccggcacgacgaaaccagcagtgccggcggcggaagcaccgacgcctcgcttccggaggcttcggatcctgagatggatgcctctttcggtggtcaccgaaggattctcgccgcccctcctggacctcagcctcgcgggcttctcctcgtcgggcggtggaagcactgcgggcgctctggtgctcctggaccgcagcttgaaggcgcccgagttcctgctcgcttgtcgcgcgaacgggtgccgcgcggacctgctgctgatgctcatgctctgcaccctccggtgcgcagggatgggcctgcttgattcagcggcagcagcgcactgttctgg

SEQ ID NO: 328 - DNA, 562 bp, Zea mays
  Clone ID: MRT4577_100302C.1
tgtgaaaggaaggagacttatgtggaccacataacagtaaactgaaagcatgtgtaaggtatttaagagctggttgttagaggatgtataagatagtagttactacacccctgtattacgataaccgaagaaactgatatattgacagcattcaaagtaactccttaccttggagttccgtctgtaagaagcaggagctgaattcactgcggaatgttgtactggttcgatggtacaaactgtttgtactgatggacttaccattctagattgctacaaaggacgatgctatcacatagagtccctttcctggggacccagatcatagtatatcttatatgtaacttatacatatagacctatttgaagagggttctgatactaacatgaatacttccattgtatgaaacgcattctatttaaaagccttacacgctctacgactggatgatctacgacattcccctgattattcaaaaacttctaaaggtccagctgacggtattcaagatggaaggtgtaattttgacacctacggaacgtcctttattgagatgtacta

SEQ ID NO: 329 - DNA, 316 bp, Zea mays
  unsure (1)..(316): unsure at all n locations
  Clone ID: MRT4577_100303C.1
gggacaaacagcataacccaggacaaataccgataagctatacaccttttagaacttgaaattccaccactgctagttatcttaacaaagcacctctaccatatacatcaggaaccacaaaagatgggagaggaaagcaatccaaagaaataaatgtatctggcactgcaagtaccatgtaccgcagtaactctgctataacagaagaaactgaaggcccttttggactatcaacaacagaagcatcattgagacgtctcactagtagctccacaaacatgcgcacatatgttntgtgaagagagtaatnggtgtc

SEQ ID NO: 330 - DNA, 351 bp, Zea mays
  Clone ID: MRT4577_100304C.1
tcgttccttggacagtgctaccagaacctgtgcctccgcagggtgcttagctggtatcattacaatatggaagagacagcggttgggtttgtcttactactatggaaaaacacagtaccgaaagctttagggggggccaaagattgtgtcattgaaggaccaaaatcgtcttggtacaagctggctcaagtgtggaaaaggcacagggtcgcttgacccagatgaatgcagtgacatgtacatggtaaacttgcaccagaatatgcgaaagggggatcaagggggcatgtctcattaagaaaacttatcagatccactatttaccccgggcttgaagggcacatgacgccc

SEQ ID NO: 331 - DNA, 164 bp, Zea mays
  Clone ID: MRT4577_100305C.1
ggggaatgggtaccctgcgggccgccgggaccggccttttgaggtgcagatccgctcccctacctacccagcatctgccgtatgcgccgactagtctctgatcctgacctcgccgacagccacgggcacgatcaacatcggacttcacggcttccgaaggatcg

SEQ ID NO: 332 - DNA, 239 bp, Zea mays
  Clone ID: MRT4577_100306C.1
gagcaaggcgttcactattcaatggccgctatctgagggtcatccgtaactagtgaagtgtatacccactcgcagtgtaggcatgcgaggcacttactggaggaactagcatccttgagaaatggagcgctggctactacagatgcccagacacaacctcgtccagccaaaacgagtacatctacagaaagaagacgctgctagccgacaagatacacacaaatcttacgcatcgcgag

SEQ ID NO: 333 - DNA, 324 bp, Zea mays
  Clone ID: MRT4577_100307C.1
tttatcgcaatcactgagttcgagctgatcggaatgcatcccggccggcgtgggctttaagatgcacaactttgtgaaaaccctgaccggcaagacttttaccctcgaggtggacttgtcttacaccattgacaacgttaaggcccacatccaggacaaggagggcattcccccagaccaggagcggattatctttgtttgcaaacagcttgaggacgggcgcacgcttgctgactacaacattcaaaaggggagcaccctccaccttttgctccgccttaggggaggcatgcaaatctttttgaaaaccctgaccggcaagac

SEQ ID NO: 334 - DNA, 480 bp, Zea mays
  Clone ID: MRT4577_100308C.1
tggcttggaacctttgggctgatttatgtgcttgggaagcgcggacgctaaccgcggcgtacgcgtccgggctcagcgtcataaatcgcggagtatttaccttaagccgcgcagcgggccctgggcgttccggtgaacgttcccgtacttcaatattcaaagcggtggataccgtgcgaggtcggtcctatagagtagtgagcattgtttgttattagaggcggaaggacaacgagttgtcacgtctcaggttaaccagggaatacgcgtttctcacggcagattatcactccccaaacaaaaaaaaaaaaaaaaaaaaaaaaaaaaaaaaaaaaaagggtggttgtctcagaggacttaagtccatgcatgtgcgtacgtgatgctacagtctcctcacagcgctattcaaacctaacctatcggttgctgccccataatgctgcgatcgggaaaatttcggtgccatttaatccaact

SEQ ID NO: 335 - DNA, 328 bp, Zea mays
  Clone ID: MRT4577_100309C.1
ccatgttgacctatggagagtacaggtgtaatttgttgatggatgatgtatgcaatcggactaccttgtgaagaagaagtaattgatcgagccacattctgagagaagagggagcgttgcatctgtattggacagaactgaagcgagagctgctgtaccattgttcagaccgtgaactttagattcattttggaccacactgatgaaataaataaataaactgtcatgatatttgtggggacactcttcacccgtgtatagtgtatgcaattgcatgatatacgcggtaataacgtataagtatctatgtatcgatcatgagcttgaa

SEQ ID NO: 336 - DNA, 317 bp, Zea mays
  Clone ID: MRT4577_10030C.1
aactggggtggggggtttatggaaaaaagtaggtcttaataaaaaaactgcttggcaatactactaaattcgacctggaagttggtttggacaaacatgccctaaaaaatgctacatttgattgaaaggggcaagccttgaggaacaaaaaataaaccttttgaaacacaaggaacacaccctgtcgctaataggactaagaaaacaaaaaacggaggcttctaatggaggcacatcgttggaggaatgaaaaagcctataaaataaattaaatacaacatgggaaggcactttggtcagggttgcctggaaatttt

SEQ ID NO: 337 - DNA, 227 bp, Zea mays
  Clone ID: MRT4577_100310C.1
cccacgcgtccgcccacgcgtccggcctacgccatggcgatcgcgccctacagcaacacgcagggcacgtgcgacaagacgaccgccgcggccgtcctctagtacgccccgacgacgagcaggaacaagaccctgcctcccctaccggccctgccgctggacaacgagaccggcgcggtgtccaacttctcgcgcaatttccgcagcctgatgagcgcgcgggaccc

SEQ ID NO: 338 - DNA, 257 bp, Zea mays
  Clone ID: MRT4577_100311C.1
taactctctcccttcctccctctatctccagggcacattgatctttgcttcgggcagggacggccaaggaagcgcccgcggagagagatgatgcttgccatcctagacaggcggcctgccgggcaagacaagactccgacgatcaaaggctggcttgtccgcctggagggcgtacgcggcggcgggctaggagagcgatgtggtggtgcagtttacaatctcccacccatcatccattccaacgtcttgctcgtagc

SEQ ID NO: 339 - DNA, 458 bp, Zea mays
  Clone ID: MRT4577_100312C.1
aaaacgtatatttttcaaaacgggaaaaaggaaaaaaaactttacaaccggggggaacggctaaggggcaagggggggggaggcacggagtcggggaaaggggaagggggaaaaagcaaaaaagacgggggtcgggaggctgcacggggcaaagggggaaaccagcccggctaccgccggcagcgagggacggcggggcccaccacgaaggggaaccaggagcccgctgggcgctcaagggggaaggccgccttaaggaaaaagggaggggggagcggcgccccgaggggggagcggccgggggaaggaaaaaggaagcggccaaccagcaaaaacccgcgcgggaacattaggcaagacaaccccccccaaaggtggaagggggaaaacccggaaaaaaggggggaaggaacaaccccagctgcggggggggaaaaagcaaaaaggcgggcgacgga

SEQ ID NO: 340 - DNA, 529 bp, Zea mays
  Clone ID: MRT4577_100313C.1
aattatcttgaaatctcatatagaatatcatatgagaatttctctcggggtctacatactaccaatcatcgattcaaagatttctggttacgtctctacttctaaaattgctagtgtctgcgtattggctgctagtcttgcctgctcctctctcgctctcccatgagcatctaatcatagaaatcgtgcgtattgagtcccaacaacttgcaacccattgttatagcatttgtgatgagctcgtgacgacctagacagcgacccctcacatgatgtacaaccggaacggcaggagctatgtgatcccacatgaatcgcaaggtgtatcactgaatgaatacaatctgcgctacaatgcggttcgctccttgcgctgcttgatgagaaagtatatgatgcgcgacaataaaggtgagagcaagaagaaccagcaggctctcttccccatggatacgcacactgcagcgcgacctgagggaagaagtatgccataagattccacgatgatctagctactatatcccacatt

SEQ ID NO: 341 - DNA, 239 bp, Zea mays
  Clone ID: MRT4577_100314C.1
atccagcccgtttttatctctaagaaccgccgactcgtgctccggtccaaaagggtggaggggggccctcttccacccaccccagttattgctgctcccgatccaccacctgcagtttttgctggtcccgatccaccgtcgtctcctaatttaaccctgccccgggttccccttgtcgtactcagcacaggcgcccatttcgtacccaatccctgaagaagttccctttgccgggaagc

SEQ ID NO: 342 - DNA, 956 bp, Zea mays
  Clone ID: MRT4577_100315C.1
gccccgtggccgtaggcggcttttttttttttttttttcgggggaatcacgaatcattttctgaactgtataaagaaaattgttaactgtgacgctagtttctcagcagcgcacaacatgaccgttaggaagagcaacagggcattcttcaagccaaaagggatttcttattctgtagagagctccaaaaaaggtaacttggcgccagttaccaaggaagagaagccggcacaacatcgtgagttcatacttcttttgcattgtaggattacagaggtccagggaaggtgccgttttcgcgttgctcgttccagcgatcaacccattcacctgggcacagggatcgatagtacttggcgaacttatcacactcaggtgcatcctcaccttttgcagccacacacctgtgatattcaacatagcgtgtgaaacaatgccttgtttggtttgttgttgggaaacgaaaatctgctggagctgtttcgatcttgatctcaggtttctcagcctcttcctcctcggtagtctcacttgcttcctctacagcaggtgtttcctctgcagcagtgttagtttcttctgcctctggattttcagcagcatcttgtacttcagaagttccattcttgtcttctacagatggaggagtttcatcattggttgagggagcagcttcagactcagtaccactagagggcttctcctcagctgccttttccactggaacttcctgtggtggaagtgaatactcctcggcgagggacggcgtcttgccttccgcggccatgggcgcagcagcagcagcctcgaagcttctacaaggggcggctgcgacagtgaaggagaagagtggaggagacagctcgcaactcgggcttcggagcaatagaaaagggagggcgagggctaggggccagtggccaatcggggccggacccgcctggagccgagctccc

SEQ ID NO: 343 - DNA, 468 bp, Zea mays
  Clone ID: MRT4577_100316C.1
ctcccgcgagatcttcagtcatcgaaatatgaaaggatgtttgtgcgtgaaccgctccaggaccctgcccagtgcgagcactggtctccgcggcaatacgctaatgctctagacgagctgaccgggaacaagccggtagcttctcctacaggtggaccgcatgatgcgtcgcccacgtcgacgctgatcttagtgcgagagccataatccagcgagagaggtcgacgcgctcagcatgatcaccacgcccagagataggcttgctcccccagacgtgtaggctctcattcacccacctagcagcatcacacgggattgagctgtcattacgctgctgtactggcgtcaatctcacactcacaatgcctgacttcatccgcatcgaaagtaggatcatattgaaggctttctttgctgaacctgtccttactgaaccactgttagaaataaaaggcgctggcaagaaat

SEQ ID NO: 344 - DNA, 1085 bp, Zea mays
  Clone ID: MRT4577_100317C.1
ggggaatcaccaatcattttctgaactgtataaaaaaaattgttaactgggacccttgttttttaacaacccacaacatgacccttaggaagggggggggggctttttttaagccaaaagggatttcttattttgtagaaagctccaaaaaagggaacttggcgccagtttccaaggaagaaaacccggcccaacattgggaggtcattcttcttttgcattgcaggattcagcagcgcacaacatgaccgttaggaagagcaacagggcattcttcaagccaaaagggatttcttattctgtagagagctccaaaaaaggtaacttggcgccagttaccaaggaagagaagccggcacaacatcgtgagttcatacttcttttgcattgtaggattacagaggtccagggaaggtgccgttttcgcgttgctcgttccagcgatcaacctgcgaattgaacacaattcagccgagcttaagatgccaagacggtaacaggaaaagctgagggaccattcacctgggcacagggatcgatagtacttggcgaacttatcacactcaggtgcatcctcaccttttgcagccacacacctgtgatattcaacatagcgtgtgaaacaatgccttgtttggtttgttgttgggaaacgaaaatctgctggagctgtttcgatcttgatctcaggtttctcagcctcttcctcctcggtagtctcacttgcttcctctacagcaggtgtttcctctgcagcagtgttagtttcttctgcctctggattttcagcagcatcttgtacttcagaagttccattcttgtcttctacagatggaggagtttcatcattggttgagggagcagcttcagactcagtaccactagagggcttctcctcagctgccttttccactggaacttcctgtggtggaagtgaatactcctcggcgagggacggcgtcttgccttccgcggccatgggcgcagcagcagcagcctcgaagcttctacgagtggcggctgcgacagtggaggaggagagcggaggagaatgggcgagggctagagggtcacggacgcgtgga

SEQ ID NO: 345 - DNA, 252 bp, Zea mays
  Clone ID: MRT4577_100318C.1
gttttataggtgggggaataacttggatttgggcgtcccacacgcgcaacatattacacacttggtacaaattaattacatgtctgtgttcggctaaaaacacttccaaactttccaagagtattggaactgcccacatcatagtcggggatactttgcaacatcctcaaatccctgcttataaaaccgttggcttatataaacctgaatatcttctactttaaaacctacatttgaacaagatctccctta

SEQ ID NO: 346 - DNA, 313 bp, Zea mays
  Clone ID: MRT4577_100319C.1
ttttgactcgacactcagctaactgcggggccggggggaactaaaagctgatcagtcccgcccgggcgtaaaacttgatgagtatgacggcagcctccgcactacgctctggactggcgttccactggaagcaggggcagcatggtgctagcttgaaagaagacattgggcttgacacggcggtcgatgcatcctattcccgtcttagatcggcccgacctctccaaccgacggcggtctgctatggtgggcgcccagatcccgagctcgcttctatcctctgatagcctatacgaattcgccggacgccttt

SEQ ID NO: 347 - DNA, 427 bp, Zea mays
  Clone ID: MRT4577_10031C.1
cggctatcctccgtttctacattttattacaaactataccttcaagatcctggggaggggaggggcaaacttgattatgtggcacaacttggtacaggttaacaaaaaactaaaaaaccagctgattgttaatttataactaacataacacgtgttgaaatatatcacactgaataacttgatcagacacccacttaatatagctattaacacatgatgtcactgaaccacttcttgtggaggtttaccaaatctatcatacttggttggcctgcttacacacaatcttctacatgcacaatcctgataagatcatctatacaaatgttattggttcactgaacatgctagaacttacaaacagagttggagctaggattaagatgacatcaacatctgaagtttattgtgatccacttgagcatac

SEQ ID NO: 348 - DNA, 637 bp, Zea mays
  Clone ID: MRT4577_100320C.1
ctcgaggccggccgggccgggggtagccgtcggttcacttctccaggaaagggttcgtactcatggcgccgccgcagccaaagtcgggcctcttcgttggcatcaacaagggtcatgtcgccaccaagcgcgagctgcctccccgcccgtgccaccgcaaggggaaatcaacgaagagggtgtctatggtcaggggcctgatcagagaggttgctgggtttgctccttatgagaagcgtatcactgagcttctgaaggttggcaaggacaagcgtgccctgaagcttgctaagagaaagcttggaactcacaagagggcaaagaagaagagggaggagatggcgggcgtcctcaggaagatgaggtcggctggtacgcacactgacaagaagaaatagagagcatttcaagttcatggagcctgccagagattatgttccagtgtctgattttccatacatgtagaacctaatagacatgtcaaagtattatgtatcgaaccagctcatgggattttgctccttccaatgcatccagggtttatgtatcgaaccagtttatgggatcttgctcctattccaatgcatccatggtttgtgaatcttttgctttgggttgctccggcctttgttcggtt

SEQ ID NO: 349 - DNA, 711 bp, Zea mays
  Clone ID: MRT4577_100321C.1
tgtccctcctcctgtgtgtggcgccgccgttgcgcacaggacacatctcaggcgagcacttccacccaatctcctcgccctcctccacagctccggccaaggcgctcacttctccggccctcctccatattcctcacctccaccccatccacttcctgtcctttgcttctccaagactgcagcatggtgctcggcggctgcggcatcggagctgatggtgcgcgagccgaccagttcaatggaggcagtagcacggggcagcagcagcagcatggagggcggccacttgatcggcaaggtcctagaactgcaaataggagtggcagtggcaatcacgatgcaaatgcaagtggtgcccaaagatcttgcaaagcctaaagcacaaaggtgggggtgcaacctaaagaaaaaagagacacaaattcaagtggaaaaggacgcaccgccaagagatggcaatttggagacccgtagatctgtacggcttgtcaagaagaagaccaaggagcaaggacgtcaacagcccataccctgttgcttagaatctgcttaaatgccacatgaagaactaaggatatcaagaagcttttggatgtatggaagcttggagctgctgttttatagaaatggcatttgaagaataaccaaggatatcaataagcttttggatgtaggcaagcttggagcttctgtttcaatgtcatgcttcga

SEQ ID NO: 350 - DNA, 698 bp, Zea mays
  Clone ID: MRT4577_100322C.1
cgtcggttcacttctccaggtaaggaaagggttcgtactcatgggcgccgccgcagccaaagtcgggcctcttcgttggcatcaacaagggtcatgtcgtcaccaagcgcgagctgcctccccgcccgtgccaccgcaaggggaaatcaacgaaaagggtgtctatggtcaggggcctgatcaaagaggttgctgggtttgctccttatgaaaagcgtatcactgagcttctgaaggttggcaaggacaagcgtgccctgaagcttgctaaaaaaaagcttggaactcccaagagggcaaaaaaaaaaaaaaaggagatggcgggcgtcctcaggaaaatgaggtcggctggtacgcacactgacaagaagaaatagagagcatttcaagttcatggagcctgccaaaaattatgttccagggtctgattttccatacatgtagaacctaatagacatgtcaaagtattatgtatcgaaccagctcatgggattttgctccttccaatgcatccagggtttatgtatcgaaccagtttatgggatcttgctcctattccaatgcatccatggtttgtgaatctaaaaaaaaaaaaaaaaaacaaaaaaaaaaaaaaaaaaaaaaaaaaaaaaaaaaacaaaaaaaaaaaaacacttcagtataacagaagcctagaactaaaaatgttcttgattttt

SEQ ID NO: 351 - DNA, 559 bp, Zea mays
  Clone ID: MRT4577_100323C.1
ccccgcgtccgcggacgcgtgggctacaggaaagggttcgtcctcatggcgccgccgcagccgaagtcgggcctcttcgtgggcatcaacaagggccatgtcgtcaccaagcgcgagctgcctccgcgcccgtcccaccgcaaggggaaagcaacgaagagggtgtccatggtcaggggcctgatcagagaggttgctggctttgctccttatgagaagcgtatcactgagcttctgaaggttggcaaggacaagcgtgctctgaaggttgccaagagaaagcttggaactcacaagagggcaaagaagaagagagaggagatggctggtgtcctcaggaagatgagatcggctggtacgcacacagacaagaagaaatagagcatttcaagtttatgaagctggcggccagagattctgttccggtgtctgtttttcctacttgtagaacgtaatagacatgtcaaagtatctgtcagcgaaatattgtgttgttagttatgtatcgaaccacctcatggggattttgcaacaactttcaatgtatccatggtttgtt

SEQ ID NO: 352 - DNA, 687 bp, Zea mays
  Clone ID: MRT4577_100324C.1
tgcgccgctcgagccggccgggcctcggtcggtagccgtcggttcacttctccaggtaaggaaagggttcgtactcatggcgccgccgcagccaaagtcgggccttttcgttggcatcaacaagggtcatgtcgtcaccaagcgcgagctgcctccccgcccgtgccaccgcaaggggaaatcaacgaagagggtgtctatggtcaggggcctgatcagagaggttgctgggtttgctccttatgagaagcgtatcactgagcttctgaaggttggcaaggacaagcgtgccctgaagcttgctaagagaaagcttggaactcacaagagggcaaagaagaagagagaggagatggcgggcgtcctcaggaagatgaggtcggctggtacgcacactgacaaaaagaaatagagagcatttcaagttcatggagctggctgccagagattatgttccagtgtctgattttccatacatgtagaacctaatagacatgtcaaagtattatgtatcgaaccagctcatgggattttgctccttccaatgcatccagggtttatgtatcgaaccaatttatgggatcttgctcttattctaatgcatccatggtttgccaaaaaaaaaaaaaaaaaaaaaaaaaaaaaaaaaaaaaaaaaaaaaactcgagggggaagcccgggtaccca

SEQ ID NO: 353 - DNA, 413 bp, Zea mays
  Clone ID: MRT4577_100325C.1
ttttttttttttttttttttttttttttttttgttggttttttttattttttggtgggttttttttttttttttcccaaatacagttttttaaatttatatttttttaatttaagccccccaaaatggactctaaacaggaccaggtattggggggtctttttttttttaaaaccccaaaacaaagggccaataaaggggaccccgaaaagagggcggcccagggtgcataatgacccactcccaccccaaaggggggggggggtcatatacgggccccaagacccagaactttatggacaggcacacccccccgcctctcgggggggaaaatggaaaaagacgggcacaacaaaaaaacactagcgggcggaaagattcgcgggtaattttgggaagaaacaaaccgttttt

SEQ ID NO: 354 - DNA, 723 bp, Zea mays
  Clone ID: MRT4577_100326C.1
cattgggaccctcgaggccggcctggccggggtctctagccgtcggttcacttctccaggtaaggaaagggttcgtactcatggcgccgccgcagccaaagtcgggcctcttcgttggcatcaacaagggtcatgtcgtcaccaagcgcgagctgcctccccgcccgtgccaccgcaaggggaaatcaacgaagagggtgtctatggtcaggggcctgatcagagaggttgctgggtttgctccttatgagaagcgtatcactgagcttctgaaggttggcaaggacaagcgtgccctgaagcttgctaagagaaagcttggaactcacaagagggcaaagaagaagagagaggagatggcgggcgtcctcaggaagatgaggtcggctggtacgcacactgacaagaagaaatagagagcatttcaagttcatggagctggctgccagagattatgttccagtgtctgattttccatacatgtagaacctaatagacatgtcaaagtattatgtatcgaaccagctcatgggattttgctccttccaatgcatccagggtttatgtatcgaaccagtttatgggatcttgctcctattccaatgcatccatggtttgtgaatcttttgctttgggttgctccggcctttgttcatttatctttgatccattaccgtgaattgtatgctatggttccaacctaatctgaaaactttatctttg

SEQ ID NO: 355 - DNA, 1014 bp, Zea mays
  Clone ID: MRT4577_100327C.1
gatcggaaggctggtggccagggtggccctgaagagtgacgttgtsgagctcgtcgccgtgaacgaccccttcttcagcaccgactacatgacctacatgttaaagtacgacactgtgaacggacagtggaagcaccatgaagtaaaggtgaargactccaaaacccttttttttggtgagaaggaggttgctgtgtttggctgcaggaaccttgaggagatcccgtggrgttcggttggtcaargtaaggaaagtgttcgtcctcatggcgccgccgcagccgaagtcgggcctcttcgtgggcatcaacaagggccatgtcgtcaccaagcgcgagctgcctctgcgcccgtcccaccgcaagggggaaagcaacgaagagggtgtccatggtcaggggcctgatcagagaggttgctggctttgctccttatgagaagcgtatcaccgagcttctgaaggttggcaaggacaagcgcgctctgaagcttgccaagagaaagcttggaactcacaagagggcaaagaagaagagagaggagatgatgggcgtcctcaggaagatgagatcggctggtacgcacactgacaagaagaaataaagcatttcaagttcatgaatgtggcagccagagattatcaactgtgttttttccctacctctagaaactagacatggcaaagtatttttgaccgaaacattgtttgttagtaatgtattgaaccacctcgtggtattttgccccaacttccaatgcatcaatggtttgttaatcttttgctatgctatttcattaccgtgaattttatgttccattagatatcataggttgacctgttggttgtacaattactttaaaaactatagtcataaaagacttagtgagtgcatctaaggaactcttcatacaatccaatagacgctggtcgtttatatgggttgtataggtggaatgttatattgttggatctagagaatttccttaatcaagatttacctcttagtatgtttt

SEQ ID NO: 356 - DNA, 598 bp, Zea mays
  Clone ID: MRT4577_100328C.1
gccggccggtccgagatccatatccttccacctttagtcatgtattgtcttcgttggatgcctgagttagtaaaggatgtatattgtgataatcaattgattgtgactcaatatcgtgacacaaggtaccctgccttcaaagaggtctcaagtattgatataaaacaagtcatgatctattcaacagcagcttatgctctttggcaaacactttattatttattcattatggtcggaagaagggataaggtagaatcaggcatcaggctgacttcttattcatggttactgaatgatccacacggtaaaaaagggttcatacagcgatctgcttttttatttgttgagaaatacaagttggagatgttcatgttactccaactgatctataacgtggtcacttctctacccacactttatttatatcacatttttggttacatacagcctttttgatttgcatgtatgcagttagtgtatggaatggtgctaattattacattgaagtattctcaagaagatatattaatgaattggataagattaaataaaaataatggttgtatcacaacaaaaaaaaaaaaaaaaaaggccccta

SEQ ID NO: 357 - DNA, 270 bp, Zea mays
  unsure (1)..(270): unsure at all n locations
  Clone ID: MRT4577_100329C.1
gacgatagnctaacattaatctaatcgcctctaaatgggtaactccacaccatgaaagtgctgagtcgtgcccttgttctgctggcgctcgctgccagcgccgcctccagtacaagcggcggctgtggctgccagacaccaccgtttcatctaccgcctccgttctatatgccgcctccgttctatctgccgccgcatcagcagcctcagccatggcaataccacactcaaccaccggagctaatgccgtgccagcagtatggatcctgc

SEQ ID NO: 358 - DNA, 337 bp, Zea mays
  Clone ID: MRT4577_10032C.1
tttttgttttacactgacatccatagctggactaagacgggaagagaaaatgagtgatgacatgacccggtcttggtattaccagtctccttgctgctgcgtaaccacacatgagacgccttacacgcatcacatgagtaaaacgggaggaaaccatgcggctctagggacgacacaatgggcccagccatctgatctaagagacaggcatgacggtgactgtacactgggtcactatctccacaggccgacggcggttactaaggatcagggacgccagcgcacccaatacttgagccagctccagcgatcgtgcagaggccttaagagcccctgg

SEQ ID NO: 359 - DNA, 278 bp, Zea mays
  Clone ID: MRT4577_100330C.1
gggcaaaccccatggaaaatttccttgggcccgggtaaaacaaacgggctttgtttcagggctgggaaaggattcctaaacaggggggatttttccccccccccccggccggttaaatcccccagttaaaaacagggggggttttttttttggggcatgcgttttgccccctttggggggggggccaaaccatactttttttaggccgcctccgggaagccaacccttagtttggcgtaattaaaaacggggggggggcccccctagaaaacattccc

SEQ ID NO: 360 - DNA, 276 bp, Zea mays
  Clone ID: MRT4577_100331C.1
aggtttaaggggtgggtcaattatacaaaaaggaacaatatgtccctatacactgttgacggattgatgcgcaaccagcagtccgttatgtcatatcctgatgctgctggttcattgtttcagccacggcacatgaggatatcagattatgccacctgtgtgttgacccctagcgaacaaaactttcatgcttgtggaacctggtcagggctctcttctgcccgagggtggggagggtgcctgatatgaggacgtatgtctgtcagtggagggtgc

SEQ ID NO: 361 - DNA, 591 bp, Zea mays
  Clone ID: MRT4577_100332C.1
gtgcaggatcatgattgcaccgtgaagttgagcgggggcagacccgcgatgacggcctcgacccgatcgccggggctcaggggaccaacgccttcgggcgtgccggtgaagatcaggtcgccgggctgcagcgcccacagctcggccgccttggacaggacgccgtccacgtcccagatcatgtcggacaggcggctggactgacggacggcgccgttgaccttcagctcaatgagtgcgtcgggcgcgggcggcgtccggctcaacgcgccgcagggcgccgactggtcgaaggccttgcccgcctcccacggccgccccttggccttggcctcggcctgaagatcgcgccgcgtcagatcgacgccgacggcccagccgaccggccgcgcgtcttcgcccagggccacgaccagttcgacctcataatgcaggttctgcgtcgccgaccggataggtcggatcggccccgtccacgaccaaagcgtcgcccggcttggcgaagaagagggcgcaggcttgtccgggtcggcccccatttcgcgagcgtgggccggcgtagttctggcccacgcacaggatgcgacgcac

SEQ ID NO: 362 - DNA, 561 bp, Zea mays
  Clone ID: MRT4577_100333C.1
gagccgacgaaagccccaaacccaaaccgaaacagaatcgagctgaagagtcaaatcatctctccgctctcgagtctcgactctagctcctccactcttaattcttgtctgaagcggcgaagcttgttcgattgatcgatggccgccgtgcagccgcgcgtagtcccacgccggcacccgccgccggttccgccgctcccagcagcgccgccggctgcccggccgcagcttccgtgcaagaggagccgcgccgacgaggaccccgcggcggcggcggcgaggcggcaggaggaggaccgcaagttctgggaggcgtgcctggcgtcgggctacccctgagcctgcaggagcagcagggcaggacgcgcagatcgatggatggatcgatcagtgctcactgctcagtggccaggccatgcatgcatgcgcgcgctcgtgtttcttgattaggactatgtacagtggtttttgttttgttttgtttgatttatttgcttgtgctttggacagcgtttacaagtttgtgcatatatggcgtgtaaaacgcgaccatgacagagg

SEQ ID NO: 363 - DNA, 428 bp, Zea mays
  Clone ID: MRT4577_100334C.1
ccggccgggatatccaagcttccatttcccaatctccactcctcaacgtcaagatgctctcccgcgccgccacccgtaccacgacctctctggtcaccaagcgaggcttccagaccacccgcgctcgcatgtcctcgccttaccactaccctgagggcgcctacagcaacatccccttcaacccccgcagcaagtggttcggcgttggctactggaccttcatggccaccggtttcttcgctcccttcggcattgctgtctggcagacctacaagccccagtaaattcgtcgctcacgaactgggtttgttgtttggttgaaagaacgggagccttgcggcggcggaatgtggtgtacataaccgaaatagacatcagtcattctcgactcttgattcgagaaaaaaaaaaaaaaaaaacccgcggcc

SEQ ID NO: 364 - DNA, 316 bp, Zea mays
  Clone ID: MRT4577_100335C.1
aaaacaatccagttcaatcatagaacatcaaaactggaggggtattttagttttaattacccaaaaaagggttaaaatttaccaatgctccaagaaagaaaaaaagggggaaattgctgccctattgaaggggttttatctacaacagattgcatcaacgattttacctaaaagggacactggtggtgggggggaaaaaagaaccccccccaaattaagaagggttaattgccttagttaaacgggtccctgttctgtcaaattaggtaggtactggacatcggcggggaaagccttaaaaaggaagtccctgaac

SEQ ID NO: 365 - DNA, 426 bp, Zea mays
  Clone ID: MRT4577_100336C.1
gaggaagaggaggaggaggaagagagctcctctgagggcttggaggctgaggactgggcccagggtgtagtggaggctggtggcagcttcggaggttatggtgcccaggaggaggcccagtgccctactctccacttcctggaaggtgaggaggactctgagtcagacagtgaggaagaagaggaagatgatgaggaggaggatgaagatgacgaagatgatgaggaggatggtgatgaggtgcctgtacccagcttcggggaagccatggcttactttgctatggtcaagaggtacctcacctccttccccattgatgatcgtgtgcaaagccacatcctccacttggaacatgacctggttcacgtgaccagaaagaaccatgccaggcaggcacgagttaggggtcttggacatcaaagctga

SEQ ID NO: 366 - DNA, 964 bp, Zea mays
  Clone ID: MRT4577_100337C.1
gcactttctatgagacaaaagtttgataaatattgggaaataaataatgtagctttggcagtgagagcatttcttgatcctagatacaaacataggatgattgagctatatatatctaagatgtatgacattgataaagctgagttagagaagttggtattcatgaatgttatcaatgaattatttgcatattattcagcagtcatcaatgcaaaatcaaccacaaaaggttctagttcaagagagagtgagtttgttccacataaaaatacttgtttggtggatgaggaggaggatgaggttgatcttgatgagttgtatgcaacaacaagcaatgacaagaaggtgtcagagttagatttgtatatgagcgaggacctagtgaaggtcaatgacaatgaagcaacatttgatatcctatcatggtggaaagggcaagtcacaaattttcctattctttctacccttgctcgtgatgtgttgtctatgcaagtgtctactgttgcttcagagtctgcatttagttcgggtggacgcattgttgatgcattccgttcaagactcaaaccagaatttattgaggcattggtttgttgtaaagattggaagattgcttcggagaaagatttggagattgaaattaaaaccttaagtgaacctatgaatgacgttgacttggaggatgctgctgcaattggaacttgagaagttaaagttcaagttaccatggatgatgttgaacttgttacttattgttgtaatgttgtggagcggaggtttgctggttgtttggttgttgcaactttattttcttatttgcacttcttcacttgaacatgttaattaatgtcaactatctactatttgttatatacttgtggatttgtggattatgcctaaaataggggaaatgctgccgaatttttttaatattagtaactttgaactgcatgatgttaatttt

SEQ ID NO: 367 - DNA, 800 bp, Zea mays
  Clone ID: MRT4577_100338C.1
tgtctttctatgagacaaaagtttgataaatattgggaaataaataatgtagctttggcagtgagagcatttcttgatcctagatacaaacataggatgattgagctatatatatctaagatgtatgacattgataaagctgagttagagaagttggtattcatgaatgttatcaacgaattatttacatattattcatcagtcatcactgcaaaatcaaccacaaaaacctcaaaaggtgctagttcaaaagagagcgagtttgttccacataaaaatactttggtggatgaggatgatgatgaggttgatcttgatgagttgtatgcaacaacaagcaaaatagatttgtacatgagtgaggatctagtgaaggtcaatgacaatgaagcaacatttgatgtcctatcatggtggaaagggcaagtcacaaattttcctattctttcaactcttgctcgtgatgttttgtctatgcaagtttctactgttgcttcagagtctgcatttagctctggtggacgcattgttgatgcattccgttcaaggctcaaaccagaaattattgaggcattggtttgttgtaaagattggaagattgcttcagagaaaggtatttggagattgaaattaaaaccttaactgaagctatggatgatgttgacttggaggatgattttgcaattagaacttgagatgttcaacttcaagttaccatggatgctgttaaactaatgaacttgttacttatttgtaatgttgtggagcggaggcttgctggctgtttggttgttggaact

SEQ ID NO: 368 - DNA, 146 bp, Zea mays
  Clone ID: MRT4577_100339C.1
acgaaaaggaaagctctctcattgccaaattgcccccgactcaagcgcccggcgccgccggcgttggtggaatcgattgaaccggtcatcccggagaatctaaggacgttggtttcacctcacgtttttgtgcatggaatatgagg

SEQ ID NO: 369 - DNA, 308 bp, Zea mays
  Clone ID: MRT4577_10033C.1
cccacgcgttctctgactcgttttcagcaatgcttcactcaaaacaacaaactgggcctggccacatacataattcaacaaactaataaaaatcaaacacatcaacactgacaaaaaccaacaacaatggcccaatctttcccaaacccaagcttccctacccttacattctaagtcatagctcttataatttttaacctaaataaacttcaatggcctcaagtttccaactttctttattggaaaaacccctggctttcccaacttaatctagttgcaacacaaccccctttaggcaattcctaaaa

SEQ ID NO: 370 - DNA, 255 bp, Zea mays
  Clone ID: MRT4577_100340C.1
tttgtatagaaaacatacagagaggtgcctttttaagagaaggggaacccacaaacttgcctattacccaagcgagacaacgatatataacacccaatcagcaactggccccatacacttctatcctcagggataaaaaaaagtggtagggaccattacctaaggaagcaccatgggaacaacaagccaaggcagttttccttgatgtgaaaaacaagcataaaggcgcaccaggaaggcaaaatggatccccca

SEQ ID NO: 371 - DNA, 253 bp, Zea mays
  Clone ID: MRT4577_100341C.1
ttttaccccaaaccatatcaaacctctgtaatgcacggacatcccctctccggctaagactacaaaagatggggagaaccggaacagaatcccttgcaggtcaaccatacaacgatcgctcgccgttctgaaacacgaacccctctttctatagtaacagccaaacccaggaacgcccttcagagtcaatcacaccatcccggtgaggtgaaccccacatgaacaacctctcccgatagcaaatgcctggacc

SEQ ID NO: 372 - DNA, 495 bp, Zea mays
  unsure (1)..(495): unsure at all n locations
  Clone ID: MRT4577_100342C.1
ggtcaccttggcgccggttgggtccttcttttccaactcttgatgactccaacagcaactcgtctgcctcatgtcgcggacggcacaacctacccaggggaggatacgcggaagaatgtctccaccaccataggcttggtgggaatcatcttcaccataccatcataaccgttcttcaagaacttgggctccttctcgagctccttgccaaatcgcctgtcgatcttggtaatgagctcagcaaacttgactgcgatgtgtgaggtgttgcagaccaacactggggcatagccgattacaatatgtccagngtggttcatgataataacctgccgagttaagctaacagcctccttggcaaagtcatccttcgagttggaggccacgaacccacgcttgagatccttgacagctacgttcttcacattgaagccaacattgtttcccctaatagccttctgaaacgcctcatggtgcatctcaacacacttcacc

SEQ ID NO: 373 - DNA, 304 bp, Zea mays
  Clone ID: MRT4577_100343C.1
aaaaaagggagggaactttttcgctagtatctctagctttattataggaatgttgggacggctggggtcctgtagtgctggttctggaccagctgctatacccaggcaccttggggtagagcaggagacactagttacagtgcctcgttcgagaatgccaggggaggtatttatgggcatggccgtggtattatataaatggtgcactatgctgcattatgccttggcgagttccttgaggtggagctcaccctgcagaaggtaaggattagggtgctctctatatggatgagcccttgagaga

SEQ ID NO: 374 - DNA, 290 bp, Zea mays
  Clone ID: MRT4577_100344C.1
atactcctccgcaatttcccagatgcaatttttcttttcaaaatccaactcaataaatggggcatgttttataactggtttgtgcgctcaaatagaacaagattaccaaccactagatgaaattcattcttcacatgacaaccttagatctattgacagtactctgcccttacacaaccattacttcattcaacatatattaaaatagcattttatgatataaaagacaatgctcccacccttacaccaagctatctatttagcatatttagcgtaccatgtttacgatt

SEQ ID NO: 375 - DNA, 338 bp, Zea mays
  unsure (1)..(338): unsure at all n locations
  Clone ID: MRT4577_100345C.1
cccggggtgcacttatttacaagtaacttttcacaataacctttctgtgatggtgttaccgaatgcaagatgtacaaagaaactaagaaagacaaggcggaggtgctaccttcccaccacccacctaccctacgtctgatcatcatggatttacacggggttaagaagctgtttggcaaaagatagatgcgctggacacggcgcggaaataaggtcttcatgtcgtggtaaactgtactgtatgctattgatttgataagaattgtactcttttcgaaaaaaaaaaaaaaaaaaaaaattttnnnnnnnnnnnnnnnnnnnnnnnnnnnnnnnnnngn

SEQ ID NO: 376 - DNA, 286 bp, Zea mays
  Clone ID: MRT4577_100346C.1
atatgaatcatatctgaaaagaagtaataactagggggttcataatgacaatacagctttgcagaagccaaaactattgtttcaacatatggacggtgacttacacgtgtgcttcacataaacggggcacccaatggcgcgttcgcaaattttttggtaaacctactttggggcttttgaacttactgtgggaactgaacatcctatcacatcatacggtaccaagggactttgctctatacaaaccctaaaccttgttcctaacccttactgctttaggctgaaa

SEQ ID NO: 377 - DNA, 1071 bp, Zea mays
  Clone ID: MRT4577_100347C.1
ccggccgggggccgcatgcggccggaaatccaacaagcaaacctgcagtcatctcctccatcaccaccaaactcaacaacagccaggctcgcgaaaataatgaagagccgcagcatggcatcatcggccgcgctcttggtgctagccctcgcgctagtggcggccaccgccccacaggtagcggaggcaaagaagaagagagcggcggagagcggcgaggcggcggaggcgaagaagatccaggacgacttctgctcgacgctgtgcgagggcaagaaggggacggacctggtcgtgtgcaaggagtcctgcgcgctctcccagcagtccaacctggtgctgtacggcaggatccagtgcaagggcaagtgcaccgagcagaagggcatcacggcgccggccatgaaggtctgccaggaggagtgcgacaaggcgtacgtggtgaaggcggccgaggtcaccaaggcctgcagcgtcacctgcgccaaggagaagaacccgcgcctcagcgagaactgcaagaggtcctgcacccctcctccttcttgaagccccttgaaatgaatgaaccatgcaggcgctgagcgagtctatacgtacgtcgtcaccggctggccacgcatgcgaatgcgataagccgataaccatctcatatggacggaactatatattgtattccttttaatctggtattttctaagctaattgtttttgttcaaatataccgtcgatggaactccaaatgtaatgtctgcgttttttcatcgattgaatggataataataaaaaggcatggctggcagttactacaaaaaaaaaaaaaaaaaaaaaaaaaacccgatcaagaagctccagttggacgcctgaaagcggtcatgccttcccttcaagacgaacatggaacaaaacctgtgaaaaattgcccttcttttgcgccgtggttttctacctgacaaataattcccgatttgggggcctcctggaggtagtgtagggagtgaataactgctacagcatttcatttttatgccgtatctaatttggtgaaaaaaaaaaaaaaaaaatttgcgg

SEQ ID NO: 378 - DNA, 600 bp, Zea mays
  unsure (1)..(600): unsure at all n locations
  Clone ID: MRT4577_100348C.1
cccacgaggaaaccttaagaaagggtgttgaagagtatggtgttggcaattggagggatattctagataacaatgctgaggctttgaccggcaggacaccggtggacttgaaggacaagtggaggaacatgcttttccgttgatgtaacggggaaacatgtagctggacatgctttactagggtaaagtacatagcatgtagtcgtcgtacatcacagcactcttggtcaagcttttctggcagctgcagctacatgatttgtgtctcggtnnnnnnnnnnnnnnnngccaatcggttggcttttctgnnnnnnnnnnnnnnnnnnactcttggtcaagcttttctgnnnnnnnnnnnnnnnnnnnnnnnnnnnnnnnnnnnnnnnnnnnnnnnnnnnnnnnnnnnnnnnnnnnnnnnnnnnnnnnnnnnnncccttggtcaagcttttctggcagctgcagctacatgattttgtctcggtgtagtagcagccgcagcccaaannnnnnnnnnnnnnnnnnnnnnnnnnnnnnnnnnnnnntgatggaatgcttaccgagtggctgattcgcgcactgacgaattatgaactctgtttc

SEQ ID NO: 379 - DNA, 423 bp, Zea mays
  Clone ID: MRT4577_100349C.1
aagggacagtattaaaacaattacacataaaaaaagagcgaagcgggcgactgaaaccaccacaaaacaaaaaaaaaccacagggcggaccaagcaaaaaacaaaaaaaaaaaagaccaacacagggagacacaaacaaaaaggagtacatgagactaaatacaaaaaaaaacaaatgcaacaagaaaagcaggccacacacaacaaaccaaggaaggaaaaacaaaaaacgtggagccgaccttttcaagcaacaacaaaaaaaccatacttcttccgccggacgcaagaatcaaccccggaaaagcccaccgggacccgcaggccccccagccccccccaaaaagagcccaaccacacctgggggcaaaccaggccatagaaggagcccgtgaaaaacaggttggcgctcacaaggccaca

SEQ ID NO: 380 - DNA, 441 bp, Zea mays
  Clone ID: MRT4577_10034C.1
cgttggaggcggtgctggcgctggcggcgtttatggcgtgggcggagggcgggctgcacgcgcgcccggcagccacgctgcttccctaatgccgcgcacctgggcgccggcctcgcatgggcgccactcgtgctgtgcaagccacgccgcggcgcgcgcggccctggcctgctgcgccgccatggccgcggccgccttggcttgcgcgcgcgggttcggcgcgcgaaaccccgtggttgccgacctcgcaaagccggccgtcgcctgggccgtcatcctcgccgtcgtcaactacaagatgctctgaggtcaccagagtcgagaaccagcccgccgtcgctattcacgcatgttcatgttcgatccatcttgtgcaccctcctctgcttctttctcgcgtgtgcagtgtttcgtctgtattactgaatctgaatgacgctt

SEQ ID NO: 381 - DNA, 328 bp, Zea mays
  Clone ID: MRT4577_100350C.1
cagacgcgtacggaagccaggacatggaaataaaaccgtgatacctgcctactgatgcaagaaaaacaccgagataccacggtgctgaacggagtgatagacgtgctcgaataccaccttgttcaatgcaccgccaggggcaagtaccaggtcttataccttaaaatgaatgatgactaccacatggaccttgctgagttcaaaactagtgcaaagaggaaagatactttttacagcaccatgaatgcctacacaaatggtcacgacattggtcttggaaaaatgggtgtaaccacaccccatcaagcttggccttggtttcaactta

SEQ ID NO: 382 - DNA, 272 bp, Zea mays
  Clone ID: MRT4577_100351C.1
aggtaccgcgcaggtacctgtccgaagtccgggtcgagcgcgcgtccggctccagcaggttttcgtttcccgacaacggatcaaacgaggcactgtttcacgctgtgtgttggataccacaggtgtgtgggtgcaaaacgtggggacgcacctgggtgtggtgagtttgccgagtagtgtcggtccctgtgcccaggtggatgggttggactgtggagcgagcagcgtgagaaatggcagcttgcctggaggtgtgtagtcctacagtgcag

SEQ ID NO: 383 - DNA, 383 bp, Zea mays
  Clone ID: MRT4577_100352C.1
cggccgggtcggctgcattcgcaaacacgtttatcgatatcgagccgtcagcgtgatttgacgtcgtatgggtatttacgccctcactctggtcggcgggcgaagctccgcagccaatgacgccgcgccgctttctatgtaatcagccacgggccacccggaccaggccggatcgagcgacgtcaggttgctgtgcgagataccgcggtccggggccgcgaattcccgtccaggaggaggacgaagaagcggcgccggcgccggtgccgtgaccgaccacgaccaccggcgcgctgccgacttgctgaggtgacaaggtatttttttttgccccccccccgcgccctggcctcccgtgtcgacctgactttcgcccgcccggt

SEQ ID NO: 384 - DNA, 269 bp, Zea mays
  Clone ID: MRT4577_100353C.1
gagctcatcatgtcggcggccgccctccttttttttttgggggtttttttaaagcttatttggtctttacaagccccaattacggtgtcttcaaaggccggccatgatgaaccaggttccacgggggggtcagacacctgaccttctcatttagcagggaaacccaccaactgaagcaaagcctaatgaccggcaccaagacacacccgcaactttgggattggggcccacaggccgtgaaatgcctggtcactttctgaaaccccagc

SEQ ID NO: 385 - DNA, 352 bp, Zea mays
  unsure (1)..(352): unsure at all n locations
  Clone ID: MRT4577_100354C.1
ggggnnnnttttttatttttttttttttttccttttttttttttttttttttttttnnnnnnnnnaaaaannccttncattccaaagggccattcagggcattgttcacacttacccttccccccatggggatgccggacccattttttcctaattatccccccttaatgacctaactagctagttagccagcggttttactacaacacataattttttcaatgggggacaccccccgcacccacctaagggcctggaatttttttttttaagccccacattccccccagttgtttgccttttttgccccccaaaaacccccgaaactggcccttttttggtttttttttca

SEQ ID NO: 386 - DNA, 285 bp, Zea mays
  Clone ID: MRT4577_100355C.1
cgccaaaaattcattaacccattagatggctgagttcgcaaacaaatacagggttttaaacagtgggaccccaaaattttgggcgggtctttttttccagcccccaaaaaaaacttggaacaagcccttgagggaagtagcattttgttttgactgaacaaaacaaaacaggctacaaagttgggcggcttaacttttgggtttccttttttgcctaagcggcctttttttggggggcaccggggggttttttgttaatccgttcaagggggagcttgccttagg

SEQ ID NO: 387 - DNA, 1892 bp, Zea mays
  unsure (1)..(1892): unsure at all n locations
  Clone ID: MRT4577_100356C.1
gctcgaggccggccgggccgggatagctagccggccgggaactcggcactagcaccggtagcagcagctaccaatggctcacgttgccggtgacatcgccgttctggtgctctttctctcgttgtcgtgccaaagcacggtgtcggccggtgccgccgtgcttggccgtaaggcaggagggtcatctccggcgacgacgcacgagggtacgaatccagccggcacgggcatgggcacgggcacggcacagtacgcggtcattttcgacggcggcagcacggggagccgcgtgcacgtcttcaagttcgacaagcagttggacctcgtcaagatcggcgacgatatccagttcttcgcgcaggtaaagccggggctcagcgagtacgctggcgaaccacaagaggctgccaggtccatcgcccccctcctcgagaaagctcaaggcgccgtccctgcgtcgctgcagagcagaactccccttaaactcggcgccactgccgggctacggctgattggagatgagaaatcggaagagattcttgaagcgatccgtgatcttgtgaagagcaagagcgaattcgaatacaacccaaactggatcactgtgcttgaggggtctcaggagggatcttacctatgggtcgccctgaactacctgctgggcaagctaggtggggactactcagacacggtaggcgtggtggacctcggaggtgggtcggtgcagctggcctatgccatctctgacgacgcgtccgcgaacgctcctgcggtgccggagggacaggacccttacgttaccaaggaacacctcaaagggaaacactacaatctctacgtgcacagctacttgcactacgggcttctagccgctcgcgcagagattctgaaggcgaacaacgggccattcagtccctgcattctgcgtgggttcagtggtacgtacacctacaacggcgaggaatacgaggcggcggcggcaccagaaggcgcgtcctacgaaaagtgcagggacggcgcggtggcggcgctgaacctgggcgcgcgctgcgaggcgaaaaactgcaccttcaacggcgtgtggaacggcggcggcggcgccggccaggccgacctctacgtggcgtcctacttctacgacagggcctcgcaggtcgggatcatcggcggcgacgcgcccaacgggaggagcaccccggccgcgttcgcggacgccgctctcaaggtctgctcgctgagcgttgccgatgccgaggccgcgttccccgatgcctgggacgccgagtacctctgcatggaccttgtgtacgagtacacgctgctcgtcgacggcttcggtttggagccgaccaaggagttcacgctggtgacaaaggtgaagtacggagaatactacgtcgacgcagcatggccgctaggcgatgcgatagaaaccttgtcgtcccagaagctgaaccaaatcgcgtgaccagtaataataatgcttaatggagtggtaaaaaataatgatgtttagacgacgtgctacagttgatgtaatggcgtaataaatggatgtatatatctatgtcccttggctacgcctgctaatatatatcagagaggaagatcgatgagatgaggaaattgtaagttctgcaataattagcatgttcacgtgaaaaaaaaaccttctatgggtgccaacaaatgatcatcattatatngaaaagagtttatacatcacgtggaatacaatgagttatcttaaaaaaaaaaaaaaaaaaaaaaaaaaaaaaaaaaaaaaaaaaaaaaaaaaaaaaanaaaaaaaaaaaaaaaaaaaaanaaaaaaaaaaaannaaaaaaaaaaaaaaaaaaagggggggggggctttgggaaaccccccgcttcc

SEQ ID NO: 388 - DNA, 198 bp, Zea mays
  Clone ID: MRT4577_100357C.1
cgttgcttttgtgtgatgatgaaactataaaatgcgacaacggagcagttgatagtttcatcatcacacagaagcaacgcattcgcaacgggaaccgtggggaagaaactctaaaccgctccggcgttccatgttctggatgattgggatgatataagtttcgttccgtgcaataaattactaaatttttacccaaaa

SEQ ID NO: 389 - DNA, 144 bp, Zea mays
  Clone ID: MRT4577_100358C.1
gcgcggacgcttgggcgccaacaagagcgccgacctgctccgccacaacccgttgaccaagaaggtgcccgagcttgttcacgacggtaagccgcatgcagagtacaccataatcatcaagtacatagaccaggcttgcaaaga

SEQ ID NO: 390 - DNA, 1020 bp, Zea mays
  unsure (1)..(1020): unsure at all n locations
  Clone ID: MRT4577_100359C.1
nacctaaaagaagggaagcagagcaatgccaacgcggcgggggcggaccaggaagggcgaacgccggatcgacgcggccatcgaccacttcgtcgtcatgggctacgacgcacgcgacattagcgccgtcgttgctgatctcctcaaggtgtacgggggccctgatgcgtggcccttactggaggaaggctcctacgaggttgtgcaaaacaggctcttcgagattgaggacgaggagaagcagaagcaggaccagcagctgctgctggagcaccacgaccagcagctgctgctggagcaccacgaccaccagctgctgctggagcaccacgaccagcagcagcttgattgccagcaagtggaggatgagcgtcctcagcaccaagaaccagcagcagacgagggagtggaagtccctatgttcattgaaccacaagataacatatcaatttcaaaggtaccagcagagactaagtcagcagatgacgaagtggaaggccctatgtccattgaaccacctgtttgtgaagctgtattgccacttaatgtagctataaggactcgcccaaggcgaccctgctatggatggcttagtgagtcagaagatgaggaagaggaacaacctactggtcaaaaacatgaggtgcatgttctaagtcggggagagcgagcccagtagatgggtggctgataccaacctgacatggtccatgatgctccactaagatgcagaagtccagtgctgtatttttggtgtcgctgaaaccaaaaactaactttcagaagccttttttgtgttttgacaagtctagcagtctagcagaactgcagaagtatataacaatatagaacgtgcgcttgatgagcgtaagtagagcatgttccgctaatttaaataagagcctttgactgaagcggtgacataatttttggaaactgagaaaagaagagcttaacttcgattgaagcagtgacgtaattttagaatatgatacgatgtttatcattcaataatatagg

SEQ ID NO: 391 - DNA, 364 bp, Zea mays
  unsure (1)..(364): unsure at all n locations
  Clone ID: MRT4577_10035C.1
gtactattctactattgattagttaactttctgtcgtagaggtgtttcaatgtgtttccttttcaggttgagagtggtgatctaatagcttatggacttatcccagaatttattggacgtttccctatccttgtgagcctcaccgctctaaatgaggaccagcttgttcaggtatcacctgtatctactgtattttatctttcctaacatcatggtctgtcgagtaatgcacgcttatgctggtacattgtttagagaaacatgcacttatatttcaatataattattacttattagagaacttctcacagagtactgacaccatcttattctgctangttctcactgagccaaagaatgccct

SEQ ID NO: 392 - DNA, 878 bp, Zea mays
  unsure (1)..(878): unsure at all n locations
  Clone ID: MRT4577_100360C.1
cgaaaccacccacgcgcgctcgctccccgcgcccaattcggagatccacccccccaccgaatccgctcgcctgcgcctgcgcctgcctacctgcgatccatctctcatggcgaccaccagcgccaggaggccgagcggcccggtgctctcggccgcgcactaccgctccgcctcgccgacgcgcgtctcgctcgccgggcagcccgtcagcgtcagcgtgtcctcgtcgtctcggggccggcggacctgcatgtgctcgccgaccaaccacccgggctcgttccgctgcagcctgcacaaggagcgcgtcaagccggcggcggggccccacggccacgggcacgggcacgggcacggcaagccgagctcgccgccgtcgcccgccagccgcctgtgcgcgggcgcgggcaggcggatgggcagcgcgctggtgcggatcggcgccgtggaagggcggcctgtgcgcgcgccgcgcgcttncggccaccgggccgcccctcccccaccgcgcagcaccgccgccgcgccggcgccgcgcggccccgccccagccgcctctccgccgtctcctcggccggcgaccgcgccggggacaacggccgcccgcggcaatagaactagcaccggtgacagtatagcactagcagtagtataaaaaaaagtatataggagaaggaaagagatctccctcttggctgtaacgcggagactggagcgagctctggcagtggatcaggactagttttgggagcctgatccatggaccgatcctcatccagacagggtaacaagaatgaaaacatcaaagctttcttgtgtacattaaaaaaaaaaaaaaaaaaggcccctaaaaaaacgaaaaaagacaaaaacaaaaa

SEQ ID NO: 393 - DNA, 139 bp, Zea mays
  Clone ID: MRT4577_100361C.1
aattcgggacgaggctctgctctcaccgtacgtctgcagcaggctcaatgggccccctaacgtaaggcggggaccagcgcagccaagcccattagacagagggggcgctctcattctactccctcaatgccaggcagcc

SEQ ID NO: 394 - DNA, 399 bp, Zea mays
  unsure (1)..(399): unsure at all n locations
  Clone ID: MRT4577_100362C.1
ggccgaccacgcgtgcgagaccaactagcaacatanaaagcacaattttgtaccttcaatggcagccaaaatataagacctccttaggctactcggtctgtccgcaagtgctgctacggtacaccaaccatcctaaaagctcgcaagcaaccatatatatccttctttcttcgtacctatcaccaacgaagtcttccgtatgtgaaaacccaattcttcaaccctacatgatccaacaggcaatcacagctagcatcttacctttatcacccttgctcctccaacaatcatcagccctattacatcaagtaccttttgtgcatgtattggcacaaaacatcatggcacaacaactacaacaacttgtgctagcaaaccatgctgcctactattatcaac

SEQ ID NO: 395 - DNA, 276 bp, Zea mays
  Clone ID: MRT4577_100363C.1
aagggggttgcacttggttctgtattggtaggtacaacttaaaacacgctgacatgcaaatgcagttcgggggccccccacaaaaagggacagcaaacaggcccctatggatcccggacttaggggccgaacaacaaaataccaatatgggaataaggcgcacatggacccgccaacccatcggtcctgggtcttgagttcaagaacaaaaaaccggagcttaaaactgttttttttggtgaggggggggagcttttcaagcgaagatttcaaaag

SEQ ID NO: 396 - DNA, 324 bp, Zea mays
  Clone ID: MRT4577_100364C.1
caaccgaatttagggtggcagtgcactggaaatggttacggcataaaggccttcagaacgcaattgaaatgccttacgtcaggcatgcaactaaagctggatccaacaattggaacatcaacaccgtggcacgtacacaagttccataccacccaaagggcttgcacatacactttgggggtgctaaggacccggcaaaccttggcgcaggacaaggagactcagatggccgcggactaaggaacccactcgggggtccagaaattggggcccgtcatgggggcgcggggacctgctatggatgccacgggcagtctaaaaccc

SEQ ID NO: 397 - DNA, 375 bp, Zea mays
  Clone ID: MRT4577_100365C.1
gtccgagctcctgttccacgcggtgtccctgttcctgtccgggtccctgcgggtgttccaagcggttttaggccgtttagcatagcactccccatttagccgtagcatttgctatgctgcgtgcggcgccaaactattaatgcctgcactcagatcatgctgcacgggtactcctacacataacccttgactccttgaccaatatgttccgtaacactcccgacatgtataatacagaactattgcctctgcaaaataatctgattccgaccttcataccgctgaccactgtgacaacgccactgtcctgcttctgctacaccaggtcatcagacatgtgccgtcatacaactatatttggacttcgacagttga

SEQ ID NO: 398 - DNA, 526 bp, Zea mays
  Clone ID: MRT4577_100366C.1
ctgtccatgcctcttttgccacaaaaccagttggggctaggccgccgtgcagcgcagccacaaattaaacggagcccggcctgggcattcattattggttgcattaatcgcagctgactgaccactgaaccaccgacagtaaaaatggctcagcatccgcctccaccgtctgcgtgactatgacggagcctgcctgggaagccgcccggtgttctccaccatgttcacgcggggcaggcaagtgcacggcgatggaaccctccatgatgcacgcaggagacctggagaggaatggcaggatcacctgcttgacgcacactcaagactggctgaggatggacctgagcgacatcggctccagtgtcatcaagtggatggggacgtacaacgctcctgccatcaaccgaaacagccttacggcgctcttcttctgcagcatgtgccagaagctgaactacttcaccacgcccgcggccgtcatctcccatttctagctgtggctagtgacgtgccacctgagcctgtt

SEQ ID NO: 399 - DNA, 560 bp, Zea mays
  Clone ID: MRT4577_100367C.1
cccgcttcgtccaccaacgtgagcaaagaactgtcggcctgtcgcccgtcgacgcggtggttgagtcgccgccagagttcaacaagtatcgtcatatcctccggcaacagcatcgtcgtcaatcatcatgccagcccgcgaccagatccagacgggagaaaagggaggaggatcgatttatttgaaacttgaaaggggctcaccttgcttatgaacagcgtacccgccaatgcttagctcgaagagagcaacgacagatattgagcaaccgccaaacgcccatccgagactacaacttctgaacgaactagggcagacaaacctctaaagctaattgttagtcagctatacatctctaatgtcttgtttatttcaatatcctatttcacacttcactctataaacaatgtagacagtaataactaatagctgtttaataagagatatagttagcaactagttggcctattagtcatcccgttttattagttgtcctgttttagaggtttagaacatggccttacatacatgcgactaacagttagcccatgtttttaaat

SEQ ID NO: 400 - DNA, 268 bp, Zea mays
  Clone ID: MRT4577_100368C.1
tgcctccatatgcttgaagtgctgattacctacaaatgatttcagatcatgtttgctaaagagaaatctggaagtgtgagatctgtaagaaatgaaagaaatgactcttggagtcaagagatctggaaatcttttaatcagttaaattgtgcagcaatagatttttaactttaactgaccatttaagttttttaataagttttttacaaagaaaagttaaacattaaaaagaattacagctttcaaaaaaaaaaaaaagggggggccg

SEQ ID NO: 401 - DNA, 335 bp, Zea mays
  Clone ID: MRT4577_100369C.1
aacataaggccctttagattgatgccagaactaccaacaaaataaaaagacacttcacatgtagatagcttagccgctagcaacaaagtgactcagcatagagtgtacaagacaatgcaaggtacagaccacatgagtgctctgataggcaaaaaagcaccgaagagcacaaccttttctgagcctacagacaaacagagggacatgctcgaaatggcacatgcacgatgagtgtattgttacaatggaagaatgaagcatttggtatcctgaacagactgctgaatggcccacacatgggaaattatggaaacatttcagagaccacgtagaat

SEQ ID NO: 402 - DNA, 756 bp, Zea mays
  Clone ID: MRT4577_10036C.1
gtaatttattcatagttacaacataatttcacatcttgaggactaatcaactattttaggtgtaagtgttccctaagagattcaaatcaggagctaactctagccaaattaccattcgtaatgtttttttgttatggatgaattacttgtctacaatgtacttttcatgctcttggtcttcaaggcaaaagttgtatattttcacatatttttgtctttggtcgatcatagtgatggtaatcagttataaacataattttaaatatattgttgcaacttcgggtggacaacaactccgtcctggccttgatgaagaatcttgtccccatgagcacaacaagcatatcaggatcaaataccacttcatcacgagctgcttggatggcagaagcgtcaaggccaactatatcaatacagggtcaactcacagactttctaaccaagtgacttggaaggctcgagttctaggagcttcacatcaggactagggtagttcaaatcactccaaagtctacacacaaggcttaggggaagaattgaaccataagccacaatgttgttgttcttttggagctctaattctaggataagtagtagtagttagtacctatgtcatggcatcttatctttctctttagcatcttatctctactttaagtatcatagttttgttatgcttttagctgcaaagtagacatctagttctataatatgaactaagagagtagcaatgatgactttctaaataatatacat

SEQ ID NO: 403 - DNA, 825 bp, Zea mays
  Clone ID: MRT4577_100370C.1
gccggccgggtcggggcgtcttcacttggccccaaatcgtggagtggaaaccctactcgtccccttccgcagccggtactcaaccccaaccctatcctgtccgccgccgtcgcccggcgcctcctcccccacctagaaacccagaggctctaatcctagttctttctgtgcagtcgccgcccaattcccccacccaattcccactctccgctcgacagatccatacatgatgggagaggccaaggagaacgacgtttatgaggaggagctcctggactacgaggaggacgacgacaagacggtcgatggctccgctgctaagcccaccggagaggtcgcaaagaagggctacgtcgggatccacagttccggtttcagagacttcctgctcaagccagagctgctccgtgctatccaggattgtggttttgagcatccttccgaaggtacactttcttctttggagcagaacatggtaacactttccattaacatggatccagaaggttaaacttttactcactgggttgctgctccaatttcttttggttccacatcagtgcaacacgagtgtatccctcaagccattcttggaatggatgtcatctgtcaagctaaatctgggatggggaaaactgctgtttttgtcctttcatccctccaacaaattgaccctgttgcgggtcaggtagcagcacttgtactgtgccacacaagggaactggcttatcagatatgccacgaatttgagaggttcagcaaatatcttactgaagttaaagttgctgtcttctatgggaggtgttcacatcaggaagcataaag

SEQ ID NO: 404 - DNA, 802 bp, Zea mays
  Clone ID: MRT4577_100371C.1
ctccttattccttccgagtttcttttctttcttttcgccaccccttatcttgctccgatgcagttgctcctcgctgtggcttagctagggtttcctcagcagccggaggtgcacatcgagggcagatttatcggctaagttccgactggcggcgccgtaggacgagttcgggcctacttcggcgactgcgagtttgggttctcatcggccagtgcgttcatcttatcgagctttccaaggacgaccctacctgtgggcggcattcaggcccagaagagcaaataagtttcgtacagtggaagaacagcgacatggcaaaggccattgtgcacaggaggaagagatggtaaaacagcctgaagctcctgaggaagcagaggggcaaggcatggagcaggaacacatcccagcagaggggcaaggcatggagcaggaacacatcccggcagaggggcaaggcatggagcaagtacacatcccagcagaggggcaaggcatggagcaggaacagtcgtcggtccaacccaacgctccagcacctggttgaaggtgtagccagggctacttcggctcccaccgtgctggctgcaacgtctgcaagccatggacagacccactcaagcttgggtgcccccacaggcgcactggttcggctttgtggctcagctaactccaagatttgagcaactcatccaggagatgcaacgtgaaggcgctgtggatggttgccgtgcgagggggaaaatgaaagccttcgagctcatcctggagcctcgccatggttgtagtctgaccctagcct

SEQ ID NO: 405 - DNA, 2772 bp, Zea mays
  Clone ID: MRT4577_100372C.1
agcagtggtaacaacgcagagtacttttttttttttttttttttttttttttagtttttttttttttttttttttttttttttgtaatccattggggatcctgtctatacatataaattttgttatgagaaaagtataattgctatccttgacaaatatatgtattatgcagggaccctggcgggctcgagccgggcacttggccccaaatcgtggagtggaaaccctactcgtccccttccgcagccggtactcaaccccaaccctatcctgtccgccgccgtcgcccggcgcctcctcccccacctagaaacccagaggctctaatcctagttctttctgtgcagtcgccgcccaattcccccacccaattcccactctccgctcgacagatccatacatgatgggagaggccaaggagaacgacgtttatgaggaggagctcctggactacgaggaggacgacgacaagacggtcgatggctccgctgctaagcccaccggagaggtcgcaaagaagggctacgtcgggatccacagttccggtttcagagacttcctgctcaagccagagctgctccgtgctatccaggattgtggttttgagcatccttccgaagtgcaacacgagtgtatccctcaagccattcttggaatggatgtcatctgtcaagctaaatctgggatggggaaaactgctgtttttgtcctttcatccctccaacaaattgaccctgttgcgggtcaggtagcagcacttgtactgtgccacacaagggaactggcttatcagatatgccacgaatttgagaggttcagcaaatatcttactgaagttaaagttgctgtcttctatggaggtgttcacatcaggaagcataaagatttgttgaagaatgaatgccctcatattgtggttggcacgcctggtaggatacttgctcttgccagggataaggatctctccttgaagaatgtgaggcacttcattcttgatgaatgtgacaaaatgctggaatcacttgacatgcggagagatgttcaggagatcttcaaaatgactcctcatgataagcaagtcatgatgttttcagcaacgctcagcaaggagatccgtcctgtatgcaagaaatttatgcaagatccgatggaaatatatgttgatgatgaggcaaagttgaccctccatggtcttgtacagcactatataaaacttagcgaggcagagaagaaccggaaactgaatgatctcttggacgctcttgatttcaaccaagttgtgatattcgtgaagagtgttagcagagctgccgaactgaataagttactttgtgaatgcaacttcccatcaatctgcattcattctggaatgactcaggaagaaaggctaacaagatataagaacttcaaggaaggccacaagagaattcttgtggctacagatttagttggcaggggcattgacattgagcgtgtcaacattgtgataaactatgacatgccagactcagctgatacttatttgcacagggttggaagggctggacgttttggcacgaagggacttgcaattacctttgtttcctctgcttcggattctgatgttcttaaccaggtgcaagaaaggtttgaggtagacataaaggaactgcctgagcaaattgacacctcgacctacatgccatcataaatgggaaggacaactgagaagagaggaggataggggagtgagcagccgtctggagatggttacctttgaactatccgatctggaggatttgatttgcctcctttgtgtactttaaaaagggcagccaggatgatgatctgtattttaagacaatgctgtctgtttgggtttaggattttgctttgtcgaaaactagcacacttattgtactactgagcagcatatttgttttcatccctgggtttaaaaaaaaaaaaaaaaaaaaaaaaaaaaacagctgatacttatcggcccagggttggaagggctggacgttttggcacgaagggacttgcaattacctttgtttcctctgcttcggattctgatgttcttaaccaggtgcaagaaaggtttgaggtagacataaaggaactgcctgagcaaattgacacctcgacctacatgccatcataaatgggaaggacaactgagaagagaggaggataggggagtgagcagccgtctggagatggttacctttgaactatccgatctggaggatttgatttgcctcctttgtgtactttaaaaagggcagccaggatgatgatctgtattttaagacaatgctgtctgtttgggtttaggattttgctttgtcgaaaactagcacacttattgtactactgagcagcatatttgttttcatccctgggttaaatgatgcgtctaaacaaaaaaaaaaaaaaaaaaaaaaaaaaaaaaaaaaaaaaaaaaaaaaaaaaaaaaacaaaaaaaaaaaaccaaaaaacaccacaaaattgcacttcttggacccatttatggaaaaaaatgattatccagtgaaaaattgaaaaagggcccaaaggccccccaacccccattttttgcccctttaaaggagagaaaatggccccttgggggaaaaatgggccaaactagttcccggggggaaattggcccccctcccaattcccacaactgaaaaaccccgagacttaaagggtaaaacccgggggggccaaagggggggacaaccccccttaattggggggggtcccccggccccttttcgatgg

SEQ ID NO: 406 - DNA, 529 bp, Zea mays
  Clone ID: MRT4577_100373C.1
tttatttatttttttttttttttttttattttttcttttttttttttttttttttttttttttttttgggccctaaaaaaagctagaccagtttcccgccccggggggccccaaaaccaaattttgggaaggacggggtttttaaaaaaaggggccaacattacccggggccccgttttttaaaacaacaatttttccaaggaaagggagggggttaaaaccccttcccgggggcaaaaaccgggataaagggcttcaaacaaaccccccctttggaggaaaactttcaccccctttcccttggggccccccatgaggggaaaaattgggccatggggcgggccctggggaacaacggggaaagcttggtttcgatttgcatcaggggggggcccttggcagggattgggaaactaaacaaaaacttcctcagttgggcgggggggctttttagccgggggtacatacttttccgacggggggtcgccccccaaaactcgccctttgggttcgcccccacatggggggg

SEQ ID NO: 407 - DNA, 301 bp, Zea mays
  unsure (1)..(301): unsure at all n locations
  Clone ID: MRT4577_100374C.1
tcgaggcttggccgggttatatatangtctcctagacttgctctaatattggtaatagtcactgactttatttcttgatcatagctttgcgctgcactaaacgtcagtaaaagaagtgtggatagggaccttgatgtttaccgcaacatactctcaaagttggttcaagccaaggaacttctcaaggaatacgtggataggtaatgcacacatataccangagcacattattttttgtcacctttactgncacttaagtctgaaatgcgtcagtaaatgatnctctgctaaccaatttgaa

SEQ ID NO: 408 - DNA, 579 bp, Zea mays
  Clone ID: MRT4577_100375C.1
tactcagcagagacttccactccgcttcttcctccgctggctccgtagctacacccgcactacgctttgttacctgccgctgatatgatctcgccgactattaatggataatggctgatcacatgaaaccatcgatgtgcgctaccttatacatcatacatcgacaacatgcaggtctcgcactgttacaaccaccttcgcccaccctgcgatgagcttcctgagaacaggaaaggaatcgcaatttgtgggggcaacgacagtagtgatctgcagggagtcgatgattacaccatgatcactgctagtggggtgccgtgccgcactggatgacactactggggaaagattgagaatgatataactctttaagatacgacctccatgactcctctctgtaaacatgcatcgttccgcttcacgagtgaaaacgccctctcagctgcactgattgtcttggcaacacaaggctccttacatttaggataagctctagaatcacaaaatggtgcagttaacaaatatcctcataaacccatcatgaatcgtgaaacagatatatgatcctacgaaatccat

SEQ ID NO: 409 - DNA, 359 bp, Zea mays
  Clone ID: MRT4577_100376C.1
tccggcaacttgaaggaaccttgcggggttggaagacccccaatcttgggccagtccttcaagtttttgaggattaaatgcagcccgacggcgacaccctacttgctcgcctcaatgccagtcgttgcggcagcagtgttgccagcagctcaagcaggtggagccgcagcaccggtaccaggcgatcttcggcttggtcctccagtccattctgcagcaacagccgcaaagcggccacgtcgcggggctgttggcggcgcaaatagcgcaacaactgaccgcgatgtgcgggctgtaacaaccgacttcatgcccctacgctggtggcggcggtgtgccccactgaagaaactatgtgc

SEQ ID NO: 410 - DNA, 353 bp, Zea mays
  Clone ID: MRT4577_100377C.1
gcgatctataactagtcttttcttttgacctaaatatgctccacgaaccgcatattaacaggaacaaaatcttggatgacccctgctggccgggcgatctctttgggggataaatatgctcatatctatcctctggatattcttaccactacagggtgggtgatggaccacccccacttgtccacgatgcacatgcgcatgaaacaaccgaacactgtggcgcggttactcgagtgtattgtcccccgcgaggaacttcttttacagaccaacgacgtaatatcaggtgggcctgatgaatgtgggcaccgtcgcgcgcgccagcgcctagctggtcaccactcggtgcttaa

SEQ ID NO: 411 - DNA, 475 bp, Zea mays
  Clone ID: MRT4577_100378C.1
agcaggacggagcacactaggtgaggtaagaaggcgaggagggtcgcgccgcccctgtcatgtgaagagtggttggtgcctgacgacatttgtctcgacgagcggaacgcagtccacgggggcgtccaggccacggacgccacggtggctgacgtgccgaccggcgacccggcccccgaggtggcgcttcgattgctacactcccaaaaggagtggctcgtttgggcgctcgcgctagatgcgtacgtcacgctttgcggacttcttcacgacgagatggggatagggaagaccatccaggctatgtcgcttggtctaaccgtgcgccgcctgcgatctggagaccatcactcaggcgtctcctagtgcaactcctcggtggaccacaccaagccacaaggagagtgcacgctggatctgtgccatgtggtggccgtcttccagtgcactgaagagatgcaacgccacactggta

SEQ ID NO: 412 - DNA, 387 bp, Zea mays
  Clone ID: MRT4577_100379C.1
gtcaccaaaccaagggaacaagttccttgtatcccctatatttatcagggggggaaattattacagtcagaaaccacctaccaagcacgtaatttttacccaactttataaacaaattcaataatttgccaacattttggtaattgaattaaacacgatatccaaaatcaagccctgttctttcagcttacctagataaatcatgttagtacagcccaaccattgtttggagatgcatctccccattgttcatattttactctggacgagtactttcttatatatatattccacaaattagtctatgagatatggccaatctccttcaattttctaaattgattacttatgatcgaattttttaacaaattccaaaaattgggacca

SEQ ID NO: 413 - DNA, 440 bp, Zea mays
  Clone ID: MRT4577_10037C.1
ggaacggaagggcgggacccctgcctcccaattaaaaaaaaaagaatggccccgggttgaggggaaaccgggcccaaaaccaatacggggggcccaaacaacccaaacaacagcaacccacacccccaggccccctcctggggcatcggtgccgagccaaacaaaagggacgagctccgactcccaaaaggggcagcacagggccaaaggaaacaccaccccgattccaaaccccggcccaggaaaaggaaaactgcgacccgtcttctttgccaacccacaaaacaccccactcgagtaagctccgatttttcaccagcgagacttccaaaaccttaatccacccccccccctccgccaaatgcctcgttttcgacccaaaccaacccacaaaaaaggggggttcgccccacgtaattgttgccgagcccatcccctga

SEQ ID NO: 414 - DNA, 224 bp, Zea mays
  Clone ID: MRT4577_100380C.1
gtgcgcaattctctatcaccgtacccaagacagatgacccctctaatctccacgccaccgagtagttatacaggctacaggatgaagcatagaataaaaaggatcatcctccagcttctccttgacttgcgagatctttgctccacagattgaatgccttgaggcaggaatacgccatcgttgtaggacgccgaggagactcagcgatctgatcgcagtgacag

SEQ ID NO: 415 - DNA, 1637 bp, Zea mays
  Clone ID: MRT4577_100381C.1
cattgggcgggcccaaaaagaacgggttttccctcgcatcctcctcctacatctatctcccacctcgcacaatcacagattcctgattcctcaatcctcagtaccccgctgcctgtcctccacgcacctcaccgcaaacatggcgaacgccgccgacgacctggacctcctgctatcactaggcgaggccgtcccggagacacctcccgcctccccccgcaccgccgatgtccccgtgtgcgacggcgctttcacaccaccaaggacggcgccccccggcggcaccgacatgtccgttttccgcgacgccgtcaaggattacctcgaggcggcccccgaaaccacctccccgcttgctaatcgccccaagcgacccaaggccaccgaaatcctcgtcgacaaatactccggcctccgcatcaagcaccttacgctctcgcctcttgagattagcaaccgcttcgctgacatccgatttgtgcgcatcaccgcgttaaagaactctgtggggagcgacaggttctccggctgttgggcaaccgcgggcgtgttactggacaagggcgtgcagcgggtgagtgcgaaggggagcagctacagcatctggaagatgggcgctctggacgagaccgacgtatctctgttcctgtttggggacgcgcacgttcactactccggagctgctgtgggttcagtgttcgctgtgttcaatggcaatgtccgcatggacaatgggggcaaagggttctctatgagtgttgcttctgttggacagatgttgaagatgggggtcgcatcagattttggtctctgcaaaggcaagaggaaagacggggtggcttgcaccatggctataaataagagtaaaggatcatactgcaaatttcattcgtcgaaaacatcacaaaagtatactactggcagagtagagcttaagggcggaaatttcaaatttgcttccaaacttcgatctgaagggatttacatggtcaatcctttctcagaacgacccaatccaagaaatttctttgcaaccggtgaaagtaatgtcaattgatgggctaaaaagggctttaagcaatgcagatagagtgactaataagaaccagtcccagggtataagatttctttcccatgttacagctaatatggacaatatggtaccaaaagccccaaccaccggctctaggaatcaacagagatcgaaggccggcttaaacaaaagtttgtcatcatctggcgccaaagccttgcccaaggagggattgcgaaaaccacaacaggatgttaaaaggcaaaagatgaacaatcctacagagaatattgttgagcttgatgcggtcagctcagacgatgacgagataaatatagtactgcgacgctgatgcttcatcaataatagcgtgacatgtaattgtactccaaatcggctaaacaattgtacgctcttgttttcatatatcccaagtcatccgaggcagaaaaattaaatcagatatatttgttgacttatggatcaggttggtccgtagtgttctattttctcttgacatgcagtttaacaattagatataaacatatatttttaatatttttatagaagagagaagtcagccttgcatccccccccccacccc

SEQ ID NO: 416 - DNA, 198 bp, Zea mays
  unsure (1)..(198): unsure at all n locations
  Clone ID: MRT4577_100382C.1
ggaaaaaggaaggacccanagcgaagaacggatctacaccaatttccacaaggggtgtttttttatcaaaaatcaatacgccgtgggggggtgtgatgttctgagcaaaacaccaagggttcccgcaaaagacacgaagcactagtacaagtgattcgaggcatgtttctaaattcggaatactaacacttggtttga

SEQ ID NO: 417 - DNA, 395 bp, Zea mays
  Clone ID: MRT4577_100383C.1
tggaatttggcacgaggaaggcaccggccatggcctctccagcagagtctagcatagaaacgcgctaggttcggtagcatacgagggttactcatcttcggagacctgatggtcaggaccaagaatgctcgcctcaagggcaatgctggtgcgtacgggacgcaggaccgcgcttggtttggtgcgtgaccaggatgggcggctccgttgttgagggcgttggggagatgatgagaccatccatgacctgacagcatatgaggtccatcgtcggcgaccctatcaacacgcgaccaagagatgatgagctcggaggcaagcctgaagcagtgtctgctgaacacgccctcgattttgtacagatgagaactggttccgcggcaccttctactggg

SEQ ID NO: 418 - DNA, 826 bp, Zea mays
  unsure (1)..(826): unsure at all n locations
  Clone ID: MRT4577_100384C.1
cttcctctctctctcatttcctcacgcacgtctcgcaactgccgcagcacaccgcgccgcttcttctcctcctcctccttccgagccgagagaaaggctgctgccagagggacgagggcgagcgatggagcagtacgaggtggtggagcagatcggccggggcgcctacggctccgcctacctcgtcctccacaaggccgagcgcaagaggtacgtcatgaagaagatccgcctctccaagcagaacgacaagttccagcggaccgcttaccaggagatgtccctgatggcaagcctcagcaacccgtacatcgtcgagtacaaggacggatgggtggacgaggggacctccgtctgcatcgtcacaagctactgcgaaggaggggacatggccgagaggatcaagaaggcaaggggcatcctattctcagaagagagggtgtgtcggtggttcacgcaattgctcctcgccctcgactacctgcactgcaaccgtgtgctccaccgtgatctcaaggttgtaggaaccccaaactatatgtgcccagaaatactagcagacataccttatggatacaaatccgatatatggtcacttggttgctgtatgtttgagattttagcacaccgacctgcatttanagctacagatatggcagcattagtcaacaaaataaacagatctttcatatctccaatgccccccatatactcatcagcactgaagcagatcgtgaagagcatgctaagggaaaatcccagacataggcctactgctgnggagctgctgaggcatccacatctttcaccatatctttctgaatcg

SEQ ID NO: 419 - DNA, 298 bp, Zea mays
  unsure (1)..(298): unsure at all n locations
  Clone ID: MRT4577_100385C.1
aaccggctcgagcgtaggcgagcctccctccgtcgctccttccgcgccgttcncggccgtcgtcgcatggtgaagtactcgcaggagccgggcaatcctacgcacgcggctaaggccataggcagggatctgagggtccacttcaagaacacaagggagacagcctttgcgcgtcgcaagttgtctttgaccaaggctaagcgataccttgaggatgttattgctcacaagcaggcaattcccttccggagatactgtgggggtgttggtcgcacgcgcaagctaagtcgcgccactc

SEQ ID NO: 420 - DNA, 313 bp, Zea mays
  Clone ID: MRT4577_100386C.1
gatcttgatgctttttctatcaaccatacaaatttactagtgtggaatagggataccgtatatgtcagttatgggtgccgacctactatgttattaccttagccaaccaagaggaaaaaaaaaggtggatttaaaaacgacgtgagaagaaaaatccactactcattaacttacctaggactggaaggaacttggccaaatcctgaagggggccggggggggaaccacccttccctatagagaggccttacccctattggaggggagactcacaaatcttgactagggggaaaagtggtaaaaactcacaatt

SEQ ID NO: 421 - DNA, 816 bp, Zea mays
  unsure (1)..(816): unsure at all n locations
  Clone ID: MRT4577_100387C.1
ctctttccctctctctctcatttcctcacgcacgtctcgcaactgccgcagcacaccgcgccgcttcttctcctcctcctccttccgagccgagagaaaggctgctgccagagggacgagggcgagcgatggagcagtacgaggtggtggagcagatcggccggggcgcctacggctccgcctacctcgtcctccacaaggccgagcgcaagaggtacgtcatgaagaagatccgcctctccaagcagaacgacaagttccagcggaccgcttaccaggagatgtccctgatggcaagcctcagcaacccgtacatcgtcgagtacaaggacggatgggtggacgaggggacctccgtctgcatcgtcacaagctactgcgaaggaggggacatggccgagaggatcaagaaggcaaggggcatcctattctcagaagaggttgtaggaaccccaaactatatgtgcccagaaatactagcagacataccttatggatacaaatccgatatatggtcacttggttgctgtatgtttgagattttagcacaccgacctgcatttaaagctacagatatggcagcattagtcaacaaaataaacagatcttcaatatctccaatgcccccaatatactcatcagcactgaagcagatcgtgaagagcatgctaaggaaaaatccagaacataggcctactgctggggagctgctgaggcatccacatcttcaaccatatctttctgaatcgtcncactgttcaccgatctatcttcccggtgaagccaccanaggtaacctggtagacaagcagtcaa

SEQ ID NO: 422 - DNA, 444 bp, Zea mays
  Clone ID: MRT4577_100388C.1
ctagagagcctgctggtggtaagatgcctcctataaacctgagttactcaggtgtcaagcaggcgtgaggaaggctgacaggcttgtttggctacagatgctaaacggctgtggctgctggaacttatgactgaagctattctggactccgacacttctgtaaatccactggcctatgctctgtcaaacagcctaccctcaaagggagcaaacccttgtctcaacacaggtgtaagataccaaccattctgataccactgatctatgttatatctgctcactggttctgttacatgcgatcattcacagttcctgtgctgcgctcttggagctctgacatgtatcacgaaatggacatgtctaggcctatcaaggagcaccacctatttgactggacggtattcgggctgctacgacaacaggccggattataccaggagcata

SEQ ID NO: 423 - DNA, 2288 bp, Zea mays
  Clone ID: MRT4577_100389C.1
ctcgaggccggccggggccctgcctgactcctctccctccctccctccctccctctctctctcatttcctcacgcacgtctcgcaactgccgcagcacaccgcgccgcttcttctcctcctcctccttccgagccgagagaaaggctgctgccagagggacgagggcgagcgatggagcagtacgaggtggtggagcagatcggccggggcgcctacggctccgcctacctcgtcctccacaaggccgagcgcaagaggtacgtcatgaagaagatccgcctctccaagcagaacgacaagttccagcggaccgcttaccaggagatgtccctgatggcaagcctcagcaacccgtacatcgtcgagtacaaggacggatgggtggacgaggggacctccgtctgcatcgtcacaagctactgcgaaggaggggacatggccgagaggatcaagaaggcaaggggcatcctattctcagaagagagggtgtgtcggtggttcacgcaattgctcctcgccctcgactacctgcactgcaaccgtgtgctccaccgtgatctcaagtgttccaacattttattgacaagggataacaatatcagactcgctgactttgggctggcaaaactgctcatggaggaccttgcctcatcggttgtaggaaccccaaactatatgtgcccagaaatactagcagacataccttatggatacaaatccgatatatggtcacttggttgctgtatgtttgagattttagcacaccgacctgcatttaaagctacagatatggcagcattagtcaacaaaataaacagatcttcaatatctccatgcccccaatatactcatcagcactgttcaatctcattttatgcccatttatgggaaaatctaacctgccttcccaagcagatcgtgaagagcatgctaaggaaaaatccagaacataggcctactgcgagctgctgaggcatccacatcttctgtaagtccttaaagaaccgttaactgttccggtcaaggccttagggtgccgacacgatgttaacattccctaaaaaaatttacaggctggggagctgctgaggcatccacatctgcaaccatatctttctgaatcgtccaactgttcaccgatctatcttccggtgaaacccaccaaaggtaacctggtagacaagcagtcaaagaagccaagcagtggcagaaagcgagctgaaaaagcctgtggatccagtggaacattagaaactgcagcagcgcacgctgtggaagcaagagacagctccacaaacttctcagatgtatcaactataggtacccaggaagccttgatattgtaaatgccggtggatcctgatgccggaagcaaagaagagcagaacgttgatgttgtaccgtttcagcatgcggcagagaatctgatggcgacaaccgatagacaggtcgatgcgaccatacgtcttaaagccataagaaccagtaacgcaaaagaggcggccccggtcacagttgcagaccaaaagttcaacgaggcgccaataccaaatgaggaactgacaatcggggtagtgcaggaacaaaggaaggacgtgaagccacgctcttaccaggcaggaaaaccagagatgtgtgacacaaccgtaacggaggaatcgtcgcccatcagcacgctaaagctggcgcacacggagagcgcgcccgcggagtgggaccacctgaacatagtccagcagagggccgacgcgctggagtcgctcctggagctctgcgcgaagctcctggagcaggagaggctcgacgagctcgcgggcgttctccggccgttcggcgagggcgccgtgtcgtctagggagacggcgatctggctgaccaagagcctgatgacccccccacccaagttcggagagtccccgacgaagcttttgtaaaacagtgattcgtttgagagtttttgtttttttttcgagtgccattttcgagagtgtacatagcatcaacagaatttgagttcaagattgctgtgcttacctaggcctgagctttatttatcttggatgtatatggtttgcatggcaccgactgttgtgagcgatgactggttatttaccagccgccttgttttatttattgtgctggtgtagcgtgagcgtaatggctgctgctgcgagtgttcaggaaataatggaaatcatgccgagtccatttttgtttaaaaaaaaaaaaaaaaaaaaaaaaaaaaaaaaaaaaaaaaaaaaaaaaaaaaaaaaactcgagggggggc

SEQ ID NO: 424 - DNA, 143 bp, Zea mays
  unsure (1)..(143): unsure at all n locations
  Clone ID: MRT4577_10038C.1
tatattgtcgaggggtgtggagggatctgntccctgctgtaccgatccttaggagggtgcgctcgattgcagaaacaacggtgatgctggtgtaccctntgtacacgtncgngcgggcgatggaaagnccattcaagctggac

SEQ ID NO: 425 - DNA, 343 bp, Zea mays
  Clone ID: MRT4577_100390C.1
ggcgggggtatctttgggctcttcctcgccgggagggccgcccggtttgccgcggacccgcagttccgtttcaaggtgctcatggaggagctcgagggcgtaaccgcgtgcgtgctggcgacatggctgccccccacttctgctcaacggtaacttctctttcacctgtcggggtccatctactccactatgtcctctgccgacgcgcggtatcccgctccgctcagcacatgtcagccggggtgtgctcgatccggtgccacctcggccaaggggccactttgggtggtcggtttcgcggacgggctcgcgggaaccgcgctctacaacggccttatggcga

SEQ ID NO: 426 - DNA, 768 bp, Zea mays
  Clone ID: MRT4577_100391C.1
cctcgaggccggccgtgccccgcaaacccctccccctgcattcctccccgtcctcgcctcgtgcgctccgcccgtcgctcctgaacgccccgtctctataccaccgaaggcgaggagggggccaaggacgagcgccttttcatgcccgctggccattgccgctgctcacgagcctcccgcctcgcgctgccctgccctctacggatctgccccaggagagccagacagccaggtaaaggagccgtcaaagcccccgccgaggagagcacgcaagggtaagcccacctaccaacgaagccccatctcttcgccttgcccttcggcttcgattagattggatcccgatcgccgtcgctgcaggtaagatttgcccccttttttttcttcctcgccgcagctccttccctcgggccgtgtgtagatctgcacgttccctggcgtctgctcggtgtcatgccttcattcatctccgtcgaattctcagtagatactatgttccctactctgtacggttattggattatgcaggcaatttgatctagctggtaggtcgataggttagttatggcaaataggaatgtcgttggcctcattttctcaagagttggcaagtcagtgaggcatagacctacgcctgctctgagttctgtccatatatactccatgaatgaactcagcaattctgctgaacgattcaagttgttatatactaagtgctagaccgactcacggacattttttcatatattaatgcactgttactcaagg

SEQ ID NO: 427 - DNA, 234 bp, Zea mays
  unsure (1)..(234): unsure at all n locations
  Clone ID: MRT4577_100392C.1
gggggcgcgtgagcgacgggtgaccggtatngtacgtacgagtgctcgggcgtcagagctcnnagcgacggcnagctggagctgaccgtgggggtccgcggcaccggcggcgcggcggcggcggcggcggaccacttggcgccgatcagcctcggcaggctcatcctcgccggcatgggcggcggcggcgngcggaggggctgggcgcggcagctctccctcctcacgccctac

SEQ ID NO: 428 - DNA, 290 bp, Zea mays
  Clone ID: MRT4577_100393C.1
aaagctaatgcctgctcacattcaattaaccagggggacaaaaaacagtcccgaacctggatacatataaattcatatccatttaaagggagaaacactaatacttctggttaaaacataaataagaatgccccagaaattacacttggcctaagcaaatactacccccaaagaacggggggagtatgtcattttatgacaggcgttaacaccgcaaaacaagttcattactatggaaaatgttccacttacaactacttattctttttgtgacgaacttcttggttgga

SEQ ID NO: 429 - DNA, 856 bp, Zea mays
  unsure (1)..(856): unsure at all n locations
  Clone ID: MRT4577_100394C.1
cattgggtacctcgaggccggccgggcaacattactacacatacctgcagctaggagtgaggtgcaggcatggcctactgctactatccagcaagagcctgctatctcctgttcctcatctaccagcccgtcgtctactacctgttgctcatggctccccacaccatcgcgctgtctttcagctacgacttctccaacccgggcgacctcgaccgagcaaatctcacgtacctcggcaactctatcgccggcgacggaatcattaaccttacaaatatgaatgacacctggagcaccggcggtgtggcctacccgcagccggtgcgcctgtgggatcaccgcaccggcaggagagcaagcttcaccaccaacttctcgttcgccatcagcggcgagcgtacctacaaccgtgcggatggcatggccttcttcatcgggtccttccgctcagccgtgccgctagactcaggcggtggttttctcgggctcatcagcaacatcactccaccgccgctgtcgactgtcggcgtagagttcgacacaaacaggaacatatgggatccccaggacgccattgaccattttggcatcgacgtcaacaacatcacctccatcgtcgtttacaagtcgctgggacaagatttcccaaacccgctctctggtaccatgtcggcaggcgtcaactacgatggcagctccaaggttttatccgttagcctccggctggccaacggagatgttcatgacctcgcaacgtcggtcgaccttanagccgctggagtgccacagtatgccaccatcgggttttcggcggccaccggcaatcacgtcgagtcgcacccagctcttgtcttga

SEQ ID NO: 430 - DNA, 512 bp, Zea mays
  unsure (1)..(512): unsure at all n locations
  Clone ID: MRT4577_100395C.1
naaaaaaaaaaaaaaaaaaaaaaaaaaaaaaaaaaaaaaaaaaaaaaaaaaaaaaaaaaaaaaaaaaaaaaaaaaaaaaaaaaaaaaaaaaaaaaaaaaaaaaaaaaagggggggccgttttaggggacccaagtttacttccccggccttgcaagtacaaagtttttttttggggaaccctaaattaaattcatgggccggcttttaacaacatcggaattggaaaaacctggggtttaccaaattaaatcgctttgaagaaaatccccttttcgcaagttggctaaatagcaaaagggcccccccctatcgcctttccaaacagtggcccaccctgaatggcaaagggaaccccccctgtaccggcgcataaaccccggggggtggggggtttacccccaggggtacctttacatttgccagcgccttagcgcccggtcttttggtttattgccttttctttttggccacgtgggcgggttttccccggaaactttaaaatggggggctc

SEQ ID NO: 431 - DNA, 467 bp, Zea mays
  unsure (1)..(467): unsure at all n locations
  Clone ID: MRT4577_100396C.1
cggccaaccgcgccacccagccgcggggggcagggcgcaggagaacagccaccgcaacggggggaagacggacaagaagccaaggcggccggangagaaggagcgccaagaggcagagcaagaagcagggaggagaggaaggcccgcggngcaagcgagagcagaggagcgagcagnaggcgggggggcggaccagaaaagcagccagggagaagcacaccccggaagagaagaacccacgccagcaacccagagggcgaggcgcggccnccggggcacgaacagacaaggacagcgaggcgagggacagaacaagcggcgaaacagagcaggacccacaccggagagaacgaccgccagagccgccagcagaccaccgaacccaagaagggcanggccaagnccaaccaccaagcacgggaccagaccaggcagcgccacaacagggcgggaaggcagggcgaaaa

SEQ ID NO: 432 - DNA, 422 bp, Zea mays
  Clone ID: MRT4577_100397C.1
accacccgaggtgcggctttcactttgacgcaggagggcccccctcgggggggggggaacccacacacaactgctcgcagaacaaccccatccaccggcaccggcggcccagaggaccacacgcgggaaggacaggggcaccagggacgccaagacgcggaaggcccccgacagcggggcggccggcgctacggcacacaaacggggccacgcggcggaggccgggccgcagcagaaccggaacacggacgcggcccggtccaaggcgacaacgcccggggacgagaacaacaactagagcgaggccgccgccaacgagaaggccgcgggcgccgtcagcgcggagacgccggacaacaagccccacgctatggcggccgcgcacgaccgcgcgggggggccagacccgggccggggccccg

SEQ ID NO: 433 - DNA, 752 bp, Zea mays
  Clone ID: MRT4577_100398C.1
tgggtacctcgaggccggccgggacggcccaatcgccggctgacactcacaagaacctgcctccctcggtctggatcgctatctcttttctagcggctccagagggagggaaagctagcgcacagccgagagaagaaagcagagagggagggagaacaaagagagagaaaaaaaaaccagagaggttgagcaagaaccgaggcggatccgccctttgtccctcctgcccgagggctagcctgcccccgcgagagatcgagaggaggcgccgttcagttcagtcctgtgattccttcctacaggggggtgagaagtcgggggggaagaaatgatgcgggagacgtacatggacgtgctgccgccggtggaccacatagccgcctcacggagcggcggttggttcccgggcgcggttcgtctctggacggcggcggagaacaagcagttcgagcgggcgctggccgggctcgacctctgccgcccggactgggagaaggtggcgcgggccatcccgggccggacggtgcgcgaggtcgtcagccacttcaagagcctccaggtcgacgtccagcagatcgagagcggcctggtgcccatgccggtctacggcgccggggccggctcgttcaccctgcagtgggacggctgctacggccccgcggactcgaggcacaacggctaccgcttcggaaacggaggctgcgggaggcggcaccacggccgcaccccggagcaggagcagaagaagggcg

SEQ ID NO: 434 - DNA, 280 bp, Zea mays
  Clone ID: MRT4577_100399C.1
gtccgttgttgtatcttgacactgatcagtgttgtttgctttgctttgccgtgctaatggcgcccgctccatgtggacgttcgtcgcaaagggcgttccacttacgcaagggcaagagcgagggcaacaagaacatgaacgagctgatgggccgaaagggcgcgaacctggcggagatggcgagcatcgggctgtacgcgcccccggggttcacggtctcgaccgaggcgtaccacccgaaccacgaggccggccgcgacctcccgccggtgctctgggc

SEQ ID NO: 435 - DNA, 625 bp, Zea mays
  unsure (1)..(625): unsure at all n locations
  Clone ID: MRT4577_10039C.1
ctttctgtagtctgaacctcttctggtcccatgagtcactggtgaaggcgcatcgtcatggagctggacgaccacacagggagtcatgcctcctccttgattcctcatccgttgttgacatgtgaattttattatactgtgtgctttggatttaataatcgcttagggctctatggaatgcctcctttcctgatacagagctcactagcttagtttcagaacagcggaaagacatgtggtggcagggcatcaaccaacgattgatttcaagttattttgagttttttgtctatctatgctctattttaggttgtcaaaaatatgtttcacactgttcctttttagttttttcatgtgaatttttttataattctccttgacattttattctcttataggcccacaatcagctgctggtttcgtgcaacaaacatgtctgcatttctctaacacatgaagagtcttaacaatatcatcttactttgattctaggggctatgtgtttgtttcgattgagaacctttagttnttgcaagaacatacctgngaggtcctttggatcctatantacaatgaatgaactcctccttaccaagtgagcaaagtgtccatgcatataggtctg

SEQ ID NO: 436 - DNA, 464 bp, Zea mays
  Clone ID: MRT4577_1003C.1
cccaaacggggcttttttttgggcttattgcgaacggggggaaaacatgggtccgggggagggggccgggggggccctcgctcgcagcaaggacatttccttcctgggggggaagtaatcgacgagctcggcgggggtcctcaagccctggttcacgggggggtcgttgttgtaggggtcggccccctcgggggggggtgggaaccccccccccccggcgagggcccccccggggggctccttggtggcccccccccagggggcccgggcacagggggggatttcccccaaacccatggcctcccccccgaaaaacctttgccccctgaggtggcccttgggcaaagccaggttcttcttggcctcctttgccatagcctccctgggctcctcgggggccggcccgaacgccttccaaaacaggcccgcgaacttttgggcggggaagggggcccaaaaccggg

SEQ ID NO: 437 - DNA, 890 bp, Zea mays
  Clone ID: MRT4577_100400C.1
ttgggtacctcgaggccggccgggtccagcacggcccatcgccggctgacactcacaagaacctgcctccctcggtctggatcgctatctcttttctagcggctccagagggagggaaagctagcgcacagccgagagaagaaagcagagagggagggagaacaaagagagagaaaaaaaaaccagagaggttgagcaagaaccgaggcggatccgccttttgtccctcctgcccgagggctagcctgcccccgcgagagatcgagaggaggcgccgttcagttcaggggggtgagaagtcgggggggaagaaatgatgcgggagacgtacatggacgtgctgccgccggtggaccacatagccgcctcacggagcggcggttggttcccgggcgcggttcgtctctggacggcggcggagaacaagcagttcgagcgggcgctggccgggctcgacctctgccgcccggactgggagaaggtggcgcgggccatcccgggccggacggtgcgcgaggtcgtcagccacttcaagagcctccaggtcgacgtccagcagatcgagagcggcctggtgcccatgccggtctacggcgccggggccggctcgttcaccctgcagtgggacggctgctacggccccgcggactcgaggcacaacggctaccgcttcggaaacggaggctgcgggaggcggcaccacggccgcaccccggagcaggagcggaagaagggcgtgccgtggacggaggaggagcacaggctgttcctcttaggcctgaagaaatacggcaagggggactggaggaacatatcgcgcaactacgtccagacgcggacgcccacgcaggtggccagccacgcgcagaagtacttcatcaggctcaact

SEQ ID NO: 438 - DNA, 1414 bp, Zea mays
  Clone ID: MRT4577_100401C.1
aagcccggcccaatcgccggctgacactcacaagaacctgcctccctcggtctggatcgctatctcttttctagcggctccagagggagggaaagctagcgcacagccgagagaagaaagcagagagggagggagaacaaagagagagagaaaaaaaaaaaaccagagaggttgagcaagaaccgaggcggatccgccttttgtccctcctgcccgagggctagcctgccgccgcccccgcgagagatcgagaggaggcgctgttcagttcaggggggtgagaagccgtgggggaagagatgatgcgggagacgtacatggacgtgctgccgccggtggaccacatagccgcctcacggagcggcggctggttcccgggcgcggcgcgtctctggacggcggcggagaacaagcagttcgagcgggcgctggccgggctcgacctctgccgcccggactgggagaaggtggcgcgggccatcccgggccggacggtgcgcgaggtcgtcagccacttcaagagcctccaggtcgacgtccagcagatcgagagcggcctggtgcccatgccggtctacggcgccggggccggggccggctcgttcaccctgcagtgggacggctgctacggccccgcggactcgaggcacaacggctaccgcttcggaagcggaggctgcgggaggcggcaccacggccgcaccccggagcaggaccggaagaagggcgtgccgtggacggaggaggagcacaggtcctatatcctatatgtggtgatgatgcgagagctccaccaaacgcctgtgtgagattggcgatgtgagtcagagttccactacctcctcggcgtctctctgcatcagctttcgcagctccctttttggccctgctgcttcccttgctcggaaaggcgtctgcggatccttgtgcgagcaccaaagggcgcttctctgtaggctgtagccaggccaagccccaaaaaaaaaatgcagccatcttcttctcttctgtgggtggttgctcgtgctttttctggctcctcgctctgcaagttgcagcgaaatgcagaacacgaggcacccactgatgatgatggagatggagggcactgttccagagaaggaagcttctggtgcgggggtgtgtgtgtgtgtgtgtctatctactgctgagcttgccgtcagtgctgctgcagcaagatctgatgaaaagcctggaattcttcaggctagttgccattgccagtcccagtcccagtcccagtcaccttctcatctctgatgtctttcagtccacatgattcagttcagttcagtgaacaaccgccgagacgatgttttcatcatcattattgtcgtttcgtcgccggaatagaagtaacttctgttctaaaaaataatttccttactttaaa

SEQ ID NO: 439 - DNA, 720 bp, Zea mays
  Clone ID: MRT4577_100402C.1
gaggtcggccggaagcccggcccaatcgccggctgacactcacaagaacctgcctccctcggtctggatcgctatctcttttctagcggctccagagggagggaaagctagcgcacagccgagagaagaaagcagagagggagggagaacaaagagagagagaaaaaaaaaaaccagagaggttgagcaagaaccgaggcggatccgccttttgtccctcctgcccgagggctagcctgccgccgcccccgcgagagatcgagaggaggcgctgttcagttcagtcctgtgattccttcctacaggggggtgagaagccgtgggggaagagatgatgcgggagacgtacatggacgtgctgccgccggtggaccacatagccgcctcacggagcggcggctggttcccgggcgcggcgcgtctctggacggcggcggagaacaagcagttcgagcgggcgctggccgggctcgacctctgccgcccggactgggagaaggtggcgcgggccatcccgggccggacggtgcgcgaggtcgtcagccacttcaagagcctccaggtcgacgtccagcagatcgagagcggcctggtgcccatgccggtctacggcgccggggccggctcgttcaccctgcagtgggacggctgctacggccccgcggactcgaggcacaacggctaccgcttcggaagcggaggctgcgggaggcggcacca

SEQ ID NO: 440 - DNA, 2481 bp, Zea mays
  Clone ID: MRT4577_100403C.1
atcgccggctgacactcacaagaacctgcctccctcggtctggatcgctatctcttttctagcggctccagagggagggaaagctagcgcacagccgagagaagaaagcagagagggagggagaacaaagagagagagaaaaaaaaaaccagagaggttgagcaagaaccgaggcggatccgccttttgtccctcctgcccgagggctagcctgccgccgcccccgcgagagatcgagaggaggcgctgttcagttcaggtgaaattttgccttgttctgggtggggtctctcgggctctctgtggtgtttggtggtgtaaattggagtgggatttagaggtagttaggtctcgtctgctaggataggtgcggtggtctcgttaatttgtgggctccggaggtcaatttgttcacgatcccggtcctgttcgcggttcagttcaggagcgagtgttcctgagcccaatctaattcgtccataaagtcgatcccttaggtcgaggataataacctgtttgcagctggttccaggtttcacttgcaaaagatgcgccttgatatctcctccaatcccatgttcatcttatatgatttgatttctagcgacgacaagaatttgtgttcagagagagagagggggcgggggagagagagagaaatcctttaataattgttacagtgctctcggaatctttatcttgttctgagtgagatgcccaaaaaggcaaagggaaatctaacctttcttccagtcctgtgattccttcctacaggggggtgagaagccgtgggggaagagatgatgcgggagacgtacatggacgtgctgccgccggtggaccacatagccgcctcacggagcggcggctggttcccgggcgcggcgcgtctctggacggcggcggagaacaagcagttcgagcgggcgctggccgggctcgacctctgccgcccggactgggagaaggtggcgcgggccatcccgggccggacggtgcgcgaggtcgtcagccacttcaagagcctccaggtcgacgtccagcagatcgagagcggcctggtgcccatgccggtctacggcgccggggccggctcgttcaccctgcagtgggacggctgctacggccccgcggactcgaggcacaacggctaccgcttcggaagcggaggctgcgggaggcggcaccacggccgcaccccggagcaggaccggaagaagggcgtgccgtggacggaggaggagcacaggctgttcctcttaggcctgaagaaatacggcaagggggactggaggaacatatcgcgcaactacgtccagacgcggacgcccacgcaggtggccagccacgcgcagaagtacttcatcaggctcaactccggcggcaaggacaagaggaggtccagcatccacgacatcaccacggtgaacctgacggacgacgagcgggcgccctcgccgtcgcggtcctctctgatcaccaccaccaccagccagccaaacgcgccggctccggccgcagtggtgataggcggccccttctcgtcggcggcggcggccgaggccaagcagcaccagcacggcgctgggaacctgccaccgaaccggacctccgtggtgccgggtgtttacatggatggacgattcgcatgaccacggcctgcagtgtggtcctctgcgtcatcaactggtcgccagccaccacagcgttctgttttaggcgcaagcgcaatcccactttgaggcgcgccatggtcatggatccatccatcaggtgttgtctagtgtgtgtgtgtacgatgcgtgtgttctttgctgtagcttcagcgcctgtatcgaagtgattagccttttggggagggggggcgtaacggaaaggggatcttcggttccacggtggtccaggtccacaatttgttgttggtgatgccgagaacgtaacaaaaaaaaggacgccaagaattctgagtggacttggcattcaatcatggaccctgcttttgctcgccacggcccgcggatgatgatcagcagaacctaattctggatccttcttggtcggctgatgtatcccttgagtgaccttggtggccatctcatcctgctgctgtctctgaagacggcgacgcgcttgtattggagggtttcagagttcagatcacattgctgtagtgtagtctagacatgtttacccatagtacgtaatcagttctttttttttttttgctaaaaaaaaaaaaaaaaaaaaaaaaaaaaaaaaaaaaaaaaaaaaaaaaaaaaaaaaaaaaaaaaaaaaaaaaaaaaaaaaaaaaaaaaaaaaaaaaaaaaaaaaaaaaaaaaaaaaaaaaaaaaaaaaaaaaaaaaaaaaaaaaaaaaaaaaggggggcccttttaaaaagaaccaaattttactacccggggattgaaaggaaaaattttttttatggggcccccaaaataaaataaatgggccggtttttaa

SEQ ID NO: 441 - DNA, 946 bp, Zea mays
  Clone ID: MRT4577_100404C.1
gaacaaggacaaggaaaaggtagccagtggcctgccagatcggaatttgctgtttacccttttgacctggcgaaatcgaatcagaataaaagaaagctctgcacttcgttcatcggagagcatccatagcaagaggaagcggctgaggttggctcgggtgagcaacatggcggagaagctgacgccggagcaggtggacgagtgcaaggaaatcttcgacctgttcgacgccgacgaggacggtcgcatcgccacgggcgagctcgtgacggcgctgcgctccctgggccagaacgtggacgaggcggaggcgcggcgcttcctggaggacgcgggcgtcgccgcgggcgccggcgacatcgacctcgcggcgttcctggccgtggcggcgcgcaagatgggcgccaggcagtcggaggcgcgcctcgccgagtgcttcgacgtgttcgacgacgcctgcagcgggtccatccccgcggagcagctgcggcaggtgatggtaagccacggcgaccggctcacggaggaggaggccgacgcgatgctccgcgaggccgacccgcgcggcgagggccgcgtcgagtacaaacactacgtcaaagtgctgctcagggacaagaagtgatccggtgatccttcgcccgccggtggccacggccggccacgagtgggggaggaggatgtcaactcgatctgctctttgatcctagtcctagcagcgccgcttaattattatcacggcatcagatccagtagctagtggctaccgaattcttgaagttgacatcaccagttctgtattctggtttcgcttgtgttgagcgtgtaagatgtctgcgatcgcagctttcgagaccaactccgttccccgtaaaaaaaaaaaaaaaaaaaaaaaaaaaaaaaaaaaaaaaaaaaaaaaaaggcggccgtcgcgtcctagaactag

SEQ ID NO: 442 - DNA, 1189 bp, Zea mays
  Clone ID: MRT4577_100405C.1
tcgaattcggccgacgaggcaagcagctggaggcagagatgccaaccgcaatgtcctgtcacctttgctcatgagcaaatcggtcaaggtcgcccatggatggagatcacaggaggcaagccgccgccgcggtcaccgtcacgcaagtcagcccggcgcggcgcctgatcgcctggctgaggcttctcttccgggcgttcgttcatagatacggcaaggtcgcgagctggaacgcggcggggcgccctgtcttcgtcgtcctcgcggtcttcttcctccagaggagcctgcgccgccggtacctgtcatggaaggagtcgtcgcgtcttccgctgatggccgccgccgccgtcaccgtgcagacgaccgtcagggcgatggcggcgcagcgcgagctctctgtccggaagcagaccagagctgccacacgcatccaggcgcaatggcgtgcgcacagggcggtgtggagctacctgacgacgaagagagccgccgtcatctgccaacgtgcttggaggcaaagcgttgcacgcaaggagctcaggaagctcagactgtgtgtgcaggagaatctggagagggaaatgctggaggaggtgtgcaggctgcgtgagatggtggacgtgctccagcaggctgtcaatgacgccgagacgagggccgtcaacgagagggaggcggcgaaggatgcgatggcgcagttggaagcagcctcggcgatcgaagagaccgtggtgatggttgaggacactgagaaggtcaagtcgctgagtgccgaagttgaccgcctcaaggatttgctgggagctgaaatgagtgaaacttttgccgccaagaaggcgctttctgaagccgagctgaggaacgagaagctggccaggctgcttggagttgaggaagttaagaacaaacggcttcaagacaccctgaaaaggatggaggagaaggcttctagtctggacgaggaaaacagaatgctgcgacaggctgtggcgtcaaaccctgctattgtcaggtcgccatcgggcgaaaaccacgaagcacctggaattcaggcagctcctgataatgagaaatcaagaaatggcacggtgaatcccatagcagtggatcgggaggctaatgtccatgagaagggcgctgaacagcccagctcaaatggtcaagaagctgggaagcaacagcaaga

SEQ ID NO: 443 - DNA, 219 bp, Zea mays
  Clone ID: MRT4577_100406C.1
ctaatctgctgactctactgacgttcctacgacgaaggctaccgcgatctgcgatcccattacatgtttccaaagaaggacacgggtccgcgaccttcatccaagcctgccaagtctagcgatgcaagcagaagaagaagaagtggagcaagggcaagcaaaaggaaaaggtgaataacatggtgctcttcgatcagagtacctatgacaagctcctct

SEQ ID NO: 444 - DNA, 640 bp, Zea mays
  unsure (1)..(640): unsure at all n locations
  Clone ID: MRT4577_100407C.1
ttgggtacctcgaggccggccgggaagctggtgctaaaaggtgctctggnccggagctctcgccctcgtctccttactaatagctacgctacttccacgtgggtggacaactagccccacttctcgatggcgtcgcacgctgaggaggggtggaggagggtaccagaccgcccgcgggtgaacttcgtgagagcgtgccgctccctcttctccatctccacgctgcatgacgacgactacgaccgagccggcgccgacgtcatcgccgccggtcacttgtggccctgctggccccgaatcgcgtcgtgagatttctttcccaccatgttgagatgggagagcgcgaggtacgaatggatcctgaggatattcttctaaaaatacttcacgtgcacttagggtgcgttactccttttgctttaataaactactctgcgagtgctgatacacttttacttgatctagggttcgagtctaagcagagctgctacttccatccactgacgaatgatgtgacaattgctcttagcctcagtaatctggacaagtttctcatctcccttgggaagcaaccagcatatgtggacttggaggctgcaccagctgtggggaaggataatgctcctgatctagcacattt

SEQ ID NO: 445 - DNA, 352 bp, Zea mays
  Clone ID: MRT4577_100408C.1
gggcgtccaccaccgcaccgtgcccccgcccgcgactttgacccccgcgcgcgtcttcctcctgcccgcgaatcacacccgctcgcgtcgccctcgccgccgggtatcccgcccgcgccaggcacccctcccccggcgcgccgtgatgcccgccgtcgggtatcccgccctcgtcagcgcacccctcgccctcacccccgtcttcgaagagccctgctttcatcctcagcgccgccagctcgccggcatcctcctaatccttgctcgatgctagattcgccagactaccgaggcgctgctcctcggatcttccgagaggtggcagttgtttgccggtaatcggccccccatg

SEQ ID NO: 446 - DNA, 535 bp, Zea mays
  Clone ID: MRT4577_100409C.1
catgcggaaccgatttccatttattgactctggagagaaaaaacagtctattttgagtccctaccaaatgcgaccataaatcaagaaccaagcttgcatcatggtcagcagttagggcaggcaggcagacatgcatgcttggcaaaattaataaatcagtcaggcggagcagtgccaccctcctcgcctgctccgctatccttgtcctcgacgtgaggcaccggcatactggtagaagaagccgcggtggaggacgccatcgacggtcggccgaacgttgcaggcggtgagccacccaggaggagtcggcgcgtaaagaagtccaaaatctgcaccggcgattgctgcgacaacggcgcgaggtcatgggcggtgctggcggaggcggcggctaccttgccgctgtgaagcaactgcgcgtaccgcatcaggtcggggaacggcaccggagacggtggcaacaacggagctgatactggcggcggctgggggatgccgggggatacaaggaaggcgccctggccggtgcgtcccc

SEQ ID NO: 447 - DNA, 258 bp, Zea mays
  Clone ID: MRT4577_10040C.1
cgtacgctttggtatctatgcaccttatttttgcagctctgctctgatcaaaggggtcgggtcaagattttgatacattactaacgggattgctgttgtacacactttctttgttgaatctattccatgaattacgctatattctaacttacttcttgctcttaatgtactagcttatgtcgtttacatatcatctcaaggaaatgcttttttgtatttagccattattaactcttttattgatttaagtctattttt

SEQ ID NO: 448 - DNA, 388 bp, Zea mays
  unsure (1)..(388): unsure at all n locations
  Clone ID: MRT4577_100410C.1
gggacgcctgcaggcaccgggccgcactacacggggcgacccaccgcggccgcncatcaacactgcacgnagaggacgcgcggggagagcaccngaaaccggcgagcagggaggaaaaggaaggccaaagaggcccgccagcacggcaccccaggaccaccgacaacgcgccaggcctctcacaagagaaactcttgggtgcgggtgggaggctcaaaacatgagggcacaacagactacaacaacttgtgctagcaaaccgtgctgcctactctcggcagcataggtgcttccgttcagccaactggctgcatgggaccctgctgcttatttgccgcagcggctgccattcaggcgggtggctgctggctgcccccggcggtgggtt

SEQ ID NO: 449 - DNA, 741 bp, Zea mays
  Clone ID: MRT4577_100411C.1
aattcggcacgaggcaaatacgatcaaccaaacaaagcaaccttgtatggccctgtttgggacgcatatctcacggtggcggtcgaaggaagcttataatcccgccaaatgccgcgtggtacctttgtttttttctctcactgcgtccgactcaaccactgcggagatgaactaagaacccaattttacatattgtggctccctcaccgccgctcatccactacaccttacagtgggagaccgcagtcccaaacagggcctatgagtccagcctggcttaaatgagcctggctgagctcatacgagccaggctaggtgtatacaagtaacaaaaaggctattgatgtcccaagtgccttaccagtagtataaactctaaagtatctagatatttgaaacaagccattcgttgagctattgtggttgtttgggatgatagaggcatcactttatatgttttttggtatctttctcctgaaattgtgccgcctcatttcctttcattggtgtcatattttactatttgtctattttgcatgatgccatacgttatttaactctgtgtgtgattgacatagtaattgcaatattcctgtttgtagcttcatatgtagaccttggttttagcttatattgctgataaggcctgtgatggcctctaggattaacttttaccattctagtactcatacttaacccccatgaggaggctacccctggtcacatcatgcccttccgctt

SEQ ID NO: 450 - DNA, 645 bp, Zea mays
  Clone ID: MRT4577_100412C.1
gctacgactgattgcaatgacactgtcttgataccggccagctcattctagtggtggtggcacacacaggttccaggggcgggcctcattcaattcaatgatattcaattgaatacccattatttttaaaaaacaacatatacatatatatagtatatatacataggaaataagaaataaatcaaataagtggagaaatttctgttaaattagaccaaaatatctctaatctccttgctactttccatacccacccagcccaataaattgttgtgtgattgtgtcctatgagatccaatgaagtgatgtagcccatcttagtatcttatggcaaaaaatctccaaaccctattgtcgtactaggaaagagctgtcaggtcgtgatgggacattaatgacagtgcgaggcattagcgattggaaagagtcaaatatgataagtatctagccaacaaccgagcaatagcccctggtgcatttcgatttaattttttttgaaatagttgtatgaaatttgagtttagtaggttagttattgaatcagttatgattattgtgtgcttaattatagattacatataattaactatatatatgctaataaataagctttaggtctagaaaaaaatttatcctaattttttt

SEQ ID NO: 451 - DNA, 228 bp, Zea mays
  Clone ID: MRT4577_100413C.1
atagtgagtcgtataaacgctggcgggtctggcggagctcgctggggtcctggtcgttcccctgcacggaccgctgcaggggggggagatctggggtcgaccgtgagattgggatgtcatccaaggcacatggagaccacgcagagtcatgcgaggtgaagattgagttggggaaaccgcagctagggctacactagacggactactgggggaggaatgagctagaag

SEQ ID NO: 452 - DNA, 1360 bp, Zea mays
  Clone ID: MRT4577_100414C.1
attgggaccctcgaggcggcgggaaccacatttgccgcttggccgcacggccgcacccgcacgccagaaacagctctcgcgttgcttccgcacgccgcccatggcgagcctgtcgtcgccgagtctcctctcttccttcctcggcgaccgcctcgcactctccactaggcctctccttctccgctccgctgtcccaggcagcaggcggctggcgtatcaagcaacgagaacgctatgcaacttggtggatatcctatttaacaggagaaatcaggatgatgcaccagaaaacaaccctagacgcctgcgtcctgggaaagtatctccacgccttagtgttcccaatcatatacaacggcctccatatgtcaattctcgtcaacaacgacctggtatgaataatggacctgaaatacatgatgagaacgggatcgagtgcatgagagcttctggaaagcttgctgcacaggttttgaaatttgctgggactcttgtaaagccaggcataacgactgatgaaattgataaagcagtgcaccaaatgataattgataatggagcatatccttcacctcttggttattgtggatacccaaagagtgtctgcacttcagtgaatgaatgcatctgtcatgggattccggattctcgtccccttgaggatggagatatcatcaatattgatgttactgtctacctcaatggctaccatggtgatacatctgctacatttctttgcggtgatgttgatgacgaagctaagaaattagttaaggtgacaagagaatgtctcgacaaggctatatcgatttgttcacctggggtggagatcaaacaaattggtagaactatacaggatcatgcagacaagttcaagtttggtgtagttagacagtttgttggccatggggttggcaaagtttttcatgctgagcctgttgtgcttcatttcagaaacaatgaatggggacgtatgatgttgaatcaaacatttactatagagcccatgctaaccatagggagcatcaaccctgtcatgtggtccgatgactggaccgcagtgacagaagacggcagcttgtcagcacagtttgagcacacgatacttattaccgaagatggccctgaaatactgacacagtgttaatggaaggccaaataacaaagaacaatcgttagtcagctggcaagatcctgcatttctttttggggactaattggtccaacctaaactctgatgcaaaatggcaaactcacattgtaatctcggttcatcggtacaacgatatatgtatagaaattgtactattttcgaagttatatttgagaaaaaaatttgctggtgcccgcggacgctggg

SEQ ID NO: 453 - DNA, 495 bp, Zea mays
  Clone ID: MRT4577_100415C.1
ctgggactcgtgggtcgacgcaagactctacactgagtcgtatgtacgcatcatgaccgacgtgaccattcctgaagactacctgcctattgtcgatggcctcctctggaagaagatcctcagggagggatcgggtgaatcgcccagcataaagtcgaatgtcaatgttcactatgtcggaacccttttcacaaccggagagaaattcgactcctctcgcgatcgctcctctcccttcaacttcaaacttggcgttggccaggtcatcaagggttgggacgaaggtgtcaagaccatgaagattggagagctggctgaactagtgtgcgcacctgaatatgcctacggagctcaaggaagccctcccaagatccccggcaactctactctcaagttcgaggttgagctgcttgacttccaggagtccgctgacaaacccactgccaagctggctttggcccagaagaagaacgatcaacgaaatgcatctttcaa

SEQ ID NO: 454 - DNA, 1037 bp, Zea mays
  unsure (1)..(1037): unsure at all n locations
  Clone ID: MRT4577_100416C.1
accccgcgtgcgtcttgttccaactactatacttacgacatttaatttttgattgtatcatgcagacaagntcaagagtggtgtggttagacagtttgttggccatggggttggcaaagtttttcatgctgagcctgttgtgcttcatttcagtgagttccccactttaacaaaaacatctttttattaattgttgtcttgcctcccggctatctcaaggttctggttgcactctgcaccatattatgatgtgatatctgtgccaatgacttcgaaatttgcaagaaacaatgaatggggagggttgatggagaccggccgatttactataggtacacctttccacagcttgcccgtgttctattaacctgtgattaaaattgctgctctttttctattgacctgtgattaaaatttcacactgtggaacctagagataacattttaaaaaagacaggtacattattttgtggttctttcagccatgatctaataacattgcatttggtcactgtcatctttctgcacataagtactagctttttttgtcttgagcatattttttacactgatgccatgcgatgttttttcattggctagtaaacaaggtaaagcatatgaagctatctcacttcatcacccttttctatcattccatgtcatcagagcccatgctaaccatagggagcatcaaccctgtcatgtggtccgatgactggaccgcagtgacagaagacggcagcttgtcagcacagttcgagcacacgatactcattaccgaagatggccctgaaatactgacacagtgttaatggaaggccaaacaacaaagaacaatcgttagtcagctgacaatatcctgcatttctttttggggactaattggtccaacctaaactctgatgcaaaatggcaaacacacattgtaatctcggttcatcggtacaacgatatatgtatagaaattgtactatttttgaagttatatttgagtggtgtgtttttgttggtgcaaaaaaaaaaaaaaaaaagcggcc

SEQ ID NO: 455 - DNA, 331 bp, Zea mays
  Clone ID: MRT4577_100417C.1
tccacacatgcaaacgcgttcccgttcactgccgacaatttggaaatgcaagaagctgtgcctggcagtcgatctccttcaacgtcaaggccggaggcatctccaacaacaccccgacctagttccagaggaccaatctcatgatccaccgcacgtaaacgcagggagagatctagggcgcgctctacgtccgctccgagcgcacgctcaatttctacgagaacgactgcatcgactacgccgccgtgaccgtgctcatcacggggggcaagctcgttacgttcctcctgaacatcaagaagctcatcggcaccctgaagtccaacatttt

SEQ ID NO: 456 - DNA, 559 bp, Zea mays
  Clone ID: MRT4577_100418C.1
gggggggtggggtttttttttttttttttttttttttttttttttttttttttttttttttttttttttttttttttacaaaaggtatcggggtattaaacgggtccggggcaacgcacgggcccccacctaggtcatttatacctatgtcccgagggggggggaggcataaaaatcggccctgaataacacccccccaatctggagaattaaccggcaaaacggtttggggggccatggggaaagcccaaaagatttttgctccaaaattcgacccatcccttttggaacaaattaccccgaaaagaaaagcaaacatggcccccggggggtccagcgctcccatgcaacaaatttttttagcatgcttaaaccggggggttttgggactattcttttacagcgagaatgaaatgggaaaccaatcaaaacttttttgggccgggaggcaattttggatattggggggcgggctctcgtattggccaaaagaaaaagggggactcgggtaaaaagaactggcaccagcgtgcatgggagcccgattagggctataaac

SEQ ID NO: 457 - DNA, 287 bp, Zea mays
  Clone ID: MRT4577_100419C.1
cttctttatggggctttttcggggttttttttgtgtttttttcggggcctacaaaaaaacccatgattttttatacaccactattttccccattacaccatgcgataaaaagatgaacttcttgccaaagacaaaaactttgccagccagatttgacatctcaatttataaagtacaagagacttttaccaccccgacatcgctctttacttaccaaaaacaacctaccgcccgcaaggcttcttcgttgtttgaaacacttacaccccatccccatacttcacgtt

SEQ ID NO: 458 - DNA, 465 bp, Zea mays
  unsure (1)..(465): unsure at all n locations
  Clone ID: MRT4577_10041C.1
agggaagcgnacgtttccagagaccagcacaganncggnccacgcctaccnccggcccncgcccgngctttcagcccncgcgcgcgccccgcaaagggnaacnnngagccangggcacagggggggaggcnccagcagnngcggcngaagaggncacngagaacangnngggnggcaagaaagccacagcggcannngcccnaggcggnccnggaagcggaaaaggcacacagggggccaacanngnggaacacnnngganncacccancncagcgccggagaccnnncgcgcgcagagaccaaancnggcncngagaacggaaccacgaccgagaacgggacaaaggagggaaagaacgccccagcagaggcgaccacaaagccgnngcaggaggcaacgacaaaaaaggaaaacgacaaanccccgagcgacggacccccaaggaaggaggagaaccgcgcag

SEQ ID NO: 459 - DNA, 447 bp, Zea mays
  Clone ID: MRT4577_100420C.1
ggccccgagtccccattccgccaaacgagcacgggagttttttggggggttttctctcccgcacgccagagactccatctccgcccacacaacacaacaaagcacaccacccccatcccaccgaaacggacgctacccctccccgcctcgtctcgctccgctccgctccggcccgttccggctctcgccaccccagccgagatgcggacgccgccgcccccaccgtggcgcgcccggcgcctccattccccgctccccatgctcatgctcttagacgcggcgctggcgacgcggacggaggacgacgacctcgcgagcgacgagcgggcgctcctggcgttccgcgacgccgtgaggcggcgcctgacgcgcaacgcctcgaacgccgcgggggcgcgatcacggacgaagatatcttgcgagaacggacgcgaggacgcgctgcga

SEQ ID NO: 460 - DNA, 512 bp, Zea mays
  Clone ID: MRT4577_100421C.1
ggaaacactaaaacccggaaaaagggcccaggccccccaaaaaaagaaacaagggaacaaatggaaaatatcagggcttttcccgcccggaataccccccaaaccccggggcccaaggggcctaataaagcaaaaaaattatttcaaccctacccttaagggatctaaaaaaaaaacatgtccgctccagaaaaaaaagggccccaaaacaaaaaaaaaccctgctgttagggggaaacaaaaaaaaccaactacgggtttgaaagagaaaaaatttccctcaacgacaatattttggcccggatttaaagaatgcgggaccggttgcttccaagagaaaaaacaacttgttccccgacgaaaagggctctccacaaggaccgaaacaattactaggggccttaaaaaccccctttgggtttttccctttggaggggcccttcgggggagccttggacaaactcttctgaacagaaaaaacagggggtgactttttggggcctttcttggac

SEQ ID NO: 461 - DNA, 677 bp, Zea mays
  unsure (1)..(677): unsure at all n locations
  Clone ID: MRT4577_100422C.1
ccggccgggaacgaacgacttcaacgcctcgcacctcgagcgagtctcagacctgtccaattctcacatccgaatacccgacggtcaattgcccaacatgcaccgcatcgctttctggagtctcttcggcctcggcgcccgattttggcaaatgggtatcgagatgcgccccttcttcaacaagtcctccctgtgggtgtaccccgtctacgcagccggtggtgctagtttcggatattggctccagggcgtcgacgacagacaaaccgacacactgaaggagcgaaagaacatcctccttgagaagcgagcgcgcaaggccgagaaggatgcccaggctgaggcttaagaagggaaatgacaacgggaatgggaatgcaaagacactgagaattacacaccttcgacttcgacaaacaagattgaagggtggagggaatattgtacatttgtgatattttgggaagtagagcgtcaaaatggatgtatgggttgaaacaattacaaccagagtgaattgaggctgtgatgacactgtattattctcatgagtcaatggctccaataggcagccttgagaaatcaccgggcttgcagcagaccagaaacatcacaaacgctacagaatacnagtacagtttcattgctccaaaaagaaaaaaaaaaaacccgcggcc

SEQ ID NO: 462 - DNA, 1103 bp, Zea mays
  Clone ID: MRT4577_100423C.1
tgggtacctcgaggccggccggggcgacccggcaacggatatctcggctctcgcatcgatgaagaacgtagcaaaatgcgatacctggtgtgaattgcagaatcccgcgaaccatcgagtttttgaacgcaagttgcgcccgaagccttctggcggagggcacgtctgcctgggcgtcacgccgtacgtctccaccgctgcaggaactccccccctccccggcggcccgcgcgcccaccaaccatggcagtcgcagccgccgcccaccacctgcccgttgtgccgcaccgccttgtcccggtccggcacaccagtagcagcccgccgccgcatccggcctcccgctgctccgccgcggggaagccgcccgtccagctccacgcggcgcaagcgagggcgtctgggttcgccgcgcgcgtcgcgttcaacccttccgggaactacgacctgtccctctccatgggcgaagacgagaccccgcaggtccagcctccgccgccgcctacccaagggcgcttcgaaatcgttatcaacaacgacaacatccgaacgctcgacctatcgccagtcgaagcagcactcggcgacttgagctccttgacaccagctgcttcaagaaccctgctggaccagaccgtcgggcaccatcagcgagagagtacacgccataacgccgcgatgctcgtccctcaccagatgagcatgcggatgggcgtcgtcttcaacccggaggcgctggagctgttcgtgatgaagaaggtgttcgccgtcgacgcttggctgaagcagcagagccatcccaagccgaggctgaagacggcggacatggcaaggatgctcggcttcggcgtcggagacgagctgttcgatctgatcgagaagtaccctgcccatcgttcgtgataaaaaaaataaacaacaaagctgagaatagggatccgatcccacacacagaagaatcagtcgtctggtcggtgctgctgcgcctgctgctcataccatacccacacccttgaagtatacacacagtagaaactaattaaggcacgtttgctttgctccaggagaccaggagcgctctaaagaaaaaaaaaaaaaaaaaa

SEQ ID NO: 463 - DNA, 511 bp, Zea mays
  Clone ID: MRT4577_100424C.1
ccggccgggccggggtgttcctacctgcttttttttggcctctgctgtcgggtgcggatggatacatgcggcgagggacgggaagatctatctctttctgtcgctccagtccggaggaggagatgacgaggatacctctgatctggttccccgatggaaatctgatagtgccatccgggacagagtcgccgtgacccgctaattagcatgcgaaccctcatgtcccggctgtgggcttgaggagaggcaccatcttctgctgggataaaaaattaccgctatgagttacagatgcgatcttccccaccgctcacatactgcctgtatgagtgccagcttcactccttcctaaaaggaaatgtctgactgaataatagattgatagctattatgctgttcggctgcttatgatatcacctcatatgaattgcaatttctacgaacatctataagatggcatacccggagttattgccctcaacctctgctattgaagtcgtgatgatacaga

SEQ ID NO: 464 - DNA, 1344 bp, Zea mays
  Clone ID: MRT4577_100425C.1
cgcggccgcgtcgacttttttttttttttttttttttttggtgattagcagaaccaaatttatccgatacatgcgaaagggctagcaccggaggaaaggtcacggccttggtctatgctgactgttccatccatagacgacaacatagactcctcgaggtcgtctcatgctagagactctgcggcgctactgagtacaacaggccgagaaggcgacgcgaggaacacgacaacatcagagcgctcctggtctcctggagcaaagcaaacgtgccttagtttctacttcaagggtgtgggtatggtatgagcagcaggcagcagcaccgaccagacgactgattcttctgtgtgtgggatcggatccctattctcagctttgttgtttaattatttttttatcacgaacgatggacagggtacttctcgatcaggtcgaacagctcatctccgacgccgaagccgagcatccttgccatgtccgccgtcttcagcctcggtttgggatggctctgctgcttcagccaagcgtcgacggcgaacaccttcttcatcacgaacagctccagcgcctccgggttgaagacgacgcccatccgcatgctcatctggtgagggacgagcatcgcggcgtatctggcaagctcgccggctctccagtcgagcacgaccgggaaccaagggtacgcggcgtcgagcctcacgaaccacagccgtatgtcggggaactccgacagctcccgcgtgtcgtactcgtcctccctctcgtagctgatggtgaacccgacggtctggtccagcagggttcttgaagcagctggtgtcaaggagctcaagtcgccgagtgctgcttcgactggcgataggtcgagcgttcggatgttgtcgttgttgataacgatttcgaagcgcccttgggtaggcggcggcggaggctggacctgcggggtctcgtcttcgcccatggagagggacaggtcgtagttcccggaagggttgaacgcgacgcgcgcggcgaacccagacgccctcgcttgcgccgcgtggagctggacgggcggcttccccgcggcggagcagcgggaggccggatgcggcggcgggctgctactggtgtgccggaccgggacaaggcggtgcggcacaacgggcaggtggtgggcggcggctgcgactgccatggttggtgggcgcgcgggccgccggggagggggggagttcctgcagcggtggagacgtacggggtcgcgcgctccacgcctgttctatccgtttacctcttaactttttcccctggtggtttagcagaacaacgggcaggtatgttgtcccggccggcctcgag

SEQ ID NO: 465 - DNA, 200 bp, Zea mays
  Clone ID: MRT4577_100426C.1
acgcgtccgccaggcgttcgtccacgcgtccgtccacttgttttaactgaagggttttcatgcaccggggacgggttacccaagatcttgatggtcggcaacagataccatgaccctttgcttaaagcgatggaattcctggtgtccagattattgaaaccttgacaaggccttaaggatctagttggaagcccacatta

SEQ ID NO: 466 - DNA, 407 bp, Zea mays
  Clone ID: MRT4577_100427C.1
ggggtgaaatcagcatctttttaaggatgaagaatcatcctaaatttatcctaatggtcagttaactccttgtcacccatgaccatgagtcacgcctagcaagattgtgttttcccaccagtcagccactgaagccacacctctagcttgtcctacttcccaccactacctagctatctctcgttgacgaaatatcattcaggacaattcaggacaatctctgtctaaaatatcctcatcatagcgacttatgcaaattgctaatagaaaaacgcgtccaaattaaacgagtgtacggtcctgtgcatcgtctattgcacttcaacgtaatttatttaccaactttattgtacatttcaacgccaaaggcaaaaaaaggacagaaagataaattatgggggaaaaaa

SEQ ID NO: 467 - DNA, 280 bp, Zea mays
  Clone ID: MRT4577_100428C.1
gcgatcctcgtgcagccttcttccacctcctgctactcttgtttggactggctcgaagcgacaacacacatccgtagcatacagagtgctagattgcagagcataaagggaacgtctctctcgcacaagtatgagatggtgacatgctcggcaagcacctttgcaagctacatgctctaagctagcgacttgggaaagtgtcttgagcaaagtgattgctacaggcaaggttatgaaggttggtctcagtgagcaaagacagggcgacatatctgtgagg

SEQ ID NO: 468 - DNA, 297 bp, Zea mays
  Clone ID: MRT4577_100429C.1
acgccaaggctggctgcctattgattggacctgtaccatggatgactagaggctcgatattgggtcggggaagctacgtgcacgcgctatggacatgggaacggtagaggacctaatactgcagctgatgaacctaaagacacacattgcgacagaaagaaaggtacagatgaccgataccgagatccagcacatctgcatcaccgccaaggagatcttactctgccagtacagccttctagagctggtggcccccatcaacgtctgcggtgacatccactggcagttctcggacct

SEQ ID NO: 469 - DNA, 488 bp, Zea mays
  Clone ID: MRT4577_10042C.1
aggattgtccaccaaaaattctatgtgagcagcatttgcccagtatgttcggcgtcgatgcctccaagcaagaacatgctcatagtgctacattcttgttcactatgaaactttggcgcgctctctggacgacctttcctcttcggcatgtctcagggtctgctcgaatgcttgcagcgaattggaggtgaagctttctagggcttggacgacacggtgcaagctactctgcaaactgcttgcgtcaaggagatgttcctggtatgtttgcgcgcttggaagccggctgtgccgacctggtatcagggccaacttcctgttcagcacatctgcctccttgttgatctccacagttttcttttccagtattttgttccatttttccctttcccgtgtagcgatcgtctgctccatttgctccacattctgtttctccaacagcttgcgcacactggacacaagagcttgcatcgaggtaaccacttcct

SEQ ID NO: 470 - DNA, 694 bp, Zea mays
  Clone ID: MRT4577_100430C.1
gccggaaaaaaaaaaaaaaaaaaaaaaaaaaaaaaaaaaaaaaaaaaaaaaaaaaaaaaaaaaaaaaaaaaaaaaaaaaaaaaaaaaaggaaaaggcttcttttccgggttttcagccaaccggattcaggccacccccattccccttgaccccgaaaaacccgacccggtggggcccaaggccggaaaaaagcccggggaaaaaaaaccgggggccggggaaaaggggggaaaaaccaccggaggtaaaaagcccaagtccgaaaagggcctggcggccttaaaatccttcggcaaggggggcgggggaaaaaaggggaaaaaaaaggccaaaaaaaggggggggacctacaaaatttacatttttaagggcctgaagcaggggccccccgacattgggattttcttcaagggcatggccattatgaacttctttattaacgacatttttcaaaagcttgccgggggggcccccaaatttgggggggacaaaaaggagcccaccattaccttccgggggaaccaaaccttcgggggccttggtcttccagggggggttggcaaaaatgccggtttcgggggaaccaagggcggccccaagttccccaacaattggaccgcctggaggggccacggatttgttagggctcccctttttacaagggttttttggcggggcctttacccctccccg

SEQ ID NO: 471 - DNA, 443 bp, Zea mays
  Clone ID: MRT4577_100431C.1
ctgtttggagaccctgggcaaacaacatcatatcttctccctccgccggtggagctggtgcagagactagggatgagaagcacagcaggagcagttctgagggctctcctcctcatccatatatgcaaagccatccagggcaatctcacctcaggctccgctgaaaaaggattagctcatctcaagagaaaagaggatgactaccagcttactgcaataaccacactaactactaccaggaaccaagcgctgatggcttccctgcaaagtagatgcatgtttcgttcgttgcagtcttttaagctctctttaagttgcattgtgtttttgttgcgtaaagttttaaaaaatatggctaagtatccattagggtgttcaaataacttttattgttttttaaaatattctaggcttcaatttaatcattggaagcttcttgatgt

SEQ ID NO: 472 - DNA, 494 bp, Zea mays
  Clone ID: MRT4577_100432C.1
actgttcacacaatcgagattaacctagacttgctgcaaggaacagtctaatacaacaaagatcttacgagtctcattagtaaacggtacgcgctacagtaggcgcggaaccgtacaaaccacatgcggttggcgcaaagcatgcttcagggagttgaaaccacatacttgtcaatagcccataaacaccaacacagagtgctaaaaacaaaaacacgtgttcacgctgtatgttcataagtgaagctgctgtttttgtttgaaacagtgaacaatcatacagacaacttactccaactttatcaagaaatcctagatctctgatgggcttaaaactttgaactcacggcctagtggaataagtacgattttaatgtcgatgcactaaattggcccctaatattcctttttgacagtgaaaattaccgagtggatggcatcatcaagctccatatactgtgtgtatgagcttctaaaaaatgtctttgaatttg

SEQ ID NO: 473 - DNA, 297 bp, Zea mays
  Clone ID: MRT4577_100433C.1
ttttttttataattgtaaagcgccactaatttaacgcaagcatctgagacttttttttataattgtaaagcgccactaatttaacgcaagcatctgagacttagtactccccactagttacccaataaactcatgctaatcaccgcagcggatccatgctcacagcagggcacctcatctggttaacgttgcgatgatgagccgtgagcccaacaacatgataacaagattagtcaccgctggcacaacccctgcagacgcagtggacacattctatcacttgttcctccctcagat

SEQ ID NO: 474 - DNA, 233 bp, Zea mays
  Clone ID: MRT4577_100434C.1
gccgatgatcttcgagaccctctccgattagaactcggcgaaaaacaccgtcccctggggcctcatcatcgcgctgccgcacgcccgccaccatcgattttgtccacaacccgaaggcctacaacaagccctgccgcccctagatctcttcttactactccgccggctccgaccacagccaccatcagcaccacggtcgccaaccgccgttgccacggcgccacaaactgcac

SEQ ID NO: 475 - DNA, 303 bp, Zea mays
  Clone ID: MRT4577_100435C.1
ggaagcactatgtttcatttcttttcgcctcactgctaaaagcacacgggccagaaaggccttgataaacccgtttgatgtcgtccacctgcaaagactgcagcactgtgaggattgccgggtacaggaattgcggccactgctttatcgaaaagcaactggacagatgtcgcgcgtggcggatagaaggacagctgcctaagcgtctggcggtgcttgtacctactccaggggagctgaacagccacagccgaccaggtgcgccaccctgtcgagtagcaccagagcgctgccgcgcacctt

SEQ ID NO: 476 - DNA, 323 bp, Zea mays
  Clone ID: MRT4577_100436C.1
gggccacaaatcaacattaacatttttgaaggggatgacagagatcccctaggatagggaattaattccaaaagtttgaggcttctgactaaaaaaaaatacattgtttggttttttgatcatccaaaaaaaaaagaaaattccacccaccggtttttttattcgggggatactttgatagtccttgaaaaaaaaagaggttacaaatagggattattttttttatttatgcctgttagtcaattggtttaaatgcaggcgatctctttttccaaacccattggacttgcctatggtgttctttgcatacggccaatgtcttt

SEQ ID NO: 477 - DNA, 318 bp, Zea mays
  Clone ID: MRT4577_100437C.1
tagaaaaaaaaaaaaaaaaaaaaaaatataaaaaaaaaaaaaaaaaaaaaaaaaaaaaagcaaaatttaaaaaacaaaaaaggcctacctacttcatccatccaaccttcatctaccatccttccaacatcaactctctcattttaccccacctaaatcacaattctttccccctccaattcccaacactcactattcttaaaaccctatacttacccaacttaatcatcttccacaacatacacctttctccaccttaccaaatttctaacagcccctacttcatctcccttactaactacttctccactctattct

SEQ ID NO: 478 - DNA, 485 bp, Zea mays
  Clone ID: MRT4577_100438C.1
attcgttgatattttgagtaccccctctgtttgttttgacaaggtacctgtacatttggagattccagttttgttttagcaataattataacacaatacatgacaataattttgtgtggttacaataatttactaatggtaaacatgagatattggcaagtttaataaagccttactgtttctttgttatggagtaatgttgtaatggtttttctgttttacaaattttagctattttgtacaaattttcacaaatactttaattattttgtaccaatgtaaaggcacctgaacatgtattggtcaagtcgactctattgaatagaattttgaaagaaagattcttgatcacccaagttaaaagagaaacttagccttgcctttcagattaaactagaggagacatgtatgaaaatggctggaaggactacaagatgcaattaatcatttacatatttggaaagtagtccatcctcatagctatg

SEQ ID NO: 479 - DNA, 287 bp, Zea mays
  Clone ID: MRT4577_100439C.1
aatttaaaatactaagcttggaattgtgagggaattcaaataagaaattataaaagaaaaagaaaaaagagaaagaaacacctttgggcccaaattccgcgcttggaccactcactccacttccttccactccgcacggcccaaccaaccgcaaccccccattgctctctgcccgcggggccccaccgctcagctcgcgcgcaactgtgcgtggggtcagccgctgacgacttgggcccactagccaactcatttgatgtctcctcgtctgcgccacgttacaccac

SEQ ID NO: 480 - DNA, 257 bp, Zea mays
  Clone ID: MRT4577_10043C.1
gggatacagcggttcgagcttcgaaaacccaagggcgagagtaactggactgttgcccagacccaaccccttctacttccagcaaaactccaaacaatgagggggattcctccgcgagcccatggttgatcgcttcatttccaaggtctttcctgactttagcgctcacgctgacgcctccaacttctaagggctcccctctatagattatttccggcctgtctcagtttccgacaccatgttcttctagcacttct

SEQ ID NO: 481 - DNA, 264 bp, Zea mays
  Clone ID: MRT4577_100440C.1
cccagcaccggtcccgaaccgcagtgtcggggtagacctacgcgtccggattataaatccaaagtgtctactagcaacaagctacctctggggtgtgcaggcagccatcatgtcacaggataatcaccaccacttctttaaccaccacaagaatgacgaggagcatcctgctggatagtactggtactcctagaccgatgtggtcaccgccacctgcgagggcgagtaccagaggtacacgaatgaggagaaagagcacaagca

SEQ ID NO: 482 - DNA, 512 bp, Zea mays
  Clone ID: MRT4577_100441C.1
gcgaccaagattttgccccttcttatgctcctcgctctttctacatgcgttgctaacgcgactatcttccctcattgctcacatgctcccatctgcttgccttcttcccccgtaccttccatacattatcgccaccgtctgccaaaaccccggtttgcagccgtgtgcgcctgctgcaatgcttggcacacacagcaacatgccgccgatcgtaccttgctcgctttaacattaacctggcccatttttgcagctgccactaggtgcagaccttcaacccactagctttgacaaaccctacagctacctgccaacaaccaattatctgtggcgccctcttctaccttcgtctcatgagcaacagttcattccataaaaccaactgattacactggacgctgctgattatttgcaaaaacatctattaccttcttaccagaatagactactggctactctcatctacagcatccaagtttcatttacaccaatcttgccgacactgaaacctc

SEQ ID NO: 483 - DNA, 350 bp, Zea mays
  Clone ID: MRT4577_100442C.1
atattgatcattaaaaaacacaccaagcgaagcggactagcaacaacctaacaacagagggtaccaacatattagccctccttgaacttgtagaactgttctggagcgcaacacatgggtcgattattccacaatggttacttacttctactaccatcattgcacaaattctcccagcagttacttccatgggctacgtacatgcagccgcgcaaggcttcaggctacaactagcgctcgcggtgagcgtctgacaacaaccaattgtccaattgcaacaacaatccttggcacatgtaaacctacaaaccatcgcaacgcaacagcgacgacagtttctgccatcactg

SEQ ID NO: 484 - DNA, 459 bp, Zea mays
  Clone ID: MRT4577_100443C.1
atgggcaagaataacaagcgcaagcgtgaaccgactcctccatcggaggacttcggtgattcggagtactcagaggaggagttctcctctgagtccgaggggtctccggctcccatccctctgcgtgagtcgtctgacgattcagacgactcccaggggcttgcggcggaggtctggacttacatccgggccgtcgagcgctccgggctcgagggctcggatgagtcggagtactcctcggacgaggaggactcgtccgaggaggacggcggcggcgatggcggcggcgacgactacgacgacgacggaggcggtggcggcaatgacagtgacggcggcgatgacagtgacggcggcggcaggggcggcagcagcggcagcaaggatggcgacggcggcagcagcaggggcggcagcggcggcggcggcagcaagggcagcaacaaggccagtggctaa

SEQ ID NO: 485 - DNA, 416 bp, Zea mays
  Clone ID: MRT4577_100444C.1
attcggctcgaggcgcaacaaattttcttctcaagcgaagtcctgaccttcacattgcgggggtgctcctaacacattggcgagggggcttaatctgatgggggataaaacacacgttcaagatcgtattgaaggtgcacacttttttagccctcagcatgacatgccacttttggaaagatgtgacactcatgacactccaacagacctcgatgttgaatagctggatgttgtgaacaagatcaaaaggacaccactggtagtggggcactgacctggctttgaagtgaataggatgttcttgcaatacactcaattgggactctttgatcttgatcttgttttggatactcataagatcgagcccgcctgcaccaaatttaaaatgcgtacgggtccttagaaaatggaagctt

SEQ ID NO: 486 - DNA, 519 bp, Zea mays
  Clone ID: MRT4577_100445C.1
ggtaccaggcccccttttggggtttttttttttttttttttttttttttttaaaaccagcccgaggaaacggttccaaacgacgacgggggaaaatatttttttggttggcagaagaaggacacattagccctagttaacccggcctgggggaaaattaacggtgggttttgggtggcgggggggggggggaactcccgggggtaagaaccgccacgccgacacggaaaccagttcgccgggctgccagaaaaggaaaagcgcgccgccgcccttttggacgcgaaacccaataagggccatccgttggagaagggcctgggccgggaactggggaaacgggcgggcctgaaccggaacaaaccccgccgacgcaagcacggcccgccacggaaggggggggggttggtccacggccactgccgggcggggggggaaaattacgcgccgttcaaggtggggctgaaccataaagggttggatcttgccgaccgcttgggggtccggccccccaacgggg

SEQ ID NO: 487 - DNA, 417 bp, Zea mays
  Clone ID: MRT4577_100446C.1
ggaagtcacaaacctctcagggggggttaataactttttttatcctttaaaaaaaaaaaaatctaggcaagggcccagttttgtctcgctaaaaactcgaaccccccgccggattccccggggccccggaacgggctctggggcatcctcgtaaggttccccctcggccccaggcgccccagggacggcccgacctccgacatggggggccgaaactccggttcaggctgaacacaaagggcgagggcttcggcaaagcgggaaagggatttggacgggaccagcccttgcaggggggggccgaccatcgggcccagcgcgtcaatgtcgggcacctgcggagaaccccatgggaccagggactgctcaggccgggggcgggccctgtcaaacggtttccggccagccaaaaccttt

SEQ ID NO: 488 - DNA, 214 bp, Zea mays
  Clone ID: MRT4577_100447C.1
ctcttttttttttttttttttaaattcggggggttttttttagttattttgggcgataaaaagaggacaaggatcaagccaagttaagacaacgagggggaatagatcctaccaaacagaaatacgagaccagaacctgggccacagaaaatcggtcaccctgatccaaggcaacatcaacacaaagcgcccccccggcaggggcaaacaccgg

SEQ ID NO: 489 - DNA, 608 bp, Zea mays
  Clone ID: MRT4577_100448C.1
tggatacgatatggaagttccacgtgtccgacttccgccccctgtacctctactccgatgaccgacctcactcctcgacgatatgtcacctcgacctgtctatgccacaacgtacgccgctgggggatgcccagacccaacgggctggactgcatcgcggccgcgctctaagcacgaccctgcctacgggacgccagagaacgcaccgtcctctcgtcacgtcttgaacccatccctgagaaatctgctggcggtgcgctgcgtaccaacatctgttgttaatctggatatatatcggacgcgtgagatactatccatcggtgctcaagtcagtgaacgtgaggctgctaaaaaggttctcttctcatacatctctgctaatgacgtgaaccttgggacctatgatgagaggtactgattctgccgagagtcccacttgtgatgtgcacctgaaagaatcttaccctgaaagattccgacttacctggcaacgctccaacggcctgaacttatcttgcccccaattgggcgtatagcatttgagcgttccagaactcaacttctaggagatcgttacgtaccggcgatttatggtcgctatgaactgg

SEQ ID NO: 490 - DNA, 331 bp, Zea mays
  Clone ID: MRT4577_100449C.1
gcagcaactatgtttcaatgcttttgcaattgcaaattgatgttcttcatatacagaaaccaattgttttttcctataccagcaaggcaccaacacaatggctggattctccaaaccatttgagagaacaaaaccaaacatttgagcagccagcaatgacgtaccggcgggggacgatctttcccggatcggtctttaccgccggcagtatatgtatcctaaagacttaaactttccctcctttccaaatggcgaattaaagaacaacaaaaaaaaatccgatgtcagctttgtcggggtcaggcggtcaacttatggcccgaccctgacc

SEQ ID NO: 491 - DNA, 778 bp, Zea mays
  Clone ID: MRT4577_10044C.1
actctcgcaccatcagcaccaaccaccgtcccccccgagcccctcaccgccactagctgtgtgcttagtggctaacctgcagtgtgtccctcccgttccgctcgccaccaccacacaccgcacgtacgtccacttgcttcttcttcttcctccccgatggcggggacgggggtgttcgcggacgtgctggacggggaggtctacaagtactacgccgacggggagtggcgcgcgtccgcctccggcaagacggtcgccatcgtcaaccccaccacccgccagacgcagtacagggtgcaagcatgtacacaggaggaggtgaacaaggtgatggacgccgccaaggtggcgcagaaggcgtgggcgcggactccgctgtggaagcgcgcggagctcctccacaaggcggcggccatcctcaaggagcacaagaccccgatcgccgagtgtctggtcaaggagatcgccaagccggccaaggatgccgtttctgaggtggtgcgatccggcgatttggtgtcatacacggccgaggagggtgtccggatactgggggagggcaagctgctggtatccgatagcttccccggtaatgagcgcaacaagtactgtttgagctccaggtacctcttgggagtagttttggcaatcccaccatttaactatcctggccaacctggcggggttctaagattggcccagcgctaattgctggcaattctcttgtgctcagcctcgacttcagggcgcggtggcagccctccatatggtacactgc

SEQ ID NO: 492 - DNA, 325 bp, Zea mays
  Clone ID: MRT4577_100450C.1
gactagttctaagatcccccgccactgtagaccggccagcagagcctctcccagccgcgtccgaccctcggagtagaccctgcgtgcctcagtgaagctccccgagcaaggaatcaaactttgcctcgccggagaagccagtccacggtcgtcggacttcacccgaccgctagtgaacgtagaccgagctccacggtgagttgttcttcaattccttgcacgtgtcgactcatcaacaccccgtgaaggtccccgtgcccttggattgacctatgccgtcgtggttaggccagagcactcaccaccgacgagttcacccacctgc

SEQ ID NO: 493 - DNA, 200 bp, Zea mays
  Clone ID: MRT4577_100451C.1
cctccctccctcaaacaaattattaggaaaagtcccgcccttttcctccgacatccacaaagggggaagggaaaacaccttcattcaacccgccggaataattggctccgtttccggtcccggcaacaacaacggcggccttcacccaagcccaatccttcttctcccctgttgccccggttaacaacccaaacttcccc

SEQ ID NO: 494 - DNA, 443 bp, Zea mays
  Clone ID: MRT4577_100452C.1
ccatgtcgttcctcgagacggcggtctcccaaaatcctaccaaccatacttgttgcatcgccttctcttccctcttaaatctactctcctcctacttgcttgctaccaccatcgcgacaatgggtatcggtggtgctgttttgaagtttggctctacagcgctgtatgcgcttgagttctgctgtgctgcggttatcctcggtatttacagctacttcctcgctgtacaggcggatcgcgatgtcaacattccggtttggcaacacgctgtcactggtcttgctggcgcgactgttttgtacacaatctttgctgtcttgttgacttgctgccttggcggaaagaaaatctttgctttcctcggcatactactcgacatcctttgctgaggtgacatgatcgccgtacacgaactgacccgagacggcgaatccaaatgctct

SEQ ID NO: 495 - DNA, 251 bp, Zea mays
  Clone ID: MRT4577_100453C.1
gagaaaaataataaaaaatatattgattatgtacaaagaaaaaacatagtgagtatgaaggagcaccattgaacaagaacaaaatgaaaagtgaaaactaaaagtatggcaccatccaacgatggaaatgcctgcaaggaaagggcttcatgcaaagaaaactggaaagtatggacaaaaatgtggagatagctgatgaagagaaggtaaacaacacaatgcggttagaacactggacaatggaataaaaa

SEQ ID NO: 496 - DNA, 369 bp, Zea mays
  Clone ID: MRT4577_100454C.1
cgagtacaagcttttttttttttttttttttttttttttttgtttttttttttttttttttttttttttttatgttattatactaatttttttcattgtaataatttaaaaacctaccatttaccacaaaattcttacccaaaacatacgcaagcaaagtgacccccaaaaacttacaaccaacacgacaacaaaaaaaaaacaaaacaaaaaacaccaccaaactaaagcaacaaaaaaaccaacacccccttacccaaaagacccgccccggcggcccctaaaaggcaaaatccaacacactggcagcccccaccaatggatccgaacaacccaccaagctgggccaaaaaaaggaaaaaacccccc

SEQ ID NO: 497 - DNA, 355 bp, Zea mays
  Clone ID: MRT4577_100455C.1
ctcgaggcggcgggcccattcccatctcgtcttgtgtcgttcggagcgggcagcagcacacagccccatcccaatcctagtcgatcttcttcccctcctcaagaaaagaagctgaaccatggaggaagagacagtcagatgcctacgccacctcccaagaaacggatggacgaactagccactgactgttcctgcccgttctgccaccaccgaagcaaggctgagtgacaaaatgacataaataaatatgattgataaaacatctagaaagatctgtcaggaaaacttactcacaaatgtcagtgccactcactgactctattgatacatatagagaatggatggatgggtgaga

SEQ ID NO: 498 - DNA, 460 bp, Zea mays
  Clone ID: MRT4577_100456C.1
ccgcactgcacgcgagtcctccactccgaccgcacgatggctgcgctgcgccttgcctccttcaccctccgccccgccgctgccgcgtcctccgcctcctccggcgcgaccccagccgtgttcggctccgactgcttcgcccgcgcggcgcgggggctgccctccctccgcctggccccgccccgccgccgcggatgacctcgccaggccccacgccacggccgaggccgcggcggggagctacgcgtccgcgctgacgaaggtggccgtcaaggaacggcaccctttagcagacggtctccgacctgaagaagctgcagaaggagttcgcggacgaggccagcaccgagaccttcgacaaccccacccgcccgcgcgaggacgaaagccgaggctcatggcacgagatcgccagctcgtccgagctacagccgcaccaccgcaactgcctcaacgccgt

SEQ ID NO: 499 - DNA, 612 bp, Zea mays
  Clone ID: MRT4577_100457C.1
agttcagtccgtgcaggtgctgtgcgggcagacgttgaaagactcgacagacgaatgacaactgcactctcatgcctaaagaaagcctacactctacgtgctgtgctacagaaaccggagcaggctctagaggtggcatgatccgacgtgatctgatgagtgcgtggaagctgcgtgcgctgcggctcccggccggctggctggccgaatccggcacggcagcggcggcgtcagcctgacggatgtccatgtcgcagaagcatgggctgaggttgctcgagtttctgcatctactctactatgcatcttccgctcgcaaaatgctgtagcgtccagcacgaattcatcgatccacgccaggtttctgctcctgatcgatcgtgctgtctttttgaccggcaatttggcaacggccggacggtatgattacttgctacctgactttcttgtcagtgttgccgtgtcagtagcctgttttcgcacaatcggtctttgacagtagttatgctgatgatgggggagatttcatcatttcttgtcaatgagattggtgctctatacgaagtcgcattttttttgccaaaaaaaaaaaaaaaaaaaaaaaaaaaaaaa

SEQ ID NO: 500 - DNA, 750 bp, Zea mays
  Clone ID: MRT4577_100458C.1
cttgtctaaccgtgacaacaatataagatatgttgctcttaacatgcttatgagggccattacagttgatgcactagcagtgcagagacacagaacaacaatattagagtgtgtaaaggatgccgatgcctccattcgcaaaagggctcttgaacttgtttatttgttagtcaatgatacaaatgtaaagcctttgactaaagagctcatcgattacttaaacatagcggatccagattttataggagatctcacagtaaatatatgctctatagttgaaaagttttctcaagagaagttatggtaccttgaccagatgttcaatgttttatctctggctggaaatcatgtgaaggatgacatatgtcatgcccttattgttgtactaagtaatacatcagagcttcaaggatattcagtgaggtcattgtataaggccttacaagaatatggtaaacagggaagtttactaagagtagctgtttggtgcattggtgaatatggtgaaatgctggtgaacaatgttggcatgctggatggggaggagccacttaaggtaacagaatcagatgctgtggatgctgtagaggtcgctcttaaccgctactcagcagatatgacaactggagcaatgtgtctggttgctcttctgaaactctcctgacgatttcctttgacatcagagaggataaaacaaatagttgcccagaataaaaggactgttgtcctttgactacagcaaagatcaat

SEQ ID NO: 501 - DNA, 1736 bp, Zea mays
  Clone ID: MRT4577_100459C.1
agtgtggattttgcactgacgttcttatgcactcttgttctggagctgctgtactacccaaagctgtctttaccaggattcttgatttgtgggttcctcttgtggatcgccagcagggagctgatccctgcaggatatgtggagcatggaactgaagatatctcagagtcagtttttgaagcaatcatgggtccagttaggcatatcttgagtgagcggaagtcgagaaagattgctgtgtttctattgatcaatacagcctacatgtttgtggaatttggctgtgggtttgtgagtgatagtcttgggctgatctctgatgcttgccatatgttgtttgattgtgctgcactggcaattggtctctatgcgtcctacattgcgagattgcctgcaaatgggatgtacaactttggaaggggcaggtttgaggttctgtcagggtatgtcaatgcagtgttcttggttcttgttggtgtgctgattgtgttggagtcgtttgagaggattcttgagcctagggaaatatcaactagtagtcttttgtcagtttcgataggtggacttgttgtaaacataatcggattggtgttctttcatgaggagcaccaccatgctcatggtggtacctgttctcactcacattctcattcacatcatggtcatgaacatcatcaacaccatggccatgaagagcacaaacatcataatcatgatcatcacggtgcgaataatgtgaaggcatgttgtgatcatcatggagatgacaaccatcgccatgatcaccatgggaatagtaaaagtgagggcattcataacaatatcatggataacacctgcaaggagaagcatagccatagtcatagtcatagccatggccatgagcatcatcactatgaacattcggaacattgccatcagagcagagagcattctcatcaaaattgcaacaatattactgttgagcaacagcttcttgacattcctcttagcaatatatcttctcatgacacagaaagtcactcttcaaaagaaggattgagaccatcagattctggaaacagtaataagccaggacaccggcaccacattgatcacaacatggaaggaatcttcttgcatgtcctagctgacacaatgggaagcgttggtgttgtaatatcgaccttactgatcaagtacaagggatggcttatagccgatcccatatgctcagtattcatttcggtgatgattgtatcttctgttattccgttgttaaggaattctgctgaaattctgttgcagagagccccgaggagccatgaaaaggatttggctgtagctttggatgatattatgaagattgaaggtgtccttggagtcaacaatttccatgtatggaacttaactaatactgacattgtaagcacttttcacctacaggtatcagcagaagctgacaagtcttccataagaaataaagcttcacaaatatttcatgaagctggggttcaagatcttactatcgagatcgagtgtgttaaaaggtagtaagaattgtatagtatgataggatttgacatagagaagattttttggcactcaatacaggagccatctgtttcaactttcaaatgtatcatggaagaaattgttttttctaaattttttcaaatgtatcaattttgaatccaaatgatgttaagtgcaacagcaaatcatagccccatggtgccacgcttctgttattgtgc

SEQ ID NO: 502 - DNA, 745 bp, Zea mays
  unsure (1)..(745): unsure at all n locations
  Clone ID: MRT4577_10045C.1
gtaccctccaggctgttccgggaggagcactacttcccgacgctgctggacatggcggaccccggcggcgtggcgcggtacacgctgacgcgcgtcaactggacgggcagcgtcgcgggccacccgcacacgtacgccgcgccggaggtctcgccgaggctcgtcgcagacctccgcgcctccaaccacacccacccccacatgttcgcgcgcaagttcgcgcccgactgcctcggcccgctcctcgccatcgccgacaccgtcatcttcaaggactgatggcgggcggctccatccaggtactacttactagttactactcggcagcagagggctggggctagtcaaggccgccgacgacggacggcgcggcagcggaagcagtgctctcccgtttcgaccccctccccctgcagcgtcatgttcatcagctccagtgcttctgtgtagtagattaggggtgcagagaagaagaggaggacgacgacgacagcacgcggcgacctaatgcgaagcggcaggttgtggttgtggttgcgtgcgtggacgcgtcctcgatcgttcgtcgtccatccgggaaaaaaaagaagaaagaaaaaatatcgtgtgtgtgtgttttgcctagcgtagccagccagagaaggttgtacagcagcgatgggtttgcctggtagtaatgggtatggccactgctactactgcatgtaataaatcctagtattggacagctagccgncgctcctgc

SEQ ID NO: 503 - DNA, 530 bp, Zea mays
  Clone ID: MRT4577_100460C.1
tatgctatctcgctagatgagagttccagctcctcctgttcccgagcagctctccaacagctaatagcgaccctcctcggtcccgctcagcctcatcacctcctctcgcacgacggccgacttccgcccgcctccggccgtcgcccgctctgtctccgtctccgtcgatgcgccggcggctcgccacggagccgtctgagttgaatgggatatcccacaagctgcgccatggcgttagtgtactccggcataaggatagaacatctggaaccctgtctacgacttataagacaataccattacgttcagcatgggatactagagctactattaacatttcttaatttacgacaccaggaatgcagagctaccgctcaggaacctcaccactcgaaatcacacagacgacaacttatgcggtcacaataaagatgtcctctccgattgacttctccgtatgaaaacgtcatatcgtctcctagttccgtgaaaagaacattaaggtcttcaacacactcattgagtgaaag

SEQ ID NO: 504 - DNA, 497 bp, Zea mays
  Clone ID: MRT4577_100461C.1
gccaccgcgtccgcgtacgccagcctcggcagcgccttcagcgccttcttcttcagccccttgctggcggcggtcgcggtcgcggtcgtggtcgtggcggccgtgctcgcgccggtggcctggtggtgcgcgtggtggcggtgcccgctgccggcgtggctcgagggggaagccggggcgccgtcgtcccccgcgcccgcgcccctgttgcgccgggatcgggcgcagcgggcgacggcggcgagccccacgacgcagatcagcgcgcagagcagcgcggtgaggatcaccaccacatcggagttgacggccgcgggcgggtcggcgggcgggatgcccgggatgcgtttggggttcgggtcggggatggcgccgccgctgtcgctgctgctctggaggaggcgccgcgagtacgacagccggagcatcgccggcgtcggtcgcgcgccggtgggtggtggggcgtttacgttaaaaaaatggagcggcgagaggac

SEQ ID NO: 505 - DNA, 341 bp, Zea mays
  Clone ID: MRT4577_100462C.1
ggggggggccgataagaactggggcccccccggtgctgaggattgcggacgaggccggccccagcgacccagggaggcagacccgccagcccggctgacagctgattcagctcacaggctcggcgaacgccttggcagccacctatctcctccgcatcccaaggagctgatagcactcgtgtacaggcatgtgcaccaggctggggaatgctgtaggtgcatcagctgtttgcgctagttgagatgccctgtgagcattagcacaaggagaagatgcaccctttgaagacattcttccagctgctcacgaagcaagtgtgctccccccatggcgatgactg

SEQ ID NO: 506 - DNA, 174 bp, Zea mays
  unsure (1)..(174): unsure at all n locations
  Clone ID: MRT4577_100463C.1
taagctgaccaccaacctcaagcacatcgaggagaggaggagtggccatggcttcgtcggtggccgccgcgcggagcacattcctgggcacccgcctggnnnacccggcgccgcagaacgggcnntcgtggcnnngtttgggttcggcggcggaaagccaagntgccgtcccga

SEQ ID NO: 507 - DNA, 272 bp, Zea mays
  Clone ID: MRT4577_100464C.1
aaaacctataattaaatataaaacaaaaactacttaaataaaatgataaaaatcctacttataggcaaaaggaaaaataataggtcgggtctttcctaaccttaaatttttttattcttttatctactttcaatctgcctgcccctctatatttaccaatcttccttactctttcatccgccattatatttctaatttcgtttctcctaattctaatttacttgccttatcttttacatcttcacaacttttaaccctttcccatttcccat

SEQ ID NO: 508 - DNA, 129 bp, Zea mays
  Clone ID: MRT4577_100465C.1
gctacagagggcttcaatgtcacaggctgcatttgagtgtctaagcgcggaatgctgtcaaacacatgagcacgacgcagctatgtctcttcctgctacgattgctgttgggggcgctggaggcaacaa

SEQ ID NO: 509 - DNA, 447 bp, Zea mays
  Clone ID: MRT4577_100466C.1
aaaaaacaaattcaggagcagcctttaatttacccatatttaaggggcccaaaactggaatatgcaatgcaacaaacaattggggccggagcaactactgggtgcccatccatgagggagctttgcccccgggctagtttctggcactagggcacactgatcaaacacggtttttgccaaaacagggaatactggggcacactttgggcatatgcatgcctgccgatatacatagttccccacaggggcccgaacctacctacatttttttaaggactcacgtacgtccaccaggaacaatctttgaatgcccccccccgcccttgtccggggggctggggcggtctcccgcgggaggcaggcgcccctaatgtttggggccggttggctttcccccccctggtgatccctttgcggccgttggcccccccgttggcgtttgggccg

SEQ ID NO: 510 - DNA, 245 bp, Zea mays
  Clone ID: MRT4577_100467C.1
gattataacaactcgctgtattgcggatagaggctgaatgaggacaaatcagctttagatagagttcaattgagatccatcgcccttgtcaaaaagaaaaagagacagtgatgacgaatggctttcttaccctagtggtggacaacgatcgcgagagtgactctgcaactgtgaatgactaaatacagagaacggcatgcttttactctactgctcagagtaatggagcggcgagaaagtttaaa

SEQ ID NO: 511 - DNA, 132 bp, Zea mays
  Clone ID: MRT4577_100468C.1
ataccttcaaatctgcatgcatcaagaccgcgtatatatctgttaagggccgagcctcttcttatgccccattctatggtacacatatttttctcacaggcccgtaagctgattgagactttgagaatgacc

SEQ ID NO: 512 - DNA, 534 bp, Zea mays
  unsure (1)..(534): unsure at all n locations
  Clone ID: MRT4577_100469C.1
gacgtcgggaacgtgtcgaactcctcgtccagctcgtccgggtgcgccgcctccgcccacgacatcttggtgtccatgtgcggcgggtggcgcggccggcgccggtagttccagagcccgatgaggaacatgtagaggaacacggtggggaggatcagctccgggtaccacaccaggatgagcagcagcacgtgcaccagcgccgtcgtcgccacgttcctccagcggcacacgtcgccgaaccaccgcgcggcgccggcgacgcccgagaagagcgacacggcgcggaagaagttggccttgctccgccgcatgctccacatgtgcgactccacgtccagcatgtactccaccacctcccggtgcagcggcggctccgcgcgccccagccgcgccgccacgatgcccatcgcctggtaccgcagcgcgtccagctgcgtcaccgtgnaacgggtgcaggtagtgcatccgggggagcatgcgctgcgtgtacaggtgcaccatgttcatgagcgacgggcangtgaagcgcac

SEQ ID NO: 513 - DNA, 347 bp, Zea mays
  Clone ID: MRT4577_10046C.1
gacacacatacgcgcacgcacgtgccaaaatccacttaacgcttaactgcggtctgaccgcaagtggattaaacacaagctgtgacagcacctgaagcggatggcgcagcaatagggtatacagtagctatggctcttgacctgcatatcgataccggttcccgcttggattaacatgccacgggatgactgtatggaaataacacctgtatgccgcctccgatgtaaaacatgtggacaaggtgttgcttctgaacaccattttggctcaacactacacatttgatgagtgtcataaaaaccaccaggccacctgcaactagtacaagagcatgaaggtgggagtc

SEQ ID NO: 514 - DNA, 406 bp, Zea mays
  Clone ID: MRT4577_100470C.1
gggggcaaaaaaaggagtaaggggggacccaaagagggggggcccttcggccatacatggttttaaaaaaaatccttataaagggaaaaagaaccccggcccaggaggggtttccttttaaaactaaggaacccccccgggggccaattacccaaggggctgggggggtcaaaaaattccaaaacgggggttaaggggaaaaaaatacaattgggccatgacccccatttaaaaaaaaaaaccccccaccggccttataacccccttttccaggggtttttaaaaaaaccaatttttaccagggtccctaaacaccctttttgggtggggtttttctaaaaatgggacaaaaagggggaaaaacattgggggggggttcctaaaaaaaaaagggggaaaactttta

SEQ ID NO: 515 - DNA, 188 bp, Zea mays
  unsure (1)..(188): unsure at all n locations
  Clone ID: MRT4577_100471C.1
gaaaataatggcataagcgagctcggcgttcggctcaagatcgagcgaatcggctcgaagccacgcacgccccggatcgaaggatggcacgcagacgcggangagtctcttcgggcttggacggacccagaagacattccgccccaagaagagcggtccatcacgcaaaccttagggaacttttaagt

SEQ ID NO: 516 - DNA, 705 bp, Zea mays
  Clone ID: MRT4577_100472C.1
atgacggatgtgatgatagcagctcgagctacaacaccgacctctcggaggaacaagagccggagggatgggttgctcgacccatcactcgtgacgccgctcgcggggtgtcacttctatgatgcgctcgacaccttgctacgccaggcactcgaccgatgcacttggtccatcgagtatcgttgtgttgtcttccagcacagtcgcgaggcttacccggaccgctgggaggcgacttgtttggttcgtcatccggaggatagtctccggggtgcggaggtctgctcggagcattattttatctttgagcgagactcatctgaggtagccatacaatatgtcgcacgacgtgcgctttcgcactactgcttagtgttcggtggggtggccgatggtcttgacctgaggtattacccccatcgtctacctggcagcataggaggcatgattgtctcacctattggtgaggacaatcctaggttgagcagcacactcaacctagccgtcgtgctaaacacggagcgggaccatgctttagatgagctgagtagggctcatgctgagatcgcccagttgcggaccgagcgtgcagagcgccgtcacctggaggatgtctctcccgcccccgttgggactcagcaccataccgctctcctcaacgtggacaccatgcctacgacaaccccgactgtaggacccagataa

SEQ ID NO: 517 - DNA, 607 bp, Zea mays
  unsure (1)..(607): unsure at all n locations
  Clone ID: MRT4577_100473C.1
gggtaccctnccgggccggccgggatttcttcaccggttgccttatctcccacgcggtacaggcttcttcttcagccgcccccattcttctccctgctagccgcacgtcaatcttcctcctctgtgcggtgctctctccatctccagtccgagctcccttctcttctccccatggcattcctcccctattcctccggcgccgcgtcctcccagcacggacgcgtgctctgctcggaatttccccggcgttctgttccctccgtggtcgcgtcccggccaagctccggctcggattggtctagcgtcgcgcgctcctccgagctgctctcaagccgcgcccttcctgcttcccctgctcggatttctactttcctccatggccgagcgtcctcttcatctctggtcgacctcctctcgcgctcggctcttcaccggcgagctccctggtgccgcgccctgctcggatcccctccctctgcgcggatctcgactttcggcccagctcgctccagctttgttggtcgcgcaggtcaccggcctccgtttgccacgcgcagccggcgtttctccttgacgcgcgctccgccttgccgtctccctgcgcgcc

SEQ ID NO: 518 - DNA, 245 bp, Zea mays
  unsure (1)..(245): unsure at all n locations
  Clone ID: MRT4577_100474C.1
ggcgatccgccctgcggttcctagtccaccgtttaatcctataagagtagctgcttcactggttccacgagtcatagctcagcagcgtcttgctcagcgatcgaaacggggaatcggtcgacgtcctgtcaatgcagacgctggtgctactcctgcggacagtagcgaagaacagngtanntgtgctgcaggagttcgctctccgcggaacactcgggatggccaggcagaagttactatgttcc

SEQ ID NO: 519 - DNA, 683 bp, Zea mays
  Clone ID: MRT4577_100475C.1
gatagtttctgctagatctgagatatcgcccgacgcgtggacggcggcgcgccctcctgcaggaaaaaaaaatagaagacgatgctgccccgcttgccaatccgcctcgcgccgccgctcgccggcgtccttcgcggcatctgcgctaccgcgctgccgcaatccaagcccccacctcaacccctctccccgtccgacctggacgcgatctccgcgctcctcccgcgcctcctctacgcgggccacgtccccgccgccggccgcctcctctccgcggagctcctcctcccgggctcccaggacggcctccccctcgattccctcgccgcgcaccttgcctcgcttccgaccctctccgctgccttcgcgctcctcaccgcgctgcgccatcacccggaccggccctcaccgctcctgctggcgtcgccgctgctcggcagcctcctctccctgcgccgcgcgcgcgaagcctcctccgtgctgcgctggctctgccgcccggactccccgcgccggcccgacgccgccacctacgctgacgccgtcgaggggctctgccgccttgaggaccccagaggcgcgctggctgcgctcagggagatggcaacggacgggctgcaggccacgcggtagctgcgggatgcggtgcgggacgcgatgctgcaagacgccaggatcgagga

SEQ ID NO: 520 - DNA, 588 bp, Zea mays
  unsure (1)..(588): unsure at all n locations
  Clone ID: MRT4577_100476C.1
gtaggaggtgagaggtgaaggggcggngtatctgcgcgggcgcccggcagccgggtgtagaagggcgggcaccacgcaccggaccgcgggccgggagcgcgcacgccgcgccccgcccccgccgccgccgccgccgccgccgccgcccgggagctgcttgctgccgccacagatggtgtccactgtcggtgctgtccagcgcacaccaggctgatccatggtcactttccgggatggcagcaaggtgacttcaactgaggatgaccctgactgaaaggcttcgtgagaagatatctcaggccttctacaaccatgggctgctctgcgcatcctaccccatccctatcatcctcttcacggggctctgcatcttagcctgctgtatgtgggtgcccctgtggcttatatccagcagatatttgtgaagtcctcggtgtctccctggcacaagaacctcttggcagtggatgtgtttcgctcacctctgtcccgggcattccagctggtggaagagatccggaaccacgtgctgagagacagttccgggaccaggggtctggaggaggtgtgcctgcaggtgaccgacct

SEQ ID NO: 521 - DNA, 492 bp, Zea mays
  Clone ID: MRT4577_100477C.1
ggttctaactctatttcagcactgtataacagagatcggctggcaacctaacttgttcatcaaacgatggaatacatcaactctgccacaaatatatcaaactgatacagtattcctggattatctatactgctcggccatgtagggcctggaatagtaagagggctaccgtgcgtgtgacctgggcttacgaaacattttaagagctgctgctaggctctacactagaggcaggggcacgctatttgagcatacgcttaagcctgtcacattagcctgttgacagctactgtgtatgtcttgtgctcctacttcagcgttggattcagcacattcttgaaaggcgactgcgggcaccaacctagctgctcggtaatgatagtcatgtctgggatcccctcgacggtatcatcgtagccctcgaggtgaaagtgactacagctgacgacactcatgggctcatacagcggagcctctacagatacatttgcg

SEQ ID NO: 522 - DNA, 1411 bp, Zea mays
  Clone ID: MRT4577_100478C.1
attgggacctcgaggcctcggaacgccccggaacgccgcctccctcgttctcgcgccgacgctcgccgcaccgcctccctctccctcgctgtcgcgccgcctccctgtccctcgttctcgagccgccacaccgcctccccagccggccaggtaacacacggcggctcttccctgctgggcttcggagctgccagtctgccacgccgccgccccagcagagaggcgagcaaccccgccggcgcctcggagctttgaattggctgggcgcgcgaccggcctctgccgccgggccgcgagcagcagcaacccccctcgccggccatgacctccgctcactccaagctctactccgatgacgtcagcctcgtcgtggtcgtcgtcgacacgaaccccttcttctgggccgccgcggcgctccccttcgccgacttcttcgcgcacctgatccacttcgtgaactccctcctgctgctgaaccacctcaaccgtgtggtcgtcatcgcggcaggagtcagctcgtgtgcctacatcctggattccagcgatgccagcccctccggtggtgtggccgtctcggacaccttcgacaaggcaagccgcaaggcggaggagttcattgcacaagatgcgcgcgccactgcaggcaacggttccgttgcttctgccaatgccgcgtcgctgctctctggggcgctgtccatctctttgtgctatatacagaggattttccggtctgggtctcggcatccacaacctcggattttgtgcctgcagggatctccagacggacctgaacaatatgtggcagtgatgaattcaatattttctgctcaacgttccatggtaccaattgactcttgtattgtgggaacccaggattctgctttcttgcagcaggcttcgtacataacaggaggagtttatttgaagccacaagaactaaatggcctatttcaataccttgccgctgtatttgcaactgatttacactctagagcttttctgcgccttccaaaaactcttggagtggacttccgtgcttcgtgtttctgccataagaagactattgacatgggatatgtctgttcaatttgtttgtcaatattctgcaagaatcagaagaagtgttcaacctgcgggtcagaattcagtcgtgccatgcctgatttgaactccgtgccggatcaaagcaagtagtgtccagtgcgaagttaacccatcaacagacaatgcttttctctgtgcgtctcacaggttcctttcggactagcaccttcacgtgtgcagtgtgtacgagacgtttctttggtcgatatgtgaatcaatttccatgtctgaatattatcggggttttttttaaaaaaaaactgaaactgcagaattattttccaagtcgacgcggccgcaagaa

SEQ ID NO: 523 - DNA, 331 bp, Zea mays
  Clone ID: MRT4577_100479C.1
gcaagatctatgcttacctgagcattttttcgagagggatcttgaagctacttgagggcggcctaatggcttcgtctactgctactaaatcagacgccttctacctcatgatgaagggcgactatcacaggtgtggctcatgcatttaatactggcagctgacaggaaggaatctgctgagagcacagtggtagcctatactgctgctcatgacattgctctctctgatccgtcacctacccatccgattaggctcggacttgctctgaatttttcagtgttctattatgagatcatgtactccccagacaaagcttgcaacctggcaaag

SEQ ID NO: 524 - DNA, 369 bp, Zea mays
  Clone ID: MRT4577_10047C.1
acaatacaacttttttttaacaccctgcaacagttctatgtacccactgacacaccatgtgtcattataaccaaacagcatatgatagcaaaagcgccctttgatcaggagcagggtgcctatgcgtatggtgccaacaataagacgagagagaaaacaagaccaggcttcagaaaagacattgatataggacaggtacatgggcatgcctggcttatctatgcctggtcggacaagactaaacttcatgcacactgactcactatttcactggcaggctgcacacggagagaacagttgacacaccataactacttgattgattagcgatatacacctgccttagaggcaggcactatagagtatgat

SEQ ID NO: 525 - DNA, 130 bp, Zea mays
  Clone ID: MRT4577_100480C.1
cgactgggtaggctgccgccgccgccctacgggaggtccagaggaccaaggcattcgtattcaacagtctcttccccgggccacacccttttgggtggaacctggaatgtagaaggaagatttggtgatt

SEQ ID NO: 526 - DNA, 363 bp, Zea mays
  Clone ID: MRT4577_100481C.1
ggccaccgggggtcagctcatgaatattgccggcgacggtacagcaacggtgggggccgagggggcatttaccctaggctgcctgcctgtgcacgagcaaccgtgaacgccagcgggctgtcaggatcgacttctctgcagaaggccaccgtcgaattctgtttttttacccggtacgtggcctatccatttggtgccgcgtatctgctttgcgtcatcagaagctaaagacgaaatcgacggagacggatcaccagcgctcttctcgtgtggccaactgctggacccgtgctctgctcgtctgccgccggcacacaggcatgcgttttctggctccagtgttccccgccaatctgttacctg

SEQ ID NO: 527 - DNA, 648 bp, Zea mays
  Clone ID: MRT4577_100482C.1
gcagcgcaacattgacttgtgatcaatgcccagatgcaaacagtgcataccctagcgtttcaaacttcatgcaggtcccaacaaatgtatctatcaatgatgatcaagttgctaaggctgcaatgaagactgctgaaggtgccttcaattttatgagaagtacgatatctggacagcctggcgcccaaagaaatgaatctgatactgggaaggaggaaagcactgatatgggcacaaacctgaatcttgatagtgatcttgctgctctcttaaattcatggtatgctgctgggttctacacttgcaggtacctcacgctgcaatctacgagaaattccagaccgtagagtgctttggccgtcttgagttttagatgtctggggaaaaaaaaagcaaatcactgggtgcgcgtgtgtgccttcaagtacgaatattctgctggagtttgtctactgtctgcttgctgcttgtcactgctattttaagctacactagactttcggtattgctcgaatgtgaatctgttgatgccaggcagaaaaattgcgtataaatgtgtaaactgtcgcactgacctatcagatattcgtcgtatatagagcgctgccatgttcaacctattttagcaggctgtttcggcaggatgac

SEQ ID NO: 528 - DNA, 243 bp, Zea mays
  Clone ID: MRT4577_100483C.1
cgtacgctggtccttcaaccaagtggatcatcccctcacgcgagaccggagctggggggagccgacgtgccagcctgcgcctgtttgaccagacctgttgtgatggacggataaggtattcctgtaggagggagagatctttcggtgtagaaaataagagggtgccgcgggcttgactgagagagctgaaggaaggaaggagtcggctatgggcgggtggaactggctcttcggcggccgatc

SEQ ID NO: 529 - DNA, 533 bp, Zea mays
  Clone ID: MRT4577_100484C.1
cattgggtacctcgaggccggccgggaacctcattctccccggcgtttcctcccagctccctctccatgccgctggcatggaactcgctgctcggccgcgccccgaccatgatccctgcgctctccagccgtgcgcatctccctctgcgggcgcgcgtctgcctaatgagtcgtcaaccccgactggcaaacttccccaaggtcgctacatgttacccgactcgacctcctccctgacgagaacttgctcggagaaagatcgacaagtgcgccatttgctacctccacgatcacgtccctagacgtgatctgccattgggcggaggagccatgagctccagtacgcctccctctcacgtggctctcagaatagtaggcactgcgacatcatctatctcacacatatctcccatcatcatgctcctcatgtgctcgcgtattgcagccagtactgtttagtcctagaatgactcgacttcaacgaagaccacatgatatctctatcctaccctatctatcacttagctgcgaga

SEQ ID NO: 530 - DNA, 611 bp, Zea mays
  unsure (1)..(611): unsure at all n locations
  Clone ID: MRT4577_100485C.1
cgcacacaagcaancagccagtacatacatactagggaggcaggcagtgcatcgccgcccaccgtgatgatggggtggacgaccaccggcgtctgtacatgccaggggctaaagtgcacacggcagtctatgcttgggccgacggttgtgcacaagactcagagacgtcagcaacggctgaaggatccggtgcatgcaagcgtggacggcctactggaacaataaattcaagatgctgacttacctgccgacgctgtcgaccgacaacctgctgaagcaagtgtactacctgctgagcaacgggtggataccctgcctggagttcagaaaggtccggttaatgtaccgcgagaactccacctacccgtgctactacgacggccaatactggaccatgtggaatctgtccatgttcggctgcaacgactccacccacgtgtacaaggagctgaatgaggccatcaaatgctacccggacaccttgcatcgcatgatacgcttcgacaacataaagcatacacattgcgtcagcttaatagtctacaatgcccagggcagttactagacagagtgcgcctgaccggccatacactgctagctagatagctagc

SEQ ID NO: 531 - DNA, 1103 bp, Zea mays
  unsure (1)..(1103): unsure at all n locations
  Clone ID: MRT4577_100486C.1
tgttgcgtgccatatgtgccaatcgcgagggctccttgcctccttggttagtgcatctgtcttcgccgaaggtcattctcagctacacgcctacactctgtagaaaccaagattgcccacagaacttcctggtgttttttttttttgttgcaacctgcctggctagcatttacatggtgcagcccttgatgctttaggcatttccgcatttgtcactccattgtgtcaaccgttagcatttccaacaagttcatggtcaacaacctcgggggattcgcttagaaaagggagaaaagcttcaggtcttgaacagaagggcctaaagatgtggaggaagggcctttgtatcaagtcttattagctggatggctgcaggtgcagggtcagagaaacacacttcaccccatcgtatgatgttgtagatgaagtagtcaaggccttccgctacactcctccaaagatcaaggaaatccttcgaattaagatatagcttcagcttagaggtcctgtctgtcagaacatctagactgtgaacaaaaccaggggatactcctgtgttttcttcatccaggatctcatcacctatgacaggtctgtccactccaggatccaatgctctggacatattcccaggacagatcttcaaactcaagcagaacccaagacagtatctgttccaggtgatcggtccctaaaacttaactaaaaagctgatttcatctgtaaacagagatccttgaggacccatatccaagaaggtagtatcttcaccccattcccgaagcacgttttcacagtaacgagcggcattgactgcacacgaagtttttgacaaagaatgatcctctagtgccgtgttcgacaattgcaatgcttcacatcgttcgcgcaatacaagaaaaaagccattcaggaacctaaccgaagaggatctgttatactggatctgcattcccctgtttggcagagcacggcctctttcaaccattgacaaagcagttttgataacaaattcacacaccggaggagctttgtagtcttctcttgtagagagaagaaacttcgttaattttccatgtaccacgctggtcatgcntaccact

SEQ ID NO: 532 - DNA, 418 bp, Zea mays
  unsure (1)..(418): unsure at all n locations
  Clone ID: MRT4577_100487C.1
aagagatatgacggcgcatgcgcacgcacgcaagcgcggagcccctagagagggcgcccccgcnnngggtgttggagacggaacaccattaaaagggagaagcatatagcagagggaggaaaacagggaaacatacccgggccgggaacgcaaaggacaggaaccacataaaggggtagcaggcgagatgagcaacggaaggagcggagcaaagccgaagaaggggctaccggggagggcagacgaaggggatgcaaaaagcagggacgtaaggagacaagctgcagcaggcgacgacaggaggaagggccaagacgaggagagagagatacgaaacggcagagggggagcagacagagcccgcaaacctcccgggagggcgactttgagaagcaggtaggcgacaaagagggaaacc

SEQ ID NO: 533 - DNA, 267 bp, Zea mays
  Clone ID: MRT4577_100488C.1
gtcaatatgaacatacattcggtccgtaggttccgactagaatataccctactgcagctgcgcgcgactgactgacgggctgacagacccgtttaccaagtactccatcctggtcgctccaaagcatctaacaaccagggatcggatcccgatgggctcattgtggacgtgccctttagccgaactggactatatccgaatagagagcattaccatgcctgctgccgtgtcagcattatggctcgacccatgtgcatactgacagag

SEQ ID NO: 534 - DNA, 298 bp, Zea mays
  Clone ID: MRT4577_100489C.1
gacagctggtgaatgctaggtagcttacgaagatggattcttttgcgtgatgcacaagcaccccgagctgacttctttttctggcaccatctgcaagttttttcttgatgaaagcttttcatctaggtgagacagaacatggggtctgctttgagttcgagaacaagatcttgcgacttgctgtaaagcatggaatatattgttccctcccagcagagcattgcgtcatagacaatgaaaaagttttgttaataatcgttgcttcagatatgtgaaagttttggctttccatgtagcg

SEQ ID NO: 535 - DNA, 178 bp, Zea mays
  Clone ID: MRT4577_10048C.1
aagagcttttacgtgatgctgcgtacgaagctcggaatttggctcgagtttgtacacagttctttgtaaccaagcaccggccagcgcctgccctgggcctttatagcatgagcgcggtaccataagaggccggcagcagcatcgcggtacggaccacccataatcccgatgtcaccgg

SEQ ID NO: 536 - DNA, 309 bp, Zea mays
  Clone ID: MRT4577_100490C.1
gccccaaaccaaaatttctttaaaattggaaaatttaccaatttgatacccaaaaattacacggaaatattaatatttccatagggaaaaaaaaaaaaaggtttaaaaaaaaatcaaaaggggggggaaaaaaatttttttcaaacaaattttatttcacttgaatggtaaaaaacggggaaacttttttttaaaggaaaacaacattgccctcctcacattcttgggccggaaaacccggatttccttgaacctgggggaaaaccctgggaaaggaaatttaacttccacaccaaaaataatcctttt

SEQ ID NO: 537 - DNA, 1436 bp, Zea mays
  Clone ID: MRT4577_100491C.1
gccggccgggttgggacacaagctagcaattgaaaaaaaaaatggctccgaccgccgccaaggacagtggctccgccgaccgctggcgcgaggtgcaggcgttcgaggacagcaagctgggtgtgaagggcctggtcgactccggcgtcaagtccatcccggccatgttccaccacccgccggagtccctcaaggatgtcatttctccaccagctctgccctcctccgacgatgcgccggccatcccagtggtggacctgtccgtggcgcggcgcgaggatctggtggcccaggtgaagcacgcggccgggacggtgggcttcttctgggtggtgaaccacggcgtgccggaggagctgatggccagcatgctcagcggggtgcgccagttcaacgagggctctctggaggccaagcaggcgctctactcacgggaccccgctcgcaacgtgcgcttcgcttccaacttcgacctcttcgagtccgcggcggccgactggcgcgacacgctctactgcaagattgcgccggatccggcgccgcgggagctcgtgccggagcctctccggaacgtgatgatggaatacggcgaggaactgacgaagctggcgcggtccatgttcgagctgctgtcggagtccctcggcatgcccagcgaccacctgcacaagatggagtgcatgcagcagctccacatcgtgtgccagtactacccgccatgcccggagccgcacctcaccatgggcgtcaggaagcactcggacaccggtttcttcaccatcctcctgcaggacggcatgggcggcctgcaggtgctagtcgatcgcggaggcggccgccagacatgggtggacgtcactccccgacctggggcactcatggtcaacatcggtgaccttctgcagctcgtgaccaatgaccggttcaggagcgtggagcaccgggtgccggccaacaagagcagtgacacggcgagggtctccgtggcgtccttcttcaacacggacgtgaggaggtccgagaggctgtacggccccattccagaccccagcaagcccccgctgtacaggagcgtcagggcccgagacttcatcgcaaagttcaacaccataggactcgatggccgcgcgctcgaccacttcaggctctagctacctggctacgtttcagattcgtcctttcatttgctttggtctctaattaataattccaaataataagcccgcggatggacctctgtctgtctgtctgtaatttagtttccaagtttagtttgttgtggtaataattcctgtatcaattatgtcataaataaaagctagggaaccttgataaataacagagagtagtatgtataccacgacactcgatcgggaactcggaaaaagtttataagggctagtttgagaacgaaaaaaaaaaaaaaaaaagcggcc

SEQ ID NO: 538 - DNA, 554 bp, Zea mays
  Clone ID: MRT4577_100492C.1
aataatggtgaaactttactaaacactcagtctaaacctagaacaagtaaaattaagcgggtctaattagcttaagggcattgcaaagcactactctaatcatctaatcttctcttaagcatatatggtggctacaacatttggtgaagtatctcaagacttctacattcttatagcactccaacatacttgttttggtcgattggaggggagtatagccattatacctcggctaggaccttctatacactactgatcatcgacgagtatcctttcgacccttttgtcagggtccaatggctaacaacaactactatcttagagctagccgttagcaaccattggggcacacttatgtaatgtatagtctgacacgcttcatccaaccagtccaacgcccctattttccttttagaacctttctaccaacctcaatactccaatagatggttcaacactccttctaagcatgaacagtgtcatcgcatggtttgacaccctgttcttttcttagtatgattcccatcttgatgcctctatgaatactcttacta

SEQ ID NO: 539 - DNA, 546 bp, Zea mays
  Clone ID: MRT4577_100493C.1
cggcagcattgggcctaaaacagttgttaaaaccaggggttgggttgccccgtcctccatgggccaaacctaaatttccttcccaaaattaaacgacggggtttaaaaaaaatgggggcccttttttttggggaaaagggaaaacaacttgtttttaaaaaaacaaatgtcctttccctgtgggaaaaagggaaaaaaacaggtttttaccaaaataaatgcccccccctcaccgcccgggttgttaaaaccacaatttttacagctttttcacagaaggggcttactcgggcaaaaactacaattggggttttaacccaactggggccctaaataaggaacgttacaaaaaaccaaccagtccacattacccgttgccacgcttgctaaaaaggggttctgggggttaaatcccctccgggcatcacccttataggacggggggtaataaagggcccccctcacgcctccatgaaaggctgggggtgccaaggaaaaaactgacctttacccggggatgcaggatcacccatggttgcggaaccg

SEQ ID NO: 540 - DNA, 432 bp, Zea mays
  Clone ID: MRT4577_100494C.1
tgaccaaggcctaccgacaccaggtgtactgctgctgagcacgagcgaggcagaaggcccaggaggccgacatgacccgcatccgtggggggggggggcggaacaaagaggcaggagaaaaggtaccgatcggacagggagatacccgccgtgcaccccgaacgcgtgatccagaagaaatggcacggtcctgagaacaaacggaccaagttgacatagaacgggatcgcgctagcaaggcacaatgctggcatcaatacaaccttcatagcacgtgcattatggtctggcattcgagtcaactctgcctttccactctacttgccggacatcgtacaaatcaagatcttggacagggagaaaggcaggagagctaagctgtgttacctgggggaccgggtgaacgcaatcaacaaatgaggcttagaactt

SEQ ID NO: 541 - DNA, 1881 bp, Zea mays
  Clone ID: MRT4577_100495C.1
aaaaaaaaagtgacaaaatatatataaaagaacaattcaaagacataaatatcaaaactattttctacgtactggcaaattttaaaaagttttgactttttgaagcaagatatgaatttatcttacagaaatacatacctcaatcatcggtctctccaggcaaaaagataacgaaacaaacctagactaatgagctgaagaccagtataaaataggtcgtcgtcgtggtggtggtggaggaggaatcagattctgtagtccatgatgctacaaggacaccatcgcagagagcaagcactcctttacgttcagtctcatcgcatgtacccaactggtttgctgcgacgactgacgagatgagcatcaggtctcagaagaagctttctgcggctacaagtaaaattgtttcagttacgattacgaagccgtgtccttccgcctgctgcatcagttcggtcctagcatgctatttctcgtgggacaaggcgtgctcggggcggtgggtgaattcgtagtcgaggtggacaaacgcgcgctcgatctctggcaggcgctccagcttctcctgcagggcctcgccgatgtcgtgagcctcccgcaggggcatgttcgacggcagcacgatgtccacctccacgaagtagtgggaaccgaacgtgtagggcgcggactgtgtcgatgtgccgcacggccttgtggtggttccagcacaggtaagtcagtttctggaggtactccggcgaggccgactgccccaccagggagtgcacgttctccagcaccgtcatcgaccatgtcctgatcgtgtagatcgctagaacgattgcaccaagcggatcgatccagccctcaatgtaattggcaagtagtgcagcaaccaggccaattacatttgtgatgacatcgaaaaagtgatcttgtgcatatgctttgacaatttcgttggtgaaggagcggcaatatataaccagggcaagttttaccaatgtcacggagagcatgatgtccacaagccacttttcttgatcacttgttaagctgaattcatctccatcagacaccaatgaacgtactgattctagaattatctgaaggccaagggttgccataacagaagcaaaaacaagtattcccagtggctgcatccgctttttcccaattgggtatctgtatggatttggtgtttgcattgaaaaggcagtaaaccacaagataaatcctgacaacaagtctagaagagaatccaaagttgatgcgatgatagcaagtgagccactccttactgaagcatacacttttgcagcaaagagaaccatatttgcaaagttagacaaccgtatggctaatgtttcactcctggcaaccttttctcgttcttccttggacattccaggaaggaaaccacgatctgtaagtgtgtccatctcactaaaaccctcaagcatctccacttgctgttggtagtattcagcaacaacatcctcaggaccttgagctagcacgccgaggcagtggtgaagcggaccgttcggcggcctctcctggtgcgcctccggcgggcggaacccctcgaagttgagccgccacgaatcctccacctcggtgggtacgccgccgccgcggccagcctccacggccgagagcaggaggagctcctccccgtctccgccgttcgccgccgccgccattctggaaccctagcagactgtgagcttggggcaaccgcgctttgacccgtacgtacgtggcgctctcccgcggcgcggcggcggcgcgcgaggactaggagcagactgacggccgagttggtttggtagttgccaagcgggcaaacgcactagccccatagccccagcccccgcccccgcgtgagtcacccaa

SEQ ID NO: 542 - DNA, 330 bp, Zea mays
  Clone ID: MRT4577_100496C.1
cgggcttccacagccgagctcgcccctctctcactccctcgccgccggagctcactgtcgtcaccgttgtggaacctcaccgaaacttgcgcgcgcagcaggcactctcgctgacccctgcccccgtacgaacgccgtcagcctctctgctcgcctcgatgtcgccagctgtgcccccatccgctctctgcgcaagacaacaagtggttgatctagtagttaagaatcaagatatattcctatccgtggaagaacctcaagttttcagtaagcaagattgcaacctcgctgatggagagtacgtcctcgtgccggagcaaggagctgctc

SEQ ID NO: 543 - DNA, 552 bp, Zea mays
  Clone ID: MRT4577_100497C.1
gggtaccctcgggccggccgggtcagtgctgcccgctcgtgaagggcatcgccgcgcctctccgtgcatgtcctactcctcggaggggctgtcaccgcgctgcggggggcgccggtgtcggacgcctgtgcctacacctgtatggcgtggctggtgcagtccatgcccacgcacatgccggacttgatccacatccctgtggtcctatccaccgggcagatgtgctccagtggttctgggcgaatgcaacgaagatgctggacatgcttgcacagtactggcatttcttgccccactcgatcaccatgaaagcggtggactacggtgtcttcatgagtgacatgaggagattaggggccgactaggtccggagagattacaaggcactggaaaatgctgcctaccgtaagatcaaaatgaggattgtccaacacgtctggatttgatcctgattttgaccaacagagcgcatgatctggctgtaggaagaccaaatgctgagaacgcaaccggccttttcgaggactcgtcgggatctggcgccgttgcccc

SEQ ID NO: 544 - DNA, 627 bp, Zea mays
  unsure (1)..(627): unsure at all n locations
  Clone ID: MRT4577_100498C.1
agaaaaagaagaagaaagaaggagagagagaggtcccgggggcggcgaggacggagcacgaagcacggagcttctacttccacagcatggaccacggcggcaggaggaggagcggcgccggcgcggcggggggcggccagccgccgccgccgcctcccaaggtgtaccgcgtggagcccagggacttccgggagctggtgcagaggctcacgggcgccggcacgcccgccgccgccgccgccgcgacggggccggcgaccctggccgcgcaccagagggtgccggtgacgccggccatggccgcggcgccgcccgcgcccgggacggcagagcagttcgactacgcgccctggttctccgcgccgctgctcagcccggcgtcgtacggcgcgccgggcttcggcgccgccgccggctacccgcaccacgggagcggtggccctttgctctagggccgcctatgtagaaaacagagccctcgtgtcgtgtagatctcgtttttgccttgcgtttcgagcatgaatgaatgacaactgctactagttcactacactacacaacgcagccagccgccttctttactataccgcgaatgaaatcngaccaagaggctacacggttattgtt

SEQ ID NO: 545 - DNA, 359 bp, Zea mays
  Clone ID: MRT4577_100499C.1
cataagcaggaaattaatggctggggatggggagctgaagctgctgggcatgtgggcgagcccgttcgtccttcgtgcgagactcgcgctcagcttcaaggggcctcaagtatgagtacgtcgaggaggagatctttggaaacaagagcgagctcctcctcgagtccaacccggtgcacaagaaggtacccgtgctcatccacaacggcaaggctatctgcgagtcacagatcatcgtgcagtacatcagtgaggtctacgacggcacaggcccttctctcctccccgtcggcgcctacgaccgtgctgtggctcgcttttgggccgcctacgttgacgaaaaggtcttcagctcgttc

SEQ ID NO: 546 - DNA, 216 bp, Zea mays
  Clone ID: MRT4577_10049C.1
gccaccagcaacgattcactaagaactgccttcggctcatacggctagaccctagactccaaagtcatcacctaccgaggaaccaaaagctattgcggattatgctgctttgcctgatccgactgaaactacatgctcgacgctatagagaacatgaacagcaaggacctagactgccgtagcattactcttaactatgacccaaccattggctgt

SEQ ID NO: 547 - DNA, 259 bp, Zea mays
  Clone ID: MRT4577_1004C.1
cgtctgaatgcccaaccagcaccaaatactacggcttactaacggaccggcctgctgctagctatcggaggagaagagcaaaacgcgttcgaagaacgaaggagaagatgcggctcttcaggactccaccagaggcaggccacacacaacagagtctgcaaagctaggccccaagactggtcaagattaaatggcaaactgagccatcagcagcaaggcaactagtaggatcggagccgatcgcttctatatatggtgc

SEQ ID NO: 548 - DNA, 326 bp, Zea mays
  unsure (1)..(326): unsure at all n locations
  Clone ID: MRT4577_100500C.1
tttntttattttttttttttttttttttttattgggggggttttttaatttttttttggtcccccaacaaaacctggccccctttatttctcattcatggaaaacataaattggccagctggccgtccctgtctagctagagatcctaatttcctaaaaactctccaaaaaactttaaacaactacaaactgaaacccttcctagaaaacccaaactaatctaatctctaactaccccaaacaaaaccccctaaaagggcccaatgatgttgctaccggagcccctccggggcccttcttaggccctgacaaaacaccctttgggg

SEQ ID NO: 549 - DNA, 202 bp, Zea mays
  unsure (1)..(202): unsure at all n locations
  Clone ID: MRT4577_100501C.1
ggagaatccaaggtggtggacttctggatcgtacttatggatttgcccgaacttccggtaaaggtccttgagacatgttgngaatgaggggagtagcagcacgttcactttcactctcacataacctgtcagcgcaccatgataatagaactatgtaaagagttgttattttaatgtggccatgtatcatagtcattatttc

SEQ ID NO: 550 - DNA, 898 bp, Zea mays
  Clone ID: MRT4577_100502C.1
ctcaaccctttttcctcaacttgtcaaccgccgccccatctactcactccaccacggtcatcattaacatttcttgtccattcttttcaggaccgtcgaggatcgatcaggcgggcagaagcggtcgtcgccggacaagacgcataggtccaccatggatggcgtctaccaccatcaccaccaccaagagtcgccgttgacgggcaacggcgtcgccaccgccggtgagaagctaggcgtggagcggttcgagctgccgctgatctacatctcgctgtcgcggaaggagaaggaagacgatttccttgcgatgaagggcaccaagctgccccagcggctccatgaaaagggctaagaacgtggaccagaccctgcaatctgtcttgccggagatgtggctgtccgatttgacgaggggacggtacgaggtgcgggagaagatatgcgtgacgaagacgcgaaattcggtgaaagggatggagagcatggacagcgactcggagtaataaggtggaggcgcggcgcagccatcttccatgggggtgggagtcgaggaaaaaggggccctagagaaggaggaaaggaggagacgttgagggcaaaagtgagtggtcgcgcctgctccccttgagcccccgccgcgctgggagcgtcggaggacggtggtgcttgccacacacagggctgtgtttctggcggtcgtgaggtttttttttgttccttgatgctgagctgcgtctccgcggccgctgtttgcagcatgtaaccctgaaactctgcgatccgtctatctctcgccttcttcattttttctcatgcgctttcgagccccctgaaacgagacggttggattcccggtaatgtgaaaacgacccccccccggtggctagttgtggcc

SEQ ID NO: 551 - DNA, 457 bp, Zea mays
  Clone ID: MRT4577_100503C.1
ggccggtcttctttggttttggtgagctgtaccgccacatctttcagcaccgagcaagagcggtgctttgctgagtccacctttgttgaggctaagctgagagtgtaggagtgaaggctcagtgctctctggaccgtcgaggatcgatcgggcggcggcgccgccgtcgtcgggcagaagcggtcgtcgccggacaaggcgcacaggtccaccatggacgccgtctaccaccaagagtcaccgttgacgagcaacggtgccgccaccgccggcgagaagctgggcgtggagcgattcgagctgacgctgatctacatctcgctctcgcggaaagagaaggaggacgatttccttgcgatgaaaggcaccaagctgccccagcggcccaagaaaagggccaagaacgtggacaagaccctccaatttgtcttcccggggatgtggttgtccgatttga

SEQ ID NO: 552 - DNA, 458 bp, Zea mays
  Clone ID: MRT4577_100504C.1
tataaaacccaatttgttatttatattggcgagcaccctctccatgtggaacttctggtggatccttccgccagcgcactcataccaactcttcgcacggagggtaacattgcaactggcgatgacatgcaaactcagagtgtcattgacaatcaagcacttccatgcctttagaatcttctgactaccaaccacaagagaatgatgccacaagaatcgtattggacgatcgcaacacatcacatctaataacggggaccaaattaaggctgtgatcaatgcaaatataattgcacctctggtgccacttctgcaaacctgttaatttgacatcaaaaaagaagcagcctgggcaatatcaaaagccactgtaggtggcacacatgaaccgatcaacgtccttggagaccagggctgctttaagccacctctgggaacatgatgattgcccgaatccc

SEQ ID NO: 553 - DNA, 583 bp, Zea mays
  unsure (1)..(583): unsure at all n locations
  Clone ID: MRT4577_100505C.1
ctatagagagaaagctaggtaccagcctgcagagtaccagagtccgagaattccccgggtcagaccccacagcgtcccgcatattaagcttcatcagacttccatgattagagagagactcagacatccatagaagagtagctagatcagttagccccttagctttctcctaggcagctcagctagcagaggcagccagcctcccagtaccaagcaggcaggctagtaggctagccatgacatccatccagtttcattctacccgcnnctccagttctatatagccagcctttccagttcttatctagcccgccagcatgcatgcatgcccgcatgccataggcatatacccccatctcataccaccagcatgctatatgcccgtagccagcaagttcaggaatcctagcgagcgtcaggcaaggcagtcgagcaagcccagttcctagggcccagtgcagtcgaagttcctagagagcaccaagtagcagcnccggctggcgactgcccctactggatctgccacatgtgccaaggcgcttgcagcagcatgtgctgccacccatatcatggcaggtggagc

SEQ ID NO: 554 - DNA, 416 bp, Zea mays
  Clone ID: MRT4577_100506C.1
ctgtaccgtaccgtcttcatctaccatcggctccgcgcgcgtgcccctccaacgcaagatccggctcgcaacagcgccagacctgcgtctcgcgggctcattcatggtcaaggactcagactccaggctctgatagatgagagctgccttgtacgctgcggtacggccactacctacgcatgatggtcagcagaggcgtccggtgccctgcggttctggttggtctgctgtctttacaaacacacataaaacacactaggcttaagcaagctgtgaaggactcccttgcgcacggtggacttgcaggaaagcctaaacgtatggcccggacacatgacaagaatatgaccgtagcgcaacacgggtaacactgataaagaaaaagattggatgactaacgaccataatgtccacac

SEQ ID NO: 555 - DNA, 453 bp, Zea mays
  Clone ID: MRT4577_100507C.1
agcaaaggctggaactgcattttacaccgattcagcctaacaaacctcaagagagccccccctaacacatgcacagggttcccatgaaccacttgcgcacaaacgccctcatcaccgacctatgttgtgtgcacaggcggccatccactaggtcacggaaggtcatgaaaaatccctaaacaattttagatgaccccaacgataaggcctcaatccccctcttatgagaggaccataaagagggccctttacatgaacttttgaatcactaacaaaggctccaccgagccttctgatttatcttcagagggggcgaccactaaaaaacctcctttcctggatgtggaaaactcgtttagggcatgggcgccgacaatccttagggaccatgacctcgcgctgtgaggcgcgaagaacttatcgggttcccccccctcctggaggagcaacccc

SEQ ID NO: 556 - DNA, 391 bp, Zea mays
  Clone ID: MRT4577_100508C.1
gaaacacatgattgttggtttgttttttttttatttcggtgtggagagcctaaagctcggaaaaaggacaagcccatgtgccgggaaaacaacgaacatggaactgagttctaacataagctcgggggggggcgggccatcttagtttggtacgcgtcacaggggatgggtgctccaaaggattcccatttagcggggggtaatgctcttccctgccctttggagggtaaccccttacccaatcacttggcagtgctgattgccttttcagacacaaaaagggggggggcactagggtcggatttcggtaaaaccacagttggggggggggacagaactgggtcgcacagagggatggcctcacctttttttgggctaccgccaggttttg

SEQ ID NO: 557 - DNA, 317 bp, Zea mays
  Clone ID: MRT4577_100509C.1
acttctttcttctttaggcctatcctcttctcctttcccttgctcgtaaccctaatcccctttccccgttgcctctctccggcaagaacagggagccacatggcggcggcagccatcacgcgccccctccttatcttgatccatgcgcaccgtgttcgaggcacatccaaccctatacgccctaaccgccccgcttaggacctggaggggatggagacaggactggggcaccctctttggaccgggcctgcgaccgccaaccaacctccacaggcttggctgttgaagacccgagctccgggggtctcgtacactgc

SEQ ID NO: 558 - DNA, 491 bp, Zea mays
  Clone ID: MRT4577_10050C.1
aaaaacacgtttgtccgggcccctgacatttttccatctcggcggggagggggcccccaatggggcgtgggaaacaacaacaagggctagcttattgggggctgcctgcttgtagcaagggggacgggcggagccatggccaaaaacgggcacgggcccttgggcaaactcaaacaatagtctgcgctggtgctcatccctgtgaggaagggtggcccccaaaaactcaaccggaagttccttgcgtatcggtgttgcaaaaacaacaccgagcttgggcattgggggaaccatgctgtaaaacttacttatgcagtacttagggagcaccccaaaaaaggcattgaaccacccttgccacaagggtcggtttggagccccatattttggcccggaaggctgctcggggaggaacttttttgctctatccaagacaaactttatgacgacaggggcaccatcgccggcaacatggccaaggggcccaaggg

SEQ ID NO: 559 - DNA, 190 bp, Zea mays
  Clone ID: MRT4577_100510C.1
gcggcagcacggcgcacgcaccgttttccggggttctctatctacgccttcctgcgccgccatggccgccacccgcttgctgccgctgctccgacgccgcctcgccgccgcagtcgccggatcgcctgctccctactccctccgaggaccctcatttcctggaccaacacctgcaaggctatgggggggg

SEQ ID NO: 560 - DNA, 157 bp, Zea mays
  Clone ID: MRT4577_100511C.1
gggtacttaagctgttaagcataccatcttcttgtatgtacttttacatatccgtaggtacatgttcttcaattatcatcgagccaatcattgtgcgagatcaaaattctgggtgctataatattaaataaatccttgcctttcttatatcaataaa

SEQ ID NO: 561 - DNA, 326 bp, Zea mays
  Clone ID: MRT4577_100512C.1
ccaaaaataaaaaacacgaatttttttttttgatcattaaaatttcaaatttaactccccccaaatccaatcgtgatttttccttttttttaaaaataaaaaacacgaatttttttttttgttctttaaaatttcaaatttaactccccacaaatccaatcgtcattggtccagggggggaatttgaaatgccaaacttattcgttaatattggaaggggccgccttgctcttaaatagaatcgcgggatggaccccacaagggttctcaagcttagttggggcaagtgaagtcctttgggcaaattttgccccaatttttgaggt

SEQ ID NO: 562 - DNA, 523 bp, Zea mays
  Clone ID: MRT4577_100513C.1
ccgtccgaaaaaaaaaaaaaaaaaaaaaaaaaaaaaaaaaaaaaaaaaaaaaaaaaaaaaaaaaaaaaaaaaaaaaaaaaaaaaaaaaaataaaaaagggggggcctgttttagaggtaaccagttttatgtacgcgcctcatgcaaacgtgtctgctcctttttttgggccccgcaattttctgttcaatgccctggggttttcccaacgtttgtgtttgggcaaccccttggcgtttcccccttttgtcgctttgccacacttccccttttcgcccgctgttttaatcgcttgggggccctcactggtgccctttcccatccctttcgcggcttttttggcgagggggcccccccttttacccgccctttaaccgcgcccgttgtgggggttttgcgccgcggtcctctttctttttccagttccttagcccccggttttttcgcttttttcctttcttttctagctcggtggcccgtttttccccgccgattttttgttgggcggctcctttgggggtcc

SEQ ID NO: 563 - DNA, 433 bp, Zea mays
  Clone ID: MRT4577_100514C.1
ggggggggagaccaagcttaaaagttaccatgatcacgtgactaaagcatgcaaagtcaaaaaggggaaagcaatcgatcaggcgaccactttgtttcagcaagcaagagatgctggctcgggagctgaaacaaaattcgagtcccggaaatcaaggtaaaaaaaacgaacaacaaaatggcattttctcgttgtttcctaccgaactgcagatagatcaggcaggatccacacgatgtgtctcatgcagtgcagcttcaaattactgggtcggcttcatcatctgatcctcgtcccgtctcctggggaccattcctgaacggacagggaagtggacgaacgctgtctccatccattgaaaccgccatggatttctgcaatgccattcaatccagcagaatggcatgaggcgtcctccaaccgccctcgcccc

SEQ ID NO: 564 - DNA, 1648 bp, Zea mays
  Clone ID: MRT4577_100515C.1
actcctatgggcgattgggaacctcgaggccggccgggaaaccctaaacccctctgatctccctctcgcgccgccgcccaccatgttttttttgaaggatccgccgcccaccatgtcgccgccgcagccaccacacccggtgccccgagagacggtggccagcgctgtcgcttccctgacaacgtggatgaagaagcgcgctgcggaggcgcgcccgaacctcctcgccgacgagcgcgacgacatcgtggtcctccagctctcgctacgccgcatccccgcctcgcgcagcaccaagccgcgcctcctcccgatgccacatcccgttgttgggcacgacggcgcctccgtctgcgtcatctcggacgaccgcaccaagtcgcggtccccttccgcctccgacctccacgcgtccatgtcgctccaccgtttccccgtctccgaggtcatcccgctctccacgctccgcacggattaccgcccgtacgagtcgcggcgccgcctcgcagcctcccacgacctcttcgtcgccgaccgcgccatcctccctctgctgccgcgcgtcctcgggaaggcgttctactccaccaagaaggctccgattggagtcgatttcacccgcatcggatggccggagcaggtccgcagggttcttggctctgcttttctgtacctgcggtcagggacctgctcggggattaaggtgggtaggctggacatggaggaggaggatatcgtggacaatgtgatggccgcggtggaggaggctgtcgagaaggtgccaaagaagtggggcaatgttagggcgctgcatctgaaggctgtggattcagttgccctaccaatttaccaggttgtgccggagttgggtatgaaaatcgaggtgcctgagcctgacattgttggatctggggaggtcatcgaaaagaaggcgaatgctggtgccgatggaagagaggtatttgccaatgtgagttccaagaggaagaggaataagaaggagcagattgaggagggtgttgtgatgcaggaagaagttcaggtggatacagagaaaaagaagaagacgaagagcatcatggttgatgatggccacgaggttggcaagaagggtagagtgaagggcaagcgtgctaccgaggagggaaagaagaggaagaagagcataaagggtgatcgtctgtaagaagatcaagggggagaaatcagatgacatgatcaagaagttgaggaccaaggtttatatgatgtaggcttcacttgagatggccaccaatcaattatactgcagaacttggtccctcaggtttttcttaagttttgttagcttagtagctcaaatgtatgggttatagaagtatggcaaaactgtttcttgttagtatggcaaatctgtttcttgttaagactatgtgctttgctcgactctcatcgatcaattgttgatcttctaagaaaaaaaaaaaaaaaaaagcggccctttgtgctatccagacaagcacgaaacatcatgcgcaaggacatccagcttgcccgccgcattcggggggagagggcctaagcattatatattctgtattcagtgtcccatcagaagatgtacagatgtgctggggttctgtagaaagggttactgtgaatcatcgag

SEQ ID NO: 565 - DNA, 295 bp, Zea mays
  Clone ID: MRT4577_100516C.1
tcgcaacactctagaatgagtcgtatcatccatgctctccgctaccaccgtgccactccagcaggggggcggcctgtccgagttctccgggctcaggagctccgcgtcgctgcccatgcgccggagtgccgcgtctgacgacgtcatgtccgccgtctccttcaggacgcacgcggtcggcaccagctgtaggtcgcggcgggcgcccacggaggccaagctgaaggtggccatcatcgggttcggccgcagctggcgcaagttcctgcggtgctggcacgggcgcggcgacgcc

SEQ ID NO: 566 - DNA, 394 bp, Zea mays
  unsure (1)..(394): unsure at all n locations
  Clone ID: MRT4577_100517C.1
caagatcgcaccagcacgacacagccaagctccgctccgccgacacgctgcgctcgagcccgccggcgagatccatggcgcggctgctcccgacggccgcggcagcggccatcgtggccgccgtcctggtggcgggcctgccgggcgcccgggcggcgtctgcctcgccggcggcggacgacgcgccgccgaacaggaaccacaccgttggcggcggctgacgggtggttcttttactccaacaccaacgcctagtccgggaacaacttcgattgggccataccaccgacgcacacgcaggnttactacctgagccgccggcaagaatcagatcgccangtggtgcataccaccttcctcacgacatgatatttgtgacacacatcaaaagctg

SEQ ID NO: 567 - DNA, 549 bp, Zea mays
  Clone ID: MRT4577_100518C.1
ctcgaagacggccgggacgcgccgctcgcccgccctctccaaatcccaaatccaacccaccggccaccgcaccaccgccgcctatcgtccccacccgcagtccccgcccccgatcgcggcggtacccataatggccgcctcgtcgtcaccgcgtgccgacggaggtccgcgagaaatatttagtctgatgctaattactatgattctaaaatgcatgagctgctgaacactggagatactgatgagttcttcacttcatatgatgaagtttttaaaagatttgatgacatgggccttcaatagaatcttctgaggggtatttatgaatatggttttgagaaaacatttgcaattcatcagagaggaattgttcccttctgcaaggtccttgatgtgattcaaaaagtacaatctggtacaggaaagatagcaaccttttgttgtgaaatcttgcagcatcttgaatatgttctggttgaatgacaaggcctgttttcttgatggcgaaagagagattaacaccaaattgaaaaagtttttcaaggactt

SEQ ID NO: 568 - DNA, 323 bp, Zea mays
  Clone ID: MRT4577_100519C.1
ttatatccatccacagatgtgaacgtttccgtctgcggctcacaggacgtccagcatagctgactactgatgcctgacttgtggtgagctcatctagcatgatgtcttcgcttggacgagatggctggtgatgcatgttgttgatctagatcctgacccgaattgcatgatcctgacctacatgaacaggcccttcagtttatctagcactggtgcgcatctagtgtctatatatatacgacgtgctgataggcgacgcattttccatgccatcttttgcgcactacaacctttcataagaactagacaaggtgagatctcta

SEQ ID NO: 569 - DNA, 625 bp, Zea mays
  Clone ID: MRT4577_10051C.1
cattgggtacctcgatgccggccgggatgaattcttatacgccagtgcattttatccttcttgctaatctgtccacctctctcgctctggcgcgccgccgccgtcctacccacgtgctgacgctttcgttgtactcttcgccggcgacgagaacccatctacttcgtggagaaaagtttgatggcgacgacatccacgcctctgtgtctcgcaacacataggcactaggaatcgccaaggctagccttatgctgagaatgatgcaccaagtccggccttacctacgattgctaagcttcctctccacgctggggggatgcaatagacgccacacacagacccacatgcggcgcatgaccctcaggccgagacaggtattcttacgctcacctacctcactgatgaccgtattgtgagctactgctacgacacgaacaaaatcctgcgatcatactttctacaactatattactattaccccaaagaaggaccctgtgttgctcagcgaggcttctttgaatctgccggcgaacaggtagatgatgaccctcattatgttagagacctttcaatgttcctgccatgcatgttgcaatccaagcgccgctctcgctgtatgctagcg

SEQ ID NO: 570 - DNA, 649 bp, Zea mays
  unsure (1)..(649): unsure at all n locations
  Clone ID: MRT4577_100520C.1
ctacgctacgtacctccgccagtttctttcaaccgccccccggaggaatagtagcacacctaatccaagaagaagcgcatcgggttcgggtcctccagccgacgtacggtctccgtttatcctgccgccggatcggagcgatgctccacggcgccaggttcctgtgctctgccgtcgcccgcctcgcgcacgcgctcatgcggagcatcctcctcctcatgcccctctgctccccgacgtcgacctcagcgatccccgcgccaacatggcagcagccggcgagggcggcgccctacatgaaggtgcacccggcgggcccgctgatggctctcgacgaccccaaggaccagctgacagcgctgtcgtcgtcggcgcagccagcggtcgtcgtcgttgtcccggcgctcaagcatcagcagcctgccgagagagttgcggagacgaagacggccaaggcggcgaggggaaggccgaccagacttgccataccgccgcccttgccctgcgctcccggggtcgacccgttcggcgcggtggaggcagagttggccaccgaactggaagtgcagggcgagggcttctgcctggcgagcaggagaggggtcaggcacgccatggaggatggctatgggggtgncatcactgatca

SEQ ID NO: 571 - DNA, 338 bp, Zea mays
  Clone ID: MRT4577_100521C.1
catctttgtgcccggagccaccacagaccagcagcagcagcgtctgagtgaaccggcagaggaaccaactccagaccgcatacagcggtaaggcttatggacaacatatgcgcaagcgaaatgaaacagaaaagacgagagcgaaagaagggaagaccaaacagtccttgggagctgcacaagaagcacgtacggagcgaggacacagtacatgaaaaagcaacccgagagacacaaaaggcaggagaaagaacactctgtacacaaggacaacaacacagagatagtgaaggacccgcacctgcacgaagacacatgaaaggcacagacgatgaacc

SEQ ID NO: 572 - DNA, 390 bp, Zea mays
  Clone ID: MRT4577_100522C.1
aaaagcacccttccataaccaggggatcaaactatcaccacttaaaaaacggattaacaggggggcaaacatctaaagggaaaaaaggcaattcccataaaaaaatataagttaacatattgaaaaaacctaaataaaatctcggaccctccaaaaacggtctgaaacaggggggaaaacaaaaaatggagccctgaacttactatcccatcctggatttgcatgaggggaattctaaaaggcacctcgaaggcccagcctggggggggctgcccccgccttttggagcataaacaggtcgttgcaatcaaacccccacccacaggttgggcactcaaagaagttgtaaatcccaaaacccgggaaggcaatccccacggaaaactcaac

SEQ ID NO: 573 - DNA, 741 bp, Zea mays
  Clone ID: MRT4577_100523C.1
gtcactggctctcaagtacgatgtagaatttgagcctttgaggaagagattccctgaagtcatttcaagatttgaccaaattatgtccaatggaatggaagcacctacaatctgcagtactagtgatgcagttgatgaaatgagcagattgaatagtagaattgattcactatactgtgaaaaccagcatcttaggaatttgcttgcagagaagacaaagaatgttcaggaattatcctgccagatatctgatgccagcaagaaaatgtcatctcaatattatctagagaaagaacatttgagacaagtcaagaacattaaagaagagcatgaggatctatatgttgaaagtacaataagagatgaaatttaccaaactgttacaagcaaattggttgatagtcatagggacatcttggaggagactacccaaattttgcatgctaaagtttcctcacttgaagctgcacattcagaaaaggacatggcgctgtgtttatctaacgaagaaaataggaagctgaaggaaaagttgtcaatactagaaaaggtgcatttcatcaaagataatcaacatgatcaattgctaatgaaacaagagagtgaggaaatgatactccgtgatattgagatggagccccacgtgccgccacaaagatcatgtcagatttctgatcaggatatgcagtatgaagaactcatcaagctgaatcagacattagagatggcctcaaccacctt

SEQ ID NO: 574 - DNA, 485 bp, Zea mays
  Clone ID: MRT4577_100524C.1
gcccgcagggcaccggcccggaactgaattaacttgctcgacgagctattatctggcgggcgccctacattttttttgttgggcataatcctatcacctatagacgccctcaggcatggtagacggacgagataccgtcgcctgttgctttggaagctacatgaggtgaatacacaaaacacatgcatgaaacgtacgacgagtatcattctctaactatacacagagtgtgttcgatccttagaccagcggcatgctcaatgccaggcaagactattttcttacaagcgcacaaatgaattttcacaaggcctgaggctgagacgcttgtaacctgaacaaaacgagcctgatttccctagaggtgaaagctatgatcttttgctagcagaatgggacaacttcatgtcatctaaggcagggctgtaccatgaccaagcctagtccattaccctctaggagagggaattgaaccagtccggtgc

SEQ ID NO: 575 - DNA, 2366 bp, Zea mays
  Clone ID: MRT4577_100525C.1
cacagcgcgtgggctttttttagatatttattcctatcattcatgccggtcactggtcccttgttattctttccactgccaaacaagagacatatatccttgactcctacccaaggcacagtggggtggccaaggatgttttaactcaactgcagaagtatttggataataaacacaactttgacatgtctaactacactgaccatgtgccacctgttcagcatcaaaaaaacaattacgattgtggctttcatgttttattgtatattgaagaattcatgaaggagaagatgtataaaatcaacaaaaaaatggtgttgaaattcagaaagcagctttgcatgaatctcttgtaccatcctttgaacagaataaatcttgtggaattcagaaagaagctgggtattacattgaaaagaaaacttcctggtatacttgatcttactattgaaggtgagaggagtgaatctgaggctgcagtgataattgaaatagagaacagagatgataagactctagaggatgaacatatttcagttgagaaagagtaaggtaaaaaagaagagcatgtactatcaactgacacaaagaatgacgaagcttcatccccatctgacgaagagcctgagcagagtgagtcatctgagcagactgtgtatgaaagatggatgattccaaaggatcattatcacctgagaaagagcaagctggagaaaaatatcctcaaacgaaaaaagaggttgggcaaagacaacatgtcctctcaggatatgatttctccagtgtttggcaagaggcttgtgcctgcaaacacacattttacctctcttaggaagttgcgaaaacacaagtttacgtctgataagatcaacgatgagatctgcaaacatatcttgaactacaatgaacgggagttgttaagtgtggggcagactaccatgactgggggtcagctggaaaagtacgtaaatgaaggtgacaatggtgataaaatactcagagcattcatcacatgcttcacttgtgatgaaaagttcaatcaagggaacatcacaaccgtcatcccgccacatgaagtatccgaagagggtgaactctccaaagttgatgctgcacaacttgtagaagaaatcaaagctgtactcaaaggcaccaatgttgcacgtgtacgcaaagacaccgaatccaccaaagatcccaaagtgaaagtctttcgaaacatgaggaggacatttatattttttcctttctacaagaatgaagaattgtttgtatttcatgtcgatacgaaaagactacccatcattgatgctctgttttgcaagatgtcatcattgtcgtttgaagatagatcctgactaggaaagtctatcatgggctgtctactcaaagccatgaaggattccggcttcatggtgaaaaaatatggtgattgtaggttcacagttactgtaactgaactcgaattcaaagatagtgcctcagcgctcataagttttattgagaacttcacttctaagttggacgacaatgccaagaaactgaaaaagggtgacaaggactggctggaaccttacaagaagtcgacagtggcataccttgtttgtcacactgaaaataaggtggtgttgcctgacgatattgtgaagtacaagcaaaacaagtgaggtggttgagtcgttaatgggtccagtggctgtgttttaagacttgtatcacactacttgtatggctttattctctgaagctgttccattgttgccgttagtaacaggtgttgcttttgtctctgctcagtgggtgattcatttcatccagagttgctgcaactttaatcagtctatagtgttgggttcctagctcagtgttgagttctaaatgatcgtgttgtgttcctaccaagtgttgagctgcacgacggcgtgcgcagccgcagccgcaccggcgaggagcgtttagaactctgttgatctacatagtgtttacaccggctcaacagagttctcatgttgatttttgaaggacccacgtgttgggttcctgctcagtgttgagttctgaacgatagtgttatgttccatgggcccttgttgatttcgagaggacccacgggccgaacggcgtgtcactttcatgcgtctatagtgttgggttcctgtctagtgttgagttctcaactatggtgttgtgttccaccaagaagttgagtttcaggggcctattatattgtctcagttaatgggtaactcagttaatcctataaattgtgtcagttaatgggaactcagttaatggtaaaaaaaaaaaaaaaaaaaaaaaaaaaaaaaaaaaaacaaaaaaaaatttaaaaaaaccccccccccccc

SEQ ID NO: 576 - DNA, 558 bp, Zea mays
  Clone ID: MRT4577_100526C.1
gggtgttttttttttttttttttttttttttttttttttttttgggggaatttttgctttttatttggttccaatttagtctctcataatgcgtcatgtcattcccatcgttatctcgaaatccagctccaaatataaaagataacctagggggggggcggcttttgtgaaacaacaaaagacaacagggaaaaaaaaagcatttaaaagacagaaaaaacaggcctgctcccttataaactctataaaactttgcggtaccatcttgtccgataactcatccaaatcgttccaaactattctgtcgtaagatgtaccaggtgtctgcggctgtgttttctttcttgtagccgtgccccgtctttagaaaacatcattattctaaatatcatctgttccttgtccacccttgtgtgtgcgtgcgtgtattcccatgatgctggtttagaaaagaaaagaaaaaaggggttgaaaataaaagaaaaatgtcgtgagtcctgctctatacagtggtctccttatgtcgagactcaggagccaccagtgatttttcccact

SEQ ID NO: 577 - DNA, 1178 bp, Zea mays
  Clone ID: MRT4577_100527C.1
cacagccttggctagaatactttgagaatggagtccccatgtccagaacttttaaccataagttgtattaaattgacttctatcatgttttaaactgtattaaattgactgatatcatgtttttttattggcaaagcaatgaacgggagttgttaagtgtggggcagactaccatgactgggggtcagctggaaaagtacgtaaatgaaggtgacaatggtgataaaatactcagagcattcatcacatgcttcacttgtgatgaaaagttcaatcaagggaacatcacaaccgtcatcccgccacatgaagtatccgaagagggtgaactctccaaagttgatgctgcacaacttgtagaagaaatcaaagctgtactcaaaggcaccaatgttgcacgtgtacgcaaagacaccgaatccaccaaagatcccaaagtgaaagtctttcgaaacatgaggaggacatttgtaagtagagattttttttcatggaacaatgattacactcagcattctgataaatgtgtttttgcagatattttttcctttctacaagaatgaagaattgtttgtatttcatgtcgatacgaaaagactacccatcattgatgctctgttttgcaagatgtcatcattgtcgtttgaagatagatcctgactaggaaagtctatcatgggctgtctactcaaagccatgaaggattccggcttcatggtgaaaaaatatggtgattgtaggttcacagttactgtaactgaactcgaattcaaagatagtgcctcagcgctcataagttttattgagaacttcacttctaagttggacgacaatgccaagaaactgaaaaagggtgacaaggactggctggaaccttacaagaagtcgacagtggcataccttgtttgtcacactgaaaataaggtggtgttgcctgacgatattgtgaagtacaagcaaaacaagtgaggtggttgagtcgttaatgggtccagtggctgtgttttaagacttgtatcacactacttgtatggctttattctctgaagctgttccattgttgccgttagtaacaggtgttgcttttgtctctgctcagtgggtgattcatttcatccagagttgctgcaactttaatcagtctatagtgttgggttcctagctcagtgttgagttct

SEQ ID NO: 578 - DNA, 110 bp, Zea mays
  Clone ID: MRT4577_100528C.1
cgaataacggatcatataaatgagttactcggtctacggacagggatccgtaagtcgagctcgtggccttcatgtgtacactgtactcgtgagtcactgcgatctcgaga

SEQ ID NO: 579 - DNA, 963 bp, Zea mays
  Clone ID: MRT4577_100529C.1
aattcggcacgagggagagagagagagagagagagagagagagagagagagagagagagagagagagagagagagagagagagagagagagagagagagagagagagagagagagagagcctcgtgccgaattcggcacgagggcgtcgcgttgtgtcggaggttggagttggagcgtctcgcgtgcgagaggatctgagcggagaaggccatggaggagagtaattagcggttgctgggtcgggaggaggtggtgtggttttgatcgtagtcgcgtttgccggggctcgatttcgatcagaaaactttttttaccggatattcttgggtgggtgtgtttttgggccgcaaattgttatcgccggtgttcggggctcgattttgaagaagaacccaatttattaggggggaaatttcctgcttttgttttcggggcaatggttttggactcccagacgcttcggattagagaatttttgccccaataacgagccattttttcagttgtgctactcgtcaatcaatccagtgattctgaactctgaaagaaagaagaagctttcctaattttcgtgctcactgtgtccaaaagctttccgttggatctacttgtgaatcggttccttttttttttaatctgagatatccttgtcgctttaggttttcgactcggcagatccaagggaacgccgaatttgcctgatttctccgcgatttttggtccgatcgagaggctccaagcctcttttttttctcgcgaggagaagcaacggttttccttttttttacgccatgtccatggcgctgagccgcttcacgcaatggctatggccggggagcgccgcggcgccggtggccacccacgagcaccccaacgaggggctgacgagctcctccttcccggacttcccctccggcttccgggagcccgacaccgtcacgttctacaccggcaggggcgcc

SEQ ID NO: 580 - DNA, 492 bp, Zea mays
  unsure (1)..(492): unsure at all n locations
  Clone ID: MRT4577_10052C.1
aagcagtggtaacaacgcagagtactttttttttttttttttttttttttttttaaatcattgatgatatgaatgtgtattgaacgaaataaaaaatatataggggtccacttttatagaatttaccggcaattccacaaacggatccattgcgagtataaatacctatgcgagctcacaatatcaaggcgtgtcccaaacccccatgtgacttcccaaggttttatagcgaaaatacaagcccgggaccacaacacaagaccgaaccacctgagacttcctccaacctcggccccgcgggcccaaatgaatagacaatcgtatttccatgggctataagggcacccaaaccttccacgtggaccgcggcacagacaaactatagttcaagcaccanggcagaatctgcggtgccaagtgcaaaccaacacacaactacctccagctgggggcnttggagtcggcttttgggttttcagtcacttttttgcc

SEQ ID NO: 581 - DNA, 280 bp, Zea mays
  Clone ID: MRT4577_100530C.1
aaaaaaaaccgaaaaacaagcaagagaagaaacacgcagaaaaaaaaaaacacaaagacgcagaagccagaaaagggaaaaaaaaaaccaacaaaaaaaaaaaaaaaaaggccccccacgggacccaagaggcccccggccccagggccaaccggcgaaaggccacacccagggggacccccagcccggccaacccccaggagacccaggaccccgcggggcggacaccaagggcaagagcgaaaccggcaagcccgggaaaaacaccgacggaggacag

SEQ ID NO: 582 - DNA, 124 bp, Zea mays
  Clone ID: MRT4577_100531C.1
tggggggttttttgaaggaggttggtgggctaatccggaaacacaaagtacgcatttgtgttcctatccaccgagaaacctgccggctcgccgtttccgcacatctcatgggtcctagaatatc

SEQ ID NO: 583 - DNA, 107 bp, Zea mays
  Clone ID: MRT4577_100532C.1
ggatagatagctagactgatcattcaacggcgatgattgagtaataatgtgtcacgcatcaccataggtgcacaaagaaagagtaagcaaggacctagagttaacaa

SEQ ID NO: 584 - DNA, 1020 bp, Zea mays
  Clone ID: MRT4577_100533C.1
cgaggccggccgggttcccttcccttccttccaatcgcacgcggcacgcgtcttggtcttcgtcttcgtcttcgtcctcgtcttctcccccaccccacggtccacgcctacctccttattgcttggttggtatacataccaccatcagcacctcgctcttctgctcagctctccccctctagcctcacctaccctatacacagccactactgttgatcgattgagtttgaacccaccaggatcaggcttaggattacagcatgtcggcgtccccggagttgtacaggcccgcggaagcgccggccttctcgccgtcctgcgccacgcagccgctcgtgttcgccggcgacgactactgctgcaggacgccgacgggcagcgggatctgctacctgagggagcccaccacgtgcccgcccgcgccccggaagccgccgccgccgccgcccatgtgcaggaagcgcctcttccaagcggcggatcagcagcttgctgaggcggggcccgtccctgttatcagcatccgcctcgacgagctggagcgcctcttccgcccctgtccgccgccgaccaccaccaccaccgacaagcggcgccgctccggctccggccccagccccagatccgccacgaaacatggtgctcagctgcagctgcgcagcatgaattgaattgggttagcgtaacgtagcttgcacgcaccaaccaaccactccctttttagtttttgctgctgcatctgtctgcttcttgttgctgcaacaagcaaagcgcaagcggtggcgcttctttttatttatttatttatttattacggagtacttgcttccgttctcaaatatttgtcatttgatagttcatttcaaaaatttgacaaataaaaaagaacgacgaagcaagcagtacccacctgtgtaaatcaaatcaaatatgcaaagttaccgccatagcaataaaatcacccgtgtaaatcagatcaaaaaaaaaaaaatgttgggtattacaaaaaaaaaaaaaaaa

SEQ ID NO: 585 - DNA, 602 bp, Zea mays
  Clone ID: MRT4577_100534C.1
gcccctcctcgagtttttttttttttttttttttttttttttttttttttttttttttttttttttttttttttttttttttagcaggactgacattacattcattacccgctggcaaaacatgcttttggaaaaaagattgtacagtactacacataccaactagtcactcactactttttactgggagggacggcccatatatcactcactccataacatagggcaaattaaacgggggaaacccccgcaaaacaagaacaacaatacccaaacccaagtttttttttagggatgactagctataataaagcatgcgggcgttttaaataaccccaggggccagcaaacatggccttttcactggccatccatttcgcccgatctaacgggggttgctcctggtctcgtcgctgtaaaaccaatcttaaacggggggggagttgggctgcggcccgtcaaaaaggttggcccccatgcccttgggggccaggttgctccccggggggaaaacactgccccacacgttgccggcgccgcgcggggttttcaacaacaacggggtcaccggggttgtgggggtcgacggggtcaactgcccc

SEQ ID NO: 586 - DNA, 215 bp, Zea mays
  Clone ID: MRT4577_100535C.1
caggttcagatgacatggttaaaatcacagttgcagggggactctgaactggcggaggaggctcatgttatacatgtgggcgtgaaagcacccgtccacgagatattcatgatctgcaaattgctcatctccggctatgtatccagcgtagtgtctatggctgctacagctccacttgaaccatcgaaaatattgctagacgtttaaaatccgca

SEQ ID NO: 587 - DNA, 446 bp, Zea mays
  Clone ID: MRT4577_100536C.1
aattcggcacgagggatcctaccgcagggccctcactctggtgaccacgcctcttctcttttccttcccttccatttaatttcgtcgccgcacctccgtccactgcatgttcgccactacactactactagcccgccggacgatacccggatgctcctgtctcgtgtccggaatgcgatggtgattggtcgctgtgctgctgggttcggttgatgcgccccgaggcggccaggccagtgaccgagtggtttgcgctgtttggctgcggatgctttaggggcttgattgggctggaatatgatggccgtgatcggaatcagtctacgattatctctctccgtgccattggcatcgatacagcccccttctgattgggattgctacaattcgaccatgcacatgcactcgccttcacatgctaattacataattaccaacatgccatt

SEQ ID NO: 588 - DNA, 249 bp, Zea mays
  Clone ID: MRT4577_100537C.1
cacgcggagcaacgtcgtgctacctctgatcaaccaagcaactctggcaaacctttctccctactctgacaacacaattacttccattcaccaactgtctacactgaaccctgccttgctgaaccacatcgttggaggagccatcttttagattgcatatgagatgtacctcgataatggtgaccctcataccggcctgtgccacctaaaagtaaacaatatattgattgcgacacatcgccggccaga

SEQ ID NO: 589 - DNA, 731 bp, Zea mays
  Clone ID: MRT4577_100538C.1
agcgtggtcgcggccgaggtactttcttcagattccggtctagagtatgttcccattcacttgttaaggaaatggctatcaagaacgaattaaccctttattcttttttttaagtatacccctcccggggaaagaagagtaggacaaaagatatggaatacaatacaaaaaaggatccttatttattctttccttcctttatccctattcatacagaattcctcatgaactaatgccaaattctttccatttattaattgctataacgagtgatttattccaatattaagttattaccgaacaaagcaaaattatattatataaaggatgagatcaattcggaagcgcttttttgttattctagcagacgtaattgctttggtctaattttgggctttccaatcaattttatcttatctaattctatctcccgcgtactctgcgttgttaccgaaacgaaacaatcctttccttttttctgatcatagaggagccgtatgaagctaaggtttcatgtacggttttggaatagcggtgggaactgtgatgttatcatcgactatgattatctaatagttcaagtacagttgatatagttgaagcacagtccaaatatggtttttttggatggaatctttggcgtcagcctatagggtttctagtttttctaatttcttctttggcagaatgtgaaagattaccctttgatttaccagaagcagaagaagaat

SEQ ID NO: 590 - DNA, 382 bp, Zea mays
  unsure (1)..(382): unsure at all n locations
  Clone ID: MRT4577_100539C.1
atgagccttttgcatatattttcatcaaacatggcggggcctttgcgggcttttgtggatttcagatagccncatcagcctaggcttcagtgctcaagcctgtgttttttactttatattttgagttcaactcatgttacaccccgatttaaggaacataataatgcatgagcctgaggcatatattttcatcaaacatggtgaatcctttcctgtcgttggtttagtccagatagccgcgtcagcctaggcttcagtgctcaagcctgtgttttttactttatattttgagttcaacccatgtcacacccagatttaaggaataaagccaggcgtgtctcatatattcgccacagaaaaacatcacatctaatgacaaaat

SEQ ID NO: 591 - DNA, 403 bp, Zea mays
  Clone ID: MRT4577_10053C.1
gcaaatcagtcagcttgatgttaatgagactgtcatggaaagtgatgatactacgcagccacctgtgcacgtgcgcaaacaggatccaaagaaggcactacttgacgctgctaaagattcaactcagaaggctgactctaagaaattttatgcatgcaatggaaggtcatgaatggggggccttcaactgcttgtgtgaaacacacagcagcagtttacaaacataagccagctcctgaagcattgttcacactttgtgaaggtctatatgaaccatatgagaaacctacccacgctattggcaccagagatgggataggagaccaaaacaactattctagcactgagcaaggctattcaattagcatcaagcatatgactttccatgccactattgaaatgg

SEQ ID NO: 592 - DNA, 593 bp, Zea mays
  Clone ID: MRT4577_100540C.1
aaagaaaaatccccatcaataagcatcccgccgcggcgccaagatccaagaagcatcacaggaagaagcggcgccatgaaccttgggcacgtcgaggaggaggtcgggaagctccgggaggagatccagaggctcggccagcagcagcccgacggctcctacaaggtcaagtttggtgtcatcttcaatgacgaccgatgcgcaaacatatttgaagcattagttggcaccttgcgggccgccaagaagaggaaagttgtcacctacgacggtgaaatgcttctgcagggtgttcatgacaatgtggagataaccctgttccctccccccacggtcgctgccacttgaagtttgcaacaccggcaagtctcccacattattgtgtcaatctgcttgtaatttgttgtgcttaaattcccatgaactgtttggtgctcagaagagtactattgtgagtgaactcatgatctatgcaattgctttgctctattgcttgcatggttgttgaaactcagtgctgatgtactgtgttgtgaaacatagagcgacaagctccaactctgaagtaaatggccaccgtgttattgagagcg

SEQ ID NO: 593 - DNA, 374 bp, Zea mays
  Clone ID: MRT4577_100541C.1
gtgggaagagagaaaggttgagatggcggctatagctgcatccgaggtgctggtggacagcgcggaggaggggtccctcgctgcggcggcggactggccgctcagaagcgcgaacagagactgcgcaaattccgggagctgcacctgatgcggaatgaagctcgtaaattaaatcaccaggaagttgtggaagaagataaaagactaaaattacctgcaaattgggaagccaaaaaagctcgtttggagtgggaactaaaggaagaggaaaagagaaaaggaatgtgcggcaaagaggagaagactatgagagagtgaagttgctgggagatccagtgcagaagatgcaggaggatgggagacggaaaagaaga

SEQ ID NO: 594 - DNA, 587 bp, Zea mays
  Clone ID: MRT4577_100542C.1
agcaactagtgcagcaaaccgtcacttcactcccacccttctcatctccccgtcctcctgcttctgcacgtacgatcaccaagaaccgtgcgcgtgccatggccgagaagccgcccaagcccaagcctcccctgccgtcgaagccgaggcccgcggcgggaataccaacgacgacgccggtcccaggcagcaggtcggccgcgccgcctttgaagaagcccacgctggcgccgccgccgccgccgcaggtgctcccgctgaagccgccgccggcgcaccagtaccggcagcagcagccgggcggcgcgcggaagccgcgggggtaccggcagcagcagcaggcgcaccggcgcgggggcgggtgctcgtgccgccgcgcgtgctgcctggccacgggcctggccctgctggcgctctgcctggcgctcgccgccgcctgcctcgcctacctctactaccgtccgcgggcgccgtcgttccacctgcggtcgttggcccccgtgcggctccgcctcggaggcaactcctcgcccgcggtgccggccatggacgccaccgtccgcgcccgcctggtgtcgtggaaccca

SEQ ID NO: 595 - DNA, 661 bp, Zea mays
  Clone ID: MRT4577_100543C.1
caaagaattcggcacgacgccgaatcgtttctgttgaagaagccatggaatcgcgccgcctcttcctcactcgccgcctctccatctcctccggcgcccagtccagcgccgctttcatcgccgacgaaatctatgccctcctcaccacacgatctttccgggcttccgttaaccgcacggaactgttcatacgctccaaatccgtcacagcctccggcgtcgccgagatgtaccgctcggtggccgttgcaggcccacctgggcagcccctttacctcggccgcgcggcctccgtgctggtcgaggcatccgcgcgcgcggccctccccgacggcgcgctgcggctgctggacctcctcatactcacgcccaacgcaccgctgccgtcgggcgcctcctgcggccacctcatggcgaagctcttctcactcgggcgccacgcggatgcgcgccgcgtgttcgagaccctcggcgatcgccagcgccgcgatgcggtcaccacggtttggagagtcgggagagcggctgacgccgtcaaggtgttcggcgaaacggcggccacgaccacggcgccaaaatattccagtgaccggtatgttaccatgaatatgatgactgactgcctgatgaagggagatctggaggctgcttggaagtgcgg

SEQ ID NO: 596 - DNA, 212 bp, Zea mays
  Clone ID: MRT4577_100544C.1
aggtttccgaggcctatccgcatctactctcgcggctctcgccagccagtctagtgtttcggacccagccgtcctaatccgccctggcggggaatgtcgaagcagggaggaaaggccaagccgctgaaggcgcccaaggccgacaagaaggagtacgacgagacggatcttgcatatctgcagaagaagaaagatggagaagaagcactgaa

SEQ ID NO: 597 - DNA, 339 bp, Zea mays
  unsure (1)..(339): unsure at all n locations
  Clone ID: MRT4577_100545C.1
tcgagggcgcgtccgggcttctcctccccctcttaccaagtcctcctcgggttaaggttccttatcctttttttgaagacgatggcttcaggtgatgttcantaccttttctttctccgcgggctttcctgggccaccaacaacgagtcgctggagaatgccttctgcttctacggctaaatcctttactccaatgtcattacctaccggtagaccgggaggtccctcggcttttgcttctttaccttttcttcccagaacttcattctctaccctatcgataacattaactggaaggatcttcactggcggaacattactcttaaccatgcccattcc

SEQ ID NO: 598 - DNA, 530 bp, Zea mays
  Clone ID: MRT4577_100546C.1
gcagatgatagacacgactaaagattacattcaagcgctgagcattgtgccgacaagagagttggccttgcagacgtctcagattttcatcgaagtttcaaagcacttgaaagcccgcgtgatggtgaccaccggaggcacgaatttgaaggacgacataatgcgtatatacgaaaacgttcacgttatcattgcgactcccggtcgcatactcgatctgatggagaagaaggttgccaagatgaacaactgtcaaatgcttgttctcgacgaagccgacaaacttctgtctcgggatttccaggggctcctcgatcgagtcatctcgttcttgccgcaagaaagacaaatccttctctattcagctacgttcccgatgaccgttgaagaattcatgcgccgtcacctcaagaacgcctacgagatcaaccttatggaggagctcacactcaagggagtgacacagtactacgctttcgtacaggaacgccagaaggtgcactgtctcaacacgcttttctcgaaacttc

SEQ ID NO: 599 - DNA, 788 bp, Zea mays
  Clone ID: MRT4577_100547C.1
gctactgccatgagcataaacacttcaatgcgagcttcctctatccgagggacatacaaattcatttcacctccatcaaaattagcattgtaagggtttagatggagactcatcaaatcttagtgttctccttggcattatccttgcttgtgctcaagtacaaaagcaggctcactatctattaaagaggacaccgtctccatcttcaaaatgtatttcaactatacatccacactttaaatactgagtagtaatccttctatcaccatgctttaagctcctgaaaaagcaaatcatgatgttgtcttcatcgcttcatagcggtgagctcctcgggaacgttgttagaatcgcttccgctgtccatttgagctgttgtcgactggatttcggagggcacgacatgaacatggagcacaaactaacactggttgcacaccatgcaaacccacatgtggttgctcttcttctgctacttcacccgagaccaaagcaaaatcgagtaatagaaccatatggacaattggaatggggttttgagcagagatggtggtagcaacgcaaggttgcacacctgcatagtggcacactgcacgacactagagggcgaggaagagtctcgtctccatggtgatggccagttctcgagtggagtggatatgacgagctcagagagaattcaatttggagttagtagattagaaaatccatgtagtttcatgattgaatggtcaaagggaaaataacattatcaagctgcaatgacaaagttcagaacctaagctaac

SEQ ID NO: 600 - DNA, 210 bp, Zea mays
  Clone ID: MRT4577_100548C.1
tagatcgcgagcggccaccctttttttttttgttaaacacaaaaactttgcaaccctccctttgggggggcttcaattttacggatctggaaggtgctactagttgggcttcaaaatggcttctaatctgaaactggagacacgtttgtcgccggtttcacagtccaaagctgggtcttaggcgagtaaaaccgggggtccgaattgggg

SEQ ID NO: 601 - DNA, 403 bp, Zea mays
  Clone ID: MRT4577_100549C.1
cagacgcgtgccatctgctgtagtatatcttttggctagatagctcactccatcattgggggcgcattattgagcgagtgggtgtcacacatcaccatgagtctcaataggaatctgagcaatgacctgaataaactattgaaacgcatctagtgaccaaggaatataaaatcttctactgcaccattgatataacactttggaatgattgtctccctttgtatacttgcttttctgtttacgtatgccattgtaaaccttctttttgaataactctattatgttcttatacttcgctgtatttctttattttaagaacaattttatcatgcctctactctcattgatatttcctttcattctgattaccttataatttatttttttttcaaaaatatttaaa

SEQ ID NO: 602 - DNA, 416 bp, Zea mays
  unsure (1)..(416): unsure at all n locations
  Clone ID: MRT4577_10054C.1
tgtataagtccctcacacactcactatacactgatctgttgcagcaagaaggaagaagctagcgccttcctagcttttgttgtcagccatggccaccaccgcccagtacaggctcctcaagtacaccttagagggctcccggctcgccttggtcacgcacacacaccaccccagtgaccgtggccgtggacactccgcgcgccggcggaagtcatatccgcacgaccatctactnctcccatacaaagacctaccacctgacgtgcttccggctcaatcacatcatggagtccatcttgtcccgggagatgacctgacgctacaagacggacatgatcactgacgccgacaccgacatgctgatcgagggccccggacacctgtgcctgggctgcgcgcacgagctgtgcaatgac

SEQ ID NO: 603 - DNA, 442 bp, Zea mays
  Clone ID: MRT4577_100550C.1
gtcgaagagtctccttcgggctccaccaaggcatcgatagatcctaccgatgcgtctacacggatcaccctcccgtatctgttgctattactcctgagatgcggatgctgctattgctcgatttaatacccgacggctggcgcagactgccaatgtgatggccgattacaagcatatcgctgaggggtctggatgatggatcgccggattaccgtgatgagctctacaagggtaagctgcgggcagcaaaaaaactactcaaactatgtgaagtgaatggagggctttatgtcaaatatgggcaatatgtatctacactaacacaagtgccaaaggagtactcattaactctgttctgcctgcaagaccaggcaactgcattcaagcttcaagatattaaagccatggtagagcacaactttggcaaggaattgtatgacat

SEQ ID NO: 604 - DNA, 363 bp, Zea mays
  Clone ID: MRT4577_100551C.1
ttttgactttgcgtaattgaaaaccgccaaacaaaaaatgggggggtatatcctaaaaggatcggcagacaatcaaaattcaataaatcatcacactcaaactatatttgctgactgcaatcattacaatcgagtgcattcactattcaaaatacatatgccagcaatatgacctatacccccaaaaaagtaactttccatacctagacacgttgatccctaaactccagacacaacacgccagccagtgctccaccacaacaacagatactgactaactttttgaattaatggaagaatgcaccatacccacgaaggcaaaataattctggaactaatgcaatgcgtacgcttacaccggaa

SEQ ID NO: 605 - DNA, 557 bp, Zea mays
  Clone ID: MRT4577_100552C.1
ggccgctttttttttttttttttttcttttttttttttttttttttttttttttttttttttttttttttttttttttttttttttttttttttttttttttttcacacaaaagaaggggtccataaccaaaaaaaaatccatccgcaaaaaagagacggaagggcccacaagggggggcccccccccagtaaaaaaagggcaccaacacaaaagggaaccccgaaccaatcgaggcccccttcccctagggaccacaagggttcaaacaaaaacagcccccccctaaaatggaatggggccgcacccccccccggccctggaaccccccctcgggggaagacgcgtcctggtactgggggacaccccaacacaagggcttccatgttgctctcgccctcggaaaaaacaatttcttccatgccctccccggggtaccaaggcaaaaaacccttccttctaaacatgggagggaactgttctctcaccctccggaacattccctggaaggaggtcgagttccccataaagggggcccccatggacaggcccctgggc

SEQ ID NO: 606 - DNA, 575 bp, Zea mays
  Clone ID: MRT4577_100553C.1
attgggtacctcgaggccggccggggcacgcctgagagtagtcaaccacgacgtctgacggcagtgctcctgctcctcctcctccttcccggccgccgcgcgagctagggctagtgtctcttcttcgcggaggcctgcgacacgatccatcatcatggacgctggtcagactgctgccctcaaagatgctatgtcatgcgagggctgcgacgcagcgcgcaaaagagggctgctccaagcatcggaatagagtaagaaaccattcttacatacaaccatcaacgagcaccaaggagacagacaaaggctacgacaagcctgaggacgtctcccagacgatttccaagaccttaaagaggacctcaaactgggacgtagaatccacggccccggacgctgcggcgactccataatgcaaaccagctcccaacaccgcttgagaagcgcctcctgctgctccggcggagccatagatcaccccaacagacgctgacgcctgatcgatcacgctattattcactcacatgagtatgctgtgcgactgcgactcctaaagcttctatccagaaagagct

SEQ ID NO: 607 - DNA, 637 bp, Zea mays
  Clone ID: MRT4577_100554C.1
cccggcttctcctgcagaaattgcagttgtccccctgttggtcatactccctgtgctggagagtcaggtatgcaaaaggttagcacttagatatatcaaactacagaaggttcatctgcaaaatatgcacctcatatactttcctattatgctacaatgcaacctaaggactgtcacatcgtgttgaaggatatgtgtatttctaagaccgtttttgtagttgataatattttgcatgttaagttactaagtataaaaaaagttgtcattgcaaacatacagatagtcactaacatattactggatcctacttgtttagctactgcacacgttcctaagcatgagcatgtttgccttcacattacattgagtcatacaataacatttattggctttattacagaatattatagagcaaagtgtgtggccaattttactagctgagagcttaaaggcactgggcgggcttggcttactttcccttggtgggaaatacttcataagacgtgtctttgagtttgttgcagagtcaaggagttcagaggcatttgttgcgctctgtcttcttacagtcgcagggacatcacttatcacccagaagctgggatttagtgatacattgggtgcatttctggct

SEQ ID NO: 608 - DNA, 2064 bp, Zea mays
  unsure (1)..(2064): unsure at all n locations
  Clone ID: MRT4577_100555C.1
tcgaggctggccggggtctcgtcgaccgagccgtccgtcgtcctccctggcggtctggccgcctccgccttcctccccgtgcgtctcacccttttcctctacagcttcctctgcccaatcagctcgtcctctcccctcctctccctcccgtgaactgctaaaatccctcgccaagcatttccgtcgggttaggtggtagataagccgaaaatcgagtggaaaagcatcaatcgagtgctgcgctggttgcctggttcgtcccaacaaattccaccgggaatcagggtcgtccggcagcggctgaggcgtctgggttctggaggagcggccgtcggtgaggggggatggggggcggcggcggatcctccgggccggagctgtcgacggacaacatgaaggggatagtcctggcgctgctctccagcggcttcatcggcgccagcttcatcatcaagaagaagggtctccgccgggccgctgtcgcctccggcgtccgtgcaggtgtaggcgggtactcatacctcatggagcccctgtggtgggttggcatgatcattatgattgtaggtgagattgccaatttcgtggcatatgctttcgcccccgctgttctggttactccccttggagcactcagcataattgttagtgcagtgctggctcatttcattctgaacgagaggctgcatgccctcggggtgctcggctgcgtgatgtgcattgcagggtctgtggtcattgttatccacgctccacaggagcaggagattacttcagttaaggaaatatggaacatggcgacacaacctgctttcttgttatatgttgcgtcagttattgtgattgtttttgtcctggtgttctatttctcccctctctatgggcagtccaatgtgttgatctacactgccatttgctctttgatgggctctctttcggttatgagtgttaaagctcttggtacatcactaaagcttacttttgagggaacaaaccaattaatatatccagagacttggttctttatgcttgttgtggctacttgtgtgttgactcagatgaattatctgaacaaggcacttgacacgttcaacacggcaattgtatctccaatatattatgtaatgttcacaactcttacaatacttgccagcgtcataatgttcaaggattggtctggtcaaagccctggaagcgtcatttctgaaatttgtggcttggttgtggtgttgtctggtaccattttgttgcatgtgacgaaggattatgaaaggatcccacaatcaagaagtgtttatgcaccattatctccctctttgacaactagattaaatggagaattgttgaagcatgtcgtggatgagaggacttcggacgaagaaaaggccttgagaagacaggagatgtattagcgtgcgtcagaatatcaaaggaaatataggttactctgatggattctccggcaggggcttgtacatggcgtagtgataaccttcccatagcgattgttgattcctccattacagtttgttggtttgtgtatataactgcagcaatttgtggctaccgagtgattgcaaatctgccgaggtggtggaaggctgcagagttccaccaaaaagaatctaagtcgggtgcatagattcttatcgaattcccttcttcctttcgtaacttcctcagttttgtccacggcatttgttccatgtgagttttagagtgaatcacggaccctatgcaactgatgtacattattattgtcatagtgaagttcgtgcaactgtgaaaaaaaaaaaaaaaaaaaaaaaaaaaaaaaaaaaaaaaaaaaaaaaaaaaaaaaaaaaaaaaaaaaaaaaaaaaaaaaaaaaaaaaaaaaaaaaaaaaaaaaaaantctctgggggggggcccggcccccatttccccttttgggggggcatataaccccccccttttggcccttttttaaaaaggggggaatgggaaaaacccgggggtccccaaatttaatccctttgaaaaaaaccccctttttcacaggggggaaaaaaaaaaaaagccccccc

SEQ ID NO: 609 - DNA, 210 bp, Zea mays
  Clone ID: MRT4577_100556C.1
ggggccgcctctgtgttgggggttttagcgactttttggctccaaacaagaggcggggacgcactcgccagttgtcggccccatgcgcttaaacaggcctctcgaggacgaccctacagccccatgaaagcattcttgaaaccatcttattttgccctggaggcaatgccacaagaggttccaccccccaccctgaacccataccccagc

SEQ ID NO: 610 - DNA, 254 bp, Zea mays
  Clone ID: MRT4577_100557C.1
gttgctcaagggcactggaccgtactggcctttatagtccacgtaccatgagtcaagccatttttttttattttttttcgaaaaaaacatggccgcgccaaaccagagaattagcgaacacattttcgtaccggggtggatcctgtgaaaagaggacgcgcgggccgggccaggccggaggaagcccagcccaactagacccctgcagcaaggcatgtgatttcccaccaatcgcacggaggccaccaaggcac

SEQ ID NO: 611 - DNA, 586 bp, Zea mays
  Clone ID: MRT4577_100558C.1
ggccgcttttttttttttttttttcatcagtttttcctttttttttttttttttttttttgttttttttttttttttttttttcttttttttttaaggggggggaaaaatctgattccgtttcaagaccaaacgggtcattcaggataaaggaccaccccatcaatcccgccctgggggacgcgggagcataccaatcacaaaggcggccggtgaagcccacaaggattgcggtggccaggggctattccccaagccaaagtttctatagggggggacccccccggcagcaatggaggggaatgggatcggctgttcaaacccacacacaggggcaggggggggggcaattggggccggcaaaagccccggcacccggacatttaccggatgttcagtgaagatgccctggaggcccaaaccgaaaaccgcctgtacccgggggtgcacctcccccgggcagggggggtggaaacactcgtggcgaaccaatggggccggagggaagaacctgggcgcccccctcgggctgacctggtccctagagaacatccccccccggcccaggaagggggggctgacaaccc

SEQ ID NO: 612 - DNA, 288 bp, Zea mays
  Clone ID: MRT4577_100559C.1
aaatggaggtgggggctcaaacccatctacattatatatttgacacaacgtacagcatcttgcagagttctttcctacgtcaaaaaaacaaatgactcaaacttaatcaatggccttactcgtttaggtaccatctactaactaacgagtttctaaaactaaacttcctaaaacatgggcccactaaaagttgtcgaccatcaccatttagatgattcacacattaccggaacctatttgggaggatcgcactaatgattggcgtctcgataactgtccgggctattg

SEQ ID NO: 613 - DNA, 483 bp, Zea mays
  Clone ID: MRT4577_10055C.1
gctacttcaattggttttatcaagctcccctgaggagtcatgccctccagaggaggccttcttccttgcaaatgatcttcttgatattgcgcccgctgtcgagtcctttgctggctcaagatttgcacccagcatagtttctgctctgaagcaatggctgcctgtgctcttgttgggtcttgtatgccggtggctaattggatcacataatgaaatggcacccaacgtattccactttgctgactctgtcttaccactgtgggtcactgccgtgttttttattgagcttgctgattccaaagagcctggccaggactagttcaccaatctgactgcggagggcgacgactcactgttatccacaaagctagcacaaatgatgccgatcctcttgaagaaaggaagccccacaatcctcgattgccgcgagcggagtccctctgaccactttccagttgaagctgcgaacatcagactatgaca

SEQ ID NO: 614 - DNA, 292 bp, Zea mays
  Clone ID: MRT4577_100560C.1
tgtagcgtggaagcgaggaagagcagtgctctagtggcgacacagagactgaagctcccctatcgctgagctgctaggctataagagacccctctcataccactgacgaaaccacccctactattcgctagccttagccactgaccatgactgacactagcgaatgcttgctctgtccatgggcgaccctgtacaattacggatccaagagccatagcttactctgtggagactatacactgacatgtgtacttctcgcaaggcatgtgaaactagctccagaggacacatg

SEQ ID NO: 615 - DNA, 1463 bp, Zea mays
  Clone ID: MRT4577_100561C.1
cattgggaccctcgaggccggccgggccgggccgcaccgcacacacatacacaagcacaagcactctagcaatggcttctgaggttgtccgccctagcgacgccgagctactgcaggcacaagccgacatatggcggctcagcctctcctacctcacgcccctgtcactgaagtgcgccgtggtgcttggcatccctgcggcaatctaccgccatggcggggctgcctcagccgctgagctgatcacggcgctgtctctcccctccgctaagctaccgttcctccgccgcctgctgcggctcctagccgcgtcgggcgtgttcaccgtcgacaggcagagcacggacgaggagaggtaccgcatcagccccgtctcctacctcctggtggaaggcatccctcacgaggaccacatgaaccacacctctttcgtgctcacctgcacctcgtcgcgctacatcgagccggcaatagggctggccgagtggttcaggaaggacacggccacgtcaccgttcgaggagctgcacggggcgactctgttccacgagagcatgggcagcctcgacgcagatttccacgacatggcgagcgacgccttggacacccacgacaacttcggcgtcgagatggcgctgcgggagttcagggacttgttcgaggggatccagtccatgacctactgctgcggtaactttggtgatgacaagggtgccagggccattgccaaggccttcccacacataaaatgcactgtgctggcccctcccaagatcattgccgccaaaccggctgatggagtgaagataaactatgtcgaaggtgacatgttcagtttcattccacctgctcaaactgtcgtgctaaagcttgtgctgcaccacctgaccgatgaggagtgcgtcaagcttctggctcaatgccggaaggcgattccttcacggaaggatggcgggaaagttataatcggtgacattatgattgaccactctgggcctatgctggaaactcagctcctgatggacatcggcatgatgaccatgacaaaaggacgacagcacgacgaaaaagaatggcgtcagctcttcaccaaagcagggttcagcgaatacaagattctcaaggaatttggaactcgtgttgccttcgaagtctatccgtgagatatatatttacatacatatgtatgcatatgggttgcgggctttggcatgacgatgtcataaataaatgaagagggtgggtgtgcttacagagtattcatggatggccatgcacctgagcgcatgcataatgtaattggatgctttcttaatattatcgttgggttgtatgtactttgtacctgctatgttgttttaagtgatatatattcttgcgtactactatgtcgggtggaatatatgtttttcataattaaataagggccaaaaaagaaaaaaaaaaaaaaagtcgacgcggcc

SEQ ID NO: 616 - DNA, 690 bp, Zea mays
  Clone ID: MRT4577_100562C.1
agttcacacacatacacaagcacaagcgcactctagcaatggcttctgaggttgtccgccctagcgacgccgagctactaaaggcacaagccgacatatggcggctcagcctctcctacctcacgcccctgtcactgaggtgcgccgtggagcttggcatccccacggcgatctaccgccatggcggggctgcctcagccgctgagctggtcacggggctgtctctcccctccactaagctgccgttcctccgccgcctgctgcggctcctcgccgcgtcgggcgtgttcaccgtcgacaagcagagcacggaggaggagcggtaccgcatcagccccgtgtcctacctcctggtggacggcatccctcacgaggaccacatgaaccacaccggtctggtgctcacctgcacctcgacgcgctacatcgaggcggggatagggctggcggagtggttcaagagggacgtggtcacgtcaccgttcgaggagctgcacggggcgactctgttccacgagagcatggggagcctcgacgcagatttccacgacatggcgagcgaggccttggacgcccacgacaacttcggcatcgagatagctatgcgggagttcagggacttgttcgaggggatccagtccatgacctactgctgcggtaacttcggggatgacaaggggtgccaggcca

SEQ ID NO: 617 - DNA, 266 bp, Zea mays
  Clone ID: MRT4577_100563C.1
aaagcttccatgaaggaggctgggaaccgacgaggactctctcattgagatcatctgctccagaaccaaccaggagctgcaggaaattaacagagtctacaaggaaatgtacaagactgatctggagaaggacattatttcggacacatctggtgacttccgcaagctgatggttgccctggcaaagggtagaagagcagaggatggctctgtcattgattatgaactgattgaccaagatgctcgggatctctatgacgctggag

SEQ ID NO: 618 - DNA, 275 bp, Zea mays
  Clone ID: MRT4577_100564C.1
atcaagggcgaatcccgaatgagggctgcgcgaccgtcattctcgctacatcaatataaagcctagcgttatactatcagccaaggccttcaccagccaataccgagtcatttttggctgttattacatttttcgaaaacattcttgcttccagtggtactgttgttcacgtctagccacagaaggatttagttcttgaaactatgttgcaattctatttccctgttcttgatgttcctgggcatcattccatgtggtactgcttctcacgtcta

SEQ ID NO: 619 - DNA, 398 bp, Zea mays
  Clone ID: MRT4577_100565C.1
gaggcctcatcaagccctaaaagagaattattgaccaagtaacatccaccctaacctaattgtagcaccaagcgcaagttatttgattttcaaacggcaagggtccgttgaccttgaactagcatgttgacctgataaggatccagaagcacacggcctgagtggatgggccgaacatacgagcccactgaccgtttcttggggcagcccgacaatattttgcgattcaaacattggctgccaatatagagtgacgacattcatgtaattccacattcgagggaggaatctatgtacagctccctgcctatcgcctaaaacttacacgcactcttatattacatgcgaacaacctaagggacaacaagatcttttgtgttaggaacactttggccaat

SEQ ID NO: 620 - DNA, 1135 bp, Zea mays
  Clone ID: MRT4577_100566C.1
tcgacgtcacagacaccaccgcggaaggcagcacagcacaaaagcaagaacctcagcagcaggagccgcgtctccgcctccaaccatccacatgggcatggcgatggtgttaacggacggcgaggtcggtgctctcatcaaggtctccgcggctgtttgggtggcgatgtcctacgcccgcctcgccgcggcgcgtctccgcccaggcgcgcttcgcctcctggcgctgctgcccgtcgtcgcgctcctctgcgcgatccccttcgccttctcgacgtccacgttccgcggcacctcgggcttcttcctcgcctggctcggctccttcaagctgctcctcctcggcgccggcattgggcccctcgacccttccctccgcctctcccacttcgtctgctcggccaccctacccgtgaagctccggcggcagtccaaagagaagagccaagcccccgcccgtggtccggcgaggatactcctctccggccccgtgtccgctggcgtcatctacgcgtaccagttcaagagctcgatgggcaggtaccagctcctcgcgctctactccgtgcacatctacttctcgctggatctcctcctggccaccgtccacaccgtgatccacgacctgctcgggatggagatggagccgcaggtggaccgcccctacctggcgtcgtcgctgcgcgacttctggggccggcggtggaacctcatggtgccctccatcctgcgtccgtcggtgttccgccccgtccgcgcgcgcctcggcaacgcggccggcgtccaggcgacattcctcgtgtccggcctcatgcatgagctcatgttctactacatcatgcggagcgcgcccagcggcgaggtgaccgccttctttctcctgcacggggcgtgcgcggccgcggaggggtggtgggcgtcgcatgccggctggtggcgcccgccgcgcccggccgcggtgccgctcacgctggccttcgtggccgggacggggttctggctcttcttaccggcaatggtaaagggcggccttgacgagatggttctccgggagtgccagggcatggtggtgttcatggagcaggccgcccggcggctcgccggtgccacagatctcgtctcgtcaaccatgtga

SEQ ID NO: 621 - DNA, 729 bp, Zea mays
  unsure (1)..(729): unsure at all n locations
  Clone ID: MRT4577_100567C.1
ccggccgggagatcgggcgactggagtcatcgccgccgggccggtcgcggtggctccgcctcctctccttcgattcgttgcttcccgcttcaaatccaagccaccgccctttccttcccatggcttccgacgccccggcggagcaaccggcgacgcagcagaagcccaccagggtctcgctgtcctatgaggagatctccaagctcttctccctccccatcgctgaggcggcctccatcctcggagtctgcaccagtgtcttgaagaggatctgccgcacccacgggattgttaggtggccatatcgtaagcttgtttctgggaaagctggggatgacacaaaaggtcctgatagcgacaaagccaacgaactccttgaggtatcaaaaatcgcgaaacaaaaggctcccagtgcatcaggcccatcagtagtgtcatcaagcacttcccaaggagcggcaaagtctcaacagggcaattctaaggcaggacagttttcagtttcgccaccaacagcgacacagactatgtgcctaccaaagatggaagccatgaaccccatgaatcaacaacacatgagccatcanagggcatgactgatgatgacgagttggactggngagcagatgaagcggaagctgaagctgatggcactgttacggcagaggcatcggcacagctgtgctcgctgagaanggaagcagtagatgacgggcgcaaactattgaa

SEQ ID NO: 622 - DNA, 1263 bp, Zea mays
  Clone ID: MRT4577_100568C.1
ccggcccggccgggccttccccaaatccgacacgcacggcacgagcacgacagatcgggcgactggagtcatcgccgccgggccggtcgcggtcggatccccccgctccgcctcctctccttcgattcgttgcttcccgcttcaaatccaagccaccaccctttccttcccatggcttccgacgccccggcggagcaaccggcgacgcagcagaagcccaccagggtctcgctgtcctatgaggagatctccaagctcttctccctccccatcgctgaggcggcctccatcctcggagtctgcaccagtgtcttgaagaggatctgccgcacccacgggattgttaggtggccatatcgtaagcttgtttctgggaaagctggggatgacacaaaaggtcctgatagcgacaaagccaacgaactccttgaggtatcaaaaatcgcgaaacaaaaggctcccagtgcatcaggcccatcagtagtgtcatcaagcacttcccaaggagcggcaaagtctcaacagggcaattctaaggcaggacagttttcagtttcgccaccaacaggtaaacataacgcatcactaagtttgacccatagccaagccaaggccatcccttgctatatggatgatttcaagtacggattcccgtcatctggcttgtcttgtgaaactatgaaatggtggggcacaagcagcgacacagactatgtgcctaccaaagatggaagccatgaaccccatgaatcaacaacacatgagccatcaaagggcatgactgatgatgacgagttggactggggagcagatgaagcggaagctgaagctgatggcactgttacggcagaggcatcggcacagctgtgctcgctgagaaggaaagcagtagatgacgggcgcaaactattgaatggtcacaaccgcaggggccaagaattctctaggctgaacaaaaggcagaagacagcgctagcccaggtatttggggcttcactgccagaatgttgtattactcgtgtctagtgagtgaagaacaactgtagctgtgttttccctccttctccagaccctcatgtaatctgacccgttattagcgagaagtgtgaaatcttctcactgaattgaagaatggcaggagcttgttttgtcttccttatcaacaagttgttgctgccgcttttgtctacgtatttctctcatctcccatgtgtgtacgaggagagcaccttatgttatatgctgtgaatgcaggtatatatg

SEQ ID NO: 623 - DNA, 269 bp, Zea mays
  unsure (1)..(269): unsure at all n locations
  Clone ID: MRT4577_100569C.1
gcctgtttgtgtttttttacaaaacttcctttccggaggggggctgatccatcaagggtgcaaagggctactcagaatccggtgtccagaaggtgtactcagtacaacgattacatcagaaaccaccgacgaaaaattcattaacaatactggggaagaccgggggcctcnntttctattgctcccaaaagtttgcgctactcccatgctagtcgccctgtgctcctgtgggccttgccggagccgtctatgttgttgttgttgggggt

SEQ ID NO: 624 - DNA, 465 bp, Zea mays
  Clone ID: MRT4577_10056C.1
aaaacaacgtgccgtttattgttccttggaagaacagtccaatccaaatacaaatgcccggggactacaatttgccctcattcacagactttaactatcacagccgacaaaactcgacaggaaagacttgtattcttacaaaccccactcctttccgaggcagaaaagaattttcctacagacatcccctaaaccaatagaattcacaacgtttttaataccagtataccacggaagaagaaaagaataagcgtagggatatggaccaaactagtaagtacaactgactaaaaaacccaaataaaaaattctactacggccgtggaaccctaaatgaacagatgctcggggaccagctttttcaacatatcatctttaattattctttcaatgtcccttcctgccctgtcgaaccagcttgctaaatatggccacttgggatctaaccctttttttccggttaat

SEQ ID NO: 625 - DNA, 2447 bp, Zea mays
  Clone ID: MRT4577_100570C.1
cattgggtccacaaccggtctcgagtctcgacagatcggcgtcttcgatgccgccggcgcaggcgccctccagcggcggcgccgcgtggcgccagctgctcctgctcctgacagtcctcccgctcacgctcgctgcgctggctttcgtgctccagtggcgcggcggcggcggcgtcgatgaccctaccactcgctggccctcccacgccttccccggcatggccgagcccaccccaccgtccctcccctcgtccgactgcgcagacgtgctcgtgggatcctccgccccctccttcccctacatccgcggctggtcattcccctccgactcgggcgctgccatgggttctgtagaggaacatctccagcccaaggtgtgcgtgcagacgagcacctccgcggggcttgagcagatcctgccctggctcttctatcacaaggtcgtcggcgtcgcgcagttcctgctcttcgtggagggcaaggcggcgaaacccaatgtcgcgggagtcctcgagtcaattcctggggtaaaagtggtgtacagaactaaggatcttgaggagcggcaggcacggagtcgaatctggaatgagacttggctttcaggatttttctacaaaccttgcaactatgaactctttgtgaagcaatccctcaacatggagatggctattgtaatggctcgggatggtggcatggattggatcatacatttagacactgatgagttactttatcctggcggagctgctgagtattctgttagacgtttgttagctgaggtccctcgtgatgtcgacatggttatttttccaaactatgaaagcagtgttgagcatgataatataaaagatccattcagcgaagtatctatgttcaagaggaattatgatcatcttcctaaagatacttactttggcatgtataaggaagcgacacgaggaaatccaaattattttctcacctatggtaatggaaaatctgctgcacgaattcaagaccatctccgtcctaatggcgcgcacaggtggcataattatgcaaagagcccaaatgagatcaagttggaggaggctgcagttctgcattatacatacactaaattttcagatttgacatctagacgtgatcgctgtggatgcaagcctacaaaagaagatgttaagagatgtttcatgttagattttgacagagcagcttttataattgcatcaactgctagtgaagaagaaatgcttcgctggtacaatgaacgagtcgtgtggaccgataagcagctgaacttaaagcttctgaggaaaggagtgctgactcgcatatacaccccaatgacaattgttcagagtctgcgcgaatccggtgtcttcacttccgccattgcagctggccaacctgctgtgaatgccaaactctcacccaaggaaaccaatgcgcagagccaaaatgttaccgcatctgggaacatgacaagagtggtcagatctactgattcaaaggcatcaggcagaaagatactgcaagccgttgatcttgccttcagcgatactaatgtaactgctgttccaccgttgtcgccgcccagtttggacgaacacaggcatcatagtgaataataatgtcatacgtatgatatatatattttttgctcggcgtataagctcctaagaaaaggaagaaaagaaagttactgacatcttcgttaagagaagtgctaacatcagcttggatggtcaatttttatgcaatctgcggcagcgaaattctggcaggcgtcttttttcgcgatcgaagtgagatgcgggtgcgggcaacattgatagatagtgttttactggaaacaaaacatatttttagcaattttgtacaaaatctttatgaagttattaacatatatggactttacttcgtgggcctgttcaggccctgctagtgaagaaaaaatgcttcgctggtccaatgaacgagtcgtgtggaccgataaacagctgaacttaaagcttctgaggaaaggagtgctgactcgcatatacaccccaatgacaattgttcagagtctgcgcgaatccggtgtcttcacttccgccattgcagctggccaacctgctgtgaatgccaaactctcacccaaggaaaccaatgcgcagagccaaaatgttaccgcatctgggaacatgacaagagtggtcagatctactgattcaaaggcatcaggcagaaagatactgcgagccgttgatcttgccttcagcgatactaatgccccccctgttcccccgttgtcgccgcccagtttggacgaacacaggcatcatagtgaataataatgtcatacgtatgatatatatattttttgctcggcgtataagctcctaagaaaaggaagaaaagaaagttaaaaaaaaaaaaaaaaaaaaaaaaaaaagaaaaaaaaaaaaaaaaaagcggcc

SEQ ID NO: 626 - DNA, 811 bp, Zea mays
  unsure (1)..(811): unsure at all n locations
  Clone ID: MRT4577_100571C.1
ccacgcgtccgagttaacctgatgatggtgtttcctgatttaaatgtaggattgtgatggtatgatggatgtttcaattggagcctactatatagtcctcttcatcatataaggttatgcatatgaactcttgggatttacaaaatttgcttctatatgttggatgcagcgtaatcttacatattcagaaccaaaggctgatgaactggcagcatcagaaatggcagttgcatatagctcctcgaattgggtattattagttgagggatgacatccatctactgctgagtaagtcacagaaagtgctctgttcaggctgactagatagggtaattgttattggtgtgttctgttcagttttttatagcatttttggcggggtaatatgaacttctattcatttttcaaatatattctagaccctaacnaactgatccaaaatgtcacattgattgatatgtggattttgatacttctgactccatgcaactacttggaatgttgcttgtcgcgttggctcattttttattccttttaatgtgcacagtaaaagcatttttacctataatgaacagtcttgtggttttattttcatttctggcgttaaatgtatgtctttctttctattgtatgagtttatttaggcataacctttatcactttctatcaatgctacaacagtagatatactaccatttatcattgaagtaattaagcggttgtatttcattttttatgttatcaaaatttttagttcttcaaatataatagatgaatcattgctaaatctaacattgctgtcaatgttttc

SEQ ID NO: 627 - DNA, 3706 bp, Zea mays
  Clone ID: MRT4577_100572C.1
ctggccgggaaaaaacccacccaaccggtctcgagtctcgacagatcggcgtcttcgatgccgccggcgcaggtgccctccggcggcggcgccgcgtggcgccagctgctcctgctcctgacagtcctccctctcacgctcgctgcgctggctttcgtgctccagtggcgcggcggcggcgtcgatgaccctaccactcgctggccctcccacgccttccccggcatggccgagcccaccccaccgtccctcccctcgtccgactgcgcagacgtgctcgtgggatcctccgccccctccttcccctacatccgcggctggtcattcccctccgactcgggcgctgccatgggttctgtagaggaacatctccagcccaaggtgtgcgtgcagacgagcacctccgcggggcttgagcagatcctgccctggctcttctatcacaaggtcgtcggcgtcgcgcagttcctgctcttcgtggagggcaaggcggcgaaacccaatgtcgcgggagtcctcgagtcaattcctggggtaaaagtggtgtacagaactaaggatcttgaggagcggcaggcacggaggtcagcttcgttttctcagtcccctgtttccgataacagtttttcttgtgtgtcatttgatcatttccacataaacaccatataaaaaaataactgcatcttgtttcaactttcaaagtgagaaccaaaagcatagggttgctggtgtagccagacaaaactaagtcagaccgcatccaaccattgacaattatggataaagggagaaattttctatgcctagttgcctactattaacccacttctaggacatgtcgaagattgtttaatagggaatatacgtggaatttagacaggtttgagccctcgatgtgagataataccctacatcatgtttgaggtggttctgttgttgtattgtatgttctaatctgatgattctatgatctgatgctctcaggcggttccctgtccctcttttaatattctaaggagtgacggaagttacatgataggcaccgagtcggctatcaagttcatgatggaaccgagtcggtacaaagtcatacgtgaattgaattctatgtcttcgagtttatctcttattctgttgagatcttactatatctgcgcttctagaatcctcctggttgtaggctcccctggtcctattgccgagtccttcggcttgtggccgagcccatgagctcttttgctcaggctcttctttacgaagcttggatagatgtcctagtatatattattgataggacatagcatgtcataatgtctggcttggcatgttctttgatagagtttttatcactcatctctgtcaccttcctgatgtattttattgcttgggctcaagtcgaatctggaatgagacttggctttcaggatttttctacaaaccttgcaactatgaactctttgtgaagcaatccctcaacatggagatggctattgtaatggctcgggatggtggcatggattggatcatacatttagacactgatgagttactttatcctggcggagctgctgagtattctgttagacgtttgttagctgaggtccctcgtgatgtcgacatggttatttttccaaactatgaaagcagtgttgagcatgataatataaaagatccattcagcgaagtatctatgttcaagaggaattatgatcatcttcctaaagatacttactttggcatgtataaggaagcgacacgaggaaatccaaattattttctcacctatggtaatggaaaatctgctgcacgaattcaagaccatctccgtcctaatggcgcgcacaggtggcataattatgcaaagagcccaaatgagatcaagttggaggaggctgcagttctgcattatacatacactaaattttcagatttgacatctagacgtgatcgctgtggatgcaagcctacaaaagaagatgttaagagatgtttcatgttagattttgacagagcagcttttataattgcatcaactgctagtgaagaagaaatgcttcgctggtaatttcctaaattttctttgcttattaatattttttgtaatgctttagagacgctgcagctctgctaggttcagaatgtcactttattgattggaacaaggaagttagatatactaaaagttttcttaaatggattattttttataagagatttatgctgtgttggactgaacttccttaactttagagattgcttcttaaaggtttattcaagtaaaaatgtcctaaaaaatggaccacactgtaccatattctttaattccatctcatgtcttcttcctcagttatggtttatgtctacctatactagtacagtcctcatttggcatggtagttactcattcatgaacatgaaataactttctaactgaaagcacatggtaacaagtggatgcataactgaaataactttctaactgttaagcacatgccccaagtctaggctctggaccagcttgagaaggcgtggctcaaaactccaaaggctgaaagtcttgttaggttttttcaatagatactgtttttttttcatgacataatttatgaaacgtaattgtttggttcagcttttttctgaccagcttttttgagaatctggctttgtagagaatctgagtatcattaggattacgtgcggaggaagataaatgtgtccataaggcttaggatctagaagatggcggattcctactattgcaacgactcaaccgattatgtgtttatgttgattttgaatggtttttacccaaacgaattttatagaagctggctgaaaagctgatctttcgacagtccgtagtagcttttggtggccagaagctgcaaaaagccgaaacaaacaggggcaatgtattgcttcaagatgaaccagactgggaatagatacattggctgaaagcttaaaccgcagcctgccctgaatctggaataatcagactacactgtactatttcatggaaagatctagtatttacaaacacttttccagctgcctcttggtgccagttgcatgcattaaaattgtgtcggtccattttttttttctccacagagaaatggattttagtgttcggttcgctaatcttttttcttgtaatgtttcttgtttctttttggctaggtacaatgaacgagtcgtgtggaccgataagcagctgaacttaaagcttctgaggaaaggagtgctgactcgcatatacaccccaatgacaattgttcagagtctgcgcgaatccggtgtcttcacttccgccattgcagctggccaacctgctgtgaatgccaaactctcacccaaggaaaccaatgcgcagagccaaaatgttaccgcatctgggaacatgacaagagtggtcagatctactgattcaaaggcatcaggcagaaagatactgcaagccgttgatcttgccttcagcgatactaatgtaactgctgttccaccgttgtcgccgcccagtttggacgaacacaggcatcatagtgaataataatgtcatacgtatgatatatatattttttgctcggcgtataagttcctaagaaaaggaggaaaagaaagttactgacatcttcggttttttttttttttttttttttataaaaaaaaaaaaaaaaaaaaaataacgggcggttttttttgt

SEQ ID NO: 628 - DNA, 349 bp, Zea mays
  Clone ID: MRT4577_100573C.1
gggaaaagcgttttcccaaaaagaagacgcaaggatagcaaataaggaaggaatggacctcctacttgtatcaagacaacgccatgaaaagaacgaacagaaagctagggacagagggaccaagcagagatggcgatcaagaggagaaaggggaaaaagaagatcgagaacgcaaagaagcagagcagaccgcacaaagagtacaaaaaggagaacatagcaccggtagacaaagaaggatcaaagcagcaccaggacaagcgacgggggatcaggggcgacaaaaaggagaacacgcggaagaaaaagcttatcaggcgatgaatagaggtgtacgccgagaagaccg

SEQ ID NO: 629 - DNA, 690 bp, Zea mays
  Clone ID: MRT4577_100574C.1
aattcggcacgaggcagaaagagaattattgattatttataggtttgtgcgtccaactgcaatgagtgagcaaagaacaacagaatacattgaagggaaatatggaaaatttggggttgaccggtatgtttagcatttgttactattatgctgctttgttgagtgtgatttatatgatgcaaaacaatttcaacaactgatactcgacttcttttttcaaattaggtaacttggttcacttaagaactacaccatcatagtacaatcttagtatttggttttgaaaaaaacttcaaggtcgatcttttcataacatttggaatcatgagcaggcatcgactttctcagctgcagtgaattgcagtcacatgatccaattagcctctactatgtgcatacatctcttttctccactacagcacaaccaataatttactatgctgtagtaaatggctaggagataaaaagagaggtatgcaaatggagaatgatggcttgcatatagcagttgttgtgtttttatgggattttgccaagcttgaatgaggttttgttgctcataaaacacgagccacatctttggtgttctgctagccctttaggggtttctcatctccgctcccttgcaccaaataatatttgacgtctggttgaggtcgtttttagttttatttacaggtgaaacatgta

SEQ ID NO: 630 - DNA, 723 bp, Zea mays
  Clone ID: MRT4577_100575C.1
ggccgcttttttttttttttttttctttttttttttttttttttttttttaaggaaacaaagaccagaaatatgccattatgggctggatatacatatttgcccttcagggtaaactttactgaccatattcctttttttgtcctttcgaagctttatacatggaacaaaaattctaaagtgcagatagaccttagatttgttcttctgattctttcactgtttgaaaatattggtctgttgtaaccagcattgattcttgtagttcatgtatgtatagctgttgatatgattcacaaacattttgcttgattcaagtctcttcatcagggcttcctgatgaacttggtaagatcaagaaagcaggaacagaacttcaacaacaaactgttgagcagcagaaaagagttagatatcttgaagaaggccgcacaggaatcagaagtggcattgagaactcagctggatcagattcaaagtttgaaagcagcaatttgaagatgatgccctcctcagtaaactgataagcaacagtcagtgtgatgggtcaagctgtcgcggaccgctcaacttcttgtgcccatcagcacgttctgtttccaaccactgggatggttcagtctaactctagggatcacttcacgctaatatgcacctcatatttatcatacccatgtgcaaatagtttttcttttattggatgtgcaaatagttcttggtgcta

SEQ ID NO: 631 - DNA, 869 bp, Zea mays
  Clone ID: MRT4577_100576C.1
ttgggtacctcgaggccggccggctgcccgtatccgcgccgcgctgttgagaggagggagacgcgaggaggaagaagcaggcaaacaaagcagaagctccgtcccatccccggcagtcccctccatccaagtgatttcaggtatcagctaccgagaaacggagaaggtgaccgcacctcacgcaattcgcccccgccccgccgtcctttccctcctctagggttgtcttgtgggtgcctctgcttcccaccctaggggcaggtccagggccggtccttcttctcgccccgcccccgctgctctcttctctgctgctagagttaggttagtgttcggcgctggggggaggggcgtcctcctccctcgccgtcgccgccaatgcctcccggcggtaggcgcggcgccaagcagcggcccaactggaccagggaaccccagctaggtgacctcgtcctcgccaagatcaaggggtacccgcgttggccagctaagatcagcaggcccgaggaatttaatcatgagccaacgccaaaaaagttctttgtctacttctatggcaccgatgagattgcttttgtaccgctggcagatcttgaggaatttactgagaagacaaagaatgatctgttagaccgagctccaaatatgaaagttaaaagaaaatatgttcaagtatttaatgatgctgtggagcagatctgcaaggcctacaatgagttgccaaaaacatctgaagctgcaaatggagcattgcctgatcagagtgaaaagccttcagagcaccttgtgaggtcacaggatgttggtgagattccaggattgggacaaatggaaggtgatagccctactgattactcgcatacttcagc

SEQ ID NO: 632 - DNA, 105 bp, Zea mays
  unsure (1)..(105): unsure at all n locations
  Clone ID: MRT4577_100577C.1
tctgtgtatggaggctgcttgaattgcatatagcgcccggcgttnnctaactatgaggtgtattttngatccttgcantaagaatctcaaaatctatgccctatg

SEQ ID NO: 633 - DNA, 480 bp, Zea mays
  Clone ID: MRT4577_100578C.1
atattcttctctctccatgccctctccacgcctccccttctccttcttgtccgacactccgatctcgcattcaccgcaccacacaaagcaaacccgactcccagcccaatcactccctctcctctcctctcctttgctatgggcagatatagcaactgagggttctcatgactatgctaggcactatgattctaagatgcggagctgcttaacactgataacactgacgcagctcttcccttcatatgatgacgtctataagatctctgatcagatgcgcctccaagagaatcttctgagatgcatctatcgctcatggctctcacaagtactctgaaaataagctcaaaggaattgatcccttcttgaaggtccttgatgtcctcctgcaacgacatgctcgacaccggagagacagcagactatctctgctgttatcttgcatgagctggactatggactgattgaatgccaagacct

SEQ ID NO: 634 - DNA, 1690 bp, Zea mays
  Clone ID: MRT4577_100579C.1
ccacgcgtccggccattaactctgcaacctattctcttcctcgcgaaaccgcttccttcgattcattccccctctcccctctccaagacccaaaaccctaacccctacgacccccgtgaccgccgccgccgtcgatgcctgcgctctccgacgtcgcgcttcaggctgccatcgccggcaacctccgcctcctgaagctggtggcgagcaagatgaatctgcgcgaagcgaaggacgccgctgggcggaacgcgctccacctggccgcggagatgggccgtcttgaggtttgcaggttcctggtggaggaatcgggcttcgaggtgaacttcgcctgcgccgaaggcgggtcgccggtccactgcgccgcggccgggggcagcgagagcgtcttgggctaccttctcgaccacggtggcgaccctgtgatgccggactccatgggctccactccactgcatgatgcggcagaggaagggcattgtgcggctgtgaggatgctgctgtccaagggtgtcgatgtggatccacacggctgtcgtgggacgccgctgcacttggcctgctccaatgaccgggatcaggttgttaggatcctgctggaacatggcgcagatcccaacaaagttgtcggtcatgtcctcccaccactcatgatggcatactgtggcggttctttgagatgcatgaagctactgattgaggctggtgcggatgtgaacttgattgctccttctggagtaattttggctcaggcagtttgtgatgggtcaactgagattgtcaagtttttgctagaggttggagctgatcctaacattcctgatgaggatgggaaaatcccgatcatgtacccagcatttaatgggcatcgggagcttgttgaaattctatttcctaagacaagaccagtttcatctttgccagactggagcgttgatgggattattagaagtatgaaagatctgtttttcaagcctcaggatgcagctgtggtggaaaaaaagatagctgatgcgaagtcacaagggaaggaagctttcgcaaggggagagtaccctgcagcagtatacttctataccatggtactagagaacgaccttgatgctactgcgtttgccaaccggagcctgtgctggttgcggctgagggagggggccaaggctctgttagatgctcaacagtgcaaaatgatacggcctcgttggtcgaaggcatggtatcgcgagggcgcggctctcagcttgctgaaggactaccaaggggcagtcaacgcgttcacggaagcattgaaactggatcctgcaagtttagagatcaagaaagccttaagggaggccaccgattccctggcgaacgttggccgctccggagaacagaacccatgagctgctgctgcatccatgtgctttatctcacgttaagaatcctctaacactatgtggctcagcctcatattatatgttgatatatgtcgccttaacgcactgctggagatactagtttcgatctcagcctatatgttttgctccttcgggatgcagcctaagatacatgtggcaaccaagtgaggttgggcagggtagcatatctatggactggttgaactattatatgtatctggatatctaagtgcacctgttgctcctagtaaagttgcagttctaatgaaaaaaaaaaaaaaaaaaaa

SEQ ID NO: 635 - DNA, 322 bp, Zea mays
  Clone ID: MRT4577_10057C.1
ctctgccaaacgctgtgtagtggacataaatgttacctgccgaatttcttgcataagttatggctattcttagaactctattttgttaacgggtttgtattcctaagcgaaattaatctagacgctatctgagaaaactagacatcctttaaggctgattcgctggatatggaattggagggaatcacagtccatattaagacaatacactacaaaggctacaccttacaaccgataaatggcggacgtactagacgatccaagctaacttacccgtgcatgcaacatcgtaggccagttaatatgccacctaaagtgaatc

SEQ ID NO: 636 - DNA, 310 bp, Zea mays
  Clone ID: MRT4577_100580C.1
accagggaaggcgagctctgcgcacacgggcgtccctgcagcagccactctgctttccaggaccggccaactgccctggaggcatccacacaggggcccaggcagcacagaggagctgtgaacccgctccacaccggccaccctgcccggagcctggcactcacagcaggccggtgctaaggagtgtggcgcgggctcgactcccactgctgccggcctcccgagtgactctgttttccactgctgcaggcgagaagaggcacgcgcggcacaggccggcctccgcttcccgggaagacggcgcactcct

SEQ ID NO: 637 - DNA, 144 bp, Zea mays
  Clone ID: MRT4577_100581C.1
ttctacggcccagaagagcaacggcacgggcggggccatcaacgagacctccgagcgcaacccgacgacgaccaagaactacggacaccaggccgcgctaccagagcagaaccggctaccacaacatgcacaaggagaaaccgc

SEQ ID NO: 638 - DNA, 382 bp, Zea mays
  Clone ID: MRT4577_100582C.1
atataaaaaattttttttttttttttttgttattttttaaaaaaaaaacatttgctttggtgaaaaaaaacaaaaataaagattcgggttcaaaaatggaaaaaaaaaaaacggtttgatgttggataaaaaaaaaaaaattccaacattaaatacgaaaggcggagatttaaatacccttagaatgagtgaaacataattattattttaaggacgggcttaaaaaaaagtaaaggatttttattggggcaccgaaaaaaaagaaaatagggcaccgatttaaaaattgtggattggaaaaaatcttggctttcccaaattaaatatgtttgaaaaaaagccctatttggcaaaatcgtgaataaaaaaaaaacccggaagg

SEQ ID NO: 639 - DNA, 1473 bp, Zea mays
  Clone ID: MRT4577_100583C.1
agaaaaatagtgacagaagttcacactgtgcaagagcaccaactatgaccacaagtcttaacacatcactgtctgcatagtactgccatataatcacgtttcttatggattagagataattacttttgacacacagactatactagatgcatgctgttcttaatatctctttctcccatagaacaattagatctatactaacatcatattatgcaagtcacatttgatttgcagtcaatcccattgtacctgtccgaaatggcgccaccccaataccgcggggcaatcaacaacggcttcgagctctgcatcagccttggcatcctcttcgcgaacgtgctcaactatttcgtcataaaaatcacagcaggatggggatggaggatatccctgtccatggccgcactgcccgccgcattcctaaccatcggcgcgatcttcctccccgagacgccaagcttcataatccaacgtgacggcaacaacacggacaaggcaagggtgctgctccagaagctgcgcggaacggcctcggtccagaaagagctcgacgacctggtccgtgctagcgacctctcacgagcaacccggtacccattcaggagcatactcgagaggaagtacaggccgcagcttgtggtggcgctgctggtccctttcttcaaccaggttagcgggatcaacgtggtgaacttctacgcgccggtcatgttcaggacgatcggtctcaaggagagcgcgtccctcctgtcctcggtggtgacacgcctgtgcgcgacgtctgccaacgtcgtggcgatggtggtggtcgacagggttgggcgcaggaagctcttccttgccggcggcgtgcagatgatactttcgcagttcaccgtcggcgcgatcctggctgcgaagttcagggactacgaggagatgggtgatgggtacgcgtacctggtgctgaccacactgtgtgtgttcgttgcaggctttgcgtggtcgtggggccctctcaccttcttggtccctgccgaggtctgcccgctggagatcaggtccgcggggcagagcatcgtggtcgctgtggttttcttgatgacgtttgtgattagccagacgtttcttgaggtcctctgccgcgtcaagtcggcgacgttcttcgtcttcggtggatggatctgcctgatgacgttgttcgtttatctgttcctgcctgagaccaagaagctgcccatggagcagatggagcaggtatggaagacgcactggttctggaagaaggttgtgggggaggaagcggataggaaagaaacaggagcagggaagatagctttgtcgggcttgtcttagtcattttctgagtcgggtgtgtgtatttgatcaaaactgcaaagaaaaacatagtatacgatcgcgacaagctgatgtaaatgtacatttgtatgtaaatcgagtaaacttatcagtctggcgttgttgccagttcct

SEQ ID NO: 640 - DNA, 928 bp, Zea mays
  Clone ID: MRT4577_100584C.1
aactcaccggtaatccagctttgcgagagcagttaattcgtcttattcaaggactaagtaatttggtttccaccacagaacatctgacgaaacaggtgcaatatgcccagcaattaaatcaactttccgatgatttggccctggtggccagggcccaggaattgcaaactcctagagttattcccgcccaaccccaaaaaaccgtcacaaaaccttaggaaacccctaaaattagccttcgaggtgtgccatatcaatcacctgaattattaagtttaattacctttacccatgactgccgtacccccatcctgccaaatccttgacggtaaagccctcgcccaaaaaatgcagggggaattacaacgggacattgcccaactggtggcccagggccatcgatcgccggggttggcggtgttgatggtgggggacaatccagccagtgccgtttatgtccgcaataaggaaaaagcctgtgaaaaattgggcatggtttcctttggcaagcatttttccgctgatacggaccaggaaacattgacggcggcgatcgccagtttgaatgaggatgaacgggtggatggcattttggtgcaattgcccctaccggatcatctcgatgcagtcaaactattacacaccattgatcccagtaaagatgcagacgggttgcatccagtcaatttgggtcatttggtgcggggagaagagggtctaaggagttgtactccagcgggggtgatggctctattggcggaatataaccttgatttaacgggcaaaaatgcggtggtgttggggcgcagtattttggtgggcaaacccctggctctaatgttgctagagaaaaattgcaccgttaccattgcccattctcgcacccaaaacttggccgatatcacccggcaagcagacatcctcgtag

SEQ ID NO: 641 - DNA, 795 bp, Zea mays
  unsure (1)..(795): unsure at all n locations
  Clone ID: MRT4577_100585C.1
ctggcctggtgctgcgcttctgccagcagagcagcgcgggggggtggactgggcganttcgaccagaagaagaagagctgccgcaggcgactcacgaccacaacgcgcgcaggcggaaccccacccgaacgctccctttggtcacgagctgcgggatttctatggtatatgaaagggggggggggtgttcgtantttgtgaagggccctacggtcagatgagaagctgtgcgagttcttcgccgcgatagcccangagcaggaggaggaggcttcaaattcgcggagacgagaggagctccttggttgaagccggcaagagctgctgctgatgggctgctgcctttgtcaggtcagcagcagcagcagcaggtgtggaatgactcgatgccgcatgttgcccatcaggaggatttcgatgggttcacggtcacggcgttcaaaggaatcagtccaaagacccttgatcaccaaggcgcaggcgttgaagcctgtgcggccgtctccagtccggacggcgtcccggaccttcagcgtgctctctctcttctgtcaaacagtccggtcggtggcggcggcacaaacaccaataccaaccacccgccgtcgtcgccggcgggtgagctgcaccaccaccgcgctgcgccgcgctgtcccgagcagcttgctcgccgccggctccgtctccgtgctgcaggaggcctcgtcgccggggctgtggcaggacggcggatgcagctgcagctggagcgcggtcctaggccaccacgcgcacgcgcggcttcagactctcgat

SEQ ID NO: 642 - DNA, 1507 bp, Zea mays
  Clone ID: MRT4577_100587C.1
cctcgaggccggccggggtcagtcgttttccgccttctaggctagtttgcgtaaagtacgatgcgcctcccgcttcttccacggtctcctctcctcgccgccgccgccgccatgcctcctcgccgacgtcgcgttgtcaaagcgacgccgctcaagccgtcttctccacaactctcctctaccccgccaccgaccccgtccgtagaggtccccaaacccgaaccccccgatcaccacgatcccactccctccgcccgtcgccgcctccccctcgctgccggggccgttgaggcgcaggaagagtggcatccgctcccgctctccacggccgacctttccctcccgctcaccctccccaccggccagaccttcctttggcgccgcacctccctctccccgctccgcttcaccggtgccgtggggtcccacctcgtctccctctcccacctgcccgaccccgacgatggccgcctcgcattcctcctccacaacgacggcggttgccccgcctcctcgttgcccgccgcccgcgccgcgctcctcgactatctcaacgcggccgtctcgctcgctgacctctggcggcagttcgccgccgcagatgagcgcttcgctgatgtctccgcgcggctcgggggcggcggcgcgcgggtgcttagacaggaacccgtcgataacttcttccagtttctatgctcctccaacaacaacattgcccggatcgagaagatggtgtggacgctggcaggctacggggagcggctcggcgaggttggtggcttcgtgttccaccggttccccacgatcgagcggctcgcgctcgtgtcggagcaggaacttcgtgaggccgggtttgggtacagggcaaagtacattgttggcactgctaaagaattgcaggccaaacctagtggaggtcaaaaatggcttgcctcactgcgtgagaaggaactttcagatgtgattgaagctctttgcactctcccaggtgttggtccaaaggtcgctgcctgcattgctctgttctcccttgatcaaaatcatgctattcctgtcgacacacatgtttggaaggttgctacacagtatctattaccagagctagctggcaagagcttgaccccaaaacttagcgttgttgttgccgatgcttttgttactagatttggaagctatgctggttgggcacaaaacgttctcttcattggccagctaccaactcaaaaagttgttgtggctcaagttaccagtgacaatggtaccacaaagcctaccaaaaggaagcgcagggtgcaaccggaaccatgttgagggagcatggataccagcgatagtgggtttgccattcttctgtgttattctcgttcagtaagaatgtaagatgatgtaatatgaccatgacgaatgatcttttctgctgaacaggcattaggttgctcctgatcacactaacatatttgctgtcagcttgtaacatataggaatgcctgactcattacattatgag

SEQ ID NO: 643 - DNA, 1968 bp, Zea mays
  Clone ID: MRT4577_100588C.1
gtttccgctatagcgccaaagaggaagaaaccacggctggttaagtacgatgaagatagccgtccggcgagcccaacgaagccagagttggtggagccgtccccaaagccggagccacctcctgtggctagatcagaagcaaagatggcaacgtcggcagcaaccgaaagtggcaccagcaccgcacctgcggctgttcaactcgagactttacgaaagccagagaagacggaggactcagagctccgtccaagcgaaccagatcggcgaaatcacagcctggagagccaggcggagctgccggcgtcgttgccggcgccttcagtcaagccggatgctgaagcaaagccggtaggatccgaggccaggaacggcgaagctactgcgacgacaaagattgagctggcatccgatggcgctcggcatgacaagttttccattgatctcatggctccccctcctgggaagctgtctgatgatatagatgcctcctccgaccctgatgcagataagaagggattggattctgagatggacatgttggggagaggaaattcggaaaagaaggatggtgaaaggactctgggagggctggatattgatttggaggaccagaaggtccggaattcccgggtcgacccacgcgtccgagtcttattccttatcaagcaaagattcctatgcaggctctctccactcctggtcaccaatcccagagttctctaagcatgagttcatcaaaaatggctcctgtaactaacctttctactggaggaggggatctatctcgatcttcaaatgcccctgttgcttctggttcaccatccaattcggtgtccaaaagcactggtggcagcccgcctgccacaggaaatgcaaagggtgttcagcagcctgtccaattgccatcaccacaacagcagttagccaagaactctgtgtcgacgtgtggctccaagtctactcctgcaaaccatttcagtatggctatgccatctatccttggccaacagcctaattcatcgcctggttctaataccgggagcaagcagcagtcacatatgtcatcgtcaatgaaacagcagccgttccctcaaggccatttcttcatatccagcacgtatgctcctcaggctccaggagccggcggtgctgctgcccttggcctataccagaagcgaccaggcgacaagacacagccacaggcaccacaccagcagaacgccttgtcagccgctgcttgcagtaacatgaaatcgcttcattcttcgtccggtggatttatgcatctcgcagcggcaacccaatctgcaggtggtggcatgccacacacccacatgcccgcggggcaaatgagttttggaacaaagccggtgcctttaaaaccctcaagcgaccaaaagcccgctgttggaaaataaacaaagcccaggtgcccatgcgtcggagtggtaattttagctggcgagctcaagtgcttatccagcggaagcccccaatgggggaggaaagatccaatgagaagagaaaagccggccccagctcgaaaaacctgcttttggttgctgctgtggtgatcagaaagggggaggaggggccctgcgaggacaccccttgctaacttaaaaggttgttcgggtctgggaatggctaatgtgagtgaaaacttttgggtagttttggctggttatccacccccccctcccatggtgtaaaggtcggaggagtgcataaaatttgtttcgtagccccgttttttgtgcatggatggatgtcgaaggctgttttctccctctatttttttgtagcttttccagttcctcgttttttttgggtggggggtttcagctttaaccggaggaggaaaaattcaatcaaaatgcagatttccggtaaaaaaaaaaaaaaaaaaaaaaaaaaaaaaaaaaaaaaaaaaaaaaaaaaaaaaaaaaaaaactcgagagaggg

SEQ ID NO: 644 - DNA, 144 bp, Zea mays
  Clone ID: MRT4577_100589C.1
gagccaatatacttaaccacccatagagggggccaggccctttcaattataagaatgcctgggggtttttttaaaggggcaggccaccttctccaaggggaaattaaccttaaaaaccaattgccatttccacgttgcaaactg

SEQ ID NO: 645 - DNA, 1002 bp, Zea mays
  Clone ID: MRT4577_10058C.1
gacccacgcgtgcgcggacgcgtgggcggacgcgtgggcggacgcgtgggcggacattatacaatatcgcggccgggctcgataaaactcacggccctactggttggcgggtgactagcactcgtcaccgttccgagaccagcgccagacgcagacggccccgaacgccggcggcggagcatcaggtcgtcgacctccgagcatcgacccgccgcgatggagaagggaaagggcctcgctcgccgctgggcggtggagctccccgacgcctcctcctcctcccccgccgtccccgacccgcccggcttcaccagatccgcgcccgacgcggacgacgccgctggagcgcgccagcgcaaggactccgaggctgcatggaaggcgcagaaagcttgggaagttgcgcaggctccgttcaagaacctgatgatgatgggatttatgatgtggatggcagggagcactgtccacctcttcagcatcggaattaccttctctgctctgtggcaacccctcaacgctctccgatctgttgggaaagtttttgaaccatttaaggacccaagggtggatactattgctcctaagttgctctttattgccctcaatttggctgccatgggattgggtatatggaagcttaatacattgggccttcttccaacaaatccatcagattgggtgtcttctctggctcctgctcgggaggttgaatatgccggaggagggctccccttaatttaatgtccatttccatttgaacttattttactagttgtaatattaataccgagtgacatttttaccatacacccctgaatacacgaagttccgggttttttcccctgtctggatttgtactactattttctagatgcgtttgtttgtatcgaatttgcgaccctgaagtatagtcgtgtctggatggaaaaggattaaattatcttctattcaattttgactaggaatgaatttaattaccttcgaaaaaaaaaaaaaaaa

SEQ ID NO: 646 - DNA, 667 bp, Zea mays
  unsure (1)..(667): unsure at all n locations
  Clone ID: MRT4577_100590C.1
atctactaaacaaatatgttccactgacaaatcttcctagcatctgaatatggattatgtatcttttgttacaaaaagtgcacatgtgaaaactgaaaaatgtaagactatcaatgcaaaccttgaaatggcttgactatttagtgaagaaaggttgtccaagtattttaacaaagagaggttgtcttaagtattagcatctactaagactattcaaaagagaaaggcttacacatgaggctgatagacacatgtggattcattcttgcttggacagttctcttctaaatcatgctataaggctttcttcgtgggttcgattacttttaaaccatggaaggggttatgaaagacttgggctccacccaaatgcaaactttttctttggttggcaattagtaatagatgttggacatctgatagactgcagaagagagggttggattatcctgaggtttgtcctttatgtgatcaagagccggaaaatatccaacacctcctttgcaattgcattnttgctcgacagttttggcactgcattctttcttcgttgaggcttgntaatctctcctgtttctaatgattcttcttttgctgantggtggaggaaagtatgtaagcaagtgcacaaatccaaaagaagactaatagtatcatcatcgtgggg

SEQ ID NO: 647 - DNA, 802 bp, Zea mays
  unsure (1)..(802): unsure at all n locations
  Clone ID: MRT4577_100591C.1
gacacattataacggnagaatgtacaccaacagtaacctgttaaaaaagctagtcgcatctgtacccgaaggcatgttgccgctcttcagggggatcaccgccgtaggctgcgtcttcttctcctgatacatcgacatgctcatatgctcatgtctgaagtctttctctccgttccctcataggttgtttctacttcaactcctctttatttcttatgtgctactatatcttcatacacaattttaactttttttcctttctattaatatattaactttttttgttacttttaatgttttttggaattttttaattgtttttatgtttttttatttatttattattattatttttattttattctattattgtttataattttttatattcttttttttattgttgtttaatatatttgtcttgtcatacaattttatttctttattgcataacttttatttatatttttatttttttttttatttatttctattttttttgtttttctttttcttattttttattactttctataatatttgtcttattttattattatattttttttttttattaattatgtatttttaattttttttttttttttttttgtttttttttttttttattttttattttatttttttttttttatttttttttttttaatttttatattattttttttttttnttttttattttatattaatttttaaattattnttttctttttnttctttcttgtttttttttttttcttttttttgttttatttttttaatttttctgtctttttttt

SEQ ID NO: 648 - DNA, 260 bp, Zea mays
  Clone ID: MRT4577_100592C.1
aaaaaaaaaaaaaactaaaaaaaaaaaaaattaaacaaaaaaataaataaaaacaaggaaagggaaaaactcaaaaaaaaataaacataaactactctataaacaaaactaacccaaacttgcttttctgtctctagctttagcttatcttgctcacttttctctcctcttcttttaatacccgtacacacactcgtacttctaaaattgaaactctttctctcttgtggtgcctgtgcaccattcttgcttgctttctt

SEQ ID NO: 649 - DNA, 209 bp, Zea mays
  Clone ID: MRT4577_100593C.1
tttttttttttattcaagttgacaaaatagaattggttcatgcattgttttacataatcagcaaataaaatatggaagtaaccaccccatgagatgctacactcattgctcactcaaataaataaggaccaataaggctgctagctatagggaactaagaaaccataattgcaattaattaggaacaataccaaaacccggcggttggg

SEQ ID NO: 650 - DNA, 234 bp, Zea mays
  Clone ID: MRT4577_100594C.1
ctcctcgtccccgcccccttctctagcggcgacgcctcggcgatactaccctgcaattccttagcatcctacgcgcagctctgatgaaaccgagaaaagggctaaacaacctgcgctggatggccctcgtcgacgtggtcgacgacatgcaccggtgggtggcggaggccgacatcggccaccactttccggggggggggggactgtgtagaggcgctgcatcctaagtcggcc

SEQ ID NO: 651 - DNA, 617 bp, Zea mays
  Clone ID: MRT4577_100595C.1
tcgagccggcgggattcatcgagacagctatttgggacctatatttttaataccgaggcgcggggaggagacggcttctggcgtgatgacggcctcggtgcgcatccgcgtggccctctcggtgttgagccacttcgccaatcgccccgccgtggccggcgatacagctttatttagtgagagacgatcgccacgtctttcaatatcctatggcgtctctcagcagactgctgcaggatgaggtggaagtgagcttgagcgtacagtaaagaacattactccatgacttaccaaccaagttcgatgtgaagatgtcccccaaagtgacgcctcgactccgcgacatgttttatgatgacaaccacaagcgtcgtgactatgctcgcccaggttctgctgacactgatccctgagatgaccgactgcaactatacgccacatcttcgctacttggcatgtgactgacgcttcactgcccatggcctgtacccagcccgaggttgaggagcactgcacgccactcatgtccaacgaatcgtcccatctcgatcaagactgatggaggagactgttactgctctatacatgatggtatcttgttatgccacgactatctt

SEQ ID NO: 652 - DNA, 517 bp, Zea mays
  Clone ID: MRT4577_100596C.1
aacacgggggatgggcctttttgggcgggaaaacaatcgatccacaatttaagaaggcagggggcaaaaagaaaaaaaaaaaaggtcctatttttttttttcgaggttaaaaaggcattaccaatgatcaacgacatgaacatttgcccaaaaagacgtgaaacgtccgtcgttttggccgttgattttccggttcacctagggggaatggaaaaaatttaaccattttttttttttggcctccgccggggatttatttgttaaaacgcattgtatgttttcagcttttataaatttagcattcacctcacctccaatggagggggaaagggggggacccacttttttttttccacacccgagcgacccaaccggaaaggaaggggccaagccggggccccaagccttcaaaggaaccggggaaaaggccccctgggtccccggggcttaaaaatttcggacacgggcccaaaaagatggggaacccccgggggtacaaaaaccacgtccaaaattt

SEQ ID NO: 653 - DNA, 255 bp, Zea mays
  Clone ID: MRT4577_100597C.1
atagtgactagacatggtagggtggagtgttgtcgtggtgaagccatcagcccatcactgtcgactggagctttaagggttagaggaatcatgcttttatttgctcattctgtctgggccactgatgttcaggattaagaccaacttcattcttggtgttgggtataggtgtgatgcacacttgtttccttcactatgatgtttgggatgtagcatcctactgacacgcacgtttatactaggtttcacatagac

SEQ ID NO: 654 - DNA, 231 bp, Zea mays
  Clone ID: MRT4577_100598C.1
cggcaacggtgaagcaacagggtgttgttagagcccaactgccgcgccaagctcaagcctcaaacactttactataagcctgtacacagcacgaatgcggcccaaactggacgcgaccacaacttttcgtccggctcgtcctggcccagcccacttgtagacaattttcggtttcgcgattctagcgggccgatgctgacaaaactaagttctcaatttgatttttagtcc

SEQ ID NO: 655 - DNA, 320 bp, Zea mays
  Clone ID: MRT4577_100599C.1
ggactaattagacactggcggcggcaactttgaatccttatcgccgtagaaaacttgactactacatatgcacttataacccgatgaaattgttccgaggcctcaaggcactaacaagagtgggcttggtaaacgtgcagagccaggggaaaacaagggtgagtccctaaggacagatgatacaccggttggctagcggtcgtagccataaggccttcttaagggtcagcgggatttatgacgataagactgtttgaaattatgaagcatgtgcgaaaatacaggaacacatgcatgacaatgatgccaaggacgtcctg

SEQ ID NO: 656 - DNA, 1328 bp, Zea mays
  Clone ID: MRT4577_10059C.1
cccacgcgtccgcacctggagccgcttcacacggccccaatctccttcgctcctctccatggcgtgccctgcgctcgccggatctccttctgctagcgcccagctgctccctgcgtgctcctcccgtgcagctcgccgagcgccctctgcctgctagcgccagcagccacgccgctgcttgctccccttccttctcccttctctgcttcccctgctcgccatggaactccctgcgtcgagctcggctcctgctccagattgctcagctgcttcgggcagatgctggggcgctcgattccccagcaaaagttatccgctgcatgcccctatttgccgagcacttcaggtgggggcgccaggaggatgcacacgagttcctccgctatgtcgtagatgcctgtcacactgctgacctccgcatgcacaagcggttacgtgcagcagctgccagtggaaactgtggtgaggatgtccgggggcagggggtttgtctggttatgagggagacatttggcggggcattactgcgtcaagtgaagtgccttgagtgcaagggagaatctaacaagactgatgagataatggatatcagtctcgatctacctgggagcagttctgttgctgatgcccttgctcggctctgtcctatgctccagctcaccccctctgtctgttctcactactgggtcgggtctgcttggcgggcacaccaccatgcccgtggaattcctcggacctctctcctccgtgttggccgaagccatagaaattccttgctgcgcccagccgagtttgcccaggtcacaagcatctatgtcctcgcctcgtcgtgctcgctggtcgtgcatccttgcagttccttgcttgtgatcgcaagcgctcgaagtggaaaaacagagttgataaagaagaaagcaaaaccgtatagttcgtgcattcatttagtgtggaattggtgctatgaattttggggaaggaattccgagaaattagtggacggtgatgatgatgttcgtgcgatactcgtcagacgctcgaccaaaaagcctaattcgggagtggctactccgtctttttcgtcatgtgggaatcgtcgtgctgacacgtcaataccgtcgatcgtcatcccctgttcgatctcgtcgtcaagcttcgcctcagccctagtcgtcgtctttcacccagcagctcgtcatgagacctcacccagcagctcgtcatgagacctggtgtcgagctcctttcctaacaaatgccgaacctatccctgctcctgcgttcgccaacagtcttaactcgtcaatcacgctcgccagatgttcaattga

SEQ ID NO: 657 - DNA, 582 bp, Zea mays
  Clone ID: MRT4577_1005C.1
taaaaaaaaaaaaaaaaaaaaaaaaaaaaaaaaaaaaaaaaaaaaaaaaaaaaaaaaaaaaaaaaaaaaaaaaaaaaaaaaaaaaaaaaaaaaaaaaaaaaaaaaaaaaaaaaaaaaggggggggccccttttaaaggacccaactttacttccccgtccttgcaacgtattagcttttttttggggcccccaaaatcaatttcacggcccgtcttttaccaccgtggggtttggaaaacccctggggttccccaatttaatcgcttggaaacaaatccccttttccccagttggcttattcgcaaaggggcccgccccgttcccctttccaaacatttgcccaccctgattgggaaagggacccccccctttaccggccctttaaccccggggggtgggggggttccccccagggggccccttccctttgccagccccttagcgcccgttctttgggtttttttcctttcttttttccccaggtgcgccggttttccccgtaaagttttaattggggggctccttttggggtcccgattaagggttttacggccccttgcccccaaaaaattggtttgggg

SEQ ID NO: 658 - DNA, 1329 bp, Zea mays
  Clone ID: MRT4577_100600C.1
agagtttagggagggagagtaagatgcagataaaaagttccctcccttattaaatcttcctcagcgccgccgctcccagacaccgagcccgactgcccaaccccgatccggcgatccgtctccttcttttcctcctctctgccgtccccgatcactcgcaaccatggcggcggcagcaggcggaggcgcggtgcgtgctctgtcccagaaggagcaggacatacagatgatgctcgccgccgacgtccaccttggcaccaagaactgcgatttccagacggagcgctatgtctttaagcgccgttccgacggcatctacatcatcaatcttggcaagacatgggataaactccagcttgcagcgagggttatcgttgccatcgagaacccgcaggacatcatcgtccagtctgcccgcccatatggccagcgtgctgtcctcaagttcgctcagtacactggcgcccatgccatcgctgggaggcacacccctggtacattcactaatcagctccagacctccttcagcgagcctcgactgctcatccttactgacccaaggactgaccatcagccaatcaaggagtctgctctggggaacatccctaccattgccttctgtgatactgactctcccatgcggtacgtcgatatcggcatcccagcgaacaacaaggggaggaacagcattggatgtctgttctggcttctgtccaggatggttctgcaaatgaggggcactattcttcctgggcacaagtgggaagtcatggtcgatctgttcttctacagagacccagaggaagcaaaggagcaggaggaggaagttgccgtagcccctgagtttgccgcaatcactgattaccaacgaactgatcagtggggtggtgatcagtggacctctgattggggtgctgctccggctccagttcctaccggtgatggctgggatcaagctggggcccctgtacctgcggacggtactgcacctccagtggttgctcctactggttgggaccaagcagccccgccgacagcccaaggctgggagtagctactatgagacctgtcttctgcagcttaagttctactatgaataggcatagtctacatgaagtggtgaactgtatcaccgaaacgcggttcagctctgcaacggcaagccgcgatactagattagatgtgaattcggttgtagatatactgcacgaactacttggaagtagaagaagagttgagtactcgtagatgctctttttatttctgcgtgatgttggtacggggcctctgacatgaaagtcataataacctagtcaaagttcattttct

SEQ ID NO: 659 - DNA, 210 bp, Zea mays
  Clone ID: MRT4577_100601C.1
cattaaaaccaaaactttattatgaccatgcatattttattggtcatcccacacatgataatgtgggtcgccttactgcattattacatttatagatagagagagatggatagaggagatttcccaaatattatgaatcaatagtaggggcggatggcagcggaaacccctcaagggttggaccgtaaccgggcacctggtactggtaga

SEQ ID NO: 660 - DNA, 1366 bp, Zea mays
  Clone ID: MRT4577_100602C.1
cattgggtacctcgaggccggccggggcagatataaagttccctcccttattaaatcttcctcagcgccgccgctcccagacaccgagcccgactgcccaaccccgatccggcgatccgtctccttcttttcctcctttctgccgtccccgatcactcgcaaccatggcggcggcagcaggcggaggcgcggtgcgtgctctgtcccagaaggagcaggacatacagatgatgctcgccgccgacgtccaccttggcaccaagaactgcgatttccagacggagcgctatgtctttaagcgccgttccgacggcatctacatcatcaatcttggcaagacatgggataaactccagcttgcagcgagggttatcgttgccatcgagaacccgcaggacatcatcgtccagtctgcccgcccatatggccagcgtgctgtcctcaagttcgctcagtacactggcgcccatgccatcgctgggaggcacacccctggtacattcactaatcagctccagacctccttcagcgagcctcgactgctcatccttactgacccaaggactgaccatcagccaatcaaggagtctgctctggggaacatcccgaccattgccttttgtgacactgactctcccatgcggtacgtcgatatcggcatcccagcgaacaacaaggggaggaacagcattggatgtctgttctggcttctgtccaggatggttctgcaaatgaggggcactatccttcctgggcacaagtgggaagtcatggtcgatctgttcttctacagagacccagaggaagcaaaggagcaggaggaggaagctgccgcggcccctgagtttgccgcaatcactgattaccaaggaactgatcagtggggtggtgatcagtggacctctgatgtggctgcgccgcctgttgctcctactggtgctgattggggtgctgctctggctccagttcctaccggtgaaggctgggatcaagccggggcccctgtacctgcggacggtactgtacatccagtggttgctcctactggttgggaccaagcagccccgccgacagcccaaggctgggagtaggcatagtctactatgagacctgtcttatgcagcttaagttcagtattttttgtgaagtctagtcttctgcagcttaagttcagtattttttgtgaagtctagatgtccagaatcttttggcatctgctatagctatgctttgctttgctttgagcacttctgttttggggctttctagctgaccctgttgtccaacgttgctggcatggaaatttttggttaatcttaaaactgggaagagcgtgtaaacgaaaaaaaaaaaaaaaaaagcggcc

SEQ ID NO: 661 - DNA, 1349 bp, Zea mays
  Clone ID: MRT4577_100603C.1
ttgggtacctcgaggccggccggggtcgcagataagaagttccctccctaattacaatcttcctcagcgccgccgctcccagacaccgagcccgactgcccaaccccgatccggcgatccgtctctttcctttccttcgttctgcaggccccgatcgcttgcattcccgtcaaccatggcggcggcagcaggcggaggcgcggtgcgcgctctgtcccagaaggagcaggacatacagatgatgctcgccgccgacgtccaccttggcaccaagaactgcgatttccagacggagcgctatgtctttaaacgccgcaccgacggcatctacatcatcaatcttggcaagacatgggataaactccagcttgcagcgagggttatcgttgccatcgagaacccgcaggacatcatcgtccagtctgcccgcccatatggccagcgtgctgtcctcaagttcgctcagtacactggcgcccatgccatcgctgggaggcacacccctggtacattcactaatcagctccagacctccttcagcgagcctcgactgctcatccttactgacccaaggactgaccatcagccaatcaaggagtctgctctggggaacatcccaaccattgccttctgtgacactgactctcccatgcggtacgtcgatatcggcatcccagcgaacaacaaggggaggaacagcattggatgtctgttctggcttctgtccaggatggttctgcaaatgaggggcactatccttcctgggcacaagtgggaagtcatggtcgatctgttcttctatagagacccagaggaagcaaaggagcaggaggaggaagttgccgcggcccctgagtttgccgcaatcactgattaccaaggagctgatcagtggggtggtgaccagtggacctctgatgtggctgcaccacctgttgctcctactggtgctgattggggtgctgctccggctccagttcctaccggtgaaggctgggatcaagccggggcccctgtacctgcggacggcactgtacctccagtggttgctcctactggttgggaccaagcagccccgccgacagcccaaggctgggagtaggcatagtctactatgagacctgtcttatgcagcttaagttcagtattttttgtgaagtctagtcttctgcagcttaagttcagtattttttgtgaagtctagatgtccagaatcttttggcatctgctatagctatgctttgctttgctttgagcacttctgttttggggctttctagctgaccctgttgtccaacgttgctggcatggaaatttttggttaatcttaaaactggaaagagcgtgtg

SEQ ID NO: 662 - DNA, 1419 bp, Zea mays
  Clone ID: MRT4577_100604C.1
tttccaaaaagagagaaaaaaaaaaaaaaccatctaaaacgaaacggaaggagaacgccgccgctcccagacaccgagcccgactgcccgaccccgatccggcgatccgtctccttcctttccttcgttctgccggccccgatcactcgtcaaccatggcggcggcagcaggcggaggagcggtgcgtgctctgtcccagaaggagcaggacatacagatgatgctcgccgccgacgtccaccttggcaccaagaactgcgatttccagacggagcgctatgtctttaagcgccgttccgacggcatctacatcatcaatcttggcaagacatgggataaactccagcttgcagcgagggttatcgttgccatcgagaacccgcaggacatcatcgtccagtctgcccgcccatatggccagcgtgctgtcctcaagttcgctcagtacactggcgcccatgccatcgctgggaggcacacccctggtacattcactaatcagctccagacctccttcagcgagcctcgactgctcatccttactgacccaaggactgaccatcagccaatcaaggagtctgctctggggaacatcccgaccattgccttttgtgacactgactctcccatgcggtacgtcgatatcggcatcccagcgaacaacaaggggaggaacagcattggatgtctgttctggcttctgtccaggatggttctgcaaatgaggggcactatccttcctgggcacaagtgggaagtcatggtcgatctgttcttctacagagacccagaggaagcaaaggagcaggaggaggaagctgccgcggcccctgagtttgccgcaatcactgattaccaaggaactgatcagtggggtggtgatcagtggacctctgatgtggctgcgccgcctgttgctcctactggtgctgattggggtgctgctccggctccagttcctaccggtgaaggctgggatcaagccggggcccctgtacctgcggacggcactgtacctccagtggttgctcctactggttgggaccaagcagccccgccgacagcccaaggctgggagtaggcatagtctactatgagacctgtcttatgcagcttaagttcagtagtgaagtctagtcttctgcagcttaagttcagtattttttgtgaagtctagtcttctgcagcttaagttcagtattttttgtgaagtctagatgtccagaatcttttggcatctgctatagctatgctttgctttgctttgagcacttctgttttggggctttctagctgaccctgttgtccaacgttgctggcatggaaatttttggttaatcttaaaactggaaagagcgtgtgaaacgatccttgtgactctgttattccctgagtatgtgcaagaaaaaatcctgatc

SEQ ID NO: 663 - DNA, 309 bp, Zea mays
  Clone ID: MRT4577_100605C.1
ccgttgcaggccgtcttgtggtcgccgtccggtaacctgacgttcttgttgtgcccctggatcccttggtgaggcgtgttctgggctcacggtgggccccatttgtgtgcctgggagggcgacatcgtgttttgcgctgagggcgatgtccgttgcagatgccacctaccctgggttgcgcgtggagacggcgccgctgtctttgactaacacattggccttcaacgtctgttgctgcggtaagtttgtgtgctccttgtggctgatgtgggctgctaggatgccgtcgtacacgtggttgttgttgtc

SEQ ID NO: 664 - DNA, 1368 bp, Zea mays
  Clone ID: MRT4577_100606C.1
cgggaagatccctccctattacatcttcctaacgccgccgctcccagacaccgagcccgactgcccgaccccgatccggcgatccgtctccttcctttccttcgttctgccggccccgatcactcgtcaaccatggcggcggcagcaggcggaggagcggtgcgtgctctgtcccagaaggagcaggacatacagatgatgctcgccgccgacgtccaccttggcaccaagaactgcgatttccagacggagcgctatgtctttaagcgccgttccgacggcatctacatcatcaatcttggcaagacatgggataaactccagcttgcagcgagggttatcgttgccatcgagaacccgcaggacatcatcgtccagtctgcccgcccatatggccagcgtgctgtcctcaagttcgctcagtacactggcgcccatgccatcgctgggaggcacacccctggtacattcactaatcagctccagacctccttcagcgagcctcgactgctcatccttactgacccaaggactgaccatcagccaatcaaggagtctgctctggggaacatcccgaccattgccttttgtgacactgactctcccatgcggtacgtcgatatcggcatcccagcgaacaacaaggggaggaacagcattggatgtctgttctggcttctgtccaggatggttctgcaaatgaggggcactatccttcctgggcacaagtgggaagtcatggtcgatctgttcttctacagagacccagaggaagcaaaggagcagggaggaggaagctgccgcggcccctgagtttgccgcaatcactgattaccaaggagctgatcagtggggtggtgaccagtggacctctgatgtggctgcaccacctgttgctcctactggtgctgattggggtgctgctccggctccagttcctaccggtgaaggctgggatcaagccggggcccctgtacctgcggacggcactgtacctccagtggttgctcctactggttgggaccaagcagccccgccgacagcccaaggctgggagtaggcatagtctactatgagacctgtcttctgcagcttaagttcagtattttttgtgaagtctagtcttctgcagcttaagttcagtattttttgtgaagtctagatgtccagaatcttttggcttctgctatagctatgctttgctttgctttgctttgagcacttctgttttgggcctttctagctgaccctgttgttcaacgttgctggcatgggaatttttggttaatcttaaaactgggaagagcgtgtgaaacgatccttgtgactctgttattccctgagtatgtgcaagtataaatcctgatc

SEQ ID NO: 665 - DNA, 700 bp, Zea mays
  unsure (1)..(700): unsure at all n locations
  Clone ID: MRT4577_100607C.1
ggtatggtcacaagctggagatttggtgccttactgtcattgtcttccaaatctgtaaatcgtgatagtgtgtagttaagtaagtttgtgttgaccagttaaactaatgcactataagaaaaacttaagtataaaaaagtacattatgcgtatactggggcatgacgggaaccactatacacttccgctgactaacaatatgttgttattaatggttcttgatgtgcgcaaaaagttaggaatttgcaactacctaatgcatatatcccttcagtgcaagcattttcaactattagaaatggcttaatagagtgatatttggtagtttcatcaaggactctgtatatctaaatcattggagcaatagacagcctaaaacagcacttgggtccaactccctgtggcagtgaatttagtctggttaaaacaatcctctcattggcaaacatggggttcagggattttgtcaacgagcaaggttgagttaaaaacattgcctagggagaggtcatgccccctgctggttgagttttttctctgaatatgctgcaggtaatatggtcattcattatagtcctattatttcttgcacataccattttttttgtattttgcataatttatttccctttttacttgtatttgtattctggatcttnttattttgctatatatgcacaatgacaatgtcatctcttat

SEQ ID NO: 666 - DNA, 302 bp, Zea mays
  unsure (1)..(302): unsure at all n locations
  Clone ID: MRT4577_100608C.1
atgcgttcgtgcctactggagcagcctacattggttcgaaaggccacatgctgttcaccttgaagaggcgggtgcaggtatcgagtaccacgcgtccgtcnaccagaatgaggtaccttccgattcacaagggcgcatctgcgccgcaccaaacaccgatcgatgtgctgtgcttcatgactcgctgcaccctacctaccgatgaccctattccactattcgctggcctgtatgctcatgacatgaccctttcctaggccccatgctgcatgtacagacttactaactttttcatctgacgc

SEQ ID NO: 667 - DNA, 583 bp, Zea mays
  unsure (1)..(583): unsure at all n locations
  Clone ID: MRT4577_100609C.1
ttattacaatacatcgacatacatgtgcaatagtacaccctacacacaaacctactatttttaaatttacacatcacgtccaatcaacataactcagttatttccctgattcgcacacgcgttcacggcactacatatgaataatagactttaccaacattcaacgcattacaagatatcgcctaacattagttggacaataaaagggacagcttactcttcattacttacttcatcgaggttctccactcgcacgcaaacaaggttttggttaaaccgcaagcttgcaaggagactcgacgacgacgcggagcaatgcgagccacgcacaaaggcgaggtcacggtgacagtgacttcactgccgttcatgacatagagcttcactcgggcattacatcgaacacccgcgaagcgccaatgttgcggggttgtgggggaaatctcggctgcgaggagctgcgctgtatagggtcgggcatgctttagccaaagtggagggaggggtggtgctgtccactgngactgcgcaaaacagggagccgccaaagcgcgaagttgtcgcggttgctgctcaaggggag

SEQ ID NO: 668 - DNA, 1186 bp, Zea mays
  Clone ID: MRT4577_10060C.1
cacgaggattaattggtggcttactggctggctttctagtctccggcacaagattccctctccagcggcgcaccaccgctaccatcctccgacccccaacctgaacccgccatgtcaccggcgccgtcgcgcccccgcatccgtccgtggctggtggtgggtgacctggcactggcggccgcgtgggtttgcgcgggcgcgctggtcaagctgctcgtttacggcggactcggcctcgggggacggcccgaggccgaggccgtcaaggtctcgctctccctcgtatacatgttcctcttcgcctggctcgaggctgcctcgggtggggcctcctacaatccgctcaccgtcctcgccgctgcgctcgcctcccacggcggacccgccgtgtacctgttcaccgcgttcgcgcgaatcccagctcaggtgattggggcggttcttggagtaaagctcattcaagtaactttccctaatgtgggtaaaggagcccgcttaagtgttggtgctcatcatggtgcgttagctgaaggcttagcaactttcatggttgttatggtatcggtgaccctgaaaaagaaggagatgaaaagtttctttatgaagacatggatcacaagcatttggaagaacacaattcatctccttagctcggatataactggagggattatgaaccctgcatctgcttttgcttgggcgtacgctcgaggagatcatacaacatttgaccacctactggtatattggctggcgcccctgcaagcaacccttctgggagtatgggcggtgaccttcttcactaaaccaaagaagatcaaggagcaaaaggtagatgaaaacaagataaagaaggaatagactattcttgaattagagctagagcttcataccatcttcttagtcagataacttgtggctacacacaaggcgaaatgtttcgaagctaatctaagaaatggcaacctatcatggtcagcttctgtgaagtctccttgatgtgtattccttgtatctggcttagcttagattgtgcagaagcttgtaagcaactgctccaggcttccattcaagacattgtcgtattggaaacagtatatatggaagctaaagcttctcagagttgactcacaaaaaaaaaaaaaaaaaaaaaaaaaaaaaaaaaaaaaaaaaaaaaaaaaaaaaa

SEQ ID NO: 669 - DNA, 294 bp, Zea mays
  unsure (1)..(294): unsure at all n locations
  Clone ID: MRT4577_100610C.1
ggcagaaccaaaaagcaccattttttttcttaggatttaacttaaaaaaaagccgggcgggggttttttcttcccagggggggggaanacatgctggttgatgcttgggtctgctggagcctaggaagaacacaatattaacaactgacccagagcgacctttaattaaaaacacatgtgggcaacaaccatccccagaccaacgaaaataaaccctttgggctggggaaaacaacacgggagcaaacaagaaaacttggccgggggggccccaccccttagttcctccagttc

SEQ ID NO: 670 - DNA, 174 bp, Zea mays
  Clone ID: MRT4577_100611C.1
ggggcggccggcccacaatgatagagctcaacgcttccaggagggagatggccatcgtgggctcgcagtacgccggcgagatgaagatggggctcttcggcgtgctgcagtacctcatgcccaggcgcggcatcctctggctgcagtccggttgcattatgggcaaggacaagc

SEQ ID NO: 671 - DNA, 362 bp, Zea mays
  Clone ID: MRT4577_100612C.1
gagaagacaataaaaggagttcggttttcgaatcaaagatggtgaataaagaccgttacaataccccattgcatgcccacaaggtagtgctagggtcccctgaccacatgctcccttgtccctaacagcccgcccaaatggctactacaaaaatgtcctacacttttcagagcattgacacatttcctggttgccacatatttcaggaacggtttttttagggggtatgcaataccaaaaaaattctacaacgtgtgcctttagcacatcacatgaaacccccttgcaagggcggattcctccagctcaaaatgggggatggtctgggaaaaaaactggatgccaaaatacaacctttttac

SEQ ID NO: 672 - DNA, 293 bp, Zea mays
  Clone ID: MRT4577_100613C.1
caagaaaacattaacgccaaacttaataacccagtagcaaagcgggggaataaagtcttacaacgtaggttgtaaaccacacaacgacagatagataagaaccgacagaaacacaagcccgacgacgccgcgccagtagagcgtatagtactggtcaccctggtggccgtcctcacccttgtaaaactcagcaccgacctcctcgtagtccttttcgagcgcagccagatcctaacgagcctcggagaactcgccctcctccataccctaaccgacgtacccagtgcacgaag

SEQ ID NO: 673 - DNA, 322 bp, Zea mays
  Clone ID: MRT4577_100614C.1
ttcataactagagcatcatatatttcctcaactacatttaacccatctcattcataactagagcatcatatatttcctcaactacatttaacccatctcacgtctacaaagggagacatctcccaccgtcacaccatggtgaggaaaactcgcatcctcgtcacagatcgctacttatatctctgctcattttccgggctcctccttgacctcccatcctcttctcttccacttggccgcatcagtcagccatgtggatctgcgctcgatctcctgccccctgattgcggggcttactatattgaactcgtgcggaattcct

SEQ ID NO: 674 - DNA, 191 bp, Zea mays
  unsure (1)..(191): unsure at all n locations
  Clone ID: MRT4577_100615C.1
cttctagagcgctgggctgccgccgagctagtggaggctcgtgcgagcccagggaatgtaatgtccgngagccggtgagcctgcgagggcgtgagcgaggctgtgtgccgctgatgagtngaggtgcgtcatgtaggaggcttggggcgtgagatgcatgggtggatgaggctgtgtgtcctggtggtgga

SEQ ID NO: 675 - DNA, 610 bp, Zea mays
  unsure (1)..(610): unsure at all n locations
  Clone ID: MRT4577_100616C.1
accaggagattacaaaagtgcgaaagctatgatgatggaagggatgctactgantcggacagcacaatcccctagataggcggtagcatatgatcagaccctatacagctttgaattgatagatgaacaaaaagaaaagaattcggagaggagatagaagaagaagaagaagaaagacaaaaaaaaagttacatgttattgattcccagctctaccttgtcaccatttccaatgtcggccgaccaacctgttgaacgtctagctccattctgcactacatgctgtaactttagccctgcacgacgattgagtagccttgtgtcttgtaacaatggcagcaaaataggttccgtcgtctgcgcttcagtttatcaggccagcaggtccgggaacagcttgtagcagttggccggtgactccttcccgtcgtcggggctgctctcctcgccggcctgcggtggtggcggtgccaccgccgccgccgacgacgacgacgaggaggagatggtggacggcgacgtctgcggcaacgacgacgactcgtggcgcgggagctcggcgagcatctgcaccacctcgcgcatggtggggcgctccacgctgttgtcct

SEQ ID NO: 676 - DNA, 305 bp, Zea mays
  Clone ID: MRT4577_100617C.1
catttcctccttttgtttttcatttttttttaaagggttaaactttgtttgattttgcgcaaagccaccaacaactattggtacaggttcagtgaaaactatccaatcgccggggagacgttaaaataaacaataatttatacacacctgcaggcagtcgctaggcggtcaggaaaacacttttaaaacacgtttaacacgcgccggaatcccggtactgatgagaagaataacgctgggagggacggtccggttatttcaggcggagcccggtgaggtcgttgacttggcttctggggcgcggt

SEQ ID NO: 677 - DNA, 251 bp, Zea mays
  Clone ID: MRT4577_100618C.1
catgaagctctcaggaggcccttcctgagacagtgattgctctaatgctaagaatgctgctgtgaaggatctgaagcacgactatgtggcctccatctccaaggatgaccctgccatagaggcctcatacctggacgtcccaagctatcatcattatccaccctgagcagataggaagcagctatgccccagagctggattgccacacctcgcacattgatgataagattgctgatctcattaccaatatt

SEQ ID NO: 678 - DNA, 356 bp, Zea mays
  unsure (1)..(356): unsure at all n locations
  Clone ID: MRT4577_100619C.1
ctgctctaggcggctatgacagggaggagaaggctgcgagggcttatgacctggcagctctcgagtactggggcccctcgactcacataaatttcccggaacagcagcggcttctcgaggggagcatccatgtacagaggagtgacaaggtgccgtgctgcaagtctgctcgcccatttttgcaccccacctgctgccttttccaacaccccaaaacttctagccatctcacatccgagtctgggcacagctctgtgcctctctctgttgggagttctgagttttctgaactcacacgcacgcacacgcatncgnctgctgcttgtgtataaagtataaaccttttcttgtcctct

SEQ ID NO: 679 - DNA, 469 bp, Zea mays
  Clone ID: MRT4577_10061C.1
gtccggaccccgggtcgcccacctcggcaccgtaaagtctacagctgcgcaatccctttcctttatccaaggcgaggagctgagggggggggggggccctctgtgtgtcttgttccccgctctccagatgtcgccccacagcccggagaggccttatgaagctgtgatgagcgactcaagtcgagatggtaacgatggatgcagaattcttctcattcaagggccgccgaaagtatctaccaaggcgggtctggaagtagggtagactgcctgatgcatatccttacaaatccctcctcgcttatcaacaagatttatcacccaaatgcatgagatgtctggctctgatgtttagatgtcataaaccaactggagcccatgttgatctataatgttttgaagatccttccagctgtactattccaatcctttgatccataaagggaggctgacactgatgatgcgtgat

SEQ ID NO: 680 - DNA, 340 bp, Zea mays
  Clone ID: MRT4577_100620C.1
aaacacgggacaaccgtatgggtatcgcagggatcctgctacggtgctaccttgatgcaccgtccgcatgacgccgaggtgccacttacaagcccactctgaaactcacgctactgccttcggcaaaaacacaagcacaccgcgcccaggccatacggtcgactcaaagaagccatactactaaaatacacaccgcgcccttggcgcacagctcttggctaaatgatcactgccacacaggccaacacaacttccgcttcttcacaggcgttgtgggtgctttaaggaacaggcagggggtactaatgacctgttccctttgcataacttacaagaatca

SEQ ID NO: 681 - DNA, 792 bp, Zea mays
  Clone ID: MRT4577_100621C.1
aagaactccttggatcattgtcatcgtccctggctcactccccgccatcgatgatcaccgcgaccaaccctcccgctcagcgtgcatgtccaccttttaatccttacaaaaggtgatcggccgatgacgaggcgagcaccccaagaaaacatcgagcaagccatgcattattgacacccagaggccagttcccgtcgcaacgaccaccggaggtcgatcgagcgagccatgggtggcggcactccgcgcagcagcatcggccacatcctccccggcgccggtttcctggccgtcggcctgtggcacctgttcaaccacatcaggctcttctccctgcgccccgacgcgtacgtcgcgcccgtctggttcccggcgccgcgcgtccgccacctcgagctcatcctcgtcatcgccggcagcgccgccgagttctccatggagatgttcgtcgaccactccaccttcctgccgttcgacgccgacggctccatcccgtccgaccgcctgcacaaccacgagcacgccatcatctgcctcgcgctgctcgtgtacgcggcctccgcgctgcacctcgaccgcgcccgcgcgcgctgccgcgacgcgctctccctgctcctcgtcgcggccgtcttcgcgcaggagctgctcgtcttccacttccactccaccgaccacgccggcctcgagggccagttccactggctcctgcagctcgtcgtcgccgcgtgcctcgccacggcgctcctgggcatcggcttcccgcggagcttcgccgtcagctgggtccgctcg

SEQ ID NO: 682 - DNA, 621 bp, Zea mays
  Clone ID: MRT4577_100622C.1
ggtaccgcggccctcctcgagtttttttttttttttttttttttttttttttttttttttttttttttttttttttttttttttttttttttttttttttttttttggaacccggaacggttcaaaatttttgttggggggggatgcgggaaaaaacaccccgccccattttaaaacttttaaaaatggggggggccaaaattgggtttaacccaataaaagagcgttttggggggatttttccggacaattttcccccggttttttgggcttaagcccagccaacccctaaaattttttttttgcccttacaaatccgggaagcggcttttccaaggggggggaataaagattttaaggccatttttaaaaaaaaaatgacaggaggggggggggttagggaacaaacacaaggaactttgaacttttccaaatttttgtttgcccaagggtaagccaaatggataaaattggcctccaacccttccttttttccatataatttggggggaaaaaacccccccccccaatttaaaaaattaaaaattgggggggccaaaaccggggggggacccaatccaaaggggttttagggttgtttttggggacgattttttccca

SEQ ID NO: 683 - DNA, 539 bp, Zea mays
  unsure (1)..(539): unsure at all n locations
  Clone ID: MRT4577_100623C.1
gcacgaacggccacaaaggtcgtcgccgccactaacgaaggaagaagaggtcgctcctcagctcctcgctaaccctctgctcttcggtaaaaaaattttgtacaacatgtttgacttacttggcccataatttgttgcgggtgtgacctctgctcttcggtaaaacttttatgtacaacatgttcgacttactcaggcccataatttgtttgatagagtgacacaattacaaccatgctccgaagttctcagtttcttggcgcttgaattttaaggtactactgctatattgtttttataatattattgagtttaaagttgatactacaaaagtatctgcttgagactgggtttcattgggagttaggtgatgatggttgttcttggtctatccagtggcccttttagatgccgcatttngtgtttgtatatttatttctctagctaagaccattggtaaacttcaggtgaacaaaacctcttctttggatcctttattagttctcatacaagatcagtattgctacactctatacttt

SEQ ID NO: 684 - DNA, 351 bp, Zea mays
  Clone ID: MRT4577_100624C.1
attcggctcgagctcttaatcaatgggagttgctcgcgatctcgctcggggccgtaacacctgctttgagcatgctagacaggcgtactccctcaggcaacacggctctgcgcgacggagcctagcacgaaagggcgggcctacaatgcgcaaatgataccggctaatgagaaatctagaaaagctattttcctgcaaatgaatcctgtttcttgccaacgaggaggcggtgaccacctaattgatttacatggcctccatttgaaccaagaaccccaaatcatcaagggtgagctcaccggctcgaaaatgctgaaatgggcatcacgggataggaagcaagaaatggtt

SEQ ID NO: 685 - DNA, 536 bp, Zea mays
  Clone ID: MRT4577_100625C.1
taaaaaaaaaaaaaaaaaaaaaaaaaaaaaaaaaaaaaaaaaaaaaaaaaaaaaaataaaaaaaaaaaaaaaaaaaaaaaaaaaaaaaaaaaaaaaaaaaaaaaaaaagggggggccgcttttaggaggatccaaatttacttcacccgtgcttgcaaaaaaaaaaatttttttttggggtccccaaaaattaaattaacgggcccggtttttacaacgttgggctttggaaaaaccctggctttacccaatttaatgggcttggaaaaaaaccccctttccccgggtggccttttgggaaaaaggcccaaaccgttggcctttccaaacattttccccccctgaatggaaaaggggaagccccctttaggggcgctttaaaaacggggggggtggtggttacccccagggtgaccctttttttgccagcttcttagcgccgggggttttggttttctccccttcttttctggccaagttcgcgggttttccccgcaaagctttaaattgggggctcctttttggggccccattta

SEQ ID NO: 686 - DNA, 305 bp, Zea mays
  Clone ID: MRT4577_100626C.1
agctcgcgaatctggtgttagtcctacttagatgtttcttttgtatctttaaattggtagatgtgatgtaattttacttttgttatgtaattggacaatgaactgtatgaacttataaactccatctagagctggctgtactctttttcccttctgaccaaagggttttttaatgaggcggtcattgcacagctctagtaatgttaagtttctttttggtcaaattcgggtgtatctctaattgtggactgtaatgtgtaattcatatcatttgttatcaatttcgggcctatctataattctgg

SEQ ID NO: 687 - DNA, 367 bp, Zea mays
  Clone ID: MRT4577_100627C.1
ggaggaactgaaggccataggactatctagccgtgatgattctccacggaatgatgtgatggttccagtagcacactgcaaccgcagcccagttttactcctgatgggtggtgggatgggagctggcaagagcactgtacttaaagatatccttaaggaggaaaatgaatgttgttagaatgaattgagaaggaaaaaaacaacaatcctgaagacagagcacatcttatacaatactatcagtatctggatataggtacatgttgatcatcttggtatacatttcttgattcacagagcattttggtctggagcagcagcgaattcagtgatcgtggaggcagatgcattcaaggaaactgatgta

SEQ ID NO: 688 - DNA, 566 bp, Zea mays
  unsure (1)..(566): unsure at all n locations
  Clone ID: MRT4577_100628C.1
gctgagggcatggccctgaacggtttttccttgggggggaaaaaaaaaaacaaacccggttcgagcgggaaaattgtaacccatgccagcggggctgccctccggaaagctgttttgttcattgaaaatgctggagcgttgtcaatttgatgaaaaatggggccatatacaacccaccgccgatcaggggggtacatccaattttttcgttttgccggcccaaccaatcctgttggccattactgggccaataattcagtccgggccattccattttaaaaaaaaacccccgtacccaaccttgattagctgggcggggggacaattcctccggtggggggaacctttcctttccatggcacccgcccgccccgtttttttttgggatttggatttggggttggcccttgggggtacaagtcccatccgtcacgcagaaaatgggatgctcccacgggaacaagcatggggctttacctcacttgctttccgngaaaaattatcatgccagcgacggttcgattcccccaatttgacaattcatttcctccacgtagccgggctcc

SEQ ID NO: 689 - DNA, 167 bp, Zea mays
  Clone ID: MRT4577_100629C.1
acgggcgctgacccactggcaactcaacgggatactgttgtattgcgtcttaccaattcttatctatcatcgttgtagttggtggctgctgaacgtagttactatctcatcacttctcaacacaataaagcactacgcatcatctggcgaaactcgcgtgcctacta

SEQ ID NO: 690 - DNA, 383 bp, Zea mays
  Clone ID: MRT4577_10062C.1
cggacgcgtgggcgatccactcgttctaagcaaaccaagaggtgaaccaacagccggcaatttaatatttctcatgcacataaaaccgagagaactttgcctgaggcgtaccaataatgcaactactataagactaagactagtagatagatggagatgtctaatagtatgctgatcatcgtgctacgcatatacactccatcagccaccgcacgattattataactcaaaactgaatccaatagtgatgatcgactacttatatgtactaactactacgatgtataacaacgattgatcaataaccgcatgcattcatgacatcttgggtcattcatggtctatacgcgagcaaagatatacacgcttacatttatgtcaaa

SEQ ID NO: 691 - DNA, 199 bp, Zea mays
  Clone ID: MRT4577_100630C.1
tttgtatatcacgctgatctgccttcagcctgcggggttttttgaaaacgcgctgttgtacgacaacagcacctaccgcaacccatgggatgcaggctagcaagcacaagcaccaaccattatgttgaagagtatcatagctaataacctttacggcctaattggagtcatcggtcacgatgactgggaatcccttgtg

SEQ ID NO: 692 - DNA, 243 bp, Zea mays
  unsure (1)..(243): unsure at all n locations
  Clone ID: MRT4577_100631C.1
ccgtngngngccgttgggttgagncaaggggnnatggnaacctccacctcagttcccgtcctcctgctcctcgacgacgncgncggcctcctcctggtncccggntcgntggngtggnagagnngnaaatgtgnnnngggngngnncggnagtggatcgncgatgtggccttcacccgggttcggntccggtggnggtcacagaangccggccatgtaccnccctggtaagcngnccaagtgc

SEQ ID NO: 693 - DNA, 583 bp, Zea mays
  Clone ID: MRT4577_100632C.1
cctagtcctccaccccgcgctcaggtgacaccggggctttgcgaagaccagattgcactgcacaacatcctgaatactgcatgcacttgctcaccctcctacgatatgaaccctgccagcatctttgaagtgcagacgctcttcccctgcacgaacctgtatggcctgctcggtgctggccacaacctgactaataatattgttgccctcaccgttgacaacttacctcgcaaagctgatgcaaacacttggcttcaacgctggcatggccaactacattaccatgctcgtgtattgatcaccagcgtcaatcagggctggcacgcaaattgacaacgtcccatacattcatggggagggctggactctgagaagcacattgacttttaactgtcaagcccatctcgccggaggccccacaagaagggctgaacagaaagaatcagaagaaggcaagcggtggcggtgatgctggcgatgaggatgacgagcgaggatggacaagtagcgctacccaatataataatattatctacttttcttgaacttgttcgaaggatgagtctctaccttgtgtgatctg

SEQ ID NO: 694 - DNA, 447 bp, Zea mays
  Clone ID: MRT4577_100633C.1
taaacaccttgttaagctgattggatattgtattgaggatgatcaaaggttacttgtataggaattcatggcacggggaagtcttgaaaatcatcttttcagaagatgaagattgctctaggtgccgcgaaaggactagccttcctccatggaggtcccaaacctgttatttacagggattttaagacatcgaatgttcttcttgatgtggagtacaacgcaaaactatctgatttcggtttagcaaaagctggtcctcagggtgataaaactcatgtatctactcgggttgttggcacctatggttatgctgcaccagagtatgtaatgacagcttcggagttgtgctactcgagatgttgactgggagaagatcaatggacaagaagcggcctacgggggagcagaacctggttgcatgggcaaggccttacctaaatgatcggc

SEQ ID NO: 695 - DNA, 2349 bp, Zea mays
  Clone ID: MRT4577_100634C.1
cagatcactttcatatgttttttagatgcacttttttttggagactaagcccacggccgggagaatagtgctctgcagtgtcgctgaacgggcggtggagtgccagtgctcgcgcagtcgcgctgaacgggcggcccaccgccactgagtctgagactcggcaactccactcccgcctcgcccccgcttgcttctccgacttgtgcacccctaccgcgcgcgccacctttcgctttcgctttcccttttgcgccccgcatcgcacttatgcaacaatggagatgaccagcgtcttggtttatcaagtggggcgagaaaagggaagcaagctgggagagaagaatcacaccgggccgtgccgatgggtgtttacgagtagcagttgtatctcgttgacctcaccgcctgcagggcaccaaggaggagatgacttccccgaagcgggcagcagggcgggaagggtgcggatgcttggccgccgtcgcgcggggcctccgcggggcgtgcttccggccggcggtgacggcggacggtgacggcggcggctcggccaagggcagccacgttcacgacgcagcagagacaagatatctgaatgctagcaatcgggagcttggtgatcattttcagacaaaacgcgatggtgaaaatggtgttgatgcatcaattgaaaagagaacacccaagctacttcagtttacctttcaagagttgaaatctgccacgcttaacttcaggccagacagtattcttggggagggtgggttcggttatgtattcaaggggtggattgagccaaacagcactgctcctgcaaaacctggcacaggggttactgtggcagtcaaaagtttggagccagatgcgcttcaaggtcatagagaatggaagtgacatgctgatatttgaactatttaggctgctaaacaccttgttaagctgattggatattgtattgaggatgatcaaaggttacttgtatatgaattcatggcacggggaagtcttgaaaatcatcttttcagaagggctcttcccctaccttggtcctacaggatgaagattgctctaggtgccgcgaaaggactagccttcctccatggaggtcccaaacctgttatttacagggattttaagacatcgaatgttcttcttgatgtggagtacaacgcaaaactatctgatttcggtttagcaaaagctggtcctcagggtgataaaactcatgtatctactcgggttgttggcacctatggttatgctgcaccagagtatgtaatgacagggcacttgacatctaagagtgatgtttatagcttcggagttgtgctactcgagatgttgactgggagaagatcaatggacaagaagcggcctacgggggagcagaacctggttgcatgggcaaggccttacctaaatgatcggcgaaggctctatcagcttgtagatcctcgcttggggctgaactactctgtcaaaggggtgcaaaaggtcgctcagatctgccactactgccttacccgtgacagtaagtctcgcccatcgatggatgaagttgtcaagcaactcacaccattacaagatctaaacgacatggcatctgcttcgccaaggcctcgctcaactcagcgcggaaaggtgcatcgatgacaacccggttctgttgtaagaagagcagtgtggtcctggttgcttgatgcttgtttggtttaattgtatagcaaaattaggtgttgcctgccgatacctggagatgtgacaccgcctgatgtgtcgctcaggtcagtcacactgctctgctgtttggctggttgccaaagcaagataacgatgtatctggttgcatcatgtaataattattataattaccatttaacttctggcgggggtacatcatgtaatggttggtgtacacccaggttagtaatcttaatagtgtttggctgacaggctgagggtcagtagacggtgtgcagttcgcttttttcaggggaaaggtacaggtgttaaattgtgattgtcccaggaagttaatccctctcaactaaaactcccatcaaatttggggcgtagtgtgtcgattcagttgtaactattatatgtcattttgggtaagcaaactgtatctactaatttctcagacttatgccttttgagctagaaacttgtgtaagaattttttgcactcagtgacatgctggatagtgcgagtagcagattacaatagtgacggatgaacattgtattttactttacatgatggatttttttgatgtgtaaggcttttaaggcatgtaaaaattcttaacttttaaaagatgctaacacgaatataaaattgcaatc

SEQ ID NO: 696 - DNA, 1030 bp, Zea mays
  unsure (1)..(1030): unsure at all n locations
  Clone ID: MRT4577_100635C.1
acacctaagctacttcagtttacttttcaagagttgaaatctgccacgcttaacttcaggccaggcaatattcttggggagggtgggttcggttatgtattcaatgggtggattgagccaaacagcactgctcctgcaaaacctggcacaggggttactgtggcagtaaaaagtttgaagccagatgcgcttcaaggtcatagagaatgggtgaagttgactttctgggacagttgcatcataaacaccttgttaagttgattggatattgtattgaggatgatcaaaggttacttgtatatgaattcatggcacggggaagtcttgaaaatcatcttttcagaagggctcttcccctcccttggtccaacaggatgaagattgttctaggtgccngcgaaggagtagccttcctccatggaggtcccaaacctgttatttacagggattttaagacatcgaatgttcttcttgatgtggagtacaacgcaaaactatccgatttcagtttagcaaaagctggtcctcagggtgataaaactcatgtatatactcgggttgttggcacctatggttatgctgcaccagagtatgtaatgacagatgcgttttttttgggaccaagccctatgggcaacaatggagatgaccagcgtcttggtttatcaagaggaagttaatccctctcaactgaaactcccatcaaatttggggcatagtgtgtcgattcagttgtaactattatatgtcattttgggttagcaaactgtatctactaatttctcagccttaagccttttgagctagaaacttgtgtaaggatttgttgcactaagtgacatgctgatatttgaactatttaggctgccaaatctgaattttttaactatcaagtactgaggatgacgagtaatnnnnnagattcattctttgacatctgcaatgtgtcatttcttcgccaatacttatctacgcctgcttccagaattgattgttttgatcgtggcaagtctcggccatggataggaaa

SEQ ID NO: 697 - DNA, 301 bp, Zea mays
  Clone ID: MRT4577_100636C.1
attgggttcttttttgggttatattttaaaaaaagtttttagccatttaacattgttcccgaagagacatgactaccgccaatgcacggacggccacctacagaaatagcacagcgccctggggggggggggcgaaccccgaactccggaccccggcgccggggcaacaacccccataataatgggaagcggatccacgggggaatggacccagggattaaagcaaaaacacagagagaagaatgcccgcattaagcccccccccaaggtcgggggggaagccccggtgacaacaggcggg

SEQ ID NO: 698 - DNA, 311 bp, Zea mays
  Clone ID: MRT4577_100637C.1
cggggggccccaaatttttttatgggggattttacccgggcaagggaagatttttaggagggctttttccctggaaaaggggccaaggggaaaaaaacaacaacggccaaaatttttttttttttaaaaaaacttatggtttgggggccaaccgaattaaaaaccccccaggggtccgggtttaatttttttttttcccgccttttggggtttttgaactggccccgggattgggggctggctcccggttttttgtcctcccggggaggttgggaaccaactttggttattgggacaaaaaggggtttttt

SEQ ID NO: 699 - DNA, 630 bp, Zea mays
  Clone ID: MRT4577_100638C.1
ggaagtgatgaatatgctcttccaggaggcactgtaaaccggaatgtcatcaaaaaacacaagagcacatttccgaagcaggggagctagggtgtggttcatagccttctggaatgtaccaggagctccaatgagaccaaaagccataactcgaaactcagtggcccgaatgagtttgaaaggcggttttgtaagactcaccctctttcaataaaatctggtggaaacccgccctaaggtccaatatagaaaaccaggatgcaccaaacagctcatcgagtagctcatcaataattgggacagggtacttggacttgatagtaagagcattaagatgcctgtaatcgacgcaaaaacgccaagaagaatccttctttttgacccgcagcactggagaggaaaacgagctgtgactatgttgaattaatccagtttgcaacatttcagccacttgagactcgatctcatccttcatcgcaggagaaaaccgatagggtcgaatattaactggtcgagctgcttcaataagaggaatagtgtgatcacaggacctgctaggtggcaaagtagatggtgattgaaataagtcttgggatacacgaagtaagtgcagcacatgttcgggcaact

SEQ ID NO: 700 - DNA, 416 bp, Zea mays
  Clone ID: MRT4577_100639C.1
aaatgcattctatggctatggtgctagggaaggtgcaccagccgtggtgcacgtcaacttctaccgcaactatggtaagacgttcaagaaaccaaggcgttcttattagaaggagcgttttgatgcttaactgaagctgtgcggtgagtatgggctgaggtgctagcgttagctttgtagggttcagtatgcactgagcaggatccgtaatgctgcaaggcactttgctcacccttgacgagaagaacccccgtagtatcttttagggtgaggcgctttttttcctgtatgaactgatattggcttgttgctgagggtcagaacatgcttgattatgtttttgtccttattgatgaagactttcttgttggtcggtttaacacttttctttaaggttggtattgtctatttcattt

SEQ ID NO: 701 - DNA, 1123 bp, Zea mays
  Clone ID: MRT4577_10063C.1
attgggtacctcgaggccggccgggaatctccctacgcagccggccagccgccgcatctcctctcttctctctcgcgcgcccaggccacctgccccacgcccgctcagaccgatgccgagcagccctgccgaagactgagccgcgcgcgcccctgcctgaccgcacccagtacgacgcgacccgaagaccttaccgcgaccgcgcagcagcccaggagccgagcaaggaccccgccatcccgacgccccgtcgagcagcgcaccgaccgcgacccgagtccccaagccggaaacggctgccgtttcttctcccctttttccctccccacgtcctctctccttcaatggaggtaacagccgccattgatgtccattgatgaagaccggccaccgtttcttcttcccccggctcgctccctcctcgcccctataaatcatcgttcctgcgccacgtcgagcccatcccagccttccctctcccacgctactgccaatgtctgccacctgcgtcgcatgccagttcctcgtcggccgccggagcttcgtcgaaacgtgcccgtggagttcgcagcaccacacgctcgtcgccaaggcctgatcgttccatctgttgtctgcccctcaacgccagcaatcgtgtttgattacccgtcgtcgtcgtgacgagatgctatgctggtcggtggccacaccgttgtcgcgccgaaatccctgtgcgtgtgctgttctgcgcccactaccgtctcaccagctcaccgtcatcaaagcatcgtcacgtctcagtcgatcccgtgttctgctctcttcgtgtgtcatccgaagtgattgatctaatagttgagaatcatgtgctattccgtggaagaacctcaagttttcaataagcaagaagttgcagatgaagatatgatgctgaactccatggatgctagtctagtgatacccccggtcatcttcctgtggatggatgtccatgttcgctgtactttgatgaataaaggttaagacattatgtctgttcgaagtgtaatatgttaatataatcgttatttacgctcttatgcattgttattttgatatattacacttgtgacgtcagaaaaaaaaaaaaaaaaaagcggcc

SEQ ID NO: 702 - DNA, 218 bp, Zea mays
  unsure (1)..(218): unsure at all n locations
  Clone ID: MRT4577_100640C.1
agctaccagnatgtccctcccgnggaaccctaccctcctccaggacatcctcgatctcaggcgcacccttacccaccgccaccagatgtgtacccgcctccccctcggggccatggacatccaccaccaccccatggtgtgtacgggggggcgncgcanggtccttacccctcaccacagnagnctncaggggggtaccagggctacttnaacgacca

SEQ ID NO: 703 - DNA, 264 bp, Zea mays
  Clone ID: MRT4577_100641C.1
aaccaacttacctattcctactttactttcacgggcccaaacgaaaacaggcgggtctcgcaactttttgattcaagacaaccccaaccatatataatacaataatactaaaacttacccctcatcttctcaaataacatcctacaaaatcagcatcagccatagaatcaaataccaggccccacagactcacctagcatgattttccacccaaactcctacaaaacttcacatgactcgtgcataacaaaaaaaccaattcaa

SEQ ID NO: 704 - DNA, 343 bp, Zea mays
  Clone ID: MRT4577_100642C.1
aacaaaaaaaactacaagaggaggtggcaaaaaaaacaaaaaaaggcaaccagatgcagaagatacggaaacatacaacggggagctgggggaactgagcggtggtgcccgcgcggccaagttatactgtccggtgccgggatgtctaccctattccagagggtttatctgcgttcgtgacgtgtttgctgttggccaacagtgtttttgtttgcagggtcgttctatgtcagatgtcagtgctgtaatcattctctaactcaacagaaccctgcatgaaaaatgttactctcccgattgatgaattttgacacccgggtcaggcttttttctcagtaaatca

SEQ ID NO: 705 - DNA, 415 bp, Zea mays
  Clone ID: MRT4577_100643C.1
cattgggtacctcgaggccggccgggatcacttcaaaatgactccaaaccgtatctgcactacacactacacttgttaccacccctcactagtccctcccatctgcccacaaccatggctcgcatcctcataaccggctcctcagacggcctcggcctagccgccgcccaacgcctaatctcccaaggccacaccgtcgtcctacacgcgcgcaacccccagcgcgccgccgacgccaccaccgcctgcccgggcgccgaaacagtcgtaacaggcgacctatccagcctctcggaaaccaaggcccttgcagctcaagtcaacaaactaggcccctttgacgccgtaatccagaacgcaggtctctaccgcggccctgtacgtaagaccagcgacggcatccccgcgctcgcgg

SEQ ID NO: 706 - DNA, 603 bp, Zea mays
  Clone ID: MRT4577_100644C.1
gaggcttgccatgtgcctgataggagcctgcctcccggcttcctgggcggcgccgctgtcgccatgccggaaggggcccgctgtctcctcatgcgtggccgaatccacaacacgcgccgcgtgctgcagaaacctccgactcccccgccgaggccgacgaccgcctgctcgggatcaagaacgtggctggcatcccccagggcgcggccgacgccgaccacgtgggcgccataggccgcgccagtgcaaaaggctccgcgtcggcacggcactacggatgtgcggaacgagcttctcatcaacgcttcccgctccgggcgccgacatgctcatgtgggcgctcggtgtcatgtgtcatccatgaggccacggccgcgtactgtgtggacatgtgactcccggcggctatctcgagcgggcgactgtctggtgcaaaaccaactcgctgtgcgcgtccatgtcggcgcgctggtgacagacctgcttcttacccatctcgacgctgctcctgaagcgaatcggcctggggccactgctgttgcggagaggctgtgggatgtgcatcttcctcttcacgctgtgcacgtccctgcacgtgatgga

SEQ ID NO: 707 - DNA, 375 bp, Zea mays
  Clone ID: MRT4577_100645C.1
cgacataccttgaaccaggggcagcaggagaagcaccaacaccaccacctgtgtccaccacatggaggcccaggagcacctcgccgccggcggctacggagagtccgccgagcacacggcggccacggtgacggaggcggtgtgcacggtcgagaaccagtacgacgagtccgaggaaggagagaaggaccacaaccacaaccagcacctcggcgaggccggcgccagcgcccccggagccttcgcactctacgagaagcacgcccgcgtgcaaggaccccggagcacgcgtcaccgccacacgatcgagccaggaggccgcggcgagccggcggcacgtcggactgcagcggtcttggctcttgcaccgagcac

SEQ ID NO: 708 - DNA, 310 bp, Zea mays
  Clone ID: MRT4577_100646C.1
ggtgtacaacgtgcgtagcgcggcacacctggggtacttcctggagcactgaagctgaagcaggacacggggggcgccggtcttgatcataaggtccatgcgtcattagccacacgaggacaatgacatgcagacgtgcggtggcgctatgaccacgttcacagacactacgtgaacctgcggcgccgagactactgtgctgccttgattataccggaagggaagtgcgtgaaccttacttacagctactactacaacggcgaccacttgcaagtgatgagctgtaagaccaccagcggcgagaaccatg

SEQ ID NO: 709 - DNA, 1302 bp, Zea mays
  Clone ID: MRT4577_100647C.1
atgttgtcttcttcctcgtctgctgcaaacacgtcgacggtcgaagcgtcgtccgaggataactcgagcaatgtggcggcggcggagctacatcggggtgatacggtggagttcggcgtttcacagatttcctcggtccgcgtgcaggatatgcagcagttgggatattttggcaacggagttgggcgtgtcccgggggcggaggaggttcccgagcccgagggcgagttggtcgttttcgaggcttttttcaccgctagccttcgcctgcctgcacatcgctttatggcggaggtcctgcggagatttgaggtccaggtccaccagctgacacctaacgccgtggtggccctggcgaagaccggaaagacttcgatggaagtcgtggagttggttccttgtgcccgtaataagtggggcaactggtgggatttctggttctatgtttctgagggcgaagtcgaaggccacccagggctccccgtggccattatgtgctcccattattatgtggcgtacccgcaatttgaggtggcggaggatgatgagaatgagggagcccttcggagcgctgtccgtatgagtagtgggcgcgatttagtcgatgaattcctcgggtatggggtgtggcccttggcgcatggatgggcgttgggcgaagtatgccctcgcgagatgccctccttgggtgggcagagagtgcgaagtccggccttcgcgttggatctgcgaggccgggatcccgccgtggtcgtgcgtgaagcggaagacagggctgtgcgtattgtggggcgttatgtgcctaggacggaggccctgtggagttgggatattcgcggatccaatgttcgcttgaacagggtcttcgagctaaatcgcttgtcgtacagcggctatcccggagatgacgctgtcgaccgccgcgggaagaggccagtggccgtgactgaagaggacccttcgcaggaggccgccccagccactaagaagagaaaactagcgatgaacaaggaccgtcaagacgctgcgcagaagcaccgggcggtcgtcaggatcgcggatcctagtgtcgaggattattttgttgggtcgggtgaggggcaattggttgttgtcctgccttcggtggcgaccacggcgccaacggcggtggttggggtgaagggtaccgcgcgggacccgtcggccgctttttgcgcgagcggcgagattatgttggccgctgccgccagggatgtggcgggctccatgtcccagcgactgaaggaaacgtcgcagcagctgtcgcagcagctgaagcaa

SEQ ID NO: 710 - DNA, 415 bp, Zea mays
  Clone ID: MRT4577_100648C.1
acttgcagccgagtcaacaaccgatagctcagcacgccaaaccaagttcgtatgcaggactgcatgccggcatgattcacactcatgggttgcccaatgaccatttattcggggacaaaaaaaagagggactgggaccttattctagggaaaaaaccgagttggttcatgttaatctatgtgtcgcatcaataaaaaaaaagcgtgtgtacggatttggcatgtttaaacaagccaattctagacgctcatccttaacaatcttgccagagtcaacagctatccggaattgaagggaatgttgatgccttggactcagcggacactcgatcagagttagccaatgcctagtgaaactcagcttctgttcggtatatctcgatttagatatgtctatgctgccgcaatcatcgacc

SEQ ID NO: 711 - DNA, 163 bp, Zea mays
  Clone ID: MRT4577_100649C.1
gactcatacgatctgataattggctaaatcgctccagtgctcccccaaattcttctgatgcgtgcacgtctgatgtacacgtatgtgcaacatttacgcccgcttactactttgctttgtaacttctgttctgtggtgttctgtgtgtggatccccattcctt

SEQ ID NO: 712 - DNA, 368 bp, Zea mays
  Clone ID: MRT4577_10064C.1
gatatgcatatttattgggccaaatgaactaaaaagaaatcagaaaaaaaagccaccaaaaatggattgaatctaaaacctttagccagtgatgcaatctttggaaaggcagcaagaacccgaacgaaaggatttcatatactagaatgcccgaagaatcacaattatataaggttagcggtgcatgctgccaacttaattagcttgctgatgaaagaccatagcccgctgacccggatgaatccaacggaatttaaatgctattccaatcgcacgtaggaagtgtagaccgcatcgggtgtccagctctccaggatgacttggttggcgatgaccttgtcgccggactcgctggtgaggcggatgga

SEQ ID NO: 713 - DNA, 421 bp, Zea mays
  Clone ID: MRT4577_100650C.1
caactttctgagagtatgctgtgacgatagtggctaggctgatgctgctgccgaggctgctgcatatgttggcaccacaacatctcggggtggccttggttatggggagactgatgctttggaggcattggtggttgaggcagccaagaggattgatcgacatttgaggaatctgtttgaatgccttcgccaatcctgattttatttgactcttggctcacgtgtcactgtgccagcgcgatcaatattagtagttcctcttcatctcgtgcaaatggatgcttctgtttggggtgatgatgctgaccattataatcctcatcggttccttaaaagggacattgatcttggagaaatattaggagcacctaaaggatcaactacgataaatattttcagtgggtgtaccaagggcgaatca

SEQ ID NO: 714 - DNA, 382 bp, Zea mays
  Clone ID: MRT4577_100651C.1
ggggaccccgggggccattttcttgtttataaaaaaaagttttagaaggggcccttttttttttttttaaaaaaaggggtgttttgggggttttgaccaaatggaaatcccaaattttttgaggttgaaaatagggaacaattttttttagggaaaccagacccaaattggttaaattggttttaattcggggtttgggttctaggaaatttttccggtcgtttttggtttaaccctggaaactccagccgggggggggaggggcccttttttttagaacgcccccaggttaccggttttgggcaactggggggccattttttcccacgttttgttttttccaattagggaagccttgggcttccccccttccccagaaaag

SEQ ID NO: 715 - DNA, 379 bp, Zea mays
  Clone ID: MRT4577_100652C.1
agcatattttgcagtctgataagacccctgtgctgtccagccaacttttccaccgtagttgtggatgcccgcccttcgccgtctaaatatccccaactgcttcgtgctattgatttctagtggtcgacctcgctcggccgcctcgagcggcgattggttcatcagccgtgacctctcctctaagctccttcttcactgccgaataccagctgcctgctggtcgaccatcgctgcgcggcgggtcagtgaagctcctactatccgaatggactgacaccgatctgccctctcgtgggttggtggatggagatcaatcagatcactcagacgcttctagatgattgagtggatgtatgtagcttggaccggcctgactgcc

SEQ ID NO: 716 - DNA, 785 bp, Zea mays
  unsure (1)..(785): unsure at all n locations
  Clone ID: MRT4577_100653C.1
aaaaaaattcaaatatgtgcngccgaaacgagactatcagcagcttcggcggcggcggagatggcgattcggtactggccgatggccggagcagccgttgggttccgcctcgtcctggttctcttcggcggggatctccaccttgcctctcgccctgaggtctccaccccactcacctcccttcgccgcctggcggaaggctactggctgaagcaagcgtccgtgtcaccgtactccggttctatgtatcacggttccccattgctcctgtctgttcttggtccattaactagtagcaggcctgacggacatcatgctcatatttactgcagtttgatttttgtggctgtagattttctagcagccatgctcatccgagcgactgggcatgaactccaaatggcacggaacagaagtttgaagtcacttgacctcacaaaggcagtaaaggatacagttaatgtaagcgctggagatgttgcctctctcatatatttgtggaacccttgggcaatagtcacttgtgtgggatcatgtacatcaccaattgagaatctaatggctgtaataatgatctacggatcctgttcacgtcattctgtctctgggttattttctagatgctcctcctccanaagtatttcttataaaagggtcaattgccagaaaaagtgatgtgtcagacaatgatanaacaagcagacagagagttgttcagcagttttcatggaaaccagtacttcactttatattttggctgttcatctggtcgtgccatgtgttgt

SEQ ID NO: 717 - DNA, 599 bp, Zea mays
  unsure (1)..(599): unsure at all n locations
  Clone ID: MRT4577_100654C.1
naaaaaaaaaaaaaaaaaaaaaaaaaaaaaaaaaaaaaaaaaaaaaaaaaaaaaaaaaaaaaaaaaaaaaaaaaaaaaaaaaaaaaaaaaaaaaaaaaaaaaaaaaaaaaaaaaaaaaaaaaaaaaaaaaaaaaaagggggggccgtttttaggggatccaaattttacttcccgcgtgcttgcaaaggttttagttttttttttggggccccttaatttaatttaatgggccgggttttaaaaacgggggaatgggaaaaacctgggggttcccaaattaaatggcttggaaaaaattccccttttcccaggttgggttattaccaaaaaggcccccccggttcccctttccaaaaatttgccccccctaatgggaaatgggaaccccccttttaggggccctttaacccggggggggggggggtttccccccagggggcccgttacttttgcaagccccttagcccccgttcttttggtttttttcctttcttttttccccagtttcgcggtttttccccgtaaatttttaaatggggggctccttttggggtcccatttaagggtttaagggcccttggccccaaaaaaatttttt

SEQ ID NO: 718 - DNA, 263 bp, Zea mays
  Clone ID: MRT4577_100655C.1
gcgggcattgctcctgtctgttcttggtccattaactagtagcaggcctgacggacatcatgctcatatttactgcagattttctagcagccatgctcatccgagcgactgggcatgaactcgaaatggcacggaacagaagtttgaagtcacttgacctcacaaaggcagtaaaggatacagttaatgtaagcgctggagatgttgcttctctcatatatttgtggaacccttgggcaatagtcacttgtgtgggatcatgt

SEQ ID NO: 719 - DNA, 443 bp, Zea mays
  Clone ID: MRT4577_100656C.1
aaaaaaaaaaacattttggccacccaagcaggaccagactacgggggaaaaaaaaacccccccaacaggtttttttttattggggagggaaacggctccggaacaaacaaagggggcacaggcccgtttagccagatggccaaaacaccccacccacccatccgggattattattcaaaaaaggctatacaagcagggcctgcctgctgggggaaaaaacaccagcccccggaaagcaaaagaaagggcccgtcccaggggccccagggggggttagcccagtagagcgggactactaacggggggccgggagccagcccagccctcacaagggaccccgggtttaattgggaatctggagggggggggggccgggaaaacttccatcctttttggccaccagccggggcctcctgggttttttggcaacaagctcggaaagc

SEQ ID NO: 720 - DNA, 1854 bp, Zea mays
  Clone ID: MRT4577_100657C.1
acaccagtccaaatatgtgccgtccgagagcaggggtaccccggagactccggccccagccgagacgagactagcagcagccgcttgctcagatcggcagcttcggcggcggcggagatggcgattcggtactggccgatggccggagcagccgttgggttccgcctcgtcctggttctcttcggcggggatctccaccttgcctctcgccctgaggtctccacccccctcacctcccttcgccgcctggcggaaggctactggctgaagcaagcgtccgtgtcaccgtactccggttctatgtatcacggttccccattgctcctgtctgttcttggtccattaactagtagcaggcctgacggacatcatgctcatatttactgcagtttgatttttgtggctgtagattttctagcagccatgctcatccgagcgactgggcatgaactcgaaatggcacggaacagaagtttgaagtcacttgacctcacaaaggcagtaaaggatacagttaatgtaagcgctggagatgttgcttctctcatatatttgtggaacccttgggcaatagtcacttgtgtgggatcatgtacatcaccaatcgagaatctaatggttgtaataatgatctacggatcctgttcacgtctggctcctcttgctgcttttggatatgttatggccacacacctctctctttatcctgcaattctcatagtaccggtcattctgttgctgggttatggtctagatgctcctcctccaaaagtatttgttataaaagggtcaattgccagaaaaagtgatgtgtcagacaatgataaaacaagcagacagagagttgttcagcagttttcatggaaaccagtacttcactttatattttggctgttcatctggtcgtgccatgtgttgttattgagcagcgtgattttgaagaaagttggtggcctccacgagatgattgaagcgtcctatggttttatacttacagtgaaagacctatcaccaaatattggtgttttgtggtacttcttcgctgaagttttcgacttctttagaaatttctttcttatggtattcaatatgaacatcatttttatggtcttaccattggccatccgattgaaacatcgtccgtgctttcttgcatttgtttacacggcaattgtggcaatattgaaatcttatccatcggctggagattcagccctgtatcttggtcttctgggcttatttgtcaacgaattagcagaaatgcagttcacattcttcttgttttttggatatattggagtctccctacttagccctgtcatgcataatctgtggatctggaggggcactggtaatgcaaatttctacttcgccactggtttggcttatacttgccttcagactgtgttgctggtagagagtgtaagttcaatgataaagcacgacagaaagttaaggctacttgttacaagctaatttggtcctcataatcagaagctcaagtggtggacagctccgatgcttgcaattccctacatggtgctcttgattcttgaacacaaacagctcctcatcttggagttcgtagatgtaggtcatattcgatgtagcatgttgtactgtagaccccacacttgtacaatactaggaccgcaactctttcaacaaagacaaggaacacggtagggctcgcccttggtgactagtacgtagttgtgttcgctaccgagaattgttgtggatcctggctgtgatgttcagtgatccagcttggttgaactgccctcacgtacatttaattccgtcagtctgatggatcaacaaggaaaccaacatttgaacgtttagccaagc

SEQ ID NO: 721 - DNA, 371 bp, Zea mays
  Clone ID: MRT4577_100658C.1
cttatttgttgagtgtcaaactttatatctatatatcaaattgtttactcaatttactataaaattatatatacattagatagaattctacatgaaaattttgttacggcacaccctatgtaaaaatcctaggtccgccactgccggttactaaggtggaactgtataaatggatttactatctttttctaacgacttaagcttttggttctcaaccagtaacatggaccactccactcattggtaacatgaaccgacgataatgatggactatcaccaacggttattgttaccaaccattggtgataattgcccccattttcatcaatggttcgtaacatgaaccggcggtgattaacataaccaatgac

SEQ ID NO: 722 - DNA, 352 bp, Zea mays
  Clone ID: MRT4577_100659C.1
tttttttttttttttttttttttttttttttttttttttttttttttttttttttttttttttttttttttttcccaaaaaaaccaggcattttcccccggagaaggactcgcacgggacgggacaaaaagagcacagggggggaatgtcaagggcgcggggggggggctataaacacgacacactataggggggcaaattaaaaaaaacaacaacaataaaaaagctaacccaggggaaaccgatcgattaataatggaaaaacagggcaataaaaaaaaaacgctgggggggaaaaacctcctttttgtttgccaaacacaggggacaaacaacttttatgtccttgaac

SEQ ID NO: 723 - DNA, 118 bp, Zea mays
  unsure (1)..(118): unsure at all n locations
  Clone ID: MRT4577_10065C.1
cgnagagaggaggacgcaaatngagagcggacgtnttgacgagtcagagatgnangnagancgcgatgacaaaccgnccatancgagtggtnccaagacaactggngaganngctacc

SEQ ID NO: 724 - DNA, 129 bp, Zea mays
  Clone ID: MRT4577_100660C.1
gtctgctcagtttaaaatccatcgaagtcttccaggctttatggacactattcgaagggcaagggtgcaccaaacttggcaccattatatgcactatatataaatactcaaaattctattcatcttcat

SEQ ID NO: 725 - DNA, 559 bp, Zea mays
  Clone ID: MRT4577_100661C.1
ttttttttttttttttaacacttgatgagatagttacttgtctcgccgaattgttgcgcgtttacatgattgaacctgccttgaaaaacaaacccccccccaaaaaaaaggacaaaaaaaagctctgtcaaacgttgcctgctccttcgccgtcccttcgaacatgggggaatgataacttgatggtttcaaatttcattcggtgtttctggcgttaacttgaagtgcaaaccaagaccagggcaacaccacgatttttgatttgtgtttttttccccataatattttcccaaagaagacgttgacttgaattgccttgtggcgccatacaacgaagccctagtgcttggctggtcagaggtgagcaaagtatgttcgcggcgaaattgaacaaggagtgggagtgtgatcttggaagaggaaattggaatggaaatcgactagagagaggcgggggcggggggattcaaggcagttgtcgttcacttagagcggcggtcaacgaatttcttgcggggtttttttgaggggagggggagtgagtgattgggcctgagga

SEQ ID NO: 726 - DNA, 608 bp, Zea mays
  Clone ID: MRT4577_100662C.1
aactctgattaaaaactgattgattgcaagttttatagacattgttttacccagtcgaatatacactttttagcaaagtaatagtataggggcatataaggaccataaatttcatttagtagttgaccttcatgaacatttgaaaaccttaaaattctacaattacaagaaaatagtttacaatgagatcgttacaacacctatgatttcataacccggagtactagtattacaacactttccatttaaacttttacgtacgttttaatagatttagatgatccactttactcgatctccctaagtttcattgggaacaaaacagaccccaaaagagggacttggtccctcaatcatcaacttatttctttgaccttgacatcactctttttgctgatcacaatccccatcaatctgcaaggttccgggtcctcgatcatttgcaccacgctcctcatcgtcggtcttagtccaggaagtcttgcggggcaaatgatcgcaatcctcagcatcttgaccgcgtcttctctatacatttctcctatcttcttgtccacaatctccatcacactctctttgctcttcagattgttgctcacccaattcac

SEQ ID NO: 727 - DNA, 268 bp, Zea mays
  Clone ID: MRT4577_100663C.1
atatcatcggagatggtcgcaaaaggaatcgaatcaaaatgattccaattggattgtattaaacatttataagctttaaaaagcttgcaaactcaagggaccttcctggacaaagctgcttaagaaaggttatacttgtataaacaggcctagcccggcggcatttaccggcattcaccacagtccaaaattataccctgttataccccggggaacaaaaccctgggaaaccctgtgcgaaagagttattaagtgacaaccactgggg

SEQ ID NO: 728 - DNA, 317 bp, Zea mays
  Clone ID: MRT4577_100664C.1
gggattcattgtttttttggggaaaataatcattattatttccttccaaaatgggtgggaacaaaccatggaaaaggaaaaaagccgattccaatttccctggtgaagacaggaccaatcattttttaaaaccttatcggcggcgacgaacaacatccaagcgcacaccttggtggcttaaacttacaagggaggtcttttaaacaccggacgatatttggaaaacgccgaaatgatccttttacccatgtgaaggaaaaggctgcggaccatcttgatccagttgggaaaaataaagtggatctagttcacccaca

SEQ ID NO: 729 - DNA, 245 bp, Zea mays
  Clone ID: MRT4577_100665C.1
cccacgcgtccgtccactcgtcctcccacgcgtccggcataatttacagctccaatgctatgcgacatgcaaaaggtattaattatgaacacaacatccctgattaatacctcttgcataatttacagctccaatgctatgcgacatgcaaaaatagagagattaatcagggatgttgcgttcataattttgctaacctggtttagcagtatgttggtggacaaaaataatgaaccatggaacaa

SEQ ID NO: 730 - DNA, 580 bp, Zea mays
  unsure (1)..(580): unsure at all n locations
  Clone ID: MRT4577_100666C.1
caagaacaccgcaaggggctgccattctccgcgccgggcgggcgggccacacatgcaagcgactgagtgcatcgcgctgacagagcgcccgcagacggggggggtaggcccgtcgactgccccagaagtcaacgacagatcgggccatgcgggggctatgcatgcatgcagaggcggccatgcggagggggagctggtaggtaggaagtaggatcgcaggggagcagcgtcgtcgtcagagccatgcatacggccggggcacgggacacatagcttatattataggagcctacgccatgaacgacgagcgtgcgatccgtggggctcggggtccagccacgtgacggggagccaccgacccaacccaaccgttctggcagcagggagggaggggcctctccgcctcttcggggtgcgcctcctgggtccggtcgggcgacgagggcccgcccgggtggcgggacggggccgggcagtctctctcgctgatcggggcgctcnaaatcaagggaagcatgggggacaggcttgcattcgcagctgcatgctctgctgagcagcagccgcagctagcagtgca

SEQ ID NO: 731 - DNA, 1046 bp, Zea mays
  Clone ID: MRT4577_100667C.1
cccacgcgtccgcccacgcgtccggtgattgttactgacatcatgtctggtcttgataaacgccttgctggtatggttgatgtggcagttgttaaccctccttatgtgccaactcctgtggaagaagtcggatgtagaggcattgcttcgtcctgggcaggcggtttgaatggccgccaagtgattgacaggatccttcctgctgtgcgtgagatgctatcagaaagggggtggctgtacatggtggccctcgaagataatgatccttcagacatatgccatctgatgagcgagatggggtatgcatcccgcgttatcttgaagaggtgtactgaggaggagagcctttatgttctcaagttctggcgagacccacacgctgttacaagtgtgtcgccgaaatcttcaggctctgaatcatggttttctcagttgcatttcaaatccctttggcacaagggctcgtagcagttcatgccctcatcattttggcagtttggcgtcttcatcagctccaaaacatagcaagagatcttctgcaaatctgagatggcagtatgtttagatgtgtttggataaaatggttactgttggtttctgaccgtctcaggcacagtgaaagaatcaagaatcagcctagcttgattggtttaaggcgcagagcaaacatgtccttagaccagaaagtactgaaccttattaatttggtagcttaaatcgttaccttatgttctcttggtgtgtgtggtgtgtcaatgtttttaaggttctcttggtgtgtgtgtgtgtgtcattgtttttaaggtgtcgccaaggcgtccatgcgcccaaaaatcataggcgccttgctcgcctaggcgtccagtcgataggccaacgtcttatctcgacttatgctttaagaaccatggtttgtgtatgctacgttgctactatggattctttgccttgctaggtttggaatatgtgttttctttatatatcattgcgtctaaatgcttatttcaagatgagaggaaagtaatatatgtgctgttttttgtgcc

SEQ ID NO: 732 - DNA, 464 bp, Zea mays
  Clone ID: MRT4577_100668C.1
agtagaccacactgatgcttcaccttagatataccattaacaagcgccacacctaatttatttacaaaacctacacatgttgttatgttcagtgcatcttagcggactctttacatactgatccacacatgtactaatgcttaaggtgactcagacaaaccacaacaaaaccacttgaacttggtgtatgctgttgacataaggtacaatcttgtacggggagggaaggggccgcttacttggtgctcaaccatccgatttcacacagatgccttacacgcaacagaacctgtcaatgggcactcaggatcgagtatgatggaccacggactccccgacgctcgatagcatctcctactgcttggatcggaccttaactagagctgataggacatgagcattactggcctcatgacccatgccaccctagtcatactgtacaagatcctccaagcctcggttgg

SEQ ID NO: 733 - DNA, 1814 bp, Zea mays
  Clone ID: MRT4577_100669C.1
atgacattctttcgaagttgaagagttcagttgagttagatcacaggcaagcagctgtttggaatatcctaggtttagttcttcttcggggtggtcagatacagagtgctatctcagttctatcttctctcacggctgttgctccagactacttggactcccttgcaaatcttggcgttgcatacattcaaagtggggatctagagctgtctgcaaagtgctttcaagaacttcttctaaaagatcaaaaccaccccgctgctctggtgaactatgcagttcttcttctgtgtagatatggatctttgtcggcaggggcagggggcaatgtcagcacaggtccttacgtgcatcagaaagaagccttagttgttgcaaaagagtgcttgcttgcagcagtgaaggctgatcctagagctgcatcagtttgggttaatcttgcaaatgcatattacatggatggtgagcataagaactcaaagaggtgcttggagcaggcagcaaaattggaacccaatcatatgcctgctcggtatgctattgcagttcaccgtatcagagatgctgtaaggtcacaatgttctgatgatcaacttctttgggctgcaaatgaaatggcaacagttctaaaagaaggagacccttccgcagttgacgccccaattgcatgggctggattggcaatggctcacagggcacaacatgaaattgcagccatctatgatactgaaaacatcaatcttaatgatgcagaagagcgagctcaatatacactaaaacaggcaatccaagaggacccagatgatgctgttcaatggcatcaacttggcctgtacaatatttgcatgacccggttcagcaggtctgtaaattttcttaaagcagccttagcccgttccccagattgcagttatgcttggtcaaatcttggtattgcgttgcaactatcagacgatccatcctctgaaactgtatataagcgggcactggtactatcatcaactcagcagctgcacgcaatcttctctaatcttggaattctttatcggcaacataggaactatgaatttgcaaggaagatgttattaaggtcgttggaactgtgtcctggatttgcaccagctagcaacaacctgggtcttgtatttgtcgctgagggccgttgggaggatgctaaaagctggtttgagaaagctctgcaatctgatcccctgcttgatgcggccaaatcgaacttgttaaaagtcctcacattgtctacgaaacagtagaacaagagaagacctaactcctaaggaaattgccactggagcctcagagttcagacacggaagcgcggtcaccaaatctctgttctgaagtgtctcaactgccagctcaaaattgatgcttggtgcctctagtctactgctcattgctcacagagtcacaggtgtaggaagtttcagaagtgcggcttcgaagactgcatttgattttgactgagttgctgcctatatgacaatcaaagctgcacaggctccgaagtggctgtgatgtgttcttaaagagtcgcatcagcgcaggaagagcccagattttgaagttcatgtgtagctaaatttcgatataagcttgaacggcttcccttagctgatgtatataaataaatatactccaacttgaggtgtactccaagttgagcatgtgcaagttataggttcagtgttccagagcaacttatggttctgtgcggtgaaactaacagcatctaaacctcaaatttggcagcaattccactttggaatcaaaagggcgtcctacgagtgtaaaaa

SEQ ID NO: 734 - DNA, 3407 bp, Zea mays
  Clone ID: MRT4577_10066C.1
ccaaattccgcggacaacaccccgcgcaggggttacagcacgtttggaccgcgcgcgggcgctgtggatgctcctcatcccgccagtagtgtccgacgcagcgccgccgcttgcatagctcgcagttctgtggacgggtctatttccggggtcatgtgagattcggccgatgcttacggattgacatggttggatgcaggttagttcggtgagaaggttaagaaaacaaatgacgaaatgcgtggttgctccggggtttgtgaaggcgatagaaatgatcgtctgaccggtataccactaggtacttcgtctttttcgcacgagcggcgctccatcttctgctccctcccccacttcgtgctcgggttccatcttccgctccttcccccactcgcggtcggcacgcaggctcggccggcgtcagcggctccccatcccgccagtacaggaagagggccgccgcttggagctcgcgggaggtagcgtcgccgccgccgcatggaggtcccgaatggctgaatcctgaccgctgcctggagagtctcgcgcctaaatcacatcatattgagcttctcgcctttggatccgtcttattatttgctcacactgaagaattagtttgcactttggaggaaaatgagtggtgctccaaagaggttgctcgaggaaggtagtcactccacaccaacaaaacgccctttggatgacagcagcttgtattcgagtcctgggaaatttattcagtccggtgacggtgatttccatggttcttctgaacatgatggtagatttgcgaaatttcaacgtgtggagtctcgtgatgataagaggccatctgtacatcggatgccgttcgggtcgactaatcttgctgttcacccaaacttgtatgacagcagataggagtcaaagcaaaataaagatgcacgggacagtaaggcagatgaccgcgaaacaaaagtcgatgccagggacgttcatagtggatcaaggattgaatttcaggctaataaaattgagagtgatgtaaaggtagacaatagagcagatgaaagtgaaataagggctgacaggaggggccatcctgcattacagaccggacataaaattgcaactgttcaagttctaccaccacaagagagttatacttcaacaggacaacaaggagcacaggggtaaaagacattttgaaccgcccgctgatactgtggattggcgtttgccccgtcctagtttacaaagtatcgatgaagctcccaaaggtccaatttctgtggaaggacgtaattccaaggacacaaatgaatctgctggtgattacaaagctgaaccaaaaaacgaagataggttcagagacaaggacaggaaaaagaaggacgagaagcatagggacttcggtgcaagagaaggcgatagaaatgatcgtcggaccggtgtaccacttggcagtagtggtgttgagcgaagagaaatgcaaagggaagatagggatgctgagaaatgggacagggaaagaaaagattccctgcgagacaaggaaggcaatgatagggagaaggattctgctaggaaagattcatctgtagtaattgcaaaggataaccctatactagaaaaagcttcatctgatggagctgttaagagtgctgagcatgagaatacgacaacagaatccaaggcacctaaggatgatgtatggaaagctcacgatagggatcctaaggacaagaaaagagagaaggatgtggatgcaggagactggcttgagcaacgaaacaaatataatgataaggaattagatgacaatgccattgaaggagatatggagaaagataaggatgtttttggaagtgtccaacgaaggaggatggtgcgaccaaggggaggtagtcaagtatctcagcgtgaacctcgattccggtccagaatgcgtgatggtgaagggtctcaaggtaagtctgaggtgtctgccattgtttataaagctggggagtgcatgcaggagcttctgaaatcatggaaagagtttgatgtaactcaggatgctacaattgctgaaagcctacaacatggtcctactcttgaaatccgaatacctgcagaatttgttacttccactaaccgtcaggtaaaaggtgctcagctttggggaacagatatttatacaaatgattcagatcttgtggctgtgctaatgcatactggctattgctcccctacgtcctcccctcccccatctgccatccaagagcttcgtgcaactgttcaagttctaccaccacaagagagttatacttcaacattgaggaacaacgtacgctcacgtgcttggggtgctgggattggttgtagctttcggattgaacgttgctgcattttcaagaaaggtggtggcaccattggtcttgagccacgccttagccacgtgtcagctgtggagcctactctcgccccagttgcagttgagcgtacaatgacgacaagagctgcagcttccaatgcattgcgacaacaaagatttgtccgtgaagtgactatacagtacaatctgtgcaatgagccatggttgaaatatagtataaacattgtggcagataagggattgaaaaagtctctttatacttctgctagactgaagaaaggagaagtcatatatttagaaacacacattaataggtatgagctttgcttcagtggagacaagccttgcattattggatcaagctccaatgcatctgattcagaaacggagaaacaccagagcgggagtcaccattctcagaatggtgacagaggctgtgtggagcatgaactccgggatgtgttccggtggtcccgctgtaagaaggccatgcctgaaagtgccatgcgctccatcggtatcccactaccagcagaccagttagaggtattgcaggataacctcgaatgggaggatgtgcagtggtcacagaccggtgtgtgggtatctgggaaggagtatcccctcgcccgagtgcacttcctctcggcgaactagaagcagatgatgttggctgtgttcgtggggggaaaaaagaaggtgatgttggagcaacaaaggaattaatatttcttgtggacaagacagagtcgggaacattgcgtttgcttgtacgggtcaccatgccatgtgtacaaaagaaggatcagttggttagtgttgatatggtagccttactgtgttgacaataacactattcattaggctggcctgctgcccatgcatgtgccaaagctatatttgctggttttaggtcctgtgtcggtacgcaaataacttgcaatatgcttgcttctcaagtaatctggccatccttattggaacactgcttcctctgtccctgaataatagattttaacaagttcaaaacagattgaattgcatt

SEQ ID NO: 735 - DNA, 315 bp, Zea mays
  Clone ID: MRT4577_100670C.1
ggggcaatgcaaaaacaccccccaaaagcacaaaaatttttaaaaccaaaagtgcttaaagctacagacttcaattacaaattcaaatacttaagcagttcaacaagtgattattgaaggaaacacccaaacattacccaagacacaaacaaaggttttttaacaccacaaccttgttttacagccaaacaaattcattcaagcagatcaattttcctcctcctcttcgcccgaataacttcccccctttgcgggaaccttctcttaatcctttttcagggcggccaagtccttgcgtgccttggaaaactcccc

SEQ ID NO: 736 - DNA, 237 bp, Zea mays
  Clone ID: MRT4577_100671C.1
caggcgtttgcaccgcgcctggccaaaatgcagacattttattagggggataaggagggcaaggtaaagcttatggaactgagtgttagtgactttggcatttgtgtagctgagcacagcaagggaggggttaatgcagatggcaagtgcaccaaggagaaggcaggaacactggagcctgcaataagggaggagagaggactggagagtgtggggaatgggaagaagtagtttact

SEQ ID NO: 737 - DNA, 257 bp, Zea mays
  Clone ID: MRT4577_100672C.1
caagacccggtccaaggtatctggaagcctctgtgttggtgcggacctaaccggaactgggatgcaggttttggaggacctggagccagcagcaacccttgctctgattcataccacggacccagtgccaaccctgaagttgaagtgaaatccatagtggacttcatcaagagtcatggaaaagtcaaggccttcattaccctccacagctattcccagctgctgatgttcccctatgggtacagatgtaccaagtt

SEQ ID NO: 738 - DNA, 265 bp, Zea mays
  Clone ID: MRT4577_100673C.1
atttcaggggaaagaagagacagaaactccagaaacagcattgccttcaaagcattttctgatggctgactcaatagctcatctgaagcaaattgcagtgaattgcccaatatttcctgtgcaccggacatgtctgaagaacagagttcaataacaatactacaaccaaaagtatccagaatacagggaaaaaacaaactgacaatttctgaaaagctgtccctgttagtttgatcccgggcacaaaggaagcaggcattccatg

SEQ ID NO: 739 - DNA, 508 bp, Zea mays
  Clone ID: MRT4577_100674C.1
ttggtggctatgtctgctttagggaatcttgcttcctcaatctggacattcaaaaggtatgttaattctacacactatagggtaaccacattttattactgatgttaaaaatagatgccctaccttcagatcaaatgcagaattattattacacttcctagtgcattcttgcaagaatgttatgtgctgcatctgtaggaacatagagactaccaaaaccaagtttgtggacaagtcttggatctacagaaccttgtactataagagtgacttagagtgttggaatgtattaattggacaaagggcacttcaatatcggcggaatatatacatgctcatgcgcatttgtatgagaacgttatataaacactggtgatttgcactataccaagaattgggcacaagctctcactgaaacctgaacataatgagctcgctactaaatcttaccctgacagcacgtgacttttatattgccgacaaaatactactctatgacatacatgac

SEQ ID NO: 740 - DNA, 202 bp, Zea mays
  Clone ID: MRT4577_100675C.1
actcgtcatcgccgccgacaacagcgtagtgtagtgtagttccggagagggttggcgagagtagtagtgatccgcaatgccgacggaggaggctgttgtggctgacgtcccggtgaccgaagtgccagcttaagtcccagcggcccagtaggccgatgcccccaaagcaaacaaggcacctcttgatacgaacgctcctatg

SEQ ID NO: 741 - DNA, 422 bp, Zea mays
  Clone ID: MRT4577_100676C.1
caacaaaaaaacccttaaaaaaaatgtgcccaccacaaccttttctcctgtttaaaggggtcaaccccgaactccccaaaaaaaacgcaatagggggcttgagaacattttgcttaaaaaaaaaaaaacaagcgcccgcttctgggacaaaaaattcccaccaggtgaaggggctttgaattttttgggtcaaaaacagggctggaacttcccaaaaacctgggatttggccccaccacctggagcctttggggcaaggtttttttttaaagctggaagcacaacccttccataaggtgaagcctttaccggaaacaaaagtggatgccctttccggacaccccaaaaacctcttaaaactaaaatatccccccgggccccaagttttgtaaaaccgggattggttcccaaaaaaccttcct

SEQ ID NO: 742 - DNA, 193 bp, Zea mays
  unsure (1)..(193): unsure at all n locations
  Clone ID: MRT4577_100677C.1
tttngccggaagggaagcgttcttttttgttggttttccattgcattattacacacaactggatacatgggcctgatgaaaccccgcccgccctgatttattttaacccccccacaaatgccacttgatacccaaataaaaagggtaaacaacattatccatcgatttattttgacacaaacacctacaaaca

SEQ ID NO: 743 - DNA, 574 bp, Zea mays
  unsure (1)..(574): unsure at all n locations
  Clone ID: MRT4577_100679C.1
ttctgcgcgcgcctttctcattgctcctacccctgctttcccgcccttaagcacctgccaaaccctctttaaaccctcgagtcatactcaaaatttctcgcgttgttggctttctcgccgcaatccgtccggggtagccgagacagaggaccctcgagctcgatttcataggttggatgtgggattttgaggttttgggtggtggggattcttgggttgcctttgcttttgtttgaccggatcttggagtgtgtgctgctgtcgttagctcactgggagcggcagcagatctgtgaatcaaccccctacagaacctccgaatcttgcgagtctcccggaaagttttgcttttgggggtgcgaatttggttctagtttgctcgatttgagccgaggcttttggtgatttcttgtaacgagatttgaggcggaggcttggcagtagctgcggtggatctgcggcctacggcgatgtctgctgccgactccctcacctccggccggggccgccgcgcggagcctcccctgccccgcctgaagcgtgtncgcgtttacttcgtggacgccgacgctac

SEQ ID NO: 744 - DNA, 427 bp, Zea mays
  unsure (1)..(427): unsure at all n locations
  Clone ID: MRT4577_10067C.1
cctttcctgaattcccttttcttacccactttttttcatcactctatnctaantctaagtgtaagggttttaaaatttgcttgttagaccacctncccaactctaattccaatgctacaatcctattgttttactgaatgacggtgtctagaccgaaacgctgaaatgtttttttttacttccttcgataacataaattgttcactcttataccccatgcataaaaatatcttgttctttacaataaaataatagaaaaaaattaggtgtatctctatctctattactaatattcaaattcttgatttcctttccttggaaaataaattatttcatgacaagtgcaccgttataaattttactaaatattatctttatccataactcatacactttcttgataaactactttatacatttcattttt

SEQ ID NO: 745 - DNA, 994 bp, Zea mays
  Clone ID: MRT4577_100680C.1
aattcggcacaatggacaaaagtcccgtccaacctcccacgcctctcgtccgtcttccattcctcactgccgccgccgccgcgccgcctgcttccgggagagcccccacctagaggaagctcctccggtcctcccatcctcctcctcatccaatcgtgccaacccgacccatctcatcacccgtccaaggacggagccgtcgttcccgtgcctcccgagacccatccaacccatccgggcttggattgctttcgaatcgaatctcctggatttttccaccacacacatgcatccttttggatttgtttagttcataagcccttcagactggcagatatcaagaggtcatacacatctcgcacctctaagtgggtgtgggtctgcaacaattctgcaaccaccttatccttgcctttgggagtaagcccgacctacatctggaggcttcgtcgagccttggaaggcctttttgttgattacggctaatttccaatggcagctgagatgtaacaaatttgctcagttcagttctctaggaaaagttcccgtggttcagcaatgtgattggtttcataggttttttcgtgtgttggttgatcaaagcaatctggtgtaagcttgcgtagttgacatcagagtttgtttcttatggttaggttcttttgcttttcatcctctactgcacatcacagatccaaggaggttttttccccagcagatgaaaccatgcatgcagcgtcaaagaaggattatcagttggagtccatgactggctcagttcgttcaaaccagatgacagaagaaaataaccgttcagctgttagtggtcattgtggcagtagcccatcatctcatcaagaatgctgtaggtcagaagacttgaatagatatgtgtgctctgatgagggcaaggaggttgggcacctaaagaagagtcagtcgcttgtaaacatgcttcaaaaggatcatggtcgtaattctagcgaaggctctg

SEQ ID NO: 746 - DNA, 191 bp, Zea mays
  unsure (1)..(191): unsure at all n locations
  Clone ID: MRT4577_100681C.1
cccgggttcgaacccacgccgtcctattacacgtcgttttntaaacttgntgatatgtttactaccctgttttgacnaactcgttgtatgttcgtgtatttatcgcgtcagaacctgtgnnaaataaaaagcagtacnaagtgtnngtttctttgctaannaaaaaaaaaaaaaaaaaaaaaaaaataaaa

SEQ ID NO: 747 - DNA, 121 bp, Zea mays
  Clone ID: MRT4577_100682C.1
cgagaggaatgaggacgacccgcgcctgtggaggaggagggattcggacgagcgctacattttctccatgaacgcagctcacagcattcggaacacgtgcagcataagttacgtgtcgcgc

SEQ ID NO: 748 - DNA, 421 bp, Zea mays
  Clone ID: MRT4577_100683C.1
taggggccttttttttttttttttttgggagaaataccgaccgtatagctttagttcacactataaattctgtgaagactacaaaccttaaggctcccctcctactcccataggagctcgatccgtgtggagttctaccaaagaggggcgcaggtattacttagcctagagctggacattaaaaaatgattatggggagatccagtcttatatgtgaaggacgatctcacggacgctacaacagcgcccactctagactcttacgaatcatgctgtcaattaccacatgaattcattttcctgctttgaggacttatataacggtcttggcgaaatcactttcgcagcccgtgattcttgcattactgaacttgctggagagctacgattacctcttcacaaaccgggccggacggcctca

SEQ ID NO: 749 - DNA, 190 bp, Zea mays
  Clone ID: MRT4577_100684C.1
acatctatttccaggtcgagacagttgttttccagtaggctgttgttaaagaggtactctaggtcctgtacaatgatactgaggtcgtcgagttcgtactttttcaagacatatttttatctcttaacgagatggtgcacgggtagaacactataacgggactttgattttgatatttgcagaaggttca

SEQ ID NO: 750 - DNA, 422 bp, Zea mays
  Clone ID: MRT4577_100685C.1
tttgcactcatccatcacaaaacattcttctatctattccatcattcatcattcatcttattgttatatgcaccaaatcagatgggcaacattaattatctaactccaaaaaccatgaatctggttcttgtggttcttgctttcattgcttaaatatcaagtgtttcttgttcacaaacatgctgctgcatctgtgttcaacaacaaaattcttagctttatcatcatccacatcatcttcatccataaaaacatcatcatctaccaccaccattacatcaccatcatcatcatctccaacatcatctagttcacatgcaaccacaataacatcatcaacaacatgaagtttatgttcatactacaacatcaacaacctgtttcacctaacactaacaacaacaacttctcctactacaaca

SEQ ID NO: 751 - DNA, 518 bp, Zea mays
  Clone ID: MRT4577_100686C.1
ggctgcaggaaagcggcagagtggaagctctgagtcttgtcatcaccgtacattgtggttcttccttagcgtctgcaacctggtagcggtgggggagagaggtggcgtcgacgaagcggttgggtgagggcgacaacggtggtgcagaggcgaggacaagagagatacaacctggcagcgacgggtcaaagatgtggcgtcaatagtggatgcagcgtagaggcaaggacgaagagagtcgcagggcacacaaaaccaactgtcgaaggaaccctaccccatcaaaactgttggtactcggggtcagcaaacccatacataagcctcccatacgtacagacgaagagcagagatattttttgcctatggctacctgtcccgtgaaaatcggttggtttccgtgttcccaaacgaggcctaatagtattactagcatgattatgaccataccaattaaaactgggtgaaaaataacacatatattgattcatatttctgaaattccagtcttcttacac

SEQ ID NO: 752 - DNA, 285 bp, Zea mays
  Clone ID: MRT4577_100687C.1
ctcaaccgataaaccgtgttttttcagccgcgggaagctgagtctctcacattctgacataaaagatcactggtcacaccaccacacgtccacaaatatatatgcgcaaccattttcccctcaaaagccaaatccagatgtgtgttcatctgtccataaaaacgccaggttcagctggttttgttggcgaagagcccatcctggccggctaggtttaaccccccagcgatggcgctggggctgccgccgttagtctttttgccacaattcatctttgcgcgggaa

SEQ ID NO: 753 - DNA, 637 bp, Zea mays
  Clone ID: MRT4577_100688C.1
tgggtacccggggccctccctcgagttttttttttttttttttttttttttttttttttttttttttttttttttttttttttttttttttttaagaaaaacagtttttgataattggggatgccggtttcctgaccccgggcaaaaccaatttacaggggaccttttttgacggggccgggaaaaaaaaataaacaggccggtaacagctaacacagttaaaaccttattggcaaaacaagagttggggcttttttattttttggtgcaaaaaataggtctcagggggaaaggaaaataactgaaacacccttttaacttttttaagcatgccccacctcctgaatgggggctaaacagggctcaggggggggcctttgtttaaaacaagccattagggccccatgggaactccttgttggggatgggcaaatatgggtcccccgggggttcattaaaggggggggggcccttggacaggttgtccccccccaggagggggcaggtcacaatcccgggggaggggattttttcccacttggccgtttaataggcgtcgtcggggacggaggaggacatgcggcgccttaaggggggggggcccccccccagcgaccggaaacccttgggccgaatt

SEQ ID NO: 754 - DNA, 378 bp, Zea mays
  Clone ID: MRT4577_100689C.1
tgttcgggggtttaacatttcatgtctccagggaagacgcccattctacttacacagggaaggaaaaaaaacatcaattcttactctgaggtatggcctgtagagcccttccaagaacaaaggagtagctgtctctgcgtaaacaaaagggggggggggtgccatcataggtggcaatcatgttctctgggctttgtgttggccacggttcgctacttttcggcataaaaggggaatgtaaaactacaggattgctggatctttgcatctgttaaaaagatcctcaatgccgccaagaacttcctcgggtacaggccggggagtgctggtaaacgcgtcgatgttctccttcacctgctccatgggggacgatccaat

SEQ ID NO: 755 - DNA, 325 bp, Zea mays
  unsure (1)..(325): unsure at all n locations
  Clone ID: MRT4577_10068C.1
tgctgccncagtccggccaagactcgcgccgcccaccgcacccgatccgcctcggccaggcgtgctgccgtccgctcccttctgccgcgccgtcgcctccgcctacgcccgggccgtcccgctggacccagcgtgcgccgctctcctcggacgcgccgccgccctctcgggttgcggcggtggtgcttggggacccgcctccgtggggggcgccgncnncngcggnngcggngccggcgctgcaggagggaagctcctggcgggtcgctgccaggagggcgaggtcctcggcgggggcacgtctggcgtggggttccgggccgtc

SEQ ID NO: 756 - DNA, 490 bp, Zea mays
  Clone ID: MRT4577_100690C.1
aaaaagaaaaaaaataatttttaagccatgccctttccataccggaaattattgaccattcagctgacccccaaaggaatcccccccaaaaaaaaaaatttggcccaagcaagggcctgatcttcaaagcacaaataatctgggctttcacagggattgggcatttatcgattacttgggggcagcagcttcatcaggcgttttgggagtcatttgggccacaaaatgcacagggctttgaaactccccccatatagccttggaaaccattctttgcctgtttacagaaaattttccctcaaatgccttggaaaacacgtttatgcaaacatgggggccatttccaagaggtatccaaaaccgggactgggtccccctccaactggtccttgaacttagcccctaacccctttgtagcgagggaatccgaaaacccccccggccccggggccgaaacccaggccgaaaaccccctgatcctggggctgct

SEQ ID NO: 757 - DNA, 346 bp, Zea mays
  Clone ID: MRT4577_100691C.1
cccacgcgtccgaaaaaaaaaaaataaatttaaaaaaaaaaaaaaaaaaaaaaaaagaaaagaaaaaaaaaaaaaaaaaaaaaaaaaggggggccgcccttttggatccacccttctttcctcctccttcctccgacttaattcttcttttatggtgccacattacttttatttgctggccgtttttcaacatcgtcactgctgaaaccctcctgttgcccccctaattaaccttgttgcacatcatccttttttcacctggtgtcgtattaacaaagccccccccaatgatctttcttaccaacagttccgcactcttggtgactattgcgccccctctttttgc

SEQ ID NO: 758 - DNA, 506 bp, Zea mays
  Clone ID: MRT4577_100692C.1
gagccaacaacccacctggcatcacgcggctgcacagctaaaacgaattggcttgccgaagcacgcacgcccacgccctggaggctgacgttgaatggtgggagcattgtggggatgccaacacgaagaacaacaccaacatcgggggaattttgcgtgcttgcaggagtaggcatatggggaagcttgacgggtgtataacagtatggcctaacgagatgttggcacccactgtagctgataccacttgtcagtaaccacccaagatagactaccttcagcatgttggcatgtaactcttacctccgaggtacatagtgttcaatgtgctgaatcctttgtgcgtagaaaatgctattgacgagcttgagcagatgcccactctagatgaatcaaagaatactagcttgtaattctgaaccggctaaactttgcagatagatagttttcagaggccaaaaaatattacataccatctgcagaggttgtttgacatctgtctctga

SEQ ID NO: 759 - DNA, 341 bp, Zea mays
  Clone ID: MRT4577_100693C.1
ttggcggggggacccacgcgtccgggacaagatgtggacctggaccgcgcgtggggcgcccaacgccagcagagatgggcgtcctcccacggcaggctgagcctcctcgccgacagcgcgtagcacttggcgccgctggcctggtccagccacagcctgcaccagccgtcgccgtcgacgtcgacggggacgccgacgacgccggcgtctcaaagcgcaaggtacgcgttctttctcggcccacggtcccggccggcggcatgcagatgcagggcgatggcgcggcggtgatccttcgggacgaagcggccccagacgtaatcggagtcggcggcggcgcg

SEQ ID NO: 760 - DNA, 260 bp, Zea mays
  Clone ID: MRT4577_100694C.1
ctaattgtttatgactgaacacaggggaacgccttgtaattgagggggagggcttacacatggctacgggcgggcccagatgttttatacgagtggtttgcgtatacatatattatatgcggactgagagaactcattagctttgacttttaccaccaattttgtcgaaatttgaactgaagcgttttgaacttttttttttaaaaaaacaaaaaagggggacctcacccaaaaaccttctcctttcttttttttttttt

SEQ ID NO: 761 - DNA, 264 bp, Zea mays
  Clone ID: MRT4577_100695C.1
actccagcccacttcgtttccctctaacaggacagcaaggatcacggggcagcagacgctggcacctcctgatgaccacagcagacgcctgcctggggaccctgaccagcgctctgatgctgcacgcgtacaaatacattacaggggaaaaatgactcctgaggggaaggcatcatcccagcgcagaagccgagctcgaccagcgcagcgctggcagcgagacaaaggcccagaggtaactaagaagaaaagcccggtcggcgc

SEQ ID NO: 762 - DNA, 776 bp, Zea mays
  Clone ID: MRT4577_100696C.1
actagttctagatcgcgagcggccgctcgccggccatatagtccacacagcaggcagagagttcgagagctagctagagagagagagagagggacaacgactaaggcaagctagctcaccgatatcgaacgaatggaccgtgtgatgcagctggcgtcggagcgtgcggtggttgtgttcacgctgagcagctgctgcatgtgccacacggtgacgcagctgatggcggacctgagcgtgaacgcgctggtgcacgagctggacagcgaccccaggggcaaggacatggagcgcgcgctgctcaagatgctgggagggagggcgcccgctgtccccgccgtcttcatcggcggcaagctcgtcggcggcaccaacaatgtcatgtcgctccacctcggcggagagctcgtgcccatgctcatgaacgctggcgccctctgggtctagacaccagggcatcgcgcgcgcgcgtactcgtctcgacctcggcggagagctcgtgcccatgctcatgaacgctggcgccctctgggtctagacaccagggcatcgcgcgcgcgcgtactcgtcacgtacgtacctatatgcttggccatgcatgcgtgagtggcgtgtgtgataaaataaacagatcatgcgttgcaagcatggtcgaagagaggattaattaccaggggtgataaacggcaggtttttcccgtcctagtcttctgatgatcaagaagttgactccaggaataagtaaggccaactgctagcttgctgttatctactat

SEQ ID NO: 763 - DNA, 1777 bp, Zea mays
  Clone ID: MRT4577_100697C.1
gggaacctcgaagccggccgggctagcttccctccgccccgtccgctcgcctggaagctgcctgcgcttgcgcacgtgggcgcgcagtgggagaagaacccacccacctcccgcgtctgcgtacgtttttcacccggccgcctcgggggctcagggctcaggcaggccgataccctccccaatccccaccggcaccgaggcgctggccgacgaggccagcatgaagccgcgggcgtccctggagcgcctggcccgccccttctcctcctcctcccgccgctcctcctccgaccagtcccgccgcgacagggaggaggaggcggacctggaggcgatcgcggcgcgggagcagcgcgcgttcaggtacgagaccctggcggcggcgacgcggagcttctccgagaagaaccggctcgggcaggggcgggttcggccccgtgtaccggggccgcctggaggacggccgcgacgtcgccgtcaagcgcctgggcgccggctcgcggcagggcgcccgggagttccgcaacgaggccacgctgctgtcccgcgtgcagcaccgcaacgtggtcgggctcatcggctactgcgcccgcggggcggaggacaagctgctggtgtacgagtacgtgccctgcgagagcctcgacaagatcctcttctcctcctcctcctccgcccgctccagcagcaacagcgaccggtcacgacgagcggagctgacctggccgcggcggcacgaggttgtggtcggcgtggcgcgtggcctgctctacctccacgaggatgcgcacacgcccatcatccaccgtgacatcaaggccagcaacatcctcctcgacgaccggtgggtgcccaagatcgccgacttcggcatggcccgtctcttcccggaggccggcgatggccactcccgtgttcatacccgtgttgccggcactaacgggtacatggcgcctgagtacctcatgcacggcgacctctccaccaaggccgacgtcttcagcttcggcgtggttgttctcgagatcgtctcaggccgcaagaactccgcctttatcccgcccccggacgccgaggccgacagcctcctggaatacgcatggaggctgtacaagaaaggtcggagcttggagttgcttgaccacgcggtcaagtcgtcggcggtgccggagcaggtcgagctgtgcgttcgcatcgggctgctgtgcgtgcaggctgacccgcggctgcggccggacatgaagcgcgtggtaatcatcctgtccaagaagcagagcacgctcgaggagccgacgcgtccgggggtgcccgggtcgcggtaccggcggaggccccacggcctgcgcggcacgcactactctgctgggtcatcgtccggcaccagcttgccgtctacgtccgcaacatcggacgcgtcagcgtcagcgtcagcgtcggtctccaacgccatgacgacgtcgagcacccacaccatgaggagccaaggcttgccctcgcaccgagaagaacacgagtaggagtaacagggcgagccccaactgtgtacatttgtcaattctttcctgttttcttcagtttggtgttaattccgatcagggtggtgaatgggattgcagagtaggtatagatgtcatgattgttttgctagcttaggatggtgctgaaaattaagctattgacgggtccatcaccgaatctgtggtagactgcaggcaaaaactgtgtatatataaaaacgagaaaaagcaattttttttaacgagaaagaacaaattct

SEQ ID NO: 764 - DNA, 617 bp, Zea mays
  unsure (1)..(617): unsure at all n locations
  Clone ID: MRT4577_100698C.1
tttanaccngccccagggagtatttaataaaagccgccgcccggcatctgaaactagtggatggggggttttattggaggggcggcccgagccgcgatgtcaagctacacttcatgcgggacattctcgcgcgctactggccgcagggtcgagtcgtaatcaaggtagcataagtgcacaagagtaatactaggcagcaggcatacctccatcctcttaccaaggggggggttttttttttttttttttacttaatactgacactcccttccacgcgcttcgttcgttacgcagacacttcccttgtaagtcagtctaggtagccaactacagtaagtaatgcctctagtaagctattatgcacctgagtccatattcgctggtggtctacttcgcttctgctactgttgtcagtcctatcttctctgtgcagatgtctatctggaggtaggtagtagtaactttgcaaaaactgggtccatgtctatgcaaatttaagcataactgaggctctatatacatatgtaacacagtactggtgctgtgccttgcatgattttggtactggcaagtctatgtctgataccagtctcatggtaaccagttcatacgctcca

SEQ ID NO: 765 - DNA, 572 bp, Zea mays
  unsure (1)..(572): unsure at all n locations
  Clone ID: MRT4577_100699C.1
gcgcttcctcctccccctacttaccaagccctcctaagtgtaggggtccttagcggttttcatgaggggcactcgcggtggctgatggggagtaccggtgctccgtcggctggcttgcctgggccaccagcacacaagtcgctggacaatgccttctgcctcctacgggaagtatcctcatactccaacgtcatcaccgaccgggagacggcgaggtcccgccgcttcggcttctgtaccttctcctccaagaacttcatgctcgacgctatcaacaacatgaacgggaacgagctctacagccgtaacatcaccgctaaccaggcccagtcccgtctcagcggcggtggcggcggtggctaccgtggaagtcccggcggcggctgcggttatggtggcgggcgccacgaccggggttatggcggacgaggccgttaccgacgcccgagcaaaggtggctgatgcagctaccgaggctgtggccgctaccgccgtccgcaccagggtggcggtggctgctactgtggatgaggctacgcntgatgaagggactgatgtgtgggcccatcctg

SEQ ID NO: 766 - DNA, 332 bp, Zea mays
  unsure (1)..(332): unsure at all n locations
  Clone ID: MRT4577_10069C.1
ctgctctgctccggtccgttccgctccttcctccccctatctagctagggcgtcccggtcctgcatcgcggcggagatgggcgcctccaccacgccgctcgcgngcgngggcnctgctgacctggaggtccgtgtgcgtggggctcccggccgggctgtgcgacgaggggttggtcgcggagctggacgcctggcgttttcatccccggggggggggggttccctncnagacctgcccagaaggaggatggcgagggaggggggggggatcacgaggggggtgagggggggctacgaggagatggggcgtggaaactggcgggaagaggggg

SEQ ID NO: 767 - DNA, 354 bp, Zea mays
  unsure (1)..(354): unsure at all n locations
  Clone ID: MRT4577_1006C.1
cctttttnntttttttnnttttttttnntttttttnntttttttttttnnttttttttttaaaccacaataatgagaatcttcaaaagctcagggtcacagaacacacagggttcacatttatgtgtccaaaaaactttttattcaggcacagaaggcagttttcaaataaccggaagggggggggaaatcctttntgggtctctggccggnggccgtcggtgggtttgttccagaatttgggggaaggaaaatatcgggaccggaaatttgagttgaaaaaggacattattttggtagatgggggggtaccaaggaagattgtttgtaagttcattgggaggaaagggtttta

SEQ ID NO: 768 - DNA, 798 bp, Zea mays
  unsure (1)..(798): unsure at all n locations
  Clone ID: MRT4577_100700C.1
ccgggnngccttgttgagtggggctaggccattgctcacgcaagcgctcgagaccggcaatgctggggagctggtggatgcccggcttaataggaactacaatgaagtcgaaatgttccgtatggtcgaagctgctgcagcctgtattcgacattcagcatccaggaggcctcggatgagccaggttgtgcgggtgcttgatagtctcgccgaggtcgatctgactaacggcgttcagccgggcaagagcgagatgttcaatgtcgcgaacacggccgagatcaggatgtttcagcggatggcgttcggcagccaggatttcaggaccgatttcagccagtccagctggagcagccagagcagaggccttgacgcatctggttccaggccattgtaaccctcgtcgtcgtagattcctacatctaactagctagggtgtttcgtgatgggttttgtacgtcatgtaattctttttgattggatcaatcgtgtgattattcttttgccatccctgtcttgtacgactgacatagatcatgtgctgcgctgaggccctgcttgcctgtgcgaagacctgctaactgatgaagagagactgctgcgtttagtcccaattagtgaattgctgtatcgaatttcctgtaattagcagtgcttttgaaatcagcggtttttttacaaggaacgctcagttcgagctgaacttttggggaaagattactcaaaaaaaaaacagtaaaaaaaaaaaaaaaaacaaaaaaaaaaaaaaaaaaaaaaaaaaaaaaaaaaaactcgagg

SEQ ID NO: 769 - DNA, 378 bp, Zea mays
  Clone ID: MRT4577_100701C.1
atggagcgacagaagtatggaaataggataagatatgcggagggcatactaataggaattccgaagatcaaaagaatggatagatgtgggtacctgctgcgagataaagtaaggaaccttcttctttcagtatgcaagagtctcggtattcgaataagatggtccaggatggagggcaacaagctgggggaagaaggaaccgaggaataccagtcaggatatgttgcatgtttggtgtccaaagaaatgaggatactggaactagcttctggggtccaaggatacctccgcctttcactttcatctcttgataccgaaattcgcctaaggtctggccttctactctactttgattcagattcatttgtcgagagatag

SEQ ID NO: 770 - DNA, 508 bp, Zea mays
  Clone ID: MRT4577_100702C.1
ggcccctgaaagggtttgggggatgtgcacgatgaggctgctggcattcgcggtgttggctctgggtgctgtcactcaagcagaggaaggagccaggcttttggcttccaaatcactgctgaacagatacgccgtggagggacgagacctgaccttacagtacaacatttacaatgttggctcaagtgctgcattagacgtggaactatctgatgattccttccctccagaagactttggcattgtgtctggaatgctcaatgtcaaatgggaccggattgcccctgctagcaatgtctcccacactgtggtcctgcgccctctcaaggctggttatttcaacttcacctcggcaacaattacttacctggcccaggaggatgggcccgttgtgattggctctaccagtgcacctggacagggaggaatcctggctcagcgggagtttgacaggcgattctcccctcattttctggactgggcagcctttggggtcatgacccttccc

SEQ ID NO: 771 - DNA, 116 bp, Zea mays
  Clone ID: MRT4577_100703C.1
accacacccaatgccaagcttacgttaggattccatcagcaacgagctgagggcgccgtacaagactgttatgttacttacacctcaaacccattacctacacaatagcgaacaca

SEQ ID NO: 772 - DNA, 465 bp, Zea mays
  unsure (1)..(465): unsure at all n locations
  Clone ID: MRT4577_100704C.1
ctcgccgggcccgaaccctcncgccgccgccggcgtcgtcttctttttcctacccaatgtggggcgcgcggggctctgaacaccaccgggcatcctcctccgccggcggcggcacccaagatggggttcgacgggggcctcgtgccctacaaccccgagggggggggtccacctgaagtggccgccgcgccgccttccctcgggggggggtcctggggtgggcccttcactcccttctcccgctccgacaaggtgggccgcatcgcggactgggcgcgcaacccggcgggccccggggctttcgccgcanctcgcgacgccggcttcgatttcgcggggctcgaggactccatcgggctcgcgtgcgggggcgactcntgcttccggctcgtggatgggaaaccggggccgggggacccgggggtttggacctcgctggggcttccagcagcgggcccaactccc

SEQ ID NO: 773 - DNA, 398 bp, Zea mays
  Clone ID: MRT4577_100705C.1
acgacaacgcttccgcgaacccatgggtttatcaattttaaccctagcgcgcgccacaacacctggggggtgttactacaacgtaccgggcttgctttcccgtcacctaaatgacgaaccgcaccaagaaggctggaattgttggcaaatattgaaccaggtatggcgctagctttcgtaagcaaatcaagaagatcgaggtatctcaccactccaagtacttctgcgagttttgtgggaagtctgcttgcacaaggaaagcagctggaattctaggatgcaaggactgtggaaaggtcaaggctagcagtgcttacaccattaacactgctagtacagtcacttgcaccagcacgattcgtcgctgagagagcttactgaaacatgatttagcttgc

SEQ ID NO: 774 - DNA, 566 bp, Zea mays
  unsure (1)..(566): unsure at all n locations
  Clone ID: MRT4577_100706C.1
ngtaacaaaggaaccgatcagagagagagagagagagcatagaacgatcactgaagggtggcagagaaggaagtgggcggtgaggaggtcggccatactgctggttctgcaaatcatgggagctccaccgacgtgcatggtcgcccgctcgccgcacgtagccgcgccgggatggctccctctccacgagcgtcaaggtgacgatgctgtcggccacgctgtgctacacggcggagacatgcaaatacattggctgcctcactcctgnttgctcctgcaactatagtgatcgtctatgctacatcatatttactcctgttgcttgaggccattccgagaaggctcaaatcttacatgcatgtggcagntcggcgacgacgctgctctctcgtgagattctgattaaagtagtggatgagtcaaggcatacatgaatggtttatgtatatgatatgngtattattaattagccgtgtgaggaaaacggagagaaaggagaggaagggttaatttacggctatctgaggatcaaataaaagggaaatatatggtggaattgtgtgaat

SEQ ID NO: 775 - DNA, 798 bp, Zea mays
  Clone ID: MRT4577_100707C.1
ttgggaccctcgagcccggccgccccatccccatccccggcgccggcaaccagatcacgcagctcggccatgtcaaggatctggcaagagccttcaacctggtgctcgggaaccccaaggcgagcaagcagatcttcaacatctccggggccaagtatgtcaccttcgacggccttgcgcgggcatgcgcaaaggctggagggttccctgagccggagctcgtccactacaaccccaaggaattcgacttcggcaagaagaaggccttcccattcagagaccagcacttctttgcgtctgtggagaaggcgacgagcgaactcgggtggacgccggagtttgacctcgtccaggggctcaccaactcgtacaacctcgacttcggccgcggcacgttccggaaggaggcggacttcaccacagacgacatgatcctcgacaagaagcttgccaccgtttgatgcatgtctcgggctagctgtacgtacgtacgattagagaagagataaatgatagcaaatcaaaatttgttgttaagtaaagtgagctcttagcttctatcagggacgattattaaggatacccgaattattcctcccaagaacacactcaaaaaagtaaggtacctcttaggccgaggcttctcctcgagagtctcccccctcgggcataacaccgcctcgccccgagctgatccccgacagataagataacagcgcctaaaaataggaaggaaaccctcgcatttaatgtatactagttgtgtgctcgtgcgttgcaacgggaacatataatacc

SEQ ID NO: 776 - DNA, 122 bp, Zea mays
  Clone ID: MRT4577_100708C.1
ggcgtccgtgagcgcttccaccctgtgcactgatcctggctccctcttatttattctacatccgtggcacccaacttgcactgaaagaggcttcttattaaatagaagaaatgaggtttctt

SEQ ID NO: 777 - DNA, 1576 bp, Zea mays
  Clone ID: MRT4577_100709C.1
gtttttccaccgcggacgggccggccgccccatccccatccccggcgccggcaaccagatcacgcagctcggccatggcaatgatctgttgtatgttccattagcacagactgaagcgcaactagaggatacagccatccattggtagtacacagggtcccacccacaagagaggcatggcggccacatcgtccctgaagagcagccttctcctcccgtctaccatctccgacttcagtggcgcagccgcagccgtctccatctcaacgcagaagaggagatcacggggggcgagggtgcaggtctcagcggctgcggactccaagaacattctggtcatgggggggactaggttcatcggggtcttcctgtccaggctccttgtcaaggagggccaccaggtcacattgttcaccaggggaaaggcacccataactcagcagctgccaggggagtccgacgcggagtacgcagacttctcctccaaggttctgcacttgaaaggtgacaggcaggacttcgaattcgtgaagacaagcttggctgccaatggatacgatgtggtttacgacatcaatggacgtgaggctgtgcaagttgagcccataattgaggccttgcctaacctgcaacagtacatctattgctcatcggcaggagtgtacctgaaatctgacattcttccgcactgtgaggttgacgcggtggaccccaagagccgtcacaagggcaagctggagacggagagcctgctgacctcgcgcggcgtgaactggacgtccatcaggcccgtgtacatctacggcccgctcaactacaaccccgtcgaggagtggtttttccaccgcctcaaggccggccgccccatccccatccccggcgccggcaaccagatcacgcagctcggccatgtcaaggatctggcaagagccttcaacctggtgctcgggaaccccaaggcgagcaagcagatcttcaacatctccggggccaagtatgtcaccttcgacggccttgcgcgggcatgcgcaaaggctggagggttccctgagccggagctcgtccactacaaccccaaggaattcgacttcggcaagaagaaggccttcccattcagagaccagcacttctttgcgtctgtggagaaggcgacgagcgaactcgggtggacgccggagtttgacctcgtcgaggggctcaccaactcgtacaacctcgacttcggccgcggcacgttccggaaggaggcggacttcaccacagacgacatgatcctcgacaagaagcttgccaccgtttgatgcatgtctcggcctagctgtacgtacgtacgttgctgagcggataaactatgtaggaatatattgagcgggccggtgacgcgattagagaagggataaatgatagcaaatcaaaatttgttgttaagtgagctcttagcttctatcagggacgatgattaaggccttgttcgtttgtatcggattagtgggtcggaacgattcctatagccgaattgcttctctaatttatataaattttgattagctggaaaaaaaaaaaaaaaaaagcggcc

SEQ ID NO: 778 - DNA, 606 bp, Zea mays
  Clone ID: MRT4577_10070C.1
actcctatgggcgattgggactctcgaggccggccgggacttgcagtggacctgaattaacaacagcagcaaccgccaaaatggtcaagaagagaaagaacaacggccgaaacaagaagggccgcggccacgtcaagcccatccgatgcagcaactgctcgcgatgcacccccaaggataaggccatcaagagattcaccatccgcaacatggttgagtctgctgctatccgtgacatctccgatgcctccgtcttcgcggagtacaccgtccccaagatgtacctgaagctgcagtactgtgtctcttgcgccatccacggcaagattgtccgtgtccgatccgttgtcggccgacgcaaccgtgcccctcctcctcgcgtccgctacaacaaggacggcaagaagatcgtccctactgcccctaaggcttagatgggttgatgtgtcttgtcttgggatggagtccggttatgatagcagcattcaaaaaatggatgggatgaatacctttgggattatgagactaagaaattccaaaaatcaactggacgacgtttgatgtctacgcgtctttgacaaaaaaaaaaaaaaaaaacccgcggcc

SEQ ID NO: 779 - DNA, 407 bp, Zea mays
  Clone ID: MRT4577_100710C.1
aaattacctggacggggtcgatgggggatcaagaagcctcgtggcctagaccagtggcccacattgcacatggtgggtgcgctggcttaccatctccccaagtgggagagtggacgtcataatttgtggtagaggggtacgcgttcgcgcggcccccgccaaatcttataaatttcatataatgttatctttatttggccacattttataaattataatttaatctttcctcttaagaatggataacgtaagtattcctggactgcattagtggtcctgcatcaaagtttatctttgtgagagatgataagttgttcgaaagcagtctttaaaattaggttcaattacttttgttattacaattctgattattcgatatattgttgcagtatcaaatattgtaagtt

SEQ ID NO: 780 - DNA, 421 bp, Zea mays
  Clone ID: MRT4577_100711C.1
ggatccttagacccgccacccttccccctcctctttcttttttttccccaaaccccattcctttttatggattacgttttcttttcaatctcctaacccccttacaccaaacaccacttaccacaaattattctcttaacctgaataaaaacctttaacaccctcccccaccacaaaaaaataaaatggccttccatcaacaccgaaaagacaatccaccccccctttcccactctctgtctccaaacatgaaaaaaactctgctatcgtcctcaccacaacaacaaacaaaaatttttcaacccacggttcctacaccacctcattcattataatacaggcatgcaaaacccccaccaacccttaaaaaacatcttttgcgaaactttaccacggccccaaaaactcccccacctcatct

SEQ ID NO: 781 - DNA, 241 bp, Zea mays
  Clone ID: MRT4577_100712C.1
aactttctttttttttttttttttgtgcagaactcagcctaaacagcgcataattcattctcaatatgcccggaaccatctgcagtgggaattaacacctcttacaacatcatgtgttgaaaaccacacactagcttcataacagacacacataacacgatagcatggagcatctctcggcatgatcacgggataagggcagcacactggcctgatgctgtgtaatcagcaaacttctcta

SEQ ID NO: 782 - DNA, 332 bp, Zea mays
  Clone ID: MRT4577_100713C.1
aaagaaaagaccaacaaaaaaaaaaacggggccttaaaatgtgggggggagcaacagaacctcattttcttgggggcaagaggactgaaccccaaaatggctgtgggccagggtttttgaacaacaccttttgaagacgaggagcaaacaacagggacctgaaaacacaaaaaatctacaagaccgtggggggcttctggggctcttacaaagccttaaaacgcttgtacaagctttacaatacgagaaatgcaggaataaaggacacaggctggaacacaaacaagtgacatttatgtggacttaaaagaaagatccttcgaagcgaaagc

SEQ ID NO: 783 - DNA, 665 bp, Zea mays
  unsure (1)..(665): unsure at all n locations
  Clone ID: MRT4577_100714C.1
agcaacccttcagcaggattcagactctggtggtgtggctacatatgagggcctatttgagatcctgtgccttcatgggtcatacttggtggtagaggatggtggcacacggtcccgaagcggaggtctttgcatagctttgtgtggtcctgaccacagggttattggtgggagtgtaggcggagtcctgacagcagctggaacagttcaggtgatagtggggagcttcatgtacggaggttcgaagaagaacaaggtgaaagcggaggtggacatggagcccgaggaggtggcacccgcggagcacagtggcatggtccctcctgcgatgagtggcggcgggtgggaagcgggcatgatgaggcagatggactcgagaactcctgccattgatatcaactcgatccgcgggtagtagggtagcagttgttgcctggttgggtggataaaggctctgtgacaaagtcgaatcctccctcctaggacacacacagcacgcatgtactaactaactaactaacagctctgttgctgtggtttaggatactcagaactccgagtatatcgtatgtgatattgttgttgtatgaaataattaacggttggttggtcgtgttattatgttaaatatatatatgaaatgctgctgttgggtctcaaaaana

SEQ ID NO: 784 - DNA, 480 bp, Zea mays
  Clone ID: MRT4577_100715C.1
ggcagatacaaaccgtttccatattgaaactggggaagactgggatcgggcaatccaccacaacaaaatgcccctcgaaacgtctggggcaaaacgcgagcacaaaacaccgagaaaattccgacctggcctcaatacaacagggcgtgcaagcgtgaccaacacttacccacacaacatgaggacaccgtgctaaaagcggcgcggcgctttcatttgtcacataaactcacaaattacaaacggatgcggccccggataatcctggggcagtagcaacttcacaataggtcaacatgattatccttgacctgccataacatcataggtggcaacccccgagaggacaaccattaacgcgccggaggtcgggcccaacaccggaacccattgcagccccgtcacgggctccataagatccagatgcatgacggaattcaccacgacggtgtacttgaaccagaatgtgaaattgcggaa

SEQ ID NO: 785 - DNA, 327 bp, Zea mays
  unsure (1)..(327): unsure at all n locations
  Clone ID: MRT4577_100716C.1
attccactcctcttgtcaggggtnggttttttttgcacacactttcttacaaaaaccgggggctatgtttatttcggacaagtaaggcaactaaaatcttgggcccgtggctgggaagcaaacaaaacaaaaaaccctcgggcggccctcctaaaaaactctgggaagaatacttcatgagcatatgggacacctaaagcgaccgtgcaaccatgaaagggcaaaaaagggaacaccggctctaatctctgtagaaacacatcctcaagggcgcagtaaaaaacaaaagggcgagtatcctgtgatgcagcaaaacactgaaacatg

SEQ ID NO: 786 - DNA, 716 bp, Zea mays
  Clone ID: MRT4577_100717C.1
aatacaaaaaaacacacctccgcctccaccccacccgtcccgacccctctcctccaaggtaagcccgcggcggcggcgagcgagcgagcggcggcgatgacgacccgcttcaagaagaaccggaagaagcgcggccacgtgtccgccgggcacgggcgtgtgggcaagcaccgcaagcatcccggaggccgcggtaacgccggaggcatgcaccaccaccgcatcctcttcgacaagtaccatcccggctacttcggcaaggtcggtatgcgctacttccacaagctcagcaacaggttctacacaccgacggtcaacgtcgagaggctctggtccatggttccgtccgacaaggcggcggaggccggcggcgacaaggcccccgtggtcgacgtctcgcagttcggctacttcaaggtgctcggcaaggggatgctgccggagaagcccatcgtcgtcaaggccaagctcatctccaagatcgccgaaaagaagatcaaggccgccggcggcgcagtcgtgctcgttgcctagggttctgttcccgaccgtgccccgagatctatatctgaactattagttgtttcccgtaccagcaatttgtgttgaagaagacatcgttagtttgttatcctggttcctgtgtggtaaaccaacatcttatgagaattttgcgctatgttatgccagtttatatcagacgagttatccatatc

SEQ ID NO: 787 - DNA, 572 bp, Zea mays
  Clone ID: MRT4577_100718C.1
gggttgaggagcaaagactctttcattgaccgtgttctatttctgtacaactagtaaaatcgatgctatacactatgaacaacaatctgctgaggcacaggatctgctgataacatcaatagctcaagaaggctgtgcccctgtatgaagctaccaaaatcagcttactcataccatgcatgaagtacatttctcatacggtatcgagtatagaccatctttgtacacgtggagactgcagccactgcaactaaaagcaccagcaacgtttctcacaggaagatcatgacgcagcttgggcagcaccaagtttgttagctcctttgtccagtttcttttttgacaccttttgggatgcttccccttcttggttcttcactactggtttgaactgatatacagaataaataacattcctcctgatttgagccatcatgtctaagaaaagattatatccctcaagtttatactcaataaggggatctcgttgggcataaccccttaaaccaacagcttgttggacaaactttagtgcctgcagatgctctttccacagcctatcaatattgctg

SEQ ID NO: 788 - DNA, 1512 bp, Zea mays
  Clone ID: MRT4577_100719C.1
tcaaggatacagttgaaatggctgtcaaagaatggggagataaatcattaactgaactggaagcagaagagcggctgtcctattcatgtgagaagggaccaacacgtgatgaagtaatagcgaatttgagaaatgcatttgtgaagatagcagacgaatataaagtttacactgaggaggaaaagcagaaggtcattacagtaggtgggcttcacgtagtaggaacagagcgccatgaatcacgcagaattgacaatcagctccgtggtcgaagtggaagacagggggatcctggaagctctcgcttctttcttagtctcgaggataatattttccggatctttggaggtgacaggatacagggtctgatgcaagcaattcggctcgaggatcttcctatcgaatcgaaaatgctaacgagggctctagatgaagcgcagcggaaagttgagaattacttttttgacatcaggaagcagttgtttgagtatgatgaggtattgaatagccagagagatcgtgtatatgcggaaagaagacgtgctcttgcatctgacagtcttcaatcacttattgtggaatatgctgaattgacaatggacgacatattaggggctaacataggacctgatactccaaaggaaaattgggacctgaacaaacttatagctaagctgcaacagtattgccatctgttggatgacttgacaccagaattgttggagggcaaaagctcaagctacgacgatttgcgggagtacctgcgtaagcgagggcgtgaagcttacttccagaaaactgaaattgtggagaagcaagctcctggattgatgaaggaagctgagcggtttctaattctcagcaatattgataggctgtggaaagagcatctgcaggcactaaagtttgtccaacaagctgttggtttaaggggttatgcccaacgagatccccttattgagtataaacttgagggatataatcttttcttagacatgatggctcaaatcaggaggaatgttatttattctgtatatcagttcaaaccagtagtgaagaaccaagaaggggaagcatcccaaaaggtgtcaaaaaagaaactggacaaaggagctaacaaacttggtgctgcccaagctgcgtcatgatcttcctgtgagaaacgttgctggtgcttttagttgcagtggctgcagtctccacgtgtacaaagatggtctatactcgataccgtatgagaaatgtacttcatgcatggtatgagtaagctgattttggtagcttcatacaggggcacagccttccagtatatatatatatatatatatatatatatgctttcttgagctattgatgttatcagcagatcctgtgcctcagcagattgttgttcatagtgcatagcatcgattttactagttgtacagaaatagaacacggtcaatgaaagagtctttgctcctcaacccacactttttcgtataataatgtaattcattcttatcggcactg

SEQ ID NO: 789 - DNA, 849 bp, Zea mays
  Clone ID: MRT4577_10071C.1
gccggccgggtcaggaaccggcagcagtctagcgacgtctgttgggccaggaagcaggccagcggcctagctttgtcctccggctccgtcgccgccgtctcctctccctacatcaccagccggcagccgctgcccattctcctcaaccgtgtccgtgctcctccattgcgcaaatcggattgggccgccaccagctctgctctacctattttcatctcgccccaccgttctatgcgcctcagatcccagcctccacggggactggggccaccgtgacagcaacggtgtccagcctttcccaaccacgccttcgagcgcaccgggctcacagtcacaccgccgcgccctgcgactgctccgccgggagagccaactcttacgcctgctccgctcgctcggcgctcaagaccgtcgccggcgtggtcagcctcgggcagcagctgcaggaggtccgtatctagcggcagctcgcctcgtcgtccgggaccaagagtccaagacagaagcacactgaacgctcgcggccgcgacggtgtggaatctgaaatgtcacaatgtggagagacggtagtcatctccgggcacatcgctcaagcaaaatgccatcagctccactataccaaccaatttcagatttgaataacagtgttggatcaaatatgatgcacccaaaatcaagtgaggaagaggaagagatgggagaacgagacgcagcagtcccatcaagaatttaatccaagatcaatcacttctacagtgcatacatggcaagacttgaggcgttttaatggtgaatggagaagggacatagagttgtatcataacatcaggggacgattttggaaaatg

SEQ ID NO: 790 - DNA, 339 bp, Zea mays
  Clone ID: MRT4577_100720C.1
ccacggcgctccggaggtacgccgagcccaggtccgcggtggcggtgctgccgtccgcgagggggggcacgaagaggtctctcgtcgcacgccatccgctgcgactacatcggctacgccaccaacctgatcatggtgacaacgacgacgctaatgctcgatgtggggcggatcaggctggcgccgttgcggaaccgcaaggcgacggcagtgctgaagctggaggggagcgactccggcctgcagatgggtgagaccgccggcgtcaccgtcgccgacatgctggactgcgccgacgtctagcacatgctcggcgacgagcatcgtgctgcggctcaa

SEQ ID NO: 791 - DNA, 378 bp, Zea mays
  unsure (1)..(378): unsure at all n locations
  Clone ID: MRT4577_100721C.1
gcgcagcagcatgcttgcgacaagaacaagcgccgggtacggaagaggcattgtcaagcaccaacacacaangaccatgcatcgtccacgcggagagtgtgcatgggaacattcatgtgcaccaccactgaagtgaactgcgggcacctcgccgatggcatccatctcttcactgactatgtaccacagcttcccccatctggagaactgaaaggcctgaacttagcaaccattgctggattgtccaggggattgctccttgtgttcgaggctgctcattccgtgttatcttcccgtcacacatgcgacctgtcctatgccaccctacatagagaaagtgatgtggtgtccacttctagcttgaaaagagacatacag

SEQ ID NO: 792 - DNA, 918 bp, Zea mays
  Clone ID: MRT4577_100722C.1
gccggccgggccaggactgtcccctccggaccaagagtccaaaacccaaacccaagcacccaaatccgaccccaaaatgcctgcttctcagtgatgggatgacggatgctcccctcctgctgtagccccagctcgcgccgcctcgctttctcccttcgcgacgccggcatttcgtggccggcggcgccgccttatcctctgccattcttgtgggcaagataagcagcgggttgtttttctttaccgttgtttctgaaggtttcggggccagttcagccggatcccggctcttcggacgccgccgctccctcggcctggtggagctggtggagcggaggggaggggcgatccatacggaggtggcggttccatttcttgttttcctgattgcccaagcaactgtggacctgaacagacttctgtggtgctgttgaagaattagtgccactctcccgatggataaacagaggaacaccaagaatggggaagtggggaacaatgtgttttgcagaatgattcttgatcatattgctggggacttatgtctcaatgaggagaacgtgccttgcaatactccaagaaactccgttcactccgcgtttggtggcaggacagttgcttctactagcggcagcttcaatactgattcggtgagcccaggcgagtatgtcagggatcctggatccctactgagtttacaaccgtggatttttagaagaaacggctcacagaactacagggaaagtgtgcgcgcgagtggtaaaggcaagaatctggtcgatgtccttggagagggtcaagctgtcgaaatctctccaaggagcccttgtcttggttatgggcctgtaagaggctggggagctattatgagcaaaagatctaataggaatttgatgaagccacttggaccaagggaaa

SEQ ID NO: 793 - DNA, 553 bp, Zea mays
  Clone ID: MRT4577_100723C.1
gccggccgggcttgcatcccatcacactgctaccacctatcccttcccgtcaccgcgcgctgcgcgcattacactccaggagttcgtgcccattggtttactaccagtatctgtcctactggtccgaggaggcgaagccgctggccccggacggcttcacacgacacgctggcggcttccagcaccacgtcgtcaaggataaagtctaggaggccgacacggtctcgcgcgccggcgccgatcaccaccgccaccatggtcaccacggctgcctctgattcatgtcgcgcaataccagcttcgaagagtacatcaacacctgcaccaccgagatccacgaccgttcgtagagctccctcgcaccggctaattgctccgcccgacgatcgcgcatccacgtccgttcgtgcttgcctgcgtgccttctggatgtctgtgcctgactggttgtgcagactcatcgtacttggcgtatgcacgagctcgcactcagctcctgtacgaattgcgactattctctcgtgacctgaataacgcttcttcttaatactaa

SEQ ID NO: 794 - DNA, 362 bp, Zea mays
  Clone ID: MRT4577_100724C.1
ggggggcaacaaatttctttaaaaaattaaagaccccccaaaaatattatgggggccaaccgaaaccctcggtccaaaaaaaccacgggacacgcccaaaattaaaagggcaaaaccctatgggtacaaaaaccaaaaacaaaccctattgggacaaaattaatcctttttggaacaaaaaaacccttcatatttaaagcaggaattattggaacaacaaaacaacccccatagggaccaaggaaacaaccccgataaacccaccaaaagggcctcaaaacacccaaattccccattaagaaaaaggatcccccaaaaaaaccaaaagcctttaaaaacttaaaaatgaacccccactggtc

SEQ ID NO: 795 - DNA, 416 bp, Zea mays
  Clone ID: MRT4577_100725C.1
aaaaaaaaaaaaaaaaaaaaagaaacaaacaaaaaaaaaaaaaaaaaaaaaaaaaaaaaaaaaaaattttaaaaaaaaaaaaaaaaaaaaaaaaaaaaaaaccctaaaaaaaaaaaaaaaaaaaaaaaaagggtttgtcccctgggccggaccccccttaggggcgatttttgcaattttccttccccttgggggcggtttgaccttccttttagggggcccatttcccccttttgggggccgttttccatttcacgggccgctgtttaaaaccgtgggcctgggaaaacccctggtttcccccactttattcccttggggaaaaatcccctttttccccgttgggattttgcgaaaaagcccccccccgtccccctttccaacaattggcccaccctaaagggaaatggaccccc

SEQ ID NO: 796 - DNA, 1481 bp, Zea mays
  Clone ID: MRT4577_100726C.1
ctgttcactgttctactgggacgaccccaaatccccaaatcgaaaggggccgtccggctcagggtttctcgacggctccttgccctctccgccatggacgcacagcgagccctccttgacgagctcatgggcacagctcgcaacctaacggaggaggagaagaaggggcacaaagagctgaagtgggacgatccggacgtgtgcggcccttacatggttcggttctgtcctcacgaccttttcgtcaacaccaagagcaatatcgggccgtgctcgaggatccacgatccgaagctcaaggaaagctttgagaagtctcctaggcacgatacttatatgcaaaggtttgaggcagagcttgcacaacaatgtgagaaattggtaatggacttagatagaaagataaggcgtggtcgagaaaggctggctcacgattctgctgtgccaatgccaatccctggaaaattagctgagctgctttcagtgcgaaaagaacaggtgaagaagctgctggagcaaattgaggagcttggtgaggctggtaaagtggatgaagctgaggcacttatgagaagggttgacattttaaacgctgagaagacagctttagctaacgaagcagacaacaaagtagctatgcttgagaagaagatggaactttgtgaaacatgtggatcattcttagttgctgatgatgctcttgagagaacccagtcccatgtgactgggaaacaacacattggatatggtatggttagagatttcctggtggaatacaaggcggcaatagagaagtcaaaagaggaagataggcttgcaagggagcagaaagcagaggagcgtcggaagcagagaggaaaagagtatgataatgggggcagggatagagataccagaagggagaagtctggggagcgtgactatgaccgtgatcgtcagtatgagcgaagcagtggaagagacaggtcttatgattacagggacagaggatcagagcaccgaagcaatcgctacagaaatgggagggattccgaaagaggtggacacagatacaggagtggtggtatgacaaacgaccgagggagaatgaggagcagatcacgttctccaaccaggcatggctatggaagatctagaagtccagatcattagctgcctagctggacatttagatagttttattcacagttgggactcatgaggtagacagttcccttctgctatttattactgtacaatgggttttattgaagtgtcgcacttttttaagtctctgatctgttgtaacagctctgttggaaccctacagtctccctattttgcatggggaaaaaattctcaggtcggtatcaattttcattcccacaatttttgtgtttctggcattctatgtattctgaagctttgtttcgatatttggaatcggaagttaaactcgtaaggccggtactggacttcatgtatgggtgatgatggtttgc

SEQ ID NO: 797 - DNA, 309 bp, Zea mays
  Clone ID: MRT4577_100727C.1
cggtcttgaattcccgggccggacgacactttctctcaacctcagatcaaacacctgcttcattttagagctctatcttcgctaacataggatccgtgtcaaggatcaatgctgcagggatctgatcattcaatctgattaccagtacagtgcagaaactgttttaagaactttatctagagcatagactatctaaatctgtactaaaagatacacggatgtcacatctgcggaatataacattatcgttcttttcacgcatcactatataatctcatagtgagtctatactagtacataacgtcttac

SEQ ID NO: 798 - DNA, 351 bp, Zea mays
  unsure (1)..(351): unsure at all n locations
  Clone ID: MRT4577_100728C.1
ccggccgggccgggaatacataatacgangggccgtccggctctggcgtttctcgacggctccttgccctctccgccatggacgcacagcgagccctccttgacgagctcatgggcacaggtaagtacccaccagattagccctcgcccgaacggcgccgccccataccctaaccttcccctaatcgcgccgcaagtactgtcgtttgcagctcgcaacctaacggaggaggagaagaaggggcacaaagagctgaagtgggacgatccggacgtgtgcggcccttacatggttcggttctgtcctcacgaccttttcgtcaacaccaagagcaatatcggttcttttttt

SEQ ID NO: 799 - DNA, 1188 bp, Zea mays
  Clone ID: MRT4577_100729C.1
ccggaaaaaaaaaaaaaaaaaaaaaaaaaaaaaaaaaaaaaaaataaaaaaaaaaaaaaaaaaaaaaaaaaaaaaaaaaaccttttttttttctctatccgaattcccaggcaggcaggtcggcgaggagggcaggaagaccgaagaccgagccgtgcgggggctcgggacgggaacgggacaggaccccaaaatctcagatccttcctgcccgcccgcccgtgcccgtcgacgcgtcgttcttgccggccgcgcctcacctccgccctctcctcctccagggggatcggatacgccacaggctgcgcgatggtgctgtgggtcttcggctacggctccctcatctggaaccccggcttcgacttcgacgacaaaatcctcggcttcatcaagggctacaagcgcacctttaatctcgcttgcattgaccacagaggcacaccggagcatccggcgaggacctgcacgcttgaaaccgacgacgaggccatatgctggggaattgcatattgtgtcaagggtggtccagaaaaagagctaaaagcaatgcagtacttggagagaagagagtgtgagtacgaccagaagatatccattgatttctacaaggaaggagatcccttgaaaccagctgtgacaggcgtcttagtgttcgtttccactccagatccaattggcaacaagtactatcttggccctgctcctttgcaggatatggcaaggcaaattgctacagccaatggccctactggctataatagggattacctgttctcaatggagaaggcattagccagcattagccacgaagatgattcgatcatagagcttgcaaacgaggtgaggaaggtgctcaacagaacaaaggagaccaagatcactggtgccaatgcttccctgaaatcacatgcccctcttgtgcacctgtccgcgcttccagaaggcaccgttgtggactcgagatagcgagagccttggacgttggacctctactcggaatctacttccagctcttgcatgtttgtggttgtggccatcatgtactgattttcccttttcaacagttgtcgtgaggctgtatcttctggagttaaaaaaaatgctaaaagccggcactaataatgatattaacttgaaaaatctatcggcgatccttgaacttggaggacccccaaactctcaatttgc

SEQ ID NO: 800 - DNA, 856 bp, Zea mays
  Clone ID: MRT4577_10072C.1
ccggccgggagtttttgtctggcgtccttgagacgtgacgaaaatcgtaccaagtagtacttccacaccctaccagaaactaacacgaacttccctaccctacattatgtcccgatcgcatgccaatcaaggattggttgaagtgttgaaacgcccatgttctggggctactcaaccggtcgagtaccactcgaccattcgccgcgttgccatcccagaagaggtagcgcagaaagtgcattgttctgctcgcaaggccgaactacgccctttgccccgccctgtgggcactgtcactaaacaggcgcaaaaccctgcagagatgaaagggttagtcacgctcatctcaaaattggagaaccgttcggtctcctttatcgcccctgccggggtaggcaagtccactgtcttcccgtgggaattgcaccataacaccgctaccgtcgtagtggtgttgtcgcctaccgagttggccgctcaagctcatgttgaggaggtcagaaacatgggtcaactggccacttacgttagcccagcccgcatgagtatcacaagcctgaacaagtctatgggcgtgatttacactactgcagcgggccttataatgagagcgttgtccgcgatgaaggacgccaccgatctcgatgccgagatgactgttgtgcatgacgaaagtcatgctatggatgccgacggccagttcttggcgtcgatgtggcctgactacgacaaggtagtcaagtttataacagtatctgcgtacggcgttcccaagccgacgtcagagctgtatttccccgcagtcgaggtcgtatccgttcccttctgtgaagagcagctatcacgcccgccgatg

SEQ ID NO: 801 - DNA, 686 bp, Zea mays
  Clone ID: MRT4577_100730C.1
atcgtgggacccaactcccgctaaacctgtcacagccctcgccctgcctcctcgagctttgagcgtcatctccccccgcctcagccgcctgtgccccgcttcgcccccgcatccccaaatcccaacccaaatcctccccgaaacgagccggagtcggccggtctaccgtcgtctcggcacaccgatggggatccccaacctgctccgcttcatgaagccgttcatcgagcccgtgcacatcaagaagtacgccggccagcgggtcggcatcgacgcgtactcctggctccacaagggggcctactcgtgcagcatggagctgtgcatgagccccaggagcgccggcgccaggcgctacatcagctacttcatgcaccatgtcaacctcctgcggcaccacaaggtcgtgcccgtcgtcgtctttgacggcggcagcatgccttgcaagtcggccacggatgaagaccggcacaagaagagggaactcagtttggtgttggggaaagaaaagctgaagcaaggaaatacagctgctgcaatcgaccttttccggaaagctgtgcaaattactccatcgatggcttatcaactgattcagattttaaagacagaaaacgttgagttcgtggttgctccatacgaagcagatgcacagttggcatatctagctactctagatgctgatc

SEQ ID NO: 802 - DNA, 406 bp, Zea mays
  Clone ID: MRT4577_100731C.1
acaaaaagcccttaactgaaacaactaatgaccctcgcccggcttatatgtatatagcacggtccgacaaggcaatgcctgtgactgatgagccctactttggcctaagcaccctggagccagatattggatcgtatgagtcaacatatgttagcgattacgagggcgacaaggaataaaagctgaatgaaacaaatgctggcgaggggatggacgatgacaatacatttgcatgtcataatagggattcgcataacaccaggactggatgtgtacatgcgttgacaataattacaaccgttcaccaggatgacaacatgagaatttgacatgaggctggtgatacacgttctgcgtgtcacgtagcacatgaacaaatagaacatattgccgcatcctcagaagc

SEQ ID NO: 803 - DNA, 2749 bp, Zea mays
  Clone ID: MRT4577_100732C.1
gcggcccgctcgaggcccggcccgggctgcggacaaatccttctgtcctatcgtgctcgccgaaagaccgccgcctccaacggttcgacacgacgaccttcgctctctccgccaccgaatccacaacaaaagccagccatatccacttgttgattcggccggtccagaagaccaatgactacggacaaactagtggtttagctgcgcgcgcgtcctatctcttcaataatgcgttgtgcgctgctggagtttgaacgtagcggagatgtcgtcggcgatggtggagcgggcaaccagcgatatgctcatcggcccggactgggcgatgaacttggagatctgtgacatcctcaaccgcgaacccggacaagcaaaagatgtggtaaagtccctcaagaaacgcattgcacacaagaacccaaaagtccaacttcttgctctcacgttgctggagacgatgataaaaaattgtggggacgttgtgcatatggttgttgctgagagagacatacttcatgagatggtcaagaggagatgtcgtcggcgatggtggagcgggcaaccagcgatatgctcatcggcccggactgggcgatgaacttggagatctgtgacatcctcaaccgcgaacccggacaagcaaaagatgtggtaaagtccctcaagaaacgcattgcacacaagaacccaaaagtccaacttcttgctctcacgttgctggagacgatgataaaaaattgtggggacgttgtgcatatggttgatgctgagagagacatacttcatgagatggtcaagatagtaaagtaaaaggcctgattgatcatgtgtaaagagaacattctcactgtgatagatacttggcaagaagtttttggtgctgcacgtgcacgacattggctattgtgccatcataaaattaattattccttataataagggagaattgctggtaaccatcttcatcatttcatgaaattttgtttcaaaacaatctacttgcagtgcaatatttctaaattgtacttgcagtgcaagatttcaaatcaatctacttaccgtgccagatttcaggggcttagacaggatatcattgcagaccttgtggatcaatgccgttcttacaagcaaagagtagtgcagcttgtcaacagtacctcgaacgaggagttgctcaaccagggtctttctttgaatgatgatatgcagcgtgttctggcaaaacatgatgctattgatgcaggtctagcagttcgagtggagaagccgaaatctctgcagtcccaaattgggaagttcttcaacaagaaagccagataccatggaagatacaattcagaggccttcagcaagtacaactgccaccagtcagtctccctttgggattttagcactttctgcacctccatccagtagttcaaaagcacctgcaatacctgcttctagtatcgacctacttagtggagatgattatgtcaaacccgaacctgcaaactccctagcacttgttcctgtcactgaatattcagctgcagacaagaatgtcttagcttttgctgatatgtttgaacaaaatacagccaacaatagcaaccataaccttccatattcttttctatcttcgacttcaaattctactatctctacatcacacacatatcatgcaccggtgcgacctgtattgcctcagcattcagctgcttatccaaatggggccagatccaatgccattgtaccttatgatcagcaggcccaatcgaactctacaggttcgcggaatgggcaaacagcctatggaggaaatcaccaaaagcaagcactaaattatggcacaggtgatcaaaatggagacattccaccagcaccatggggaactaagagatccactaacccatttgacgacgatcagcttggtggaatggcagtgcaaccaaaaggcatgcaaccccaaccagtgcaacccagtcagcatgggaacaaattcatgtcagcaccaccaatgccgaggggacagccaggaagaatgcagttgcaacaggtgcctggtgctcagcttggcgctctacaaccaacacaggctacactgaacatgcagtacaggggcatgcatccatcgatgcaaatgaatcatggaatgggcatgtattcccaaccaacgttcggaggatattatggaatgaaccaaacacagctttacggcgttcatatgtctggttatggatatggtcagcaatctgggggctactatattccgaatgctgcatatgcctatactagtgcaaacgaacttgcccagaggatgaatgacctttcagttcaaaacggtgatccaaatggagccgcagcaaataagcagagcagacctgaggatgcactctttggtgatctcttgagcatcgccaagatgaagcaaaacaaacctgcagctggcaaggttggcggctaagtttgagtaaagaaggtacataattttatcttaattgccagcagcagaaacctttcctgacagcgcatataattattttgccacgttctatgcaatgccagatggcttctcgatgtaagctcatttggtagaaattcatattgggaactggagattaggatgcttgtggggagcctcatagcaaatatgtctataactctactatatatgaaattcttgagttctcagtagcaatatgtattgtcataatttccctctgcaaatattaaggcagaatcagagattcctgttctccctagccat

SEQ ID NO: 804 - DNA, 599 bp, Zea mays
  Clone ID: MRT4577_100733C.1
gaatgctccggactgtcttatctagctatagtagctcccttgagaagctttgagggaggagcatgtctgaggagaagcacgccgccagctgtttcgccaccgcgagccagaggaggagggcgcctccggtgaggtcgactacgagaagaaggagaagcaccacacagcacctggagaatctgcggcgagctcggcgccatcgccgccggagcgcacgccctgcacgagaagcacaaggcctaggaaggacccaaagaacgagcacgcgacaccggggcaaggaggagagtggccgccgtcgccgacgggggctccgccggattcgctttccacgagcaccacgcagaagaaggacgccaagaactccgcccacaactgatgccgtcgcgaggtgctgagtcgcatcatgttcttccagcctcgttcttcgtctacgtgtgtagccgggcaggactagatttgccctgccgatatctgactggacgtatgaactgagaaggccgttcgtcggcgactctatgattgatcattcaatcatgcacttgaatcaggtgggagtgcagatcatcatttgctgacgaacgaatgaactatatatt

SEQ ID NO: 805 - DNA, 303 bp, Zea mays
  Clone ID: MRT4577_100734C.1
gggaacaactaaactatttaataggggttctggacaaaataaataaatatttacatggtaacgaaacaacgttccagcaacccaaagttgactggaagacgacggcctaaacctttaacgaacacattggagaattcctccatgcgcctaatcctatggtacatgttcttgaccttaaacgagcacctgctcagaagagttcaccggctgaacccctggatcctttggggctggcttgtctagggtggaggtagatcagacgaggaatgggcgagggctaaacccgggggtgtttcccgaccc

SEQ ID NO: 806 - DNA, 3864 bp, Zea mays
  unsure (1)..(3864): unsure at all n locations
  Clone ID: MRT4577_100735C.1
atgccattaactcctaggcagaccaagcatttgctgaattatctttctcttgcaccttattttgctatcctgaatatgcttgattctcttttatgcagaaatcaatacgattcccaggttagacattcagaggggtcctgcttgcctgtggaaaatcaagttctctcaaatgagtgcttaggtgcattgttctcaagacctatttacggcgaacacagcagaacaatcctttccccagaaggaggtgcagatatgtctccctctcaggagccccaaaagcactcactgaggtcttccactgatgaatctactagagcaaccaaagaagttattctggagcatccaaagaagttattctcagagtctcatactaattgcattcatgctacagccttaaatgagaactttggtgtgcaaactccttcccaggttgcctcaaagaaaatcttcccagggcttgctcatggtgctgatacacctttaactggatatggttcagaacaaactcttttgcagcattcatcaaagaagttctcattggtttctgctaatggtaaatacactagagcagcggtgacaccgtttgagcaaaattcaactgaaagatgatgtgcctgtacttcgtatgaagggtctgtggcatccctacgctcttgcgggnnnnnnnnnnnnnnnnnnnnnnnnnnnnngacaaatggaaccccattgaagaatcactcaaagaattcctccttgcttatggacggtaaatataacataacatctgctgcactatttccagaacttgactctagtcctctgaaaccagaaacaccagcaatgcaggcagctattcctcgcctgaagcgagttcaggaagaccaaggtgtggatgccaacaaccaatgccctcctttgtgggccatgaacaagaagatgaaatcagctcattgttctattgaaaagaaggatcatgatgaaatggctggtagcgcgcgtagcaaatttgagtggctgaattcatttgccatcagagatgcaaataaaaggcggccaaatgatccactttatgacaagagtacccttttcattccacctgatgcattgagaaaaatgtcaacatctcaaaagcaatactggaatattaagtgcaaatatatggatgttgtcctctttttcaaagtggggaaattttatgagctctatgagctagatgctgagattggccaaaaagaacttgactggaaaatgactgttagtggggtgggcaagtgcagacaggttggtatttcagaaagtggtatagatgatgctgttgataagcttatagctcgggggtataaagttggaagaatagaacaaatggaatctgcaaaccaggccaaagctagaggagtacattctgttattgaaagaaagttggttcatgtgtccacaccatcaaccgcggttgataacattggtactgatgctgttcaccttctggcactgaaagaggtgaccctagcttctagcggtttccaagtctttggatttgctttcctagactatgctgcccttaaaatttgggtgggttcagtccaagatgatgactcgtctgcagctttgggtgctttgttgatgcaggtttctcctagagaattaatctatgaaacctcaggcatctcaaaagaaactcaaaggacaataagaaaatatgcctcagcaggatctgtgaagatgcagctgacccccctctccgggatagatttctctgatgctgcacagattcgaaatttaatacattctaaagggttctttaatgcatcaacagagtcatggttatctgctttggattgcacaatgaatcaagatgtagttatttgtgcacttggtggacttattggccatttgactaggctcatgttacatgatgccctgaaaaatggggaagtcttaccataccatgtgtacaaaacatgtttaaggatggatggccagactcttgtgaacctcgagattttcatcaacaatttcaatggtggttcatctggtactttatataagcaccttaatcactgtgtcacagcatctggtaagcggatgctaagaaggtggatttgtcatccacttaaagacattgatgctatcaataaaaggcttgatgttgttgaggggtttatccaaaactgtggactaggccctacaacacttgggtatctccagaaaattcctgatcttgagagattattaggacaagttagatccactgttgggttatcatctttgcttcaactgccctttattggagaaaaaataataaagaaacggattaaaacatttataatgcttatcaatggcctccgcaatggtattgacttgctaaatgatttacaaagagcggaccatggtatcttggcgctttataagattgtggatattccatcattgagctatcttcctgagttaatccataagtttgaagagagaatgcaaaatgagtttccatgtggccaggtttctgatgtcaatgccaatggtgccaacgatttggctgctctgatggacgtttttatcggaaaggcttctgaatggtctttggtgatcaatgccgtcagcactattgatgtgcttaggtcctttgctgcaatgacattgtcatcatttggtgccatgtgcagaccacaagttctgctgaaagatgatgtgcctgtacttcgtatgaagggtctgtggcatccctacgcttttgcgggaaatgcaaatagtctggtaccaaatgatttaacccttggtcaggatttatctggtctcaatcgttttgcattgctgttaactggtccaaatatgggtgggaaatccacaatcatgcgtgccacctgcctggctgttgtacttgctcagcttggctgttatgtcccctgcacgtcatgtgagttgacccttgcggattccatctttacgcgcctcggtgcaacagatcggattatgactggggaaagtacttttctcgttgaatgtactgagactgcctctgttcttcagaaagcaactgtggactcgcttgtcttgcttgatgagcttggcagaggaactagcacatttgatggatatgcaatcgcatatgctgtgtttcgccacctagtggagcgagtgcgatgccgtcagctctttgctacccactaccattctcttacaaaggagttcgcctcgcaccctcacgtgagcctccagcacatggcctgcatgttcaagccaaggagcgacggcaacggccagaaggagctgaccttcctataccggctgacctcgggggcctgtccagaaagctacggcctgcaggtcgccgcaatggcagggatcccgaagtcgatagtggagaaggcgtctgtcgcgggccaggtgatgagggctaagatcgccgggaacttcaagtcgagcgaacagcgagctgagttctcgaccctccacgaggaatggctgagggcggccctggcggtgagcgcgatggacggacaaccggacgacgacgacgtcatggacacgctgttctgcatccagcaagagctgaagtctcacttcaggaaggcgagatgagcattcgccgccgccgctgatcgcgtacgtgggagtactaattatcaatgcctagattcttcagtgatgtcgtatctttacaaccatggtagatataatgtaatccgcgttttttttccatggcacgaatcctgtactttaaacaaagtatcttgtgtatatatgttctgtgctatgtcttgtttgcattgggcatcaaggaccactatccttaatcacttccaccgtttatgtgcatcatatacatttgtgtttggtttgaggaataaaatagtttattatcttttcaaaaaaaaaaaaaaaaaaaaa

SEQ ID NO: 807 - DNA, 338 bp, Zea mays
  Clone ID: MRT4577_100736C.1
ggggtccaaaaaaaatccacatttgcatccacatccatgtattatccggtgggctccaaatccaataaagaatcgtgggttaggatatgggggaggcagtatccgacccattttaatccctatatgtcctatattcatgttaatcccggcaactgtttatacttttaggttcaggactggaaaccacatttcatgattagcgtcttgagcaaatttttggaactcacattttaatgttggtaccattttccagggccattccttttgcagcctgaagcagtgaaccaaagtttttgctcctggcgcttttgaacttccgggagcctgtgagataataa

SEQ ID NO: 808 - DNA, 398 bp, Zea mays
  Clone ID: MRT4577_100737C.1
cccacgcgtccggttgatttaggctgtttccctgtgcttctagtagcaagagtttttattcatagtattcctgtatggccaaactcaatgcaacaaactgaataaattacaagtgatgctgtttcgtcttgcatagattttgtatgttctgaaatgcatgggtactgaattacccccacagatatctctgttttggtctatgatgttatgttctcttgaaccagggttgtcgaaatggcagatcttgtccatactctcatgattctggctcattggtctctgcacctgtcacatctggaatatgctctcaagaaagcaaaagcacctcattgtgcgatacaaggttgcttcctgctgatggagattggcatattcttgtcgtgaatgacaaaaccctg

SEQ ID NO: 809 - DNA, 266 bp, Zea mays
  Clone ID: MRT4577_100738C.1
tgccacggatgcgtgcgccttgttgagacagttcgggacccatcgccgaaacccgcagatggaggtcgtcgtcgccgcgaagcagaaggcgaagaaacacatacacctcttctactgctcggaatgcgaggagctcgccctcaagatcgccgccagctccgacgccatcgagctccaatccatcaactggcggagcttcgacaacggtgtagaggacctgttcatcaacggggcgcaagacatccgtgggcagaacgtggcgtgcc

SEQ ID NO: 810 - DNA, 516 bp, Zea mays
  Clone ID: MRT4577_100739C.1
ccggccggacccgtcttctctccgcctcgcgcacccggttccgcgtgcctttccccacctactctcgcggctctcgccagccagtctagggtttcggtcccggcgtgcttatccgcccccgccggccatgtcgaagcaaggagggaaggccaagccgctgaaggcgcccaaggccgacaagaaggagtacgacgaggcactgaaggagcttaaggccaaggcacagaagggcgcgattgggggctcgggtctgaagaaaagtggaaagaaatgagactggtcacccgtctccaatacctagaggatgataaggcagctgtctatctgtgttgcgcttcactaagtgtgattgtaacagtggtacctcttgtgttctgtgttccgcgatgttgcagttggttgcttgatcgaaagatgtttcaacctcccatctgctagctatgatacagatggtcccctgataataatgatgacatattctgtgatggcaaaaaaaaaaaaaaaaaatttgcggcc

SEQ ID NO: 811 - DNA, 217 bp, Zea mays
  unsure (1)..(217): unsure at all n locations
  Clone ID: MRT4577_10073C.1
tacccanttctcttcacaggtccacttccttggagttcaactcaagcaatacaatacgtcaaagggcccaaattactcttgacaagacctttactaccacgtcagctgtcagcaggtccaatataaccaacattgacaaagaccctctattcagtacaaacaagcacaacaatacggttgcaattttcagacatcctcactcaccactcaaggatcc

SEQ ID NO: 812 - DNA, 201 bp, Zea mays
  Clone ID: MRT4577_100740C.1
acccctcgttcctgtcgcgcagccgcgacattccacattcacctactcccccgggcggcctgtcgcaggtccagtatcgaaatatcgcgcatgaccttccaaggcccaaccttcaggcggtacactcctctcgcacctcgcgaagttatatgctcccaacccgccatccctggctccagcaagcaaattccttagcttcga

SEQ ID NO: 813 - DNA, 468 bp, Zea mays
  Clone ID: MRT4577_100741C.1
aagcaactatctggattcaataaccattgcgactgttccttatttaacattggtaccggaggagaccaatcacaaacagcacagtaagtacagtatgacacgctactcatacgagggaagtctggaagcataggcacatgcagcctaaatactaggcgaacttggtaacggatcttggtgccctataacacggcatgcttggagagtttccccgggaggacgaggctcaaccaggtaattatctaacgggacgtgaaggcggactacttgttgtaacaggcaagcttattagactttggggtaagcatgtccaagatttctttcatgaagaaattgataatggatatggaacttaaaagaaattacgatgtgcaagcgcaactggtaaagcaccttgaacatatagatctagtataacctacattatctttcttggccttctattggcccctttttacctgggaaacc

SEQ ID NO: 814 - DNA, 1949 bp, Zea mays
  unsure (1)..(1949): unsure at all n locations
  Clone ID: MRT4577_100742C.1
gacccaccagatccgcccccgttttctcgcctcgcggtctcgcccctcgcacccgcccctcagctcccatgggctctcgccgtcgctgacactggggcccaacgctctcccccgcgtccgcgcccgcctcctccccctcaccctcctcctcctcttgttgcctccactgactctagccgaccgcccccgcccacgcgacatcggaagccctagctgctgcaggaactgccctgccggcccgccgctcctccgctcgaagcgtctccggtttcttggatgcaccggctgctccgatggctgcccttccgcccgccgcagaggaccccgacgccgtggagatccgtgaagtttgggcgagcaacctggaggaggagttcgcagtgatccgcgccgtcgtcgacgtgtacccgtacgtggccatggacacggagtttcccggcttcgtggtgacgccgagcgccgagtaccggttcacctgcgaccgcaactacgccgccctcgagggcaacgtcaacgtgctcaagctcatccagcttggcctcaccctctccaacggggcaggcgcgctcccgccgtgcggcacgggtgggaggcgctgcatctggcagtttaacttccggggcttcgacccgcacaccgacccttctagcagcgactccatcgatctgctccgccgcagcggcatcgacttcgacctctttgcggctgagggggtcgattccacccgcttcgccgagctgatgatgtcgtccggagtcgtgctgaacgacgatgtccagtgggtgaccttccacagtggccacgacttcggctacctcctcaagctgctcaccggacgggaaatgcccaacaccttggatgagttcctgaaactcaccaagaccttctttccggtgatgtacgacatcaagcatctcatgaagttctgtggcggtggcctatatggcgggctgagcaagcttggggagctgctcaagattgagcgtgttgggatcagccaccaggctggatctgattcgctgctgaccctgcagtgcttcatgaagctcaagcagttgtatttaaaggagtctgttaagttgtatgatggtgtgttgtttgggcttattcctggggaagtggagatcaaacctgttgctccacccattgaatgagttatggtagttcaataacaagattctgaatgataaaaatggagaacagagcctaccatcagtgaatatatagctgatctgatgatttctggtgcttgttatgatatgccttctctnnnnnccnnnncgagagatcgaattcggcacgagcctttccccacctactctcgcggctctcgccagccagtctagggtttcggtcccggcgtgcttatccgcccccgccggccatgtcgaagcaaggagggaaggccaagccgctgaaggcgcccaaggccgacaagaaggagtacgacgagacggatcttgcatatctgcagaagaagaaagatgaggaaaaagcactgaaggagcttaaggccaaggcacagaagggcgcgattgggggctcgggtctgaagaaaagtggaaagaaatgagactggtcacccgtctccaatacctagaggatgataaggcagctgtctatctgtgttgcgcttcactaagtgtgattgtaacagtggtacctcttgtgttctgtgttccgcgatgttgcagttggttgcttgatcgaaagatgtttcaacctcccatctgctagctatgatacagatggtcccctgataataatgatgacatattctgtgatggatgccacagcattttttgtttttgtttttgcattcagatatttcagcttccttatagttttacatgtcccaactaggaatgagaagtcattctgttggtccaatctaaattttatgtgtgttagtggagtgccaaagagagtggatatgtagaacaatggtt

SEQ ID NO: 815 - DNA, 817 bp, Zea mays
  unsure (1)..(817): unsure at all n locations
  Clone ID: MRT4577_100743C.1
ccggccgggaaaagattcccacttggacgggctcgcgtctcgcgcacgcagctttctactgccatcctccgtgtatgtatatatcgtcacgcgcgagccttgtcacccgtcttctctccgcctcgcgcacccggttccgcgtgcctttccccacctactctcgcggctctcgccagccagtctagggtttcggtcccggcgtgcttatccgcccccgccggccatgtcgaagcaaggtgcgttcctatccttgttggatccggtcattgtttggtgccgattggttgggtttttttttgcctatcgagggggtctgacgagacggccgggtccgnaccgaggtgggttttgctntgcaggagggaaggccaagccgctgaaggcgcccaaggccgacaagaaggagtacgacgagacggatcttgcatatctgcagaagaagaaagatgaggaaaaagcactgaaggagcttaaggccaaggcacagaagggcgcgattgggggctcgggtctgaagaaaagtggaaagaaatgagactggtcacccgtctccaatacctagaggatgataaggcagctgtctatctgtgttgcgcttcactaagtgtgattgtaacagtggtacctcttgtgttctgtgttccgcgatgttgcagttggttgcttgatcgaaagatgtttcaacctcccatctgctagctatgatacagatggtcccctgataataatgatgacatattctgtgatggatgccacagcattttttgtttgaaaaaaaaaaaaaaaaaaaaaaaaaaaaaaaaaggggggggcctta

SEQ ID NO: 816 - DNA, 2250 bp, Zea mays
  Clone ID: MRT4577_100744C.1
aattcggcacgaggcccactctccctcgccccggcatcgccatctccgcgccgcagccgcccgcccgccggcccagatcccaccggcgagccgcagcatggaccgtctccgggcgggaagccccgtctacgggcggcagcggagcggcagcagcacgggctcctcctcccccggcggcgtctccccctcgcaccaccgctcctcctccacctcctccgctgcctccgccgcgggcgcgcccggcacctccaacatccgccgcacgcagaacgtcgccgcgcgcgccgcggccgcgaggctcgcgcaggtcatggcctcgcagaacgccgccgcggccgccggcgacgatgacgacgacgatgactacccgcccccggctcctgggaggttcggaagtggaagagtggcgcacggcagcaacggcgtgtccctgcttggacgctccgcgagatctccctctcctgcggtcggaatattgtagagccacctcctacggcccgctcatcatcggcaggcaggccagctgttgcatcacgacccaccaccacagtggtgccgccaatcaaaaccaacacgacgctgcgaacaccgtcccctattccaccggtggctgtggagcctccagcggatcgcactcgaccgaaaagatttgatgcagcgcttcatagctcaagagaatcaggactgaaaagagaggcatctacacttcacgatgagcttgatatgctacaagaggagaatgaaagtgttctagaaaagttgcgacttgctgaagaaagatgtgaggaagctgaagctagagccaaggagcttgagaaacaggtagctgctcttggagaaatcatgtcattagaggctcgcctcttgagcaggaaggaagcagcacttaaacagagggaggctgcgctaaaagctgcaagagaatcaaaggatggcagagatggggaagtaacaacactaaggcaagaacttgagtctgccaaagaagaggttgcatcagcaatggaccagctaaaggaggcagagtctgaaacgaaggctctccgatctatgactcagagaacggtcttaactcaagaagaaatggaggaggttgtcctaaaaagatgctggcttgcacgctattggggcttagcagttcaatatggtgtgtatcccgaaattgcggtatcaaagcatgaacattggtcatcattggctcctcttcctcttgaggttgttctttccgccggtcaaaaagctaaggaggaacctcgaaaacaaggtgacaatgttcaagggagaaataaacttgcacgagaaatgagtgatgtaatgggagaaggcaatatagagagcatgctttcagttgaaatgggccttagagagctttcttcattgaaggtggaagatgctgttgtagttgcagttggccaacatcgcagacctagcatagttcgtcagttcacatcagatttcaaatcacctggtgaacctaaatacttggaggcatttgatcttagcccagaagaggctgaagatgttagctttaagcaggcatggcttatatacttctggagaagagccaaaactcatggtgttgaggaagatattgctgatgaccggcttcagctttggattggtcgcaacgcacaagctccaaattctcatgacgctatcgatgtggagagaggtctaacagagctgaggaaattgggcatagagcagcaactgtgggagggctcgcgagcagatatagatcaagcttctttggcgatggagaatcagtaagaattttccacggctgtctatgcttcgtgtatcatcccagttttggagaaacgggaactccatttcccagcaggtctcggccctttgcatcatcaggtatcacagtcacaggattgtgctccgatcttggggtgtgaccgatggacttcggataagttggagtagtgcatgtgcaagcctctcggctgtttgcattataaggtatctgagtcacaggattgtgctccgatcttggggtgtgaccgatggacatccgatgagtttgtgtagtgcatgtgcaagccattcatctgttgttattaaaatagctttgtgaaatgtgtaatagctctgctttggcaagagaaacgatggcaacgacgaccccacttccagcaattgtgaattttgtgattaaaaaaaattgtttattctccaaaaaaaaaaaaaaaaaaaaaaaaaaaaaaaaaaaaaaaaaaaaaaaaaaactcgaggaggggc

SEQ ID NO: 817 - DNA, 309 bp, Zea mays
  Clone ID: MRT4577_100745C.1
attcggctcgagcggggtcctgaacctggttgcccacctcgggcctcgctgacatggaggactaaaagagatggacggagcgacagaccggctgctgcctggcgggcaggttgactacaacgttgtgacgaaccttgagggaataatggtccactaagaggagccacggccgatgagcggaggactggccctaggggtctactaccgtacaaacgaacatgcttttgtatgagcggcctgcctgcctggctatggaaaacgagagtacccgggctttaactataataggtggctttgatgctagagaag

SEQ ID NO: 818 - DNA, 626 bp, Zea mays
  Clone ID: MRT4577_100746C.1
ctcgaggccggccggggtgctttcttacaggagcgatgttttctcctccccctccggttcgggttcaggatcagtcgaggctctccggggatcggattctgggccgactcgtatccagatcggccggccgtcagatgctgagaaccggtgcttcgccggcggcctcgcctgggccacggaggaccactccctcaacaacgcctatacagccacctacaggggaggtcctccgagtacaacatgatcctcgcatcgagcagacgataggcccggcgccttcggcttcgacaccttctccatagcatgaggcgatagctcaacgccatactacggcatgaaacgccaaggagctggacggccgaaacatcaacgttaaccaggaacaggtcacgtcggaggtccgtgcaatgcccgcgtgggcgatgtatcggcggcgctcgtgtgaggcttcgcctagctgctcggccggaaccgtgatgaggtcggcgagtacgtgggtgtcgagggcggctaccatatcttcagcgagtacggtgtggactacctcgggaacccgagcctcatccgcgcgcagagcatccttgatatctgcgcctgccaggacaagttcatgggggccgtcgagg

SEQ ID NO: 819 - DNA, 314 bp, Zea mays
  unsure (1)..(314): unsure at all n locations
  Clone ID: MRT4577_100747C.1
cggggggggccccctcgcggggggctccccgatgggaccctcgaaggcggccgggcaagcctttcacagaacttgagntctagcgagagtgcatcgagtgagtgatgtgattcacgttcacgtcagtgtttactctccccggccatcactgccccgcccggaacgccacggagccgccgaagaaccccgctggaaaacggcgctcatcgtggaagaccttatctggggccggttgcgtgcgcgatgtcggcatggaccgaactgagaagagccacaagagcccgctccaccatggctggtaactctactgcatc

SEQ ID NO: 820 - DNA, 216 bp, Zea mays
  Clone ID: MRT4577_100748C.1
gcacgagtttctagctcgctttgttacagttcagatttgagtgcgcgtaagataaacattagcagccatcttttcttatcatgttacatcttgattcctgtaaaacaaaaggtgttagaaaataccgcatagttaattagagaaagtgcaaaaaaaaaaaagaatgaccatctatttttgcagattcccatctgttcatcacctggaggacttgtt

SEQ ID NO: 821 - DNA, 333 bp, Zea mays
  unsure (1)..(333): unsure at all n locations
  Clone ID: MRT4577_100749C.1
ccgggccgacccacgcgtgcggagaagcaaaggaatgcaaatggtactcaacataaccttggaggacatgaancanaaaggcaaaaagttgttaagcaaaatgggcagagaaccnaatctattgctagacgataagaattcatcagaaggagctactaggcatccatgttcagacccccaaaaagctactttacctgttaattctattgcaacacctggatcaatacatactcagcatgaagtctcagaggcttctaggattttgcaggagttcttgtttggtgctggcagttagaggaaagtatgtgtgaactattctgccttttgatacct

SEQ ID NO: 822 - DNA, 343 bp, Zea mays
  Clone ID: MRT4577_10074C.1
agaggtttgacttcacaaaagggttgaatcaaaagttttctcttagccacagagaggctgtttcgaacccgtgacctggtgattcagtgagacagctctgaccactgcaccaggcctgtccactaagatcattacataacttatgctatattctcccgaatccaaagttaatgctcattgcaagggtgatgacagatggaaggcttaatgctcgcgtgaaatgtgatttgacagacaatctcacgctgaaagtaaatgcacagcttacccaagaggcacattactcacaaggaatgtttaactttgactacaaggtcgacgtttctgacaagtcagtcaattg

SEQ ID NO: 823 - DNA, 337 bp, Zea mays
  Clone ID: MRT4577_100750C.1
gtgactatcgctcacggcggtgtgctccttaatatcaaccctgttctgctgcccaagaagacggcggagaaggcgtccagtggcgggagcaaggaggcaaagtcgtccaagaaggccgccaagtcccctaagaaggcatatactgactgtccggagtgatctgatgtttagcagtaccttgttaccagtatgcggggatgcgttggctgcatatgggacaaatgtgcttgaatgtgtatatgtcctgctgcaagtttttcttttgctatttagaatgggaagaagaaatgccttgtttttcaaataaaaaaataaatggttggtcccttttttagga

SEQ ID NO: 824 - DNA, 222 bp, Zea mays
  Clone ID: MRT4577_100751C.1
gtgaaaccactgataaagaaggctattaattcaatgcaaactcaatcagccaagcggaaacgctacattcccaacggtcacgttgctataaacatgatccaccacttctctatcgactagaacatcgacactattcacatgtagcttgagaacaataactacttctacctttgccataaactgctcgactaccagactatgctcttcaaagaatgcatcatc

SEQ ID NO: 825 - DNA, 283 bp, Zea mays
  Clone ID: MRT4577_100752C.1
acaaaattttttttccccctttttattttttttttctgtggtgttttataaaaacatgagcggggaacacccaaactgcctaaacacaacggccgaaaaaacaaacaaaacccccagccgccaccacggccagcacgcacaccggcccaaaaaaccccatacaccaagggaccaacgaccaacccaggcaaacccgaacacacatacggccccaaacgcccaagccaaaatcagcgacaaacaacgaccgacggcacgacccggacaaacacgtgcacaggcc

SEQ ID NO: 826 - DNA, 580 bp, Zea mays
  unsure (1)..(580): unsure at all n locations
  Clone ID: MRT4577_100753C.1
gggtaccactcgggncctgccgggaactccgctgacccgctgatcctgccatccacagctgctgtgcaagcagacatatggcggcgcgcgtcgccagcctgctcctagccgaggcgctgcatcgtagacgtcgctggcgcggaggtgccgtcgacgttcgatcgcatcgagtgcccggagtacgaggtggcggacagcgccaatgggttctagtattcggtggatacacgtacgctatgtggatcaccacggtgcccatccaggactatctacttcgtatccgtcacgcgcatttggttagttcatgtgttcgactacatgcagggcaagaacgcgtactgcgagacgttagatatgacggggccggtgctgacgcgggtgtcaactaccgatggttcattgtgcgcctgcgtgttcatcatgaggttgtacgactcctgccaagaactagtcggacatggccgtcgtacaaaggcttgcgcatggaccgatgatgtggggcgacagactgaacacgatccacactagcgtggatggggggtccatccccatgtctgtggacaacaacagcagtggtggc

SEQ ID NO: 827 - DNA, 776 bp, Zea mays
  Clone ID: MRT4577_100754C.1
cagaagtttgtgttggaggagtgtaggaaatggaatctggcttgggttggcctaaacaaggttgctcctctagagcctgatgagatggagttcctgcttggctttcccaaggatcacaccagaggtatcagcaggacagagaggtaccgatctcttggaaactcgtttcaggttgacactgttgcttaccatctctcagtcctcaaggataggtacccacaaggcatgaacgtgttgtctctattcactggcatcggaggagccgaggtggctctccataggctcggcatacgcatgaacacagtcatttcagtagagaagtctgaggtgaacaggacaattttgaagagctggtgggatcagacgcagaccggtaccttgattgagatcaatgatgtgcagacgctgacagctgataggatcgaggcatatattagacgaattggcggctttgatctcgtgatcggtggaagcccatgcaacaatctcgctgggagcaaccgccaccacagagatggcttggagggcgaacattcttccttgttctaccattattttaggatcttggactccgtcaagtccatcatggagcgcctgtagtttttagaaacttttgatgttctggttcgtagaattgtagccgtctttccctgtgatcaaacttgtgaatgatttgaaggtcgactggtgtaatattcatgtcactctaatttaggctactttcgttaattccctcttgtgtccaatgcaaattgaaaggcaggtttcttttcttt

SEQ ID NO: 828 - DNA, 336 bp, Zea mays
  Clone ID: MRT4577_100755C.1
acgaagctggcttcattggaatatgcaccaatattggggaagctggtttttatcttttggacacatgctacaaatttttaataggctactttcttttgaagaacgaagctccacaactgtttttttccagtcgacactaaggtctcggtgagcttctggcgatagcacattgtaacttctgttcacccacctgtttccgaagatcttcaatttggcacttctgggcttcaatttgggcttaggaagtagctcacgcttcttttattttatacaccaatgaggttaaaatcagatctttgacaagaccctggttccttagttgaaacacttataaac

SEQ ID NO: 829 - DNA, 168 bp, Zea mays
  Clone ID: MRT4577_100756C.1
cccacgcgtccgcggacgcgtgggctaggcttctccccgggcctccgactccgagtgggacacgctgttctactcgctcctgttgcgcgaccaattcgccttcttcgacgcccgctccttccaatcccttgacaggctgttcaacgccttccccctgcagaagaaccc

SEQ ID NO: 830 - DNA, 258 bp, Zea mays
  Clone ID: MRT4577_100757C.1
gcagtcgatgccgtcgtccatcttccctgcgtgtccctgccggcgccgtcgacaatgccctgcgccctttctcgtcaggccgtgtcttccatggcggtctgcacggtgtagtgtaggtgtaggcggtgcgagaggcagagaaggggagaggaatgagcgacatgccataagaagttttaaaacttcatagcctcgagattttattgagctctggttgttcggtagagtttctgtggctggaaagcagtaacctttatg

SEQ ID NO: 831 - DNA, 450 bp, Zea mays
  Clone ID: MRT4577_100758C.1
ctatcaggtggcctaccaaacttctataagttaccacagaagatttgcctatcattgtagtagttatgtcagatattaatgttagagaatctggttcaagtgcagatcgtccttgcttgaacgcatgcctgtattagatgaagctaggtatctggtgaagcgggctactgctacacaatcaactatttcagcagataaaattgctccaacagtcactcctggaagccttaagcttccgaatggtgtagcaaaacccacctcagctcctttagctgatttgcttgatttcagttctgatggtgccccagcttccaccgttgcttctactacaacacctaatgattttttgcaagatcttctgggtattggtggagttagttcatcaacgacaggtgtaacttcaaccgcaagcacagatattcttatggatcttctgtccatgggatcatc

SEQ ID NO: 832 - DNA, 273 bp, Zea mays
  Clone ID: MRT4577_100759C.1
ctatgacgtctcatgcacacgtaccgccgcttgttatctctagagcggcacggcctacattactttttcatacgatgacccacactgcggctgcagtcgactaggatatgtatgacgaaggactcctccacatataaacgtcggccccaaacggccctgattactcgagaagacagaccacccactgctcaggattattattgatgatcagcgccgtctaccgaataaaggcgaacttactctcgggaacgcctggagcaccccatgatgctg

SEQ ID NO: 833 - DNA, 543 bp, Zea mays
  Clone ID: MRT4577_10075C.1
ctggtgcgagaggtgaggaagaggccctcgatgctccaagtggccatggcggggaggagaccgggcgcagccacaatggtggcggcgtcataggaggtgagcaaatccgcggcggcaacggcggagtggctgagcagggccacgacggtggtggtgcgcgtgccggcgacctcgccagtggcggcgactgggttgtccgtggcggcgtctagagcagaggcggacgggagctccatggtgcagggggaggatcggccggctgcgactgtcggtgacggagaagggtgggttgcggctgggtgcgccggcggcgggggggggggggaaagcgctcgatggctgggaaaagaggggtcgcggctgggggcgccgacggcggggaagaagttggccgcggctggggcgccagcggcgggggatatggtcggcgtctacaggagtgcagcggttgggggtgcgccgacggcagtgggggccggtggcctggaaagatcggtggctaggaaaggggtctggcggctgtggcaggaagagaggagagag

SEQ ID NO: 834 - DNA, 1305 bp, Zea mays
  Clone ID: MRT4577_100760C.1
ccggccgggagagtccggacgcctgatcggaaagcaacgtcgttgccccccccccccacctcgtcacgagtcagagagctacacaacaaccatcctgttcccgcccgcatacaggactctagctagctagctagcgttgttccgttgtggttgctctcgctcgctctcgttcggtcgatcatggagtggagggacagcttcttggacctggcgctcatcccgctcagcctgctcctccccatggcgtaccacgcctggctgtggcgcgaggtccgcctccgcccgctgcgcacggccgtcggcatcaacgccgccacgcgccgcctctgggccatcggcatgatgaaggacaacgccaagaacgcggtgacggtggtgcagtcggtgcggaacgtcatcatggggtcgacgctgatggccacgacggcgatcctcttctgcacgggcgtggcggcggtgctgagcagcacctacaccatcaagaagccgctcagcgacaccgtgttcggcgcgcacggcgagtacatgatggcgctcaagtacgtggcgctcatgctgctcttcctcctcgccttcctctgccactccctcgccatctgcttcctcaaccaggccagcttcctcatcaacacctcggcctgcctcttctcctcctccgccgactccgacgccgccgtcctcggcctcccgctgccgcccaccagggactacatcggcgacgtcctggagcgcggcttcaccctcaacctcgtcggcaacaggctcttctacgccggggtgcccctcctgctctggatcttcggcccgctcctcgccttcctgtcctccatggtcatggtccccatactctacagcctcgacgtcgtcaacctcatgggccacagcggatgcgtcgtcgtcagcggcaaatctgcggagatgaacggcgggagcgagtgcgcgcgtgccgtctgaagctgccggacttgtgtcctcaacaaaccatatgcatgcgatccgtacatgtgattcggttgagactgttgccgcgcgcaacggcctgtgatgtgtcgagcaccaaggagacggcatgttgttcgtcgtcgtcgttctctcattcatgtggggttataggctagccgcgcgccgtcgtagctgatgctgatgtactaggaaaaccttcgttgcatggatgacacggaacccataccccacgcggttcagttgctttgctgctcttggtgctcgacaagttgacagtgtgtgccactacaacacatattccaagtcggctttatctaaaaaaaaaaaaaaaatttgcggcca

SEQ ID NO: 835 - DNA, 261 bp, Zea mays
  unsure (1)..(261): unsure at all n locations
  Clone ID: MRT4577_100761C.1
gccggccgggccccatttcagtcttttcagaacgagattgcatcgagggaaactacagaaaagggagcccaatcgaactccgtggtgcactgggccctcccccttcctcacagaacggccgccgccgtgaagagatccgagcgaaagggcgtgccggcgtcgcctccgggcctccttcggncggcggcgccggtcgccactctaggggctactaaggagtcatacacatgttcaaaaaatacacgcagtcaacttttcagc

SEQ ID NO: 836 - DNA, 340 bp, Zea mays
  Clone ID: MRT4577_100762C.1
cgcgcgaggcgtcaaccacgacgtacacacggagcatgtcgtgcccgcctaagctcgacgacgcggaggacgccggcggggtgacgagctcgctgggactggagatggtcgaagccgttgctgccatggagaggtcggccacgtaccaccccatgaggccaccgctgcctccactgatgaatgagcgacgacaagattaggactataaagcatacactccaccttggtaatcgaactgcatagtacctgtgttgcagctgtgtactgtaccatacatagtgtagagtcattctgggagtcacttctgaagtcccgttcgtatacatataagttttttttc

SEQ ID NO: 837 - DNA, 267 bp, Zea mays
  unsure (1)..(267): unsure at all n locations
  Clone ID: MRT4577_100763C.1
aaaaggtggaaggaacatggctttacaatctaacagaagcttgagctcnagaactatgatggtctccctgcgggctctagacacactggctgattacccctccaatgttggcatgctcaacttccgggtcgcgtgtttatattgctcctcaatttctattgtaaaactcatattgaatgattgtgccactgctggtcccttgatgctatcatgtatgagctgcttgctgggtacatctcgattgtattgataggatccgacacctac

SEQ ID NO: 838 - DNA, 343 bp, Zea mays
  Clone ID: MRT4577_100764C.1
agggggcatttctactcacattagcggcgcccaaattatataatccagagtatataatctttgaaaactaagccagatcagataatgccacttgggggaaacaaacaaggcccaagtttatttggcgtgactcacattcggcttaggctaagcgctgtcgcacactaacagaaagactcgagcatgtgcgcttgcacgctacttgaaggagctcatgatggcgattacacagcggtttttcacatcttgcttcacacgccttgagagagcctcagcgatatagatcctcttaatgatctcacacgccggattgatattgaagggtgcacagaacctaaccatt

SEQ ID NO: 839 - DNA, 524 bp, Zea mays
  Clone ID: MRT4577_100765C.1
atggtcgatcgatcgatgatgaatgagcaactgagtaactgacgatacatacacacatgcagcagcgcgagccaacattaccgaacactatccacggtggggcctcctcctgcctagctcctcataattccgcaacggtttcgaaacaacggcaaccacctccccccaaaggcaccaaactgtattcaaggccggccggcggtcaccgccacatgcgcgcgccgacgaaacggcgcccgacacaaacgattcagcacctgcatctactgctgctacgagcatgctataggcatggccggccgatttaccgttgcgggttgcggctcgatcgcgagatgccatggattcctttctgttcatcctgcctgcctgcgtgcgcgcgattgcagatagacaagtagtatccatgcaattggggcaaagacgacatgcacggatcgacgtgacgcgagataggcctggacgaatcgaccggcacactcgtgccgaattcggcacgaggagagagagaactagtctcgcgt

SEQ ID NO: 840 - DNA, 369 bp, Zea mays
  Clone ID: MRT4577_100766C.1
ggttgtgtttttaacacagggaccaaattattttgttaaaaccttaacgacgacgacgaacaacgaccaagccacaccatggataacttaacttaacttgggagttttttttaggaccgaacgaaatatgaaaacgggggacgggttcctgtgggggggggaggaaagagggagggggcacttgtgcccggatcgggaaaactaaagaggtgcttttgacacacagcgagaggggggtgtttttttaagggagatttagaaggggggggtgtcattagaccaacaagtggtggagggatacgatctgatatggatggaaggacggacgctgagacatattaagtggggtaattgtgggcgatgtggtgg

SEQ ID NO: 841 - DNA, 233 bp, Zea mays
  unsure (1)..(233): unsure at all n locations
  Clone ID: MRT4577_100767C.1
gttgactctngtccacctagttcaccatcatgaatgaaagatcagtgagcaaccggcggtgtctttaagactaatcgactgtgcgccctaatacaagaaagtcgtatcactcgatagcaaacccgcacatggagtcaaactgaatcggacncattcaaccaactgagaagagaccattcacatgctcaatctttaactcaaacttacctatctatcaactcacatcagagcgc

SEQ ID NO: 842 - DNA, 263 bp, Zea mays
  unsure (1)..(263): unsure at all n locations
  Clone ID: MRT4577_100768C.1
cctgcagtaccggtccnaatacccnntcgggggcgcgaccattaactccagtcctgtgtggcaagcctccatgacacacatatctttggcagggggatggggggggggtcaacaaagcagggtggctcaaaacggactatactaccccaccggagtataagtttactggattaggggaagaatcattcggggacactgatttttgccctggatgcattaatatcatatctccatctggagaaggcttgggaacatctaactat

SEQ ID NO: 843 - DNA, 1033 bp, Zea mays
  Clone ID: MRT4577_100769C.1
tccgcggatcgtggactgaccacgcaccgcaccggcggcggggatcctgatccgcctctgctcgctgtgctcggccggccggccggctcaccgccgggagtgtcacctgcgcatttctttcagagtcggtcggcttgcaaagcaaagagacgatggcgccgacgacgacgctcatcgtcaccgtgaacctggaatgctgccgctgcagcagcaagatccagaagatcctctgcggcattcagcaagaaggagagttcaccatcgagaagatcgtgtacgagaaggacaaggtgttggtcacaggcccattcgacgccgacaagctgtcctgcaagctgtggtgcaaggcgggaaggatcatcaaggacatccaggtcgccaaaccaaaagacgaaaagcctaaaaacccttcatgcaagctggtatacccttattacccttgctaccctttccagctgtgcccgcagcagcagcccggtgcatggccctgcagcggcggctgcccacatcctcactgtgggtgccagtccaagccgccgccgccgccggttccaccaccacctccacctccacctccacctccgccgcccatgccgccggcgtgccagtgctccacgtggccgtcgtgctactgcggcggctacccgccgcccatgccgccgtcgtgccagtgctccacgtggccgtcgtgctactgcggcggctacccgccgcccatgccctacccgatgatcgtctgcgatgacagcccgccctatggcgcctgcaccgtgatgtaatgctgctgctactcttttccctgccgtaacaaattaaagcagggccggggtcatatatcgcagcctgtattcatgcctacatatatacgagagctagcggctctccattacctaaagaaaatgttctcctgtgtatttcattgccagtactgtatcaattagtatagttaccggtgtgtaccataaacctcacggcagtacatcaattatatgttgttttccgcccagaatactatatatgtttctaggaaaac

SEQ ID NO: 844 - DNA, 821 bp, Zea mays
  unsure (1)..(821): unsure at all n locations
  Clone ID: MRT4577_10076C.1
ggtaccctcggagctgccgggctgtgactctgtgagcatgtcccgagttcgccgccaggagccacctctaatggagactagtgagcagccggagcaggtggtcggatctcttccaccgcaggtaaacagccgcgcgcaggcccaagcatcgagtgctcaacagagggagcgggttcggcgctcgctcgtctctcccgcggcactacgtcctgttcctgctcccgcctccttccgttcagcaacgccgccatcttcnatcnntctcttcggacggtactgtttctgtacaagcccctgcttacttaacttacaagatcgccaaggtagctttgctttggtacgtgcgtgtgcgtttgttgctggtacataaattggtacagcaggccaagatctgttgcgagaaatatcagttgcggcctgacaatttcgtacaagatatcgtacgcacaggaagaaggacagtgcaagagcataaacgattgagccatattctgtacaagattggaatccaatttggaaggtagctttgctttgatactctgatttcaatgcacagttgtgtttggtgcctggcaattttgtatttttctcaaaattagtgtaaccgaaacatggacttggaggctatcacccgtacaacagtagactattgtgttcaggtttgtctagtgatgatgttgacaataattgcaatgtagaaggggaagatgcagtgtttgggttcaaatccctcatgtcctaatagtttggatggtgaaggagcaagtcttgagagcacntgcgggtggtgacaacaagagaatgaggaccagagcatcgaa

SEQ ID NO: 845 - DNA, 962 bp, Zea mays
  Clone ID: MRT4577_100770C.1
taatatgttgtctcctgcaccgatatgggaactctcagctgggtcagaaactgatgagggcacgtgtagttggaagccctccatgcggcgcgggggcgcgatgctgctcctgctcggcatcggctgctctgctgccgtggcccgtgcgtgggatttagctcaggaacccacgcctgacatcccctcttcctccccggccggcgatgtcgtcttcgtcttccgcgctggccaaaggcaagtcggcaatcggatccgcagccggatctgccaaattcgaggccaaggggaaattctcctcctcctcctccccagctgcggcagctaccaagcgtggaaccaccaccaccagcagcagaggtagaggtagagggaaggccgacaagaaggtctactccttgcccggccagaagttcgatcctccggaggagagggagcctctcaggattttctacgagtcactgtccaagcagatcccctccagtgagatggctgaattctggttgatggagcatggtatgttgtctcctgagagagcaaggaaggcatatgaaaggaagcaaaagcggcagcagcaagtgaggatgggtaccccaatcaagtcttgtgcagtgagaaaagataataaacctgaaagttccaagaagccaggcattatggattccaaggcaaagagaagagttgattacagtgacgacgacgacgatgacttcattgtgaaaatgaagagatccaggggatgacatttactttacttgtaattttttttattaattatatcaagtacagataccaaaaagacatgctttatataagctagggtcctaattaattaaaccctgcaactgtacccgcatgcatcttgaatagatatactgaggtttgcaagaaaaaaaaaaaaaaaaaaaaaaaaaaaaaatgtatgtgcaggggaaaaatttaatttgtctacaaatgtattctgc

SEQ ID NO: 846 - DNA, 467 bp, Zea mays
  Clone ID: MRT4577_100771C.1
tggaacctttgggctgatttatgtgcttgtagttcccgaaaagaaaatttattttattgctgtggcggattaggtggatgagtaggaacggtgcatgtggtgaggtggaagaagtgggcgggttgtcatgaggcgggttggattactggttagggtattcctgttaaggctaagcctgttgctgatgttgatattggtgtgtttgctggtacgaaagggtctgatagggagattactcctgtttattgtacgtcttattagactaaaagggaaacactaactacgaagactgcaagatactttaatacagctaggtccaacgaggcgccggtagggaagatgaagacacatacaactccggaatccgctatcggaggtgaatcgcccgacaaaacagtttgacacgggaagtcatgcgagaacgaagttaggaagcacccttagtagtccaccgacgttaccgacca

SEQ ID NO: 847 - DNA, 484 bp, Zea mays
  Clone ID: MRT4577_100773C.1
tattccgtcgcggcggagatcgaatcgagcgcccgccacggcgatggcgactagagtcctgccgccggctctgctctctttcatactcctcctgctgctctcgctctcagcccgcgacaccgtcgccgcgggcgaggatttcccacgcgacgggcgggtgatcgacctcgacgacagcaatttcgaggcggcgctgggcgccatcgactttctcttcgtcgacttctacgccccttggtgcggccactgcaagagacttgcgcccgagttagatgaagctgcaccggtgttgtcagggctgagtgagcctattgttgttgccaaagtcaacgctgggataagctttccgatattccttggttttggggtgaatgactcattgattgctgagcatggaaggaaatacaagaaaagagcctggcttgctgttgctaaagatctctctgaggacatcatggtagcctatgaacctgcacaagctccc

SEQ ID NO: 848 - DNA, 409 bp, Zea mays
  Clone ID: MRT4577_100774C.1
ttgatgctcaaggggcacgcaagacttggggggggctttgtcagatggggagcctaacttccacagacacgcctgtacaccgtggaacgcctcggcttagacaaccactttcgcgagctcatcggagctgccctggaacgaagcggatctggggagctgccagagcacgacggaagactgtacagtagatggcttcgaagaggaatattcatggagtacgagatatgggctaggggagccgcaacggccgaaatcggagaggacgcgggcgcgttctgctcgagcctcaagaacagctgccgtaagcctatccgtgagtttgtccaatgcggttcacatggcagtatcgtatgaactatgggcaagacgactccatggacttggataggggccgtctaaaggacatgat

SEQ ID NO: 849 - DNA, 326 bp, Zea mays
  Clone ID: MRT4577_100775C.1
tctgtgaggtccaactcgttcttacaggacttcaataattttagccctgctggaaacaaactccaacccggttaaaagtccttcgcatttgaagcatatgccgcgaactgggaccaaccaccagaccttcaaaagcaagacttcttccagcgacctgggctatatcggtagccattattgcaaggggaaaagtcctttgcctcctgggcatattccgcggaatggagcctattaccatcacttggtcatatatcacactattcctttctagtcctaagcatattcgctgaaatgggaagaaccactaccattagggcaaccatctc

SEQ ID NO: 850 - DNA, 305 bp, Zea mays
  Clone ID: MRT4577_100778C.1
aacacaggagacttacctacacagtatatagacagagccaaagaaaccttcacagacccaaatatggacaccagggttttaaataaccacactttttgactgggaaaaaaacagccctttcattcaatgggcaaaaacataaaatctctgcttgcatgtaaccgccttctgaagaagccgtacttccatctagccttccttaagcttaaaaaactgtaaagccgcgctagacagcctaacagttacctttctaaataactctgctcatgagtaaccatccccctagaaggggtgaacagatcccc

SEQ ID NO: 851 - DNA, 341 bp, Zea mays
  Clone ID: MRT4577_100779C.1
tttcagtggcacagcgaccaacccagaacccgacccaaacgcccgcaaccgcaagctcagattcattcccaaatccactgcacaccacacgacagatgatctcaacgatgactacattccaacaggcgagcgacaggggcgaccatccggatccagccatgtgcggagccactatcattggggacatcatgccggcggcgactccgccgcgggtaacgggtggacacctatggcccgagagctagcatgcgaggaggactccatccagcagtagattagcccccggggagcagcatgagcagcaggaggatctcgaggccgacttcgaggagttcgcggat

SEQ ID NO: 852 - DNA, 498 bp, Zea mays
  Clone ID: MRT4577_10077C.1
ccggccgggaccgtaccttcgcgaccgctcccttaaagaataccgagagcaccccacgaccaggaatagccgaagcgtggggaggagggccgccgtcggcatcctgcgcatacatgcccacctgcggtctggtggggagtcgcgggtgatcttgtgggtctgcctaagctatccgtgcccttcccgggtggagaaatccaccggtgcaccagtaattgctcgtcggtggccgggcgttgctctattatcgccctgcgtcgtggccgcgtcctctgctacatcgaaacacggtcaagagcaggtacaacaggatgaggcgcgtggaggatgctatgatgagttcgtgagtggtctaggccgtcgtctcccagtcaactttgggttgctgaaccgttgtctccttataatgtaattatttatttattttgtacaaaactctgattatatagtaaagatgtgacattcgatccgaaaaaaaaaaaaaaaaaatttgcggcc

SEQ ID NO: 853 - DNA, 812 bp, Zea mays
  Clone ID: MRT4577_100780C.1
tgggaccctcgaggccggccgggccgggttccccagaccccttcggtttctctctctaccgggtcgaagcccctctcctctctccccgcctcgtcctctcccctacaggatctagggtttgcttcgctcggccttcgtccttcttgggccgagccctaattcttctgccccgccaccaagcaagccgagcccccggtttggttcgcctccgctgcgccccgcttcctccccggattcttggattctattggcttctatcttcagcatgggtgagccaaacagcaatgataatgcaatggtgcatgacaatgagatgatcgatggcaatggggtgatccatggtagcgagatgattcatggtagtgtgatgatacatggagatgagatgccccatggcaatgagatgatccatggaaatgagatgatccatgggactgagatggttgaaggcagtgagatgatccatggtcatgagatggttcaggttaatgatctcatccacggtaatgagatggttgccgttaacgtcatggttaatggtgatgagatgccccatgttaatgaattcatcaatactgaggtgaccccgcggagacgtcggaagaagaagtcgcttgtttgggagcacttcactatagaacccatgccaggggggaactcaagagcatgttgcaatttatgcaagcaaacctttgcgtatagttctggctccaaaatcgaggcacgagccatctgaagagacacatcacgcttagctcctgccctgttatgaaagaatcagaccgcaggctaacactgcccctaacaggggg

SEQ ID NO: 854 - DNA, 861 bp, Zea mays
  unsure (1)..(861): unsure at all n locations
  Clone ID: MRT4577_100781C.1
cattgggtacctcgaggccggccgggatggctctaatcatcaactctccccgaagtaggaaccgtatgtgtacaccagcctcgctgagcttcggggtcttttgcgatatcctaatataaaaaaactacagactgcacgtaggatcatgctcacagggtcctccgacacgtcctgtgccctctcttccacctcggccatcggcgggaccttgcgcctccctttaccatgacgagctcgcacccgcagcacctggtagttcgtcggccaaatcacacctgaaatcgccctaaaaaatggacttccccctgccagtgcccccgtcgcgggtgcacaccgagaaagagcttcggaggcagatgccgcccttgcagacgacgtcaatcaacccctcgagctcagcacagtcgcgtccccagcaagcagtcttcaagtctcccatcgccgacatgctgccggaacaagccgcggtccggccgcctgcttcacctccgacccatcagcgcttcgtcttgaccgacttggtggctgctcgctaccttgaggagggccctgccacaacatgccacgtccttgcccgccgccagaggatcgagggctacgagatctacctggtcgagcaatgggcctgctcccgcacccaccccacttacctcatcaccacctacacgggtaatcccgaagactctgtcttggccaccattataagcgtacccagtaacgaggatgaatggtccccccaaatgcgcctgtacttcaagtctctcgncgactgctatgcccggagaaaggaaacgncctatggcaccctcatgatcaccaatctcagcggattcccctctttcctgactggtattcccatcc

SEQ ID NO: 855 - DNA, 449 bp, Zea mays
  Clone ID: MRT4577_100782C.1
ctctggaaagcgaaagggcctctagactagtggttaaggcttcggagtagcaccacgcgagtgccgggcttgattcccctcgagggcggattttcgggcttggttaaaaaatctcctcgatgtgcctcattcgctctcgggttacgatgtcctgtgcgccattgtttcggttgacgccggtccgttagtaatttgaggccagggttcggggattttctcggctgggactattgtttcggtctcttcttaatgttataccgggagggtggtcattccctcggtcgagttattattctctggaaaaggtgcaacactttaaccatgtggtttgcttcatgtggatgtcctggtttgggtaggtgtgacttgtgagtagtaaaacttttatctgggtgttggaattgtagccatttggtacattatgaaaatatttcttgccttctagacct

SEQ ID NO: 856 - DNA, 508 bp, Zea mays
  Clone ID: MRT4577_100783C.1
ggttgggttgggttttttttttttttttttttttttttttttttttttttttttttttttttttttttttttttttttttttttttttttttttttttttttttttttttttttttttttgggccgaaacccggcccctttttccattgggggggaggggggcccccccaatgttgggggggggggaaccccgaaaaaaaaatttttgttcttggggggcccccggcttggggttaacctccctttcggcccccccaccccaaatcccccctcccataatccatgttgtagggcccaagggggtttccccctcaacttggtttccttgggcccctcaaaaacaggatggccgtttttgccctaaacccctttctttccccccgtggcccttggaaaaacaaatgggcccttaaagctcactttaattccccccgacaccccgaaattccttttttattgttttcaacccccctttcaaatttggggttccgaacctcgcctgggcccc

SEQ ID NO: 857 - DNA, 786 bp, Zea mays
  Clone ID: MRT4577_100784C.1
gaggttggccgggatataatctttgcgatggctagaaattgctggggctaaatacagtcttccatcgtactcctttcatcaaatttaggttatggccatgtcttattcgtatcattggccatgatctatttgactctctactcataattattctgacaggtagagtctctttgtatattgtcacccttgctcaatccatttgtctcgcgcgagatgtcttattggttacgtctggtaatggtgttatgactaaaaccgatggtgccgcgatgaaaccgagggcctcctgtgaatgtacacacatggttgtgctgctcggcacgcgctggtatcacggcgagtagttgtaatccattatgaggctatatcaatgtgttatcttggcacaatctagttttgtcatgcggaatttttatcggtgatgttcgataatggtgtcacgattaatgatttgtggtgccgccgcgaaactgagagccccttgtgaatgtacacgcaaggttatgctgcttggcgcatgctggtaccgaggtctctggtcatgatccattgtggaactacactgatgtgtgatcttccgtggactcctcccttgaaacgatttttgtgttgtttgctgaaacaattaaataacatatgccatcactgttggatcaaaagagtatataactctgatgtattccttaagtaaaatttttaccagttcgtaagttttaaaaaatattaaacctatctgtatttaattgtgtggtatattctcccctttatttatgtatttttttcttt

SEQ ID NO: 858 - DNA, 254 bp, Zea mays
  Clone ID: MRT4577_100785C.1
ggccttgtgtcgttttatttttttgggcaaaaaaacataggctttaaagcaaaatcaaggtgttgaatgaaccttttcagggaaccgcttttgcggtcgaacctgatattgttaacactgatctggcggcccaatttaaggccggggatttaccatcaaccaagtaacgtgaacacaaagatgcgaggcacttaagggggtgacaaatgcgagtctgccgcaccttttaggggtaccttgctcgcctgtgggga

SEQ ID NO: 859 - DNA, 1671 bp, Zea mays
  Clone ID: MRT4577_100786C.1
cgtgccctgtacaacgagatccggagcatgaaggtccgcgacgtgccggcttacctgagagccgcgcttgacctgtgacaacgtcaagaagagcgccgaccaggccgtcgaccgctacatcgagaagtacatcgacacgagctcgccggaccctctctaccacgtctgcatcggaggtcgtcggcatggaccccgagctcgacgagttcatggtacgcacgctaaaccaggtgttctgattcttgtgtcgttattacatgtgaccgtggcgacgacgacggtggctgcggcgcgcaggagacgtactgccggttgctggagcggtacaaggaggagctgtcgcggccgttcgacgaggcggcgtccttcctcagcagcgtcaggacgcagctcagctccctctgcggcggcgccgcatcgctctccgatgaaatggtggagtcctctgaggacgagccatgctcaggcgacacagatgcgacgacagacccagggcaggagcacagctcgcgcctggccgaccgcgagctcaaggagatgctgctgaagaagtacagcggctttttattatatggatgtgtgcacaggtgcacgtagataggtagaatagaagggagattatagctagctagaggcagcgagcagctcggttgctgggacacgcgatcgagctacagcaaagaagactgcagggtggcgcggcgggcatggaggatctgtacagcatccacccggggatctcgcgccacggggcggcggcgactagcgaggcgtccggggtcgccggtggaccgggctcacccccgcccccgcccccgccggcggcggatctgacggagctggtcaaggcgcagatcgccgggcacccacgctacccgtccctcctctccgcctacatcgactgccgcaaggtgggcgcgccgtcggaggtggccacgctgctggaggagatcggccgggagaggtgcgccgccgcctccgccggcggggaggtcgtcggcatggaccccgagctcgacgagttcatggagacgtactgccggttgctggagcggtacaaggaggagctgtcgcggccgttggacgaggcggcgtccttcctcagcaacgtcaggacgcagctcagctccctctgcggcggcgccgcctcgctctccggagatgaagctatccgtgatcagttcagcggtttgctacagtaagcatatagatctggttttataatcagttcgtctttttaattgtcatctaaaactcggaaataaaaaacccattaataataactccccgctcacatgcatctcaatctctccggccggtcgccgacgagacgagacgacctgccatgccgccattgtggacatgcatctttgcggtgcattattgctgttcttgtgggaactgtgaactgtgaagcgaagaaagctagcgcgtgtgcgactatagaggggcgactggcgaggatggatactagctgctttgatgaatgcgtgcgcgtgtgcgtgttcttcttgtgtggtcaaatcgtgtccatgcaaatggggtgcaggagtgtcagacgccggggtcggatgagtaaagttttgagcgtgtgcttcgtgtaagacactctccagcaggatgtaaaataggagacttatgatatgggatctaagttactgtacaccaacc

SEQ ID NO: 860 - DNA, 214 bp, Zea mays
  Clone ID: MRT4577_100787C.1
ccatcctaaattcccgcgtgccacccacacatccaattcttcaaaatcaccttcatacacttttttttttccaacaacaacaaaaaacctgtctaaataataaactttcttgccttacaaacacaaaacacctcctcctcccataccatcattcctatcttctcatttaaacaacttctccttcgctccataaaattttttttttttattacta

SEQ ID NO: 861 - DNA, 571 bp, Zea mays
  Clone ID: MRT4577_100788C.1
tttttttttttttttttttttttttttttttttttttttttttttttttttttttttttttttttttttttttttttttttttttttttttttttttttttttttttttttttttttttttttttttggaactggccgctcctttttggggggggggggggaaaaggtttttttttgttggccccaaagggaaaaaaggggaaaaaaaatgggggatttttaaaggaaaaaagggggccagcctaaaaaaaaaaagggggggaaggggaaaaaaaaggggggggttttaattaaaaaagccagccgggggttttaaaagggaaaaaaaaaaggggggttttttttttgaaaaaagtgaacaagggggttgttaaaaaggggtcccctttaaaaaaggggttttggaacccttttcaccaggggctcaaaatccaagcccaggggtacaacaaccccccggggaaatcctccctttttggccaaaaataaagccccccggacccgggggttaacccggaaatttggggcggggccctggaggggaacacattttcttttaagggggggcatt

SEQ ID NO: 862 - DNA, 454 bp, Zea mays
  Clone ID: MRT4577_100789C.1
ctagggttttctttgcacactactcgctccaatgggaaagggaacagggagtttcggtaagaggaggaacaagagtcacacactctgtgtgagatgtggtcgtcgtagtttccacatccagaagagtcgttgctcggcttgtgcttacccagctgctcgcaagaggacttacaactggagtgtgaaggccatcaggaggaagactactggtaccggaaggatgaggtatctccgtaatgttcctcgtcggttcaagactggattcagagaaggtactgaagccaagccaaggagcaaggcatcagcttcatcagcttaaagagccagttcgagtagtctctcaggaaggactaaagcttagcattttttgcattcaactagttgaagattacttttcatgtggatctcatacattatgttatgtgggttttgtttcttttgttattcacttaat

SEQ ID NO: 863 - DNA, 381 bp, Zea mays
  Clone ID: MRT4577_10078C.1
gaatagggaagattttttgcttgttttttttgtttgtttttaaattttttttttttttagattttttcattttggtttcttacctggttgattttttgcagtggaaaaaacgggggcggcacttttggcaacctgcgaccagaatgcgccccagaactctaacacactgggaacccaaacccgaacaatgtggccgaccactgggcaacggccgctgacctggtgttgtcgcgcccatacaacattcgtggggtttgacggcccccccggacctgttttaagagtgggcgaaagacttgggcggccgctaggaaaaaccgggccatttggggccgcaccaagcgggaaataatacttcacctggggggaatccccggggcc

SEQ ID NO: 864 - DNA, 443 bp, Zea mays
  Clone ID: MRT4577_100790C.1
gggagaggtcctaaagaaaacaggaaattctccaaagatataaaacccccccccccgaaatctggaaaaggatttttcccttgccatcccatttccttccactggggtgatactaaccccaaaaggtcaattccaggaaaaaaaaaaccccaaaggggttccagggctttttggtgcccccaatttgaaccattatactggaccctttttcgggtttggaacccatttaaagactttttctggatggggcccaaaatgaaggggaggggcccattggttttccttctttgggcgcaaacccacaaaaggccctttccgggccacccagggggcaccccccccaccctaacccgggaaaaagggggaccaagggggggggtggggccccccgggaggggacccaccggggggaacgagcccgcgtttttttttatttccaaaaa

SEQ ID NO: 865 - DNA, 200 bp, Zea mays
  Clone ID: MRT4577_100791C.1
ggacctttctcagaccgatttgatctcctacgtcatctgctcgttcaacttcgtcacgggtctcacgcccgacagcttcagcccctacatcatctacatggcgactgctccctcggacgtgctcgccgttgagctcctgcaacgctattgctgcatgcgccattctctgcctctattgcctctgttctagaggctttcct

SEQ ID NO: 866 - DNA, 387 bp, Zea mays
  Clone ID: MRT4577_100792C.1
gggaaccactgcctcgcagggctttttatcttttttttttgtggcaaagggcgcttaagggatcttttttgccacctgccggtggggaagcccccggctgcccaattcccggggggggggctccatgggtttccctttccggctagcggggggcctgcaaaaaagggtggggggcgggggaacatcccccggttaaaacatgttccctttgtgccttctggggggcggggcttgctgggttttaggccagttgcttgctgggttttggatcggtacacaggcctgccatccccatccgggatcattgtcttgtaagccccccccttggggttcttgggcaacacatgccccgggtgggggactgttttttccaacgaggtcggccct

SEQ ID NO: 867 - DNA, 295 bp, Zea mays
  Clone ID: MRT4577_100793C.1
caaggggaaaggggtttttttttacaaacaaatcctttagtttgaacgggaacaaatttgtaatgtttacacattacataatagtcggaaaattgccacggtttgtgctgaatgaacaaagatgggcccgccgttttgcccaaaaattcacctccaaaaacagtgtttttgtcccggggcctgtccggactttaagtttataaaaagatcacagatggggtcttaattttgtgacattccttaagtttttagcttgaaaatggccccgggtgaaggcaaagcttcaaaatgcatt

SEQ ID NO: 868 - DNA, 2400 bp, Zea mays
  Clone ID: MRT4577_100794C.1
atctctatcgatttcctctctgctctgacggctcttgggaaaccctagccgtcgggcgccctgggcaagcccaccggaggacgccggagccgaaggggagtcgcaaacgcagagatccggctacaacgtggctttcccgaccggttgtggcggcgatttcgcatcacatagatccgctcgtggccttcccttctgcgcggtcggtggatcctctggagctccgctggcgccccgagcagggctctctcggcgtggagggcggaggcaagggacgggtgtggcagcggcttcggccagcccacggctcccagcccctggcgggcagcactcagtccctggcggcgagctcgtattcccagaccttgcctccactttctggtggttctagcagcaattcgatttctggtgagaaatttcactccgaagatggttcaactctttttgcaagtgccggcagaatgcggcagtgttaatacagttgtcgtggaagggaggagatctctttttcacaatgttgagtccataatcaagtcattgacaaaatcagcaggcaggtatgaagctcggctgtggctctgtgccactgtctcgttggtccattcgctcagtgactgtggccagagggacctgtttcttgatctcttagagaggaagaattccaggcgtgatgtcgctgctcgcttgctgcgtatgattttcgataagaaacccagaatggttgggtctattctagcaagaaaaggccatatactggaggatttcttccgaggaaatccaaacaggataatgcagtggtttggccactttgctgttactggggaatccacacatagaaagggagctaaggcactttcgcagtttgcatttgtaaatcgtgacaggtgctgggaagaacttgagtggaaaggcaagcatgggcaatctccggctgtggttgctaccaagcctcactattttcgtgatcttgatgttctcgagacagtggagaatttcttagagtatgtcccagatttctggtcttctgatgagcttgctaattctatcaaagatggtgaaatactgcaaatcgatgaagaatattttgtagatcaatttttatatttaatgtatgaggagaattccaaagatgcatggcatgtggttgaagattttttgatggacgagcagttctcttctctttgccagcatcttcttatccatctggatgaggaaaggcttcttggtttcttaaattctttaggcaagctcatcaatcctactatgcagtgcaaggaattgacattcccgtgttgttggcttgaagttcttttatcaggacattatgatcacatatctcttgatgatcttgtctttttgaactgtgtcattgccaagggtagacaactttggcggctcatgaacgatgaagaacaacacgaagaatgggggcaaatggaagaacttttgaagggcggaaaccatttgactgatgctgatcattttgctctcatgaaggaacttgtggagacagaattacctggtgtgcttaagtgggtaggcattcagtcctggataattttctgtgaattgtcgaaagaatgcaaatcaggagattcttgtgaatcttttttctctcataacaaaatagaatttcacaaggctgatgattactcattggttcggaattatgggttctcaatttcacatatgcctgatattgatgttgaagatctaactagaagcagccataaaaggagaaagaggaataggagaaagcgccataggtacgagtctgatgaggacaagtttgatgaactgcttgaacttggatcatctgatggaaagaatggtgttgagtcacagcgtggaagctggcgcctttcaactgatggtttctctgcttcttgggacatttcagacataccagatcacctttctacttgttatttcacaatttgggtaaagtgggcttgctttagatgattgtctacacagtatgtgtagtatatcaatctgggtgccttttcagctacagaatctatgagcatggagctcaggcaggcatatttctgcactaattctgcaacattttggtgatgggttctgatgatgcattctgggattgctgaacgctgcatgagatccaggacaactctctttagttgggatgctgaaggttgacacctgttgaagaattttggttgcataggcattgaatatggtccaggcatttccttgaaacccatttggactttggagttagttgtagagatctcaggtattgactaagctaagcaaaaacgagtttgtaattgtgttgtccagtgctagcgacattttgccaactacacctgttgtaaatataccagattgttgctgtgaatttgacaaccttaaaggaattattatactcttccagct

SEQ ID NO: 869 - DNA, 600 bp, Zea mays
  Clone ID: MRT4577_100795C.1
gagaaaaatacttaagttttttttcttcaaaaaagcccatacacaaccggagtatactttactagtatacgtaacaaagccgtactatttcgcatggtatatatatcaacgtatatgtaatgtgttgaagctaagccggcctcagacgatcatgcaggtctatgaccagccgaacttgaagtcaaggacgtagacgacgacgagggacagcggatacagcaggtaggccacgacacacgtccagagggggaaatctgtccggaagctggtgaagaggcccattatggtgcagacactgaagatgatgaggacctctgagctgaaatcccacgtcaaaccccgcacgtagacgaggcccaagaacacggccaggcagagcgtgttgttcatggtcaccgcaccgtagacctgcgcttattaacacgatggcatcacgcagtcaaacgggagtctttgaaactcatggcacatgcaaaagatgcagatttagatataaacctcagagaatgtaagtgacagggtccgctgcttcttccggctagcaaatatgattgctgagacagcctcactggaattggtagccaggggcattgcaatgaa

SEQ ID NO: 870 - DNA, 284 bp, Zea mays
  Clone ID: MRT4577_100796C.1
accatgagcaaccagcgctacatctggcgcgatagacagtgcgtaggcccggtgtctctgtcaggcgatgtctgctggtccttctcgttatctaaaacgcattcatgctctatgatagctagtcatcacgatacatatatgcgtgtgcgtgcgtatcggctttcgcggtctgctgatctgtgaggcaatagactccgacgtatcagttgacctatgctatgagatgagtagcatatatatgccgccactcctagtacctagtagtgcctagtcggtgatcgtat

SEQ ID NO: 871 - DNA, 366 bp, Zea mays
  unsure (1)..(366): unsure at all n locations
  Clone ID: MRT4577_100797C.1
ggagtgctcattgctcattgatgattccatgggaggggattagcaaggtttaggataacatctgagtgttccactttgaggtggcagcaaatatgtagaatattgtagtttaggcgcatcttaggtccaaagtccaaatggcatctgtatcttgtaacattaagtggtactgtacagtgcccgaggtgagtgtatctcaacttggtgagctgaatttcacgttcgatcatcattatgacagtttgaatttattcaaatcatcattatgataggatgaaaagtattcaagtgttcaaatnaaaacatagaaacaagaaaaaaccttaaaaaacctttctcaatgccaacaaaatgtcctgggttggc

SEQ ID NO: 872 - DNA, 516 bp, Zea mays
  Clone ID: MRT4577_100798C.1
ttcggagccccccctagctctctccctgtctgtcaccgccgagtctctcgcagtctgcctctcgctctccctactgctctcgctgcggagtccggaccattccctatcctctctctctctctctctctctctctctctctctctctctttctagcagtctagtagctgcgactagcactaccaccaccaccacctgcaccccgctgctgctgctgctgcggcggcggcgggcttcgtcctcgggttccccggccagcagcacccttcgtcgccgacgtcgccgtcgccgtcgccggtctacgccgaccggtggcctgtatgtccggaccggcggttctgagttctggttagggtggtttgacttgcgtaatttgctggtgatgaggcggggaaggctgccttgtctgtctgtacgtgggtgtgcgtgcgtgagaggctggttgatggaggacgccggcatggaaatggcatctgtttccttctcttttctctgcctcgattttcttgtttcccgcg

SEQ ID NO: 873 - DNA, 360 bp, Zea mays
  Clone ID: MRT4577_100799C.1
ttttggaagactgccggtttattttttgcttaaaaccatagaacacacataccccctgaaaactagcccaaaggaaaacacatacttcaaacttagaacaaattttgttacggggtattccaccaatgggagggttacctaacacttacaccttggaacggggggtcacccccaaatttttcaaaacaaactggtttattccgtgctatcaaaccatggaggtatcaaactactcatttaagcctggcaagctgcgtgcggatgagcttggtggccaagaccatgttggatagggcgggcttgaccttcaagtacttgcgtgacttgagaccaaagtcagggttcacccacaggatgttg

SEQ ID NO: 874 - DNA, 1001 bp, Zea mays
  Clone ID: MRT4577_10079C.1
aaaaaaaattccaaaaaaaaaaaaaaaaaaaaaaaaaaaaagctgctgaggagagctgatcagccgagctagtcgacgagtcctcacttatatttcacacgcacacgcacccacgccatctcatcaccagatcaccagcagcctacagctctgccatccctctccgcgcggccggtccctcggctctcgccatggccacggcgcacggcggcaggctcttcctcttcgaggccatgctcttctcggcgctgctgctgctgctcctactcctccaggcacacactgcttccgccgcagacggcagcacgtacccagccgactgcccttacccgtgcctgcctccgcccgcggcgcccgccgtcgtcaccgccaactgcccgccgccgccgccatcgtcctcctacaacactccgccttcgtcctcctggagctacccgccgccgccgccgccgtcggggggctacattccctacttgaatcctccagcgggaggcggggcggggtacggctacccggcgccgccgccgcccaaccccatcctgccgtggtacccctggtactacaagacgccgccgccgccgccgtctgcggcggcgagggggaccggttctagtgttcttggcttggccgccgtgctagccgctggccagctgatcgtggcttaggcgcttagccgcagcacctgttcgttttgcttcttcgttcgatattctctccgccctgatgcagcagagctgcagaggttatttctccctccccctcttttgttattgtttattcagcaggattatattcatgaatatatatatatatatcatctacatgctactatagctagtttcttgattaccactgagcttttgagtagtggagcaactaccatcgcagcatcgctagttcttcatgagagagagacagagagcatcatgagcatgcgtggctagtgactaaaaaaaaaaacaacgaggcttattaaagcagagaaaactcaaggtgttgat

SEQ ID NO: 875 - DNA, 2266 bp, Zea mays
  Clone ID: MRT4577_1007C.1
acccccgaggctggccgggctcggtttaggcattcccctcccctccccacctccccgtcgtcgtagtcccctgttcatccatcgcaagaactccctcggatcgcgctgggttcgccgcttgcatgcatgcacgcacaagcccgcgagcccggccggggtgccagcatattcgttcgctagctcgtgggctcttctccgtctccgatccgttccgtccgcgctgaagaacacgcgcgcgcgccgggctgtttagatccgatccgatccaggccttcttccgttgcaacctgcgccttgaggcctcctggtgatcgatcttctgcattaattgctggctcaatggtcgccacagccacaggcgtagagtgctgcaagatctttggttttgttgctctataaacactgcatgtgttccgtattgtgaggccattttaaggaatgcagaaagatgtgtttgagtgaaaaagatttctgctctgaagaggagcacatttctccaataaatttcaaatcgctaataattcttgatgagcgaggatttcaagcacacattagacgcatagtagaaaatagctgtgatgcaactgatgtcagaagaaatatcgcaatgctatgtcatataatttctgaagacggctgaagttctctctttaccgacttgtcgtcctacgagttcctacaatcagttggtagcaggtgtctatatatataatatgatggaagcagagaagaatggaaacattcttatgcaaaagtatgaggttggaaaattattggggcaaggaacatttgccaaggtataccatgctaggaacatagagacctctcaaagtgttgctatcaaggttattgacaaggacaaaatttttaaggttgggctaatggagcagatcaaacgagagatatcggtgatgaaactggtgaggcacccaaacatcgtgcaactttatgaggtcatggctactaaatcaaagatatactttgtgcttgaatatgtcaagggtggtgaattgtttaacaaaattgctaaaggaaagttaagagaagatgcttccaggaaatacttccagcaattggttagtgcggttgatttttgtcatagtaggggtgtgtatcatcgtgatttgaagccagaaaacctacttgttgatgagaatgggaatctaaaaatttcagattttggattgagtgctcttgctgaatcaagacgccaagatggtcttctacacacaacttgtggtactccagcatatgtggcgccagaggttattagccgaaaaggatatgatggcgcaaaggttgacacatggtcctgtggtgtgatcctatttgttcttatggctggatatcttcctttccaagattcaaatttgatggagatgtacagaaagattggaaaagcagatttcaaatgcccaccatggtttccatctgatgtacgcaagttagtgtcaagaattcttgatccaaatccaaggactagaatgccaattacaaaaatagtggaatgcttttggttcaaaaagggcattgacaacaagctaatccgaaagaatatcgagatgaaagggaaagtttcagctctcactgatgttaatgtagttttctcatccacgggtattggtagcaacaataacaaattggttgatgtggaacaagatgtagcaaagattaccaacctgaatgcttttgacattatttccctttcagaaggctttaatctttcaggcttatttgaagagtccgagaaaagaaaagaggcacgcttcacatctagtcaatcagcttcaactattatatcaaaactagaagatgctgccacctgttcaaagatgacaataaagaaaaaagaaggtggtgtgctaaaaatggaaggtgcaaatgaaggaaggaaaggtgtactatctattgatgctgagatctttgaagttactcctgctttccatcttgtagagattaagaaaaataatggggatacactagaatatgaaaatttgtttaagcaggacatgaaaccagcgcttaaagacattgtttgggcatggcaaggtgagagtaaggaccaacaggccaaggatcacaatcaatcataaattactcaaccagtttgtttccataataagaaataatgtttgttagtgttcaaaagttgtatctacttcaaactttctcgcatttgacataaacatgtgatttgattcagagtttgttaagaaccatagtattgttatgttacatctatcattaattgtttttctatattgat

SEQ ID NO: 876 - DNA, 287 bp, Zea mays
  Clone ID: MRT4577_100800C.1
ggtgtttttttgttttttttttttttaaaaaacacgaaatttttgaatttccgaaaacctacggttttacgggcgcgttggccaacaaaaaaatccacgagaggggttcataaacttcagaaagtgtgccccactgatctgggcccccccacgggggggcgccttccttggggggggccaggatcataaaaccctggttggcccaaggcaccaactgttatcaaatgtggagggcctctgggttagtccaataccccctgccaaaaagaacaaactgtgaacagggt

SEQ ID NO: 877 - DNA, 137 bp, Zea mays
  Clone ID: MRT4577_100801C.1
gccaagtcttcacaaacccttgcaacattgcctggaggttatggaataagatgtattctcacgcgcatgatctcagaggcgtaactctggaagcacagcttcacgacacgtaattttaaccgatgatttccaggtga

SEQ ID NO: 878 - DNA, 479 bp, Zea mays
  unsure (1)..(479): unsure at all n locations
  Clone ID: MRT4577_100802C.1
atactcgtccgcccggtctccctcccctcccctgctccagctcgtctggtggcgttatgatttcctcgcgctcgcgagttcatcctagatctgcatggtctgggctagattccgccggatctgtggcggccgtttaaatctgtgggcttttcttttgctgcgtttaagcgcgattttgaaaggttttcgcccgtcccgatttgggcctaatgggccatgctgggatttcttccgatttcctgaaattttaccggtcggtgtgcggtctgcaagtccaggccatagaggagctcccgtggctgctgttcaatagtaggatttcgaatttggggcgcgaggttctgttccgcgggccagatgagatctgtagtctcctccatgcgccatggcaggaatntggggaaaactctgcggcgagcggacttttgattctcagtcagctgtgtcgactgggaaacgctcagatctcaaaagttcag

SEQ ID NO: 879 - DNA, 537 bp, Zea mays
  Clone ID: MRT4577_100803C.1
agttgctgcagtgccaattacatctgttcctccatgcaagcaactggctaatcaaaacgagtttactgaaaagaattatgttgatgagtttcagaaagattcagaatctcgaaatgtaaccaaggagttaccaggtaagttttgctggattggtgttctgttgtgtttcagatcattgacttgaatctcgaaactgttttgtcccgcagactgtatctcccgtctgatttttcaatctcatgagtcttaatgacttccatattaatgcttgtaaatttgtccttatgtaatgaaagctggaaaaaacaaacattgttcttgtggatggagttgtcaaggattctccaggtcaaatctagtttaggggaaaggcaacagcttaatgatcaagtgacagatgtggttacagaatcttctggtaagatctagaattctatgtttgaagtataataattggcatagtgcatgtagaccgaagtcttcatagctctttctcctggcaggtcaaattcagaatactgatgcaacagtgtctga

SEQ ID NO: 880 - DNA, 282 bp, Zea mays
  unsure (1)..(282): unsure at all n locations
  Clone ID: MRT4577_100804C.1
tataatatcttctatatttggatgtttgatgtgttttctaaatacaaggatgatcatctggttggcggggcgacgtcnatcttcttattccatgagctagttatgtctantnaacaacttcatgnacattatacacattctnncnaanngtctctctcnangacaacanntctcaaaaccctcacncatnangtnatngncattctnatcnacatnaccaaacaaatnaccctcatttnttnnnccanacctctattntccctantanntctantacaccat

SEQ ID NO: 881 - DNA, 305 bp, Zea mays
  Clone ID: MRT4577_100805C.1
aagagaagcgtcagatcaattccggtttcttgcaatgaaataacaagtgttatgaacagttgcaggccactggcctactcccactgagaagactcgacaccgatccatcacgactttgacaccgtcagtgacacagccaccaccatctgacgggaatacagatattatgacaccgtgttatggtcgtagaacacaaacagggcgagcccggcggaccacacgtggtttaacatcagcgacttgtccgacaagtggatgatgccgacgaggtaccgtacgcacaggatgctgatcttggtgagcct

SEQ ID NO: 882 - DNA, 554 bp, Zea mays
  Clone ID: MRT4577_100806C.1
gcgttcgcagttgattactcgattgcgagtgtgagggatgatctaggcataccctgttgcaagggcctactgggtgtgtgccggcccccatgaggctgtgacgattgcgccagtccagtacctcgtgagaattatgtaaccgaagttgccgtgtacctgggagaactcccgtactgtttggtgtttgattgcctatttcactttgcagtttggtcaaaaaaaaaaaaaaaaaaaaaaaaaaaaaaaaaaaaaaaaaaaaaaaaaaaaaaaaaaaaaaaaaaaaaaaaaaaaaaaaaaaaaaaaaaaaaaaaaaaaaaaaaaaaaaaaaaaaaaaaaaaaaaaaaaaaaaaaaaaaaaaaaaaaaaaaaaaaaaaggggggggccgttttaaaaaaaccaaatttttaaaccctgggttttgaaaataaattttttttttttggggccccaaaaaaaaattcccggggccgggtttaaaaacggggggatgggaaaaacccgggggtacccaaaataaaagcctttgaaaaaaatccctttttccccaagtgggg

SEQ ID NO: 883 - DNA, 878 bp, Zea mays
  unsure (1)..(878): unsure at all n locations
  Clone ID: MRT4577_100807C.1
gagctcacctgcctgcggccgccctgagaatttttttatttttttttttaccccaaaatagcagtcaaatctgttcaaacaaaattccctaacaatatcctactttctgaaccacacacagctctgtcagtgtaatggattaagaaaatgaaccctagcagatagtaaagtggaccattagcaatgtagcagaaacacagcttaacgaaagcatgattggggatgaggtaaactggcatgctatctggtaaaggagctaggttccccatggtcagaagccgagccaagaaccacccttcaaaggggtttcccaaagtcatgaccaaacacctcaagatgacctcttctcaaagaatacaagcatcgccaatctcttggcatccattagtgacaggaatatctcagtatctctcacgaagtctattcattccaccaccaactcattttccttgtttgcgtgttttttacttctcttcttttgctgaacctttgcatgttttttacttctcttcttttgctgaatcccctcagtaggctctggtctcttctttggctctggatcctcagtaggatctgatctcttcttcggctctagatcctcagtatcttccttgtttgcgtgttttttacttctcttcttgcgctgaacccccacggcatgctctttctttggctctggatcctcaataggctctggtctcttctttggctctggatcctcagtatctctcacaaagttatttctcttcttttgctgaacccccttggcatgctctttctttggctctggatcctcagtaggctctggtctcttccttggaacttcgatctgtttgggccaggaatcgtataccatcttccgnncataggagctcgcg

SEQ ID NO: 884 - DNA, 623 bp, Zea mays
  Clone ID: MRT4577_100808C.1
ctgctgccatgcctgtccttgccattgcctttcgctacttttccatgcagaggctctgctggctgctccattgctgttgctcttccaaaacgttaaccaccaaccctccggagtagtagtagtaagccacaaacgaaatggttggtgagtggtatatccacaatgcgagggaggggacacgagaaagaaagtaagaaacagcagcaccgacactcgactccaccacagtcatgcacggcggcacgggcatctatctatctatctagtccagcggcgtggagcactgcgctgtttcggggtcccacatggccggcagcaggaagcgtcggccggcgatccccacggcgttgtagctggcgcccgtggcggcgtccacgcgcagctgccccgggtacccctggtaggcgccggccccgaacacgcccgcgcacgccgtgacggcctccatcggcgcctccgcggggccctggaagaagccgccgccgtacgggttggtcaccgcgcccgccagcagcgtggccagcgtgatcaccgcgccgtccatcccgacgtccgcgttcggggccaccagcggcgccgccgccggctgcgggccgtaaagcggctggtggaagggccatgcg

SEQ ID NO: 885 - DNA, 231 bp, Zea mays
  unsure (1)..(231): unsure at all n locations
  Clone ID: MRT4577_100809C.1
ttttcaaaactctgttcttcaatacatcgggaattatcgattaaagagaaggacatgnnattgtagcttttatgagcactgcttctagtaatgttcacatagcatggctctgtaataatactgttgatcaccacatccaccatcatcaggcaatccgtttgccaatgttgaggcagccttttacaagcacctgtgctgctgtttgcctatcaatcttaacccttaaagggg

SEQ ID NO: 886 - DNA, 402 bp, Zea mays
  unsure (1)..(402): unsure at all n locations
  Clone ID: MRT4577_10080C.1
gtcttagcgctttcatcatctactagcgggggctctatgcattgcgcgtacgtagggttactcactgactggacgatggcgtgcacagatgaatagaacggtctcttctgtgctgctctagtctaggacgctagtactgagtagatggagaaggtatgcgtttcttacagcgagcgctggctacttcatgtcattcaggaccgtgagcgtgaggcgggtatcctacgttctgattaccatgccctgttctgcgctgatgtagatacatcatctattgtggtgatcgtgctcggnggagaccctctgcgcagtacagcatatgctggcaacatgtccgtaactgtagagcttgcacctactgaatagaattggtaccaatatacggttaaagagggatgtact

SEQ ID NO: 887 - DNA, 294 bp, Zea mays
  Clone ID: MRT4577_100810C.1
caaccccatttaatatcccttcttttataaatttaaataaagtaaccccttcccgaaaattccctttttttttgggtggttttccatccaaatttttaaaacccttccatttcccaaatcgccattaaatttttttaaaaattttgcccccccaggtccaggaccaaaggttgcagaaaactttttaaaaccggaaacgaaatggtttttttttttaaactctaaaaagacccctcccagtttaacccaattggcccctttttaaaaaaccgcccccactttttttctaaaatt

SEQ ID NO: 888 - DNA, 293 bp, Zea mays
  unsure (1)..(293): unsure at all n locations
  Clone ID: MRT4577_100811C.1
ttcgtcgggcttcacagacggctggttcgcgctgcgtcttggtgcctgagtcatgaccggggtctacgtgtacacggcgggtttcggggcctttggtgccgtttcttttttgatcatcccctccctcttcttgggggatgtngggggtttcttggtgaccacctccaagggcgagtcgttggagaagttttttgtgctgttcttttgctgcttcttgttggtcgaccgttgctgtgggggtttcccgtttgcggtgttttccctttttggctagcgttatttttggtttgtgt

SEQ ID NO: 889 - DNA, 467 bp, Zea mays
  Clone ID: MRT4577_100812C.1
accttcccgggcggtcttttttaagggcgaacccccccccacgggcggccgaaaggggggaatccaaccccggggccgaccttgccagaggaaccgacctaggtcccaaccgggggaaaatgatggcccaacacaattccacgagaaaaacggagccccagccacaaagcccaaaaccaggggagcccaaagaaaaaactaacaaacctggggggcctaaagcggacccccccccacacaaatgggaaaccccccacgccccctttttcaaagaaaaaacccacccccccagagaggctaaaaaaatatccaacccccgggcaaaggcgggttgactaacgggcccccctccgctttccggctaaaggaagcggtgtccccggacttaaaggcggggagaccggtttccacccaatcaaggggggacccccgggaaaccccggaaccaaggggccccccaaggacaa

SEQ ID NO: 890 - DNA, 472 bp, Zea mays
  unsure (1)..(472): unsure at all n locations
  Clone ID: MRT4577_100813C.1
gataaacacaatagagcacaatagtttgaacttgaacttgaaaacatatatttgcagaaataaggttgaactaaatacttgatgaataatgcacacgtatgtgctctgcagatagagggaaaatatgaatatggatgagataacatacacagtatctgataagtttaaatatttcctgctttacatcacaaccctagcaacacaacatatgtaatacgttccaaaaaatcatttttctaaaacaaaatagaacatcaaactaaagtacagatagactgtcacaagggaagtagcactgctactgcccgatcgacaagtctggcgcttacctgttcattgtcttagtctagttcaatattttcagcatttgaattgcaatagatttatgatcacagcgtgctgcactaggacgcatcaaacgacaatgtctccttcccaacgtagnataggatgtgcatgttttgctgctggt

SEQ ID NO: 891 - DNA, 313 bp, Zea mays
  Clone ID: MRT4577_100814C.1
ttttgtcttttcgtttcttgtaaagaccttggggtggtttttatttaaggaggagggtcttataattagcccaataattggcaagcaggcacaggggcaacaaactcgaagctggcaggaaccaatcatgagcggcgaagctactagcgaaatcgtggcgggctcaaagcggatgatgtttgaggagagcgccaaagtggacagcaacggaccaagccgcgtaggccattagcatcggtgggcagatcccgaacgagggagcggtcggtcaagggggaaaaaacttccgggggggcaacattaaagggggggg

SEQ ID NO: 892 - DNA, 274 bp, Zea mays
  Clone ID: MRT4577_100815C.1
caagtagggtgaggtggtacggtcatttcttctgccttccgtctctgcgactctcggagaacttccagcagcagcatgttgggccagagtatccggaggttcaccacctccgtggtgcgtcgcagccactatgaggagggtccggggaagaatttgcctcgttcagtggaaaacaagtggcggttactgcttatgatgaccgtgtactttggatctggatttgctgctcctttctttatagtaaggcaccagctacttagtaaataaggatatt

SEQ ID NO: 893 - DNA, 459 bp, Zea mays
  Clone ID: MRT4577_100816C.1
attgatcagttcattattatcctactttttacatttactttgtttcatttaatgatccttaagaaaaatatattgaacgagcatgtaatataacacttgttcaccgggacaggggcactagatctacacagaccacccaagggggaggggacaaaccatttcattcatcagcattaaacgagagcttcaccgtcgacctcacgcacctgtaaccggggtcttcttctttccgcgcctctcatcgacctccatctctggatcagaacgagaccggccgcagacggaacgggcaaccgcgagacgctgcctagtgcaccatggcatggccggtgtgggggaagctctggcgctgcgcgtaagcgaacgacaccccccccttgcactggacgctgagaagccccgaagcccaccaccacggcagggactgccgcttgagcgtggtggccaccgagtgcgcgg

SEQ ID NO: 894 - DNA, 485 bp, Zea mays
  Clone ID: MRT4577_100817C.1
tgccccccttccttagcttggattcttttaagccggccgcctttgggttttttttttttttttttttttttttttttttttttttttttttttttttttttttaaaaaaaaaagttttggggttttttccacccccaaaccgacccccctggagttttttttttggccttttaaatttttggccggggtctttcctttttgccttttacccaggccggttaacacacagagtttattttccgaaaaatcaatttagggagccggggcccctttgccgtccccgttggatgggttggcctcccacaagttggttgtctccgggatcaggggggtcccccctttcgggtccttgtgggaccccggcctccggtcctaaaaaaaccctttgccttccttttgggggtgggggcccccccgtaccgacgccccgtggttcgggaccccccaaacaaaggtttttttgtctggggtcttttgggggcccg

SEQ ID NO: 895 - DNA, 1040 bp, Zea mays
  Clone ID: MRT4577_100818C.1
aagagccgggggccccaaattagctgtcaacccgtcgcttccttcacgtaatcacgtcatctccgccgcccttgctaagcaaacgcaacctgcaactgcaaacccctcctccgattcctcccccgcagctcttcgtccccggaggaccaagcccaccaccggagatgtcgtacgcctacctcttcaagtacatcatcatcggcgacacaggcgtcggcaagtcgtgcctgctgctgcagttcaccgacaagcgcttccagcccgtccacgacctcaccatcggcgtcgagttcggggcccggatgatcaccatcgacaacaagcccatcaagctccagatttgggatacggctggtcaagagtcattcagatccataactagatcatactacagaggagctgctggtgctcttttggtttatgatatcactaggagggagactttcaatcaccttgcaagctggctggaggatgcaaggcagcacgcgaatgctaacatgacgataatgcttgttgggaacaagtgtgatctgtctcacaggcgtgcagtgagctatgaggaaggcgagcagttcgcaaaggaacatggtcttatcttcatggaggcctctgcaaagaccgcgcagaatgtcgaggaggcatttgttaagactgctggagcaatctacaagaaaatccaagatggtgttttcgatgtatctaatgagtcttatgggatcaaagttggatatgtagtccctggccaatctggaggtgctggtagctcttctcaaggtggtggctgctgcagctaatctgctaacgcccttatgtacaaaggcatatctgcggtgtagctgcgttatctctatgttgctgagcgtaaaatagttactgctccagggtgctttgttatttgatgcaccaacgggtggcagtgcctgaacgatttaagacattcagttttatttatgtcaggtgttcataaacattctgtaaatcactagattctttactgtcattcgtcattaagcgctcacaaaaaaaaaaaaaaagcggcc

SEQ ID NO: 896 - DNA, 569 bp, Zea mays
  Clone ID: MRT4577_100819C.1
gggtacctcgaggccggccgggtcgccgcggcggcggcagcaggttgggaggcgcgtggatccaatcggagaacggaggaaggaagagggctgacgggacgagacggacctgtgtcgccgatgatgatgtacttgaagaggtaggcatacgacatctccggtggtgggcttggtcctccggggacgaagagctgcggggggcttccgcgtgcgggggaggaatcggaggaggggtttgcagttgcaggttgcgtttgcttagcaagggcggcggaggagacgtgattacgtgaaggaagcgacgggttgacagctaatttgggggcggtttgttcttgttccttcggcggcggggtgacgcgcggactgtttggattcacgttgcggcttgcctgtttcttttttttcttttgaaaaattaccttgagagcaaggattagctaaaaagactagctaaagttaataatttagctagtctctaaattagattttacaggaaaaagtgtaggttaattcaacagactcaataaatctatagactaaataaaaaaaaaaaaaaaaaagcggcc

SEQ ID NO: 897 - DNA, 217 bp, Zea mays
  Clone ID: MRT4577_10081C.1
acaaatatcattttccaatgctaatttttttatcatgaatcttacttcttcaatcatggttgtgttatctccatggctactactctatcatttccttatcaataccattctatctatcttaaatctatttacctaaaattttcttcttaaaactcttttctttattatcctctcctaatatttcactatttcaaatacaactttacattctttctac

SEQ ID NO: 898 - DNA, 1265 bp, Zea mays
  Clone ID: MRT4577_100820C.1
cctcgaggccggccgggagtccgcgcgtcaccccgccgccgaaggaacaagaacaaaccgcccccaaattagctgtcaacccgtcgcttccttcacgtaatcacgtctcctccgccgcccccgctgagcaaacgcaacctgcaactgcaaacccctcctccgattcctcccccgcacgcggaagccccccgcagctcttcgtccccggaggaccaagcccaccaccggagatgtcgtatgcctacctcttcaagtacatcatcatcggcgacacaggcgtcggcaagtcgtgcctgctgctgcagttcaccgacaagcgcttccagcccgtccacgacctcaccatcggcgtcgagttcggggcccggatgatcaccatcgacaacaagcccatcaagctccagatttgggatacggctggtcaagagtcattcagatccataactagatcatactacagaggcgctgctggtgctcttctggtctatgatatcactaggagggagactttcaatcaccttgcaagctggctggaggatgcaaggcagcacgcgaatgctaacatgacgataatgcttgttgggaacaagtgtgatctgtctcacaggcgtgcagtgagctatgaggaaggcgagcagtttgcaaaggaacatggtcttatcttcatggaggcctctgcaaagaccgcgcagaatgtcgaggaggcatttgttaagactgctggagcaatctacaagaaaatccaagatggcgttttcgatgtatctaatgagtcttatgggatcaaagttggatatgtagtccctggccaatctggaggtgctggtagctcttctcaaggtggtggctgctgcagctaatctgctaacgcccttatgtacaaaggcatatctgcggtgtagctgcgttatctctatgttgctgagcgtaaaagagttactgctccagggtgctttgttatttgatgcaccaacgggtggcagtgcctgaacgatttgagacattcagttttatttatgtcaggtgttcataaacattctgtaaatcactagattctttactgtcattcgtcattaagcgctcacaaattctgtccgtttgcacgtgtaaataagatacctcgatgcatcgtttggtgcgatgttagtttgtcttttttgaatatgttggaacttggaactccatgttttgacaaatactctgctttcagagggacaatcgctatgatcgggataatcgctaaaaaaaaaaaaaaaaaagcggcc

SEQ ID NO: 899 - DNA, 448 bp, Zea mays
  Clone ID: MRT4577_100821C.1
tgccatctcccttcgtcttctccctccgcctcgcgctgtcgagcttcctccatgcgcagtgcgcccagtcgagcggttcctgctgcgcgccgcggtcttccagtgttccctctgcctgctcgagcgacacgcccagcgccctggattccttggccttcgcgccctggtcctttgcccggagggccttgatacactcggggctctctctgctcgctctggacgagcacctcccttcgtagtgcccacggcacataaatctccagcatcctcgaggcccatgccactgaacaccccaaatcccggtacgacctgtacttcctcatcaacaaggccttgccccataaggaaccaccttgataggaacatcacgtacaaagaccctaaaatcacgctcattcttgactaaagcacgatccacacccttgcccgctactaccagcgcactaag

SEQ ID NO: 900 - DNA, 1204 bp, Zea mays
  Clone ID: MRT4577_100822C.1
gcaacccgcaattattcctcccccgcacgcgaaatccgcccgcagctcttcgtccccggaggaccaagcccgcgcaccagagatgtcgtacgcctacctgttcaagtacatcatcatcggcgacacaggtccgtgccgccacgttggccctcttccttcctccgtgctccgattggatcctcgcgcctcccaacctgagtccgccgcggcaagatggagatccaatctagtccgcttgcccgtttgcgacgacggtgacggccttggctttgcttttgctgcaggcgtcggtaagtcgtgcctgctgctgcagttcaccgacaagcgattccagcccgtccacgacctcaccatcggcgtcgagttcggggcccggatgatcaccatcgacaacaagcccatcaagctccagatttgggacacggctggtcaagagtcattcagatccataactagatcatactacagaggcgctgctggtgctcttttggtttatgacataactaggagggagactttcaaccaccttgcaagctggctggaggatgcgaggcagcacgccaatgctaacatgacaataatgcttgttgggaacaagtgtgatctgtctcacaggcgtgcggtgagctatgaggaaggcgagcagtttgcaaaagaacatggccttatcttcatggaagcctctgcgaagacagcacagaatgtcgaggaggcatttgttaagactgctggagcgatctacaagaagattcaagatggtgttttcgatgtatctaatgagtcctatggaatcaaagttggatatgcaatccctgggcaatctggaggtgctggtagctcgtcttctcaaggtggtggctgctgcagctaatctgctaacgccgttaacaaatgcatatctgtcgtgtgtcacataccagctgcgctgtgaaaaatagttattgctgctccagggtgccttgttatttgacgcaccaatggatcctgtgcctgatcgacttgagagattcagtttatttacgtcaggtgtttataaactccctgtaaatcactagattcttcactgttttccgtcattaggcactcaacaatcgtgtgtccgtttgcatgtgtaaataaggcacatctacatattgtttgatatgatattaatttgtcctgttcgaataaaaaaaaaaaaaaagaaaaaaaactcgaggaaggg

SEQ ID NO: 901 - DNA, 890 bp, Zea mays
  Clone ID: MRT4577_100823C.1
ttgggtacctcgaggccggccggggcaaaagatattcccctcttgtggaacagaagaagcaagcgagagaagaacacagctcgacgccaaaacctcgccgcctcgccggcctccgcctcaattccatgcctcgccaatcagatccacgctcctcgccctctactatggactccggcggggggtcctcagcggacatggagctggcctggcaccttctcaccgtgctcatccgcctcggccgtcccgccgccgcctcggaactcaccgccgccgctaccgtcgcagcgccctccatctcgacgcgcgtcgtcaagcagatgtgttgcttacctaggtcaccactatggatctctgacgacggcgtcgtgacgccctccgagacggctatcctggcgtttctgaggttcatggggtgggatatcccggggcctaaggtgagcctgtggccttcggaggtgaggcggtggtcgggaaaggtgtccattaggtatgagcgtaagcggcaagggtcggatgcaaggtgcttcagcgcgaagaggcgccgactactggcatcggccgcagatttggtggaacaaacggagcaccagtcgtggcagctggttgcgcagacctgtactacggctgctactggagaggtacatttggaggttatgcaaaagttgcaggataggcttcccagtctcggcacattttctcggtgatcttcagcacaaacttgaccagcctcttagaggtgacgatgacttggctattgggaacatgtctttagcactggtgccaacaggtttttcagattgcccttggtctgtcaatcttccctcactggatgctgagaaatgagaatttcatatggaagttgatggtagaaagcacagattagtgatctg

SEQ ID NO: 902 - DNA, 302 bp, Zea mays
  Clone ID: MRT4577_100824C.1
gggggaaaaaaaacccaaaggccttgaaccgaacctttttatttcaaaccggttcctggttcaccgggggcaaccgcttaagcccgccccccatcttttttatttggccgggcctaatttaaaaaagaacctgggggccacaaaaatttggaaaccgggaaaggcccccccacccctgaaaaggacccccaacttataaaaaccccccttcaagatggaccccagggacggttaaaaattaaatcaaaatccaaccccgggggcccaaaccccttttaatggccccctgggttctaaacccc

SEQ ID NO: 903 - DNA, 253 bp, Zea mays
  unsure (1)..(253): unsure at all n locations
  Clone ID: MRT4577_100825C.1
cgtccggaacaagaagtnccaaaaccccctcaccttctagatctctctcctcccaanaaccacatgagacgggtcttttctacagacgggggggcccaacaaataacccgtccaaaattatggtctgcacttgcctatttcaccggtggaagtgaaacacactatcatccattaatttcaaatggcgccagtagcgctatagttagatttttttggctgttctttttgtacagtacctattgctaaaaaagat

SEQ ID NO: 904 - DNA, 439 bp, Zea mays
  Clone ID: MRT4577_100826C.1
ccactcttcctcagaagagagcagaggtccagagtctcttaaggcagtctcggactggatgaagatgaatattattctcagctagcgaggatgccgttcctgaacgtgtcgaccaacgtgaacctgtatggcgtggactccttctccatcctagtctcgaactactatattatcttaatttatctataaataccatatattacttttttacgctttttcatcttctttttttttactatttacatttgttcttttttttttttttctttacctcaacttttttattttttttattcttttttattttttctcttttttatttattttttctttattatttttttttatttttaatttattttaatttttttatcatttttttttttttattttttattattttattatttttaatatttattttttttatttttttttt

SEQ ID NO: 905 - DNA, 331 bp, Zea mays
  Clone ID: MRT4577_100827C.1
gcagaagtgccacaggtatggcgtcatgcacagtgaacagaacacgattaatgtcactagacatgcaatgacacaaacatcattgaagtcttcattgtgcggaatggccacaggtctggacgtcctgcaccgcgatctcaagacatagaacgctgtatatactacacgggccagtaggcctttaagaagcaactgtgtcccggcatgtgagtgctgtagaggccgagtgagctattcactactaattgtgtgcagtaccatactacatgggcccaaacggtacaaagcgaaactctggccatgatactagcggctggagagttgaaatgat

SEQ ID NO: 906 - DNA, 417 bp, Zea mays
  Clone ID: MRT4577_100828C.1
ctcctttttttctactttttttttcataaaactgatcaccaccatcgtttggggggacatcactcacaaaaggcagaaccattgactgccagaaacaaatttattcgatgttgttgccccaaagggtgctaaccagaaatacgtttcaaccgcacaaatggaacaagagcaggaccaggactgcccaacacccctcattgtggacaactactgccaactaccattctgactaccgccgtggtacaccaacgtcagaacagcttaccaaggcttggagaactcgaacatcaaaaatgacaccctgacagggtttctctctgtggctctgcccccgtggtgggcggtgctcagggaattcaataccagggggggccctgcaccctccttaccttgcatgatgggatgtggggaggcccc

SEQ ID NO: 907 - DNA, 408 bp, Zea mays
  Clone ID: MRT4577_100829C.1
attcgtgcggagggtacgcttttactgatcggcactgcaaagggactgcatcctcaattgtatctccacttcttgaccaacttccaatagattgaatcattctctgctttcaatagcgtatataacaactagacccttttagagaatatatgcagctcctagctcacacttttcatcaaaggctgtggatttttcaggatgggaacatcttgagaaagccacacctggaaccgtttcacaacaacaactagatcgtgcatgagaggcaaccaaatctgcagttctgatgaacttgcaatcaaggtctatcccatctgacgatattggaagacaagatcttacttatgaggagaggacgcccatcgagtattttctgaaacagtataggagatcactatgaatgacatt

SEQ ID NO: 908 - DNA, 289 bp, Zea mays
  Clone ID: MRT4577_10082C.1
ggccaaacgggaaaaacccaacccctgaatgaacaacgggctttttttatgggggtttggttaaaagcctcccaaggggttgggggcgaaaagattaacccatgtaaatcccccctggatttacagtttaaactttttacaaggaaatgttgttttacggcccctgtacatccaccaaatgaaaatttttgggataattgccacataaactcctttttggaaaaggtcttggtccatcaccaaaaaactgtttttggaacaagactggttaatatcctgtgcataattc

SEQ ID NO: 909 - DNA, 187 bp, Zea mays
  Clone ID: MRT4577_100830C.1
cgaataatgagttgacatgccatcgcgtgtgactcattattaacaataaaacaggtgccctcttatgatccggtgatacctaatccactgctactgtgcaagggtgccacagggcgacacatgatgtgccaacatgactctttttatagctgcgataaactctggcaggtgtccccgcaggacccac

SEQ ID NO: 910 - DNA, 182 bp, Zea mays
  Clone ID: MRT4577_100831C.1
agtcgtgttgttttttccaaccccaacgacaaaagggaagactactctcccctgttatgggcagccgcctatagcctatcccctctgattgaccgcccctactttcttcgccgccgggctctcagggacccgcccgtgcgaatctgtatgttccgcacccgagtccttatctccgctagtga

SEQ ID NO: 911 - DNA, 1885 bp, Zea mays
  Clone ID: MRT4577_100832C.1
ggaagaaaaaaaagaagcgttcgttgacaatcaagcggccgggaagagagaaaaaaactaaaaaaaatggcgccttcattgacagggaaatgacctgacattgtttcagagctagtccgccgtacaagtacaaggatacagccgcaggcccgcagaggaagaggagagcctactctcctgccatggccgcgccgagtccgctcccccgcttcctgatactcctgctcgccgtaacctcctccgcgtttgccgccgccgcggcaaccggggctccggtggtgggggaggactacgtccgtccgccgccggcgcggtgccaccgcaaggcactccttagcctcttcccttggagcaagaaggaggagtccgccgcctcctccgatccgcagcaggtgcacatttctctagctggagaaaagcacatgagaataacatgggttaccaatgataactctgtcccatctgtggtggactatggaactaaagaaagtacatacacaatgaaatctcaaggagaaagcacatcctacagctacttattgtatagttcaggaaaaattcatcatgttgtcattggacctcttgaagataacactatttattactaccgatgtggagggcaaggtccagaattccaatttaagaccccgccctcccaatttcctttgtcattggctgttgttggtgatcttggtcagactagttggacaacatcaacgctgaatcacattaagcagtgtgagcatgatatgcttttactccctggtgatctatcttatgctgattatatgcaacacttgtgggattccttcggcacattggtggagccacttgctagcaaccggccttggatggtgacagaaggcaaccatgagaaggagcacattccattttttgagtcaggatttcaatcttataatgcacgatggaaaatgccttatgaagagagcggatctagatcaaatttgtactactcttttgaagttgctggtgcacacatcataatgctaggttcatacacagattatgatgatagctcagatcagtatgcttggctaaaggctgatcttgccaaggttgatagaaagaggacaccctggctcattgtgttgttgcacgtaccatggtacaatagcaattgggctcatcagggtgaaggcgacagtatgatggcttcaatggagcctttgctgtacgctgctcatgtggatatggtaatagcaggtcatgtccatgcttatgaacgtgcggagcgagtctacaattccagacctgatccttgtggcgctgtccacataactatcggcgacggtgggaaccgtgaaggcttggcccgcaggtaccgtaacccgaagccagcgtggtcggtcttcagggaagcgagctttgggcacggcgagctaaagatcgtgaactccacccatgcccactggacctggcacagaaacgacgacgaagagccggtgagaaccgatgacgtgtggataaactctcttgctggttcagggtgcatccaggagggcagccgtgaccgtgagtcgaggaagatcctgatgtctccttgatgcttagcagtatagcttgggcctgcgatgtactgtgtatataatgcgtgctacttgataatctaacacctagtaaaagttaatgcgtcgtgctgcttgcctgcgtgtatactggagactggtttgatctggcgcgtttgctgctcttgttgtgttgtaccactatggatgtttgtagcaaagtgacatacgacggtgttgtaatggactgaagatgaatagatgatgttccagtaaaaaaaaaaaaaaaaaaacaaaaaaaaaaaaacgaaacgtggtcaacagcagggtacctgtcccgactcctgacccctaccgat

SEQ ID NO: 912 - DNA, 678 bp, Zea mays
  Clone ID: MRT4577_100833C.1
gggtacccctcggagccggccgggggcgttagtgcagcaacaggtgtcatgacagttgccatcttacttcttgcagaaatcactcccaaaagtgttgcagtccataatgccaccgaggtcgctaggtttgtggtaagaccggtcgcatggctttcactgatcctctatccagttgggcggattgttacttttctgtcaatggggatgctaaagattctaggcctgaaagggagaagtgaaccatatgttactgaagatgaactgaagttaatgttacgaggagcagagttgagtggtgcaattgcagaagatgaacaggatatgatcgagaatgtcctggaaattaaagatacacatgtgagggaagtaatgacgcctttggtggacgtagtagcaattgatgctatcgcaacacttattgatttcaaaaacttgtgggaaactcatcagtactctagagttcctgtatttgaggagcgcatagataatattgttggaattgcttatgcaatggacatgcttgaatatgttgaagaggttgagaaattgaatgcaatcactgtgaaggaaatcgcacatatgcctacatactttgttccagattcaatgtctggttggaacctattaaaagagttccggatcaggcaggttatattgggcagtggtcccaaatgaata

SEQ ID NO: 913 - DNA, 312 bp, Zea mays
  Clone ID: MRT4577_100834C.1
ccaacccagctcgctcgtcccatcggatcaggtcgagcacctagtagcgacctgctcgatcatcagtgtagagtgtcggtaggtgtctgtctctcttggtggctggttgcaacggtcatggcgacgtcgtctcgtcgggtgcccttgctgctgctgtgcctgggcgtgcttttgtcctgctccttcgcggcgggcgggtgggggcaggagctgcacatcacgtggggcgacgggccccgctcggtccttgccttcgggcggttgctgtcgctgtcgctggtccggtcgtccgcctccggcttcccgcccccc

SEQ ID NO: 914 - DNA, 520 bp, Zea mays
  unsure (1)..(520): unsure at all n locations
  Clone ID: MRT4577_100835C.1
aattcnncaccagggttgcgtagtcgcgggggggggatggctcaaactggggagatccggggcgccatggatcacatcctcnagggcgagaggaagggggagatcaaccacgacaacgtgctctacatcgtcgagaacatcaacgtggcagggatcgataatctctgctcantgcgaggggagggggacagagtatgctatgtctgaagaaccaagtgagacttatcattcaactactgcggtccagccctactacacaaacaaatagcactgcgatatcggaagatataatataaggcgcggcttaatcaaggctccgtgcagccaacttaattccggccttaattaaccggcaacatactgagcctaatgcggtgtcacacttcaagggggctcccggatttatctgctaggcgtggtatctatcggtgtgtcaaaaggtgggtgaagccgccaccacgtgaccacgcctcaaaagaattgcggtttgatttgtgtatccaagctgccacaccgggag

SEQ ID NO: 915 - DNA, 427 bp, Zea mays
  Clone ID: MRT4577_100836C.1
aatacaccttcggatagtactacagctgttttctcgagacaagtggtgtattaaacggtcgaaatgttcatttgcacaacaacaaatcagctatttggctcacattatcagtgcccgtggtgtagctactgatcccgaaaggtgtcagccatcgctaattggccttgtcctcaaatagtgaaggaactacgcagctttctttgattggctggctactaccgcaaatttgtccgtaacttcgaagtcatatcaaaactttgactcttctgctcaagaaacattcagtgtttgtgtggacgtcagtacatgatcatgcttttaacgtgctgaaacagtccttgtgcttggcgcatgtgttgaaattgcccaactttggacatgcattttcaggtgaaattgacgcagcaacaactggaatgggtgcaat

SEQ ID NO: 916 - DNA, 1319 bp, Zea mays
  Clone ID: MRT4577_100837C.1
agattgaatatgaccgacttcaattgcaatagctggaaagaaaattatactcataaccataaccatcggttaggtcggttaggtcgtaggatgatgtttctaccgatacctagggttcaacagacaagtctttttttgcactctcaaaattgcacttcagcaaatcaaaactctcgaacttgtgtgcttctgtagaaatataaatggtcacattttactgttcatgtaaaagctactagcagagggtacaatacaaaatttggaaaatatgtattgccagtttatcgctcttgtaccatttagaaactagtgagaaaaaaacattgagtttaatctttctgcaacttggctggcgctgtcctctccttatgggatgctgcatatctccttttcttgttagctcttcttctcttgcgctcagcctgtgtaagttccccctcttccttaacatcaccttttccttcaaatatctcttcaggggcaagcattgcagcatccgaaacagctacaggtgcaatctcttccatggctaaagcaggcacatttgcttgcacagacatatcctcaatgactggctttggagcaaagtggaaatgcgatagcgcatccaatttcaaacatatcctcttaaataaagtatttgcctcttcctttagttcatctgaaatagaaagtggggcaggtgcaatgcctgctttttgtgcatagtcatcctcatacagttcagcaagacccttcttgctcttagtttcatccagttccttgtgctcctttggagctttagatggcaagagagacggcttctcaacatcatcaaaatgactctctgcgattcttttctttatcatttcttcaagggaagctgtcacttcctcggttattacaggggcaggtcttacattgtgctcaaaatcaaggtccacttctagggcactgtttttgggcctcctagaagcagtaacctctccctgcatggtccacgtgctgggttcaagattagctttctccatttgctctattttagtacgcatcttcagacgctccttttcgtgagttgagagaccatgttcttgttcatcatttccatcatcattctcactgtcatggagttcaacttcatgtgcttcatccttgaattgaactttctttgtggaaccatctctcttcttagcttgcttgttgtgtccattctcaaaaaaatcttcatacagaatatctccaccgcctgcttcaccatcctcgtcatcatcctcaaaatcttctaaatccaattcgtcctcatcttcatcctcagtgtcactctcaaccatccagttttt

SEQ ID NO: 917 - DNA, 140 bp, Zea mays
  unsure (1)..(140): unsure at all n locations
  Clone ID: MRT4577_100838C.1
tgcgctagtgtgatgccttctcctagttcattgcttccggttcgcaatccctaatcctgatctcacttaagcgttcgngagtgctctccagttgctaaagactgtcagattgagttatagtctcagtacacgggtgttgt

SEQ ID NO: 918 - DNA, 288 bp, Zea mays
  Clone ID: MRT4577_100839C.1
ctcaaccaactcattgaacatctcaataagcttctcaacgatcatagtgttgaaaatctatctaaagaacctcacgttgaaagagagctgattcttataaagctaaacttataacctgatcagcacccttaggatcatggttttagttgacattttcacagcaaaagaagttgatatatctgagaaaacacttaccatagaggtagctgcagatccatgcaaaatagctgcattgcacatgaaattaacgaaaatcgttatcaaataaattagcataacatgaaaaat

SEQ ID NO: 919 - DNA, 441 bp, Zea mays
  Clone ID: MRT4577_10083C.1
tgttccaatggtcaatttaacataaaaatatgccttcacactggattgtaaaaggcatgtgatttttgagattttatccggggatgcatccgccttttgcattattaaacggaaagaggtattagtgtgcatcaccctatcccgtttttgaagccagtgtagctgtgtggattacaaaaccagcaccgctcccctgaatgaaacctgaataccttggaaacgcatgaactcctctgactgtatataacagaaaaagcggactgattcccaggaaaaatctaaaaaatcccttgccttttacaatccagggggagggctttttttttttttaaaaattaaccctttgggaacgggggacccccggttttgaaacctttttaaacttttatttaaacccgaatccgaaccttaaggccccccactttccactaaatagttttt

SEQ ID NO: 920 - DNA, 195 bp, Zea mays
  Clone ID: MRT4577_100840C.1
atctaattacataataatccctcactcccttttatcaaaatctttatgattcataacctaaacatgatacttttcaaaccctaaaagctcaaaatcttctctgccctcaaaatgtcgtcttttagaatactacatcgtctctgtaatattgacaataaatttatttgactacccaaatcacctcattttgaaatt

SEQ ID NO: 921 - DNA, 269 bp, Zea mays
  Clone ID: MRT4577_100841C.1
gatagctaaagcgccagcttccagctttcggtcggtcggaggttcaaaccccggccgttcgcatttgcgaaaattatttaattttcgcatttctgtatgagaggttaccctcttcacaacctttcggtgaccttgtgtcaccaaaaaccaccatcgcggctttgtgctgccctttcgctttcggctgcgtccgacatttcaaatcattctctgtctttgagtcgagctactgtgctcacctctgtatcttaacttattagttaattata

SEQ ID NO: 922 - DNA, 2030 bp, Zea mays
  Clone ID: MRT4577_100842C.1
cgtccactggtttgcatccccgctgcttcaatatacccaaaccaaaccagccaaagccctcctctcctccccgcctccgcctccgacctcgaacattcttctccaatggcgacggcccccgcatccctctcgctctccgcctctaccctgcccacccggctccgtgccgcagcggtgctggcgggcatgcgctggaggcagccgcagcgcgggcggatggtggtgcgcgccaagatccgggagatcttcatgccggcgctgagctccaccatgacggagggcaagatcgtctcctggtccgctggagagggtgatcgcgtctccaagggtgacgctgtcgtggtcgtcgagtctgacaaggccgacatggacgttgagaccttccacgacggcatcgtggcggtggtcctcgtccaggctggcgagtcggcgccggtgggcgcgcccatcgcgctgctcgcggagtcagaggaggaggtgccgctcgctctcgccaaggctcaggagctctccaacgggcagccgcagcaggcgcctcctgctccgacggaggatgccgcagcgacgccgccccctcctcctgctccggcgactgctcccacgccggtggccgcgggtacgaagggcattgccagcccgcacgctaagaagctggctaagcagcacagggtggaccttgccaaggtgactggcaccgggccgtatggtcgaattacgtcggcagatatcgaggcggctgccggaatcaagccgaagtcaaagcccgctcctgctgctgctgctgcgccaccacctgtggctgcgccttcagttggtgctgtgcctcaatcggcagtgctgccaccggttcctggcgcgactgttgttccattcactaccatgcaggctgcagtgagcaagaacatggtggagagtctggcagtgccagcattccgcgttgggtaccccattattactgataaactcgacgagctgtatgaaaaggttaagccaaagggagtgacaatgacagtgctgctggcgaaggctgcagccatggctcttgcacagcaccctgttgtcaatgctagctgcagggatggaaagagcttcacatacaacagtaatatcaacattgcagtggctgtggcaattgatggtggccttattacacctgtccttcaggatgctgacaagctggatatttatttgctctcgcaaaattggaaggacctagtcaagaaagcacgtgcaaaacagctccaaccaaatgattacaactctgggacttttacactgtccaacttgggtatgtttggtgtagatcggtttgatgcaatccttccacctggccagggagctattatggctgttggagcctcgaaacctacagttgtggctgataaagatggtttctttagcgtcaagagcaaaatgctggtcaatgtcactgctgatcacaggattgtatacggtgctgatttggcagcatttctacaaacttttgcaaagattattgaggatcctgagagcttaactttgtaaggtcacttgaagagttatgatcttatctatatgcccataagtagtcttattgcagttggagttctattgttgatatccaatttttgtatctttgagcattcaatagaattcatccgatctttttgtaccggtttttatctctcaatgttgtggatcttgttgggggagattatactgttgatattatggaattactggagagcaataagttataaactgtagaatagttctgcaaattttatctctgaaagggggtttgtatccccttaacattttacttccgggaagaaaaaaaaaaaaaataaactgagacaagccttctccctgtaaatatggagaggctgtttcgaaaacccgtgacctggtgaatgagtgagtgagatagctctcaccactgcactaggcctgccctgtaccattgatattgtggaattattggagagcaataaattataagctgtagatagttctgcagattttgtatctaaaatagtggtttagtgtcc

SEQ ID NO: 923 - DNA, 398 bp, Zea mays
  Clone ID: MRT4577_100843C.1
tcgcccacgcgttcggggctgagcccactattcttgccattgccagcatgcctatttggacgggagcttcgactacgcattcgcaagacgtgtggaaaggggactgaagctcgcacacctggtctgatccaccggcccgcggaacggatccagggcatccgcattctaggatcgcgtcgcgtcgcgtgccgccgcttgaaatccccggatcggtgcaattggcccctggctgcactcgataacccagccgtagggtagttgcctgtcgatctcgctgctggagctggttaactacctggccatttgtggatttgtgtgcctgcttgattttggtgcatgcatggtcgtggtgaatcccctgcttggggtgtctgaactaggggttgggccttcaagat

SEQ ID NO: 924 - DNA, 1433 bp, Zea mays
  Clone ID: MRT4577_100844C.1
atggcgagcgcgcccggcgaggtgccgtcccacttcctctgccccatctcgctgcagctcatgcgggaacccgtcacgctgcccaccggcatctcctacgaccgcgccgccatctcccgctggctggccacgcctgcgccggccggcggccgcacctgcccggtcacgcgcgtgccgctcccgccgcagccccagctcactcccaaccacaccctccgccgtctcatccacgcctggctcgcgtccctctcccccgaggcggaggtcaacgaggacgtggccgcgctgcgggggcccgtgcccggcgcggaggcggtcgtcgcgctgctgtccgacgccgccggggctcaggttgaggcgctcaagaggctgcgggagctggtggccgagtgcgaggacagcaggacggttctcgagtcccaggacggggtgttcgacgccttgtcccgcgtcgtgagcagtgccgatgcgtgctcgacggcgcgcgaggaggcggtcgggctgctcgcgtcgctccggatcccggagccggagctggccggcgtcgtggccaggcacagcaacctgggggatgcactcacggccgtcctccgctcgtcgaatctgaagtcgcgcgcgaacgccgctctgctcgttaggtccctctccgaagcggcgtggccggcctgggtcatcgggctgagccaggagcttctagcggaggttgtccgcgtggtccgcgaccgtgtctccacgcaggcgaccaaggcagcactgcacgccctcgcggcgctctgcccctacggccggacccgcgtcaagatcgtgggcgtgggcgcggtgccggcgatcgtggacctcctgctcgacgaccccgagaggcgtgtcaacgagctcgcgcttgtggcgctggaccggttgtgtacgtgcgccgagggccgcgctgagctggtcgcgcacgcggcggggctggccgtggtgggcaagaaggcgctgcgggtgtcggagaccgcgagcgagcgggcggtgcgcgtgctgcgctccgtggcgcgtcacgcggccacgcctgccgtgctgcaggagatggtggagtccggcgtcgtggccaagctctgcgcggcgctgtggtcccagcagtgcgggttgaggaccaagcagaaggcgcatgaggtgctcaagctgcactccaggacatggaggagctcgccctgcttgtctccaaaatttttggggctctacccatcatgacgatggggcttcttttcctgttgattcattctttcaatctaaggcaccagattgtgcctgcagaagttgaacacatctgaattctttttgcttggtaaccgaattagtgtaggatgatgtaatctttttgataatctgttcagttcagagcacctgatttgccgcgagatgttgagatggagaaaaaaaaaaaaaaaagcggccct

SEQ ID NO: 925 - DNA, 256 bp, Zea mays
  Clone ID: MRT4577_100845C.1
ggatcaaatggatataagatgggtcccatttatatttggtgacaggggtgccaatcgggttaaccaagctgcatgtagacccatgtccttgaggagaagaggggggggccaaacatgcacagggggattgggaactggagaactttggtatggtttttctgagatacacccgatacaattcctatttttgggagggagttcgggcttgctttttattggttaaccgccagcgcaagcttggtaggtggtgattata

SEQ ID NO: 926 - DNA, 480 bp, Zea mays
  Clone ID: MRT4577_100846C.1
ttttttacgatataggaagcatgatattagccaaaattaacgttgggacataataatgcaagtagaatatacacattgcgttgctttggggagcttgggacattggatacaaaaggcccgctcgttcagcaaaagagatcgaacagccaaatttatgtcccttcttcatacgtcagagatcagtatcagcatcaaaaggatatatcgctcgttcgccgtgagtacatctctttggaaaatgtggaggaccaatctgggatcaacttcaagggggcggccctatctggacaaaccatccttttctggatactgagtgtgaaacaagttttcctttgcgaaaatctcagcgaagtggcagtacgatctggagttctggacaatccatcctcttttttttatgctgcatactaactatccagaatgtgtgaacactagctgttttccaaaatatcatgtagtctgcgagcttttcaagggatc

SEQ ID NO: 927 - DNA, 170 bp, Zea mays
  Clone ID: MRT4577_100847C.1
ctcaggaagaaaacggtatacgtgcggtttctcaacaggagcaataagagaaccatgtgtgctagtgctacagctacggtctagctatcgctactacggcgcagctagcagcagcgttggacatgagcgactggcgcgaggagagcaccagcattaggtgttcatagttg

SEQ ID NO: 928 - DNA, 267 bp, Zea mays
  unsure (1)..(267): unsure at all n locations
  Clone ID: MRT4577_100848C.1
atctcggcacgaggaattaaaatgcctattagtattattgcaaatgtggtgaaatgattattgcacaagcctttttgataggatggacgcagagatcagtgacgtgggacccntggtttgtgggtttcgtctctggcgttcccgcttgtttttgttttcctgtggggggggtggtcgctggcgttctgctctcctcccttgtgctcggtgcctcttttggtttggcgcttgcccgctttcgtgttcgcttcttttttgtctccgctt

SEQ ID NO: 929 - DNA, 692 bp, Zea mays
  unsure (1)..(692): unsure at all n locations
  Clone ID: MRT4577_100849C.1
ctnncgaggccggcccggaaaaaaaaaaaaaaaaaaaaaaaaaaaactaaccttccgatgtctcccattattttcctccacgaagttcttctgatgaaacaacatgttctaattgggcttaaaaaaaaaaaaaaaaaaaaaaaaaaaaaaaaaaaaaaaaaaaaaaaaaaaaaaaaaaaaaaaaaaaaaaaaaaccgcaggccccccacaaagaaccagttccccttaaaaaccaaaaggaaaaaaaagcgggaaaagatttcccccatgagaaagaaccttatcagggccaaaatcaggaaaaaaacattaatcctgccaagttttgcccaaaagtaacttaaatttaaaaaaaatctatccccacccaagaacaatgaacttaaccacctgcttgataaaaaacaagaactttttgcttgttaaaacgggtttaacttttccggttaaaaaaaaaaaaaaaaaaaaaaaaaaaaaaaaaccaaaaaaaaaaaaaaaaaggggggccccccaacccccactttttgtccccttaaggaaggttaaattgccccttggggaaaacaagggcaaaacttgttcccgggggaaaattgtaacccccccaaaatcccacaaaaaaaacaacccgaaaaaaaaaagggaaaacccggggggcccaaaggagggactaaccccacttaattggggtg

SEQ ID NO: 930 - DNA, 329 bp, Zea mays
  Clone ID: MRT4577_10084C.1
agagatgagctcgaataagctgcataagagagtgactgcttttgaacatgagactctgctctccctcgtgattgagcagtttcattttcagatttatgagttttttttgcaatgcaaatttctgacattgagcatttgattggttttactgaaccaggacacatctccttgggggggagagcaatacccacgtaataaaaggggggactttgcccgcaaaaaaaaagtgcctaggtggcaaaaaggccaaccttgatgggacaggcaacggccatctctcgggaaaaaagttcaacacgtgtggggaccaaaccggaaggcagcccccc

SEQ ID NO: 931 - DNA, 676 bp, Zea mays
  unsure (1)..(676): unsure at all n locations
  Clone ID: MRT4577_100850C.1
ccggccgggggcagatctgtcgaggcgggcgattccagggtttagagaggagcggagatggtgaaggtcatccaggggcgcccggccgagatggggttccggatgccggcggagtgggagccgcacgagcagtgctggatgggatggcctgagcgtccagataactggagggagaatgctggtccagctcaagagtacccgaaagtccacgagctgatggaacatcaaaccaacatcagggtcgttgagatgagcatgaacgattcctggttccgcgacatggggcccacttttgtcactcataaaggggattcaggaattgcagaacaaacaatagcaggaattgattggcaattcaatgcctggggaggaatctatgacgactggagtcttgacagcgatgttgccaagaaaatagtcgagatcgagaggatccctaggtttccccaaaaaaattatccttgagggtggaagcattcatgtagatggagaaggtacatgcattacaacggaagaatgcttgctgaatcctaataggaaccccaacatgaccaaactagagatagagaatgagctgaaggattttcttggagtctcaaaggtcatctggatacctcgtggactttatggtgatgaggatacaaacggccacattgacnacatgtgctgcttcatc

SEQ ID NO: 932 - DNA, 1679 bp, Zea mays
  Clone ID: MRT4577_100851C.1
gaggagagccgtgtctcacatccaactgcatacgggtgggtggccttggccggattaatcaacgccctaggtgcatcggcgctgtacgcaccgagccaaccagccgccgctcacagttgcatcggacaccgcagcgccggtgcatataaaggccacgagtacaattttgatccacgcctgtgtggcgtttggccgtttgtgccgtatagtataatagtacattagtactcatacagtatttgtcaacgaactgctgggcgtggcttatttcgcgcgcgtattggtgagcgtgataacgacaggggaccaacgacccacctactcgcacgctcttcatcgcttcgcctcgacgccggtttcacctaggacgggcgcacgggctgctgctgcgtgatgcagtgaatgttcccacctcccagcgcgatctcccgtccgccttcgaccatcaccacctcgtgatcaggaaacgccttctggagaaccgcgtacgcctcctcgtcccacctgtcgccgaaggaaggcgctatgatcccgccattggcgatgtagaagttgacgtacgaggcggccaatctcgtgcccgctggcctcggcacagaatgtcccgatgaaacaacgccttgtgcctcttcctctgtcatgtacagaggcccggggacgtggatcttcaccacttggagctgccgccctttcgcgtcgacggactgggagagaacagacagtgcctcgaccgaccgttcgtactgatggtccttctcgtcgtcggtccacgacagcaggatcacaccgggtttgatgaagcagcacatgttgtcaacgtggccgtttgtatcctcatcaccataaagtccacgaggtatccagatgaccttcgagactccaagaaaatccttcagctcattctctatctctagtttggtcatgttggggttcctattaggattcagcaagcattcttccgttgtaatgcatgtaccttctccatctacatgaatgcttccaccctcaaggataattttttggggaaacctagggatcctctcgatctcgactattttcttggcaacatcgctgtcaagactccagtcgtcatagattcctccccaggcattgaattgccaatcaattcctgctattgtttgttctgcaattcctgaatcccctttacaggtgacaaaagtggggcccatgtcgcggaaccaggaatcgttcatgctcatctcaacgaccctgatgttggtttgatgttccatcagctcgtggactttggggtactgcttggcacttgcacataacgtgacgggttcaaactttgaaatggcaattgcagttctagcaaatacctcttgagctggaccagcattctccctccagttatctggacgctcaggccatcccatccagcactgctcgtgcggctcccactccgccggcatccggaaccccatctcggccgggcgcccgtggatgaccttcaccatctccgctcctctctaaaccctggaatcgcccgcctcgactgatctgccgctgggctggtgctcccgcggcccgctttatatagcgcgggctgcaggaagacgagacggaggaggagatttcgtatgcacgtacgtacggcgttgcccgcggcgacgccgctgcgcccggcggtcggggtctgccgcgaggggtaaaaa

SEQ ID NO: 933 - DNA, 647 bp, Zea mays
  Clone ID: MRT4577_100852C.1
gtgctatcttcgtgatggacgggttatctctcgtgatatcgtcttctcctcaccccgattgaggcccgtctctgagcttccagcgacgccacattgacatctcgcaactcagggatatatgtcttccagccctatcaccgagatgatctctgtgcatgcatagcctgcagaaggatgaccacattgtcctcacttcgcatctccagaacatagaaggcgtggaatgagagttctcggaagaatctcgagactaccattggtcctgaggatgtgcgtttggcgcgaacccccggcctagctagcctgggaatgccctcatctgtactgcgtctcgctaacatcctgtgtgtataactcgttgacacagatagactcactggtgattgcctcctgactgctgcgatgtaagtaatgctagatagctctgtctatatgtccattactcgagctttccaaagatatgactcaacaactatgcctagggacatcagagatgcggcatgtttgtacccatacatgctggaacaattgccgccgttggcggagtgacggtctaagctgcctccgggatgatacatggatccgctctccagatgacgctatctacttaccaaagcaccgtgaagcttcgaccgtctccactaatg

SEQ ID NO: 934 - DNA, 801 bp, Zea mays
  Clone ID: MRT4577_100853C.1
cggacgcgtgggcggacgcgtgggcggacgcgtgggcggacgcgtgggggacgaacttaggaaggcaaagaagaaaatgggggagcaaaatatacaaaaggctgtgaagtccgcaatggatgctgcagaagctgctctttcaggaaataaaccgttttgtgttactcatgtggatgtgggtcttgataccacggctgtccgtgaggcggttatcaaagtcatggaccagaagggtttgcctataatgttattcagcaccgatgaggcatcaaacaaagccgttatctatgctggtgtgcctcccaatgctcctagcggcttcaaggtgttggactggctaacaaattcggcacgaggactcaagggacgtagcggtgaaggaaatgattcgactcctaaacgcctacagagtgacgcttctcagctcaaggaagcaatggcacttgcgaacagcattgcttcaatgaagctctgctgattggtggtagtaactggtgcactgcccatggaactcatgcgtggctgctgctggattactctttgattttagctttctatttacccattatacttaaacagaagttcaatggtgcttgcagtttcatttatacttaccatacaattggaagcacaggacatgtaacagtataaagcttgttgtgtgcccgattgaacgaaaggttctatgcatatacgattgggagccactttgtaggcggttaggagtcgaatcatttccttccctgctacggctattttcgcatcgagcagccttacggaggatcatgagactactaggtc

SEQ ID NO: 935 - DNA, 1878 bp, Zea mays
  Clone ID: MRT4577_100854C.1
aatgtaattaaaaaaaattgagtagagaaaagccattgttttcccaatcaaagaagtgtaaactaacgaccaaagaaatgaaaaaaggtatccttataaaagaagcgacgacgtcgcatacacgagtaagataatttggattcttttaaagcggccgcccatattttttttttttttttttttttttgacttaagataaataatatacgggcagccaatcaggatgataaaggccacgaattgtagacaggaactagtacaattttgatccacgcctgtgtggcgtttggccgtttgtgccgtatagtataatagtactcatacagtatgtgtcaacgaactgctggcgtggcttatttcgcgagcgtattggtgagcgtgataacgacaggagcagcatacaaaacaatactactcgcaagctcttcatcgcccctcgcgtcgacgccggtttcagctaggacgggcgcacgggctgctgctgcgtgatgcagtgaatgttcccacctcccagcgcgatctcccgtccgccttcgaccatcaccacctcgtgatcggggaatgccttctggagaaccgcatacgcctcctcgtcccacctgtcgccgaaggaaggcgctatgatcccaccattggcgatgtagaagttgacgtacgaggcggccaatctcgtgcccgctggcctcggcacagaatgtcccgatgaaacaacgccctgtgcctcttcctctgtcatgtacagaggcccggggacgtggatcttcaccacttggagctgccgccctttcgcgtcgacggactgggagagaacagacagcgcctcgaccgaccgttcgtactgatggtccttctcgtcgtcggtccacgacagcaggatcacaccgggcttgatgaagcagcacatgttgtcaatgtggccgtttgtatcctcgtcgccataaagtccacgaggtatccagatgacctttgagactccaagaaaatccttcagctcattctctatctctagtttggtcatgttggggttcctattaggattcagcaagcattcttccgttgtaatgcatgtaccttctccatctacatgaatgcttccaccctcaaggataattttttggggaaacctagggatcctctcgatctcgactattttcttggcaacatcgctgtcaagactccagtcgtcatagattcctccccaggcattgaattgccaatcaattcctgctattgtttgttctgcaattcctgaatcccctttatgagtgacaaaagtgggccccatgtcgcggaaccaggaatcgttcatgctcatctcaacgaccctgatgttggtttgatgttccatcagctcgtggactttggggtactgcttggcactcgcacataacgtggcgggttcaaactttgaaatggcaattgcagttctagcaaatacctcttgagctggaccagcattctccctccagttatctggacgctcaggccatcccatccagcactgctcgtgcggctcccactccgccggcatccggaaccccatctcggccgggcgcccctggatgaccttcaccatctccgctcctctctaaaccctggaatcgcccgcctcgactgatctgccgctgggctggtgctcccgcggcctggcaggaagacgaggcggaggaggagattgtcgtgatgcacgtgacgtgacggcgttgcccgcggcgacgccgctgcgccccggcggtcggtggggccgccgcgaggggtaaaaatgtgtgcggatgtggggactggggaggcagcgatggccgatggagatgggcaggcaaacctcctcactcacacttgctcgtgtctgtctgtgattgctgcagtgctcccggccgg

SEQ ID NO: 936 - DNA, 318 bp, Zea mays
  unsure (1)..(318): unsure at all n locations
  Clone ID: MRT4577_100855C.1
ccaactttcttnnnnnnnnaannnnnaacacagngaaggattatgggaggcggcgccgaaacaagcacccgggcgccgcaaaacnaagcccaaacaaaagggccacagaagcaacacanagcaccgggccacaaaanacaagggaaccaaccggcnnagcacgggccccaccggaagagagaaacccaccnaggacccgagcaaaccggcannncaaggacacagnngggaccccacaccccaggaggggccaagaccggagggcgcggcccgcccccggcccccgggggggggaaggccaccaggcccggaagagga

SEQ ID NO: 937 - DNA, 148 bp, Zea mays
  Clone ID: MRT4577_100856C.1
cgcaactgacgttccggcggggcaaagtactgaaccctgaagagaacagtggctgcaccccgagacggctccggttcaggccttccgtagccatggcagacgcggcatccaggaacagaggcggcaggatcacaagcaagaggagcgg

SEQ ID NO: 938 - DNA, 3782 bp, Zea mays
  Clone ID: MRT4577_100857C.1
atgtgtgatagatcatcggcgaggcaagatactcggtggaggacatttcaggagctgtttatgttagttggtccaacaacatcgctcggaccagagaaaaaatgtaatcaaccaattatatgcagcaacggagcctatgaagaagccctattttctgctgctgtttgccaactccaagcagatcgcccactaaagaagcccaccctcctcgctatagaagcaagttcagaaggtttaattttcatttttagtgttggtatggactattggcatgaggagaacaaaggatcaagtttgaacaagttagacattaaaaatactattttctttaataagcacataagaaatgaggggcattacaaggtcgggtccctgttgcccgctgtggagtcgattcccgcgtgctgcttctactaccccggacgaagcctagatgggtggatgctgaccgtgccgaccctcccacgcgcgtgccgcctgcttcgtctcttcactcgtctcgaagctagggttttgcccgccgccaccatcctagtttccttctcgtcatcgttctcatcttccccagccgccgccccgcctcagatggatccgtcgccggcgtggccgtcccggcggatccgccaggagttcttaaccttcttcgagtccaaggcacatacgaggtggccgtcgagtcccgtggtccccgtcgacgaccccacgctgctgttcgccaacgctggaatgaaccagttcaagccggtcttcctcggcacagcggcgccggactcgccgctcggccgcctgcaccgtgcctgtaacacccaaaagtgcatccgcgccggcgggaagcacaacgacctcgacgacgtggggaatgacacctaccaccataccttcttcgagatgcttgggaactggtctttcggggactatttcaaggaggaggccatcagatgggcctgggagcttctcacccaggtatataaattgcccaccgatagaatttatgccacatactttggtggtgatgtgaaatctggtcttggtgctgatgatgaatcgaaggacatttggttgaaatatctaccgaaagaaaaggttctgccttttggctgcaaggacaacttttgggagatgggtgacactggtccttgtggaccatgtactgaaattcattttgaccgtattggcaaccgtgatgctgcgtccttggttaacaatgatgatccaacttgtattgagatatggaaccttgtattcattcagttcaatagggaggcagatggcacattgagacctttgccagcaaaacatgtggacactgggctgggctttgagcgtttaacttctattcttcagaataaaatgagcaattatgatacagatatattcatgccaatatttgatgccatccaccaattggctggcgatggaattcagccatactctggtaaattaggttctgatgatattggcaaagttgatatggcttacagagtagtagctgaccacataagaaccctttcttttgctattgctgatggttctcaacctggtaatgagggaagagagtatgttctgaggcgcatacttaggcgagctgttcactttggtcatcagaaattgaaggcaaagcaaagtttttttagctcgcttgtaaatgtttttgtccaactgatgggtgatgtatttcccgagttaaaagacaacgaaaagaagatcaaatgtattattagagatgaagaagaaagctttgagaacactctagcaaagggttatgaaaaatttaagaaagctgcagacgctgttaaggataatggtggaactatacttagtggacaggatgcatttattctttgggacacttatggttatccaattgatttgactgaggtcatggcaatcgactatgggctaactgttgataagaaggggtttaatgcttctatggaagaagcgaggcaaaaagctagaaatgctcgtaacaagtctggagggaactctattgctatggatgcgaatgctacagcgcagttgcgcaaactggggcttgccagcacggacgatagcccaaagtttctgtggcccaaggaacatgaaagcgtggtgaaggctatctatactggctcagaatacattactacagctactggtgatggggactttggtcttgtgctggaaagtacaagtttctatgctgaacaaggaggccagatatttgacactgggagcattgaggggtcatttggaactttcaatgtgaacaacgtccaagtgtttgctggctatgttctacatattggctcatttacaaaaggttcgaaggttttgtctcttggagatagtgtgatatgcaaggttgattacaaccggcgcacactgattgctccaaatcatacgtgtacccacatgttgaactttgctctaagggaagtacttggtgatcatgttgaccagaagggttcaattgttctaccagagaagctaagatttgatttctctcatggaaaacctgtccagcctgaagatctgaggaaaatcgagttcatagtgaaccagcaaataaaggacgagctgggtgtgtatgcacttgaaataaaactagaggatgcgaagcgcataaatggtcttcgtgctgtgtttggtgaaatctaccctgatccagtaagagttgtatcagttggtcgcaaagttgaagatctgcttgcagatcctgatagcaaagagtggctatccatatcgactgaactatgtggaggtacacatatcacaaacacaagagatgctaaagcatttgcactcttatctgaggagggtattgcaaaaggagttaggaggataacagccgtgactgctggatgtgccacccaggctatggagttggcgtcatctatcgattctgatatcaataaagcatctcagttggagggagctttgttggaaaagaaaattgcttccatcaagagtgggctggatgcagctgctatccctgctgcgagaaaagctgatttgagaggcaaggtttcaaagttagaggacgaacttaggaaggcaaagaagaaaatgggggagcaaaatatacaaaaggctgtgaagtccgcaatggatgctgcagaagctgctctttcaggaaataaaccgttttgtgttactcatgtggatgtgggtcttgataccacggctgtccgtgaggcggttatcaaagtcatggaccagaagggtttgcctataatgttattcagcaccgatgaggcatcaaacaaagccgttatctatgctggtgtgcctcccaatgctcctagcggcttcaaggtgttggactggctaacaccttcaattgcgccactcaagggaagaggcggtggcggcaagaacggcgtcgcccagggccaggggagtgacgcttctcagctcaaggaagcaatggcacttgcgaacagcattgcttcaatgaagctctgctgattggtggtagtaactggtgcactgcccatggaactcatgcgtggctgctgctggattactctttgattttagctttctatttacccattatacttaaacagaagttcaatggtgcttgcagtttcatttatacttaccatacaattggaagcacaggacatgtaacagtataaagcttgttgtgtgcccgattgaacgaaaggttctatgcatatacgattgggagtcaaaaaataggcatttaggagtcgaatcatttccttccctgctaaggctattttcagatcctttatccacttccatttcttactctgaattaaaaaaaaaaaaaa

SEQ ID NO: 939 - DNA, 1826 bp, Zea mays
  Clone ID: MRT4577_100858C.1
cgtatattgtgggggaatttgaagggataacacattcacacagggaacacctatgggcctaaatccccacgatttgggcccagagcgggacccctagagacgcgccccagagtgctgtgaatcgcccctaaaagcaggggcaccagcagagagctttttttttttttttttttttttaaaaaaaacaaaacaataaggccttgttcgtttccgtcggattacacccggaatcgttacagctaatcaaagtttatataaattagagaagcaatctggtcagaaatcgttccgacccatcaatccggtagaaacgaacaaggtctaatactactcgcacgctcttcatcgcttcgcgtcgacgcgggtttcacctaggacaggcgcacgggctgctgctgcgtgatgcagtgaatgttcccacctcccagcgcgatctcccgtccgccttcgaccatcaccacctcgtgatcaggaaacgccttctggagaaccgcgtacgcctcctcgtcccacctgtcgccgaaagaaggcgctatgatcccaccattggcgatgtagaagttgacgtacgaggcggccaacctcgtgcccgctggcctcggcacagaatgtcccgatgaaacaacgccctgtgcctcttcctctgtcatgtacagaggcccggggacgtggatcttcaccacttggagctgccgccctttcgcgtcaacggactgggagagaacagacagcgcctcgaccgaccgttcgtactgatggtccttctcgtcgtcggtccacgacagcaggatcacaccgggcttgatgaagcagcacatgttgtcaatgtggccgtttgtatcctcatcaccataaagtccacgaggtatccagatgacctttgagactccaagaaaatccttcagctcattctctatctctagtttggtcatgttggggttcctattaggattcagcaagcattcttccgttgtaatgcatgtaccttctccatctacatgaatgcttccaccctcaaggataattttttggggaaacctagggatcctctcgatctcgactattttcttggcaacatcgctgtcaagactccagtcgtcatagattcctccccaggcattgaattgccaatcaattcctgctattgtttgttctgcaattcctgaatcccctttatgagtgacaaaagtgggccccatgtcgcggaaccaggaatcgttcatgctcatctcaacgaccctgatgttggtttgatgttccatcagctcgtggactttcgggtactgcttggcacttgcacataacgtgacgggttcaaactttgaaatggcaattgcagttctagcaaatacctcttgagctggaccagcattctccctccagttatctggacgctcaggccatcccatccagcactgctcgtgcggctcccactccgccggcatccggaaccccatctcggccgggcgcccctggatgaccttcaccatctccgctcctctctaaaccctggaatcgcccgcctcgactgatctgccgctgggctgctgctcccgcggcccgctttatatagcgcggcctggcaggaagacgaggcggaggaggagattatcgtgatgcacgtgacgtgacggcgttgcccgcggcgacgccgctgcgccccggcggtcggtgggcctgccgcgaggggtaaaaatgtgtgcggatgtggggactggggaggcagcgatggccgatggtcgatggagatgggcaggcgaacctcctcactcacacttgctcgtgtctgtctgtttttttttttttcccggccggcctcgagggta

SEQ ID NO: 940 - DNA, 475 bp, Zea mays
  Clone ID: MRT4577_100859C.1
tccacgcgtccgtattcttcgactttcggtccagtctcaacatctgtacaggatagagttgtgactgtggggggtgttagaaccgtatcagggtttagtctcgtccctctgtaatgggcctaggcccagatacccttattataaatacatctcccaacccagctagggttagggtttttcccaacttccattaagaagtttccatgatactagcttataatagcgccttacttttccaaggttttattagcttgttgctcactgagcttgtctttgtatgtttaatgttgttatatacttatatatgagggcatgaggctgatttctgtgcaattgtaaaggttgtgcaaagcgtgcaattacattagatggctcagatcatgtaattggtcgcttgcaaaacttaacaaattgcacatgatatggcctcttatatattccttggaaaattggtagtgattgtgacaactttttt

SEQ ID NO: 941 - DNA, 323 bp, Zea mays
  Clone ID: MRT4577_10085C.1
atcaaatatgcccacaataagttctaagcagtcttgcataactacgagcgagagggactgggatgctgccagaaaagagcaccccgagaagttggcggccaagtattatctggacgcccctccagtgcatggcagtagagtccatgaggatgttccatttatgacaggtgataaatcacaacacggttctgctatccctgttgcaaaatcagaatggactaaagacccggatcatgctgttcgagaattgtttcatcaagaaactgggaaggcgacaagtttctttcgaaacatcggtcagccaaggacgccacttgtgtctt

SEQ ID NO: 942 - DNA, 356 bp, Zea mays
  Clone ID: MRT4577_100860C.1
cttcatgcgcggacctaagacatcgcctagagacctgcagaatggttatgcgatggtaggcgggtttataacctacggatgctgtgggcaagatctacgttactctatgacaagtggcgcagggcatgagggtctaagtctgagatcactgataacgtgcttcggaaacatgacttatgccaatggatgcaccattgatgctgatgggctagagctcttactccatgcattgatcgatgcctggagatcatgttgtggggacaaacgtgggataaagtgcttgacataggtggacagacttgcgatctgacaggctggttcacattgcatgggggagacgaatgacatgagggaat

SEQ ID NO: 943 - DNA, 421 bp, Zea mays
  Clone ID: MRT4577_100861C.1
ccctcttccctctctctctcctcccctccccaccccacccaccgccgcgccgggccaccacccactccacccctctctctctctctctctctctctctctctctctctctctccaccgccaccaccagcccccaccatcccggcgcggagaccgcttccctccctccacccccgcaaccctcgtcccgccgcgcacgcgccaccctccatgcctccgctccccggttcctcccgatcttaaccacccggggggcgccgtcccggcagcgggcggtcgagcgcccggtgcgtgcggtcgcacacgagaggcaggcggaccgttgctcccagagtcgaggcggcgccgcgcggccggaggcgggggaggccggaggaggaggacgctggggggacaccaccccgagcgcagtccacgcgaagc

SEQ ID NO: 944 - DNA, 384 bp, Zea mays
  Clone ID: MRT4577_100862C.1
ggcaagggggggacccttatgggcccctagaaaaaaacaggcaaacctggcacagatagcaagaggtttgaattacaggaaaacgggggctgataaaggagcaggataaaaggggggcaaaacaacagtataaaagggaatagcgggggtgaattattattagggaacaattttgaaaaccttaagcttctcaacccatgggttgaaagagctgacagggttcctgaagccgaggaagccatgccccttgctttggttcatgcggcccaaaagctgggtctccacagaaaacatggcatgggcgaaccaccaattggggatcccggaaagctccggggctataagggcgttttccctgacaatcttgggccaaaaagtttcctt

SEQ ID NO: 945 - DNA, 112 bp, Zea mays
  Clone ID: MRT4577_100863C.1
tagaagagctgcggcgctggcggacaacgagcaggcggacgaggagttgttccaagccacaattgggtatctcgcgtgactcgatgcacaagctccgagccaccggtggaaa

SEQ ID NO: 946 - DNA, 755 bp, Zea mays
  unsure (1)..(755): unsure at all n locations
  Clone ID: MRT4577_100864C.1
tcctccgggatcctccacacctcaccccggccgcatcccacatcgccgtcatgtcagacaacgcagtgtccgagctcgcacccaagtttgcgcccttcgtgggcatggctggcattgctgccgccatgatattcggatgcattggcgcagcttatggaacagcgaaatcaggtatcggcatcgctggtgtcggtacctttcgaccagacctcatcatgaagtgcctgatccccgtcgtcatgtccggtatcattggagtctactcccttgtcattccggttctcatcgccgaagatctcaacccgccatcaaacacaagctacaccctctttgcgggcttcttgcaccttggctgtggcatcgcagtcggtatgactggccttgcggctggttactgcatcggcattgtcggcgactcgggcgtgcgcgcctacatggaacagtcgaggatctttgtcggtatggtgttgatcctgattttcggcgaagttttgggtctctacggactcattgttgcgctcctcctcaacaccaagaccaagggttgagggattacgatcaaactccgaataccttccaccaccgcgctcctgtcccatacagtcaggagaacacaccatcgacaaccaccccagtacagtatgaggtaatcagcctctggtgtaccgancagctgcatgaggcacggncgttatgggcctctgtatattttacataatgggcagtagggaaacccagacgaagaagcagatcgg

SEQ ID NO: 947 - DNA, 201 bp, Zea mays
  Clone ID: MRT4577_100865C.1
gtggtttcggcggaggcgcccgttgtgttttcggaggaggcaaacgtcgtgcttttgccggtttcaaaggaggtggtttcctctcatgttctctttgtggctttgtaggacgcaatcttgttcgttttttttctttttttcttcctcgtctttttttattatcttctattcttccttttctttctttttctattttttctt

SEQ ID NO: 948 - DNA, 489 bp, Zea mays
  Clone ID: MRT4577_100866C.1
cccccaataattcccaccctttctccatagataatcaggggcctccggaactacatacacctccaaaaggggggggctttttactactactagcatgcaggcagtaggtggttgtttccgggggcatgggaaggggtcacgcgagcccaatgggggagagggggagcgcgacgagggcagcgcacagcccaacctttgggagggggagaaagccccccgccgccgccgccgttgggtccatgcctggtgggcctaggccgccgaacccgggacccggagggcctgcagtccccatgccggtagggccggttgggcctgcccctgtcccggggggggtaaagggccctgggcctcccgttcctcccattgggcccccgggggggggggtcacggttcccgcggggcttgcactggggggggggtaaaagcaccccaaaaagctcgggtcccttgtggtaagggtggcggtcccggcaaaatcccaggggg

SEQ ID NO: 949 - DNA, 282 bp, Zea mays
  Clone ID: MRT4577_100867C.1
caacaacccactgatagcagagatcaggaagaagatccccagcgagttccttcgaagcattctgccgaacggtagccatgaccacccgctaaagatgccccttccaaatgtcatcaaatcagatgtgttgaaaaaggctccggagtttaagtttggctggaggactgacgaagagttcgcgagagagacacttgcaggcgtcttcgagcgcaccgtgttccctgcaaagtacgcgctggggatgtcggcagacgtgtacaagacctggaatttcaacgagca

SEQ ID NO: 950 - DNA, 338 bp, Zea mays
  Clone ID: MRT4577_100868C.1
ccccgagggaatggaacatcacgttacttttgggctgttgcagcgcccgttaacacgataacccagaagagtcaggaattccaattccgggcgtaggataggacaatgtcctcagcaattgaggcctgatcggggggggttaggcaaaaaagcatgcacaaagccagccccacaaacaaatgatggcccggtggggttcctcctaaaaaactccagaaatcagaggggcccggccccccccccaagataataaaaaaaaggggggggggggggggttacattttttagggagtcgctcgcaccgttcatccgatccgatcagccgaacaaagggatcc

SEQ ID NO: 951 - DNA, 590 bp, Zea mays
  Clone ID: MRT4577_100869C.1
gagcgggcagaagagcggcgcggtgttcatccgcaccatcaccagccagttccagaccatcctgggcatctcgctcatcgagatcctctccaagcactcctccgtcgaggtgtacctcggccagcgcgacgagcctgagcgctggacgtcggacgccagggcgctggacgcgttcagaaggttcggaagccggctggtggagatcgagaagcggatcaggacgatgaacgacagcccgacgttgaagaaccggaaggggccggtggagatgccgtacatgctgctgtatcccaacacgtcggatgtcaccggcgagaagggcgaggggctcactgccatgggcattcccaacagcatctccatatgagcctcctcactgcctgagcggatggtttgtagatgctctgttacgctgtgtgtaatgtgtcgtttattcgttggttttgtcagtctcagggtagggaatggagatgttgattggatccatgatctgtagggttgagagaggagccacgtctggagaatgttgtcatgtgtgtttctttcttggttaagaataaaagttcgtcaaaaaaaaaaaaaaaaaaact

SEQ ID NO: 952 - DNA, 744 bp, Zea mays
  unsure (1)..(744): unsure at all n locations
  Clone ID: MRT4577_10086C.1
attcgttctcttctcgcctcgactactgggctacaccgccgtcttctgctgatgtctggagaaacgcttgacggagatgacatccaccctcttgtcttgaaccatggcactgaaatgttcacggctgtgtttgctggcaactacgtaccacctggctgctttctctagtatggtcggccgtactcaccacactgctgttattgaactaatgagacagaaagatgctcatgttggtgatcagcaacaatccaacataccaaatctcacgttcaagtatccgatcgactctggaaatgctatcaactgaaattacatgaataaaatctgagatcacactttctacgacgagaattcctggtgcccaaaaagagctccctgtgttgatcattgatgctcctttgaatccacaggacaacactgacaatatggccccgattatgttccatacttgcaatgtatctgtcatggacgttctgaatgtagtacagctgacactctatgtcagtgtacgtactacttggaatagataacgactctgagtgatggtgcgagtcacactgcgaccatatatgagggatatgcccttcgccatgccattcttcgtctgtatcttgctgggcgggacctcacagactccctcatgaatattctcactganaggggttattactttccaacctctgccgagcgaaaaaatgtgagggacatcaaggcagaagcttgcatatatacctcttgactatg

SEQ ID NO: 953 - DNA, 3472 bp, Zea mays
  unsure (1)..(3472): unsure at all n locations
  Clone ID: MRT4577_100870C.1
gccggccgggccgggatatatcgcggcgcagggcagcaggggagttccacacttccatacacacctgccttgtgccttcccttccctcccttgccttgcttcgcttattgccggcatatcacacatcggcaggcgagtgacggagcgagcagggacgcccatccaccagccagccaccgcgttcctgagaagcgaggagcgagaaaagcgaagagcggccatgttctggcacggggtcgcggaccggctgagggcttgnttcggttattttcaatccatatggattgggaggggattgatacggattggaggggattttgacttaccagtgatttaaaccccctcaatcctcctcaatccatatggattggggtagaaccgaacaagccctgacggggaagaacaaggaggcgtggagcgagggcaagatccgcggcacggtgaggctggtcaagaaggaggtgctggacgtcggcgacttcaacgcctcgctcctcgacggcgtccacaggatcctcggctgggacgacggcgtcgccttccagctcgtcagcgccaccgcggccgaccccagcaacgggggccgtggcaaggtggggaaggcggcgcacctggaggaggcggtggtgtcgctcaagtccacggcggacggggagaccgtgtaccgggtgagcttcgagtgggacgagtcgcagggcatcccgggcgccgtcctggtcaggaacctgcagcacgccgagttcttcctcaagacgctcacccctcgagggcgtccccggcaagggcaccgtcgtcttcgtcgccaactcgtgggtctacccgcacaagctctactcccaggaacgcatcttcttcgccaacgacacctatctgccgagcaaaatgcccggcggcgttggtgccttatcggcaagatgagctcaagattctccgtggcgacgataaccctggaccataccaggagcatgaccgcgtctaccgttacgactactacaacgaccttggtgatcccgacaagggcgaagagcacgctcggccgatccttggtggcagccaagaacacccgtatccccgtcgctgcagaactggccggcacccaacaaagaaagacccaaattcggagagcaggcttttcctgctgaacctgaacatctacgtcccgcgtgacgaacgctttgggcatctcaagatgtcggacttccttgggtactcgctgaagacgatcatcgaggctgttcttccaacactggggactttcgtcgatgacacgcccaaggagttcgattcgtttgaggatatcctcgggctctacgagctgggcccagaggcacccaacaacccactgatagcagagatcaggaagaagatccccagcgagttccttcgaagcattctgcccaacggtagccatgaccacccgctaaagatgccccttccaaatgtcatcaaatcagatgtgttgaaaaaggctccggagtttaagtttggctggaggactgacgaagagttcgcgagagagacacttgcaggcgtcaacccagtaatcatcaaaccgcctgacggagttcccccgctaaagcaccctggacccaaggcagtatggagaccacaccagcaagatcactgaagctcacatccggcacaacatgggaggcctgtcggtgcagaacgcactgaggaacaagaggctcttcatcctagaccaccatgaccatttcatgccgtacctcgacgagatcaacgagctggaggggaacttcatctacgccagcaggaccctactgttcctgaaggacgatggcacgctgaagcccctggccatcgagctgagcctgccccaccctgacggccagcagcgcggcgcggtcagcaaggtgtacaccccggctcacaccggcgtcgagggccacgtctggcagctcgccaaggcttatgcctgcgtaaacgactctgcctggcatcagctgatcagccactggctgaacacgcacgcggtgatcgagccgttcgtaatcgcgacaaaccggcagctcagcgtggtgcatcccgtgcacaagctgctgagcccgcactaccgtgacacgctgaacatcaacgccctgggcacgccagacactcatcaacgccggcggcgtcttcgagcgcaccgtgttccctgcaaaagtacgcgctggggatgtcggcagacgtgtacaagacctggaatttcaacgaccagtctctcccagcagatctcgtcaagagaggtgtggctgtgccggaccagtcaagcccatatggtgtccgactgctgatcaaggactacccctatgccgttgacgggctcgtcatctggtgggcgatcgagcggtgggtcaaggagtacctggacatctactaccctaacgacggcgagctccagcgtgacgtggagctgcaggcgtggtggaaggaggtgcgtgaggaggcgcacggcgacctcaaggaccgagactggtggcccaggatggacaccgtccagcagctggctagggcgtgcacgaccatcatctgggtggcatccgcgctgcacgcggctgtcaactttgggcagtacccatacgccgggtacctcccgaaccggccgacggtcagccggcgcccgatgccggagccaggcagccacgactacaagaagctgggagcggggcagaaggaggcggacatggtgttcatccgcaccatcaccagccagttccagaccatcctgggcatctcgctcatcgagatcctctccaagcactcctccgacgaggtgtacctcggccagcgtgacgagcctgagcgctggacgtcagacgccaaggcgctggatgcgttcaaaagattcgggagccggctggtgcagattgagaatcggatcaagacgatgaacgacagtccggacttgaagaaccggaaggggcctgtggagatgccgtacatgctgctgtaccccaacacgtcggacgttaccggcgagaaggccgaggggcttactgccatgggcattcccaacagcatctccatatgagcctcctcactgcctgagcggatggtttgtagatgttctgttacgctgtgtgtaatgtgtcgtttattcgttggttttgtcagtctcagggtagggaatggagatgttgattggatccatgatctttgtagggttgagagaggagtcacgtctggagaatgttgtcaatgtgtgtttctttcttgttaagaataaaagttcgtcagctcatttcttaaaaaaaaaaaaaaaaaaaaaaaaaaaaaaaaaaaaaaaacaaaaaaaaaaaaatacaaagaaggacaacacgcaaagatttaatacaacaatcttatgaatgaccactcttaacttatgctcaaaaaccaccattttaactgacactgggctggaaaaccactggccggggcccagcttaatccttcctaagaatattcccatttcttcacctaagcctttttc

SEQ ID NO: 954 - DNA, 326 bp, Zea mays
  Clone ID: MRT4577_100871C.1
acgacggggagtcagttttcgcaacagccctccggccgagggcgcaattcgtgcgacgcacgtcaggcggatatttccccgtgagactgtccagtacttcatgattagcgcctgaatcgatcaaatcaccagtaaaagcggtagaccccattccgcgcctcagcaacgccgccgccgaggagaggaagagaatggccgtcagctgctcctccttcacggaggtcgagagcgattccggtcgacggcacgatgggatccgagccaccgcggaaaccgacgagatcacgctgaacagaaagagggcgcatcatgacggagaccaaggt

SEQ ID NO: 955 - DNA, 735 bp, Zea mays
  Clone ID: MRT4577_100872C.1
cagcgttggagcaagattgtgttattagcagcatctcgttctcgtcttctcgctcgttcgtcgtattatgacgacgacgacgacaaaggtggccgcgggagccgggcgggacgcggaggaggggatgaggcggaggaacgccgagctcgagagggcggtcgcggaggcggcggcgagggaggagcggctgcggcgggagctggagacggccctggcgcggctggccgtggccgaggaggccgaggagcgcctgtgcgtccagctcggcgagctggaggccgaagccatggagcaggccgtcgagtaccaggagcgcgtcagggcgctgtccgaccgcctcgccttcgtcgacggcgtgctcaggtcgtccggggtccggggcttcgccgccgccggcggcgtaacgagcatggattcatcgagctgagcggtcatcggtgtgttatatataatctaatctaaggcagagctgggtgctccgaaggatcgacgtatacgggtattgttgtatatctacggcttgttgtattgtatgtccctcgattacacaccaaatcactccgacatccaaacaaaatctaaacaagtatgtacagttccacgttgattcatgtgtgacgtgtgtttattgtccggagttgtaaattagcttgagaaaaatgattcttttagtaaccaggtgctgtttggttcctcacatgtaatgtctaaatatatatttaatggtccccactc

SEQ ID NO: 956 - DNA, 823 bp, Zea mays
  Clone ID: MRT4577_100873C.1
tcttcttctcctaccccaaggacgaggccacgtatggcgtggaccggcagttcctgctggggcgcggcgtgctcgtgtcgccggtgctcgagcccggtgccaccaccgtagaagcctacttcccggccgggcggtggttcagcctctttgaccacgaggtcgtcgtcgcctcggcgacgggcaagcacgtcaccctcccggggcccgcggacacggtcaacgtgcacgtggccggcggcaacatcctgccgctacagctgccggagctgacgacgtcgcgcgcgcgccagaccgcgttccacctcctggtcgcgctcgccgaggacggatccgcatccggggagctgttcctcgacggcggcgagttaccggagatggccgggccgcggggcgagtggagtctggtgcggttcagctgcacgcaggggcgcgacggggttaagctcatgtcgcacgtggtgcacgacgcgtacgggccgagccggaagctggtcatcggcaaggtgatgttcctgggactgccctcgctggcgccaccgggagagttcgccgtgtatgtcaacggcgttaagatggccaactcgactggcgcgacgctagggtatcaaaggcgcggagcactcggcgccgctcaagtggaggggttgtcgctggtcgtcgtcgaggaattcgagctcaaggtggtcacgtcgtcataacgtgacactcgtgctcgttctgaataaaaaatgatcaaaagtctaaatttaaattggaaataaaggaattgtgagagcaatatagcgaagagcaagcgcagccgctaacgatctacaagcagcga

SEQ ID NO: 957 - DNA, 347 bp, Zea mays
  Clone ID: MRT4577_100874C.1
actatatatagatagcgatcggtctatatgaacgaagcatacttacgcgggcatgcatgggaatagatattttatatatgcagctacataaaattaactgactgtccgtctacaaacaacggactgacagaaaaatgcctttacccacctaacttaacttgcttgaaatacatctttcttcagctggctagcttactaataaggacgtactgacacgatcttccttacataacagtcagcctgaatgaataacgaaacgcaccctgcctgtagccattaattaagcccggtgtgtgtggtacttacactatgaacgctccacttactagccatctagctctcgcaca

SEQ ID NO: 958 - DNA, 168 bp, Zea mays
  Clone ID: MRT4577_100875C.1
ttcaattcctcgatcctactccaagcattataataccttcagaacttcctgtgcatgatgctgggaactcatactcggccccagatgctgctatacacttctgtacatacaagcatgtatgtcttaagggcaacacgaaaagtttccgaacttgctgaacctgcttat

SEQ ID NO: 959 - DNA, 366 bp, Zea mays
  unsure (1)..(366): unsure at all n locations
  Clone ID: MRT4577_100876C.1
catacaaccgnnnnncaaaccaatccattaccatggcgtgatcaatcgttgcggccgcggcctgctgatggtcatgcctctcctcatcgtccccactcgctcgcctaatctctcgccgcggccttgccggtgccgcatacggccatgggtctgctaaggtgcccttgtggaaagatcctgtgagcccgagcaagttgaaggaagagcactttgttctatcaagcctttcaatgtggggggttatttttttttgtgtgttatattttatagttgttattattttatccaatttttattattctatattttactatttttttttttttttatttttttaattcctattttattattttttagattttc

SEQ ID NO: 960 - DNA, 392 bp, Zea mays
  Clone ID: MRT4577_100877C.1
ctggtgttccacctgtacactatgttcgtttcttgcgggctcgcggacaataccgggaaaagcggcccccggcccgggaggggaaccaggttacaatatggccaatggaaaaaacccttggcaaaaaaagggaaaaaagaacttccctaaggagaaaaaaaaatcagataaattgcgtcacaaaaaaagggcccaaacaaaaaagaaaaaaggcggggccccccaccgtatgaaataacccaaatcacgggggggggcttaattgaccaattgcccaagggaaaacgaggggcgccaccggttaaaaagaaaacagccaattccccttaaaagccgggaacacgaaaaagaccccaggggggattccctttggaccaggaaagagggcaaaa

SEQ ID NO: 961 - DNA, 552 bp, Zea mays
  Clone ID: MRT4577_100878C.1
atggagcacacggggtgccatcattacttgtttactgggcccggggtcgggcgaggcggtgactcctccgaggtcgaggttgagtccgagccctggggtcgggcgaggcggagtccgtcgtccgaggtcgaggttgagtccgagccctggggtcgggcgaggcggagtccgtcgtccgaggtcgaggctgagtctgagccctggggtcgggcgaggcggagtccgtcgtccggcgtcgaggttgagtccgagccctggggtcgggcgaggcggagtccgtcgtccgaggtcgaggctgagtccgagccctggggtcgggcgaggcggagtccatcgtccggcgtcgaggttgagcccgagctctggggtcgggcgaggcagagcttcctatggcgcccgaggctggacttagctgctgtcagcctcactctgtcgagtggcacagcagtcggagcagggcagacatcgctgttttctagtcaggtcggtcagtggagcgacgaagtgactgcggtcacttcggtcctgtcgactgaggagcgcgcgtcatga

SEQ ID NO: 962 - DNA, 624 bp, Zea mays
  unsure (1)..(624): unsure at all n locations
  Clone ID: MRT4577_100879C.1
cctccgaagcgccggcgcgtcgattaccgcgcgtgggcgccagatccggccgagttcgcgctcatgacctccgcggaccccaccacctccgcctcagcctccgcgccggcagggctgcgggggctcaacaacctcggcaacacctgcttcatgaactccgtgctccaggcgctcctccacgcgcccccgctccggaactacttcctcggtgatcgccacaaccggttcctctgcccgcgccgcacgcccgtcaggcaccgcgcctcggacgccgacagggtcgcgtgcctcgcgtgtgatctcgacgagatctactccgcggccttcaacggggaccgcacgccatacagccccgccaagtttctatataggtctggactctggatctcgcgcgctaatcgcaatggttgatgccatttcgggcctatagcagcatgccttactcctttctgctggatccatagcgtattgggaaagcaaagttaatatttatggtagccaaaatgggttcttgatgagttgtaacgcgggaaagggaatcttgcctgagatngttgggttgtatttcttgcttgcaaagatacattacagtgctatttggattatatgccttgtatttcaact

SEQ ID NO: 963 - DNA, 312 bp, Zea mays
  Clone ID: MRT4577_10087C.1
atatttttttttttttttttttttttctttttgttgggtttttttataaatacaggggggtatacaaactcatctctgggaacccaaaaaaaggatatccaacaaagggaaaagggccaaaaaagcaaaacaaagtatcaggtcataatctggcaggataaaccaaaccaagggagcccaaaaaccccctaaaaaggacaaatcaaaggggcccaccaaaaaaccgccccccaaaaaaaaaaggcacaataaggggccttttttccaacaaacccaaaaaaaccccaaattttgaagtttggcccacaaaaa

SEQ ID NO: 964 - DNA, 543 bp, Zea mays
  unsure (1)..(543): unsure at all n locations
  Clone ID: MRT4577_100880C.1
ccacgcgtccgctttgataccatgcctttcgtatcaatggnatggcgtccttctcgagcaacttcagaacctcgtcctggttattcgagaaggacgccttcctttgaataccatgcctttcgtatacactatggactctcggtgtcatgttcttttttcatagccggatgattatgcctgtgtgaccatatgtgatggacgatctgtgggggaagcctatacgctcttagacaggaaacgtccaaactagctcttggaagaaggtgccattatcgactaggaagcgcctggtgcattantggttcgtacactaattggatgcgattgttgtcacgactggtttattcagctgaccagttaagtgccgtcgtttcatggaaacagttttgatggcggccttcttgcagggtaattgcttaaatctgaggtgcccacaattanacagtttccggggacacaagnatttgctggtaagctatccaatgacctagctcanncagnatatatgctttaaacctgccggttatggncaggagaacagga

SEQ ID NO: 965 - DNA, 551 bp, Zea mays
  unsure (1)..(551): unsure at all n locations
  Clone ID: MRT4577_100881C.1
aaacaccgggggggggggggggggtcctgtaaatataagtcggggggccgggttggattccattgcattgcatcctcctccacctgcctgcctgcctgcgtagctcgcacaccacaaccgcgttctcttcttctctcgtccctaagcaagcgccgccggtggctcgtntgggtcnctcnatcccncaaggcccgtccttccatggccatcgcctcccgtgccacgaagcgcgcgctgtccaccttcgccgcggccaagctcccggaggaggcgatcgccgccaccgccgcggtgccggtgccgctggcgcccgcgcccgcgtcgtccgagagggcgctgctgcagttcgaggacacggggcggctgttcgcgggggagccgacgccggcgctgctgcgcacgctcgccgcgctgcaggcgctgtccgtgggcccgctggtggacgcggccactgcggcgctgcggtcgccggcggtggccggcagcgcgctgggccgggccgcggccagggccacggcgtaccggcacttctgcgcgggcgagaccgccgg

SEQ ID NO: 966 - DNA, 370 bp, Zea mays
  Clone ID: MRT4577_100882C.1
ggaccaaccaagatctggtgggtgaatggtctcacgcttgcagctgcagttcaactgacagaatgtcgtggaaagaatttgcctagcatcagccctgggcaactctaaccactgaaaaaataattagatctggcgactaaatcgaaatgttactcgaaaaaaaaacctactactgtatgtatactctcccggaccaagacgctttattcccaacttttgcagacatgctcacccacgtgtagcagatcaccggggtggcctctagagaacaccggcctgcaggtggtcaaacagcggtgtcaggtaaatccggatacattttatgtttgccaaaagtttcaaactataagactacagcttaagtctacgt

SEQ ID NO: 967 - DNA, 500 bp, Zea mays
  unsure (1)..(500): unsure at all n locations
  Clone ID: MRT4577_100883C.1
ccggccatccgccgcagcgcattttcgcccatgaagaagagcttcgcccccgcgctctccacccgattcgccagcaccgacgcaacaaaggatggcaagattcatcaggtcattggcgccatcgtagatgtcaagttcgacaccgagcagctccctgctattctcaacgccgtcaccacccagaacggcgaccagaagctgattctcgaagttgctcaacatttgggtgagaacgtcgtcagatgtattgccatggatggtaccgagggtctcgtccgcggttccaaggccaccgacaccggtgcccccatcaagattcccgttggtcacggtacccttggtcgtatcatgaacgtcactggtgaccccattgacgagcgtggtcccatcaaggccaccaagtacgctcccatccacgccgaccccccggagtttaccgagcaatccacctccgctgaggtcctcgntacccggatcaaggttgncgacctgttggctcc

SEQ ID NO: 968 - DNA, 269 bp, Zea mays
  Clone ID: MRT4577_100884C.1
tgcagatacatggtaaagacctcgctcaccggcccctttctcttcgggtcaaatcgtgccattcctctcctgtccagatacatgatccgctgatgcaggcgagctataggcttctccctttgcagatgttgacaattcatagcatttgcagatattgacaattcataccagtatctctgatgtgtttccgtctctatatatagtctacttcagaagtgtgactccattccgttaaaacacattatttacctaaaattccatatttgtat

SEQ ID NO: 969 - DNA, 1682 bp, Zea mays
  Clone ID: MRT4577_100885C.1
cacactctcatcacttcgctccaagccagtgctagccccttgtgtacgtgagagacggcatcgtaccgtagagcagcatccatggcggctcagggaagtggcagtgctcgtggcagcggcgccgccgccgcgcttgcgctggtcctcctctgcgtgctccttcacggcgtgctgcacggctcggcggggtgtgcgggcggccaccgcgggggacggcgcttgcacagcgccgagcggcgccagggttttccgtgtgcacgcgttcgtcgtgcagcgttcaggtacaacgccaaggcgcacaacgtggtgcccgtgagcgcggcggggtacaggtcgtgcagcgcgcccaagggcgtgagggcgctcaccaccggggaacgaccgcgtcacgctgaagcgcggcgccaactacttcatctgcagcttcccaggccactgccaggccggcatgaagatcgctgtcaccgccgcgtgaggcccccggccgatcagccgcgccggcgacgacgaccgccggacacacgggctcgatcggtggccagcttattattatttttatttccctctccaaagtaaaagcgtcgcgtccttaacctgcgtgttggtaggcggtgttaggtgtgtggagaccggccggcactatagagaactaaatcgaatgatggtgtactcagtacgtactgacgtgtatgagtttgtgttgatgtggacaacaataaaggcatgtgtacgcgtttgtatatcctgaactcagttcatgtgcgatatatatatatgctagctaaaaaaaaaaaaaaaaaaaaaaaaaaaaaaaaaaaaaaaaaaaaaaaaaaaaagctctgctcactctcatcacttcgctccaagccagtgctagcccggccccttgtgtacgtgagagacggcatcgtaccgtaaagcagcatccatggcggctcagggaagtggcagtgctcgtggcagcggcgccgccgccgcgcttgcgctggtcctcctctgcgtgctcctccacggcgagttggccgagtcggcggtgtacacggtcggcgaccgcggcgggtggagcttcaacaccgccaactggcccaagggcaagcggttccgcgccggcgacgtgctcgcgttcaggtacaacgccaaggcgcacaacgtggtgcccgtgagcgcggcggggtacaagtcgtgcagcgcgcccaagggcgtgagggcgctcaccaccgggaacgaccgcgtcacgctgaagcgcggcaccaactacttcatctgcagcttcccaggccactgccaggccggcatgaagatcgctgtcaccgccgcgtgaggcccccggccgatcagccgcgccggcgacgacgaccgccggacacacgggctcgatcggtggccagctttttattatttttatttccctctccaaagtaaaagcgtcgcgtccttaacctgcgtgctggtaggcggtgttaggtgtgtggagaccggccggcactatagagaactaaatcgaatgatggtgtactcgatcactacgtactgacgtgtatgagtttgtgtacgcgtttgtatatcctgtactcagttcatgtgcgatataaaggcatgtgtactgagtttggccctaacaaaaaaacaaggggaaagaagtaactctcttccattatctaaaaaaaatgcctgcttgagct

SEQ ID NO: 970 - DNA, 294 bp, Zea mays
  Clone ID: MRT4577_100886C.1
caagcacacacacaatgggaaaggtccacggaggtctcgctcgcgccggtaaggtgcgcaacaacacgcccaaggtcgccaaggccgagaacaagccgaagcctaaggtcggccgctcgcagaagcgcctcctgtacagccgccgcttcctcagcaaggtcgagaccaccggccgcggtggccccaacagccagaagcgcaagagcgaggaggccaaggcctaagcagctcgcctactttgagcactattcaggcatgcctgcacgtcttcaccttaaaaattcctgttgaaaa

SEQ ID NO: 971 - DNA, 615 bp, Zea mays
  Clone ID: MRT4577_100887C.1
gccggccggttcgggaactcttggcgagcaaacgaccacatttgtagttcgctcaggcgcgcctgcgtacgtggttagttagttaaggcgaccagaccatgggctccgcagcggcggcggacgtggtcatcccggcgtgcgcggcggtgggcatcgccttcgcgctgtggcaatggttcctcgtctccagggtgaagatgtccgcctacgcggcgcccggcaacggcggccaccacgggggccccgtcttccggatggaggacgacgaggaggacgtcggcatgggcggtgccggcgaccgcgacgaggaggaggaggagaccgccggcgacggcactgtcgccgtggcgcgctgcgcggagatccagagcgccatttcggttggtgagttcaatctgttctccaccacgcctttcgctctgtgctggtagtaactagtcaccgatctgtccatacatgttttgagcgccatcaagatgattaccgtgtcatcatccattgctcatgtactcttttcgtcctgtaataagtcaaccgttccgttccgtgatgcatcctagaacattgcaatgcaacatgtattcgaaccaaaaaaaaaaaaaaaaaaggccccta

SEQ ID NO: 972 - DNA, 1173 bp, Zea mays
  Clone ID: MRT4577_100888C.1
cactcacagtcgctccaagcccccttgtgtacgtgagagacggcatcgtaccgtagagcagcatccatggcggctcaggggagtggcggtgctcgtgttcgtggcagcgccgccgccgccgcgcttgcgccggtcctcctctgcgtgctcctccacggcgagttggcccagtcggcggtgtacacggtcggcgaccgcggcggggtggagctgcaacccggccgggacagctctgctcacgctcatcacttcgctccaagccagtgctagcccggccccttgtgtacgtgagagacggcatcgtaccgtagagcagcacatccatggctcagggaagtggcagtgctcgtggcagcggcgccgccgccgcgcttgcgctggtcctcctctgcgtgctcctccacggcgagctggccgagtcggcggtgtacacggtcggcgaccgcggcgggtggagcttcaacagcgccaactggcccaagggcaagcggttccgcgccggcgacgtgctcgcgttcaggtacaacgccaaggcgcacaacgtggtgcccgtgagcgcggcggggtacaggtcgtgcagcgcgcccaagggcgtgagggcgctcaccaccgggaacgaccgcgtcacgctgaagcgcggcgccaactacttcatctgcagcttcccaggccactgccaggccggcatgaagatcgctgtcaccgccgcgtgaggcccccggccgatcagccgcgccggcgacgacgaccgccggacacacgggctcgatcggtggccagcttattattatttttatttccctctccaaagtaaaagcgtcgcgtccttaacctgcgtgttggtaggcggtgttaggtgtgtggagaccggccggcactatagagaactaaatcgaatgatggtgtactcgatcactacgtactgacgtgtatgagtttgtgttgatgtggagaacaataaaggcatgtgtacgcgtttgtatatcctgtactcagttcatgtgcgatatatatatatgctagctatgcctgcttgagctacaatctgagtttggccctaacctcgtacgaggggaaagctgaactctcttcctatctaacgcctgtttgtttacccccagattatataatctggattaaataatcctaagaagcaaacaaacagtctagctt

SEQ ID NO: 973 - DNA, 442 bp, Zea mays
  unsure (1)..(442): unsure at all n locations
  Clone ID: MRT4577_100889C.1
gtcgaataggtttaaattggctctttgctgaggagtgaggagaattaatagcgtgcagaattgatttagtaatccaaacgattattcgataaggctgtcgtcgttgattttgtaggatttttggtggtcaaacctgaaatatttgattaattgttgacatgtaaaatatgtgaggtgaaaaaaaaaaaaaaaaaaaaaaaaaaaaaaaaaaaattgtttgttagatatttagaaaaaaaaaaaaaaaaaaagataaaaaatgtgataaatgtaaaatttttgaaaataaaaaattaattaaaaaaaataaaaaaataaaaaaaaagtaannnnnnttaaggggggggccctttttttttttaaaaaaaaaaaaaaaaaaaggggggcgcctttaaaaaaccactaaattaacccccggggggagagaatatttttttttttt

SEQ ID NO: 974 - DNA, 729 bp, Zea mays
  Clone ID: MRT4577_10088C.1
cctcaggcggcggccggactcctcccgctaaaatctcgctcgctcgacgccatgtgcttcactttggatatctctaccacgcccatgatgactggagatcctgcacatcgcacggaggtgaatgcgtcaaccagatggccgccaagttctgggaggaggcgtgcgatgaacatggcattgaacctaccgggaggtatactggcaatgccgaccttcaggtgcagcgtgctcatgtctactacaatgaagcctcctgcggacgctttgttccccgacactgaactcagtggatactatgaccctgtcacaatggacagtgtccgaaccgctccctatgggcagatcttccgccctgacaactttctgtttgggcaatctggtgctggtaacaattgcgctaacgaccactacaccgacgacgctgagctcatcgactctgttctggacgatgtcaggaaggaagctgacaactgtgactgattgcaaggattccaagtatgccactcgcttgacgatggtactgcgatctgacatgagtacgactgttgatctcgaagatcggcgaggagtaccctgaccggatgatgctgacattctcagcattcccctcaccgaaagtatctgcatacgtaggatgagccatacaatgccactctttctgtccaccagttggttaagaatgaagatgagtgcatgcttctcgataacgaagacatctatgacatctgc

SEQ ID NO: 975 - DNA, 377 bp, Zea mays
  Clone ID: MRT4577_100890C.1
agaagaagggaatgttactacggatggggggttggacacatacatcatccaacaaacttcattatcgaattacaactaataagccatctaaaagagggcaccaccaatgacgacatgatggtagaaggcatttgcctttgtacaaccacggtgcacaaaaggccacaattgtatggcttagactaaggctgaggccttagccgcaaactggtgcttaaaaggcagtaactgacgctgcgttaagaaagaagcacggattgctgcacatcgctggctacatggacatagcatttgctgctatgaataaacacagggcatcaaagctgaccagtgtataaatggaagaaccaggggttaatgatagtatgccactgcta

SEQ ID NO: 976 - DNA, 272 bp, Zea mays
  Clone ID: MRT4577_100891C.1
agctcttccaaagactgcagcgcctcagggcccaggtttcaacagattcttcaaaatgccatcccaaataagagcatgccatggaaaccatgatgcttacatttcacaggtttgcaggggaaaaaaactacttgacaaaggaggacctgagagtgctcatggaaagggagttccctgggtttttggaaaatcaaaaggaccctctggctgtggacaaaataatgaaagacctggaccagtgccgagaatggaaagtgggcttcagagctttc

SEQ ID NO: 977 - DNA, 215 bp, Zea mays
  Clone ID: MRT4577_100892C.1
gaaagacagcgccgcagccgccgcacccaccgcacggtacgtgcgcacagtacacgagcagcgccagttcaagacagccgggaacaccttcacggatgagttcatcgataccatcgacgccgtttaccagcagcagctggacatgctgaagaagctgcagcagcgccagcaccggctcgacaagaacgtcaagaccatccaggcgtagcgccggg

SEQ ID NO: 978 - DNA, 195 bp, Zea mays
  Clone ID: MRT4577_100893C.1
tcgatgaaattaacgcaccaacaacagcaagaaaggcctttcacgacgacaacaccgaaaaccgaccgagaaaggctgacttccccagtttaaaagtgagtatgggcaggcgcacgaaaaaaaaaccggtcgggccctctgacattcaaacctattcctgcggtgtatatggactcaaattctctttacgggggg

SEQ ID NO: 979 - DNA, 336 bp, Zea mays
  Clone ID: MRT4577_100894C.1
acaaaagggtttaaaaaataatcccaaacccccaaaaagaaaaacaaattttttccatacccatttagttggaaaaattaaaactgggttcttttttatccacgacccaactttttaatataaaaaaagggtggcccaagtccctttaagcccaggggtttaatgggccccatcgggaaccaaaataatccttttggggggcccattggtggaattttaacgggtaccaaaattacccccctaaaaaaagggggtcctttttttttttagggcccccaggggggcctttaaattggatgggcccaagaaggtgttcccccccttgaagggggggcc

SEQ ID NO: 980 - DNA, 150 bp, Zea mays
  Clone ID: MRT4577_100895C.1
attcggctcgaggtgatataagattttttagatgcaccgaataaatgtctatgggggggggtattttgaaacatgggaccgtgttgtaaccgatgaaccttgatcgatcacgtatgctgattttagtgtacgttcagaacatcattcgat

SEQ ID NO: 981 - DNA, 263 bp, Zea mays
  Clone ID: MRT4577_100896C.1
aaaaaaaaaaatatataaaaaaaaattttacacccaaagaaaaaaaaaaaaaaaaaccggggccaataaaaaaaagggggccgcactcaaaaaacctccattttacttacccatacattcaaccttttccctcttctattatgtctcctaaactaaaatccctgaccccaaacttttaaaccctatacttttgaaaaacctacggataccccaacttaatctccttttcccacataccccctttgcccacaagcttaacacct

SEQ ID NO: 982 - DNA, 460 bp, Zea mays
  Clone ID: MRT4577_100897C.1
gtgtggtgctgcgatcacatttctgaggaatagaatggataggcctccaaacgcgtggttcaaactcattatccacccgggctgctctgatgcttgatgcacaaagagaaccagtaaagacatggagcaccataggtgaaatacattatgtagggggaacttatgagaggtagatgtcaagaaggtgtacctgtaggaaagggacgtgtaaccttcagagacggaagcttgtatgaaggactctggaggtatgcgaagagatctggtttggggactctatttgacagtagcggtgatgtataccatgcaacgtggatggatgaccttattcatggaaagggctgtgactattcttacatcggagaccgctggtgcgcatatttttggaagggccaggctaatggtgagggtagatgttatgccagtgacgggagtatcttctttggccatttacgaaatg

SEQ ID NO: 983 - DNA, 310 bp, Zea mays
  Clone ID: MRT4577_100898C.1
ccggcgaggtcgagctgttcgagtctaagggcgtcggccacgcgttccacttcgacatgctggactcggagcagggcgtcgcactacaggagcggatcgtggctttcataaataaatgaaaaccgagacgataaataagagttttcttttttttgtccactatcgattcacggagtaaatcgattgtttggtttggtccattttatccgctgtcggtccacggagtaattcgttgtctcgttttttgttagaacaatttgtatcgattcacagagctatcagtgcggtgattgatcaccagcggtatgtt

SEQ ID NO: 984 - DNA, 924 bp, Zea mays
  Clone ID: MRT4577_100899C.1
cccacgcgtccgcccacgcgtccgcccacgcgtccgcccacgcgtccgacgccatcaaggctaggctcgacgccgcctgccccggcgtcgtctcctgcgctgacacgctcgcgctcgccgcgcgtgactccgtcaggctgacgaaaggcccgttcatcccgctcccgactggccggagggacggcaacaggtcggtggccgccgacgtcgccctgaactcgccgccgccggacgccaacatcaccgatatcatcgccctgtttgctaaaaagttcaacctcaccgccaaggacgtcgccgtcctctccggcgcacacacaatcgggaaggcgcggtgctccacggtgtcgccgcggctgtacaacttcggcgggcagaacggcgcgtccgaccccacgctggacgccaactacacggccacccttcgcggccagtgcaagcccggcgacaacgccaccctcgtctacctcgaccctcccacgcccaccaccttcgacgccgactactacaccctcgtcgccggcaacaagggcctgctctccacagacgccgccctcctcctcgacaccaccactagcgcctacgtcgcgcgccaggccaacgccaccgcgccggcgaccgagttcttcgccgacttcgccacgtccttcgtcgccatgagcaagctgggcgcgctcacgcaccacaatggagagatcaggcaggtctgctccaaggtcaacccgccgacgtcgtcccagctgtccaacgcagccgccgtccccggtgggttggcagtgtcactcgctctagctgtggtggctctcgtgctaaagctctgagtctgacagctgacagccagcgcctgtttattatgatttgttccagtttggtgattcaatttcctctgattcggggttaaaaaaaaaaaaaaaggcgggcgct

SEQ ID NO: 985 - DNA, 244 bp, Zea mays
  unsure (1)..(244): unsure at all n locations
  Clone ID: MRT4577_10089C.1
aacggccttgtcgaggtacaacttgcggctgtgacgaagaccaggtgccgagcggcgttgacgccaccaagatctcgcaggagtagtacctcaacgcgccaggcgagacctactccgtcaccctcaccgcgacgggaacctaagggtattactgacagccacaataaagagccgcaatggtcggtaagatcactgtcaactaattaagctagctatcgatcgagatccatntatgtattagctg

SEQ ID NO: 986 - DNA, 159 bp, Zea mays
  Clone ID: MRT4577_1008C.1
gcgcctgtcgtgccgttccggaacgaccgactcgaccgacgacgcctccgaccactcgtcccgtgccgacaagcgtgtggcaggagatatcccagtgtgcgaaaccggcagcgtgcgcaaggagtgactatcgaggtgcctgagtgggattaatgaagg

SEQ ID NO: 987 - DNA, 182 bp, Zea mays
  Clone ID: MRT4577_100900C.1
acaactgtaccacaccgtctagaggggacacaaccgccactcaagaacgagcgctacacacacaaaataagaggggaaaaggctaggtgtggtcagaacttaagcctaaaacacaggagttcattgggggcccaaacatggtgaacaagactagtaacgctggggtcgcacaaaaaaaaaca

SEQ ID NO: 988 - DNA, 449 bp, Zea mays
  Clone ID: MRT4577_100901C.1
cggacgcgtggggtttcttctgattgacaactatgatgtgcagaggaaggaggcgattgcacgctgtgtgaggagtgcgtttggggtgctggtgaagaaaggagtggttccgtcattggagccattgacaggttgtgacaagttatcaccactgctgaggcaaaagcttctggcatttttatctgatacttgtgaggcagctgaagaagcttgtgggaagacaatcaatggggtttctaaaggaacagagttgaacaagagaatttgctgaagcatgcacacaatttatggttgtcacaaccatctttacgaggaatgaatttagcacctattcgtcgggatttccttgttttggaaactttcgtagacctgtaaagaggaaacagaaggtgctttgggtattatataatgacaagggagaggtgaagaaaattttggaagcggcaagc

SEQ ID NO: 989 - DNA, 581 bp, Zea mays
  unsure (1)..(581): unsure at all n locations
  Clone ID: MRT4577_100902C.1
cgggacggatcaaaagggagaagccgctcacgcccacgccttctccgcccccctccttccaattttccgcatctcagcaaaggaccgcctgcagaagctgaaaggcacatccgccgcagaattacatggactctcctcgcaggagattcgattcggtcatcttcttcatgtgatgatagctcttagatcatagtttacattagccattacagcaaggagtaccgaaatgctgaaaagctccatgtttcttcctgctggttgctcgaccaaacaactatagtacttatgaggggaggaaactcaaatgaatattgcagttgccaggtgtgcctcggcaagtacacactacttggtgatgaagaaaatccaagattggcaatgttcgaaagacgccttcccttctttggttgtggaattggatggtgttgttttctcttangtttcctgtggccgttaatttggtacatagcagctcttctttattgctgcaagtactacaaccgtgatcctcgagaacggcctgggcttgctgcttctgctcttctggcaatcatgtttacagcagcgactatcattaccct

SEQ ID NO: 990 - DNA, 604 bp, Zea mays
  Clone ID: MRT4577_100903C.1
gttgattagcaaagctaaagaacaaaccctaaaaagaaagctcgaattagagataaggataagaaccactgccggaaacccaacaggcaatacccaaaatcaacatgaagaaaaaaaaagaagacctggatccatccccagactaagccccgaagagccagactgtaacactcgaaattgaaatcattaacctcttgccatcggcataggccaaagggccaaatactgtgcccatttcccttcccctggttcttataaccaggtacaagggaccaggaaaatggaccaaaacaactaccccgaaccattttgtgacaaatttaagtcaaacggtaaacctgaaccggtaacggatccgcctaaggagatccgggaattgattctcggggtaaatagttggagccaactcgacccccaccccagggacctcgaaccgagaactttcaaccaccatccagtgaaaccggctcttgaatctggcatttggataaaaataaaatctggatccgcaaacccgaaacctaaaaaggaaattgaaaacggaaatagccaccctcggaaccgatcaacagacgaaaacggaaattggaaaaggaaaatgcaa

SEQ ID NO: 991 - DNA, 310 bp, Zea mays
  Clone ID: MRT4577_100904C.1
cacgtccgtggatggagacctcaataagaaagtggacgccaagaactcgctggagaactgcggctacaacatgcgctacacgatcaaggactagaagattgcgtacaagctgacggtcgatgactagaagaagatcgaggacgccatctacgcggtcatcagctggctggacgccaaccagctcgacgaggcagacgagttctatgacatgatgaaggatctggagagtctctgctaccctatgattgtcaagatgtacctatgcgctggtcaagacatgggcggcgctggcggtatggacgacgacgcc

SEQ ID NO: 992 - DNA, 356 bp, Zea mays
  Clone ID: MRT4577_100905C.1
ataagattagtgttactgaaggttatggatggaagacccaggtcctcacaaccctatggttgccgtatactccagacccggacatgtttacctatgggggacaagatgttgatcccgaggaaagaaggatcaattaccagcatcaacaagagagagccttggatgacacaagtgctagccgttccgtatctgatgaatatctacggaggacaccgttctagaaacacctattgcagaccttgatattgctaactatcaagtgggactctggctggcatcagccacatataaaggatggaagagcggatgtaaaccattagcaccaatcatctgcacaggagcactttccatttccg

SEQ ID NO: 993 - DNA, 410 bp, Zea mays
  Clone ID: MRT4577_100906C.1
cggccgccctccttttttttttttttttttttttttttttccggggaaaaaaggctttcctaatattcttactgactatgagtctacgagaaacgaaatggggatagattaatttatttgattccacaaacctaccaaaaaagtgagtgggagagatctcattcctcaaaccatgcacgcttctaatgtgtccaccataacatgaatggccttctagtgctctttcactgggttgacaggcttctgacaaaggtcaaaccataacgctgggccgcattactgctatgggggttgggcacacaacagtgattaccgcatgagcgggggcggaccacatgccgggggatggcttgacaccctaatttgcacatcacatgacacgtggggattaaaagtataaaacttttttt

SEQ ID NO: 994 - DNA, 345 bp, Zea mays
  Clone ID: MRT4577_100907C.1
cagacaactcatagagacagggatgctaaatagggtactatgtggtggcttggatggcgtcatgcgggacattggtaagagcctcagagcggacgatggcactataccaatgcacgcgcactagcaacctgactgatgcgtttgacgagtacttcatgaagtctgccttcgggtgagactttgcacattattgtttcaaagaacggtactatgctctattgagccagagttgtaactactagcgagattgcatcacaaataccctgtgaattgggtggctcatgctacaggccatggtggagtgtcacgtacaaagctagactctgcgtgatttgctaccttaac

SEQ ID NO: 995 - DNA, 484 bp, Zea mays
  unsure (1)..(484): unsure at all n locations
  Clone ID: MRT4577_100908C.1
cccgggcccgnccaaaccgtttccggaccttcgatctcccttcccggccgtggcgggggcctctctnttnagccgcgaggcgggcgcgcctctcaatccacctcaggcctcgctcagatctctccgcccgggtcgctcttcccaccccaaaccttctcccgcctctctcgtcgccgccgcccgncgagagggatggcggggcgtgggggctccggccgcttcgctcctcgtcctcctcgccctagcggcggccggcggggtggcggccggcggctccggtcaccggggcaagattcgcgagcccggcccgctctacgccaacgggggcgggccgtttgccagtcccggtgggggcgtntcggtttttgcggcctggcctttctgctctcctggcccaggggggggggatgagcgaggcccttgggggggttctcggtggggatcgggttgttggtgcgccttgctggcttggttggcgtggcgg

SEQ ID NO: 996 - DNA, 257 bp, Zea mays
  Clone ID: MRT4577_100909C.1
actgtgaacttgaagcacaacatagacacaagctgcgcgggtgcacatggggtcaccgcgccccactaccaccaccagtccacacgacgcacactttattcaccccatgcgactcgcagctcgcatggggggggggccgcgatagccactggtatagtttctacacattcgtgacacacacagcgatggatgagaaaccgtaaacgttcgcgttgtccatgaacagcaaggccgtgccttgttagcccgcgcgcgct

SEQ ID NO: 997 - DNA, 520 bp, Zea mays
  Clone ID: MRT4577_10090C.1
ttttcttttttttttttttttttttttttttttttttttttttttttttgggggggaaaaaaggattttccatttagaacgaaaacatccttttttttcaaacattaggccgatcggatcgaaaccaaatacacagcacactccaccaaacaggacacggacacagggggcatttcgaacaccctaaacggctaaaaaatcaacggggggggggcggggctaaacaaataaacaccgccaccacgggggcggacctttttttggctaaagcaaaaccaggcaccggaccggggtcctttaaaatggggacacaaaaaaaacgccggcgagggaaagcaaaccaaagtttaaaaaaccagggccaccggctaactcactccagggccgggcatcccgggaggggggcccctttgctgcactggttgggcccgaacggtttgcacccgtgcttgaagaccccggggcccttggggagcggcccgcacaggcggttgaagctgaggcccagcttcgggagggg

SEQ ID NO: 998 - DNA, 213 bp, Zea mays
  Clone ID: MRT4577_100910C.1
aacttactatctcctcgtttttttttatttgcctgctagggaacgaaaactattcgaaaacggagctatgctaagggggcatcacaccagctccagaatagacataggcagtgctgaaacgaactgtaaaaaaacagagaccaatgtggtccagcatcatgctatcacggactcattactacattattacaacctacacataacacaacacca

SEQ ID NO: 999 - DNA, 268 bp, Zea mays
  unsure (1)..(268): unsure at all n locations
  Clone ID: MRT4577_100911C.1
actgcaaccgcagcccgatcgctcgcctccgctccggcagcgagctctatctctcgcgacgagtagcagctgccaccgacgcacgcagaccgggcaataaatattggtattggtagtgtgatatctataagaagtcaagatggtgaagttcacagctgaagagctccgcgctatcatggacaaaaagaacaacattcgtaacatgtctgccaccccccctctggancatggcaagtctacgcttacagattcccttgtggcagctgct

SEQ ID NO: 1000 - DNA, 812 bp, Zea mays
  Clone ID: MRT4577_100912C.1
tccgccaccgccggtgcgagttgaagaatcaaaaaagagagaggtaacccgcgactgctgccgtcacctcgcccgcggcgtgcttgagtcggaaagtggatgagggcaatcccaaggctcggtgaagccgttcatggccaacgagcgtatcgaggtctccggcgatagtccgtccatcatcggggcttgtgtctcgtgtcagactgcgcggtgacatgaccagcttcgtcctcgtcgtctcagcagtggaaaactctgagcaggagctcgttgaaggcaagttgtgcccttgatcactgttgggggccttactctttcgaaggtcctcaaaaacatgactaaccatttgtttctagcatactactaaatattacatgagcttcgtcataagaaaagcttcgtggtgaggatcttcttccccgccgaagatcctcgagacgaagacattgtctgaaagcgataacgacgaataccgaagctacaaccgaaggatgacgacttcctcttgagggggcaacgaaggtcaaacatgatgccgagccaaagagggaaagactagctaatccccgatgatttatgtcgcgattatggctgtatgttaaggtcataaatgtatttttactcaggttgcgtcccgtgcctataaatcagtgaatagtacccccgtactgttcacgctggattgtaatcactctcgcgtcaacatcttcaatcaggctgaaggtttaaagttgaaataaattctgttaatgttcatttgtatatcatgaaataatatatggatgaatgaatgaataacgtatattgtcttt

SEQ ID NO: 1001 - DNA, 369 bp, Zea mays
  Clone ID: MRT4577_100913C.1
accctaaatagccccacggggggctaattgccacatgaaaaggaaaagcccttgccacaggtgggtacttcattctgggggggaaaacacattgggaattggtcacaatcaagggatggtttaaaaagggaaatagcggggcaaatgccagcggaaaaaacagggaaccggggggacaacagcattagctgacccattcgcttttgacttgatcccgaattctggagcttcaaaaggagaaagcgtcccgttggggggacatcaaggggccttctcatttatttcaaggggcaagtctaaaaaagcaagtttggtattaacaattgatgtgccttccgcgaaggggccaaatctttggccagctttccc

SEQ ID NO: 1002 - DNA, 425 bp, Zea mays
  Clone ID: MRT4577_100914C.1
tcgctcacgcgtgcgcactcccactctccggggccggtgtcaggctccgagtgccgccgtacccggctactcctacccatcacacacaaacagccactccgcagctcccccgtcctgcggttcatgtgctgctgctacccatggcgcccccactcgacctggactgcatacgcctctcgccggcggcggctgccgacgatgcccaccacgacctgaaggggaccgagctccggcttggtctgacggggtccggttcgcctgaccgccggggggaggctgccaccgcaaccaccctggacctgctcccggctaaaggcgcccagcgcggacattttgaccaggcgcctgcgccatcggacggtgcagatgtcgggaagggaaagaatgcagccggtgaggtggacgacaagaacgttgcagcgacg

SEQ ID NO: 1003 - DNA, 390 bp, Zea mays
  Clone ID: MRT4577_100915C.1
gatttggtggttagggatccctagaggatccatgggggagaaatccccttgcgtttcaattttcaataacaagaggatttcttccccagggatccccggtcaccaaatcagccctcagtgtcaactcctcctctccgccgccaacagctgcggggagctcgccagtcgccacttcgccagaatgttgcatcaatgccaggcaatgggtcgcgcgctgccagtccccgctcaagtctcaagaaggtttaagagcaacggtcagattctcgccatagacgagatctgagtgtaaccctacaaaaatcaagaactgtggcatctggctgtgttaccagtgcaagacaggttaccacgacctgcacaaggagtaccggaataccatcctgaatg

SEQ ID NO: 1004 - DNA, 625 bp, Zea mays
  Clone ID: MRT4577_100916C.1
gccgggagctgcagtgtcaacccctcctctccgccgcctacagctgcggggagctcgccagtcgccacttcgccagaatgttccatcagtaccaggcagcgggtcgcgcgctgccagtccccgctgatgagcaccccaagatctaccgcatggagcttgcgctaccaacgagatctttgagtgtaaccctacaacaatcaagaactgtggcatctggctgtgttaccagtgcaggacaggttaccatgacctgcacaaggagtaccgtaataccaccctgaatggtgccatggagcagatgtacaatgagacggcttcctgtcatcgtgtggtcaccctacatacagatcatcaagacggcaacgatcaactttaagctttgcaagagggacagcaccaagcagttccacaattcaaagttcaagtttcctttggtttactgcaacaagtcaggccaccaaataggaagctgaagaccaccttcaaggctttaagacccaacttgttcgtgttatccaacttgccctgacaccctcccaaatctgtgaggctgtcagtctggtggtttgctagttcagggtaatgcaatctacatgcaaccaaaaaaaaaaaaaaaaaagcggcc

SEQ ID NO: 1005 - DNA, 239 bp, Zea mays
  Clone ID: MRT4577_100917C.1
ctgtgctagatgagggaacaccatggcaatggcggcgtagaagagttctttagacattgtggatgtctgccgctcgtggtgtgagtttggtggtagggagggaaatgggcagtggcagcgcgtgcaagccggttgccagggagcagcagtgtgtctcggcatggcgagtgttgggcatgaatggtggtgttcctgtgttgtggcggtgcgaggatagggtggctagcacagagatggca

SEQ ID NO: 1006 - DNA, 1039 bp, Zea mays
  unsure (1)..(1039): unsure at all n locations
  Clone ID: MRT4577_100918C.1
gagtgaaaaatgcatctttagcataaatgtcaattcctcaaccaaaacattatccatgcacatcatagattcgactaacagtaattgctcctcgacatagagcaaaatatgctcctattgacaagcatagcaaaagcaacactacccaaaggccagtgccaggagatggcaaatagcaaggagaagacgcctacagcctccttcccctcctaccaccctttctgcgagtgctgccagtagaactgcctgatctcaatagctctcttgtgtggttttgttatttgtatggactcaattttctctgccatattttcttgcagctgagaagaaaggtgccaaccaaactggtgatgcagagaaaaaggaagatgctcctgccccttcggagagcaagacctcaaagaagaagaaaaggaaggacaagagtttaaaggagggaaaagaaacacaagaagcagctgacgggtcagaggagcctaacagtgcaagcagtgatatcttcatcagtgctgtcgatgtgagtctccgcttacccatcaagtgctcaatgtgtttcttttccctcctttgaactcttgtccttctttttcttcttcttggaggccatgctctcgggaggagcaggagcatcttcctttttctctgaatcaccactttggttggtacctttcttctcagcatcctgtgcagtgctgctagaatttgcagagagtcccagctcagccaatactgcatcaagttctgctagttccttctttttcaactcctttttagacagctgcctttctgtgtccttgggtggcgcagccggggctgcagcaaggagtgcaaggcccccgccccccaagaagaaagaaaagagtcaaaaaaaccagcagcccgtgcggtaaatgggcataaagttttgagtttgggtgctgtgagtttgatatccccttgttcgttttggactcgcaataaaactttttgagttatcgtaaaaaaaaaaaaaaaaaagggcggccgcncgcgatctagngacggacgctgggtcaacccg

SEQ ID NO: 1007 - DNA, 727 bp, Zea mays
  Clone ID: MRT4577_100919C.1
ccctcgaggcttggccggggtcagtgtcaacccctcctctccgccgccacagctgcggggagctcgccagtcgccacttcgccagaatggttgccccacggtggcttctcctcgctttgttcctcctaccggcgtggctgctgatctcggccgcttttgtgtaatttgtttggatcccgcagttgcatcagtgccaggcagtgggtcgcgcgctgccagtccccgctgatgagcaccccaagatctaccgcatggagcttgcgctaccaacgagatctgctccaaatccaagctctggtactatctgaggaagctcaagtctcaagaaggtttaagagcaacggtcagattctcgccatagacgagggttaccacgacctgcacaagcagtaccgtaataccaccctgaatggtgccatggagcagatgtacaatgagacggcttcctgtcggtcaccctacatacagatcatcaagacggcaacaatcaactttaagctttgcaagagggacaacaccaagcagttccacaattcaaagtttaagtttcctttggtttactgcaacaagtcaggccaccaaataggaagctgaagaccaccttcaaggctttaaggcccaacttgttcgtgttatccaacttaccctgacaccctcccaaatctgtcaggctgtcagtctggtggtttgctagttcagggtaatgcaatctacatggcacctatag

SEQ ID NO: 1008 - DNA, 360 bp, Zea mays
  unsure (1)..(360): unsure at all n locations
  Clone ID: MRT4577_10091C.1
tgggctgatttatgtgcttgtttatgtgcttgaaaaccttttttaaaaaataacaagctatccgcctactactactagagcaaatatagtagaatttcagtgtgttgccttcttgatgatctatactttatttatctatttattttacggtggttaagtctcttattagtgttgatgttttggttctggcgtggtctcttgtagtagtgtaagtggtcgtgacttagtttcctcntttgtgtcctcctcctcttctgtcggttgggattaatttggttcctttgtactgttgtactgttaccgttgctgactctcttgatgagcttgttcctgttgctaagcgggttgcgtagaatcatt

SEQ ID NO: 1009 - DNA, 214 bp, Zea mays
  Clone ID: MRT4577_100920C.1
acgcgtccgggcatttttaagccactaatcaattaattccacctgaggggagatttgatttttatagtggtgtaccttgccccagacaatgtcttgatggaaaatctcctaatgcaattgactgctcaagtacgacttgacctgactacatgcaaccatcacatccgggaaggtccaaaaataacttaaccccatcatttttataggatgacaa

SEQ ID NO: 1010 - DNA, 1681 bp, Zea mays
  Clone ID: MRT4577_100921C.1
agcaaatacatcaccgtgcctcaggcagaggcctcagcctctctctcgtctttgcgttgcgccgctgctttaaacaaacgtcaggtgaaggctgcggcacgcgtcccctcctccgcctccagtctccgcccatctcaaaaccctagcaaccgcgcctccacccctacccgaatcccaatccaggtccgatcccccggcggcgaggacacccggcgccgattcgtccccgcagatcggcgggcaggacagattcagattcgggttcggggtccgctcgggtcgcctcgccggggtccaccgcggcggtcagggagcatggtgggcggcgggaggcggggtggagcggcggaggaggtcaagctcaacaccggcaacgtgttcgcggcgctcgagtccctcaagaagaagaagaagggcgacaaaggcaagggcggccgggtcttcctccaggaagaagcacggcgagggggccgcgcagcgacaagagccaccgcagaaggagctgttctgggcgcccgcgccacttaccaccaagtcctgggcggacgtcgaggacgacgacgacgacgactacttcgccaccaccgcgccgccgcgccccgtctggggcactgccggtgagcccgccaaggaagaggaagacgtcgatgatgctgtgcgtgccgcccttcaggaggacattgagagtgatgatggggaccttgatgatgaggttgatgatggacctgaggatgaacctgaacatgatgcggaagatgccccagccgaacctgctatcaggacagctgcggccccggctgcgccacccaaggacacagaaaggcagctgtctaaaaaggagttgaaaaagaaggaactagcagaacttgatgcagtattggctgagctgggactctctgcaaattctagcagcactgcacaggatgctgagaagaaaggtaccaaccaaattggtgatgcagagaaaaaggaagatgctcctgctcctcccgagagcaaggcctccaagaagaagaaaaagaaggacaagagttcaaaggagggaaaagaaacacaagaagcacttgatgggtcagaggagactgccagtgcaggacctgatgaagatacttctgctgtggatgtgaaggagcgcttgaagaagatggcatcaatgaagaagaagaaatcgagcagagagacggacacagctgccaaaattgccgctgccgaggctgcagcaaggagtgcaaggcttgcggcggccaagaagaaagaaaagagtcattacaaccagcagcccgtgcggtaaatgggcataaagttttgagtttgggtgctgtgagtttgatatccccttgttcgttttggactcgcaataaaacttttttgagttatcgtatttatgactgggaagtgcctttctgagtttcattttcagaatttaatgaaaggcctttgtggttgcaaaacggtggtgtaattgtgctttaaattgttcatccaatgataaacttcatgaacaactccagcaccgcctgtagtccgatttttaaatccttgcattgatgaggagggcgggggtacacttgccgaaattatccccagcctgatttctttcatgctaaaaaaaaaaaaaaaaaaaaaaaaaaaaaaaaaaaaaaaaaaaaaaaaaaaaaaaaaaaaactcgagaaggggccc

SEQ ID NO: 1011 - DNA, 774 bp, Zea mays
  Clone ID: MRT4577_100922C.1
cattgggtacctcgaggccggccgggagctgcagtgtcaacccctcctctccgccgcctacagctgcggggagctcgccagtcgccacttcgccagaatgttccatcagtaccaggcagcgggtcgcgcgctgccagtccccgctgatgagcaccccaagatctaccgcatggagcttgcgctaccaacgaggtctgctccaaatccaatctctgatctttgagtgtaaccctacaacaatcaagaactgtggcatctggctgtgttaccagtgcaggacaggttaccatgacctgcacaaggagtaccgtaataccaccctgaatggtgccatggagcagatgtacaatgagacggcttcctgtcatcgtgtggtcaccctacatacagatcatcaagacggcaacgatcaactttaagctttgcaagagggacagcaccaagcagttccacaattcaaagttcaagtttcctttggtttactgcaacaagtcaggccaccaaataggaagctgaagaccaccttcaaggctttaaggcccaacttgttcgtgttatccaacttgccctgacaccctcccaaatctgtgaggctgtcagtctggtggtttgctagttcagggtaatgcaatctacatgcaacctattgtttctaagttctagttggaggtccacgaaagggttcttagtgtgatggcaaaggcttctgagtagcaccctaagtgacccggtctggtgggttgctagttcagggtaactcaatctacatgcaac

SEQ ID NO: 1012 - DNA, 454 bp, Zea mays
  Clone ID: MRT4577_100923C.1
aatttaatctatacatgagccatacaaacaggtactaaccagtgccatcacattaggcatgccagatagcatacagagacaataccagatccctaccagctcccagcttcggcttattcatttttttttttttttttttttttttttttttttttttttttttcttttttttttttttatcattttttttttgttttttaattgatattccgttgagcaccctttcacggagaaaattgaccatatgtttctccaagggcccccaaaagactggtgccgcgttcaatgaactatacttgctgccccccccccaaacacctggtgagggggggaccttttttttttttctccttcagggggtggcttttcgcaccaagaacctgaatcatcacacaccattgttaccacactttggaaagcgcccttgctgagcgtcaccggggggatttttttt

SEQ ID NO: 1013 - DNA, 254 bp, Zea mays
  Clone ID: MRT4577_100924C.1
cagtattgtgactgggcagaagaacggggattttctttcagatttacaggactagttcattagaatttacaatgcagctatacgccgaacatctagttcggattactcactactgcttctggcctcaattctagctgaggtaaatccacacctgacacctttcgaagggggaaaaatctcaaactgcaatatatttacagatcttgcgacaaggatgatcctgttttaacaactaacaagtgccacgtatactt

SEQ ID NO: 1014 - DNA, 1335 bp, Zea mays
  Clone ID: MRT4577_100925C.1
cattgggtacctcgaggccggccgggagctgcagtgtcaggtcgacccctcctctccgccgcctacagctgcggggagctcgccagtcgccacttcgccagaatgttgcatcagtgccaggcagcgggtcgcgcgctgccagtccccgctgatgagcaccccaagatctaccgcatggagcttgcgctaccaacgagatctgctccaaatccaagctctggtactatctgaggaagctcaagtctcaagaaggtttaagagcaacggtcagattctcgccatagacgagatctgagtgtaaccctacaacaatcaagaactgtggcatctggctgtgttaccagtgcaggacaggttaccacgacctgcacaaggagtaccgtaataccaccctgaatggtgccatggagcagatgtacaatgagacggcttcctgtcatcgtgtggtcaccctacatacagatcatcaagacggcaacaatcaactttaagctttgcaagagggacaacaccaagcagttccacaattcaaagttcaagtttcctttggtttactgcaacaagtcaggccaccaaataggaagctgaagaccaccttcaaggctttaaggcccaacttgttcgtgttatccaacttgccctgacaccctcccaaatctgtgaggctgtcagtctggtggtttgctagttcagggtaatgcaatctacatgcaacctattgtttctaagttctagttggaggtccatgaaagggttcttagtgtgatggcaaaggcttccgagtagcaccctagtgacccgggtctggtgggttgctagttcagggtaactcaatctacatgcaacctattgtttctaagttctagttggaggtccacaaaagggctcttagtgtgatggccaaggcttccgagtagcaccctagtgacctgggttatgactcccagtgggagtggatttatgtggactgggtaaaaaaatccctttgtctaaccatacgtcaaagcacgatttaaggcctgtcccatgctcacataggcaatgtggtcgtcgtgtaagggtgtgggaaagtaggtttaagggttcccttaggcaatgcttgggggcctatcccatcctcatttctttttgttctttaccgtctggtgccttataaattataatagcatgtacaaatctcatgtgctttaaacttacccaaaaaagagcagacctgttactggagggatctggacggggtataaacggaggcaatggtgacttagtgagacagctctcaccactgcattatgcctgctttaaaattcactcaaatgtcaaaactggtgtttgctt

SEQ ID NO: 1015 - DNA, 795 bp, Zea mays
  Clone ID: MRT4577_100926C.1
atccctcctctccgccgcctacagctgggggggagggggccggtcgccacttcgccagtcgccacttcgccagaatgggtgcccacacgggggcttctcctcgctttgttcctcctaccggcgtggctgctgatctcggccgtttttgtgtaatttgtttggatcccgcagttccatgggggggggggagcgggtcgcgcgctgccagtccccgctgatgagcaccccaagatctaccgcatggagcttgcgctaccaacgaggtactatctgaggaagctcaagtctcaagaaggtttaagagcaacggtcagattctcgccatagacgagatctttgagtgtaaccctacaacaatcaagagctgtggcatctggctgtgttaccagtgcaggacaggttaccacgacctgcacaaggagtaccgtaataccaccctgaatggtgccatggagcagatgtacaatgagacggcttcctgtcatcgtgtggtcaccctacatacagatcatcaagacggcaacaatcaactttaagctttgcaagagggacaacaccaagcagttccacaattcaaagttcaagtttcctttggtttactgcaacaagtcaggccaccaaataggaagctgaagaccaccttcaaggctttaaggcccaacttattcgtgttatccaacttgccctgacaccctcccaaatctgtgaggctgtcagtctggtggtttgctagttcagggtaatgcaatctacatgcaacctattgtttctaaaaaaaaaaaaaaaaaagcggcc

SEQ ID NO: 1016 - DNA, 582 bp, Zea mays
  Clone ID: MRT4577_100927C.1
atggcgccgttaccagagagaaatcagggagagggaaagaaggaaacgggtgtccgtttgaagttccataacgcagggaggtgtaacggcaatggaaacggctcggtcgcgtgcggtggagggcacgcgcaggcgcgacacggggccctccagacagtgaccaagagtggggaaagaaagggggaggctgacgggcgggtcctccttgtcaggaccgtcgtctacctcggcaacgcgcacggcacgagtgccatggccggagccggtgactccacgcgggcgaaaaaggcacggggcggccgcggttggcagggtggtctcggttcgacggcgcggaaccagtaccgacgatcaccggtgactaatcgacggaacagagaagatggggtagagagaagagaaggtccggcgaggaaattcacctcgggtggagcagggacgagggcggggctaggcgtgacggtggcagagcacgatcgcggacagtggtcgagctctaccagcgacagaatcgggcgcagggggcctggcgatggggaagctccggcgaacttgaagaacaggcgcgcgcagctcgggtga

SEQ ID NO: 1017 - DNA, 1201 bp, Zea mays
  Clone ID: MRT4577_100928C.1
cgaggcggcgggtcaggctgattggtggtagggtcctagagatcatgggggagaaatccccttgcaattcaattttgaatagcaagaggatttcttcccccagggatccccggtcaccaaatcagcccgtcagtgtcaactcctcctctccgccgccaacagctgcggggagctcgccagtcgccacttcgccagaatggttgcccacacggtggcttctcctcgctttgttcctcctaccggcgtggctgctgatctcggccgcttttgtgtaatttgtttggatcccgcagttgcatcagtgccaggcagtgggtcgcgcgctgccagtccccgctgatgagcaccccaagatctaccgcatggagcttgcgctaccaacgagatctgctccaaatccaagctctggtactatctgaggaagctcaagtctcaagaaggtttaagagcaacggtcagattctcgccatagacgagatctgagtgtaaccctacaaaaatcaagaactgtggcatctggctgtgttaccagtgcaggacaggttaccacgacctgcacaaggagtaccgtaataccaccctgaatggtgccatggagcagatgtacaatgagacggcttcctgtcggtcaccctacgtacagatcatcaagacggcaacaatcaactttaagctttgcaagagggacaacaccaagcagttccacaattcaaagttcaagtttcctttggtttactgcaacaagtcaggccacaaaataggaagctgaagaccaccttcaaggctttaaggcccaacttgttcgtgttatccaacttaccctgacaccatcccaaatctgtcaggctgtcagtctggtggtttgctagttcagcgtaatgcaatctacatgcaacctattgtttctaagttctagttggaggtccatgaaagggttcttagtgtgatggcaaaggcttccgagtagcaccctagtgacccgggtctggtgggttgctagttcagggtaactcaatctacatgcaacctattgtttctaagttctagttggaggtccacaaaagggctcttagtgtgatggccaaggcttccgagtagcaccctagtgacctgggttatgactcccagtgggagtggatttatgtggactgggtaaaaatatccctttgtctaaccatacgtcaaagcacgatttaaggcc

SEQ ID NO: 1018 - DNA, 212 bp, Zea mays
  Clone ID: MRT4577_100929C.1
tcttcctcccacgcttcctctaaaagcaccatataattttccctccaacatcacattctcagtgtgcatgtctttccttacacgtacataatgtcatatcacatatgaaatattgatcaatgacattcaaacaatgttcatacaaaataacaagctaaaccatctcttttactcacaatgaatacctcctctacactataaactcaagtact

SEQ ID NO: 1019 - DNA, 553 bp, Zea mays
  unsure (1)..(553): unsure at all n locations
  Clone ID: MRT4577_10092C.1
gattgnaaanctttccctgcatgttgaggatcatcgcacacgggctgtgattgggactggccgtcatcgctgattgcagggaaaactcaataacataataagggaacaatgtcttcgggatgttggacagctagagcaagatcttgtgtttggcgatgctggaaccaaagaactaggaggttttgagaacacaattgcacttaacccagataagtttgaaagcgacaagggtgcaaaattaatgcagttggcaggattatctgctgatgacatgattgctgtaaataatatgcgttgcttatgtgggcctgataccaaaaagtcttcagtagggggttttacactgaaatttgatgttcacaagaagaaacacacaaatcgaaaagagcgaacaggggaaagaatcaacatgggcactctctcgattttaccctattttggagcaattgattgaaaatcttagcaaaggtgagctgccaaaagatgaatataactgtatgaatgaccctagtcctactgttcatggactgccaaccagtagctctgcccgaac

SEQ ID NO: 1020 - DNA, 245 bp, Zea mays
  unsure (1)..(245): unsure at all n locations
  Clone ID: MRT4577_100930C.1
ccggccggcatccccggtgccgaggacagggagcnacccngcccggaccgccaccagcccggccgccgcccccgcccacccccaggtgacgacagcgccgaccgagccacaggaatcagcgacgaacacagcgaagccggaggccaccaacccaaggggccacccgccggtagcccgcccgaggcaagagagagcagggccaccggcacgaccaggcagacggcgcgcagcnttgcgcagcggac

SEQ ID NO: 1021 - DNA, 275 bp, Zea mays
  Clone ID: MRT4577_100931C.1
cttttctcaaggatgattctgcacaacaggtgtgttcacacctgtgttatggcttctgcccttctatctacaacagatctcatcataaaagcctgactattgttgtcacgcgtgtcaacaaaaccaccaacgatacctacaccatcctcttaaaaatccaccgaatattaaatccacaccgtggatacatcatcatcaacatgcctgatatcctccttccttgtcttttattctcttactcgctaagatacgattattatgccaagaacctctta

SEQ ID NO: 1022 - DNA, 349 bp, Zea mays
  unsure (1)..(349): unsure at all n locations
  Clone ID: MRT4577_100932C.1
aattaaagacctttacaaatgatcgtcaataactttacataaactatatctttcttgtcataataacagcattatacatgggattttgtctcacggctgatggctgtatatgccaacagagggttaaaaaaaagaatttagcaataatcaatcttttactcacacctgaaaatcttcaccaccaatagatatcgtttagatcttcagttctcacgttatgcacatcactgcctcaatgaaatggttcattagcacgtcagcctgccactggtattggtagctctgctccttggaagacgaagaactgntgctgctgcctctctggtggccttcttcagcagaggctcaa

SEQ ID NO: 1023 - DNA, 1644 bp, Zea mays
  Clone ID: MRT4577_100933C.1
cctcgaggccggccgggagggatactcatcagtacatatactcaggtagcgcaacctggcctggcccggcccggcccagagaggagcgcgcccatatcgcttccctgaggccgagagcgaagcggagcgagcaccggacgagaggcatggccatggcgcgggcggagctccgcaccgtgaccgtgcgctcttccccgcttccgcgctgcgtcctctcccggctgctgccgttgctcctctcagtctcagccatcggcgctgcgtctgcggcgccactaaagttcgggatcaactacgggcagattgcgaacaacctcccgcagccgacgcaggtgtcgggcctcctgcagtcgctgaacgtgaaccgcgtgaagctctacgacgccgaccccatcgtgctgacggccttcgccggcacgggcgtcgagttcatcatcggcaacgatgacctctacaacctgaccgacgcacgcaaggcccgggcctgggtggcgcagcacgtccagccgttcctccccagcacgcgcatcacctgcatcaccgtgggcaacgaggtgctctccggcaaggacacgaccgccatgcagagcctcctcccggccatgcagaccgtgtaccaggccgtggtcgccctgggcctcggcggccaggtgaacgtctcgacggcgcactcggtcaacatcctggccagcagctacccgccgtcgtcgggcgccttccgggaggagctcgggcagtacatccagccgatcctcaacttccacgccgaggtcggctcgccgttcctcatcaacgcgtacccgttcttcgcctacaaggcgagccccgggagcgtgtcgctgccgtacgtcctgttcgagcccaaccccggcgtggtcgaccccaacaccaacctcacctacgacaacatgctctacgcccagatcgacgccgtgtacgcggccatggaggccatggggcacagcgacctcaccgtcaggatctccgagaccgggtggccgtccagaggggacgaggacgaggtgggcgccaccgtggccaacgccgccgcgtacaacgggaacctcatgaagaggatcgccatgggccagggcacgccgctcaagccgcacgtgcccgtcgacgtcttcgtgttcgcgctcttcaacgaggacatgaagcccggggcaacgtcggagaggaactacggcttgttttaccccaacggcacgccggtgtacagcctcggctttttcaacggagcgtccttcagcccgtcgccgacgtactcctcttcttccaagctggcgattacatttcagatggcggttgttgtcctgctcgccagcttctccatcctacacagtgccgtgccgtgccgtgcgtgaagattattgctatttttttgactaacccatctgtgccttcattgtacacattaggctagctaccataacccatattagtctgacttgatgtaaagcatgtgcgacagtagtgctgtccagctcaattgataatgcgtatatagtatctgtttggcgtcagagtagagttattttactcgttatatggacgtctcttacttcaaagtagatattatttgaacttttgaagcgaaaaaaaaaaaaaaaatttcggtaaaaaaaaaaaaaaaaagcggcc

SEQ ID NO: 1024 - DNA, 701 bp, Zea mays
  Clone ID: MRT4577_100934C.1
ggccggggggctggctcctcagactcgccagggtgaccaggcttagacgaagctggtcgccgcgctcaagttccctcggcgccgccgtcctcgagtttactcgacatctccgcttactcccctcgtttaatccactcggctacgcctacctccaagccatggcgacagatgcgttagccatgctagcgcctgtggctgcgataatagccgcgctcccagaggcgcgcggccctgtgcgcagcctctggcagggcctcgcgcgccatatccgtcttcttgcgcccctactaccgggccgccaagacagggacctggactacgccttgaatctcgcatactcgctgcgtgccgagcgcaacctcttcctggcaggtgatgactgcagctagatctaccatagtgcgcgctgaagctttgcttgactgtgcctccaatctgcatccgacctatgaatgagcaccatcatgaaccgaccacccaggcgatgcgaggggatgccgggctacaacgcttggcaactgatcacagactcattcactctgtcttggatgccttgccacacaagagcttctactagcctgaagaatgctggacaagtcgatcttgttcgttctcagttcaaaagggctgtatcacagctgctctaccagatgcacagttgttagcagacatatgctttggtcttgctgacaaggactttg

SEQ ID NO: 1025 - DNA, 491 bp, Zea mays
  Clone ID: MRT4577_100935C.1
tgtccgggatcaacttagcaactcatccatcttcataacaaacatccaaccaacaccacctttcaaacttcaccaccaacaaccatcagcatgtctgccaaccccggaaacgtcattggaggccacaaggccaacatcaacaaccccaacacctcggaggaagccaagcagcactccaaggaagtcctccaggatctcgagaacggcggtgaaatcacctctaagtccaccagcgaccaggacaagaaccccaacaatgtcgctggcggcctcaaggctactctgaagaaccctaatgtttccgacgaagctaagcagagcgctgaggagaggctcggacagttgtaagccgctcaggactatgcaatacgagggcttgatgcctatgggaggatcgatgaggagggaaggcattgagccgagtcggtaaatatgagtgttttagcaccgtcaatgacaataacgctttacgcctcgcgtcttctgccttg

SEQ ID NO: 1026 - DNA, 394 bp, Zea mays
  Clone ID: MRT4577_100936C.1
ataacatttttgtgaatgtcatgtaaggcacatcacggagtgactgtaactgttgtattgagcggaacatttgccaaatgaaacactaaagcaacacgccgcgaaacactgaagatcgaaaccaatccaacagccgaaatacagaataaaaccgataacccaccaaaaccacgcaaggaaaacaagggaacaacactaccatacattacatgaaagaaaaacatgaaaagccacaaaacaaacaacgaaagcaaccttctccttaacataaatcccaaatgggggaagacatcgcctgggatttgcacccacgcgtacgaccacgcctcccaaaacccccgggtccacccgggaaacccggaccggaccctgcaggcctcccagccttccctat

SEQ ID NO: 1027 - DNA, 283 bp, Zea mays
  unsure (1)..(283): unsure at all n locations
  Clone ID: MRT4577_100937C.1
gccctccctccgaaaaccagcagcaccaagcccagaagggggccagaaaaggaccgcgggggggaccgcacaaccggaagaggccggaaacacacaaccggacncaggggagacgaccaagaccaagggaaacagcaaccagcacccaacgcaacaagaaaagcggaaggcccgcccacacagccagggggaccaccagagaccaccaggccaaacagcccggagaggaaacagcaccaccgaacaggcacccggcacacaaggaacacaggagacggacaac

SEQ ID NO: 1028 - DNA, 189 bp, Zea mays
  unsure (1)..(189): unsure at all n locations
  Clone ID: MRT4577_100938C.1
tacgagttcttcgacggctggggcgaggacatctccggctgccgcagttatttttacctccccaagaacgcacacgtcggccgggctgactctataagagccggcccgtcccacccacngntaccttatctatttttttcaaacttccctacatgctctacatttttctctaattataactttttctaa

SEQ ID NO: 1029 - DNA, 722 bp, Zea mays
  unsure (1)..(722): unsure at all n locations
  Clone ID: MRT4577_100939C.1
cggaaagatgagatactcaaatttgtgcatcccatgctggcatccttgatttgtgacatttggattgtgagcacaaaatttgaaatgaattcaaatcaagtttaaaagatttggaaacaaaacaagaaaatacaaagaataaaagaaaaaaaataaagaaagcctaatctggcctgggggcgctgttttcggcccacttggcctttcctctgtgcggcctgcccagctcggcgtcgactcctcggtcccaccgggcagtcactgatcccctcgcccgctcccattcaccaattaggtcgctgcagggtggggcacattcacctgccccttccacacgcgcatgccaggctagtcgcccactggctagcggcccccgcatgtcagccgaggcaccactattcttctccttgcaacgaatagtgccgaagcgcatggcactgcggggaaatcgggtgtcgttgcgttgttacaccgaaccgacctcccgaaggccatatagcggactctcgnggggttttagctccacctttcgcccccacaaatcatcactggacgagagaattgagatagaagggagccgttggtgtccgccgcactagaatctcaggtcaagcataactaagctcttggcgagtgtccaatagggtttgcccgatcgggggaaagtttgttgggtaacttgcctagggcgaattgtgaccccgcgcctcaaaatctgtcgc

SEQ ID NO: 1030 - DNA, 2464 bp, Zea mays
  Clone ID: MRT4577_10093C.1
aaaaaaacagcatcagggcggtagcgtaatttccctggccggttgcggccgacgacctcttcgagagaacgaacgattcttcctcccgtttgcttcccctgcccgcactctgcctcgtcaatctcgctccgcgtcccgcttccgctgttgctttcgtcgccatctcgctccggtccccgccgctgctccaagtgggagccaagtcatctctctggccgaagatccaggttgagtcggcgtcgccggcagaggcaagagactccggcgcgatgtcgttggactcggaggcttcctcgcagggtggggactaccgtagcttccgccagatcacgcgagatcgtttattatttgaaatgctcagatcaactaggaagaattcgaaatcaacatggaaggttcttatcatggataagtttacagtcaagattatgtcatatgcatgtaagatggcagatattacagaagaaggtgtttcattggtcgaagatttatataaacggaggcaaccattgccttcactggatgccatatatttcatccaaccaactaaagagaacattgtcatgttcctatccgacatgtcaggaagaagccctttgtacaagaaggcatatgtgtttttcagttctcccgtacataaagaattagttgctcaaataaaaaaggattcaagtgtactacctcgtattgccgcacttagtgagatgaatttggagtactttgctattgattcccagggtttcataactgaccatgagagggcattggaagaactttttagtgaaaatgcagaaggatctcacaagtataatgcttgtctgaacacaatggctactcgtatatccacagtatttgcatcaatgagggaattccctcgtgtacactaccgtattgccaagacgattgatgcttctacaatgacaacactacgagacttagtccccacaaagcttgctgccagtgtatggaattgtcttgcgaaatataaaacgacaatacctgaatttcctcaaacagaaacttgtgagctacttatagtagaccgttcaatagatcagattgcaccaattattcatgaatggacttatgatgctatgtgtcatgatctgctttgtatggatggcaacaagtatgttcatgaggttccaactaaaaatgggtcggcaactgaaaaaaaggaggtcctgttggaggatcatgaccctgtctggcttgagcttaggcatgcacatatagcagatgcaagtgagaggctacatgataagatgaccaacttcatttcaaagaacaaagctgcacaattgcatcaagcacgaaccgatggagaattatcgacaagagatttacaaaaaatggttcaggctcttccacagtacagtgatcaaattgataagctttccctgcatgttgagtcactttattttatacagattgcaggaaaactcaataacataataagggaacaatgtcttcgggatgttggacagctagagcaagatcttgtgtttggcgatgctggaaccaaagaactaatcaactttttgagaacacaattggttgtaagtcgtgaaaataaattacgcttgctgatgatttatgcagcacttaacccagagaagtttgaaagcgacaagggtgcaaaattaatgcagttggcaggattatctgctgatgacatgattgctgtaaataatatgcgttgcttatgtgggcctgataccaaaaagtcttcagtagggggttttacactgaaatttgatgttcacaagaagaaacacacaaatcgaaaagagcgaacaggggaagaatcaacatgggcactctctcgattttaccctattttggagcaattgattgaaaatcttagcaaaggtgagctgccaaaagatgaatataactgtatgaatgaccctagtcctactgttcatggactgccaaccagtagctctgcccgaacaagccccgctcactcaatgcgatccagacgaacaggtggcacatgggcaagacctcgtggctctgatgatggatattcaagtgattctgtgttgaagcatgcctccagtgacttcaggaaacttggtcagcgtatatttgtttttgtaataggcggtgctactcgatcagagttacgtgctgcacacaagctttcatccaagctgaagcgagacatcatccttggttcatctagccttgatgatcctccccagttcatcacaaaattaaagttgatgtcagtagaagaattgacacttgatgaccttcagctgtaaatggtgtccgcccacacggagtgtaaccttttattttctctgttctgtcagctcttatttgtgggggcctgtcatattcattcggtgaaatgcattcttaataccacttttactggtgaatgtaagaaaaaaaactgttatgcaattaatcttttcatgcaattattgtgcaaccaaaaactcgctggtgc

SEQ ID NO: 1031 - DNA, 142 bp, Zea mays
  unsure (1)..(142): unsure at all n locations
  Clone ID: MRT4577_100940C.1
ngtcggtcggctgccgcaaactgatataagccggcactccttaaccgtatgcgcgggtcatactaaatcaaataccacaccactctactgacgccctacgagattaatatttttctttaaccatttgtaacgtttatattat

SEQ ID NO: 1032 - DNA, 268 bp, Zea mays
  Clone ID: MRT4577_100941C.1
ggcgcagtcgcacccgtacctcagcattgaattcggggcgtggactgtggtgctatgaccgcctgggcgggccgactgcggacttcccttactcattccatccccgctgacccatgcgggcatcccacagccagatctgcgaaaccccggctccctcgattcccaatcccacccctgccccgaggagatcagatgacggcgagctgctgctggtccagtgcatcggaatctgaggcgatgccggctaggctcatcggtggtgcaccct

SEQ ID NO: 1033 - DNA, 237 bp, Zea mays
  unsure (1)..(237): unsure at all n locations
  Clone ID: MRT4577_100942C.1
agactttgacttgccatcgattcatccggcgcggcgggctatggacctgcagcagcaagctaattaanagggtgtttggtttctagggactaatgtttaatcccttcaatttaatctttttcagcatataaattgctacatacataaactataccttattttagtttctacatttaataattttctcactatattctactacactttcatgactaattattactccctaaaaaccaa

SEQ ID NO: 1034 - DNA, 193 bp, Zea mays
  Clone ID: MRT4577_100943C.1
tgggatccgccaaagcactaaacgcgcgtaactcactgcaaagcaagacgggaaacgacgatttagcacttttacaagccaactaaaatctaatgacctaaaactcggggggggggtacaagcattttttcttcgtccacaaaaaatggatgcaccatccccaagtaaatcgcacagcctgaaaccccttgcc

SEQ ID NO: 1035 - DNA, 1058 bp, Zea mays
  Clone ID: MRT4577_100944C.1
tcggcggcactcgctcgtctgcccattgccctgccgtgtcgacgcagattgatccggtccgatccatcaccgtggcgtagcccagctccgccttgtcgtcgtgggcgcgttcatggcggtccgaactatcaaggtgaccaacgtgcctctctcggcgaccgcggagaacatgaaggagttcttctccttctccggcgagatcgagtacgtcgagatgcgaagggactcggagacgtctcaggttgcttatgtcaccttcaaggagttccatggagccgatacagctctgctgctctctggatcaagcatgtgtggcgatgtttccgtgaacatcgcaccggtggaagactacgaactgccaccggaagcgtactcccatgcaggagcaaggtctccgggtccgggaacgccgacgggggaggccgtgaagaaggcggaggaggtggtgagcaccatgctggccaggggcttcgtgctgagcaaggacgcgctgcggcgcgcacagtccttcgacggccggcaccagcagctgctgtccacggccacggcgcgggtggcgtcgctggaccgccgcctgggcctcagcgacaagttcagcctcggcacggccgcggcccgcggcgcggcgcgcggcgtcgacgagcgcttccaggtcacggagcgcgcctggggggccttctcggcggccggggaggtcgtggccggcagcccctacgcgtcccgcggcgccgcctgggtgtcggcggccgtcggcgccgtcgcccgggccgcgtccgacgtcggcgccatgaccatggagaaggtgggcagggccgaggaggagggggaggcctcggcggcggagcatggtcactacgcgtcgtcccgtgtcgacgtgcacgacggacagggaggtgcagctcagcacggtgaccataataaggcaatgtgataaaagtagtagcgcgcacgagtatgaatccataaacgttttttttttgaaaaataagatagaaatgtaactgcatgcatctgtccgattattttgacacaataaattctatatccttatcggtttg

SEQ ID NO: 1036 - DNA, 322 bp, Zea mays
  Clone ID: MRT4577_100945C.1
gcatttaagtgcgagatgggcgcccacactactatagtgcgagcagattgcgcccaataggcgcaacgggagagggagatgggcgctggactggccggcttcctttgcgagtgcagaggggagggcaccggagctgctgttatggggcagtgcccatacagtctgttgctacctctgttaaagggcctgaattgcgaggcggactgctactgagagagaactggatctacgcgtgcgagaaggtgtgcatgtcctaacgcaacctacatggaacgctattcgttatggggactatatgtgttcaagacatcgcacaccccgt

SEQ ID NO: 1037 - DNA, 303 bp, Zea mays
  Clone ID: MRT4577_100946C.1
atggcggctagccttctcttcctggcggtagagcttctcttctccctgccacgatcccccatccgagccatccccccgcggaagacggctcctggacacagttcacgccacgctcgaactcactctcctttgcacgatcgtgggtggctcacggtgaagggagggatagacggcaaccccggcgtcctgccttatagccccgaggcaggccggatccaggagtccgagtccgcgatggagcacgtgctttggagcagcgacagggagcgcccgccatggatctcggtgtccggcccatgctaa

SEQ ID NO: 1038 - DNA, 391 bp, Zea mays
  Clone ID: MRT4577_100947C.1
tttttttttttttttttttaatgcatttttttttttatgtttttgagcaaagtgtccttggttttggggttttttttttttttttttttttttattaaaaaccaaaggggcttaaagggcccgactttaattacaaaggcaaattctagagccgttcaccagggggtggggggggggaacccccaaacttttcccggggcacaaaaaaagggttttaaacaccaaaacctgggtgggcgggcaaaaagattcatgccagcagataagtttttcttctccccgggggcggaaatattgcccccctttggggggaccctcttgtaattcctttttcaggggggggaggtccctgggggccttggaaaaaacccccttctttatgccccttccg

SEQ ID NO: 1039 - DNA, 296 bp, Zea mays
  Clone ID: MRT4577_100948C.1
aataattttccattatcctaaaaccctgacttagacattttttacaagagaccaatcagatgcaggaccgaacccaagcccttggttcccatcccaaaaaaccatggcagcgtggtgaaaccccatttgatgccgaactatagtcggcctacccagcacccagtagaggaagcaaagggacaaagatacatagatttagaacaacgcggaacccatacacgaggaccacggcctgggacccggtcatgaccatgcacaatgtagcagctggacaagctgtctaacacctgaggacc

SEQ ID NO: 1040 - DNA, 390 bp, Zea mays
  Clone ID: MRT4577_100949C.1
aattcggcacgaggccgccacctcattgtggggcattcaaattcggcaattttggcaacttcttcttcttcttcttggccctggggcttgaaattttggaatcggttcatttatggaaaggcaacaagccccatggattggcggtttttaacggcaacttaattgaaaggttaacggtttttaacgggaatcggcaacttcttcttgggcggcggtaatggaaaaatttcaaaaaaggcatttccgaaggcctggaacaacaaaacataataattggcaaaagaagcattaacataagacttaatttaaggaacttatttcttggaagtggcaattcaattaacggaaggtttgaagcttttaaaggttggaaaccaggaattaatggag

SEQ ID NO: 1041 - DNA, 434 bp, Zea mays
  unsure (1)..(434): unsure at all n locations
  Clone ID: MRT4577_10094C.1
cccacgaggccggccgggagcgccggacccccccgcccaccaccgggggggaccacgcgagaaggaggaaagagcagaaagacggcggcagaacacggaaggaggacgcgaacccaagaccggnagaaagcggcccagaacagcaagaagggggacacccaacagaccaggaaccacagcaccgacaaaaccggccacaacgaggagggggaggggacacgggccagacacaaggccacgcagcacaagaaaaagcagaggaggaccgggagcagacgaaacgggaccaagcgcgccaaggggagcgagaacaccaagaaagccaacggcaggagcaagaggaagcagaggcgaaaacgaacagggcaggcacagagcagccggagaagaaagaacgaacgcagaaggaaagccaagaaagaccagagcaaggc

SEQ ID NO: 1042 - DNA, 225 bp, Zea mays
  unsure (1)..(225): unsure at all n locations
  Clone ID: MRT4577_100950C.1
ggcctgcgcncattgggcctgtttggataggggggttgccgnncaaatcnaaccaggggggtgagcatgcgnaaagcaacccctctctccattcaaacaggccctcctgcctccgttcctgggctagctgncgggacggntcagctccagctttgcggncctccagctcttcgcagaataagnacaatattganaagcaaagcaagaaangcgtggggggggggg

SEQ ID NO: 1043 - DNA, 340 bp, Zea mays
  Clone ID: MRT4577_100951C.1
tctgtccgttacattcactgtttgggtgtcttcttatcataccattgacaatgtcaataccgggggggaggacaaggagggcgggccaccctaccaacatcgcctaatcttcttcggcaagcagctggaggatggccgcacccttgcggattacaacatccagaaggagaggactcttcacctggcgctcctgctaatgggtgggatacatatttttgtgaaaacattaacaggcaagaccatctcctttgaggctgagagctctgacaccattgacaatgtaaatgccaaaattcatgacaaggatgatatttcctctaaccatcagcgttatgatttt

SEQ ID NO: 1044 - DNA, 667 bp, Zea mays
  Clone ID: MRT4577_100952C.1
atttcttagatagagcatatacgatcctgtcgactggcctaactccactggctcggagctgttgccgctctctactgattgccttctcgcacgtcctgcgatctacaccgacgaccatgccctgacgctcggcgtgtggatccgcgtcggacgggtccctctccacgacgcccacgcgggctaggatgtgtactgccttgagcttgacattcaagatgtgcaaatacacgccctgcgacactactgtttgctcatgcgattttgctgtccacactcctcttacgtgatattgactgctgttgattgatgtcccgcgttgctcttgatcaccatgtcttcattgttgtcgacgagcggagaactggaacctacctctcgctcttttatgctgaagagatgatcggtgcaaaggatgattgaatgctctacttagatggggatcactacaccatggcaaaggacagtgcagaactgtgcgttgatctattcacgaattttgccgaccactgaactgggctccatatgttccatcgtgtataacgctgaaaaaagaagaaacccctatctggccttgagctccctcctcctagagcgtctgtgtggtgactactgcaagatagccgaactcgtggtcacagcggacccttgcgcccaagtgtcaacttct

SEQ ID NO: 1045 - DNA, 1203 bp, Zea mays
  unsure (1)..(1203): unsure at all n locations
  Clone ID: MRT4577_100953C.1
cccatacgtccgnccacgcgtccgcggacgctggtcgacctggctctacgaggccgagggagagaacgaccccttcgacgtgatccactccgagagcgtggccgtgttccaccgctgggcgctcggcgtggacaagctggtagtgtcatggcacggcatctcgctggaggccctgcactcgggcatcttccaggacctggcccgcggcgacgaggagcccaggtcgccggcgctgaaccagagcctgggccagtccgtgtaccgcgtgctctccgaggtgcgcttcttccggagctacgcgcaccaggtggccatcagcgactcgacgggggagatgctccgcgacgtgtaccagatcccctcccgccgcgtgcacgtcatcctgaacggcgtggacgaggcgcagttcgagccggaccccccgctcgggcgcgcgttccgggaggaggtcggggtgcccaagggcgccgacctcgtgctgggcgtgtcgggccggctggtcaaggacaagggccacccgctgctgtacgaggccttctccaagctggcgctgcgccacccgaacgtgtacctcctcatcgccgggaaggggccctgggagaaccggtacatggacctgggccgcaacgccaaggtgctcggcgccgtgccgccggggaagctgaaggcgttctacaacgcgctggacgtgttcgtggacccgacgctgcggccccaggggctggacctgacgctgatggaggcgatgcagtgcgggaagccggtggtggcgacgcggttcccgagcatcaagggcagcatcgtggtggacgaggggttcgggtacatgttcgcgcccaacgtggagtcgctgctggagagcctggaggccgtggtggcggagggcgcccggcgcgccgcgcagcgcgggcgcgcgtgccgggagtacgccaagtccatgttcgcggccaccaagatggcgctcgcgtacgagaggctcttcctctgcgtcaagaacgacaccttctgcgggtacccagccgagttcgattgagcagctcctgcatgcatgtgcgttttgctaataattatacaagtgctgtacggtgctttttccgtcgcgtttttacgttgaactaccaggcatatagatatttaacttggagtccgtttttatgaatacaaacaaatgaacaaaaatctacgaattgctcttttttacgc

SEQ ID NO: 1046 - DNA, 214 bp, Zea mays
  Clone ID: MRT4577_100954C.1
ctcgaggtctaccacatgaacagacacatcgcaggttttaataatggctaggcatgtcaagacagcatttccaacggcttatgaactccgatgcacatattcaaacttctggacgcctacttaccgacactgcttagattgcaatacttggcttccatcagtcgcttgtaatgtttacagtacaataaggacgagtgcgactacaatcaaatct

SEQ ID NO: 1047 - DNA, 856 bp, Zea mays
  unsure (1)..(856): unsure at all n locations
  Clone ID: MRT4577_100955C.1
ggccggccgggaaagaatatgtttataattataatgtgaatagaacatgatctttaacttagatatgacttatattagagttaatccttaatgtatatctcacatgatttatagaatcaatttaaggtctagttttacctatttaatcatgaaaatcttctgaaaatcataactctttaacagtaacttgaattttagtgattctcgaacccacgaccacgtagcaatgcatagaatactcttacattgtttgttctcatgtttggtgtgatgttaattttgcctatgccatgtttgtttgtattgctacgattagcagcgaggttatgagaatctgaagatcatcctggtaccttgaatctcgagtcccaggcaagttgtgcccttgatcacttttctttacccaataatgttcctgttaatcattgtgacatgctcaggttaatttgatgggacctaataggtttccctagacttgtttatcccacaccttgtttaccactgaacttttgggtagttttgctactgctttgcttagtttgggattaatatttgttgngggtcttcttcctcgccgaaggtcctcaagataaaaacaccttcggcaagataatacagagatatatgtgacatgatgatacaaaaggaagccaaagctatgactgaagaagcttcggtttagtattatgacaaagccaaaggtcgtcaccgactcaagggaaaaaggttgtttaatccttgatcactcacattgtaagtacatgtaaatgacagggacataaatgtaattgtgnctgggctgcgttccgcgcctataaatagatgacagtacccccgtactggtcacgctggattg

SEQ ID NO: 1048 - DNA, 810 bp, Zea mays
  unsure (1)..(810): unsure at all n locations
  Clone ID: MRT4577_100956C.1
ccggccggggttttatgccggggccatccctgcggcagcccacctgtcaggcgagcccctctctcgggaatcctcccaaaattccccaattacaggctgcctcgcagccgcaggccaccttcgcgcgcccacgtcgccgccataccatacccgccggcagccgccccgtcttaagatttccctcctctcgtctcatcgctcgctgtccctcagagacccgacagccagcatactcctccctcccgcaactgctacctttgcaccgtgggagcttcccgtttcttggatctctggacggccggcgctgggcatgatggatggaggccaagatggcccggaaagctcagatcacaacatggacctagaagaaggcaatgtcaccattagggtcaaaagggcaaaagcaacaaattggcccagggtgatgtcaaagtttttgcttgattggtaccttgagaagaagaagggaatgccacccaagaccaagttcaagaagatccaccacgtttggtgcacatctgctgtaaatactaaattcagaacaacttactctgttgatcaggtgcatcgccattttagacgtttcaaggagatctggatcattgtgactcggtatgtcaatgagactgngagcaggtttaacaataaacacaaaatgcttatacttcctcctgccactatggctagtttaccagtagctgagcgtgctattcttgttaaacccattccattcttcgaccatctgctacatctcttcaatgatggccagctggatgcagagtgcatgagagaccctatcatgactgacga

SEQ ID NO: 1049 - DNA, 327 bp, Zea mays
  Clone ID: MRT4577_100957C.1
cttccggccgcagaaaaaacacactcatccgcttaaatttcggagtaagcatatagttaaagttaggggcaatgccaaagaaatgaaaacggccatgagtgggaatcatgattcagtcgtggatcatgccagaatacatgataagagtaaacggcatgaagatcctgcacgttcagcaaatgcccaaaatgccacgaaatctcaaaagctcacattctactgaaaagatgatggactcggtaatctgcacatcggcatgtatctattctagttcaactccatctatgttactaatgactgcttctgaaagactccttgtccatatat

SEQ ID NO: 1050 - DNA, 1324 bp, Zea mays
  Clone ID: MRT4577_100958C.1
ttgggtacctcgaggccggccgggctgtcattccagcccctctctcgggaatcctcccaaaattccccaattcacaggctgcctcgcagccgcaggccaccttcgcgcgcccacgtcgccgccacacccgccggcagctgcccccgtcttaagatttccctccgctcgtctcatcgctcgctgtccctcagagacccgacagccagcatattcctcccccccgcaactgctacctttgcaccgtgggagcttcccgtttcttggatctctggacggccggcgctgggcatgatggatggaggccaagatggcccggaaggctcaggcagtcgacataagcatggaaagaatccagaataaataagcaaggcctctaggtgtttaaaagaaatctgtgtatgaactatggagtcgttttgcctgaagcaatgacagatcacgcaaaccgagctgatcttgtttgaacacaagttcaacttctaaaggatgccctaagctaaaagcaaaactgtttacagattcctgaaggatgaaacccagtatttgaagtatcacaacatggacctagaagaaggcaatgtcaccattagggtcaaaagggcaaaagcaacaaattggcccagggtgatgtcaaagtttttgcttgattggtaccttgagaagaagaagggaatggcacccaagaccaagttcaagaagatccaccacgtttggtgcacatctgctgtaaatactaaattcagaacaacttactctgttgatcaggtgcatcgccattttagacgtttcaaggagatctggatcattgtgactcggtatgtcaatgagactgggagcaggtttaacaataaacacaaaatgcttatacttcctcctgccactatggctagtttaccagtagctgagcgtgctattcttgttaaacccattccattcttcgaccatctgctacatctcttcaatgatggccagctggatgcagtgtgcatgagagaccctatcatgactgacgaatctaatgaggaattggaggcccagattgcgttgaacattattgcctcaggtgcagatacaagggaccaagatggggaagacctagataatataggattggagggtgaagataaccatcatgaggtcgcagcaagtagtggtgaggtgccttgtgaagtgatgtctgatactagtccaccatccgcgcagccatccgggtcctttgctgagagcacaatggctgctctgaagcctagcgcaaagaagatgaagatcatcagcaaaacgaaactaagcccaaaggcgcaggctgctctgccacgtgatggaa

SEQ ID NO: 1051 - DNA, 1136 bp, Zea mays
  Clone ID: MRT4577_100959C.1
tcggccagcagcaggcacgagcagcctccagagacccagtgcgttctcagagccaagcagcttgcaatataatggcgtcgtcgctcaagttcacggtgcggaggcggcccgcggcgctggtggcgccggcgtccccgacgccgcgggagctgaagcggctctcggacatcgacgaccaggacgggctgcgcttccacatccccgtcatccagttctaccgccggagcgcgctcatgggcgggcgggacccggcgccggtggtccgggacgccgtggccagggcgctcgtgcactactacccgttcgccggtcggctcagggagctggaaggccgcaagctcgccgtggagtgcacgggcgagggcgtgctgttcatcgaggccgacaccgacgtgcgcctcgaccacttcggggacgcgctgcagccgccgttcccgtgcctcgaggagctcatcttcgacgtccccggctcgtccgaggtgctgggctcgccgctcctcctcttccaggtgacgcggctggcgtgcgggggcttcatcctcggggtgcggctgcaccacacgatggcggacgcgcaggggctggtgcagttcctcgacgccgtggcggagctggcgcggggcgcggcggcaccgacggtccggccggtgtgggggcgggagctgctggaggcgcgcgacccgccgcggccggccttcgcgcaccgcgagtacgacgaggtgccggacaccaagggcaccatcatcccgctggacgacatggtgcaccgctccttcttcttcgggcgccgggaggtggcggccgtccgcgccaacctcccgccgggcctccgctcgcgcgcctccaggttcgacctcctcacggggctcctgtggaagtgccgcaccgcggcgctcgccccggacgccgacgaggtgatgcggatgatctgcatcgtgaacgcccgcggcggcaagtccggcgccgccatccccgagggctactacggcaacgccttcgcgttcccggtggccgtcgcgacggccggggacctcgccgcgaggccgctcgggtacgccgtggagctggtgaagcgggccaagggcgaggtggacgtggagtacatgcgctcggtggccgacctgatggtgctacgc

SEQ ID NO: 1052 - DNA, 1627 bp, Zea mays
  Clone ID: MRT4577_10095C.1
ggagtgcaaaggctatttgtggtggatgtctagctgaatcatttacagataaaagagaaatgaaatcacttgtacgtcttcttcgtgcctagggaccagaggaacagtccccgaggctaagggagcatacgtctgcgcttttaaacttcaccgatgtcaggattgaggcagaatcgagctaccgtcaagggcctaggtcccactccaaatacccaggataggattgcaagggaggtgcccctgaagcagatgattgagctgcgaacagtggcaccgcacggcatctaagcagctcacgccgcaatctaccgcccgccgtcggttcaggccgacgggggaggaagttcggagagggcgcctgtgctgtattctctgctcaaaggattagccttgcagttgccagacgaggtacctgataaaaatgagataattagattgagaaaggttgcgagcagtgttggtgttggcgacaaacatgatgctgagtgggtacactctattctggcagacgctggtgcagctaatgataattcttggatcctacttccatacctttgtgctgcattcatggtgtccaacatttggaacggtgctgtttatgatgtcaatataggtggactcagtaacaatttgcactgcctagcaaggtgtgtaagtgctgtgattgggggaagcgaatacactcgggtcgaaagggagcagcgaataaattctctttcaaatgtgcatacagatgagctgcaagaggccgagttaccgagccgtgtctcagcagaagcaaatatcaaatcttgtatgcagatctacgtcaaactgtctgcagggatcgtcctggattcatggaacgacacaagcaggcagcacatcgtcccgaagctgacattcctggaccagctctgcgagctgtccccgtacgtgccaaggagcaccttagaagctcacatcccatacaccatcctgcgctcgatataccaccagctgtacggaggctctctgctggcctcggaaccggcggagcagtccccaaggcagtcgcctctcatctctctggcacacgcgtccccgtcgtccgcaaggcagaaccgaccagagacaacacccaggtcccacaccttcgacccaggctactacagctcgtcggggtcccagcacgacgatggctacgacgcggataggagggccggacggctgctgcggagcttgaggcgctctggaccgctcgacttcggtgcgagcagaaaggcgaagaagttcgtcgagggctccagctccgggagcagccatggagctggctcgctgcagaggttcgcagtgtccagatctggccctctatcgtacagatagggggccgcatgtaatgtaaactctagagagcagtagatcttgctatgcgtgctggtttacgtagctagcagtagcaacagcagcagctagttgtgctgtaagtaaaacccattaattgcttaatttgtgttgactgtcgttaggcaagtgatttgaattagctgttgctcgtttggtttgtgtatcaacaatactattattcgttgatttttcttgatagcaaagtaaagtaaaccaaccttctcttgaaagaaagaaatagagagaaagattagacggaggc

SEQ ID NO: 1053 - DNA, 497 bp, Zea mays
  Clone ID: MRT4577_100960C.1
gcaacggaaatatcgaataacacaataatctctactatatttggatataaatttgatgtgtgactctagaaatccatttgagtgaaaagctatgtgtcttactttcatttacatacaagagagttcatttaacacctttgcctgaggatcattttgcaacgcaaccttgtccaacatgtttgcatcatctaaactttgcctgaggcgcttttaaaactcttccagcaaaatgattccttgctgtatgaaaaactgttccaggtggattttggttggagcttaatctttctttgcctcttgggggctgttgcaggttcttgacccacgtcagctaatcttttcaggatgttcattatagagggaacaaatctcatgaacagtgaaaggatggtaggaagaaatccatgttggaattccctgccaatttttgattgcacccaaagggcttttccaacaaggtaaaaaacaaaatttggcaaacacctaaaggggattcc

SEQ ID NO: 1054 - DNA, 188 bp, Zea mays
  Clone ID: MRT4577_100961C.1
atgagatcgcgaaacaaacactatgtgttttgagagaaccgataagcagagctacgagtcactgaccgaccgcttggcatggaggtagaacactcgtgaggcgcgcgcctgaggccgacgcgcggtgcggcgtggaggagctggctcgtgctcgggacaagcacctagagattgcggaggtgaacgcc

SEQ ID NO: 1055 - DNA, 347 bp, Zea mays
  Clone ID: MRT4577_100962C.1
gaacaaaaatcttttatgtaccggtacaaactcttcaccgaaaaaacacaaaccatgagtccatcaccataacaccaaaaacaaaaggacacaacaagggggatgatacttaaatactaacaccacgtaaaatggtaaaaaaaggcaattaattacatggaaaggcatccaatttaaccttctccccaaatcaagatccaattaaccagtttaaaccaaaacccatacaatatacaggaggaggacagtctcatattggcaacaaaaaacgccagacggccggcaatcaggaatttaaaaccacaaccagcaccaaaggaggaaaccggtaagggggaagaggcaaa

SEQ ID NO: 1056 - DNA, 212 bp, Zea mays
  unsure (1)..(212): unsure at all n locations
  Clone ID: MRT4577_100963C.1
ctcctgtacggtgccccccgggaccggggaagtncggccatcgatctttcgncattggncaactatcctcgatctacgacagggtatcgagagtcgatgctcacagtccagtgcatctccaacatccgatcctccgcaaaggctcttcatcgagaanccaccagcaaagtccaatcaatcgtcattcgagagaacatcgatctgggctccct

SEQ ID NO: 1057 - DNA, 316 bp, Zea mays
  unsure (1)..(316): unsure at all n locations
  Clone ID: MRT4577_100964C.1
cataatttctccngcgcctctnccgccgtcntcgtcgccctccnccncctccatcccgatggtggacctctcantgacgcgccgcgaggacctagtcgagcagggtgaggcacgctgcncggnacgatgggcttcttctggntggtgaaccacngcgtggcagagganctgatggngcggcatnctccgcnnggtgcaccagttcaacgagggaccccatggaggcnaacagngcnctctactcnangnacctcgctcgcaacctgnnttcgcctccaacttngacctcttcaaggctgctgnngnncaactggcg

SEQ ID NO: 1058 - DNA, 1696 bp, Zea mays
  Clone ID: MRT4577_100965C.1
ttattcggcacgaggttataactcggtgctcaatgcatgtgttctgtcacagcagtggaaaggtgtattttgggtgttccagcaaatgagaattggtggtttaccacctacaggagcaacatatgggttggccatggaagttatgttgaaagccaagaagtatgactttgtccagaagttctatgagaagatgcagaaaaatggcgtaccaccaagagcaataacttacaaagtgcttgtaagatctttttgggagcaggataaaattaatgaagctgttgaagcagtcaatgacatggaacaaagaggagttgttggagcagcaagtgtttactatgaattagcttgctgtctctgcaataatggaaggtggagagatgctatgttacaggttgagaagctgaaacagcttcccctcacgaaaccactggagtacgcatttactggaatgatcttagcctcatttaatggtggatatatctatgattgcatctcaatatttgaattaatgaaggaccactgcatgccaaatattgggactgtgaatgtcatgttaaaagtttatggacattgtgatatgtttgggaaggcaaaggacttgtttgaaaccaccaaggcttgtttcttaaattctcagacatatatccacgagcattcgtcattcaaagcagacacatatacatacaactctatgcttgaagcatctgcctctgcccaacagtgggaatacttcgaatatgtgtatagagagatggctctgtctcatcactgtctagatcaaagcaaatattcatggttgctcatcaaggcatgcagagctggaaagccatatttgctggagcatgcacttgactcgatacttgaaagaggagagatccctgatgtacagttgattactgaatcgatatgccagtcgtccgctcatagagattatggaaggacgctgcagctcttgaatattatgacccaggcctcaataaaaattaaagaagtcgagtgggattacctactacagcaaaatatgcatcaattcagcattgatgccctcgagggccttataaagtatctcagtactaatggtactaccaatgctgatcctgcagttgatttagtaagagcactgcagtcccaatgccgggacgataccagtactcaacagtttgaactctcttttcatggaagtggaaacaaatattcatgtagcagtctggcagaactagatcagctcacttgcaagaacttgtgcactgatataattcttgacgtccctggttctgatagagagatgcctcagttaggtgtcagtgctctcatgtgcagggacatctcattaaacggtcaacgagtggaaaacaaacatgagctttctgatcttgggcagaggggtccacaggtatctgcaattgacaaagtacttgattccatgaattcttatggtgacaattcgtatggggagatgccatcagcttcaaaaattcttgagctgtgggagcatgagaggtaaatgacatgtttgctccaaaaacagaaaattagaggataaatgaaatgctagcagatattatttgatatatgggcagtgcaatccttgtataaattactgacaaatgctgtaaatttgaaggcccctaagttggttcgtgggatcaaagctgcaaaaaaaaaaaaaaaaaaaaaaaaaaaaaaaagaaaggct

SEQ ID NO: 1059 - DNA, 290 bp, Zea mays
  Clone ID: MRT4577_100966C.1
gcaacaaaaccagggcgagattaacgggggggggggccaccccctgtcctccaagttggcccggtacctggaccggggaggcctccttggccaaggaccaactgttggacccggggcactggttccgccaggggggggggctcatttgcggcctgttttgggaagccgtcccccttgtgggggccgtttggatcgaactgttgccaaggaggattttggaggccatggggcgctttttaaggagggtcttttggtttaattaacccttttcctgctttgggggactttag

SEQ ID NO: 1060 - DNA, 120 bp, Zea mays
  Clone ID: MRT4577_100967C.1
ggccgccgccgcgctgagtttgggccgggctctgttaatctgggcgactttgaggttctctgctcgcgctgcccctgccgttagagtgaaacgattctggagaaagaccgtataatccta

SEQ ID NO: 1061 - DNA, 313 bp, Zea mays
  Clone ID: MRT4577_100968C.1
accacgcttacgacaacgcgcacaacatcgattcatacatatctcattctatactccatagagcctgatctctttgaccggacgatcaagattcaacttatgccgatgctatcctggataactcacaactacagcttcacattacaaccaaacatactatagtcatccattatacttcacgaattgtaaacactcaaacttacatcacaatcaatactaaaatcaacccaattattaaagataatacaagctctgactatctctccaaaactgtacagaattttcaactccaactacctaacatagaacaaac

SEQ ID NO: 1062 - DNA, 695 bp, Zea mays
  Clone ID: MRT4577_100969C.1
atgttatattgctaaccataaggatctgagacctacacttgagtggtccttagaaaaaggttggacagtacctcttgcgcaggcaaaccaaaaaagttggtatcccgctcgtcttcttcgacactataaatctgattcagacaagagcacctcaggtgatgaaaatggcgatgatgagaaggggggaatgcagcaataggtgtccagaacttgaaacatgcctcaggaagccctaggtcccgtggttcctaccaaaacgctcagaaaggacgccactgtcactccagtccaaggagagtgtggagatcagctcaacttccaagccaccagacccttgagagcagaactcgttcctgactgatggtgtgaggctgatgatgtcacggacgagtttctggatatgctgaacacggtcgagaccaggctacaaacacctcctggagtgtacgcgggaacttagcgacgacctgctggcttttccatccgctaggcggatgaagtggttctgaatacccaaggcgattgattggaaatacctgttgttgctgtactgctgtttgtagtcgcaggaagcactagtcttgcgcatagagatgaaactggtaagtgcaaaagaggatcatcatcggttaaaggcaactggtaagtgcaactcccgtcaaccttaaccaaggaattgaagtggcatgctgggg

SEQ ID NO: 1063 - DNA, 1400 bp, Zea mays
  Clone ID: MRT4577_10096C.1
cgggacggctgctgcaagaagctggaacgggtgcctttgctgtcgtcgacgtgtctttggacgacggcgccaggtgccgcaagatgccatcggggatgctgatccagcccataaggtacaacagctgcaaggtcagcgccatcgatcacgttcgagtagatgacactagcagtcatgacctcttccatccatgcctgagcggtgtcctcttcggggccaggcgctgggtgacgagcatggcgcgacagtgcgcgcggatcagagatgtgtttcatgtcaccaactgtaccctcaacgtcacttcaagggggaggaagactagcatgaagctggcagacaatctgctggccgactacaccagcagcgtcgccgccttccctgacgacgcctggaccgtccagtgcggtgtgggcacggaacaggacatcaagatcatgtacaagaggcaaagcgaaggcagcagcagcagcagcaacaccgcggtcgtgtgcgcgtgcgcgtcgttcctgctgccgctgcgcatgaggaaagcgttcgacctgctcaagaacaatctgctgcgtgccaagtgggacgtactggtgaacggaggctccgtgaaggaggaggttcgtgtcgccaatggtgtcggaagcgacgacgctgtctccatcctgcatgtcaagcatggccacggggcaaacagggacaccatgatgatcctgcagaacagcagctacgacgcgtccgggtcgttcatggtctactcctctctcgacaagcagctggtggagacaattacgaacccgggtgacagccaggcgatgagcagcatcaacctcttccccgccggcttctccctcgtccccctcaccaacccggacccggcgccgcaagagggctccggcagcatcgcacagcctggggcgaccgtgatgactgccgggttccagattctgatgaagatggcccgtgggaccggcctttgccctcgctcggtgtcgtccgcggtcaagatcatgtcagacaacatcaccaacatcaaagacgctctgttgaaaagccaccctgttttctacaagagcattcagtctgtcgactgaatagcggcaagggagaaagggaggtcgtccaatgcttgtggaggctgctgtttaaatcaaggatactgaaacggaaccccatcagctttggtcgccgcctgcgtttctcccggcaatatatacccgttccgtctactgtgtggaactgctcttggctgccaagagcctgtaatgatgttagtggaaccgaagttgtgctatgtggacccgtcacctgataatgtatgccatgttaaatccttaatttgcttgttgacttggtttggcatgataagtttagtgctcatctgttataacaccggaatggcaattggccaa

SEQ ID NO: 1064 - DNA, 721 bp, Zea mays
  unsure (1)..(721): unsure at all n locations
  Clone ID: MRT4577_100970C.1
ccggccgggagtcgtgtgcccgagccgaggttccccaaacacgcacagcacacgaacacacaccgcgcccagctccgaggtgatcttccggcggccggcgagatgagccgtggcacaggcgcgggctatgaccgccacatcaccatcttctccccggagggacgcctgtaccaagtcgagtacgcgttcaaggcggtgaagtcggcgggtgtcacgtcgatcggcgtccgcggcgcggactccgtctgcgttgttacgcagaagaaagtcccggataagttgctggatcagacgagcgtgacacacctgttcccgatcaccaagtacgtcggattgcttgccactggccttacagctgatgctaggtcattggtttcccaagcaaggaacgaagcagctgagtttcgtttcaaatggggctacgagatgccagttgatgtgttagcaaaatggattgctgacaaagctcaagtttacacgcagcatgcatacatgagaccccttggagtagagaaaaatgcccaactattcaagtgcgaccctgctggtcacttctttggacataaggcaactagtgccgggctcaaggagcaggaagcaataaattttctggagaagaaaatgaaggatgacccgaaattcacctatgacgaaactgtgcagattgcaatatctgcgttgcaatcagntctccaggaagatttcaaggccactgagatcg

SEQ ID NO: 1065 - DNA, 306 bp, Zea mays
  Clone ID: MRT4577_100971C.1
cggggcgggctacacttccgcacaaagacaacaaactaaacactctttctctttcctctccttcccaacccctcgttggctataaacaattttgcgtcgcccaaaaacaaccaaaccccaccttaccaccaccatactcttcataactcttcaactggtcacggctactgccacacttttatacccatgcccatacacatacacctttcaaaaccatctcaacatactcttatatctttaaacaaatttacagtactcaaccaaactacaaccaataagaaattctcataccccatcaccctaatc

SEQ ID NO: 1066 - DNA, 1482 bp, Zea mays
  Clone ID: MRT4577_100972C.1
cttttcttgcggagtaagaagagtggcggcggcgggccggcggcgtgtataggcgtgttcccgagcagaggcccccccaaactacctcgacggccgggagtcgtgtgcccgagccgaggttccccaaacacgcacagcgcacagcacacgaacacacaccgcgcccagctccgaggtgatcttccggcggccggcgagatgagccgtggcacaggcgcgggctatgaccgccacatcaccatcttctcccccgagggacgcctgtaccaagtcgagtacgcgttcaaggcggtgaagtcggcgggtgtcacgtcgatcggcgtccgcggcgcggactccgtctgcgttgttacgcagaagaaagtcccggataagttgctggatcagacgagcgtgacacacctgttcccgatcaccaagtacgtcggattgcttgccactggccttacagctgatgctaggtcattggtttcccaagcaaggaacgaagcagctgagtttcgtttcaaatggggctacgagatgccagttgatgtgttagcaaaatggattgctgacaaagctcaagtttacacgcagcatgcatacatgagaccccttggagtagttgctatggtcttgggctacgatgaagagaaaaatgcccaactattcaaatgcgaccctgctggtcacttctttggacataaggcaactagtgccgggctcaaggagcaggaagcaataaattttctggagaagaaaatgaaggatgacccgaaattcacctatgacgaaactgtgcagattgcaatatctgcgttgcaatcagttctccaggaagatttcaaggccactgagatcgaagttggtgttgtgagaaaagaagaccgcgttttcagagctctcacaacagaggagatcgatcagcacctgacggcaattagtgaacgggactgagctgccatatgttggacatttgatccctccaaactcactgcgccgtgccattgtgcttcggcagtcattaagtttcatagtcatcaaaggaactgagtgtaccatttcacgtttaagaccgaaaacaagccccctctcgatgtactcgtttcatatcgttctgtggttgattgaaattggcacggtttggttttgggttgctaaaatgctaactatatttgcatgtggccaatattttaaccgtttatatcagtgtttgttctgagtcagaaaaaaaaaaaaaaaaaaagattaaaattggcacggtttggttttgggttgctaaacttctgtgcaccgtgccattgtgcttcagcactgccatttagtttgacatcaaatgaactgaatgtaccatttcatgtctaacactgaaaacaaagctcgttgattaaatttggcacagtttggtttcgcattgctaactaaaaaaaaaaaaaaaaaaaaaaaagggcgagcgcgtccgcggtaaggatccaagctgcgtcgcggcagcaagctatt

SEQ ID NO: 1067 - DNA, 759 bp, Zea mays
  Clone ID: MRT4577_100973C.1
atgtcgggagatcacgccaagaaggatatggtgaccggcgagaagcccgccacaagccacgggaaggctccatcaggagagtcccacaacaagaagaaggaggaattacctcctcacaagtcgcatcggagtggcgacaagaaaaagaagatgaagaaggtggtctactacgagaccgattcttcgtcgccatccacctccggctccgacgcaccgtccgtcacttctaagcgccatgcgtgcaagaagtttagctccaagaaaatcatcgagcaagacacctcctccacacgcgaggcacaacccgtcgcattcaaagcgttggaggagaagaaagaagagtctacatcaagtaggcttcccattgacgcctccaagctcgacaacgaggaaatgacgctcatcatcaagatctttcgccaaatcctcaagcaaaggaaggggaaagattacaagccccgttccaagaaggtttgctacaagtgtggtaagcccggtcactttatagcaaaatgtcccatttctagtgacagtgacaggggcgacgacaagagggggaagaagaaggagaagaagaggtactacaagaagaagggtggtgatgcccatgtttgccgggagtgggactccgacgagagctccaccaactcctcctccgacgaggacaccgccaacatcgccatcaacaaaggcctcctcttctccaacgtcggccacaaatgcctcatggcaaaggacggcaagaagaagaaaaaatga

SEQ ID NO: 1068 - DNA, 272 bp, Zea mays
  Clone ID: MRT4577_100974C.1
atcttataatttgttacttaagggatctacaacatagtgttggtggttcacaaacccccaaaccctagctggggtacataacgcacaaacgacagcagcatagcagcgccggaagaggagacacaaccatgggaatacaacggaggaccgacatcaaccccattgatggctggatgggggagcaacctgccccaggaaagagggaatcctcgtgaagaaaatgaggcccggaaagacctagagcttgacgagcagaacccaaaagcgcgagg

SEQ ID NO: 1069 - DNA, 482 bp, Zea mays
  unsure (1)..(482): unsure at all n locations
  Clone ID: MRT4577_100975C.1
aaggggaagcaaaaggcaaggaggggggcccnaaacaaccaaaanagcccaaaacaaaaacagggcagggcggaaggttttttacaatccataaaccacgggaccgaacgaacaaaatttttttttgtaggggcccaaaaaaaaggnccacagangggggagcgggaaaaaggggacccccccgccccggagcacccaacccccggagccggccaaaaaaccccgggnncccaacggggggcgggaagcgcccgggcccaaaangggaccagggggcgaagaaccggagccggaacccccccagggccagccgggaaggccgccccaggagggaccgggggaggggcaacacccccngcgggggacccacacagcagccccggagcaaaagggaggcaccccgcacgacccccaaaggggggaagccacccaggggagggagggcccncncaggcccggcaaacccggggggggcaacgggg

SEQ ID NO: 1070 - DNA, 371 bp, Zea mays
  unsure (1)..(371): unsure at all n locations
  Clone ID: MRT4577_100976C.1
cgaggagaccttcgcggtgaccggcgtcatgagcgtcggggactncgggcgtgcgctgcggtgggtggacgcgtctgcncagagtcaacgcggccctgctccgtctccaggcgagacgcgacgcattcgtcgccggcctcgttcacgacggacgccgaagccgcaatcgcaaagctgtcggtggtggtggcggtggcccaacagacacggagaagaggagcaccattgacgagctcctgtcgctacaggaaactgatcctggctactacaccgacactgtcatcaaaggcattgtctcgatactgctcaatgcgggcacagacacgacggcgctgacaatggaatgggcaatggcgcagctgctgacgcac

SEQ ID NO: 1071 - DNA, 261 bp, Zea mays
  Clone ID: MRT4577_100977C.1
agcaagcagtacttcaccaggctcggtaagttcctcggcggctccggcgaaccgtcctaacccggcgggcccctattcaaaccgctcggcttcggcaagaccgagaaggagatgaatgagctcaagctcaaggagaacaagaacggcaagctcgccatgctcgccatcctcggttacttcatccaggggctcgtcaacggcgtcggcccgttccagaacctgctcgaacaactcggcgaccccgtcaacaacaacgtgctc

SEQ ID NO: 1072 - DNA, 502 bp, Zea mays
  Clone ID: MRT4577_100978C.1
actgtgcggcgctcgagccggccgggccgggaccacgcgtccgtatgaatatgagtaatatgtgtggagctacaatacttgtattgtttctctttgtattccttgcacaatgtcgtcctcatgagcttgatgtcgttggaacttcttatggtatcaccaaaagaaaagatgtattttgtcaggcgggtcacatagataataaattggtctactactgcatgcatcagaagccaaaaccaatatgctatgacactttgcaggagtgtcttgccaaatgcctatagccaatgatagatgcacaatctgtgcaaaccttaaggccatttgatcgatggtattaaacttaaaccatcattgataacctaaataatgtaggccctcatcgattggcaacataggagcttgttttgtttgaaggccactaacctatcattggacagcccggatcttaaggtattgcaaaaaaaaaaaaaaaaaaggcccctaaggccgcggccgctct

SEQ ID NO: 1073 - DNA, 523 bp, Zea mays
  Clone ID: MRT4577_100979C.1
ccctgatctcaacagtggtacagcacctgcacctgtatgtattccagataaccaacgggcctaacaaatgtttgcttctaggccacatcgtaacaggatgttcatcagtcttttgactttcagctcaacctgaagccagatttccttctttacatggtagtgataagagtacagagcctacaaaaattaggttagaacccctcgcctaaattcaaacggggccacacaaacaaggtaagaaaaggcaaccgttgctgtacatggtaatctacaaggtaacagtgtttgcgacgtagtttgaggaagagctgttgaacttggatgaaaaataattccttaagctatcaacgagctgccggatgtcatctaccaaggaccatgtcggggcgttcagcgctcgtatcgagttcaagcacactagaagggttcctccttcatgaagaagtacagtcaaccaaagaggaagaaatcccaggacagaaggaagcgcagcaaaaacaatacaagttaaggccagagctac

SEQ ID NO: 1074 - DNA, 223 bp, Zea mays
  Clone ID: MRT4577_10097C.1
cttttattaaataaaaaataaatggatattaggagtgtgacaaacaacaatacaatatgtgtgttgattgtggtatagagcaatatataatgatacactggcaagtggtacaacgggtgagtgaatgggtaaaccatgtggtagattaaactgtatcgcctggcattacatatgactttcgctagatagggtggtaattaagagggatgttaagattgaagtt

SEQ ID NO: 1075 - DNA, 3917 bp, Zea mays
  Clone ID: MRT4577_100980C.1
cgtgtaaaatgttttcttttcacgaccaacaaatgaacaaataccgtcttgaacatgatcatccgctagtgcctatacacttcggtttattctgaaggaaacagtaacagaactttatacaccttgtcgagggatgtaaatataatatacacttgaaagaatggactccgagaacgagagggtgccgatgaatcacttgtactgaactctcatgcagacttgagagagttgaaaactgaagcgccaagctgccgcaaccgcatcaggctaccgtccagccgccttcaggaacttgtcatatgggctagcaggtggcagcctgaacgaacagtctgattcgctggacgctgaatcgcagcggcgcatgcgccccttccttgttgactgtaactcaggctcagacagcagagaagactcattcgtttcaagcccatccacaccggctgaaccatgcgagtcagtcctcgaatgcttcaagctcaagaggacagacatcttctgttgcttctccatgaccagggcttcgcactgactcttcatctggtcgtacggtacagggttggcgggaactggaacgttggcaacttgccttgcggtctcatgaacagattctattagttggttgacagttagaacatctgacgaagccatggaacctgacgttttcctgtcagattgagacccactatgctcaaagatgatgtcgtcatcgtctagctcagaaggaacagtgtcctcgtcaaaacattcttcatccttttctgcatacattgaacaagagtgtggcatctccatgaatagtggagcaccaagaggaaacgaatcatccagggaaaactcttgaagaagttgctcttctatcccgttaaccttctctggtaaattttcgaacttctccctgaagtggcacatcacggtttctattaactctgtgtcaggcttgttgatggctgaaagaaaagccagtgcatcactttcatcttcctcggaaccataaaccatctcgctgttagatgactctgcagaggtattaacaagctggcagtcatccatcaagcgaagatgaggatcaaccattttctctggtgctgcggctttcacaagaggaattatctggtggagatcagcaatttttgctgaaaagatgagcatcgctgatgccatcgtatacagacaccttctacgagatggcttcaaatcactttcagggctaagagagtttctcctgagagagaacgccaactggaaacaacgaatacgtgtcacatgactggagctttttggttttgaacataataaagcaatgctgtacacaaggcccattgcttcaaaatttgcaggtaagttgtcatccagagatgcttgactccaaatagatgaaagaaggagaacaatctggtggtcgttcaacttcatgaactttaagttttcatcattaaaagctgtacgataatgctcatttagacatggcccccctgaatacttccttttatctggttctgtctgtgtgtatccattctcaggatccactatagcttctgatttgttgttttcttgcaaggattcttggatcttgtttttggtccgtgtttcattgattatggcctcagaagagaaagctgagagaaccaacaaatgcaagttatgtgaatcatcacccttcattgggataggaaagctgatgtccgaccatggacacgccattgaaggtgctacaatggtagatagaacacgatgtgaaccaatccttgtcttattgtctgagtgcaacattgctaagagaagctggtgaaataaagcttcaggaaatgccttctgatggtatgatgacttgtagacagatgctgctatttgtgatgtgcgataaacagatgaaattgttgttcttgcgatggtagcagtatgagagagattctcaagcattaccccaaccatatcaagaataggaccaacatccccaaccttttctgtcaactgcactaggcactcctccaaggccacataaagtgcactgtaccacttgtcacaatcagcatttgcattagatgcttcaatagcaaaatgcatacatttgcgcaagtgctttattaagtcactgatagcacttgctatcgtcactgatgccttcaactttgcatgccttgcaagatgtgaagcaacttttacaatattgatttgcttgacagaattcttggcaatacttttatggtctatgtgctttatagtgaaagataacaacaaatgaccatgttgccctgatttgtccatcagtttctgcatttcttgcagaacggaaagggcaatcccactttcaggagaccaatagtcgtggctgtcaaaaaggcggaaaagagggtcaagaatacgccgcacagttgtggcctcctttgcaatattagccatatttcgcaagcaaacccttgcccagtatgctggattttcagatgcagacattgtatcagatgccactttggcactattttgtccagacactggtaacacagccaagttcccattaatgaccaaatcatcatcatcttgaaatctgactacctcttttattgagagtgtttgattagcctcgtaacagcttatgatcactgagacaacttcatcaagttccattgaaatgtgtgagtggtcgcccatgtattggaccatagaagcaagagcctgaagagctgcagatcgaagacggagcccttcatcatcttctcttaattcgtgaccaattttgcaaagttttggtatgaggccttccaaattaaacatatgtgtgctatcaacctggccattcaggaagtcaacaagcataagacaacccagaacttgtagatcatcatgcgctttcatatcaagaagagtgtgaatggtgcttaatgagcttgtggctagcaatggcctgagctccttgcatgaacaaagaattttcctatagatgcatggcacaactttggccaacgtaaaattctcatgccttagatctttatagaatctctgttcaagatactctgtgatctttggtatgcgtgttggatttctcgagacataatcacagagtttcccaatccttctatcatttggctctccatccggttgcagctggtagatatctgctatgatcttcttgtaccgcttgacaggctgccgagagcgcgcccgcagagatgggcagaagtagcaaaggctgctgcaggcgggcagaacccgccgggacattacccccatttccctagtcttctttgattcgatgagcaaccaaaggaggagctgagcaggtcgtcttcttcctcaagcactcgccaaacaggtgaaaggaacgagctgaccaagcctccttgttgtcactctcttgtagccgcaaagatcgatccttttttttaatacagttgtgatcaaacaacacaagccaacaaattcacggcagaactcgccctgttttaggatgggcacactgaactaaaactctccgatccaactgagctcagggagcagaaactttagcagcggcgatttactgaccaaccgctttccagcacagcatttcggatccagaccaaaccaaaccaaaccaaaccaaaccagaaaaattcccctcacgtcggtttgactttttgaccgaatctacttcaacgcgggacgaagacaaccgattgcccgatcagttgaagctcctggagtaggccggaggcgacgcgatcgcccccgcactgggacggctcagctcaagcgctcgtcgactcgcccagcccagcccaccggaccccggacgccgccgtgccgcgcgggtgcgggtgccgacggcgaggcgccggggcgaagggagggggggggacagggggggcagggtggtttaatgcacggcaccgcaacggtcgcctcaccgcagtcgctgttaattcaccggcccggcttgc

SEQ ID NO: 1076 - DNA, 1184 bp, Zea mays
  Clone ID: MRT4577_100981C.1
catatatttttaatgaataattttattataaataaataaaagatagaaaaaaaaaatattataataggcagcttttttttttgtagtagagatttcattcccattaactttcttcaccaatcaattagtagtagtacaaacaatcactcacgctgttatttctcaccaacccagcagcagcagaggttaggtgcgagctggttttacatgacactaacacggcgtccatcagggaaaaaaaaagcagacagccatctttggttgttttgtttgtttgtttgttgctcgttcgtcgttttcagaaacccacccaactgatgaatgaattcatcgaaaaaaggaaaagaacagaagaagaaaaaacaaatctcctctcgtctcctgattgattaattgtaattaattaattgattaattaccccaaccgccagtccaccacctgcgagattcttctgagctagacgatgacgacatcatctttgagcatagtgggtctcaatctgacaggaaaacgtcaggttccatggcttcgtcagatgttctaactgtcaaccaactaatagaatctgttcatgagaccgcaaggcaagttgccaacgttccagttcccgccaaccctgtaccgtacgaccagatgaagagtcagtgcgaagccctggtcatggagaagcaacagaagatgtctgtcctcttgagcttgaagcattcgatgactgactcgcatggttcagccggtgtggatgggcttgaaacgaatgagtcttctctgctgtctgagcctgagttacagtcaacaaggaaggggcgcatgcgccgctgcgattcagcgtccagcgaatcagactgttcgttcaggctgccacctgctagcccatatgacaagttcctgaaggcggctggacggtagcctgatgcggttgcggcagcttggcgcttcagttttcaactctctcaagtctgcatgagagttcagtacaagtgattcatcggcaccctctcgttctcggagtccattctttcaagtgtatattatatttacatccctcgacaaggtgtataaagttctgttactgtttccttcagaataaaccgaagtgtataggcactagcggatgatcatgttcaagacggtatttgttcatttgttggtcgtgaaaagaaaacattttacacaaaaaaaaaac

SEQ ID NO: 1077 - DNA, 425 bp, Zea mays
  Clone ID: MRT4577_100982C.1
ggggaaacggggaaaaacaaaaattaaacgccccccttttggatttagccccaacccccttttacagggctgggttgagcccccaactacccccgaaataatagtagttatcccacccccttgatgttcaacacccccccaattacagtattttattcaggcctgcctcggggggcatttggggcttgcattggcaaactgaaaaaagaggtaagttccctcccttggagaaagaggctttttctccacgccctaaaaaaggccggtggggaccgcccgcccccctaaaaggagggttttttgggggggcaagggcctgggccaaacaatgggcccccccccagcaacagattttttttgtgggggggaaaaaaaaagcccccccccccccccggggaaacaaaaaccccctgcccgggggggtt

SEQ ID NO: 1078 - DNA, 304 bp, Zea mays
  Clone ID: MRT4577_100983C.1
cgcgctctgggccacgctgtggcagccactgctgcagactctcgtgccctacttcgtcgtgggcctagtcatcttcctctccctccgtcgcctcctcaccatcatggccgccggcgtgccgctctactggactctgcccatcttctgggccacgtcacgcgtcgccgcgattggtgcctgtgccgcatcgaagtgggccctggttggcaggcgggccgacggtgacacggtgcacatctgggcgccggcgtgttcctggacacggtctggcacgccgtgcgcactgctaccgaggagtacttct

SEQ ID NO: 1079 - DNA, 314 bp, Zea mays
  unsure (1)..(314): unsure at all n locations
  Clone ID: MRT4577_100984C.1
cgagaaaagcngaggcaccggcagcacacgcaagcgcttttacataattatgcgacagcagcaacagccggggcgacaggaggccggcagggacccaaaggcgccccaagcctactcgcgnaggaacaaaaaccgggagcccccaggcagcccacacggcacagaggaaaacacaaacgagacggnnncgcccgagacgaggccgacataccanggcccggcgcacaagagggcngcaaccncagacgacccccnganagaggaaaaaacagannaccaacnacaagaagcccaggacaagagggacaccaaaa

SEQ ID NO: 1080 - DNA, 317 bp, Zea mays
  Clone ID: MRT4577_100985C.1
gcgtccgcccacccatccatgatcctcaaggcgttgaagaacgccccccaagcgacgggggtgcagaagatctttttcccccccaccaactacctgacggtctgcctggagctgaagggcccctgcaagtcctccatcataatccgtctataccgcaaccttctcagcaccggcaacctaagcgcctaccaaacgaactgtatcgagatcgataactcctgcacaaggcaccctattcttcttccaccagaactgccccctctaaggcaccttaagccgcctgcacccccgcctgtggcggtgccacatcaagatcc

SEQ ID NO: 1081 - DNA, 529 bp, Zea mays
  Clone ID: MRT4577_100986C.1
ccacgaatagaaatttaaatttgttagcttgtttcttccaattactttccaacgacatgaaacatttattagttaaatatactagaaatctgtccaggtgattccgcaaggttctgacactgcaactccttccgcatgtgagatatggaaattgagagttgagacgacgagcaaagccgttggccactaccattggcatgagatcaacatctgcacagtgtcgtcgctcctccagcggcagccggcggcaccaccatgtaaacgctcggcgagcccaccggctccggtgacagcagaggtctgaactcgctgctctccaacagcagcagctggtccttgagcctgtccagagcttcccgcatccagtcgtaccggcatagaccatacgcctcctccacgggtacccatctcctgccatgggtgacctgctcgggccaggtttccagcagctccgtgacctgcagtccgaacatgaagcccttgcatgccccttgcagaccgcaactgttttgcttgctcttgctcttga

SEQ ID NO: 1082 - DNA, 362 bp, Zea mays
  unsure (1)..(362): unsure at all n locations
  Clone ID: MRT4577_100987C.1
gggttgaactttttgggagancagccgggtttacccccagcgggggaactgaacttttatttttggatagctaagggctgagagaactgagaaagaaaaaatacaggggaaaaaaagaatgggtttacagtatcagccggggtattccagtgacacattcccaacgaactacgtggcccataacttttggcagttaggtgagagcaaccaagcagctagaaccagggccaccaaaaatttccatgttatgtgcgctccttgatcctaaccctgctggtttacgggggtggccgcaccgttttggacccctaagatgcgcttgcggaagtctgaaaccatgaggggaaggccctcacacaggg

SEQ ID NO: 1083 - DNA, 745 bp, Zea mays
  unsure (1)..(745): unsure at all n locations
  Clone ID: MRT4577_100988C.1
aaaaaaaaaaaaaaaaaaaaaaaaaaaaaaaaaaaaaaaaaaaaaaanaaaaaaaaaaaaaaaaaaaaaaaaaaaaaaaaaaaaaaaaaaaaaaaaaaaanaaaagaaagaanaaaaaaaaaaaaaaagaaaaanaaaataatgaaggggaaagagaaaaaagaaaaacgacccacatatttttaangtaccgctgggtattcacggacccggcaacaaacaggagaccggacaaaacacacacaacaacacaacaacaacacacaaccaacagaacaaacgagaagacaccgcaaaccacgcccaggaaacggcggaaacagcgaccacgcaacccgacggaaacaaagacaaacaacaggcgccacgcagaccggaagaccgcaaagaaccaaaaaaccaacccaaaaggggaaacagagcacagaaaccacagacaaaaaagaaaaagacaaacccaagaaaagaccacaacaaaaaagacaaagaagaaaacaaaaaaacaaaaaanaaaacaaaagaaaacaatcaaaaaaaaaaacaagaaaacaaaacaaagaacaaaaaaaacaaaacaaaacaagaagaaagaaaaaaaaagaagaaaaaaacacagagaaccaaacaaaaaaaaaacacacacaaaaaaaaaaaaaaagaaaagcaaaagaaaaaaaaacaaaacaaaaaacaaacaaaaaaaaaaaaaaaaaaaaaaaaaaaaaaaaaaaaaaaacaatagaac

SEQ ID NO: 1084 - DNA, 353 bp, Zea mays
  Clone ID: MRT4577_100989C.1
ctgttgcggaaccccggccgaaaacttatttttccccccggcccgggggggggccccccagaaacaaaaaaaaatgtttctgggagtgacccgggggaaaaaaaaaaaccggcccttttgcggggatttttttgccgcgggggttttgccaaaaaatttcggggtttccctttaaccccgggccgcggccggggggtggggctaccacgggggggacaggcccccccccccgttttaagcgtgcgcaaagggttaccccccgttctcgagggcgcgggaaaaaaccccggagggcccccggacacgggtggccccccccgggcggaaacgtggggaaaaaagagaacaccccc

SEQ ID NO: 1085 - DNA, 149 bp, Zea mays
  Clone ID: MRT4577_10098C.1
ttgctctgacactttggcagactcttttgcatacttttgggctctcaatttcccaaccactgttccgtcctggtccaatgactacgagcagctgctcaaaacattccaaggctatttcactaactatgctctcatcatctccattctct

SEQ ID NO: 1086 - DNA, 420 bp, Zea mays
  Clone ID: MRT4577_100990C.1
ctctttgtccagttttctgagaggcgacgactggatggcaagtaccttgacgagtctgcggtccacacgtgcgggggtgaggctacactcgtggagagaccttatgcagaccacaggggtaagtgaagctatagctgacgggattattggagcagcatccaagatcgatcgactggcgagatacacgagccagtgaacgaaatgcgcaaggactggagataattcaagttacaactggatcaagagagcttgatcgagatgagggaggcaagaaacaggagctatcactgagattatgaacaacgatcatgaagacaagactgattcttgcaaagaccgatgaatgacagtgcacattccactgccgttggtgtagaacatgctcatgttttgctcccaccttcggagacattgtgtaca

SEQ ID NO: 1087 - DNA, 335 bp, Zea mays
  Clone ID: MRT4577_100991C.1
atacgagccggccgggaccgtaccattatggctggatcgtggatgccgacgccactctctcctgatgtcgttgctgctcgctgagcaagcagggagccatcgatgttccgcagcgaatggcaacgcaacgatctgacgccagtactgcagggggagcctgaccagtgatccccggttgcagcgcgcgcatccagggagagcaatgcaactgagcgtactacgcatgcgggggaccgaccgcatcccgctgcggcggcgtgcggttactacgactcgctcgcgcaggtgcatggtgtgtcaccgcaggtcgtgttcttggcgtctgttctctcacg

SEQ ID NO: 1088 - DNA, 2939 bp, Zea mays
  Clone ID: MRT4577_100992C.1
caacgattgattgctgctgaaatttcagatggttatgcatgttggaaatcgtactcacagtaaaccagtgtgaagaacacagagtttccctagacatacttgatgatatgatatatgaacttactttgatcccatgggagattgagtccctgcaaaatgtacacacacatataccagtaaagacagattcatctaagcatctaatttaacaattaggtctggtatctctgatttagaagatgcgtaagaggaagttacgataaaatcaatcagatcttcttatgcaagtgcctacaatagcacgttacaaaatgagttgagtaaactaaaagatcatatttcttccatttctgaagaaaaacgtcaaatgcagttaaatacttctgctgtacaggaggagttggagaaaacaaacgaggaactggcaatcaatttcaggaaccttgaaagtgccaacaccaccattaattcactacaagatgcactatcacaggctagatcaaatatttttattcttgctgctgaaaagaatgaagctgaagctaaatatgaaacagaaataaatgctcttaatgctgagctaaccaaatgtttggaggagttggataaaactcatgggcacttacaaagtcattcaacagaatatcatggttaccttgagaagcttggcatgtttatgatggatgatagtctcttgtctctgatagctgaagaatatggaaagacattcaacagcttgagagatatgtgtcttatagtcaagagtatgcatgagcagctttctgtgaagagttttcagaatgattcaattgtggaggattcagaactctcatcacttttatctcttccggactatgagagctttgttagagaaagattggtcaagaacataaatagaaaagggaatattgatgacacttcatccttctctactattgttgaacagttgagcaaccaaactgaatacctttctagttttttaaaagatttgtcaacctacatgaatagcaatattattgtggtgcttcgttctctgcaactagtgagcaacacctttgcccatactctagaagagcatgacatgttgaaggttgaattggggaacaaggatgctcataacagagctcaagaatctgaagtgctttctctacaaaaagatctgagagcaatgtcatcaaaatgtatttattgcgtccaacaaattgaaattgtttttgacgatatggttgatcttggatatgcaatagacttggctacaggcagctcaagcatagggtctgaactagaggtaactgtgtctgatctgaagaatgaggataccagtgattatagtaaggtggctgatactttgcttgctacaattgacacacttaagtccaagtctgaaaaattatctaccattaaggggcttgtgataacttcattggatgacttcaaaatgaagctgaaacaagctgaagcagctgctgaaactgcttcacatgagcatcagttgtctgttgaaagggtatgcatgctggagaaagaactcaaaatattacaggatgagtgcaacagaatggaactaaatattcaagagtataaggaaagggagggtgcattgaaggcaagggagttagagttgctatcagttgagcacactcaaatttcagcagacagaggtttaactgacaatgcaatttcaaaagatcaaatggaagctcttgttgagaagataagtaagttaaatatgctgtcaggcgagtcaaatgtgcagagggaagaggctacaagtccgcttgacaaactttttgttgtcattgatgaattcagtgcacttcaacatgaggttgagaccttaagatatgaaaatgaagatttacagttaaatattgaatcctatacccgtgaaattgaacagctaagagaggtctccagaaatagtgatctaactaatagggagttggaatccaaaggaagtgagcttcttgaggtagctgttagtatggagcgaatgattcagcggttaggatatcttggaggaaaagatgtactagaagataacaaacctgctagcacacaagctctcttatcgaagctggaaaagctaataatagcttcaagtactgaatctgggaattctaaatccataatacaggagctgggagcaaagctgcagtcaagggaaaaggcagttgatgagctatcaacaaaagtaaagatgctcgaggatttgtgccatgcacaactttctcagccagaacctagtaaagacagatcatttgaagcatcttcctcaacaattgggtcagatatgtctgatattgaagatgcaggaccagtgggcaagacaacatcagtttcatctgtttctacagctgcacatgctagaacaatgcggaaggggtcagcggatcatcttgttgtcaacattggttcagagtcagaacgattgattgctgcacaagattcagatgacaaggggcgtataaaatcgctccatacatctggcttcattccagctcagggaaagcacatcgctgatagggtcgatgccttctgggtctcggggagccaaattctgatgaaccggccacgagcaaggctagggcttatgttgtactggctggctgtgcacctatggttgatgggcagcatcttgtgacaccgcttctcaataccgagacccatctcatagcataattgtacaatagcacgtattagcagtttcttcttccattcatacaatacatggtagatgttagaaataccatttttttcattgtcttcctcctgctgagatttgcacttgagcagtatgtgttgaatttttgcacacaagatgtaacgcgcagaaaaaataacgttgtcattctttgatatagaaaagaggtggtagttgtatttgtaaatgtggtggccctgatcacctgatgggccccatcatcattcgttgtttg

SEQ ID NO: 1089 - DNA, 361 bp, Zea mays
  Clone ID: MRT4577_100993C.1
accggccgcccttattttttttatttttttttttaagatattacgcatttttttttgaggtcaaaatatcttcaaaccggcacatcaaatgtgtaccctgaggctttatacattccaacactcttacatgggtccaaacaatatgggtaaataaaaaatactaaaacaaacattgcccgtttgggacctgaatatttagcttagagctaaccgggcgaaattaaactgtttgtggtaaacagaccccaaaatcactgaaacaaacttttcttgaaagatgtttttttgtgataagcaaaaatcccgcaatattatacacatggcaaatataataaatcctgactcaactttcattttggta

SEQ ID NO: 1090 - DNA, 289 bp, Zea mays
  Clone ID: MRT4577_100994C.1
gcttaaacgagcggcttgaaattgatgaacagaggtgaaagcatacaccctagtggctatcggaacaagagcacacaactaatgtcagaagacacaacaacaatctctgcaaactgcgtttttgactaagaacgttaacttttctaaggagaaggaacctttgtgccatatgaaaacagtgacccactgatggtacaactatgacacacaaggaaaaaggaaaagaaattggccaagaatcagaaggggttctcagccgaattgatggggagttacaacaaaataaatg

SEQ ID NO: 1091 - DNA, 281 bp, Zea mays
  Clone ID: MRT4577_100995C.1
ggggggaaaatttccctccaacccaggacgtttaaaaattgtaaggttcgaacatcccaacgaatgaaaaaaaggccattttgggggccccaaggacccccccccacctcttttaaaacccctccccccacaaatagacaggggggcccctttcaaaccccgggccttgggggttttaaaaaaaaaccggtttcaaaacccaagccttggctttttttcaaatccacaaatcaagggtgggtcttttcccccaccccccgaaaaccctctttgcgggttta

SEQ ID NO: 1092 - DNA, 204 bp, Zea mays
  Clone ID: MRT4577_100996C.1
tcgttgtatacgcattccttcccaaaacacatactgcgatcctcgaagcctccgccgagcatcgatcatgtactccctactgatgcaatgtacgtgtatgagctcatcaagaatgctgtctacatcggcaccgatggcacgtatattactagctgctgatgagtcaactggcactcataggcaagcgcgctatcagcataaatg

SEQ ID NO: 1093 - DNA, 420 bp, Zea mays
  Clone ID: MRT4577_100997C.1
catgcccccccccgagcttgatccttagagcgggcggcctgtcctttttttttttttttttttttttagggacaagaggtcgggtatattgcacaaaccaagttgccacaaacccagcacttatctgagtttattgcgagttcgacaagacgacaacacttgccgccctgaataagcgcatgaacaactttcattgaccaagctaagacttctatgatgctaatgcgctatgcactgccaccggcaacagacagcggtgtgagagtaaaatgcccagacggtgcctctcttttgctttcttattgactgctcaagatagctcagaaatggctagggtattcctagccactggtaactaattgttctcaaggttttggacacggttgttggcgcaagctgcatcgcttgcacaatgctttt

SEQ ID NO: 1094 - DNA, 354 bp, Zea mays
  Clone ID: MRT4577_100998C.1
agctcggaattcggctcgagattcctctgcctccaccctcatttctctccaggcgcagcagcagcccaccccgtcgccgactcgcgacagggcgggcagcggcgagtggctggccgacacggagaagctccccggcgccgccgcgtcccctgaggacgtcgacgttgtctccacgcaccacgccgccgccgtcgccaggtacgtgccgccgcgcgccacgtcgcacaccgccgaaccgaaccctggccgcgacggctgaggcgggtggaactcgtggaacggcgcccgtcgcgctcgccacgatccgcccgcgccgcggcggcagcagcccgtgaagaacgcacccagctcttt

SEQ ID NO: 1095 - DNA, 194 bp, Zea mays
  Clone ID: MRT4577_100999C.1
acaacctgcaaacatccccataaataaaggctaatttcagggtttgtttatcgttcgtcggcccccattcaagggggggggcaccacccaccaaccctacttcccaaaacccccaaacctctggaggaccttggctaccggcaaacttttcccccctgccggacgcgggaagggtgtgggggcgcgctcggggg

SEQ ID NO: 1096 - DNA, 429 bp, Zea mays
  Clone ID: MRT4577_10099C.1
ctcgaggccggccggggaaaattctcagccccaccgccttcacccatcgcctccgccatcgacacctgcctcacccaccgcctcgaaagaagaagacgtggatctaaggaagaagacgcggatccaagggttgactgttgaggaagaagacgctactcctcgtcttcgatctgtttcgtggagtgtttgttccttttggaagaagttgctactatcgtacaattgaagttcaccaaggtctaccggaggtttctactgctattttgtttgaatttttagagaagccaatagcagcaagtatctcattgtgtgtgaggacagagatattttgttgcacggccaatttcagtagaacatttgcgatcagaactatttgctattgaaaatttgagatatttgctacggaaaaaaaaaaaaaaaaaagcggcc

SEQ ID NO: 1097 - DNA, 217 bp, Zea mays
  Clone ID: MRT4577_1009C.1
gggcgcgtggcgaggcgatgctattgatagccggtaataattattcgctgggcttaaggggagtatttgagtatactctgtatggtccactcattgcgtgctgtgctggtgttcatttgtatttggataattgtcgagcccctatggcatgattgtgtcatatatctgtttgatttgcaatgctattcatcgaagtcgatgtagtatatttcattca

SEQ ID NO: 1098 - DNA, 439 bp, Zea mays
  Clone ID: MRT4577_100C.1
ggtagctggcaccaggagccgtgggcaagggaagaggccacaccctgccctgctctgctgcagccagaatgggtgtgaaggcgtctcaaacaggctttgtggtcctggtgctgctccagtgctgctctgcatacaaactggtctgctactacaccagctggtcccagtaccgggaaggcgatgggagctgcttcccagatgcccttgaccgcttcctctgtacccacatcatctacagctttgccaatataagcaacgatcacatcgacacctgggagtggaatgatgtgacgctctacggcatgctcaacacactcaagaacaggaaccccaacctgaagactctcttgtctgtcggaggatggaactttgggtctcaaagattttccaagatagcctccaacacccagagtcgccggactttcatcaagtcagtacc

SEQ ID NO: 1099 - DNA, 241 bp, Zea mays
  Clone ID: MRT4577_101000C.1
ctacacgtatagggccttgagcaaccggccctcttgtgggggccgaacaccactacagactacaaaccaacactggggctcttcaatgtctacacacgcctgcctaaccaaacacacactgagtgggtgtgtttatctcttcacccttttttattgggcccctatcggtcactacgagcatccttatgcactactaggctgaccaactctgctccactatctcacggactttgcggttgtt

SEQ ID NO: 1100 - DNA, 745 bp, Zea mays
  unsure (1)..(745): unsure at all n locations
  Clone ID: MRT4577_101001C.1
gggggggggggggggggatatatcntcaaaggagaggtagntcggccgaaaaatgcgagaancaccggctggggcgtagannnagaaagaagtaagagantaaccgnngattaaaaaagatgggcctgaaaatacgngcaaattgccggggaaggaatgctagantctggtacaaaataacaaaatcccncacgataggnaaaggaaaatggtggcttaaacgccaacagcaagatacgaggggcagagactanncgactacaaatcaaagctacgataaacactatcnccanntaaaagacgnngataaacaggggtgccctccaatgggtgaattgacnccntgtttgtaacaaagttaaacaaaacctacaagtaagaanngaatactcttaaaaaatctgctacnngtaagnntactacaactattgaaccctggggttgccgacttaactaaattttcagtgtgaacnntagtgcctttggaannctgagtcctnacaaaatttnnaccggcctctttcnnatcccttgggctggggtataggccccgtggggcgggtgttagtaattaagcgncaacaataagccgcaagcggccgtgagaagcacaaagacaacgccttggcgattaattaagatgtgccgcagcctattattcagcgttaactttgacggtcaaacaattattactaaactaagcctcatacagctgaataaaccggatgtgtacgtcaccagagcc

SEQ ID NO: 1101 - DNA, 349 bp, Zea mays
  unsure (1)..(349): unsure at all n locations
  Clone ID: MRT4577_101002C.1
ggaattagggggataggggaaaaggaaccaaacaataccaacccgaaggaaggcaagcacaggagcataaaagcgaagcatggccaaccncaaaaaaaggtggagggcaacaaaagaaagccgcggcctagaggcgggaaaaaaaaaaaaacgaggggggaaaaaaaagggaaaaaaccaagagcccccgagcaaaaggaacaaaggcgcccaaacgaaaacgggggcggtggaaacccccccaagacgtggagaggaaaaaaaaaaaagcggggggagaacaaagcccaggcggggggagacacggagaaaatcgggggggggagggaggaaaaaaaccccgggggcc

SEQ ID NO: 1102 - DNA, 379 bp, Zea mays
  Clone ID: MRT4577_101003C.1
acgcctcggtatgtgttattttgttcaccctttgagcggatgcggtcattcattttattttttgggatgcactaaaaaatttataaactttggccccacagggccatgaataccccatttgtacaggcgctaacaaattaagggcaggcggccccataataggtgctgactgcaacgtggtgaactcatcgcgccgggatctctctgaagtgacccaggtgttcttgtaacatatctcccgcgctaatgcctttgcgctgtgcgcccgcctccctgcacggctcaggcctgtttacaaaaactaatcaaccccatttctgacacctgtgggataatgaccttctatctcaatgaaaccaccctacaattccggttgcgt

SEQ ID NO: 1103 - DNA, 478 bp, Zea mays
  Clone ID: MRT4577_101004C.1
gcctcatcggggtgcctgaggtgtacacgcctgtggaatcactgagatccaaggaagagaggaagcgaagggtggccaccattggtcgttccgggtcgactggctccatctcgacagcatcaacagtgcaggctgatgttggagcaaaagcctgcagtgatcagcaatccgaggatactggagggataatagagacggcaaaagcaaccgagatcacctcctgattttgtgcaattggttccattttcaactgaaagcagagttgcttgtggctttgtttttgccccctagtgtaaatcgtcagttgtgaatgaaatcaaacggcccgtttgtgtgtttcgttcggaatgttgaaatgcccaaaagttctatggtcgagatggccctgtctacatagtagaatgttggggcttcgatttttggggaaaatatgaacatgagcatgtgctttcttaatataacaattttgttaaccccc

SEQ ID NO: 1104 - DNA, 240 bp, Zea mays
  Clone ID: MRT4577_101005C.1
tgactagtatacatgagtctagaaaaaaaaaaaagagctcccagaaagagctacaatcaaccaaagttacattcggacctgacgatcacatcaaaaccgtacatgaaaagcatatacccatgccgcccaataatacaacctgcaagcacaagactttccatgtacagagcgccagcccgcatgctattgcttacagagagactgtaccccaaccgacttctgaaccgtttgccggggcct

SEQ ID NO: 1105 - DNA, 504 bp, Zea mays
  Clone ID: MRT4577_101006C.1
ccgaacgaaacacacaaacgggccgtttgatttcattcacaactgacgatttacactagggggcaaaaacaaagccacaagcaactctgctttcagttgaaaatggaaccaattgcacaaaatcaggaggtgatctcggttgcttttgccgtctctattatccctccagtatcctcggattgctgatcactgcaggcttttgctccaacatcagcctgcactgttgatgctgtcgagatggagccctgcaacatgcgcgtagccgagatacacggcaatcagaagtcaggccatttcagctacaaaattaactagtccaatctctcaaaaaacgggggactcaagaagacgaagagtaagaacttacagtcgacccggaacgaccaatggtggccacccttcgcttcctctcttccttggatctcagtgattccacaggcgtgtacacctgccaccatggcgtctaataaattctcaaaattggtagcagcgtcagccacggag

SEQ ID NO: 1106 - DNA, 266 bp, Zea mays
  Clone ID: MRT4577_101007C.1
gccggtgcgaaaatggtccatccatctcgagtaaacttggtgtcctgggtgtgttctttagcagcttcagtttagaataatcaggttatgtcttcatcatcagttttttagatcggttcatgtaataataaacttgagatggtacacatgtttcttaattagttctcttggtattttttatttgtttctcattaaacacaaaacaccgaataaacactgaatatagagcactatcaaattaataaataattagaattttctcactt

SEQ ID NO: 1107 - DNA, 336 bp, Zea mays
  Clone ID: MRT4577_101008C.1
ggaaaccgaaaccaagaaaaccctgaatgggtttcacttaacttaaattctcaaatgacatttgcccttttttggcaacatcccaggggataaaagggggggggaaaccttgcggcaaacgggtaataacttaaattctccacgggggaaaaaaaaaaaaatgcccaggtcggttcaggaatacacagagttcttgttttgggtaacaaaacggggcagccgggagcaccacccctgaagagaccaccaatgggaatcgacagaaaaactaggggtgggcagacaagaagacattccagggagacccccgcttttgggactgggatgttttgggac

SEQ ID NO: 1108 - DNA, 555 bp, Zea mays
  Clone ID: MRT4577_10100C.1
caccatcagttatatccactatctaccggagccctcctgaaagaagcaagatccagacaccccctaaatctcacatgggaaaaagcaagcccccaaggagtactggtgttctcgctgttcaacctctcctgcgcaagcttgctgaacggacaactctaaccactgttccaccaacagtactacctgctccaccatttgctcaaccggatgtgtgaggacatcctgcagttttccgaagagcttgcgcgacgccaccgatctgcacaacgcctaccacatggcgtagaaacccccacccttggctacgtcacgcctagcacatcattcatcggcaaatatcccaaacaaatggcattcctgcgcggcacgagccacacaataccgaaagatgatgatcgacccattgacgagtggccaaccacaagatgctcaggaggacaacctgatagatggacttaaccaggggatgctcgccaagcgagtacctcccccacaaaaactatctaagtgctaaaaataaaagactccttacgatcattgattgatggccagact

SEQ ID NO: 1109 - DNA, 195 bp, Zea mays
  Clone ID: MRT4577_101010C.1
cccaagcatgcaggcaatgcgcatcatgtccgcttgcattggacgatgatgcaaattcgcatgtgattattgatgaatagtagaaagaggagtatactgagaacgagaacaggcatgcagacatatctgccgtgccttccgtggcatatctagagggagagaagaaagagtatggaggtgcaccatgaacaatca

SEQ ID NO: 1110 - DNA, 269 bp, Zea mays
  Clone ID: MRT4577_101011C.1
gttctagatcgcgagcggctgcccttttttttttacggggctcaagcttacgggtctctaagttataccatatcaggggagaacattccagtaccggggtctagcaaatttcttacacaacactgcagtctggaaaaaagtcaccctttgaagagcctgacgacttacagcagatggcccagggaaaacaaaagccgcaaaagcagcagacatcctcatgtatcgcaaactaacgtgccagttgccacagcacattgcacaccatgaat

SEQ ID NO: 1111 - DNA, 857 bp, Zea mays
  Clone ID: MRT4577_101012C.1
cccacgcgtccgcttcagatctcaagaagatggctcttcctccttgccacatgggcgtcagatttcatgtgggttacgggtgattatcctgcgaagctagagatgaaaatggcagtgtggcggtggcggttctctggagcccccagccttggaacctcggtgggtgaaatcagtcgaacgaactggtactacataaaaaatgaaccggagatttgtccatgttataggggatgctcatgtctatagaaatcacgttcgagcggaggaacagattcagaagatgcctaaaccatttccaattttgaagataaatccttcgaaaaaggatatagattctttcatggcgtcagacttcaagctggttggctatgatcctcaccagaagctagagatgaaaatggcagtgtaacggtggcttagctctggagcccccagccttggaacctcggtgggtgaaatcagtcgaacgaactggtactacataaaaaatgaaccggacatcgcactagcttgtttttggtgatggtgctgaatgttgtgcgggaggcgttttcccccgttattagtagcgatctgcgtgctatatatggtcgctgaagtcaaaattgtctctcttttattttttatctactactactcaattgcgagtgagagatggtctgggcacaccattcaattgcaacggcctactggtgtgttgccccccctatgagggctgtgacgattgcgccactacctcgtgagaaacatgatgtgaccgaaattgctgtgtacctgcatggtagaacaacgcactctttggtatctggttgccttaatacgtgacctggttaattcagtttccagtttggatgggc

SEQ ID NO: 1112 - DNA, 281 bp, Zea mays
  Clone ID: MRT4577_101013C.1
cagcgatggctcagacagctcgggtttgtggagtctcgtcagcaacccaagcagccctgacttcactcccctcaattcgttctccgcctttggaaactcttttaatctaactggtgaagttttcagcaaactcggattatctcgtcgtgcaatcaggcctcacagaggatctggaacgagtttaatagtggcccttcatacctttgggagtcgccagcgacagatcccagtccttcctggccagccagttccggctccccgacccacacagccacatcggt

SEQ ID NO: 1113 - DNA, 464 bp, Zea mays
  Clone ID: MRT4577_101014C.1
aaagaaaaaagccccaacattaagggggcaaaccacaaaaaaaagcttcaacattaagggggcaaaccaaatgccatgtttacaaatacaggaaaaaaacccccgagaaaaataaaaaaaagcttttggatcaccgggcattattgggggtcaaaaggcttttcacatgtaacccgagggaaaaaaaaatcaaaagatcccccccgaagcattccaaaaaggcccctaacacttaacccaactttttgggtgggcacaggtttccaaaaaaaaaagggaaaagcaaggggcccacacttaatgctaggggggggggccctaaaaattccttctaaccaaagtttttgcccccaaattaaaaagggattggcccgactgggtaaagcgggcgttgttcaaaccctggggacttaaaagggagggggatgcaaaagaggaaaacccccaacaggggaggggggggt

SEQ ID NO: 1114 - DNA, 258 bp, Zea mays
  Clone ID: MRT4577_101015C.1
cagacgctgggtcggactcgtgggcatcgcctcgaccgtgacagtgacataggtgatccacaggtacgtcatgaacacggcaagaaagtttgaagattggtcagaaaatcatgattcctttcgccacgagcataattttgttcagtggactgaggaaagacagccatgatgttgaagcccttttcatcgtggttgtgagtctattggatgctttaatgctcaaattatcatgtgtcacttcagcttttagctccaatt

SEQ ID NO: 1115 - DNA, 413 bp, Zea mays
  unsure (1)..(413): unsure at all n locations
  Clone ID: MRT4577_101016C.1
ccccccgcttggcgncgtcctcccctcttctctcgcgccccctaantnncacttcctggccgccgcnttcccccnncgggcccggganncccctgccnnnccccaccttaatcgccttgcngccctccccctttcnccccctggcgcccccgcccccggccccccccgntcgcccttccnctctnnnncncnncccgnatggcnaatgggccgccccctgtnnccgcgccttnnncccccccccccgcggcggttccccccccncntgccccctccctcttccccatcccccttncgccccctcccttttccctntctttcccttccctnccccccccccttcnccccgccttcccccccnccngcccccccannncgggggcctccccttttcccttttccccntnnccccg

SEQ ID NO: 1116 - DNA, 1558 bp, Zea mays
  Clone ID: MRT4577_101017C.1
ttggggtaccctcggggttggccgggaagcagaagcaattactattgcctgcttccctcagggagcagggcgaaccctagccaccagctctctctctctctctctctctctctcgactagccacggtgccctccgtcgtgcacactgccggcgacaacgcagccgccacccccttcttcctcccctcgcttgcagccctaaccgtgaacagtactcgcgggtactgtagcgcgggtgctgtagcatgagtattgtagcgcccctgttctctcgctttctgccggccgcaccgagccttggcgctccagcgccgtgatcgctgtcgggctccagcacctcatccctattcccttcgccacattcccctgcaactttgcttatgttatgcttgtttttggccagaattttcaggttttatgtatcctcacattagctgggttcgcctcatataaaaagaacttggttcttgaagacgcattcaatcaaaatatgctcggttcattccttctggcaaatatccttactggtctggttaatctctcagttaacacgctctctgcttcttccctcaccgccttcatgattctatgacctgacgtatcccacattcccactgacctagctggaggtgcgtgggcattcggccctctttccgcgtggcgtttcttcgtgcaatcgtgcctgaggcctgaggcgacgacggtttggcaccggctctctgccgtcgagagaatggcaccagctcgtgtcaccactgctggcataggtggtctgctcctcttcagctcgctgcttatttaagaaaccgtgacagagaatgcctttgaccttaaatctgttgaaccaatgtaccgggggaggaggtaaccagtgcatcagtactccggcccctcagctccacttcagatcagatctcctgaattgcacgtttgagatcgagatctatcaggccatgctaagagagtaagaggtgatcaaatgacagtactgaaaagtgtagcaacaaccacgcttgcttgtgtgtgatggtggagtgagagacaaggagagctggatccaccaccctgtcctctggagacttgatgagtcggacgcatcaaattgcgttgcgtgatcggacgggtccaaatggtattaactcgcagcacatggattgcgagccttcatggaatggtttccggatcacgatggatcaatcgttcatcgctgacgaactagtacgtggtatttgtattgcaccgaccttgtgtggcccatagtactacttcctttaacttgttttcggtactctcgtttctgaaattgatgttgctaggttattctaaccctaactggaggtgcgtgggcattcggccctctttccgcgtggcgtttcttcgcgcctgaggcgacgacggtttggcaccggctctctgccgtcgagagagaatggcaccagccaccagctcgtgtcaccactgccggcataggtggtctgttcctcttcagctcgctgcttatttaagaaaccgtgacagagaatgcctttgaccttaaatctgttgaaccaatgtaccgg

SEQ ID NO: 1117 - DNA, 1784 bp, Zea mays
  Clone ID: MRT4577_101018C.1
cagaagcaattactattgcccgcttccctcagggagcagggcgaaccctagccaccagctctctctctccttctcgattagccacggtgccctccgtcgtgcacactgccggcgacaacgcagccgccacccccttcttcctcccctcgcttgcagccctaaccgtgaacagtactcgccggtactgtagcgcgggtgctgtagcatgagtattgtagcgcccctgttctctcgctttctgccggccacaccgagccctggcgccccaaccgagtcatcgcgctccagctcctgcatcgctttccggctccctcacctcatcgctattcccttcgccacatccccgtgcaactttgcttatgttatgcttgtttttggccagaattttcaggttttatgtatcctcacattagctgggttcgtctcatataaaaagaacttggttcttgaagatgcattcaatcaaaatatgctcggcccattcgtccgggcaaatatccttactggtctggttaatctctcagttaacacgctctctgcttcttccctcaccgccttcatgattctgtcagtatacacctttgctttatgcatggttactggccttatccatttttgtggtgttagaatgaaattctggtgaattgtaagctaccatttgatatgatgtatgcattcattaacttgtcagcgaactagtagctagcttgcttgaaatataatgatttttagggtgggaaataaggcagattggtatcctactacgtgatgcagatgacctgacgtatcccactgacgacctagctggaggtgcgtgggcattcggccctctttccgcgtggcgtttcttcgtgcctgaggcgacgacggtttggcaccggctctctgccgtcgagagaatggcaccagctcgtatcaccactgctggcataggtggtctgttcctcttcagctcgctgcttatttaagaaaccgtgacagagaatgcctgaccttaaatctgttgaaccaatgtaccgggggaggtaaccagtgcatcagtactccctgtacacgcctactccggcccctcagctccacttcagatcagatctcctgaattgcacgtttgagatcgagatctatcaggccatgctaagagagtaagaggtgatcaaatgacagtactgaaaagtgtagcaacaaccacgcttgcttgtgtgtgatggagtgagagacaaggagagctggatccaccaccctgtccgaattttttttgcattttaaccctttatcaggaataaaatcacttttggacctaaaaaaattttaatctcaattttggacccttttctcggcgccataagatgtggcgccgaggtaacacagctcggcgccacaggctgtggcgcgagcgctgacgtgtccatggcgaacagacgtgacgtgttaacacgcatgacatctagctcggcgccacagatcttggcgccgagctatcatggaatcatttccggatcacgatggatcaatcgttcatcgccgacgagctagtacgtggtatttgtatttcaccgaccttgtgtggcccgagtcactcataagccatagtactacttcctttagggctagtttgggaacactaatttcccttagaaaatgaaaatcccatggaaaattagtgttcccaaactagtccttaacatgttttcggtactctcgtttctgaaattgatgttgctaggttattctaatcggtcaaattttcttaagttcaactagatttataatatttcatattttat

SEQ ID NO: 1118 - DNA, 162 bp, Zea mays
  Clone ID: MRT4577_101019C.1
cacgatcaattgaccggtttattcaaatatatatcgaggataggtacacgggtaattaagaagaccctggcctccaatattctctgggaaccaagatataatttagatgatagtcgtagggatcccaatatcattaggaaggtcatccaaggcttgctaatt

SEQ ID NO: 1119 - DNA, 531 bp, Zea mays
  Clone ID: MRT4577_10101C.1
ctacctcccacacatcctcgaatcactacctcacacctcctcccctgaccgaccaccccgcagctagcttcgcgcagccagcaccgaccgatcgcacgctagctgctgctgctgaggcgaccgaccggctatccatggcggtgaaggactgcggcgggcacaagggcgggggctgcgagtgccaccgccgccggctctaccgcaagtgctgcggcgcgctgctggccctcgtcatcctcgccctcttcatcatcctcatcgtctacctggtgctccgcccccacaagccccgcttctacctgcaggacctggcggtgctctgcctcaacgtcacgccgcccacctccgcctacctcttcaccaccatgcaggccacggtcgcggcgcgcaaccccaacgaccgcgtcggcgtctactacgacgaggcggacatgtacgcggagtacaagggcgtgcccatcaccgtccccacccgcctccccgtcgcctaccagggtcaccgggaccagcccgtctggtcgccctacctcc

SEQ ID NO: 1120 - DNA, 1271 bp, Zea mays
  Clone ID: MRT4577_101020C.1
tttccggtaggcgtccggtcgctgccggtgggtggctacccgtaacggcactccactccacttccgctcccactccaccgccgcctccttcgtcctctcgtcattcgctcccggcacgctgtacgccgagaaatctctccttcccagcttctgtcctgtgggaggcttctgagatcgcgcggaggtgcggaatggagagcagcagcggggaggagctggaggaggagttcccgggccacgagtggatcaccccgcagtcctccatcaacgccgcctaccagtctcagaccgagaagggtatcaggaaaatttgctccgatttgttggagttgaaggatgctattgaaaacctgtctgcaaataggcagtcaaagttcctggcttttctcagaatttctgaggaggttgttgaagcagaacaagagttaattgagctacaaaagcatgtgtcttcccaaggaattcttgtgcaggatctaatgagtggtgtgtgtcgtgagctcgacatttggcacaaatctagcaaggaagaagatgcaacaaaaaaagactctgaaactgaacttgatgaaattttgtctgatgatacccaggatcccagaactatttttctagataagttagacgttttgcttgcagagcacaaaatggaggaggctgttcttgctttggaagctgaagagaagaaatatttagttgcagatgaatctggtaaagaatcaaatgcagataatactgcctttaagacagcactggttaaaaggaaaacaattcttgaggatcagcttgttaggtattgtggacagccatctttatctatgaatgaacgggggaagtgtttgtctggtttaattaagataggcaaaagttctttagcccatcaagtacttctaaaagcttatggttcacgcctgcagaaaagtgtcgaggcatttcttcctaactgttcaatctacacggagacatactctgcaactttgtcacagcttgttttctcagctattgcaaattcagcaaaagaaactaatacgctacttggagatagccccatgaatacaaaccgggttatccaatgggctgaatatgaaatcgaaacctttgcgcgtttggttaaagaaaattctcctttgcctgagagtgtttctgcccttcgctctgcctgtatatgcatcgaaactagtctctttcattgctcttgtctagaatcccaaggtctgaaattctcaaaattacttatggtcctattgggcccttatattgaagaagttttt

SEQ ID NO: 1121 - DNA, 840 bp, Zea mays
  Clone ID: MRT4577_101021C.1
ctcgaggccggccgggacgagcaggacgagccctgcggattcgacgagaacccgtacgccgcgacgacgagcgccgccgtgctcctgcaaggcgcgtcgtgcccggcgctgcaggccgcggccggcgcgcagaggatgcccaggatcccgtccctcacggagctgttcagcgacccctcgctggcgcacttgttcgaggagggcggcatgcaggacatggcacggctgggtaatcatcatcagcagcaccagcagcagcacggcgctctcctcggccgccccgtcacgactcacgagccaactgctggtcaacaacgccaacagcttgtccggggagaagatcccgcggatggacccgcctgcctcgacgtcggccgctggccatggcgcagctggcaagcgcaagaggtcatcggaggcgagcactactagtgccagccagtgcgctgtcgagccgggcgtctgcagccatgaaacgaccgatcgaacagctggtgcaacgttccaaataggcaacggactgcagcagcaggggtcgctgggccaccgccagatgctgcttcattcttaacacggggatgaactgacagcttgctgttctccactgaaagctatacttgatgagcatccaattgtgatttcgacatcgggtattattaaagggattggcggattatacttgtacagtccagtagtatagtagtgtcaactagttagttgctagtagggacgccatagttgattgggtttgccgtgtgtaaacatttcttctcctgtacatagtacaatactatatacttaagcccaaaaaaaaaaaaaaaagcggcctcgagctcagct

SEQ ID NO: 1122 - DNA, 523 bp, Zea mays
  unsure (1)..(523): unsure at all n locations
  Clone ID: MRT4577_101022C.1
ccaatcacagatcgatagtagttttttctttctttctttctttcaccgatcaccgatgtcgaattggcgactggaaagtggaaatgttaatttcggcagaaatttgacgtgaagacctagacaaaacgcgcgcgcgcggctcccgactcccgagcacatgcaccatggtagtactacagatcctaccgctacgctacgctgtccttggaacgacagcggcgtacgcagcagcgcacgaagaagcagctagctataccgacgaggcgacgacgacaagctcgggtcgagagggtagtagtagccgccggggaggtggagctggtcggcggcggcgaggtcggggcccgcgcagaagtccagcaggaagagggacgcttcgcctgcgccgttctccgccgccgccgaccagttgtggaggccgacgacgccgcggaggcggccgaggtggacccgtcggcggcgaacgggtccccgaggccgagcgccggcgccaggaagtcgtcgcaggtgtacgctcggtnct

SEQ ID NO: 1123 - DNA, 435 bp, Zea mays
  Clone ID: MRT4577_101023C.1
tcttacgcgtgcgcctgtgtctaggctgggagcaaagcaaagagagagagaggaaagctagctagctagcatggagagtgccatccagaaagtcgcagccgctgtgtacgcgctgctgcttctccagctgatggtagctccgacgacggatacagcccgactcctgcatgcggatacctcccccgcgtttggactcgacatcatcgcgagggagtttggccatccacatggagccatgtactgtggtgaatcatgtgtactcataccatgcgatccgccactcttgggatgcctatgtgaaaacaaactctgcgagaaacaaactcgggacgccggttcgtttagggagacgaggccatatatctctgatctctggctcgaaaattgcgtggcataagttgctgatctcatgaagaaccagctcgtgctttgaac

SEQ ID NO: 1124 - DNA, 299 bp, Zea mays
  Clone ID: MRT4577_101024C.1
caggccacacagaccccccacactggcagagtgaagaagcaccacccatccccactgccatccttggtgctctgagcctctctccagggcctatagctccccctatgggtagtgccactccagcccaggccccactctgggcagcacaaccacagatcttagctaatagctaggcactagacttagctaaatgctagggcacaaggcactgcctcactgccaggtcaaggccacagcacagccttccctgatgggccgcagtgctagtgaccccaaccttccagttcctttatctgcac

SEQ ID NO: 1125 - DNA, 104 bp, Zea mays
  Clone ID: MRT4577_101025C.1
gctaaagagagcatacaagaaggacgggcgagagcgagctagaagagcacaactcggtcttcttatcttcgtcctcggcgccacacacgtcatggtctgactct

SEQ ID NO: 1126 - DNA, 519 bp, Zea mays
  Clone ID: MRT4577_101026C.1
cttaagtactaaactgtggcatagtccctacgtatttataatacgacgcattctaaattttttaagatgacttaagacattactcaaatgaagcatgtacccatggattaaacacaattaagaagtttcttctgaacttatggtttcctttttaacaaattttgtgaattctggtcaccacgtggaatgccttatattttactataaattggagggagtataatttatagaatttagggcatcaacaaaatattctgcttcaacagtgaagccccaaatctatattatagggcggtccactacggtgtagtatatttgaggcacttgagagggtgtcctataattttttgaccaaattttataaaataaagcactgttggagtagttttttctgcgtagagctctatatttcaatttaagacccccgtttgaggcattgttggagatgctcttatagaacaaccatgtggaccctttatctgatatgaccgtagcctgataaacacattctattctacc

SEQ ID NO: 1127 - DNA, 316 bp, Zea mays
  Clone ID: MRT4577_101027C.1
attcggctcgagagcaagcccatctttttatgactgaaagagtgtttgcggtgcgggatcgggtgtgcctcacattacagtcctactgtcagtcgtgtctcactgaacgggtcaaccagcagctgacgctcagggtcttgagtacatacactatcatactgaacattaatccagttgcttatgaactgctgataccagccgggagatcaaatcataccatattgcatgtctcacaggtacaagccgtagccagtacacataccgccgtgagcccctctccgactgactcagatcataatctgcaaataccaaaaac

SEQ ID NO: 1128 - DNA, 214 bp, Zea mays
  Clone ID: MRT4577_101028C.1
tttttatttcgcgcgcactaacgatttatttatgggttcaatctaattacaggcgggtcctttttactgttactacaaataattaacttaaaaacacccaccgacccccaactaaatttttacataacctaaattggatacacaaacatgcctactaaaaaaaaaacacgtaccaataccccctttctaacaaacgcccaccctctatttctaa

SEQ ID NO: 1129 - DNA, 370 bp, Zea mays
  Clone ID: MRT4577_101029C.1
gcacgacaaatagaatagggggtgaacagcacgaggactgttcagcctcagtggacctctctagaggcacccagtcatgcacattcatgaatggcagatctcccgagaatgcccacaatcatgacaacgggcgatagaatgaaaaatatcctgcatgattgtctgcgcactggtactggaacaaatgccagtggatgtggagtgaattatgccccttgagcttgtaaagcctgttgaggatctccaagaaagatggactcagactgaaatgcccagaccaacatagtgtcaaccaaatgcgttatctcagtgtcatgattgtcacggaaaaccggacgatgcccatgtgccacgtacttatcagcctcat

SEQ ID NO: 1130 - DNA, 129 bp, Zea mays
  Clone ID: MRT4577_10102C.1
gtctgacttagggcaatttgaatctgcacttggggtctgtctgtacagggactcatgtcattgtaatgatttcactcctaactgtgacatttatatcaaatgtgtgaataaatacataaagattggtac

SEQ ID NO: 1131 - DNA, 270 bp, Zea mays
  Clone ID: MRT4577_101030C.1
ggaggcaacaagcctggttttttttttaaaagctaattcgcttatttgtttaaatggccgaaagggtgttacccctgaccgaaagaggccctttaaagctttgacacccctcttttgtaaaaacccttaccatccaagccctgaatcggggggcctggggcggggaaaatccatttttaaacctcatccaagggttaaaactttgtcccttcaagaacaatgggttggggggttcccctttcggacaaaacttttttttggcggggggaa

SEQ ID NO: 1132 - DNA, 884 bp, Zea mays
  Clone ID: MRT4577_101031C.1
cccgccactacgcgcacgtcgactgcccaggccacgccgactacgtcaagaacatgatcaccggcgccgcgcagatggacggcgccatcctcgtcgtctccggcgccgacgggcccatgccgcagaccaaggagcacatcctcctcgccaagcaggtcggcgtccccaagatcgtcgtcttcctcaacaagaaggacatggtcgacgacgaggagctgctcgagctcgtcgagctcgaggtccgcgagctgctcagcaactacgagtacgacggcgacgacgtgcccatcatcgctggctccgccctcaaggcgctcgaggccctcatggccaaccctgccctcaagcgcggcgacaatgagtgggtggactacatcttcaacctggttgatgaagtggataactatattccagtcccacagcggcagaccgacctcccgttcttgctcgctgttgaggatgtcttctccatcaccgtatcaagatgattgttcagctcatccagcctgttgcttgtgagcagggtatgaggtttgctatccgtgagggtggtaagaccgttggtgctggtgtcatcaacaaaatcattgagtaaactggatatggcatatcccccacgagaattttcattgtttactcagcgaaatgctctgtagttgttattatgcgttgagttttaggggttgttcttgtgaaattgtagtatgacactctttcgccaagtgaatttgcataatttatgacattcacgacaaaaatacacttatctggttgcaactgatttggctaagaggtaccatctactgttacatgtccaattgtttcttggttctgttaccctataatagtgttgatacacttaaaaatgaaaaaataaaaaaata

SEQ ID NO: 1133 - DNA, 1940 bp, Zea mays
  Clone ID: MRT4577_101032C.1
cgcaccgcagaccactaacctagcagtgtagtcgtttacgagggccaacgcatccccacctcccgcagctcgtccgccgcccgccacggcctccctcacctcggcgtccactttcactcctcttcccgcaggccctcctcatccagaagccgcatccgtgtctccaccccctagggctttcgcgtccggccgggctccctatccatccccaaataatccccacctcccgctcatcctccgcctccgccgcccgccatggcctccctcacctcggcctccacctcactcctcttcccgcaggcctcctcatccaggagccgcgtccggctctccacctccctgggcttctccgcgcagccggcgcggctgcggagccgggcggcggcaggagggcagcggcgcgggagcctgctggtggtgcgcgcggcgaggggaaagttcgagcgcaccaagccgcacgtaaacatcggcaccatcggtcacgtcgaccacggcaagaccaccctcaccgccgcgctcaccatggtgctcgcctccgtcggcggcagcgcgcccaagaagtacgacgagatcgatgccgcccccgaggagcgtgcccgcggtatcaccatcaacaccgccaccgtcgagtacgagaccgagacccgccactacgcgcacgtcgactgccccggccacgccgactatgtcaagaacatgatcaccggcgctgcgccagatggacggcgccatcctcgtcgtatctggcgccgacggtcccatgccgcagaccaaagagcacattctcctcgccaagcaggtcggcgttcccaagatcgttgtcttcctcaacaagaaggacatggtcgacgacgaggagctgctcgagctcgtcgagctggaagtccgcgagctgctcagcaactatgagtacgacggcgacgaggtgccaatcgtcgctggctccgccctcaaggcgctcgaggccctcatgggcaaccctaccctgaagcgcggcgacgatgagtgggtggactgcatcttcaagctggttgattctgtggattcctacattccagtgccacagcggcagaccgacctcccgttcttactcgctgttgaagatgtcttctccatcaccggtcgtggtacagttgccactggccgtatcgagcgtggcaccgtcaagattggtgacacagtcgatatcgttggaatccgggacacccggaactgcaccgtgactggcgttgagatgttccagaagaccatggacgatgccatggctggagacaatgtcggactgctgctccgtggtatgcagaaggatgacattgagagaggcatggtgctggcaaagcccggctctatcacaccgcacaccaagtttgaggctgttgtgtatgtgcttaagaaggaagagggtggccggcactcacctttcttccctggttaccgcccgcagttctacatgaggacaaccgatgtgacagggaatgtgactgtgattatgaatgacaaagatgaggaggcgaagatgtgcatgcctggtgaccgtatcaagatggttgttcagctcatccagcctgttgcttgtgagcagggtatgaggtttgctatccgtgagggtggtaagactgttggtgctggtgtcatcaacaaaatcattgagtaaactggatatatcacatccaccacgagaattttccttgtttactcaaagcgaaatgctctgtagttgttattatgtgttgagttttaggggttgttcatgtgaaattgtagtatgacactctttcgccaagtgaatttgcataatttatgacattcacgacaaagatacacttatctggttgcaaaaaatttggctaaaaagcaccatctactgttacaaaaaaaaaaaaaaaaaaaaagtgtccagttgtttcttggttgtgttgcattatattgttcatatgctt

SEQ ID NO: 1134 - DNA, 562 bp, Zea mays
  Clone ID: MRT4577_101033C.1
cgcacaaaatgcttcttcgtactcatctcctactcagctgaaacctttactccttgttccaattactttcgccggccggcggtacacccttgcgactacacaatacggaattgcatcgcgatccacatcggcacatgccggtatacaggcaatgtaaactcaagctgggagctgtactgccttgagcatggcgttcatgctgacggttacatgcccgatgacaagatcattcgggggaggtaatgattctttcaacaccttcttcagatagactgttgctgggaagcacgtgccccgtgctgtccttgttgaccttaaacccactgtaatcgatgaggtgagaactggcacctaccgccagctcttccaccctgagcatcttattaatgcataaggaggatgcaaccaacaactttgcacgctgtcactactccattagcaatgatattggtgaactttgccttgatcccatgaagaagcttttctacaactgcactggtatacacggattccttggcttcaacgctgttagtcgaggaacgggctctgaccttggatacct

SEQ ID NO: 1135 - DNA, 2826 bp, Zea mays
  Clone ID: MRT4577_101034C.1
aaaaaaaaaaaaatactgctcggccaggccgcggcggcggcagcgggcaccccgtcgctgcccgacctgaacgaggaattcgtcatggaggaggataatgaggagtcccccgcggatcggtgcgtcgacagggtcctagagggcaaggaggccaccgacgtccgcctggccgccatggccgtcgtcgccggatcccgtaaggggctggagaagctcgccgtccgcggcagccacccgacccgtggcgtcacggaccaaggactgtcggcggttgcacgcggcagccccaacctcagctcgctcgcgctctgggatgtgcctcttatcaccgatgctgggctcgcggagattgctgccgggtgtccctcgctcgagcgtctggatatctgtcggtgtcccctcatcacagacaagggcctcgtcgctgttgcgcaggggtgccccaacttggtgtctctgacccgcacgcgtgggcatgccccggtgttgccaatgagggcctgagggcgattggccgcagctgcgtgaagctgcaagctgtgaacatcaagaactgccctcttgttggtgaccaaggcatttccagcctggtgtgctctgctaccgctgctcttacaaagatccggctccagggactgaacataactgatgcttcgcttgctgtgattggatactatgggaaagccatcactgaccttacacttactcgtctcgctgctgttggtgagaggggtttctgggtgatggctaatgctgctggcctgcagaatctcaggtgcatgagtgttacctcttgccctggagtcaccgatcttgcgctcgcttctattgccaagttctgcccgaacttgaagcagctttacctcaggaagtgcggatatgtgtcagatgctggcctcaaggcgttcacagaatcagcaaaggtgtttgagaacttacatctcgaggaatgcaaccgggtttctcttgtcggtattcttgctttcctcaactgcagagagaagttcagggctctctctttggtgaaatgcatggggatcaaggatatctgctctgtgccacaacttcctttttgccgatcacttcgtttccttacaatcaaggactgcccaggtttcaccgatgcaagcttggccgtggtagggatgatttgccctcagttggagcaggttgacttgagtggtcttggtgaggtcactgataatgggcttcttccattgatccagtcttctgaatctggtctgatcaaggttgacttgagtggttgcaagaacatcacagatgtggctgtctcctctctggtgaagcgacatggaaaatctctgaagaaagtcagccttgagggttgcagcaagataacagatgctagcctcttcaccatgtctgagagctgcaccgagcttgccgagcttgatctttcaaactgcatggttagtgactatggtgttgccatgctggcatctgcaaggcacctcaagcttcgtgttctctcactgtctggttgctctaaggttactcagaagagtgtgccgttcttgggcaaccttggccagtctctagagggcctcaatcttcagttctgcaacatgattggcaaccacaacattgcatcgctggagaaaaagctctggtggtgcgacatccttgcataggcagcagacaagatgagccattgctggaaggggctcatgtctactgggagccacttccagatgcagatatacgaccttagcagtagcacaaccagacggtcttcaggtttttggctcgcatgccggtcattatggtgggcttccacattgttcaaggaccagttgttttagggggcgctttctagcggagtgctcgtttttcacagatcacctctcagggggtttatctgttttttgagcctcggctgccatcactggcatcctgcccctagatccagacactggtccttgcccttacagtcataagttctttttaggttgccatagtgtccaggtcctctttcgttttactgttgcaggcgttggtgatccattgacagctctggactatcacagttctaactcaactgccagatgctgctggtgctggagcgtctgtggacttgtgcggtgtgtttggttgtcatgtttagagtcttgatgtgttgtgtgtgtgtgctgttctccatggtgtgtactggtcatgtagggttgcatcttttttacggtctctttgggatgcctggtgttcatggtgatcgtggccattgcgaggcgcttactagaagccttgccttgacagccttgtatggttgtttttttttgccagatccctgtttttacaggcagattgttgagtgctgtaagcttggcgaccctctatgaataaatgaaatatgtgtttatgttcgaaaaaaaaaaaaaaaaaaaaaaccgtgatccattggcagctctggactatcacaattctaactcaagaaccagatgctggtgtcatcttttccagggctgctgatgctggagcgtctgtggatttgtgcagtgtgtttggttgtcgagttttgagtttgtttttagtcttgatgtgttgtgtgctgttcatgttctccatggtgtgtaagggtcatgtagggttgcatcttttttacagtctctctgggatgcttggtgttcatggtgatcttggccaatgctaggcgcatactagaagccttgccttgacaaccttttatgggttttttttgccagatccctatttttccaaccagattgttgagtgctgtaagcttggcgaccctctttgaatcaatgaaatatgtgtttatgttgtaaaaaaaaaaaaaaaaaagcggcc

SEQ ID NO: 1136 - DNA, 375 bp, Zea mays
  Clone ID: MRT4577_101035C.1
gacagagacagggacagcgacgatcacatgctatttcaacgagaagtgataccgatagagtgggccctgtgatgcagcaggggttcgaccgtgcagaggctgtgttcacgctcatcagccgctgcatgtgccacacggtgactcagctgattgccgacctgagcgtaaatgcgatggtgcacgagctgggcagcgaccccaggggcaaggacatggtgcacgcgctgctcaatatgctgagatggaaggcgcccgccgtctccgccgtcatcagctgcgggaatctcatctgcggcaccagcaaagtcatgtctctccacctcgccggatagctcgtgcccatgctcacgaatgctagcgccctctgggtctaca

SEQ ID NO: 1137 - DNA, 942 bp, Zea mays
  unsure (1)..(942): unsure at all n locations
  Clone ID: MRT4577_101036C.1
tttaaaacggccccccctttttttttttttttttttttttttttttttttttttttttnttttttttttttttttttttttttttttttttttttttttttttttttttttttttttttttttttttttttgatgtgggatttcagtttgttataccattttatttacaattgctaggctcgacggtggaactaccagatctcatatgcaaaaaaaaaaagatgaagataagcttattgcagagcactatatttcagacatcaggtcagatgagcttcatctttcggaagtactgttgtagatgccacagctgtaaaacagagactgcaatgcaaacaacaagagacagcatgctcagccacgtgaccctagaattcgtctgctcactgacgtccctcatgttagcttctttggattttaggagcagcaggttgtcatggattgattggacagcaacttcgagcttgagcaactccagttcaactccctcgatcttttcctttttggcaacagaatcccagtctctactagccagcccaattttccagtcaaggtttagcttcaccactaaccctctgtcctcaccatcaattgagaagcaggcaaggtagttccctgcttctgctgtggtaaatgcaaattgccccatcgaaaccttctctttcttatgaacaatgtctccaaaaggggatgtgaccttgacggagatggtaggctgggcgtggtggtgatcatagaggacggagtagtcgccgatgacgacaacgttggattggatctcctccgacacacacttagtccctgacggcgcaatctccagccataccgccccggcccccgccgccatccaccacacggccgccgccgccaccgcggcccacgcgccacctcgcgccatcgtctcttcctaccgcaccaccacaacgaacagccccaagcgcc

SEQ ID NO: 1138 - DNA, 279 bp, Zea mays
  Clone ID: MRT4577_101037C.1
gtcgggataggggaatatcaatacattgcgaaggatccactgttacgaagatcctattgcaaaatattgaaggtgtcagcataatactccaggctggatcaaacagcaagccagcttgcaggcgttgaaatccaatgccacacaatagagctcgaaaagttcacagctacctctaagctagtccttggcgtgtaaaaactgtggggtctgctattcccagcgagtgggcgcgagatctggctcaacgataattctttgcgagcatgtatgtaccaatat

SEQ ID NO: 1139 - DNA, 274 bp, Zea mays
  Clone ID: MRT4577_101038C.1
attatttcaagactatttttgaggtaattctagccttttaaaatattctacagacctacggggcttaaaagaaccccagtaccgactaagcaaataggcaaaagacatgttggaaatgtagtatagtacttgaaacagtcactatcatagggataattggtgcatcctgtgtaaatggaagctgagcttgacacctggtgcttttaagtagggataaagtcatcctctcactgcaagcacagcatacctgtacctccaaaagtgacgttttagt

SEQ ID NO: 1140 - DNA, 703 bp, Zea mays
  Clone ID: MRT4577_101039C.1
ggtaccggcgccctctctcgagtttttttttttttttttttttttttttttttttttttttttttttttttttttttttttttttttttttttttttttttttttttgaaaccaaaaagaaccttttttttggggaaacgaaaaaagcccttttaacaacagccccaacgaaccacctcccgaagggggacctgggtttttgccaaaaaccccccaagggaaaacccccctttacgggaggggacggggaaacccaaaaaaattgggggaacacccgccctcccttttttaaaaaaaaactaaaagggaaatccttttggaaaccccctgggggggaaccccgggggggcccccctttggggggagggggtgggggaaaacaaccgttaagggaaacccgcccggcccttttggtttttgggggggggggccccctttaaggggaacaaccctttttttaatttgggaaaccccccccccaaaccgttaaaacccccccggcccttgggggcccaacccccactctttggggccccccggcccaagaacccccttttggggggaggggttgaacaggatccccaaaaaaaaaatccccacagggccctgaaactggttgggaagggggcccaaaaacaccttttcgggttgggccccaaattccggaaacttggggttccccgggcccggaattgttttccgt

SEQ ID NO: 1141 - DNA, 291 bp, Zea mays
  unsure (1)..(291): unsure at all n locations
  Clone ID: MRT4577_10103C.1
ttcatacattaaatatatcggccgctcngagcacgcgagcggggaaagcttatgcaacaatctcgcccctagcaaccgccaccacatatatagctgaaaaggcgaacatgctcccttgacctaccattattttagcatctccgactccatcaaatccatcatggagcgcctgtcgatcttataattattagatcatcaggttcgtaaaaattgttaaaaaatactctgtaatcaaacttttgaatcaattgaaggtctactgctcttatgttcagtcttacttataatatc

SEQ ID NO: 1142 - DNA, 542 bp, Zea mays
  Clone ID: MRT4577_101040C.1
cacacatccataagctaagcccctgcatgggtgctgggccttaggggacgactgcatactttattgcaaggaccctgaccggaaagactctgaccctgattgtggagagtctattacaccctcgtcaatgtgtaggccattatccaaggcaaggcgggcatcaccactctccagggtaccctgatctttgctgggaaaaactttgaggactgtcactcgctagccatactccctcatgcacctggatagttctctgcacttactgctgtgcttgatgtgaagccttcagatttctgcgaagaccctgtccgctgagactattaccctggacgtaggagtcttcaaacgccatccactctgtcaaagccaagatccaggacacggacgtgctaccacctaaccatcatatagtgatctttaatggcaatcaactggacgatggtcgacaccttgcggattacaacatccatagagagagcacacttaatctggtgctccgacttacgggtggtatgcagagctttgtgaagacactaactggc

SEQ ID NO: 1143 - DNA, 210 bp, Zea mays
  Clone ID: MRT4577_101041C.1
ggtcgagggacgagtcagccgacgcgtcagccgtcgcctgaggcgatcgggtgacccctcgggatgattcagcggtaaaggattaggctgatactgtcgatgaagatgtatctagagcagatctcgtgataaatgtggtgagactgatgtctgccacaacaccaacactttcttacgggacatagtcgcgtttcatgagatgcagtggat

SEQ ID NO: 1144 - DNA, 419 bp, Zea mays
  Clone ID: MRT4577_101042C.1
ttgagagggcctctccaacaagccaagcgctgtccctgcgaagaaagacacgccgaagcaggtggagttcacccattgctcgcctgcgattgttggcaggctgatgggcctcgacaccgtgccttgccccaagaaatcttttgaccgctgccagagtgacacccggggtaaccggcgacacttgtcaggagttgctcgaggcgtggacagcgcttcgtctggggatcaggcatgtaacaccagttctgatgagctgccagcatttaacgaatgtttcgaggtaacagagatggagaacatggcgatgcatgggccgctgcagcctggaaaataggagccatatctgacaaacattgtcagcttttcttggatttgtgaggcaaaaagcttttggatgttaaccgcctggccctggcgaa

SEQ ID NO: 1145 - DNA, 927 bp, Zea mays
  Clone ID: MRT4577_101043C.1
ttttttttttttttttagaatgaaattcaattccaatggggtgttacagaaattagatcccaaatttattacatatgattctgctccaaggaattcaacttgtttttttcatacaagcaatgcatttcttcattgtgtttctgccttgtgcattttcgtacaactgaatcttactactgtagtttcgcactaatctcaaactgagttttttctattgcagctatctgctcttcttacgattttatcaagactgctcccaacaatcatagacattatgatgcaaataattaatacgaagcacaagcacaagaattccccacatccatctcgtcatcatccccaacctatccatgctcagagcttcatgaaccagacgtggggacgggcccaagtgcggtaccagtctcctgactcgccatcctcatcttcctccgtgggctcgaacagtggtgatgactcttgaagctgtgcatagaacatagaacttccatgtggatgtcccagtacttagataggtagccttcaggttccggggtttcttggtaacccagttacgaatttgaagcaggacgaccccgaaatcgtaagcctagccgccgccatttctccctacccctcgccatcgctggagggggaggccgggcgtcgtgcggacctcaaggaaggcggcggcagggtctttccccgtgtggctgctagggtgctgcagggcatgaccgcaaggaaggcggtggtggggtccttccccgtgtgactgctagggtgctgaaggggtgacgactgctggggtgcttcgcggtggcggcggtgacagcgaggtgcagcggctcagggccgcggtggcgtcgaggtgtagcggcgcgtgtccacagcggtgcggccgaacagtagacggcctggcgcagctaatctccggacccggccggc

SEQ ID NO: 1146 - DNA, 405 bp, Zea mays
  Clone ID: MRT4577_101044C.1
ggcaagtctgaaagccaaatggacggagatggacgactatggagaaacgctcatgaatatacatgcgggattatgcacgtatgcaggccaatggtcactcaaagaggcccgttcccttaccagtacacttagaaaaactactttactcactaaagcgtacattggagacttggtgtttttttttctgaatagcatgcttgttggttactgctaagaacattgtggaacctgattattggtttgataatggaaccatgggttttcatttcaggaagacactgatagatcacatcccttttttttgtattggaggtaccgaccaacttatctgttagggacagaaataatgattctgcacatatccttctataaagggtgggtacctaaaaaaaaaaaatattatat

SEQ ID NO: 1147 - DNA, 302 bp, Zea mays
  Clone ID: MRT4577_101045C.1
cccacgcgtgcgcggacgcgaggagttgtcatgctagaacgcgctcggcgtcgccacgctgtatgacccgcgccactcgcctatcactcttggtatacccggccgctcgcctgcctggtacgatgcgagccgacggcagtgcctcctactacccgtcaccaattgcagatcatttgacatacatggctgactcagaggatgtttcggccatagtgtgagacactggagctggaatgggcaatgctggctgaagggaagatgatgctccccgagctgtagtcccaagtatagatgctcgcaca

SEQ ID NO: 1148 - DNA, 293 bp, Zea mays
  Clone ID: MRT4577_101046C.1
ccaaccttcttattacattagaaatttttttaattttttttagtctcagtaaggctggaaatgtttaggaatactgcttaccaaagtgggacagcaccatggcactttagtttacacaaacacaccagcactgcgctagctataggactatgcctaggggaaaagcccccacagcacctatagtaacaacaaaaatgcgaagcaacccccttcttatattccttgacaaaactaatctggccatatccaagcaggaaccgccacaaaatcacgagcctgaggggtgtggggct

SEQ ID NO: 1149 - DNA, 247 bp, Zea mays
  Clone ID: MRT4577_101047C.1
ctgaagtgtgccctgatctggcgcaccggactgtccggtgcaccaccggacagtgtccggtgcaccagggaacccaactccgaactgctcaccttcgggaattctggaagccgctctgttataattcaccgaactgtccagtgtagcaccggactgtccagtgtgccagtggagtaacggctactacagcgccaatagtcgtctgcaacaacagttaatgtgctacagggcgcgcagaagtcagagc

SEQ ID NO: 1150 - DNA, 347 bp, Zea mays
  unsure (1)..(347): unsure at all n locations
  Clone ID: MRT4577_101048C.1
ccttgttggacatgaaattggtacccacattgattctccacacacttcatgaatgcgtttgctcatgggggcgatgcctgcatatacatgatngatggactgggaagctacttgcaaatcncttcgttggagcggcctcggtctcgtcatgtcgctgaacatgctgaaggccttgccgatgcgcggattctacttcagcttctccagcgtcttcgccacgtcncncaacgcttcacagcacttgagcgcgttgcngacatcctctagccgcagnaggtaatnctcctcgctnacccggaacgatttttgctccctgtacttcnacatcacattcatggccagcacat

SEQ ID NO: 1151 - DNA, 220 bp, Zea mays
  Clone ID: MRT4577_101049C.1
acataagcgtcagggtcggcttatcacttgactgatattggtgtgaatgggaaggagcaccagccatatgtgcacgtcaacttctaccgcatctatggtgatacgttcaagaaaccaaggcgtgcttatgagacggagcgtcttgatgctgcactgaaactagctactgagtattgcctgaggtgcaaacatgagcttatcaggagacactatgcactga

SEQ ID NO: 1152 - DNA, 1241 bp, Zea mays
  Clone ID: MRT4577_10104C.1
gtttctgtggaggctgtcggccccaaattatggtacagcgcatacggaggctaaccttccattggcagcgcacagatcatccggggcggacctataagatgtcaagtgtctcaaggtcatgagaatgttgccgctgagtactacaaacaacaggtggagatgttagagggttttagtgagatggagggggtacatatcgtgctttcctacctgtaatgtccaaggaagaacaggaaaaagttgtcaggagtgaatcattagccatatggctgtctaatattgcaaatatggttctctttgctgcaaaagtgtatgcttcaaaacccaattggaaaagcgtgtgcagcccctgaaccagggaatgcaagttgggattgcttggctggtcctaccaggtttgatctgttctgggtttcatgtgggaatcaaggaactagctaatgtatccttcccggttctattgatagcaacaggtcgtgtgaatgttgccgctgagtactacaaacaacaggtagagatgttagagggttttagtgagatgggcgcatttacagatcatactttcctacctgtaatgtccaaggtatgttatatatggactttctgtttgaacattagggaaggtaacttatgtggatgttaataatcaaattttcttcactatattttttcttctttttaatagtgacgacatcaatagatatctggccactttattgacctgcaggaagaacacgaaaaagttatcaggagtgaaccattagccatatggttgtctaatattgcaaatatggttctctttgctgcaaaagtgtatgctttagtaaggagtggttcacttgctattatcgcatcaactttggattctcttctagactttttgtcacgatatatcttgtggtttactgccttttcaatgcaaacgccaaatccctatagaaacccaattggaaaaagcgtatgcagccgctggtgagttcttttttgccataacctgtacttccaaaaatgatggttgatgttgacatctagatctattgtccagaatgttttgtactcttttctgcgaaaatgatttacttatcttttacgtaatctgaattattgtctctgcattttgaatagaatgagcattgctttccatgtttctttctgaggcaaacaataaagatctgaattgacaggaaatcaataaacttactcaacactgtgtgctcactactcagtaattcttacttact

SEQ ID NO: 1153 - DNA, 232 bp, Zea mays
  Clone ID: MRT4577_101050C.1
gttgagcacggtcacgcaccggagcggtggtgcacacacgtctgtacggagctcggaccggggtccgggatcggcaggttcatgctggctgcctggggctacgagtacgggtgctcgcccacggccacgagcgcgttcgagaggccgacgctccggactaactcggtgtagggggtcgtgcggaacaccacctccgaagacgggtccacggtcgccttcacggcgtatagga

SEQ ID NO: 1154 - DNA, 821 bp, Zea mays
  Clone ID: MRT4577_101051C.1
cccctcgaggccggccggcacctgctcccatagtcctctactcagctatccaaatcacttacttctcaacgcgtcttctccaacactacctttaacatgtctggcttcagcaatgcggataccggctccaagactgccgacccctacactcagaagaacctcgaggagccttctctgaaggagaaggttgaggatctgttcagcttcgtcgacaagaccaagttctgcctcttgaccacacaagttgctgacagcgatcttttggcttcgagagcaatggcacttgctgccaaggaaggacacggcttcgatctcctcttccacaccaacactgagtctggcaagacagatgacctgaaagaacacgcgtcggtcaacattggcttcatcaacaactccggagaatgggcttccatctctggccatgcaaccattgagactgatcgcgaggttgtccgcaagcactactcgccagcgctcaaggcctggatcggcgacctcggcgacggcaagcatgacggcggtccagaagacccacgcattggcatcatccgtgtcaaggccagcactgctcaatacgccatatccaagaagacccaagtcggcgggcttattgagctggccaagggtatcgcgagcggcgagtcaccaaacgtgaacaagctgaggcagatctctgaggcggagatccagcagtacaggtctcaatagacgtggtgaaaatttaacggatgcttctatggtctatgtaattacaaaaataccttgatacgtttacgatcgaaaaaaagaaagcagggctacggcggccgcggcgctct

SEQ ID NO: 1155 - DNA, 353 bp, Zea mays
  Clone ID: MRT4577_101052C.1
ggttaattgtcgggtcgacccacccgtgcgcccacgcgtccgacctgccctactcctgtcgcgcctttcccttctctcctgcgaccggacgaccccgggggggttctctaccagttggaccagagcttactcgacgacgaccaggtcgccgagggctttgtgctcacctgcatcgcctaccacaccttggaccttttcattcacacccacaatgaggatgcactccttgaggcgtactagtataggcagccattaatggaccacatacccacccttttcctggcatgcatggctggcataataaaaaaaaacacccccgcctggcattattaacttaatttccccgcccccca

SEQ ID NO: 1156 - DNA, 588 bp, Zea mays
  Clone ID: MRT4577_101053C.1
gttgcgtgtcctttgcagacactttctggggcgaggtgacatggcgagagtcttggatcggtggacgtagacggtagacagttcgcgtgcgtttccttcgcctacttggcctacatgccttctgcccgtgaagcgatgtttcccctcgaaaggccgtaggctacgccgtcagaatcggtttttcagtgagttttgacccctccgacgctccgtcgcctgacagaatcgcggcgttcttcgtacccgcccatcctccgcggacgcccgctgccatggcgactctgctgcgccctgtcctccgtcggctctgcgggctcccgggcctacagcggcctgcggcagaaatgcccctccgggctaggagcgacggcgccggcccgctatactcgcaccacctccccacctccccgctgcagaaagcgctgttggccgccggctccgcggcgatggcgctctataacccctaccgccacggtaaggccgcccgcgcctcgcccccgtgggggcggcttggagccgtttcctgtgggtaactggaacatagcctaggtcggggtacccaaacctggttgcagctcgtaaccactc

SEQ ID NO: 1157 - DNA, 881 bp, Zea mays
  Clone ID: MRT4577_101054C.1
gcttagggttctaacttgaaactgcagtaaggcccactcagcccgttattcttcagccgccagcgatccagctctagcgtttcttttttcccccagaagctcgacgccggcggtgctccacgggagccaccagccccacctccatcggaggcagccaccggccacgggagcagcacgcctcctgcatcaactgctggcagccaccagccacctccatcgttggctacttggctccctcctccttggtagaagatggccccatcctcgtcctccagctccgatggacatggccatgctgctccgcgccctgggactggtagagttcaagtggcgttgcctaacgcagatgctgctgctgaagctgatgcagaggttagtggtggttatgctgaatctaacgagccaaattctactggtgctccatcatgtgggtctggtgtcgttcccaatgattctgagtctatagttgccaaaacattagagaagttgccaccagagcttgctgcactagctaaagatcctaagaggcatgctaaatctaaggaccctgggtggaagtatgggttctggccatatgaagggaagaaggatatggttcaatgcatattttgcaaaaaggtggttcctgcaggaatcaagagattcaagcaacacatcgcaggtggttatgcagtcgtcgagaggtgtccagctgcacctgcaatgatcaggaaagaaatgtttgattttttggtgaaaaatgcaagaaaagaactgaacttgcagcaaggaagggaatgggattctgaaagtggaggtggagtgcaagaagtacctgttgtgccaagttcagggacagagttaaggaaaataaaaggaaggttcaagcatccattggttct

SEQ ID NO: 1158 - DNA, 257 bp, Zea mays
  Clone ID: MRT4577_101055C.1
gcggcgtaaaacgagtactgaccatgtttctctttcttacacagaatcatcgtttaaaacaatcagggtcttggggataatagtgatgacggatactactttatttacataactaaaaccttccttactgactgatataaaaaaataagttggctcctttgtaggactgtagggttccctcttgtaggtccaaattgttaccttttttatttgtgtttcaataaatttaattcatggggtgattgtttaaatacatc

SEQ ID NO: 1159 - DNA, 534 bp, Zea mays
  Clone ID: MRT4577_101056C.1
atggaacagggagggcgcggctggaggagcttcggcggccctagacaaatggagcccgcgccatggctggagagcgcctgctccatgggagctcggccatggaggccgttgggagatgggagccgctgctcgcctgcaggggacgcgcccatggggaggaggtcagggagcgccggcgttgagggagctcggcggccatgggaggcccctgcgctggctgctgttgtggtgctcggtgtaggagcacggcggccatgggaggtgctggcggatccgccaccggcggcgcggatccagggagaagagggtcgtccgcttccacgcgcacccgcgccgcgcgccgtcggagctaggggctgccgcgccgaggctgggcagccacgcccgcgccgagctgcgaggggccgcgcctgtgcacagccgcaccaatggaaggggccgccccgggaggagcctcccaggggcggcggcggctcaggtgggaggcggctgctcctggcggctgctgggtgggagagagcccccggcggctag

SEQ ID NO: 1160 - DNA, 732 bp, Zea mays
  unsure (1)..(732): unsure at all n locations
  Clone ID: MRT4577_101057C.1
nnaggccggccgggactttcgcttcaggcacgctcagtcttcaccgcgtctgctccagatgctctactcgatcaccgaattcttgaactcgcaaacacgcctgctccctcttcgataaatgcaacctattatgcaaaccgtctcccgtgtgatccgtcgtcgacgaggagtcgactcgcctatccacaggcaaaaatagagaaaaaggtgatagtatctacgtaggagcgtcgccggggatgctctgctccggccgcatgctggcctgcaacggagtcttgcccggacgtctccggctgcctaggggtgtcgcctaccacctgcgtccaccagcgctcgcgtggaggtggcgcgtcctgccctccgctgcggcgtccgtaggttcccctgacctcacatcgtcgtcgtcttcgacggctaacccgacgaatgtggccggtgaggaccataccgccgcgacacctgggttttgcatcattgaagggactgagacgggcccagattttgcaaagctagacttgcgggagattcaggataatattaggacccgacgaaacaagatcttcttgcatatggatgatattctaagattgagagtacagcaaagaatacaaaatgtggaactcggtatttccgatgaagattgtgaccatgaactctctgatttccatcatttattccgctcttgcctcctctgagagcagctaacctacaggtctactatgccgcatg

SEQ ID NO: 1161 - DNA, 330 bp, Zea mays
  Clone ID: MRT4577_101058C.1
gccggccgggtttggacaagcaccaaactaattactttcttctagctacatctagactcgtctgctgccagaagtactagacccatgcatgggaggcgaaggaggaggacgacttcctgaagaccatcatctactcggagagccacaacttcggcacggagaggcacggcttggacgacaacggactacaaggcatcctgcccaccatgccgctcttacaagcctcatggagatcaagatctgggacttctaccgcgcacggcatcgaccatgtacgacgcaccttactctttctctacatctcccttctcaccgggatgggccgctccc

SEQ ID NO: 1162 - DNA, 306 bp, Zea mays
  Clone ID: MRT4577_101059C.1
ttttcctaacgaaccgtgtttttccgggggtagaacagtcttatcaaaaagaaagaaaagaaaagaaaagggggcccccaaattgcacaatattttggccccaaccataagggttattagagataactgggaacccaggcttgggcaaattttaatataggtggtcttcttgatcggcatctatctgattaacgccttcacattgttcggggatgtgaccaggaaatgaatattcgtggtttttgtgcacaaggccacacttgcagcgtatacaaccacgcggagtttttgattggggtgacaacc

SEQ ID NO: 1163 - DNA, 917 bp, Zea mays
  Clone ID: MRT4577_10105C.1
cgcattcaacatagagctggcaaaacccccctccatcacacacacccgcggcctcgaagagcgctggttttcccctcctgcacctggcctggagctcgccccgtttctcctccccacaccacactagcctctccccggtttttccccaaatccgacggactcgaggccaagcggaggcggagatggcgctgcggtgggcgctgctcagatcggcggagatctctcccggtcgcaaggctgcacttgagtacttgcattctctatcaaaggcacagcctactcgttctatctcatgtgccggcctgcatcctgctggcagatcattcagcacccaggctgctactacatcaagcacaccacagcctccaccaccacccccacctccagagaagactcactttggtgaccttaaagatgaagatcgtattttcaccaacctctatggtcttcatgacccttttctgaaaggtgcaatgaagagaggtgactggtatagaaccaaggatttagtgattaaaggggcagactggatagtgaatgaaatgaagaaatcaggtctacgagggcgtggaggtgcaggttttccgtctggcctcaaatggtccttcatgcccaaagtgtctgatggacgtccttcttatcttgttgttaatgctgatgagagtgaaccaggaacttgtaaagacagggaaatcatgcgtcatgacccccacaagcttctggaagggtgcctgattgctggagttggaatgagggcatcagctgcttacatctacattcgaggtgaatatgtgaatgagcgtctgaaccttgagaaagctcggcaggaagcatatgcatcaggacttcttggtaagacgcttgcgggtcaggctatgattttgatgtacatatacatttttgtgccggtgcctaca

SEQ ID NO: 1164 - DNA, 273 bp, Zea mays
  Clone ID: MRT4577_101060C.1
ggcccacaagacgaacaacaaggacggggcttttttatgtgagtatgctgttccttcggatgatggattggaagatgggccttctgccgacgtccactagatcagcgaattctcatacaaggctaccgacgaacatgttaacctggcacgtaaataggtgaacgcctcagtgacgatcgaccttgatgtggcacttgctgcttaaggggacatctcatgtgctatgctgaccttatgactgatgagagacctaccatcttagttttttgcagg

SEQ ID NO: 1165 - DNA, 536 bp, Zea mays
  Clone ID: MRT4577_101061C.1
ctcgcaacaagcctaccgcgatcagattatcaaattcagaagaaaacaggtggttcttttacatgcactagtgtattgccgctcgccctgcgcgcggtgttaaatccgtttgtgagatcttaatttgtacataaataagaaacacagaacttactatccacctattgcttcttccaacgcgtcatcatcatcaaaccatcgattaagctagtcatgtgtcttgtcagaaagtgggcagcttaaaagtcttccttctgcctttgagctattgccaccaagcactcagctcaacatcgtaggtattccatacttgatgaagaatcttccaccaactcttccaggtgtggtatccacaacctggtcgaaaactctttcgaatagaacttgtagactgcacgattcaccttgctgcaattcgagccagttgtcttgttcacaccacagatcttattagctctgttcttcctctccttaatctgattatgtgactccacctcggtagcaagaccatttctgcaaactaaatgaacttgcga

SEQ ID NO: 1166 - DNA, 407 bp, Zea mays
  Clone ID: MRT4577_101062C.1
tattctcacttgcttccaaatgacgacgaggcgtttgagcattttgattctttcatttcaagaagaattgatgaggctaataaaattggcaaaatcaaccttgctgctactgggaaggaccttatggatgacgagaaacaagaaattactattgatatgtataccgcattggagatggaaaacgatatagttggggagcgagcccctgagatggaaaagaaccagaaacttgggctacttcttggttttctctctgtgcatgactggtatcatgcacaactactatttgagcgtcttgggcacctaaatcctgttgagcacattgaaatctgtgatggattatttagaatgattgaaaagacaatgtcttccgcatatcatatagtttgtcacctgtattattacct

SEQ ID NO: 1167 - DNA, 588 bp, Zea mays
  Clone ID: MRT4577_101063C.1
cggcacaaaacgtatctgacacacccactgcccattatgttcgtcctttgtgtggctctactactgcctgcaggctggtggctgctgctgctctccccatgtgcgtgtttcatcactgactgggtgctgtgctcccttcaagtatatacaggtacagagacatgctaagaaccgctttctgcaatctggcaattgcaccaatgcagccttgtttcactccactgaccaggcttactgcattggtataattgtggtgtggcaccaaccaagattaatgcgctggccttttatctttactactaattcggactcgtccggtatcttatttttctttccccttttatagtccgctctgaaactgctgagagatttgcatttttgatccctcatatcctttggtctaaggaataattaaacggcgcgccggtactaggaggaaaccatgccttacaatccgcccttcatgcggacgtgcatatactattcctattgtcgtcagcctggcttcaatatcactggggcgcccgtttccacaacgtccttcactagggaaaacccagtcgtaccccaacttaatcccctcccagc

SEQ ID NO: 1168 - DNA, 1369 bp, Zea mays
  Clone ID: MRT4577_101064C.1
cctcgagcccggccgggaccgccactggacgtgcgctccctccacgctccggcccttctcgcctctccggccatggccaccgccgccgccgccgtcacggccaccttccgcaccctgatccagcacgcagcggcttgtggcgcccccgtcccgctccccagcgtccggttccagagcctgcagcgccaccgcgtcggcctccgccgcttcgcgccaccgcgtgggcgccccgtcctacccccgcccttcgccgccgaggacttctcttcctacgtagatgatttctccggggacgacggcgaggagcacttcgatgaggaagagggctctgagccggaggaggaagccgaggccccgcgcgcgtactcgtcgccacgaagccgcccgccgcgcggcgacgaccccggccgtctcttcgtcggcaaccttccctacacctatacctccgaggagctcgcccaggtgttctctgaggccggcagggtcgacgacgcgcagataatctacgacaaggtcaccaacaggagccggggcttcgccttcgtcaccatggccaccgccgaggaggccgccaaggccatccagatgttcgatggcgccctgctgggagggaggacggctagggtgaactacccggaggtgccgcgtggcggggagaggagaacagtcaccatgagtggccgcaggcgtgacgatggcacttacaagatttatgccggcaacctggggtggggggtgcgtgccgacacgttgaggaacgtgttcgagggtagggacggcttgctcgacgccagggttatttttgagcgtgagactggtcgctccagagggtttgggttcgtctccttcagcaccgcagaggatgcacaggctgcattggagtctttggatggagtggaactggaagggaggccgcttcgtcttagtctggcagaacagaacccgccacctggttccccgcctagcactgcgcaggcacagcaggaagaaacggattcaggcgcacctgctggtgggggtacggaggcagccagttcttcagaaccatctgaagcagaggtgggcgagagcaacttgcaaacagctgcaaattattgataagcaggagccacagggttataaatgtgttgcaacgacctctaaatcctgccattcgagtccaaggtgtgctgatagggaagtaaattttgacacgagtgatgctgtagcgaggattcagcatttgagctatacatatacactagaatggattaagtgttgttaggaacgtatttgtgtaatgaattctgcaaagtatgatctcaactgcagttgtgtagcctttctcttactgtaaactgattccttttcaatgttctgtttttcgttc

SEQ ID NO: 1169 - DNA, 125 bp, Zea mays
  Clone ID: MRT4577_101065C.1
acacatgtggagataacgcgacaattttgcataaatgatcacaagataatattgcttccttgcttgccccataacttgcatgagtgataggctcaaggaatgaatacccaaaggtttaaaggggg

SEQ ID NO: 1170 - DNA, 413 bp, Zea mays
  Clone ID: MRT4577_101066C.1
gaactgggacatataacacaaattcactgattggttaagaccctcacgccaaaacagctcaatatgaaaacacaacaccaacggggaataccgaccgctgcaaactatgtcaatctaagaataccaactcttaggaacaattggatctctatcattaaaagaaccaaactttagatttattccatggaccccacctgtaattgactcatgtggactcacatgtgagggagataactatggtttggatccaaaagggtgatctttgaatggtatggatccaaatttccccaactgtttacatagactccagcgcaacctaggtattgtttataaaggtcgacaccgtcggacgcatgatccatttgtaaatggtgacgggaacttacaaccaaaaactactgcgacgcaacaaa

SEQ ID NO: 1171 - DNA, 339 bp, Zea mays
  Clone ID: MRT4577_101067C.1
ggcaacaacaatgccttgcaataactgtcattccaaaaattccataacggtgaacccaaattttaacgactattcccaaccagctttacccaacttgggaaatccatcaacatgcgtttaaacaaagcctaatcctggaggttgcattcccaacttataaacaccatccttttgacaaacattgcacaaaatttatttttataaaccggcagtgtgtccctttttacccgaagtaaattgacaccagcgggatgtctacgttattgtcgtcgtcttcctcacaggccacaacaacctccaaatggcggtggtaggaaagcaccttcaacttggccacct

SEQ ID NO: 1172 - DNA, 385 bp, Zea mays
  Clone ID: MRT4577_101068C.1
acaaacaacttcaactcctcgcgaaccgacaggacagatttccccggcagctgcagctactggtatcagcaccaaccaactctattctagcctcgtaagccacttctcctctcccggcaggcttggtctcgccttctccaattatcggcatctctctcctattatcgtatgagaattctagccagtcacttcgggaaggaagtcaactgcaaatagccagcctccacgaacagcgaaggagctacggcacttctggcactatcctcaaatccatatggcgcgtcgtcaacccaatttgccaagcgtcaatctcaatcttccaaaaaaaggaaactagctatctagaggaaactaactatctctatctagaagaagctgagaaaga

SEQ ID NO: 1173 - DNA, 364 bp, Zea mays
  Clone ID: MRT4577_101069C.1
gcggggaagatgaatgcatttctcggatcgttcatccggaacaataattaaaaaaaatatactctgagaaacctgctacctttttgtatcaaccacagtctgcaccgatccatcatgactattcgcataaacaatgtatcccttttaaactgctacatatggtgtcctttaaccaactacctttgactaactttagccagttctaccaactacacctcattggtgatgccctcttttagatactttatcaattatgcctgctagctgaagcataccatgtcttgcttcttgactcaccagcagtatgatagctttttacccgcagaccaccctatggccgaatactgctcttatacatacacac

SEQ ID NO: 1174 - DNA, 774 bp, Zea mays
  Clone ID: MRT4577_10106C.1
agccacagccacctcgccttcgatgtccaagaaccgcacggtcctgctacggttccgggtcgccctggcccgggccctcgcggacggcggtgtcttggcgaggcaggggcgcgcggtggatggcgccgtcgagcacgccggctcctcgtccgccggagccgggtgctgccgcgcagaattccgcttgccggagaatatggcgttgagaaggctggcgagccgcgcgccgggggaggccggcctgcggcagccgccgctggcgggggcggcggacggcttccgcgccctcttcgccgtgcctggcggggccggcttctgcttctccacgggagccaccgaggccggcccaacgccgccagctgaggttcggatggggcggaggcggcggagggagtactcgacctcggacgacgagaagtagccacggccggaggagcagtcgtccgcaggcgaaggggccgcgcgcgccgcccggtggctggcggccaagaagggcttgtagtagtagtaatgtagggccgcctggtgttgctccttggcgctccgaggcgtcggtgccgtggcacgctccgccgttgctccgtggccgccggcctgctcgtccaaggaatcgcagatggcgtccagcagcgtggacgagaaggatggttggccaggtcgccgcctcggcctctcccgcgccgccgacggtggcgctggcgcccacctctccattgttgacgtgtagtcgagaagagcagagcagcgagtgcgcgcggggcaatgatgatatag

SEQ ID NO: 1175 - DNA, 573 bp, Zea mays
  unsure (1)..(573): unsure at all n locations
  Clone ID: MRT4577_101070C.1
tcttccggctcgtgtgtctggaaccctatcctccatatctcacgatccactcgngcaccaagccgagggaaggagaggagtgatggtgcgcgtctgggtgcccgagcagggcggaggcgccgcggctcagaagacggggtcgggtcccttgacgatcgactgacccaagccagtggagcactggagcatggaactcggctcgatcgagaagatcctggcaggaaccatcccggcttcacgtcctgcatgctcgtgaagctcgagggctccgtctcgatatctcgcaataacacctattgattgacaccactgacttagcctatccaaaatcttacttgaatgcttggcccgaagaccattgcgcagcctctcgtgaggttattggtctagtgatggatgctgccaggaatccatggatggtttatgtatatgcgctatatttaattgcgtgaaacaccggacagangagaggagatgaattgtattacgcttatctgttgatcttataaatgggtaaaatttgatagctggtgcccgaaaaaataaaaaagaaaggtggctatgggctgggat

SEQ ID NO: 1176 - DNA, 1330 bp, Zea mays
  unsure (1)..(1330): unsure at all n locations
  Clone ID: MRT4577_101071C.1
taccctcggagcctgccgggnacattgggacctcgaggcggccggtgggccccggccactcctgcactttcactctatcatcacctaccaggctactagcataacaagtcgccaatccctcccccgagagagtcagaaatggcatcacctcatagttgctttcgcggctggcagagcacgagccacgtcgcacttgcgctggtgtccgtgctgatcctgagctcggcacgtctctccgcgggcggcaggagcctgctggagctgtacaagccgccggccagcgcgatcctgacgtaccacaacggcgccgtgctgcagggccgcatcccggtgtccataatctggtacggccgcttcacgccagcgcagaaggccgtggtcaccgacttcctcgggtccctcaccaccgccgccgcctcgccgctggcaccgtccccgtccgtgtcgcagtggtggagcaccatcgaccagctgtacctctccaaggcgcggggcaggggcagcggcggcggcggcggcggcgcgcgggtggcgctcgtcggccaggccaccgacgaagggtgctcgctggggaagcgcctgacgctggcccagctcccgcagctggcggcgcgggccgggccgaggaagggcgggatcgcgctggtgctcaccgcgcaggacgtgggcgtggacgggttctgcacgagccgctgcggcctgcacggctccgacgcccgggcccccgggaccgcgtacgtctgggtcggcaactccgccacgcagtgccccgggcagtgcgcgtggccgttccaccggcctctgtacggtccccagacgccggcgctcgtgccgccgagcggcgacgtcggcgcggacggcatggtgatcaacatcgccagcatggtcgccggcgcggtgaccaacccgttccgcgacgggttctaccagggcgacaaggacgcgccgctggaggccgccactgcctgcacaggggtctacggcagcggcgcctaccccggtttcgcaggtaacctggcggtggaccccgcgacgggggcgagctacaatgccaatggcgcgaatgggaggaagtacctgcttccggctctgttcgaccctgctacctctacgtgttcgactttggtgtagtaaacaatcctgtcgggattgtgtagcaacactgtgtatatagtatagtatgaggattaaggagtgtactgtgctaagtgttgataactggatcataacacgacataaaaaatagatatgtaccgtccacttttgaagaaaaatttacttgttggaccgggggattgcaggcagaaatgatgtaaaaaaacaccatcct

SEQ ID NO: 1177 - DNA, 301 bp, Zea mays
  Clone ID: MRT4577_101072C.1
gggacgcgtgtgcggactcgtgtggctcctggcgttgaggatgcccttgggttacctatacatggtgcgtgcgctctgctagagacaggaggggataccatggtgtactagcttgccgtcgatcagatcgccgtgttcatagaggagttcgaactctcgatggggatggtgacagttgcatctcagccaaagagctcgaagctgaggtgcgatcactgggtcaaaactccaccgaggctgatctccatgacttgatcaacgagggctatgctgacgtgtactgcaccatcgacttactgga

SEQ ID NO: 1178 - DNA, 215 bp, Zea mays
  Clone ID: MRT4577_101073C.1
aggactcttgcctgacaccccaagatccccaagtgaaccgctggctgctctcgtgctgaacggtgggaacgcatgccagccccgacctgtggactgcatccatgacgctacagactcctgtcgtgtactcgatcatccatgtcgctcccgcatgatgccgactaatggacgctcaggtcagagctgtgatgcgcccgtctgatgaatacatggac

SEQ ID NO: 1179 - DNA, 189 bp, Zea mays
  unsure (1)..(189): unsure at all n locations
  Clone ID: MRT4577_101074C.1
cctacgcgtccgtctttgccctcttgtgagttccaagaagattagagaggagatgatgggcgtcctcaggaagatgagagcggctggtacgcacactgacaagaagaaataaagcatttcaagttcatgaatgtgtnnganngagtagatgntcttctattgcccaatatatatacgaccatcagtctt

SEQ ID NO: 1180 - DNA, 562 bp, Zea mays
  unsure (1)..(562): unsure at all n locations
  Clone ID: MRT4577_101075C.1
ctgtaccataaatattttttttgcctatccagcagtgcagtacaggttctagaaagccaaagattccccttttgggtagagagagaggaaagcaaaggatgggggaagatccctccttttgctcgcaactcttttttcttttatcagcagccgatgaattcatcggttttcaaggggcgccatcattctgccgtgtcggcctatggcgttgcctctctggatatcggagggcggcagcaagtgatgaaaaatggtggcggtaggtgctgtaaaaaaaatatgggaacgtgtcccattccactttcagtcaggtttgttgccgaaaccaatgtcaacagctacgacaatttgtccactgagatgcaatattagtcaaaggtgaatctgtaatctttcaaccgtggaccccacggagttactgcccttttttttgccatcaacctgctctacccgtatgttctctttcttgctgnttttttttctctttcttatctttctaccccctcanaggcagagcccaggagtcagaaggatcgcacagcatcaagaaacaaccgaggca

SEQ ID NO: 1181 - DNA, 211 bp, Zea mays
  Clone ID: MRT4577_101076C.1
ggtaccgaaccgcaatttccagcccacacccacgcatcttgtctactgacatggacacacatgctgcacactttagggctgattccaaagagcgtgatggatggatcacaaagccctactctcgcatattcgataagcaatatcatgcagaatgtgcatcagcaagacctgcaggccatgcttggttcatcgcagcgtacaagttgtcttg

SEQ ID NO: 1182 - DNA, 648 bp, Zea mays
  Clone ID: MRT4577_101077C.1
acctcgaggccggccgggccgggatctcactatatcgctcctcttcgcctcctttctggaacagatatgatttctcccttgatcccatgcgtcgagtgcacacctgcttctccccactctgatctcttcccatattcgtcgagatggcaaagaaaataataaccctctcactgtccctgggcaactacttataggtgtgaaaagttatgatccatcagaatcgacaaaccatccgccacattctgtaagattactcgctctcacctcgtcctccctcttcctagcgatagctccaagatgctctccatggtaatcaagtcctgaaaatagcacttgcactgcctgcatcgtcaccgtctccacactctgaagccgaatccgacgattggtatgacgcctgccccaacataccctgcttctttggtgtcgaactccataattgggatgattccctctcctccttgctaccggtccccacttgtcgacctcatctcgactctgactactctgcacataatcgctctactcgacctgacctgtactactgctgctgacatgatccaggtcaagacaccccattacatgcgcgacaccttcaacatacttaatgacttcgcccctgcagatccagcagaacatccgcatgag

SEQ ID NO: 1183 - DNA, 722 bp, Zea mays
  Clone ID: MRT4577_101078C.1
cctcgaggccggccgggattcttctatatcctcaagcttgggaataaatcaatactaaaagtgtctttgttttagagaatcacctctgtcatagtttcattcatgtagttttatcccccccccctgaacaatattcatgtgatttcttatgaatgatcttctgtcatatcattattctgcctcatttcttgtatttctgtttgtactctgatcaggaaaaatggagtggcttttgtgaaaatacatctcagttatttattaatcattttcacattttcagtatggagtgacttggagatattacattcctgacttatattcttgcgttctcaacatgaagggaatgatttcagttttttcacaagccatcttgattttttgctttattttttcagtcatcctccgcattcatgaagagttggtcaacgtgtatcccgttctactactaattcttgtgccaagacatcctgaagactgtaagaatatttccttggcactaaagaaacagaaggtcaattttgtgctgaggtcaactagggaagtggtctcttcaatcactagggggaattaagaatgctttacagggtcaccccaattgcagttgttggtggttcatttctacctggcttagccggccataatttttctgaggctgctgccgctggttgtgctgttatgactggaccccacgttggacacttctaccatatgctggtcgaaat

SEQ ID NO: 1184 - DNA, 572 bp, Zea mays
  unsure (1)..(572): unsure at all n locations
  Clone ID: MRT4577_101079C.1
atactcaagttttgtctagtctttcctgagnatagattttaagtgatcatatgagtgatttagttttaaagattgtcttgggagcttgaaagataaccaggtttacaaatcaaatgatttattagatgattcatgtaattcacatagctgttggagatgttaataccggggagaatcaggtcaacgaaataaaagatttgcaacggcagtttagcaataggcccctctggatggctgcttctattcacagaggtgaagaagaagtcatcctccgcattcatgaagagttggtcaacgtgtatcccgttctactactaattcttgtgccaagacatcctgaagactgtaagaatatttccttggcactaaagaaacagaaggtcaattttgtgctgaggtcaactagggaagtggtctcttcaatcactagggtatatatggttgatactttaggggaattaagaatgctttacagggtcaccccaattgcagttgttggtggttcatttctacctggcttagccggccataatttttctgaggctgctgccgctggttgtgctgttatgact

SEQ ID NO: 1185 - DNA, 270 bp, Zea mays
  Clone ID: MRT4577_10107C.1
atatttttttttttgttattgattattgttcggttcggggaacataaaagcgctttatgcggcatatgtacaagacgcatccatagatttgtaggatggcgatacattgagattataaagctacttgtttttttagttacgattggatttacgataaacacagagtttgtgttaatgccaaagccaaacctatcgttgtccacgttttgggggggtgcctgattgtgccgtgactagtgaggctaaacgagaaagaagcttacctggggc

SEQ ID NO: 1186 - DNA, 436 bp, Zea mays
  Clone ID: MRT4577_101080C.1
attcggctcgaggggagcttgcttgctaacggttttaaacaggttggacagcatgatcgacccgggagacgaatgcattcccttgaagacaacggtagctgcaagaataatgaccccatggtccactgcgcggctccacttgtacgagcgctcaggcctcacgggggccagcttcgatacctacgaacataggcgacttctgtgattctttgagaacactctgactggtgagtccctccggtacgctcgacaaagatgtaagagaaaacacttggcaccagcgtgcgacagacgatgattgcataagcatacttcacgtgcgggggccatacctggacgacatcgcctcccatgtacccgcggtgggcatgggacaacaacaacgagtcgggggaaagactggcgtctgcatatgccagccagtgtcgacgctcca

SEQ ID NO: 1187 - DNA, 262 bp, Zea mays
  unsure (1)..(262): unsure at all n locations
  Clone ID: MRT4577_101081C.1
agaccggggctaaaattttttactggtataagtgctaaaaggccaaagttgaagtagtactagatgaaagaagcattggtatgctagatagggcagcaacagaggcgtagcgcaggcaatgtagggctataacaaaatgccaatagaccaatgcatatatacatagcactacataataactagcaagggaaagagatagagagcacgacctggtagatatgtataacttanaaccatggcatccaccanatgtacattttgc

SEQ ID NO: 1188 - DNA, 2274 bp, Zea mays
  Clone ID: MRT4577_101082C.1
ccggccggagcgcccgcaggccggacgggagccgcagctgcagtctgcagagcacagccgtgcgcggtttgcaaccgtaccagcacaagcaccccaggcgggcaggaaacaagcctcctccgctgctccgccgcaatggcgtccccgcgcggccatcgccgggccagcgtgctgcagaaggcggcggcgctcctcctgctcgccctgtcctgctgcggctgcaccggtgccggcgccggtccagcggcgccaaccccgaaggtgccggcggtgatcgtgttcggggactcgacggtggacacgggcaacaacaacgcgatcgggaccatcctgaagagcaacttcccgccgtacgggcgcgacatggccggcggggcccagcccacggggcggttctgcaacgggcgcctgccgccggacttcatctccgaggcgctcggcctgccgccgctggtcccggcctacctcgaccccgcctacggcatccaggacttcgcccgcggcgtctgcttcgcctccgcaggcaccggcctcgacaacaagaccgccggcgtcctgtcagtgatcccgctgtggaaggaggtggagtacttcaaggagtacaagcggcggctccggcggcacgtgggggtcgcgggggcccggcgcatcgtctccgacgcgctgtacgtggtgagcgtcggcaccaacgacttcctggagaactacttcctgctggtgacggggcggttcgcggagctcacggtgggcgagttcgaggacttcctggtggcgcaggcggagtggttcctgggcgagatccaccggctgggcgcgcggcgggtcaccttcgccgggctcagccccatgggctgcctgccgctggagcgcacgctcaacgcgctccgcggcggctgcgtcgacgagtacaaccaggtggcccgcgactacaacgccaagctgctcgacatgctccgccggctcacggcggcgcggccggggctgagggtcgcctacatcgacgtgtaccagaacatgctggacctcatcaccaacccttccacgctggggctggagaacgtggaggagggctgctgcgccacggggaaggtggagatgtcgtacctgtgcaacgagaagagccccgacacatgcgacgacgcggacaggtacttcttctgggactccttccaccccacccagaaggtgaaccagttcttcgccaagaagacgctggacctgtgctacgaccagctcctgctgtgatgctgatgatgcgccctagagctcagtgtggctacgtttagtccacactccacagtcaaaattgttgctgctaattcgtctccgtgtgtatagcatagctagtattcgatgtgatgtatgtagtagtatatggttgctgtgcctgtctcgatgcgtcgatcgatggattcacgattcttttgggcttaaatgctcataagggagataaaatttacacaaaagaaaaaaaaaaaaatttgctgccgccggagccggacgtcttttggccaaattgtttgtgacagagagatcgatggatgtagtatatactgctagtagtagttcctaggctcttggtggagtgattgattaaacaagcagagcagagagaaacaagcagctgcaatgcaacagttcagttacggatggcgccggagatggatcacgcattcaccgttctggacaagttgttggtgatgcagcccatcctgaagatcttggcgaaggagcgccagagcctgagctcctggtgcgccatcatcgtcggcatcccctccttcacgcagtggtcgtacttctccagcaccgacacaatgtagctgaattccggccgccgcgccgggttcgccgaccagcacttcttgatcaggctgttgagcaccggcgggcacgagctcgacagcggcgggcgcaggttcttctccgatgcggcgtacgcggcctgcacgggcgtcatgccctggaacgggagcaggcaggtggtgagctcccagagcacgatgccgaagctgtacacgtccaccttgcgggtgtagggcttctccttggtcatctccggcgccatccagcggtaggtgcccttgttgcccttggtggcctggcacttggtctccaggcaggaggtgccgaagtcggccaccttgacgcgcatctcgtcgttgagcagcaggttctgggacttgaggtcccggtggatcacgccctgcgcgtgcaggtactccatgccccgcgagatgtccagcgcccggcccggccgacagcgagtaagaa

SEQ ID NO: 1189 - DNA, 304 bp, Zea mays
  unsure (1)..(304): unsure at all n locations
  Clone ID: MRT4577_101083C.1
tcggcaaagctgaacgatctggggcataatgatggccagaaaggagacggctgcggacccagctatgtgaaactggattagatggcaagatatattgcatattgagtgattatatggtcatagacttcactggggcattgggaaatgggatattgatgagatgggctagtcacgggtgttatcatttatgaagcatgcatacaactgtcaactatgactgattctctattttttttttctagcgtgcatgaaaatctatggaacttgtacgctgacgaataacaacgcaactctcacggtttnt

SEQ ID NO: 1190 - DNA, 299 bp, Zea mays
  unsure (1)..(299): unsure at all n locations
  Clone ID: MRT4577_101084C.1
ttccttgaacagcaagaccaacaaaccctctttctgactgaccactgtgccgcgccgtggtcaccggacggacacacagaacgacgatggncgcgtcggcgttgcaccagaccaccagcttnctcgggcangncctgatctcccgcgccaccggcgtcgatgaccgangccgcatcaccatgcgccgcaccgtctagatcgttccccagagcatatggtacgatcctgatcggcccaagtatcttgaaccgttctccgagcagacgtcgtcgtacctgagcggcgagatacccgacaac

SEQ ID NO: 1191 - DNA, 120 bp, Zea mays
  Clone ID: MRT4577_101085C.1
ggtacctacgcacagtatgctgtttcaagagcccggactccggaggactgaagacatcggcgccgatcctcgtgctgccccgtcgatcagtcaaccgttcgcctcggcgtgtggctgcgc

SEQ ID NO: 1192 - DNA, 600 bp, Zea mays
  Clone ID: MRT4577_101086C.1
aaaaaaaaccagggtttccaccgggggggaattaaaaaaaaaaaatggggtggaaaagccccctacataaagcaaaaaaacagccccccgcacaccccggccttggggtcagggaaacaccaccctgaaaaaaaaaaacccttaagggggggcccccccgcggtccttattataccccaccccccccttggaagggaaggttcatctacaatgggggggggccctttccattggttggccccggctttttgtaaaaaaggaacgggtttgggacccccataaggaccgggggaaatcgtttcacgcccaaaaacagggggaccccccggttaagggcctccttttaaaccactttccctttgcccctttggaaggttagcggggaaaatggaaaaaggttgagggcaccccgaaaaggggccccccccccgattttggggaaaaaaaccttggggcccggggacatttccacgttttcctgggggaacgggaaatccagaatcttccggatctcatcctccggggggggaggcggcgaaaaaataaaaacccggcaaaggaattcggggggaaccccatgcggggaggggtattttgccc

SEQ ID NO: 1193 - DNA, 424 bp, Zea mays
  unsure (1)..(424): unsure at all n locations
  Clone ID: MRT4577_101087C.1
tccgtggccatggcgtctngagcttcgaaccattgatgagagcagcaccgttggctgcggcggccggacgcgatgtccgttgtggcggccgtggggcccggcgccgcggtggcggcgtacgggcacgggcagccgctgtgcggcggcggggcgaggaagaggaaggacgtccgggaccatgaggttggattattgccgggtagcgacggccgcgcggcggcggcggcggcggggcgtggcgccgggctgttcgtgctggagacggtggaggaggaagaagaaggggcggacgcggagaggtcgtcgtccgtcggcgcggcgtccgaggacgacgcggaggaggaggaggacggtgacaacttggcatcgagactatgagatggttccaggtttcaggaataaatataatagaagttattgtgat

SEQ ID NO: 1194 - DNA, 320 bp, Zea mays
  Clone ID: MRT4577_101088C.1
caacccaggcaaaacactgaatgggttaaaaaaaaaattaattttacatggcccggtttttttggtttatcggggtttttgggaaaaaaaggggtgtaagtttgcaaacactgaaaaaggcccttttttttaaaacaaaggggccatgatcaaaagggggcttttttggttttttggcaatatccggtgccggtttaaaagataaattaaggctgaaccttagggcccggttttgtttaagggaaaaaaccagtttccagccttgaaattttaatagaagggggccttcctggaaacaccgaaaaacacgggattggggg

SEQ ID NO: 1195 - DNA, 430 bp, Zea mays
  Clone ID: MRT4577_101089C.1
tttgaagccacgtgaagaccgcgtctacagcacagaggcggcggcggctagggcacagaggaggcggcggcacgagctccgtctgcacgagatctggcggcgacatctacaccggctcaccggcgtccacgaggggaacgccactggctgaccggcgccatcccgtcggtgtccgcttctcgccgtagatctttgcatcgatgtggccggccactggagtacgcccaagtggtaggcaacttgtcgagaccctcggctacacccaagaggaagcgaggacgcggacggtctgctccctcggctggaaatgcggcgaggcaggcacgccggcgagcctcgtccactgagagatcgcggcggatgctctgcttccctcccgcgtcctaatgagcgaggaagtggccgatcttcctctgtgccgctgacggac

SEQ ID NO: 1196 - DNA, 362 bp, Zea mays
  Clone ID: MRT4577_10108C.1
aaccacccgttcgcaaaaaaaaaataatataacaaccataaaagatttttactttctaacataaaaattaacaaggggggaagggggaattttataaaccatgaaacaacagccttaaaacatgatggctgctcctgtatttgacaccacattggatgagcctcaaggagcatcgccgtgcccactacgatgacttcctaaaggcctatgagcttgccaggactgcaacccttactgcgggagaggccgctgaggctcacacagctaccaccttgttcaaaaacacttgttttccgaaaggatgtctgctcaataacattaagccctcttctctaccaacaagagttcatattgaaggatat

SEQ ID NO: 1197 - DNA, 427 bp, Zea mays
  unsure (1)..(427): unsure at all n locations
  Clone ID: MRT4577_101090C.1
acgggnccggaatcccgggccgaccacacccttccgcgacacccttggccccccaaggacggtttaagttcccccagtaacaaggttatgggttgggaggcaattgttttgcttaatgggaaccttgtaaaaagggtcttccgtggtttgggcccttaaaagttttccgttgccggaaccattttcgggggccgtggccttgccggaccatggggaaaggaatttgttgcaaagttttataattgaaacaccatggtgaaccagaacttgcctgaaggcggcttcttttggtccaaaagtttttgtgttgttgaaaaccttgttgttactttgccaaaattggttttcaactgttttaacggtaagaccttgaaaagtgctcttccttttatgaagaaggatatcaagttggttatttttttttgtt

SEQ ID NO: 1198 - DNA, 152 bp, Zea mays
  Clone ID: MRT4577_101091C.1
cttgagatgcattgtggacagggggcggagcgagatgaaatctctggtgcctatgcttgtgaaggagagtagaacatgcctgcatgagttgttctcccgagctgtgtgatgcggggctgtacatatcatgacggaactgcctagattcctta

SEQ ID NO: 1199 - DNA, 237 bp, Zea mays
  Clone ID: MRT4577_101092C.1
tctgactacgcgttacgctaagcgctcggcatattcgcgctacgaagtctacgatccgacgcgtcgatcgctcggacgctcgctcaagcggtcgcctccgtaggacggtgaatgctagctgcgaggtaccagcgcggcggccatcatgaaggcggcgccggagcatcgcggcggcgcttaacaagatgaagaaggagaccaccgcggactggatggccaagctggacgaggggcgca

SEQ ID NO: 1200 - DNA, 347 bp, Zea mays
  Clone ID: MRT4577_101093C.1
tcggccccgccggcgccgatttccgaaagtcccgtgggatcccgccggttggggggcgaacttgggggggaaaaacgcttgctttttgggggccgttgcgaacaacaaattgaacggcttccggaagcgcttcttctttttatttttaaacggattggggaacgtaaagggctcgggcggttgttccttggtttccgccggtttcaacaacttgtgccccttttttaattcgttcttgttcgggtttaatggggtttttcctcaaaagcccccttcttcttgttcttttttttcaaacccgttcttttatattagatttcgttagtccctctggggggtttttttaa

SEQ ID NO: 1201 - DNA, 137 bp, Zea mays
  Clone ID: MRT4577_101094C.1
gaatgtcctactgcggctgaccctcagagaggctacaatggactgaacccttgattgcctcaatctgaacctgttctgggagcagaacgaggacaccacggtctggcatgctgatgcttacgcttttccagagatga

SEQ ID NO: 1202 - DNA, 792 bp, Zea mays
  unsure (1)..(792): unsure at all n locations
  Clone ID: MRT4577_101095C.1
gccggccggggaacaatatggtcagtttcnnnnnnaaaaaaaaaaaaaaaaaaaaaaaaaaaaaaaaaaaaaaaaaaaaaaaaccacgcgtccgccctgactacccgctaaccacagtccacagcccaaagcggcggtcgctccccgcttaaacccttaagcccgcacaccgacgaggcgaacggaccagagtcggcgagcccccaggaggcgccgactccgcctccggctctgaccggtctttagaccccccctgccccaggcgacgacgaaaccagcagcgctgcgcagcgccgaccactccgggaacctcacgatccaggggagatgctggtcgccgccgccgcctcgccgtcgcagccgtgaaccggtttccccaggggggagggacttgggctcagattcggcggatcttgggctggtctcgtgcattcgagccgcggcaggcgtctgggtaaccgcttctcccgaggaaaaggaaaccaaagctgctcggccaactttgggatcaaggatcggcgaaaaggaaaagaaaaaggagggatctttttgggagggtctgtttgagccttcggggttaccgtagcctcgggcaactccgtgctaatggatttcttcaagattaagaagctcgggaaggggaagaagagcgccgggggtggnggagaggcagttgaatccgacgacgacagcgccggggggtgtgaccccccggngcctggaggagctgaagccgggcatcggggagaggactaacgccgnagcggcggcagagggtacaggcgcgggcat

SEQ ID NO: 1203 - DNA, 200 bp, Zea mays
  Clone ID: MRT4577_101096C.1
gctggtaacaataatgggcttgcaggcaacaaccagggggctacacccgctagcctgcgtgtttccctagcctcacaaccgttacacatactcacgcagatggtgcatttccacaggcagaagaggaccaccaacacccgctggggaaccacctttcctaacacagggggagaccaacctaaccccgggccgaatcaacc

SEQ ID NO: 1204 - DNA, 310 bp, Zea mays
  Clone ID: MRT4577_101097C.1
gaggcgagcacggtaagcagcggtaggaggaactctagcgccgccgcacccgcacgaatgggtgatcgacctcgacgccaggggcaggaataagaagaccaagcgcacctaacccaagtctgaccaggtgtacctcaagcgcctcggcaagttctaccgattcttgctcaggaggaccaagagctaattcggcgctcggattcttaagaggcttggcttgagaaacaccaaccgacccccaatgtgcgtgcgcccgcttgctaagttactggattgaaaggctatgaacattgctgtcatagttggctca

SEQ ID NO: 1205 - DNA, 168 bp, Zea mays
  Clone ID: MRT4577_101098C.1
cttatgtataatcaaataaattccattcgctgtagaacacaatgcaaaacaatacgaaacaagaaccgacgtcgcgaatatagaaagaccaacatagtgaaaagacagaattggacatgaatagctgacacgggggtcctggagtaaaagccgcagacgtaaccgcca

SEQ ID NO: 1206 - DNA, 1135 bp, Zea mays
  Clone ID: MRT4577_101099C.1
tccacagaaaaaaaaaaaaaagataaaaaaaaaaaaaaaacaaggcaggagtcggtgactgcaatagaacatcctggccaacaccggtgagcgaagagaaacgattccatagtcgaagcgtagatcgcagcggagcagaggcatggatggaaagagctttagcaacgaacagcaagcccaacaaaagaacccagacgcagtgacaaacagtgttccgagccaaggccaggagcccttgaacacgtttccagattcagacgatggaaacacgaacaccggtccgttgaatggccacgcagcagctcatgtgaacatggaagctgccatctccacggaggacgtcatacgggctggcgggttcggagcgaaggacgacattggcagcctcctcccgacggcaattgattccaccgattttgaggcctcgctgcgggatgcccgtggtttcgagggcgagaaagcggcgccgtcgcatcctggactagggtggaagggggagaaagctgatggtggaaccaaactggcagatgtggcggagcagtgatcacgctttcctcttctgtagcccagctccagccttcagaaaaccttgttttctgccacgtgtgtctggagagctgccctgcgtatgaactttctttgtcacagtgttttgtgtgacacataacattctgtgtatgaacatgaggatgtcggttctatgctgtctgtcgtatagctctcctaaaaaaaaaaaaaaaaaagagtcttagtttcttctgcgtctgacttttcagcagcatcttgtacttcagacgtttcattcttatcttctacagatgaaggagtctcatcattggttgaaggagcagattcagtctcagtaccactagagggcttctcctcagctgccttttccactggaacttcctgtggtggaagtgaatattcctcagcgagggacggcgtcttggcttccgcggccatgggcgcagcagcagcctcgaagcttctacagtggcggctgcgagagcgagggagagatcagagagatagggagggagggggggtgctggactgggatcgcctgccgtcgcccaccgaaggcaggagcacgcagtcagctgctctccccacgcgtccgcggacgcgtggg

SEQ ID NO: 1207 - DNA, 390 bp, Zea mays
  Clone ID: MRT4577_10109C.1
ctgcatgtaaaattgcaacaaagactttagcatggcaatgtgagaattttgtatgtatatttcaacattgacttaaacaaagccataggacaactttggcatggcccatggatggctgtggataaacttttagaacccataaaaaccactgatattcaagaaattacttattacacatggcgacggaaaaaaaagacattacattaagagggctgtgattttatgaaaatatgcgagggggcatgctctggcatgttacgaagcatctcctttattgtgaaactaacccttgcgcttcaagcaccaaattggacatggagacgacagattcttaggagctagcaccctcttaaacaggcttgaattcctgcaggtgtttgaagggggccc

SEQ ID NO: 1208 - DNA, 252 bp, Zea mays
  Clone ID: MRT4577_1010C.1
accggaaacagccaaaaaaaatttaagataccccaacataccgggctagggggctacgaccctagtttaaagcttttttacaaaggcataaacaattcctaataggggcttccaaaattggcctaaaaaaaaaggagtatcgggcaaacgggattaaaaagaatcccggggcccggcactggatcaccagacgggactcaaatagccggtggggggggaactgtttaccaaaaaccaatgcaatggggaaac

SEQ ID NO: 1209 - DNA, 787 bp, Zea mays
  Clone ID: MRT4577_101100C.1
ttttttttttttctttttttttgtggtcaaatgattcagccattcataacatcaaactgctacttgactgtctttagcagtgcaaattaaacagtaatacaaaccagagcggtaagagaactgcaaagcacaatgtgttttatcatataaaatgacaaggtacgtatcaccaaaacaatagcctcttagcatagtaacagcaggcataccaggtatgcttttatcccaggagttggccatgttagcagctcaggagcatgtattgaaaatctaatgtttaccattacagggcagcattaacaattcttttgtgtagagaatgtgatcaatgcaaacaccacccatgaaacttgaataacatggcaataccacttaggcacgaccttgtggcacttcttcactagatgatgcttcaggcacataagcttcatcatcactggattcttctgatacagtaacttcctcagcggcagatccttcgagctcaagtgcctctacctctgcagcatcgggcctaacctcagcaacagtttctccagatgtaacttccaacagaggagtttctccactatctgagtccaacccaagctctttctcaaccttcttccaaccagacagcaaatctcgtgggaacatcttttttacctctgcaacaacctctttggcatcagccaccctgcctccttttgccaatccctcaaccaagcctttcattgttctaaaatctggcaccttacgcctctttaagctatccttgaagatgcccaaaccagcatcaaagtctcca

SEQ ID NO: 1210 - DNA, 137 bp, Zea mays
  Clone ID: MRT4577_101101C.1
ccgtatagcgcgcatgccttctgtttcccttactcttttttgggcgacaaggactaattgtgtgtatcagaacgcacgtatcttacacaatgtgccaacaggtgaatcgcaagagacggaacctggataaaagcaac

SEQ ID NO: 1211 - DNA, 958 bp, Zea mays
  Clone ID: MRT4577_101102C.1
aaaaaaacagaacacacgcgagctccagatcgcacttgccagccttgatccactaatcacctggcagcactctacacagcgagagggagggaggaatcgaggagagcttacgaggtagttagtagctacaagacacagcaccataggcatgccggaggcgccggtcgtcacaatgcgagacacggcggcggcggcggcgcccgcgactcaccgcgacctgctcgagtacatcgagcgcgtgacggcgggggcggcccaagtgcagcgccgcgtcctgtcggagatcctggcgcagaacgcgccggcggagtacctgcggcggctgggcgtctcgggcgccgcgccgggcgccgtggaggcgttccgccgcgccgcgccgctcgtcacctacgaggacatcctgcccgacgtgctgcgcatcgccaacggggacacgtcgcccatcctctccggcaagcccatccgcgagttcctcaccagctccggcacgtccggaggggagcgcaagctgatgccggcgatagccgacgagatggaccggcggtcgctgctgtacagcctgctgatgccggtgatgagccaggccgtgccggggctggacaggggcaggtgcatgtacctctacttcgtgaaggcggagtcgcgcacgccgggcggtcacccggcgcgccccgtgctgacgagcttctaccggagccgccacttcctggagcgcccgcacgacccctacaccgtgcacaccagccccgacgaggccgtcctctgcgtggacgcgtaccagagcatgtacgcgcagctgctgtgcggcctggtgcaccgcgccgacgtgctccgcgtgggcgccgtcttcgcgtcgggattcctccgcgccatccgctttctggagaagcactggcagcgcctgtgccgggacctccgcaggggcgcgctcggggcgaggtgacacgacgctccgtgc

SEQ ID NO: 1212 - DNA, 1516 bp, Zea mays
  Clone ID: MRT4577_101103C.1
cattgggtacctcgaggccggcggccgggacaccaccctccctccctctctgcctcatcacctactccgcctgcgcctgcgagctgtgctgtgctgtgctgcgcaacggggagatccaatccacagaacaggatgcagtccaagcaccgggtcttcgcggaggacctgctcctggcggcggcggcggagggcgaggaccacttcgaccgggtgcccgactccctggtgctcctcatcttcaacaagctggccgacgcgcggtcgctggggcgctgctccgcggtgtcgcgccgcttcagcgcgctggtcccgctcgtggacgacgcctgcctgcgcatcgaccgcgtcatccccgccgacgccgccgacgcgggggcgccgcgcccgcgcgccgcgctctcgcacctcctcaagtccgtgctgctcgccgtgctcaagcccttcgcgcactgcgacgccaagtccgcgtcgccgcaaaagcacgcgcagcagcagcagcagcaccactcgcccgcccaggtgctcaggaacttcagcagcatccgcagcctccggatggagctcccggtctccgacgtgggcaccgacgacggcgtcgtgctcaggtggaaggccgtcttcggcagcacgctgcagagctgcgtcatcctcggcggcaccagggtggaccgcgcgggaccgccgcacgccccctcctccggctccgctccccccgcgggcgacgacgacggcggcagcatcccggagtccctgtacaccaacggcggcctcaagctgcgcgtcgtctggaccatcagctccctcatcgccgcggccaccaggcactacctcctccgcgagatcgtcaaggagcaccccaccctggagcgggtggcgctgacggacgccggcgggcagggcacgctcagcatggggcgcgaccagctcagggagttcagagacaggccgctcgccgccgcgcccgccgccgccgccaaccgcacgcaggtgcccgcctgcaacatgaagctgcgctacgcgccgctgctggagctctcggacggcaccaggatccacggcgccacgctcgtggtcatcaagcccgtcggcgacgccggcgggaaggacctcgacgagctcggcgccggcgccttcgacgggcccctgagggaggccgtggccgcgctcggcaagcgccgcgcctacctgctcgagatgaacggcttctagtctgtgcgcctctctgctccatggcaatgggcattgttaattggccaatgggcaacggcaactagctagattgctcctccgctcgcttcacctcagctgtcagtcagctcctgtcctgacgatatccttgtggaaaaaaaacagtagtatagaatggagtgggcagcgccagccggccagcttcacagtgcattctgatgctatcatgaacggaaatgaagcagtcagtcacattttgaatcaactcttgtatgtaatggcatgagacgacgaaaccagagagttgcagcatggcaattcgaagtct

SEQ ID NO: 1213 - DNA, 340 bp, Zea mays
  Clone ID: MRT4577_101104C.1
tcccgcttgattgggcgtgggctgtctacttaatcccagacttacgagggcctgcattcgacgtgataaattttttataggagtacataaattgcattcaggggcccgcggtaaacaagggcgcgtctgatacaatccacttgttacacaagtacgtgaggtaccagcacatgcgctgtttcaccgttggcgtaataggtaaaaggagcggacacatggctctttccaacagttgctcgatcagaatggagaatgtgacgcggccatgttctctgtattaagcgcgacggttattttggttacccgcattgtacaccgtacatttgtgcagaccctaggg

SEQ ID NO: 1214 - DNA, 836 bp, Zea mays
  Clone ID: MRT4577_101105C.1
gagagaaggcaggcaacggtagaaaaatacgtagctgatccgggtaacggtatgattaggggcgtcccgaccccgacagcgagccatggatggacttcaacaaacggtcggtctccgtctcctccgtcgtcgcctttataagcgcctccgccgcgccttcactcgccaccaccatcctcttcctacctcacctactctcttcgcttcctcatctgcgagctgtgagctgcggcaacgatccaatccacaggcaggacaggatgcagtccaagcaccgggtcttcgcggaggacctgctcctggcggcggagggcgaggaccacttcgaccgggtgcccgactccctggtgctcctcatcttcaacaaggtcgccgacgcgcggtcgctggggcgctgctccgcggtgtcgcgccgcttcaacgcgctggtcccgctcgtggacgacgcctgcctgcgcatcgaccgcgtcatccccgccggcgacggcgacggcgacgcgctcctcggcctcgcgggggcgccgcgcccgcgcgccgtgctctcgcacctcctcaaggccgtgctgctcgccgtgctcaagcccttcgcgcactgcgacgccaagtccgcggcggcggtgcacaagcacgcgcaggtgcaggcgcagcagcagcaccactcgccggcccaggtgctcaagaacttcagcagcatccgcaacctccgcatggagctccccgtgtccgacgtcggcaccgacgacggcgtcgtgctcaggtggaaggccgtgttcggcagcacgctgcagagctgcgtcatcctcggcggcaccaaggtggacccgggcgccgcgggt

SEQ ID NO: 1215 - DNA, 470 bp, Zea mays
  Clone ID: MRT4577_101106C.1
atagaaccacctttttttttggttcaaattcgggggaaactgggtacaattgttggggccatcagttagacaagttattagagaaaaacctttggtttgaatagccaaacacccaaaaattacttggccaaaaaaagaaatggggccactgattttgggggaaaagacaccctattaaccggcgggggaaccagagaaccttttaaggttcaggtacatttttggataagggtgacttggaaagcttcccgatggggttttggcgggcgttccctaaaaagggtttgtcagcagtgatgaaaaagccagcaatacagggtggaaatataatgagggcttgggcagggtaattgaaattccccttagcccaagggagggcacgggagccaaccaacgggggaactggaaccacaggaccaggttttggggggttttttggtcccagcaagacaatttttttgacggggggg

SEQ ID NO: 1216 - DNA, 322 bp, Zea mays
  Clone ID: MRT4577_101108C.1
tttctttttttttaggacacttctgtgctttgtttaaaaatttaaggctttttcaatccattacaaaaagtctatccctgggcataagaaggggggggtttacccccccgggccccccttttgggggccaagggtttgtcccttatactttttttgggcctttttttaatttgggaccaaaatgtgtactttaaatttaaagcagaaaatttgggagatttgggttgggttataaaaaaatttttgggtttgcccttggggccaattttccttttttttccgcgtggattccaaaaaaaaactttttttttttggggccccc

SEQ ID NO: 1217 - DNA, 1501 bp, Zea mays
  Clone ID: MRT4577_101109C.1
gaaattagaggacaataacactgaacaaaacgacagacaaagttaaggtgtcaggtaaaagaacgtttgggcctaccaaaaatacgcacgaagagttagtgaagaggaaaaaattacaagatactgaaaacagcagtgatagcgagtatgattctgagccagcccagcctttgagcaataatgaagtaactatgaaacatgatgatacccaatttgggagtgcactactggatgatgaaccacagaatgatatatacagaaactttactgatatcataaaaaatcctggtcctaagacaactttcgaagttggaatgttagctggtgattcatggaagaaggtcaagagcgacaaaggaaaggaccacagcaatgccaatgacattaccaataaatccaaaataccggttccttctattgtagacccacagcctaagcaacaggatcacaattccgattcagattctgaggaagagatggttgaaggcaacttgaccatccctgacagaaaggagagctatgaacttccatcgcaagctgatctcatacgtcaggcttttgctggtgatgatgttgaagctgaatttgagaaagacaaaatggatgttttaaatgaggagaatcctgaacctgaaaagcctgctcttgttcctggctggggccagtggacagacatccaacagaaaaaaggacttccctcatggatgataaaagaacatgaagttgctaaaagaaatagagaagaagccttgaagaggaggaaagactcgaagcttaagcatgtcattatttctgaacatgtagataagaagactgaaaagtatttggtaaggaaactgcctttcccttacacttcgaaagatgtgtatgagcagagcattcgaatgcctattgggcctgatttcaacccagcgatatcagtttctgctctcaatcgacctgcgattgttaagaagcctggtgttatcattaaaccaatacaatacgaggaggttaatccccatgagaagctcgatgaaccaaaacgtgtcattcagagagcaaccccaaaccggaatgcaaagaaagcctttgccaaacaaggaaaaagcgtaacttcacaaaagagaaagtgacgagacagtcatcttctcgtcaatggcttcatttggacaaaggagagctcatccgaattttgttgcccccgccgaatttgcacatgcatggctccaggtgtgtgcagtgattcttccctttatgaaagttcccgcttcggcgcatgacccatgggcaaaaggtttcacaccactggtttatgagagcagagaaattttggtacaagtagttctgtatttgttatttattgcattcgccacgcatcgtccaaatgagacggatgctatatttcagttctgatgatggccactggttaactagagtcacctgtcttgtatggatccccacttttcagacgccggtaaatttgtatgatttgcgaaaaaaaactagatggatgtgagcg

SEQ ID NO: 1218 - DNA, 608 bp, Zea mays
  Clone ID: MRT4577_10110C.1
cccaacaacctacgctcacgcgtgcaaagcgcgtcacctactatcagagctgcctattttcaagcgctatagcgtgccacatctttgctctctgcgtccaggctccacgcaccggcgatcgcacggcgtaaggctgacccacgcagctttgggagtccaagactacataacgaacccactccgagatttgttacaaacgcaaacaactacaccgcatccatgcttgcactgataattcatgataatggagaccatgaggggcggcgctatcttacttgtgctaatcttaacaaagaggaagaagcacgaacggcgtgaacacatacggtaactcatacactaccaacagcgcctacactgcctgtgtggcacctaacatgcagacttcctcgtgacactccttgaccctgcaccatgaagcgtgctacaacatcctgcataagaaaaggataactaaaaagaaccttagggctgctgagtaccacaagatctttgcccacaggctgaaggaacagactgaccgtcagagcgagagctcggtcaataggagatccaagctgtctgccggcgaaaaggtttctgctggcacctgtgcttaagaatattca

SEQ ID NO: 1219 - DNA, 172 bp, Zea mays
  Clone ID: MRT4577_101110C.1
attcggctcgagcagaagtccgccctctgtatgtccaacctgggtacctgactcgtgcaggggtgatttactcgtacgggcgctagcgacctctgatccgccgcctcaagccagataaacgctgccctcccaagactaagggaagaatagactgtgcagacaggccctggac

SEQ ID NO: 1220 - DNA, 267 bp, Zea mays
  unsure (1)..(267): unsure at all n locations
  Clone ID: MRT4577_101111C.1
ccggccggatcacgcccatatatacagctccctgtagctccggactttgcttgttacgaccgattgcacgactcaagccaaaatgtccgattccaccgttgcccgtcctcctcccagcgccatttccaggccgctcagcgagtctcttcttaatgagaagtgggaccgctgcctctccaatctcctcgtcaagtcatccctcggtctcggntttggtgtcgncttctctgtcctcttggttcagcgaagagcatggcccgcatttgt

SEQ ID NO: 1221 - DNA, 858 bp, Zea mays
  Clone ID: MRT4577_101112C.1
cctccactcccgctctccctctctctctctcctcctacgcctcgcctcttgagcgcgctcttgaaggaaggctccagacctctgccttctgctctccccggctctgcatccgcgagagctgttgcattgctgcagctcgcgagcgcccgggtccttagtagttctttcaccacagcccggatcatggagttcgacgagcgctgcctcaaggtccaggagcccaaatttgattgcctcctctttgacctcgacgacactctgtacccgctgagctcggggatctcatcacacgtcaagaccaacattgaagcttacatgattgagaagctgggtattgatgagagcaagatcgaaaaccttggcaacctgctgtacaagaactatggcaccacgatggcgggcctcagggcaattggctacaacttcgactacgatgagtaccacagctttgtccatggaagactgccctacgacaacatcaagccagaccccgttctgaagcagattctcaagaacatgcgcatccgcaagctcattttcaccaacggtgacatgatccatgccgtgagagccctcaagaggctgggcctggaggactgcttcgaggggatcatctgcttcgagaccctgaacccgccgtgcctgctgacgccgtgcgaccaggcgcccgagatcttcgacatcgccggccacttcgccgggttaggcagcgccgacgacctgcccaggacccccgtcctatgcaagcccaacgggggcgccatggaggcggccctcaggatcgccaacgtcaacccttacaggggatttcttcgacgacacgttgcgcaacattcaggcagggcagcgaattggcct

SEQ ID NO: 1222 - DNA, 765 bp, Zea mays
  Clone ID: MRT4577_101113C.1
tcagccgtgcgctggttgcgggggggcgggggggaagaacaaatggtctcttttgcagatcctatcgtcacatatatctggcctacagatgtttctaaacggcactttgctgctgaaagtctcattccaccggggtgacatgggaacatgccactcaagctgtgcgggagaatcatgctgctgccaattccaagattgaaagccttatctcaaaatccctcaacaaggatcagatggaggcaattatggagctggcaaatcaagggaaggggaagaaaggaagcaggtctagggggcgcaaggtgttgccactcaaagcccccaccatcaaggctgttcccggaatatgagctgcgcgtcctgttgggctatcagtggtcctagttttattttatgtatcccaagttagttctaccttgctcgtgtcagggggcagagcaagatgtcctgaaggttcttttgccagactgttggtcgttgcatggtatttggtggtctggaggtggttttcgaatcaatggatccttgttcctctgtatcttactaatttcagtttggaacttttgtgtgtgtcgtgggccatgtgtatcttactgttggtgaacaaggttgccagtctgcatcaaatgttaactatgttatattctttatgtggcaatgtctgttcaagtagaggagggttcatcttttaatgaatacaaactgttgtattttatcttggaatgtgaggggtttgaatgcccgtgctaagcgctcgagccgaat

SEQ ID NO: 1223 - DNA, 1430 bp, Zea mays
  Clone ID: MRT4577_101114C.1
acgaccccctcccccctaatggcagctcatcctccattgcttcctcccccaagatcttcccctacgcagcaaggatcgagaaaaggaggggcacgttgaattgaagaggaagagaggatcaaggagatgttcttccccatcttctcttgaagatttcttgggaaaaccctaggtggctacactccagatcatgtctagtacatttcttcttcttccatgaacgcaagtgaatgtagcggtggttgcttacgttctgacctgttatttctatcgcctacactctaatattcacaagtatcagattctttcataattggactctatggcgatgctttacttgcttgcattatactgatgctcaatcatatattgatgatacattatgattcgagtatgactcatgagattaattcacacccctgaaggcaaatgaagtattagtatagatttgacacttggtccccattatataatgtctccaaatattcttttcccttctccaaaagcaaggtcatcagctttgctatcttggagaatccctcaatgaaacgtttggctggatcaactgatattccaccattggagatgatatgcccaaggaatgacacttcacccaaccagaactcacatttactgaacttggcatagagttggttatccctcaacttatgcaataccattcgtagatgttcctcatgttccccatcattcttggaataaattagaatgtcatcgatgaataccacgacaaacttatcaagatattccataaacaccttgttcattagattcatgaagtaggctggtgcattggtcaagccaaacaacatgacagtgaactcatatagcccatatcgggtagagaaagccgtcttgggaatatcagaaggcccaatcttcatttgatgataacccgacctaagatcaattttagagaataccctggcacctctcatttgatcaaacaagtcttcaacgagtaatttgtaatcaacacacatcctctgtgaaccatccttattatgaacaaacagcacaggtgctccccaaggtgaggaactgggacgaatataccccgactcctgcaactccttcaactgtttcttaagttcttttaattcatctacagacatccggtagggtctttttgaaataggagcagtaccatgtagtaggtcaataacaaactccacctctctatccagtggcattccaggtaactcttttggaaaaacatctggaaattctctaacaactcggatatggtctcccacaaatttactgttaaccagatatattgcatgttgggtaaatgggggaggtgcaactgtgacttcaaatctatctccatcaggagtagaaagctttatagtccctcttgatgtagtgcccaacctcaccacacttgaaacatgtattgccagtagcat

SEQ ID NO: 1224 - DNA, 155 bp, Zea mays
  Clone ID: MRT4577_101115C.1
ttgttatcgtcacctccatgatctacgccgtgggacacatttcggtcgcgcacatgaaccccgccatcacgctcgggttcgcagcgtgcccgcattctccatggatccagttgccgttctactgtgcggcgctacgcaacgtcacaatgtgacct

SEQ ID NO: 1225 - DNA, 425 bp, Zea mays
  Clone ID: MRT4577_101116C.1
gggggtaaaagggctccccacaaaaagggtcgggggggcggggggaaacctgggaaaacaattaaattttattgttttaaaacggggggaaaacagggaaatccggtccgggttaaaggaaaaaaaatttttaccgggatactaaggttttggtcccgggcaaaaatataaaaaggatttggacatttgggggtttcaaatttaaaaaaatttggaaaaaagggggccgttgatccaaaaacaaaatttggtgcccaaaaaccccaaaagccctttttttttgggggggaaaaaaaaaactttaaaggttttacggggaaaattgggggtcccattttaaggggaaacctggtggggaggtggctttttttttttcttggccgccggtggcggcaccttgggggaaaaaaggccaaaaccccccc

SEQ ID NO: 1226 - DNA, 800 bp, Zea mays
  Clone ID: MRT4577_101117C.1
ttctagggaagcaccgcaagctcgtgcctactgcactggaacgtacattctggggttttggagatggatctacgctgcccgtctttgataccccgttgggaaaaatcggtgccctcctctgctgggaaaacaagatgccacttgccaggacagccatgtacgccaaagggattcagatatattgtgctcccacagctgatgcgtccccaacttgggtggcttccatgacgcatatcgccctcgaagggggatgcttcgtggtgtcggcaaaccagttctgtcgcaggaaggactacccaccccctccggagtatacattcggtggcctcgacgaagagccatccccggagactgttgtgtgtcctggaggaagtgtcatcgtttcaccgtccgggacagtgttggcaggccccaacttcgagggtgagggcctcgttacagctgacctcgaccttggagagattgttcgagccaagtttgatttcgacgtggtggggcactactcgcgacgtgaggtgctgagtttggtggtgaagactgatccaaagtctgctgtctctttcactgcttcagccgatggagagaggccggcttccgctgggaagaagcgcgacgactctgtgtacaaataatggccacgtatctgtaatctttccttatacgccaattgcaagtttgccactactacatcgcaactattgcgggcttttcctgtacgtctctgaataataaactgtttatgtacacaacagtcgatgtatattatcctacagatatgagatcgatctcttggttgatgg

SEQ ID NO: 1227 - DNA, 292 bp, Zea mays
  Clone ID: MRT4577_101118C.1
aagggactgaactccaagcttctggatatcaggagctacctggaaaaagtcgccacaggcaagctgcccatcaaccaccagatcatctaccagctgcaggacgtcgtcaacctgctgccagatgtcagcctgcaggagttcgtcaaggccttttacctgaagaccaatgaccagatggtggtagtgtacttggcctcgctgatccgttccgtggtcgccctgcacaacctcatcaacaacaagattgccaaccgggatgcagagaagaaagaacggcaggagaaagaagaga

SEQ ID NO: 1228 - DNA, 404 bp, Zea mays
  Clone ID: MRT4577_101119C.1
aaaaaagggccgttaacgggttttcgccccatttaattttggcccttccacctttgggaaattttgaacctttagtggtaaattgggttttgcaaatccgattcccgttaaaggggggcggacagggggtgtccaaagcacccggggttttggttggccttccaaaaagccccggcccggattcccaggcaggggtccttaccaggtagttgggccttgactttaacgggttcctggacaacgggggtcccggaggtggccccggagtcaatggggtgcccttgaacttacccggcccccatgcggaacttgccgttgcccccaacaatgttaatttgggggacgtggttgagcacctctttgcggccaaggatggaaagcgtgctccctttttcttccccggc

SEQ ID NO: 1229 - DNA, 242 bp, Zea mays
  Clone ID: MRT4577_10111C.1
ggccgccctcggcctcggcctcgccgtcgccgccgcacctctcctccgctaggacctgctaggtgggatggagggggccgggcactactactctcattttatcccgctgtctggcgtaccctacgtccctgcgccttcgctgggttttcatccatcatccgtcatcaccatatctcttcgtggattactagcagcactgcgtttactgttattcaactgaccctcttgttcttccccgtgct

SEQ ID NO: 1230 - DNA, 865 bp, Zea mays
  Clone ID: MRT4577_101120C.1
cattgggacctcgagccggccggggcgattttttttctctctccctctcttcgttcactctctctgcgctctccggactccggtcttcttcctcgccttcacaccttctgacatttgcgattcatttaccgtaccgtgaacgacgaccgccgccctccggcctccgggtcgcccccccctggattcgcgcccgcgccaccgcgtctccggatcctctcggagatctgctgctgagggagttgcatataatctgagctgctcgtgaagtgttcagaagaggttccttttttttgtgcgtgtataatggaggaagtggaggaggcgaacagggaagccgtggagagctgccgcagggtgctagccttgctctcccatccgcatgaccccgcgcaggtcaggagcatagctctggggacggacgaagcatgcaccaagtttaggaaggtggtctccctgctcagcaatggaggagagggaacaggagaagccggaccgtcaggcgcaagcggaagccatcctagagctaagcttgttagcagaagacagaatccagggttcttgactcagaaaggcttcgtggacagtaacaccctggtcgtggtgctgaacagcgccgcccatccttctccgacctccgcgcaggtgcatccaagagccggagctttggatccgcagggcgtgcacccccttggagtcggaggacctcccaagctggtccagcccttgtccgcgcattttcagttcggcaatgtgtcgtcgaggtatcagcagttaccgagtcatcatcatcgtcatcagcagcaggagaagctgcaggccgccgagatgttcaagagaagcaacagcgggatgaacctgaagttcg

SEQ ID NO: 1231 - DNA, 428 bp, Zea mays
  Clone ID: MRT4577_101121C.1
gatgataatgagattgttgatgcagaatgctactctttatgcatgtccattctggaataagcattaaaagctgtctttcagaaaataccaatttcagtaagtactttaaatcggcagcatgcacattccagtccttgtgtatactatcattactttatagcttgttgcatggactaagcacttaagataaaaaattacgatggcttatctgaagaatttgatgtgttcaaggaaaaagaagaatttgatgtgttgtgcattttgaaaagacatatttcatgcagtgcttatcaagagcccttcgggatgagaatccaaaatttctgatggcagcatcaaccttgctcctaccatttcaacccctgatggtttcagctgtccacaccgggataatggaggtttcatttgctaaacgagcatcaatagat

SEQ ID NO: 1232 - DNA, 701 bp, Zea mays
  Clone ID: MRT4577_101122C.1
ccggccgggaagcctaccgacctccagtattctcaagcactggcccagggtttaacgacaacgatacatatgacacgaaacgaaacgatacatacgagacgatatccacgataatactccaacacccactcacgcacaactcaactcaataatatcaagactcgctccgagtcttgcgcatcgataatccagcgacctcagctgaagccaggacatggtacctcgtctctaaaccgtgtttatcaataactagtcttattcttctttcttctctacgcccagcatgatggatgactatgtgagcgagtcggatagcgactacacaagctactggagggattggtttatctcgtccaggggcaacgagtacttttgcgaaatcgatgaggactacctcacagacaggttcaacctgactggcctgaacacagaggtacaatactaccagtacgcgctggacctcgtcaccgacgtctttgacctcgagtgcgatgatgagatgcgcgaggccatagagaaatctgcaaggcacctttacggtctcgtgcatgctcgctatattgttacgactagaggtctatcaaaaatgcttgacaagtacaaaaaggccgagtttggaaaatgccctcgtgtcatgtgtcactcccaccccctccttcctatgggtctctctgatgtcccccacctaaagccagtcaagc

SEQ ID NO: 1233 - DNA, 222 bp, Zea mays
  Clone ID: MRT4577_101124C.1
gtcacaccgacctagcactgtggaggaaatggggacatataacatgacgcgatgtgatacacacataaccagctctggtcacaatgagaaaccttgcatcgaatgctgaaggcagtcaagaatgtatacattcgtgggaatcgctggagaactcaatatgcgatccacgtgagggtatgaggcctgaacctgctgatgttagagcatcattctgagatatgg

SEQ ID NO: 1234 - DNA, 281 bp, Zea mays
  Clone ID: MRT4577_101125C.1
aaatatgattacaaccaaattacggcaaaatatagaaaacatggcgttggcacattcaactgggatttgcattggtcagcataactttgttaaggaggagacatttggttacactcttggttcatacaacaacacaattttggtttttgggtgatacacaaacatgataacgttggggggctccaggctgaattgtgaacgacggaagcgtcacttcatgttcctctgaagaaatgtacgggggaaattactcccgagggtggcgttgatagtaccgtttt

SEQ ID NO: 1235 - DNA, 334 bp, Zea mays
  Clone ID: MRT4577_101126C.1
cggctcgaggtgacataacttatggcaagtaggatgtaagtgaatattttggcaattctggaaacctcttaaaacaaactagcttaatatattaatatttgagaaatctgggtgaagggtaaccagaattatttactattcttccaagttctgtataagtctgagtgctcattccattctgatgccagaatggtaaaattcatgattggtttagagcaaggccacagtatcaggcttacatccatattatatgacagagaaattaacttttattatattgtatccactttaatatgacgggcagtttactattttactcacaaccagatttaat

SEQ ID NO: 1236 - DNA, 599 bp, Zea mays
  unsure (1)..(599): unsure at all n locations
  Clone ID: MRT4577_101128C.1
actcagcccaatggttaagctattgagtaaaggaagacaatccatccccctaccatttccaggctttcttctaagttagttcatgcaagatgctcaatgtggtattgagctgagcctaggggttgtttgaatgcactagagctaataggtagttggctaaaaatttgctagtaggactagctagctaactattagttaatttgctaaaaatagctaatacttgaattattagctatcctgtttgaatgtttttagctaattttagcagctaactattagctttagtgtgcattcaaacactctctaggttgtttgttgaagacatttaagaagcaaataaccgcattgtctaaacactgaatttgttttcctgctgcaagcctgcaaacaagccatgagtggtagatttaaagctctagtacaatgttgaggttagtaaattttccattgctcctggataaattacattacactacagacccgtaatcngttcgtggntcggtactgaatatattgctattgatgaggccatatctcaaatattattaggataaaacttatcgtgtaggcgctatacagtgcactaatttctggagcag

SEQ ID NO: 1237 - DNA, 307 bp, Zea mays
  Clone ID: MRT4577_101129C.1
tttgtgtggttttatttattttgggggtggataaagcgcttcttctgtagggtggaagcacctacggcaagagagatgcgggtactacgacgaccacataacacgccactacgggctactgctaactactactacactacaccgccaatactatttcgacgacccacccccactaaccaaaaagaaccagaggggactagcccctggcgtacataccgcccttggaggcgcccccctggctggcgcggggtccagccggggggctcctggcgcgggcctgggagggacccgacgcgggcctgcgagg

SEQ ID NO: 1238 - DNA, 737 bp, Zea mays
  Clone ID: MRT4577_10112C.1
ctcgaggccggccgggccgggccctgtgcacaggaaagagcaagatgaagacaacgacgacggcgatgcgctccttgtccgtcgccgtcctcctcctcgtcgccgccgccgcttcagcatccgccgccaaggatcgctgccactcgggcgacaaggcggcgctgctggccatcaaggcggcgctcggcaacccgtaccacttcgcgtcgtggacgcccgacaacccctgctgcgactggtacgacgtggactgcgacgccaccactggccgcgtcgtcggcctcgccgtgttccaggacgccaacctgacgggcaccatccccgacgccgtctcgggcctcgtccacctccagaacctcatgctgcaccacctcccgggcatctccgggcccatcccgccggccatcggcaggctctctaacctctccttcctcaccatctcctggacgggcgtctccggccccgtgccgtcgttcctgggcgcgctcaccaggctcaaccagctggacctctccttcaacgccctcaccggcgccgtcccggcctcgctcgccgcgctccccagcctttacagcatcgacatcagccgcaaccgcctcacgggctccctgccgccgctgctcttcagcaggctcgataaggcgcagcaggaggcgtacctccggctgtcgcacaacaacctcaccggcagcgttccgcctgagttctctgcgggggccttcgcgcaggtcgacctg

SEQ ID NO: 1239 - DNA, 113 bp, Zea mays
  Clone ID: MRT4577_101130C.1
cccactcgtacgcggaggccggccgacaccgcctgagaacctataccgcggccgtacccacaccattcctgctagatactcgttaccttagcgcaacggggctgaaacggggt

SEQ ID NO: 1240 - DNA, 554 bp, Zea mays
  Clone ID: MRT4577_101131C.1
gggcacgcttgcatgggggggggaaaacgccaccctcctgtcccactgagtgaacaggtaagaccttattgagcggatgaggacatccggtctcccgaaacgggccagctctttggcgtgatggacgcacgacctgcatgccgaggagaccatacttatccccgtgagagacaagctcaacacctacacttccggtggcaagaagagcatagtcctgtcgactgactgctgcataggcggcatagtaactactggcttggacacgctcatattgacactgggtctgtgatcatgatcatatacagtctgttcgctctgatccatgagaagtacccaagccggaggtgaccccaaccgtctatcctgtaacaggaacaacagcgatacgctaacgggccccgactgtgtctaccatctatgagggcgcctacacatgaatcaacattacacatatgtatctgaaacatgacagacactgtgccggagggctaatcccatacgatgaaaacaaactgggcacaccatgtccatcagaaatactagtatgcaattcc

SEQ ID NO: 1241 - DNA, 830 bp, Zea mays
  Clone ID: MRT4577_101132C.1
ggccgcttttttttttttttttttcgtgagcaaagcagttttgtgatttaaaaaaacatttcttcagtctcgatgtaaggttaatgagctcctcacacaaagcaactctgcttcattaaggaaggacatgtacattttttgatcaagataaaaattcttcaggcagatttcgagtctccaaagatggcatggcttttcttgccgtgagcgattggatcaccggcaaacaataaaatccaaagtcctccagcactgatgacaaggccgggagctccgatgagtttcaagccaatgttccaggaggaaaagccaaagagcgagaagaacaaagtggaaaagaagatcgtcggttggcgataaggggcggcgactgcgcgcgcatcggccccatgggccatcgaagaggaaaccggtatcgctccggtttggaggacgatgagcgaagccaaggtcaggaagctaagcccaactaatctcgcaagataagtctctaactcgttcaatggtttgtaagctcctatgatcccgctctccgtcggggactgatctttgttggccaaccagggtcccaggagcatgacgaggaattttggaaaggcgatgagtggcagggacagtaaggtaagatagatcgaggaaacataagagaaccatcggttggattgtttgtcggggattccagaggattgatagtcctctatcacagaatcgattgaggagcagggttctttgggatccttaagtacgtcgggagtagacattgtaatagtttctttctcagaagaaaaaaataaaagttaaaagtttaagaatggaatcttcccggccgg

SEQ ID NO: 1242 - DNA, 364 bp, Zea mays
  Clone ID: MRT4577_101133C.1
aaccttttcaaaccatattacctgaccaggcccttcctaaggcccttcctgacttaacactggcgctggaccatgtttaacaccatgaacaactaaaacctcgacaccggatggttaccaaattcgaaatccagctaccatgcttaagtgggtcatacaacattggctggtaatcgaccatcagggcacttaaataccataaaataaaatttttagatgatactcagttcagtccacagcataactcagccaggtccatgagcgtcctgatcacttacttggccaggccgaggcaacaaaaatgtaggttcatcagggcacgcctctgctttttgatcctggacgcaagtgcacgggccttgct

SEQ ID NO: 1243 - DNA, 1635 bp, Zea mays
  Clone ID: MRT4577_101134C.1
gaatgttccagtgaaacgcctaggcctcattttaaggaacctgttgtggacagctctgggttaacatcagcagcacctgaaagtttaacagctaagcaacatgtccactcaccagatgcctttataccaccaaagcctggtgctccaactggggaattaggtgatgtaaaatcagattttaaaggtgaagaaattattcaaaaagaacaatattgtgaaagcgaacctattgttgctacaagagagaatttgctaattgatctttcctgtggtgccgagtcgatagatgtgtcagatgtattggaatctttaatggaagaaaggagtggaacttcgtacgtgccagtatcaatagaggacttcctgggtgcttcagcagtggaagaaccacaatactctagccctatagcgttatctccttggggtgaacctagttactaccaaggtgatgctggtgattctgcgctatggggtattcaagattcgatcaatgatatgtggtcattgctttcaccaagacctatgctccaaccttcatctggtattggaactgaggggaaggaaacttttgatatcaacgaggtggctgtgacccatgttaatagtgatttttttcaaagaggatcgatgcttggggaggaaaatatgaatcaggcaaacttgagtgttgctgcagataggatgctgctgcctgagcaggtcccatcaataccaaatggtatgtcaacatcatcagtagacgagggcaccagagttataggttctcaagcatcaatcaatcagagcttagactggggtactacatggaggactagtcagaatctcagcgtgtatagcaatgaaatagcagggccctcgagtaaaagctattgggaagaatcaaggaagcaggaagccaccaattcgggcgtttctatttcaggggaagccattagaaacaagcgcttgaaccctcctgataatgctattcggggcagccatcatcaccgtggcaggtactcccaaatcagtgaatcttggctactcagttcaaatcactctaggagtagttctgctagatttggcagcggtggttcatcaagatcaacttcaaagggtcaaactaggggctaatgtaaattctcaggtgcaggagaaaggatgcatcttgtagctacctgcatccttgatctctgcagcaggaataggttttaaaattctctgttatatctttgcagtttgtataggctaattaaaattaagtcaacagagagcgtaaatgaccatctctgctccactcaactcaactgtagcaaggagcatatgtttagcatagaggtttgactgaatggccctgcccaagaagtagattcagctcttgggcatggtctgtatcatcctgacattctgttggatggaactgcaattgtgcaaaaaaaaaaaaaaaaaaaaaaaaaaaaaaaaaaaaaaaaaaaaaaaaaaaaaaaaaaaaaaaaaaaaaaataaaaaaaaaaataaaacacaaaaaaaaaaggaggttacatcacataaaaaccgattacaatagacataatatatatttggggggggcctttttaaagatcccatgtttttttcccggggtttgcggggttttactttttttttggggcccca

SEQ ID NO: 1244 - DNA, 437 bp, Zea mays
  Clone ID: MRT4577_101135C.1
cccaataacaagaatggcacgcgccaccactgtagccgctgtccttgactccctaggcacgaaggtcggccggctcaggaacaggctatagaatggcctgcaggcaccccgtgactggagcctggggcctttatacattgtcagccctctgggcgcctacttcttgtggcccgtggcgaaccccgacgagggcatgataacagcgcctggatccggaggtgtgcatccttgtcctgctgccgcgctttctcgactatgaaggatctgtacttcaagctcttgctcaccgttggcgttgcggaggaggccgccgatttggcgtagcatctcatgcagtagtgggacatgctgttcttgaacatagctgcctaccgaacctatgaggttgtttgttgacatactggatattattactttactttcgatgatattgagtg

SEQ ID NO: 1245 - DNA, 539 bp, Zea mays
  unsure (1)..(539): unsure at all n locations
  Clone ID: MRT4577_101136C.1
cacccccancnccncggcagcttttcaaccccaanccccaagcccggccgcggcggnccccggccccgacccngccgaggaaccgcccgcccccaaaaccaagccncgccccccncgccgcnccccnccccacggaggacgaggacgccggccgcggcgacgggggcgaggccncccccccgcaccangccgcggcgncgggcgaccgggcgcgggaccgggcggcgnccccgaccagcncgcgccccgcgacgcagacggngaacgggncccaccgccgcgggagccagggccacccgcccgccaagggcaggggcgncgggaagcacancgccagcgacaccnccaccgccggcggccaccagngggcgaccnacgcccacccagacgggaagaaccccgaggacaacnccggcgacggcccggncnncancgcgcccgcgcccgacggcaccgacgngcgngcgcncngcgagcncacgcgncnagaccagaggggcangggcaagcacaaggggcacccgcacgccgaccgcccc

SEQ ID NO: 1246 - DNA, 536 bp, Zea mays
  Clone ID: MRT4577_101137C.1
caaggacgaaggactttatcgtttaacattctctgtgttgccttgttcttaactcttagcatttgagaacaagtccccaacaattacgcttctcgaacctaacgcaaacatcacgaacaacaaactatacacaagaaatacaattaacttaatcacaacttatcagttaattaattaaattctaaactaatcccttgccttataaattatactacatctttataagtgattaaaatattttatcatcacacatgcctaccaaaattctacttggtacattaattcagctaattgaccggaatagcgaaataactcgctataactgaatctagctcgataatcgcaagaactgcgaagtcgacgagagtttcgtgacttacgcaatttatcgagcaccttaatgagtatcgcactagcacattaatttattcaacgatcgaattattctgaataatttatcagcttaccgttccaatagctgactcgaattcgcgagatcggtaatgattctccgacttaggcaatttgtcaagcgc

SEQ ID NO: 1247 - DNA, 635 bp, Zea mays
  Clone ID: MRT4577_101138C.1
ccacgcgtccgtaactcactcagagaaaaggttgaaggaggaaaagttaaatctcgaagatgaaagaaaggttcttttggaagagaaaaataagctggatctgaacatgcaggcaattatatccagggaggaagctataatccagaaggaatccatacttgacaaacgtgaaagtgaactattgattctccaagagaccattgcaagcaaagaaagggctgaaatagaaaggctccgtcaagaggaagaaattgccttggtgaggaggaggcaggaatttgctcctgccatggaaattaagctcacttcttttgaggaagagattgatgcaaggaaagccttgctcgatcagagggaaaccaccatcaatgagaaggaggatgcagtggcgcaaagggaacagaatctcaaccttaggtttgctgagttagcgaacaaggaagaatctttggtaaagaaatcagatgagttaagggaggaagagaaaaggctctcctctgagagagagacactgcacattgatctgcaaaaagaaaaggaggaaattcagaacatgaaattggatttagagaaggaaaaatctttcttcgaggaggagaagcgtgaagcgattcaagctcaggagaatctagcaa

SEQ ID NO: 1248 - DNA, 504 bp, Zea mays
  Clone ID: MRT4577_101139C.1
ttgtaatctcctcccccgcagccgccgcccgggggtgcgccaacgatacatgcttctccctcctccgatccggcctttttgatccccggatcccgtacaatatgcttcccctctcgctcctcaagaccgcccaggggcaccccatgctcgtggagctgaagaatggtgagacatacaacgggcatctggtcaattgcgacacgtggatgaacatccatcttagggaggttatttgcacctcaaaggtgaaaaatctggtgcccttgattcacattgtgaaaggctctagttagcaaaagattagttaagtgcactgtctgatttttgggtgaatctcttacccgaagcaagcatggttgaaattcaaatagtaacaatgtggggtctcagttatcctgctctattagcttgtgagtttcctgtagttatggtttatgatggctcgaattgcaggacggtgacaagttttggaggatgccaaagtgttacattcgcgggaacaca

SEQ ID NO: 1249 - DNA, 449 bp, Zea mays
  Clone ID: MRT4577_10113C.1
ttggattcacctggtactggttttctgtttaattattattcaaactctactagctgtactctgtacacagactgctatggagcttgatgaggaggagaaagctatcactattcactccgtccacaaatgttggtcacgtttggaggagtcaaacatttttaactttgactatatttatataaaactatttatatttatattacataataagtatcattagatagatctttaagtctattttgtagtaaaatatttgaagatataattattgctaatataatttataaatgtagtcaaacttttatgaataccgacaaacatttgtggacgaatagtgatctgtgttcttgtaccgattcagtaacttactagtgattagtgccatctggtgttaatttcctccgaccttggaatagaatatagtagtattcactagaacagttcttgca

SEQ ID NO: 1250 - DNA, 850 bp, Zea mays
  unsure (1)..(850): unsure at all n locations
  Clone ID: MRT4577_101140C.1
acatcaggaacggcaaactatacactttaaacatgattagcctaaacacaactcatcagctacttaattaattaaattctaaacttatcatttgctttataaattatactacatctttataagtgattaaaatattttatcaacacacatgcctactaaaattctacccggtatattaattcagctaattgactggaatatcgaaataactcgctataactgaacctggctcgataagcgcaagaactgcgaagtcgacgagagtttcgtgacttacgcaatttatcgagcaccttaataaacctcgcactaacacattaatttattcaacgatcgaactattctgaataatttatcagcttaccgttccaatagctgactcgaattcgcgagatcggtaatgattctccgacttaggcaatttgtcaagcgcttgacagatactatccgtacttcacgcacaccaccatccaatctttggacatcttctcttggggattattttgtcagcgcgattccaacttggaggcatcacgtagggactgacgtcgaaacgaggcgacagaacaacgacaacaggttggggcagtgttgaaggagcttggcgtcatggcgaatagaagttcgacgaagactgaaccgattgccgaacaggaactgcgcagatcgacgacgcgaggctcgatctagcgagcacgactcaagggagagcgtcgcagaagctgctccgacatgaattacttgctgccgagcacgacggaggccgggaagctgctgatggtcggcccaacagcgagcaggggtaccagggcgcgcatgcaggaacaacttgacaggacgcgnccgagcg

SEQ ID NO: 1251 - DNA, 1769 bp, Zea mays
  Clone ID: MRT4577_101141C.1
aaaccaacaatttgtagcggaaatctaattaccaaattttacaagttacatcaagttttatgatgtacatgatcggagtgattacaaaagtgattcaaagaaataactttgaattgttataaattatttgtcgttttgaaatatatgctagcttaagtgaccatcctcaataagaagtttagaagagttacttagacttataagaaggccgtgcccaccggcgcttaacaccaatcacaatcaaaatgactcgtaacctgggtaacactaggttagtgttgttagacgtcgatcacttgacgatcagcctttattccgatactcgctccattatccatcttcaggttaatccatcatcttgcgaattagtccacctgttacgtcatcttggggtcgactcaactttggtcttccatatctcgtagtcaattaacgtacctgaatgaaatgcattatgcacatgaatgcatatagacaggaatatcacaaacctaacttgtgctacgtgatagtgaattaaacacctagcggcgagacgttgtactattctatacgaaaacactagttaccaatatacaactacgcgtaataattacgcttctcgaacctaacgcaaacatcacgaacaacaaaatatacacaagaaatacaattaacttaatcacaacttatcagttaattaattaaattctaaactaatcccttgccttataaattatactacatctttataagtgattaaaatattttatcatcacacatgcctaccaaaattctacttggtccactaattcagctaagtgaccggaatagcgaaataattcaccatagctgaatctggctcgataatcgcaagaactgtgaagtcgacgagagtttcgtgactcacgcaatttatcgagcacctaatgagcatcgcactaacacattaatttatttaacgttcgaactattctaaacaattcatcagcttaccgtttcaacagctgccacgaatccatgagatcggtagcgattttctgatacaggcaatttatcgagcgcttagggaatatcgcgctgctagcttcgtcttcacccgattcttgggattcttgatgacgcgcgggacgatgacgagattatatctggagcgagctggcgggatagggttgagcaggggatgacgggttcaacgactcgacggcaaacacaagcacgcacaaagcccgatgacaacaggaatcgagctcgcgacagaaagtgatgacgacgcggcacgacaagctgaaacatgaacgcgtcaacatggggttggattcagcgcgtgagcttgacgcgtgcagagaaacagcacgacatagtggagcatggaccaagcgccagccagcaaggaaatttcggacgcgcagggaggaaacaccagagagacagggcaccgtgggaactgcgcgcggcaccgaatcgaaggagcagggagaagaccgagcttgaggacggcggtgacatggacgagatgggcagggccgagctcggcaaccacggcgaactgggcgagttccggcgtgcagggagaagcaccggaggagcaggacgcggctctgcgcaggggaggaagagaagcaagcgccgagcagggagccgcgccatgggacttcggctggggcaggagatggccgtgagagctccacggccggaggtggaagatgacccggcgaccggtgcgcacaagaagaagcagagaccgagcggctgatagaaaatcagagagagcgcccgacccggccggc

SEQ ID NO: 1252 - DNA, 493 bp, Zea mays
  Clone ID: MRT4577_101142C.1
aattcggcacgagggtttctcgacggggtccgttatcctctccacgctgcctatattatatatataccgaccccccgacgccctggtgactactcgatccatcaagccggtgggcgcatgaccaactcagaaggcgccagccaccattaccaccgagaccccgccgccggcaaaccgatgttgcgtcgtcgctgcacctttggtgatgggtcgtgtagcttcgttgattgggtttccatagagatgctcgtaacttctctaggctcggttggtggtcgaaatggtctggattcctcgctggcgtggaactccaccacggatctgcactccaccgctcaacgttgcgtgatcgccggtaaggcatgtcccattaagtgctgtttggtttggtctttttgtcccggccagtatcagcttacaacgcgaatatattgcgttgctttgtgtttggttggtccactccgtgatgaatcactgcagaatgagttcccat

SEQ ID NO: 1253 - DNA, 495 bp, Zea mays
  Clone ID: MRT4577_101143C.1
gcaaaaagaagacacgtcttgtagtatatatgattatatatgaacaataaccgggcaaagaaatacggcaaaataacgctatgattcttcaccctttggtcgccggcgcggccatgccgcggtgattatgccacgagtaggcgccgagccctttggccagccgctgcagcgggctcaaccgggcgcacccggcgacgctgtccgccgccgcggccgcgtccccatcgccgtgtttccagcccttgcccatgtcctcgcgctttgtggcgctggctttgatcgtcaccgccggcggctgctgcgctcgccctcttgacgggcacgtcgagctgttgacgcggccgccgtcggacgagctccggaacaggaggagatcgctgagccgccaccgtctccacccggcgctcctcgacgcgggacgcgtggctggtctcgtgggcggcgagccatggggggcaacagcaacaccgccctcgtcgtccttgccgccgagcg

SEQ ID NO: 1254 - DNA, 483 bp, Zea mays
  unsure (1)..(483): unsure at all n locations
  Clone ID: MRT4577_101144C.1
ttcccgattggggtaccctcgnaggccggtccgggnacccaaccaacataatagcatctcgcatgccctcgacttcctccctcgagatctcagcattctatctgagcgacacgggtggcagatgcggtgacgctgtggatcatgctgctggctgctaggtcaagctcgttcatgcggctcttcagatcccctatcctggcggagactcatgccgccgcgcagcgcaccccaccaccatcgtcctgcccccacaagatcatgcccggcgcgatcgtctccaccacgcccacgcatctccgtagaggtcgcacctgcctgctactgctccattaggtgcaatggctgcacctgtaacgtgctgatgacattattcgaccactttggagacatttattactcgatcaaccacggggcgttgtttgaggaataacaggaatgggcccagccgccgtggctgacgtaagagatgaagctccacgcgag

SEQ ID NO: 1255 - DNA, 570 bp, Zea mays
  unsure (1)..(570): unsure at all n locations
  Clone ID: MRT4577_101145C.1
gccggttccgnagtgccactccccgtctccactctcccccgcagtcccgcacccgccgtcttcccctccctcccccgtctcccactctcccccgcagtgccgcacccgccgtcttcccctccctcccccgtcagatcttccccacatctctgtgttgcatcactcgccgcaatccactcccaatcctaaacccgaaagctctcagctccgcctccctgttcgtacgtccgccttttgactccccctagctagcaggtgatgcggagcaaccccgcaattccaagaaaagcaactggtcaagaaagagtgcaacaaaggaggatggtggtgatgatggcgttaagacaccccatgatgcgccccatcattccgtcgcctcgagggcctgcgtgctgctaaaagggtctcgccggacgtcgtggtggtggcgtgggagcgcggggggagtcgtcgctgcgccgccaccatgccgcaataccaggagctgccctgcggcggtcaagcgctcgaaatcgacactgcgctcaaagatggcatccctcggtggagcgctggaaaccgaggatgccg

SEQ ID NO: 1256 - DNA, 299 bp, Zea mays
  Clone ID: MRT4577_101146C.1
gtggagcttctttgtggttctggccagtcaagaaccactgattgccctataatagtaccttgggctgcgattcaggagattcttcttgccctaaattctagcaaagtcactgtgagggcagccttggtctgtggataaccctttgcagctagtttgcctgtccaaaccctttccctggactagatgcctactgacacacccttccttgttacatatttgaattggggctgtatttgggctctactgccttaattcagcagactttgctatgcaggttctgatgtttagttaccgctcct

SEQ ID NO: 1257 - DNA, 1213 bp, Zea mays
  Clone ID: MRT4577_101147C.1
cgcctagtgatggtcgtcgttggtccctgcgtccttccccggtcgtctcacctcccttcggggcccctgttttttttcagcttcggcgtccatcgcgtcctgctccttccattcgtatgctctggtgatcgtccaccccggcgtccagcgctgcccttgtctcttcgggttttgtctccccaacaccagtcggacgctccttccattcatatgctctggtggtcgtccaccccagcgtccagtgctgctctcgcctcgtcgggctttgtctccccaacatcagtcgctgcttcaactcatgttcgtggatgccgtatctacgactccgacactccctacacaaatctgctgttttgtgttcatcgccgaataaaaatgcgaggccgggggagctcgtccgctttttcctctctgctgcttgctgattccctttcccccaagctccctgccatggccgccatctcccatggaagctgcgcccagccgagctccctctccgacggtcgtcctcgcctcaagttccctcggcgctgtccctgctcgcctgcgcacctttccccggcgggagctcgcgctctgcggagcccggtccttccctaccacgtgccgagccctttgccgtgccaagctcctaaccatggcgctactgctcccagccgcgagctcgctgagctctgccctcttccatggcgcccaacccgctgcttcgcgaccccagtcctctcccatggcggcgcgcccatcctctgctccctcttcccggatctcgcgcgcccctgattcctacttctgctccagcgcgcgcgttcttccctgtcgcgtctggccgtcgtcaagctccatggtgtctggccccgcttggatctcgtccgtgccgtgcagctccctctgccgatttcgctgtgcgccgaggtcgcgtgcagctcgtccagctcataagggtgaatcacagtttgagattgaaaaaggagcttagaaggtgtagataatgaagccctagattgacgtttgccgttgtcgtttgtgcgaacatcgaatcaaattgtgatgcggtaagctaattcattgtttttgctactgtttcgatgattggattaagtaaattgataggtagcacacagcattcattcagctagcgagcgagagagaggggacaaaaaggaagggcgaggagacagggagccgagcgcaagagctgaggcttcgccgcgaa

SEQ ID NO: 1258 - DNA, 989 bp, Zea mays
  Clone ID: MRT4577_101148C.1
ggccgcgagcgggcggtggaagccgtcggggaaggagaagccggtggtgctgccccgcccgtgtggcggagggagcctcctggtgggcgtgaagagggcgatgacgttcgtgccccgccgccggaagaagacggcggcgttgccgtcgtcggcggccctgaagaccggctgggtcatgcacgagtaccgcctcgccgcgccgctgcacaagaacggctgcagcctggctcaggcgcaaggagagtgggtcgtctgccgcgtcttccagaagggcggcaacaggccgaggaggaggcagcgagaagcgtcgccgccgccgtccgctagcagcagctgcgtcacggatgcgtcgagctcggacctggacgaggtcagcagctagcttagctagctagctagcagaaccgaccgtacgtgccggctggccacaacatgcagtcaagaacgtacgtacgtatatgtataccgccaccagctcgtcgcgcgcgcagctgtgctgtgcatgccgtacgtgtgcggccggcctcgacctcgatctcgaagagaggatgtgatcaagctgagttacggataagggggaacaacccatccacacgcacttctcctccgacccaacattatttgttgttaactagttttttcttttctttatctctttctttcttttgcactctgtacgtgtaatgtaatgcagtgtaatttaattagtgagagaagcatgacgccctactaccggccggattattagttaacagcaaattaattactacgtacctagctactcgcgtcagcagcttctactgtacttgaggtttcagaagcccaatatgtatattgtcaaattagtaacctgcattatatgcagaggtcgtcgtacgtgtccttaattagtgtctttgtaatatctcttcatgaagcgaggaggaaggaaagaacctgaatccatgcgtaacagcgcagtcgttgctgcataaaaccccccaaacacc

SEQ ID NO: 1259 - DNA, 332 bp, Zea mays
  Clone ID: MRT4577_101149C.1
ccaaaccaaacgaaaaacgaaaaaaaggacaacccaaaagggcgtttcggccgagcgagaccaggaaaaacccagtcgaaaaccggggcctgaggggggggaagcaaaatcgggtggcttgaccgggggccagcagacaaaccccccggccccgggggggaccctcccccccccggcgccaacaaggacaaaacaacaaaatccgacgggggacggaaaaggaaaaaaagaaaaagaggggggaagctttatggatctacaccacgaatatacgagcccatcgcgggattgggcaggggccccacggagccaagcccaggggcaagtcggcc

SEQ ID NO: 1260 - DNA, 1446 bp, Zea mays
  unsure (1)..(1446): unsure at all n locations
  Clone ID: MRT4577_10114C.1
acaggctcctcaccttggtggtccnnaaaaaaaaaaaaaaaataaaaaaatccaatcgcctggccggccgggtccggttccggatccgaatctcgccctcccctctctttcttgcctccaggtccggccgtccgggcggcgccgggaggagagaatggcctccacggcgtcgccgccggtgttcgagagggtggccgggatccgagccattgccgagtccggccgcttcaaggcatggttgctggaccagtttggcgttcttcatgacgggaagaagccgtaccccggcgccattctggcattggagaagctagcggagaatggggcaaagatggtgataatcagcaattcctctaggcggtcatctgtgacaatgaagaagctcaagagcctggggttcgacacgtcctgtttcctcgcgaccatcaccagtggggagctcacacatcagcaccttcagaagagagacgacccatggtttgctgctcttggaaggaagtgtatccatatcacttgggacgatcgaggggcaatttctctcgagggccttggtttgcaagttgtgaacaatgttgatgatgcagagttcatattagcccacggtactgaagctcttggctcaccttctggtgttcctcttcccaaaagtcttgaggagcttgagcaggttctaatgcttggcatagaaaagcgacttccaatggtggtagctaatccagattatgtcactgtcgaagctcgagatctccgtgtcatgcctggcactctggcagctaaatatgagagtcttggtggtgaagtgaaatggatggggaagcctgataaggtgatctatacatcagcgatgtccctagcgggcgttgatgcccgtgaatgtatcatggtgggtgattcgctgcaccacgacatcaaaggagccaatgcgtcagggatggcatccgcgttcgtcactggaggggtccatgcggacgaacttggactcggtgaatttggagaaactgctggggaggatgctgtcagttcgctgtgcagcaagcacggatcgtacccttcttatgttctgccttcattcgcgtggtagagatgcggcctagaatttttttttgttttaggtgcacgggaaagtgattttaggcagatattgttgttatggaaataagtgccacgcaatgatcaagccgctggaggtgtcattcttcttaataaataataagtgacacgcaatgctcaagccgctggaggcagatttgtatttgcatttgtagtgtgtgtgtgtctatatatgctgcctgtggtgtatataccgcctgtgctgcaatgttcggttgagactttagacagcgatactgtatgaaggattcacattgttctgctcaattatgtaaacccgctctattacttttcaaaaaaaaaaaaaaaaaagtactctgcgttgttaccactgct

SEQ ID NO: 1261 - DNA, 391 bp, Zea mays
  Clone ID: MRT4577_101150C.1
ttttttttttttttttttttttttttttttttttgtgttggtttttttttttttttttttttttttttttttttttggagaagggaatttcagccgggaaatcacttgaattttgattttttgaagtttgcagcagtaaaattacatttttccatttactaccacgacttggttcatacattttctgttttacgttgggggtgcccagtttaaataaaaacaaattccgggttctttatttgggatgggttatacagcacaattcccacggtttaatcccaggcaggattgaaaaacccagctttttttattttaaaattgtagacgttttttaggagcattttttctttcttgaaaaaattttttaaaaagtcctttttgggggggaggt

SEQ ID NO: 1262 - DNA, 585 bp, Zea mays
  unsure (1)..(585): unsure at all n locations
  Clone ID: MRT4577_101151C.1
ttttattttttttttttttttttttttttttttttttttttttttttttttttttttttttttttttttttttttttttttttttttttttttttttttttttttaaaaaatttcctttnncctaaccccccttaaggcaaattgggggggagggggcgcccttactttgggaccccctcctgggaccaagcttggggccccattgggcagagttttttccctggggaaattgtaacccctaaaaattccccccaaaaaaccgcccggaagcgtaaaagacaaaacccggggggcccaaaaggggggggggcggacaaaaactgagccccgctaaacggcccttttcccgcgggaaaaaccgggatccccctccctttgttgaaatcgccaccacccccaaaaaacccccccccggaaggggccctcttgccatctcgccctttcctccttccttggcttggtccttctggctcggggggggggtttccctcctctggggggggnatcccgctacccgccgaatccgggtttcccccnaataaagcttttccccggagcccaaccctagcccaaaaccccaaaaa

SEQ ID NO: 1263 - DNA, 647 bp, Zea mays
  unsure (1)..(647): unsure at all n locations
  Clone ID: MRT4577_101152C.1
aattcggcatcggcacgaggcagagtcccactccgccacgggaaaaactcgctttcgaaatctctcctctcctgtccaaacccaacgaaatctgcgcgattcataacgaatcgccatagttaatcgaagcattaaactggggaaaaacagagggagaagagaagataggggagagagggagagggagagggaggggaggaggccatcgcatccgccggctggtcctgatcccggtcccgggtcgtatttgggcgccgccgcacgcagcaggaggaagacatcagcgcggggcgaagcgtcgagcccatctccgccgcgggaaccactggcatttaggatggtggacaagaatgatgggtcagagggtattaaattcaacacatcaaacctcattcaaacaaccgaagaggttgcaagagcgtttatcgctgcggcctcggctgccactgcacagtctgcacggacatctgtagtgtattcatccaaagatgagagtggcagcccaatgcanaagcttcagcagcatttttcgaaaatcatgaaagggttttcggccgcaccagacctttcaggaacttacanatccggaagtccttacaacgcaaaagcgggaggggtcgaggtaccanatgaagtcattgggtgat

SEQ ID NO: 1264 - DNA, 896 bp, Zea mays
  unsure (1)..(896): unsure at all n locations
  Clone ID: MRT4577_101153C.1
ctttctttcgccccgcgggcccgatcctactcatcagccgcggcgggaggagaacagcgcctttctccccggnaattccgnngcccaccaccaccaccaccacctcctccctcccctgtgcatttggcagcgcagatcccgccgctcccgtccagccatcctcttctcccttgctctaggccttgactgttctcgactccccagtcaccaactcggtctcctcgtccacgccgcgttccgttcggccgcttgatccaacacgccagcagctgctgccgcgtaaaacaccgggaaatacctgccttcctttctggtgtaagcaagtttcaactcccgaagtttgctgctttgggtaaatcttttctgacctttcaggtctcagcatcaccaggccccttttactaccaatctttctgtccgatcactgcaattttaagcttcagtcccctttttcggaaaatccagtctctgacaaagctgttcggcggctcatgcaccagtagcttcagctaagatctccccatgccacagactcctcctcctccaggaccgtcagccatggtatagagctatagcgctgctccggccggcctgcctgcctaagctgcggaattcgggccccctccccggcttcccgcgccatggacggcctccccgacgccgacacggcgccggttgcggccgcgccggcgcagaagcgcgacgagtggagcgagagcggcatcctgcgcctgctcgatgcctacgaggccaagtggctgctgcggaaccgcgccaagctcaagtggagcgactgggtcgacatcgcccgcgaggtgtccgtgcatttcgccgacgaacgccgcggccgccggggaagcccccggccccggcggcggcagcagcgccaagacccc

SEQ ID NO: 1265 - DNA, 295 bp, Zea mays
  Clone ID: MRT4577_101154C.1
cggtgtgctctccatggccaacgccgggcccaacaaccaacggcttccaattttttcatctgcaccgtcccgacccgtggcttcgacggcaagcacgtctttttcggccaggtcgtcaaggccatggacgtcgtcaaggccatcaaaaaggtggccacccgcaacggttccacctccaaggtggtcaaggtcgctgactgcggacagctctcctagatctctctgatctggtctgttcggccgccctccttccgtatcgtcgactccccctgcgtcccgtcctttggatctgaat

SEQ ID NO: 1266 - DNA, 320 bp, Zea mays
  Clone ID: MRT4577_101155C.1
cgttgcacatagttgttcacgactgtgcctctgtaaatttctggaccagtgggacccaggggttttttttgggtcctgagggaaccaaaaaaaaaatttttggaggcaccacaaaaccagcatatgctccaaaaccacatgatgtggcccggtccacccaacctgaagtaaaatctgggggccaaccataaataacaaaaatggctggtcaagtaaaccctggttggccatgccccggccctacaataactttcaattggaaaaaaagcttaaaggcttttaaactgctgaaaccataatggaacctttgggcctttggg

SEQ ID NO: 1267 - DNA, 402 bp, Zea mays
  Clone ID: MRT4577_101156C.1
ggcaaccacaaacccccaaaacttttcaccccggatactgccttaagggttcaaatgaaaaaaaaaaaggggccccaaaaatggtccccctggatcaaaaaaatttatggaccgacttcaagacggcctttgccaccaattccaaatggggtaaccccggaaccggggacaccgggacccttgccaaaacccgggggggaaccggtatttggcacccccggcctggggcccataaacaaaaacttcaacccccccacctgggttaacaccttgggaaccttggcggggtaatacccttttttccaagggccccactttgggggcgcctcattattggtttccaccatccaacccttcccattcccctccccaaaaaagggattttccttttccaccaaggcc

SEQ ID NO: 1268 - DNA, 290 bp, Zea mays
  Clone ID: MRT4577_101157C.1
gaaccccaaaaaattggacttttgtttaaaagaacaagacgacaaattttttccagtttgttttttaaaccctaaaaggaatacggggggggttttcaccccagaggttttgattcccataggctatgaatttttttactacatgcccagtttttttttcaaaaaactttaaaaatcaaagggtgatcttgaaaccttgatacttcctccttaaagcttttctaaagcacaccctgcacgcaaagatttttttttaaggggaagtcaacaaaactttttttgggggtttc

SEQ ID NO: 1269 - DNA, 767 bp, Zea mays
  Clone ID: MRT4577_101158C.1
ggcgattgggttcctcgaggccggccgggaaggcggccctcacgcacggtgtcgtctattattgcttggacgttgttgcccccgtgtgtacccaaagcctccatggctgtccccttgaagttgaagaagcgcggcatgccggcactggggtggtggctcatggctgtcggcaccttgcgctcggccttcacctggtcgtgcttcttcggctccgcgtcgctctgctcagccacctactccgagatacaggtgaccggcgtgcatgggcgcacggttgcggtgtggacgctgctgtcgtgcacgctctgcttcctgtgcgccttcaacctcagcagcaagccgctgtacgcggccaccttcctgtccatcgtctacgccatcgggcacctgagcgtcgagtgcgtggtttatcacaccatcagtgcagctagtctcgccccattcaccttcatcacagtcacgaccatggtctggatgctgcttcagtggaactcggatggccacaacacccgttccggtcggtctacttccaagcagccatgacctgctagaccggacttcgcaggttgtgtcaccgttggctactttcttgtcaccgttgtgcagtccatatatgcaagcaacatggaaattctgtaatcttttttctcgttatcctcgtctcatttcgatgtcccggaggctactgaatgtaaccagcaagctgtaacacgcttattattttgtcatcagtgatgccatgtgaaggataaacgactacacttctg

SEQ ID NO: 1270 - DNA, 377 bp, Zea mays
  Clone ID: MRT4577_101159C.1
cctctcctcccatggcgtcctccccttctcggcctcggctacagctgctcgacgcccactactccttctccctcacgcagcagcagccggcacccctttttcttcttccctggtctccacggcagcaagctgggagctctctccttctcccatggcgcagcagcaatatcaccatggcacacctcatccccttcctcaagccagcgccttcctccctactccctgctggcgagcagcagctccatggccgcccagcttcttcctccatggcgcccagattttttttcagcagagagcttcttccccatggagcttcttccctgcaggtcgccagcagcctctccatggctagcgctccctgtcctcctctcggcgcg

SEQ ID NO: 1271 - DNA, 356 bp, Zea mays
  Clone ID: MRT4577_10115C.1
ttggcttggaacctttgggctgatttatgtgcttgtttatgtgcttgtggatgtgcggggctgtacctcccttggcccgttggccggggggtaaatcagaatcaggaaagcgccaagctccgtcgaactagcacccatcttcccttagagcctgtggaagttggctagggttcttgatcccaacagtaacaggtgccacagcaggatgtataacgtgccatcccggggacttcccgcgcggtcggcctagcgaccgagacagacccggaaagagcccgccccgtcgaaccgccacctaacatctatcaaggtgcgctttcggccatacgaaaaaaagagaaatcccgataagagta

SEQ ID NO: 1272 - DNA, 1061 bp, Zea mays
  Clone ID: MRT4577_101160C.1
cctcgaggccggccgggccgggcagggtaacctggctcgcaacgttgcgtgaagacctcgcgcgcgctctccctctactgcttggtcgtctcgttgccccggccgaacacctaagcctctccatgtctggcccttcgaagaagcgcggcatgccggcactggggtgctggctcatggctgtcggcaccttccgcttggccttcacctggtcgtgcttcttcggctccgggtcgctctgctcagccaccttctccgagatacaggtgatcggcgtgcatgggcgcacggctgcggtgtggacgctgctgtcgtgcaccctctgcttcctttgcgccttcaacctcaccagcaagccgctgtacgcggccaccttcctgtccttcgtctacgccttcgggtacctgagcaccgagtgcatggtgtaccacaccatgagtgcagctagtctcgtcccgttcaccttcatcgctgtcacatccatggtctggatgctgcttcaatggaactcgaatggtcacggccctcgtcttcttcatgggtctactgcttccaagcagccatgacttcgcaggttctctcacctatggcttccttcaactacatacggttcagtgcatgcaagcaccatggaattatggaatatctgtaatcttttgtaataatcgtttctatgtcccgcaggctagtgaatgaaactagcaagctatcatctgtgataaatttgtaattttaccactctcaatttcggcttactattattatatcaaaaaaaaaaaaccatcagaaaaaaaaagtcctcctcaccgcgaggaggaaggatgcccgctcagtgaagatcaagaggagcaaggatgttgtcaagttcaaggtgcgctgctccaagtacttgtacacgctctgcgtcttcgatgctgagaaggcaaacaagttgaagcaatctcttcccccaggtttgaccgtcgaggaggtctgattggatacatggcaacgccgagttgaactacccaagcttctttataaattgtggggtcaatgacatattagcgaagcccacaatgata

SEQ ID NO: 1273 - DNA, 849 bp, Zea mays
  Clone ID: MRT4577_101161C.1
tttaggacagagagtgtaacaaataactccaaaacacagtggcaataccatccgtataaaaaaactcagacgcccaataaacccaatcgacgcctcgtaacccctccctctcctgcgctccaatgtctgacaagaaggacgtcgaggccggcacctcgccgccggcggcgcccagggttgcggcggcggctccaaagccatccacctacgtgcccatgttcgctctgcgtggcgaggaatgcgctaacctccttgcgctggtctccgccgtctcgcgcccgctcgaggacgccgtcgtggatttcctcgcacgcgtgcccccagagcgccgcttccggtttggctccgccattagcttcgtcctcgaggacaaaatgatgcttcaacctgctgagcgtttagttgcatttgcaattctgcatcaaggttattcctcacagtcggcaaatccatttcttcctctcttaataaatgttgcatgtgatgaaacttctgaggcagcagaccaggcgtttctccaacttctgttaagttcgagtaatggggacaatagtgaggttctgaagcagtctgctgttgattacttgaatggatctgattatgcatctcaggttcttttgccaagagaacatctagagaaacaatgttcttatgatgctgcacgacctctgcccttctctagtaatttcagagatgccactgtcagaagtgttattcctgacccatatgtttttcaaagcttcggtagttcatcgggaggtgtcctcaataataccaaatagagatgacatggttgctactttactttcacaacatcacttggactgcctccctcatggatacgaccgt

SEQ ID NO: 1274 - DNA, 343 bp, Zea mays
  Clone ID: MRT4577_101163C.1
cgcgctttcgcgtccgcggacgcgtggagttggcttgtcctccccctccgagtcgagctcggattcaggaggctctccggagtcacggttccgtggatgagcggatcgagatggccacggcggatgttgagtaccgctgattggtcggggggctagcgtgggccacaaccgaccacttcctcaacaacgcctagaggacctacggcgtgatactcgagtgcatgaccatgctacctcgggagacgcaccggtcccgagggtcttgcttcctcacgttctccacgaaggaggcgatgctgaacgcacatcgatgagcctgaacggcaaggagatggacgggcga

SEQ ID NO: 1275 - DNA, 380 bp, Zea mays
  Clone ID: MRT4577_101164C.1
cttccgccgcacgcctgaattttctctgctcggccttaatccccatcgcgttgtcgacctcgccggttgtcgttcgtcgccgcgtcgtgtgtgcggcaaccccgatcttgttgtcgaccttacttgctactgatgtcgcggcttgtgcatcttgtgtttgacaagagccctgagggatggacctgcttgcgcgatttaagtcgatcctgacgatctatctcccagatgcgcgtcacttgtactaagctccgaagcccccctgtcgtgctcgaccctggagggctccaactcgtcgacatcccttgcgtcggcgaacgatcccccgaattccggttaagcaataaatctcgtgtgggtttttggccggcggctcgggccca

SEQ ID NO: 1276 - DNA, 684 bp, Zea mays
  Clone ID: MRT4577_101165C.1
gaatttagaaacacatcaaaccttccgctctcttcccttcctttgcgggctgctctccagttcaggcgtccagcttcgcccagagtccagacacggccaacagttaaacgcgccaccgccaccacgctcgcacgcacgccccacaggtacagctagctcccacccctcaacagcaacagctaagcttctcctagcagacagcaacatgaccgaggaggaggccaagaaggtggaggtggaagtggaggtcaccaaggcggcgccggcgaaggagaacgccgccgaagagaaggccgtcatccccgcgaccgagccgccggccgcccaggagaagccgccagcgccggccgacgactccaaggccctggccatcgtcgagagtgagtacaacttgctctgcttaattctccctctgtgtagtggaaggcttgcgatggaaaggtggtgttggcgtactggtttctgctctaagaattctgagaagctttcctcctccctactctatgctttggttcgtcgtctctgcacttcctggtagctgtacagtgggagtactaggtaggtactcagcacttgtgatccttgacagttggtttgcctttttcttttcatgggtttctggtttgttgttggccaactcatttggtccgactacttttcgcagaaaacaaaaattttcttctt

SEQ ID NO: 1277 - DNA, 294 bp, Zea mays
  Clone ID: MRT4577_101167C.1
acgccaccgtcgtcgtcaccaaggtcggagtgtggggtggagagggagggtcgacgcacgacatcgcgacgactgagccgtcgaggcgtctgcaaagactgaccgttcgcgccggctttaacgcagactgcatggagtacaactacagtgcctacacatgttgtcaaacccgcaaagatcaacttatcaagcagacttaccggcaacaggctgaagcttcatctaggcaacgctaaatgcatggcggtagttcttggtactgacagctacttatgaggtactgatactcttacc

SEQ ID NO: 1278 - DNA, 443 bp, Zea mays
  Clone ID: MRT4577_101169C.1
tttttatttcaggaacagacataacaagaacaccccgcacttttgtcgcctgatcatggcacatcaacgcacttggacaactaccctgataatatacatgcttctaccggtttaatactgttgaaagtgcacgtacatgagggacgatggcgcacagataaccatctaactgaatggtatctacatggtaaacctccaaaagctgggcctggccaggacttattgctacacaggacttgtgatctggtctcaaggaaatccagccgtaccaattagacatcaagctgtgaaccttgccatgagcaacagcttgattcccatgacgaatgcccacttgacccatctactgcgagcactgactcaaccgttctaaaaccagggacctactctttaacacctttacagagaccgtagatgcctcatagatcactaggacctgactg

SEQ ID NO: 1279 - DNA, 799 bp, Zea mays
  unsure (1)..(799): unsure at all n locations
  Clone ID: MRT4577_10116C.1
cattgggtacctcgaggccggccggatccgaatctcgccctcccctctctttcttgcctccaggtccggccgtccgggcggcgccgggaggagagaatggcctccacggcgtcgccgccggtgttcgagagggtggccgggacccgagccattgccgagtccggccgcttcaaggcatggttgctggaccagtttggcgttcttcatgacgggaagaagccgtaccccggcgccattctggcattggagaagctagcggagaatggggcaaagatggtgataatcagcaattcctctaggcggtcatctgtgacaatgaagaagctcaagagcctggggttcgacacgtcctgtttcctcgcgaccatcaccagtggggagctcacacatcagcaccttcagaagagagacgacccatggtttgctgctcttggaaggaagtgtatccatatcacttgggacgatcgaggggcaatttctctcgaggtttatttcctgctatttctgcttagcatcagaatggatttttttcttatcagtttttcattttctcatactatagggccttggtttgcaagttgtgaacaatgttgatgatgcagagttcatattagcccacggtactgaagctcttggctcaccttctggtgttcctcttcccaaaagtcttgaggagcttgagcaggttctaatgcttggcagagaaaagcgacttccnatggtggtagctaatccagattatgtcactgtcgaagctcgagatctccgtgtcatgcctggcactctggcggctaatatg

SEQ ID NO: 1280 - DNA, 359 bp, Zea mays
  Clone ID: MRT4577_101171C.1
tttttttttttttttttttttttttttttttttgggttttttttttttttttttttttttttatttttttttttttttttttttttttttatttttttttttttggggaaaaaaagcttaaaaaaaaaaaaaaatttttaaaaaaatttggctttaaacgggaagaaaaaaaaatgatttcccaaactttttactggaactttaaagcaaattggaaaggtgggccccccattaaattaaatcccctgggggaaaaaaggggcggctttttcaacccaaaatttttttcaacccctgggaaatccgctcccaatttcgggattccccaacccccaaattaaattttgggggggaaccct

SEQ ID NO: 1281 - DNA, 453 bp, Zea mays
  Clone ID: MRT4577_101172C.1
aaaacaaaaaaggcctttcttatttggggggaagccacaaacatcatccaaaaaacttcattttggaaggaaaacccaaaagcaatcaaaaagagagggcccccccaagggggggttgggggaaaaaccctggggggtttgaaaaaaaaagggggttgaagggcaaaaattgttgcagttgaaaaagggggccagcgttaggcccagcgggcaggtaaaacggaaacaactggtgttgggtaaaaaagggaacagggctcaaaaaaactaactggctaaaagggggaagctgttgctgttgaaaaaaaacagcaaagttcaatgctcccagttggttaaaaggaaaaaattgcgggggggaggcaacaactacctgactgaaggggagttggtggggcaaataagcagcaaagttcaatgcacccagttggttaaatggaaaaaactgctgtt

SEQ ID NO: 1282 - DNA, 379 bp, Zea mays
  Clone ID: MRT4577_101173C.1
tgggtatttacaacaacaacaactactatcattcatccagctagctactgcctactctgagcggcaacaatctcttccatttaaccaattggccgcactgaacccctctgcttatttccagcaacacatactactaccatttggccagctagctacaacaagccccacttcctttttgaaacaacaacaattgcttccgttctaccagcagttagcggctaaccccgcatccctcttacaacttctacaccttctgccctttgtccaactcgctcttacaaacccattaaccttctaccaacaacacatcattggccatgccatctcttagaatgcctattacttgtaattcaattatgaaaccctactgcttacgtat

SEQ ID NO: 1283 - DNA, 638 bp, Zea mays
  Clone ID: MRT4577_101174C.1
gggtaccctcgggccggccggaaagcacggcgccgcgggttcggacagggctctcgcgacgcgatcggccatggcggagcttctgcgggcctcgtcctccctccgctcgcgcctgctctcgttctcctaggggggctctctgtgtacgcggcgtctcctcctctgctgaccatggccagctccgacgccccccaccagaccgaaaccctagctgtcgacaagacccagctgaacgcggacaggccagctaccgccactgcgcttctctactgcacgggtctacttggttccggtcgcaactggcgctccttgtctgacgccctcgtttacgaactccagagactgatggctctcgtgcactagatgaaccatgcaaaaccgggtgagaccaacgtgctaggcccaccccacaacatagctactgtccacaaggacatccatgatttagtgcaggcccgtggctgcccatgaccgcatgatggtgggcgacaatccatgggacaacaagctgctctagattgcgtggagagctgctctcgcggcgtgcatggagatactgctaatcttcccaaacagataacggccacttgattgctgtacgtggacactgacgaacacactccagggcagggggaagc

SEQ ID NO: 1284 - DNA, 299 bp, Zea mays
  Clone ID: MRT4577_101175C.1
aaaacaaaaaactttttttcagggcacgagcttattggcgtaattcccacaggaactgagggcgtgcccctaccaaagccaagaaccaagaccctgcccaacccgtcaaccccaaacatacataaggccccccggcaggccccaacgggcgtggattcccgcccccgggcggttcaattagccctggggaggaagctttccctgccctcggggaccttccccgggcagggggtgatgtcctccttgaccctgggttcccgccccacaaaaccctggccccccgggtgaccatggggggg

SEQ ID NO: 1285 - DNA, 597 bp, Zea mays
  Clone ID: MRT4577_101176C.1
cggccgagatcaggttcacaccatgcagccgacctgggcaccgtcgccggcgcaggtgcgcccggcatcagctccgaatggcacagctttctagcggagtctgaccacggaagacctgcacttacgaagggggagtcgcatcaaactctatctactctgcgaaggggaaaatccgggacgacgagggcatctccccggagcctgagcgggtcatctgcgcctggaaaccgctcgaagaggaaagcaccgatctccgaatacaaagatgcaaggagtccaccctccacctggcgatccgcgtccgcggagggaccgagaatacatgtactaagacgtacaccgcggcactgatggtgattcccaaccaccacaaggagaggttcgccgtgctggaacccaataaggaggactgcgctgatattaaggcgaccctccttcgcgaggagagtgccatctcatagagagttgcgggaatgtgcatggacaaccacatgaaccgccactactggggtaagagctgcctcaccgatgtcaacgaacatagatggtactgtttgccccgattcgctatatccgactaccctatcgagcatccag

SEQ ID NO: 1286 - DNA, 297 bp, Zea mays
  Clone ID: MRT4577_101177C.1
gggggcccgcccttttttttttttttttttaggaacaaagacagatcccatattcattatggtagcggatgaacaatcagagtagagcatacatatggcgaggggagctatattagtcaagacataagggctagacggcaagctgatcaccgcatgcagtaacatcaagggagagctacgaagggcatcggtcctccacagagagcacagcaaggagcggaggagcaggaacatgaagcctcaggagggagacaggcctacacaaccagggtggcggagactgccgtcagtacggac

SEQ ID NO: 1287 - DNA, 552 bp, Zea mays
  Clone ID: MRT4577_101178C.1
accaaaaaaaaaaaaaaaaaaaaaaaaaaaaaaaaaaaaaaaaaaaaaaaaaaaaaaaaaaaaaaaaaaaaaaaaattcaaaaaaaaaaaaaaaaaaaaaaaaaaaaaggtttttcccttgggccgcgccccccctaggggcgatttttggggttttccttccccctgggggccgttcggccttgcttttggggggcccatttcgccctttgggggggggttttacatttccctggccgtggttttacaccgtcgtgcctgggaaacccctggggttccccactttattccctttggggcacatcccctttttcccagttggggtattaccaaaggggcccgccccgttcgcctttcccaacatttgccccccctgattggcaattggcccccccctttgggggccctttaagcccggggggtgtgggggttccccccagggggcccgtttcatttgccggcgccttagggcccgctcttttggtttttttcccttcttttttcgccacgttggccggttttccccgccaagctttaaatggggggctcctt

SEQ ID NO: 1288 - DNA, 1093 bp, Zea mays
  unsure (1)..(1093): unsure at all n locations
  Clone ID: MRT4577_101179C.1
acatactcccacagcccagccgcagctcctccgcctcctcctgctcctcggcccccttccgtccatccctcctggtcacctgtgaaagctactgtcttctgtattatcgaattgacacaggggagattaccacgaagcaagctggtctggtgacaagatgaaaatggctggctctgttgtgctgctcatttcactcctatcggctattgctcccctaccctctgaagccctcaacgtgagaggccatcttcttaaatcaaagacgttccgttctccgcccatcttactgggccctggatcagtctcaaacaagtaccaccatgatgtcgacttcccccgaggccaccttgcagtcaagagctttgatgcagaggtcgtcgatgagaatggcgtccctgtcccgctccatgagacttacctgcatcactgggttgcagaaccatactatgctctgaagaacagtcagagccccgatacgcagaatcttccaaaaggaatgcttaaaaggaatgatggagtgtgcaagaccacactaggccagtacttcgggctcggttccgagactcgccacactgccacatgggttcctgatccttatggaattgagattggcaatgaagacaaggcccctgaaggctatgaggagaaatggttgctcaatattcatgccatcgacacaaggggcgtggtcgacaagcctagctgcaccgagtgcaagtgcgacttttacaatgtcacaattgatgagtatgggcgcacaatctcaaagaactacactggtgggctattttgctgctatgatcagacccagtgtcgggtcaaagcagggttcaatggcgaggtgcggaagttgttcttgcagtacaccgtgacgtggctcgactggactgatgcggtggtgcctgtcaagatttacatatttgacgttacggataccgctatgctcgatggtactcctgaacattcttgcaaggttgagtatcaagtcgaggaacgcagcgcagaaaaccgagccaacaatgagtgcatccatactaagactgctagagcggncttgccgcgtggaggagatatcgtggtcagtgttgcgcac

SEQ ID NO: 1289 - DNA, 431 bp, Zea mays
  Clone ID: MRT4577_10117C.1
ttcttacaaaccgcacaaacacaccctccagagggggggccttataaggggaagagccccagttgccccaccggcaggccggagagaaacacacacctaaactgacgcggggtacgccccggaaagaaaggagtaccagcaagcggcaattcacgaaaggagaacaccccgatactgctccatgaccataagcagctggagagcaaagacgaggaccccaagggaatcgggaagaaccaggacaccagcaggggactggccacccatgaagatggccatacacaagaggaaaccaggggagagccgtgagcctgtgactgaggagaacccggaccgaaaccagcaaagccgcagaccaaatggagcactggaagacatgcagaagcaggaagcaaccgctggcgccacagcagcggagacggagcgacaga

SEQ ID NO: 1290 - DNA, 295 bp, Zea mays
  Clone ID: MRT4577_101180C.1
tcgtgcactatcgggctatgcggtggattctgctctgaacaggaatgaccgtcacagtattggagctcgtgtccttaacgatcctattcagatgacgggcctaatcgggcacgggacttgttaatgaggaagacgagattctcaccgatctacggggccaacccatgagccttgatgttgcgtacgatcttgctaccacccatcctcttgacaaaaggggcggcgtgctcggcacctagcagagcaccaatcttataacggggctggcccttctatagagccttgctagtcattt

SEQ ID NO: 1291 - DNA, 135 bp, Zea mays
  Clone ID: MRT4577_101181C.1
aaagcgtcgaacagtgtgccgatgataatcagagacataaggacagcacatgattagctcttaacatgtttggcttccgaactggcttttctcgagatccccaaggaagaagaagatccggtcagatatgtgtcg

SEQ ID NO: 1292 - DNA, 292 bp, Zea mays
  Clone ID: MRT4577_101182C.1
cggacgcgtggcgcgacttcgaccgcctcaaggcctccttcgacgctctccgagcggaccacgacgccctcctccaggacaacaaccgcccccgctcacaggctgtgtcgtcgaccgagaagctgcaagagaaggaggatgcgacggacggcggcgccaccgctgacaccgccgcgccggccgtcgacgtcgaggcctcctctggcgaccacgccgaggagccagcagagcatgccgcgacgcctcacgcgctgcaggaggcgaagctcgacgacaggcctgagcacggcag

SEQ ID NO: 1293 - DNA, 330 bp, Zea mays
  Clone ID: MRT4577_101183C.1
aaaaaaaaaaaaaaaaaaaaaaaaaaaaaaaaaaaatatattacataaaaaaaactgacaggcaggtgtatactgattggatgaaaaaggtcgaccgatatcgaggacccacttttacgatccacgtgttgctacgcacaaattcgatgtataaaggcccctatattgaaaccaagttccaatgttttacacgtagttaaacatgaaaaccctggggaaacccaccttatttcccttgtaataaataccctttaaaacacttgttttaaaaactaaaagaccctcaacaatctcctttccaaacagtcttttcaacctgtttcgcaaatg

SEQ ID NO: 1294 - DNA, 368 bp, Zea mays
  unsure (1)..(368): unsure at all n locations
  Clone ID: MRT4577_101184C.1
gggccgtggcaatactacgcgcaccacaccaaacacggaaagaattttactctctttactcttcatatgcggtagcggggggaatcatattatatatactatcttgttcacatattcttgtgtggggtggtttccctgactaccttgttttanagaattataataatctcagaattttacttcacagcatgccattgtgtcaaaatcaaaacannatatatcttaggtagcctatctggatgattataccatatcttgccatgtaaagttgatcgaagagggctaagatcacgcatggccagcatttcttatataagaagcgaaactatctaatgttccagttaatcggcctccaaactggagttttt

SEQ ID NO: 1295 - DNA, 276 bp, Zea mays
  Clone ID: MRT4577_101185C.1
gtgtgggctagtagtaggtagctgtattagaagtttagaaccagtgacccaccgtggtggtggtggtgggctacagccactcagccatgttgttgctgccgtgcctgctcgtgctatcgtccctgcaagcgccggccatcgtcgctgcttctgcagctgcaggtggccgaccgccggcgatgtttgtgttcggggactccacgctggatgtgggcaacaacaactacttggcggggccgggcgtgccccaggccaacaagccctactacggtatcg

SEQ ID NO: 1296 - DNA, 393 bp, Zea mays
  Clone ID: MRT4577_101186C.1
cagacgtaggcccgatctagcgccggcgagttgtgtccgacagagaccggacatgccattctttaccgtgttgtggaaactctactgtgcattccatatcttgcggtcttcgacggcgacgacaactcaattgatgctgaaagacgacttaaggttcagacaggggttgaagttgttgtgggtatagaattcggcgaaatgatgtggttgcacaaatgggatgcccagcgattgaagttgttgaaaaggactcgaagcagggtgctggggctttaacaactcctgttaatacatacaacttatcagattatctgttacttacttgagatacacctataaagttataattggtttcaaagaataagaaacatcatgaggtttaaactgaactat

SEQ ID NO: 1297 - DNA, 662 bp, Zea mays
  Clone ID: MRT4577_101187C.1
cttcttcttgctaaaaagccccctttctgaacagtcaagggacatctgctgtatcttctctagtgtaacaatggcagacgttgtcccctggttgctcaaagcttttgttctatccagagagagcccctcacttgttcaggaggtttgcaagttacttgcatgcatattcttgctatcaactacagattcctcaattcaactgcctttgggttctcataaagaatctctttctttgaatcactgggccacatacttccatcaagtttctgtgggaactaatctcaattgtcattactttgctagcttacaagcatcgtccgaggaaaaggttccaaaggacacctataaagatttcagaaatgagacagatgacaatgtctcgaaatttctcaggttgtcatcaagggacatcaaatatattgagaaacatatgacagaattcttccaaaaacttcctgatgtaccagttctgtgcattagtatgcttggaggtgattatgttaatgcccttctgaaattccattgccatcctccgttttttcctgcttggatgttgctttcaagggtttgattcaacaaatgaacccacaacattgcttcttccagtggattctatttcagcagaaatgcaatttgaagattcctgcaccaaagatttgggc

SEQ ID NO: 1298 - DNA, 293 bp, Zea mays
  Clone ID: MRT4577_101188C.1
gcgagaggaggatggcagccgaacaggatcatggtagtggtggttaagcatcagcatcggcgacgaggacgacgctgagaggcttctccgttcttgacggtactgtcaccgatgcggagccatcacaatgggacctctgtctccgctcaggggtatcccttcgccagcattctacaattctgctgcgtcactgctgatgctgtccaagtcgctcttcctgtactgctgaacacagacctatacttgatcggatacatgctctctgagggatttttcattagacaggccctgtg

SEQ ID NO: 1299 - DNA, 282 bp, Zea mays
  Clone ID: MRT4577_101189C.1
gggaatgaccagagactcgcgccacaagcgctccgcttctggagccaagcgcgcccaatagcgcacgaagacaaagttcgacttgggccgtcatgctgccaacaccaagctcggtgctcaccgcatccatgacgtccgcaccagtggcggtacccgcaagttcggtaccgtgcgtttggatgccgaaaacttctccagcggttccgatgccatctcccgcgagacccgtaacattgctgttgtctacgacgccgccaacatccacttcgtccttaccggtac

SEQ ID NO: 1300 - DNA, 307 bp, Zea mays
  Clone ID: MRT4577_10118C.1
attaaaagggaaagttccctgggaggaacagaaaacaccttttggggggttggacaaaacccaattacccccccccgggggaaaaaagagagtttaggcccccgcccgagggggtttttctttgggatcaggcgcccccccggggtttctttaaaaaagccccccggggcgggggggggttttaaaaaaaaacggagatggggggccactaacacccaagctttgggtattacccccccgggcccgggggaacaccccggaatttaagaccggtacctggggggggggcccccccccctaaagtggg

SEQ ID NO: 1301 - DNA, 355 bp, Zea mays
  unsure (1)..(355): unsure at all n locations
  Clone ID: MRT4577_101190C.1
cgatgatcctggtgcggggggaggggaggcctttgctcaangtaaaggatgccagtggntgccggaacaacctaactggnagcttgngggcagnatagagtaagggatacacatagtgctcgggggttacatctaaaatgggtgcgtgtttattgtgttgtttaacatttgtcaaagatctattggggggagagggnatgcttnnnncaaaacaaggttcttttgtccccttgntnntngctnattttcgacccgcattactcctgntcttannacctattgtcgnngctattgnntgactgacgacnnannattcattgnnttttggcattgtttgatggcatttttgggactg

SEQ ID NO: 1302 - DNA, 109 bp, Zea mays
  Clone ID: MRT4577_101191C.1
ggcttaattttattagaagtagccagttatttattaaagcatgatgttaataaaataggcatattctggctggtgtgtataagtggttttctttttaaaacaaatcaga

SEQ ID NO: 1303 - DNA, 439 bp, Zea mays
  Clone ID: MRT4577_101192C.1
cagaacagctgggtaactgattgagccttggattgaataggaagaccacacacatctcataataaaataaggtcacttaggtacatgttaccattcagaagctcaggaagaaaaaaaaaaaggatagggatcatcagcattcgtcagagcaaatgccaagcagtgggtgtttctgaggttactgtagcacttctgcaaataccaagatgttcatcagcagctactaacggcaatatgtacaaggacagagatatgcctagtactgcaaagtgcactggagctccgataacacaattcagcaagagtggaagcgctccgtggtccaagttgatgctcaatgtaacaatcgtgattcttgtctcttcaggtcattgttcccaactacagtttatatagaaccaaagcatacaggaagtctatgcaggaagcaagaattact

SEQ ID NO: 1304 - DNA, 793 bp, Zea mays
  unsure (1)..(793): unsure at all n locations
  Clone ID: MRT4577_101193C.1
ccggccgggaccgtacctccggcgcctccgactccggtcctccggcctgcgcaggctagctagctctatttaggtccaccgtgcccccgccgcgcaggcaggggagatccaagggtccgagcaaaaggccgccggcggcgaggcagccagccagctaaagcgatccatatatacatatatactatcgagcaacaagaaagaaaggaagaaagaagccaagcccaccagggctggggaagagaggagctaaggaaggaaggaaggaagatgatgagcaaggaggcagtggtgaacgcgttcctgggctgcttcatgcacgtggggctggcgctggtgctcgccgtctacctccccgtggcctttgtgtgccgcctcctccaccgcctcctcgtccgccccttcgccaggggcgaggacctccgcggcaaggtcatcctcgtcaccggcgcgtcctccggcatcggcgagtgaatcacttggtggccaacgccgggatctggtccagctgcttctttgaagagatcaccaacataaccgccttccataatgttattgatctcaacttctggnggtgccgtgtacccgacctacttcgcgctgccgtacctcaaggccagccggncaaacatcgtggtgaccgcctccgtcggccggcagggtgcgaccagccaggatgagcttctacacgcaggcaatggcgcccgtgatacgtttctacgagacgctgaagggctttgaacttggggtcccacgtgcacgtcaccatctcacgccccggctacgtcgtctcaac

SEQ ID NO: 1305 - DNA, 403 bp, Zea mays
  Clone ID: MRT4577_101194C.1
aaggacaaaagcccggcgaccctttaaaaaaaggggaaacaggggttctgattctttggtcaggggaatccaacaagggggggggtttgcaaatttagcccacaaccaatgggagcttcgctggggaaattttggggccctaaaaatatacccaaatgggaaatcctcaggccggaccgggggggcaaaaacaacattgggaaaatccccaggggcgggaaaaaaaagcggaccttgaagggaaaggagccccgttttaaagggagggggggggcttcacggatcttttgaacggaaacttaataattacccccttaagggtcgggggcgggggggaaagggcctacaactccaccctttccattcccggtggccacgtccatttgagcctgggggggtcctt

SEQ ID NO: 1306 - DNA, 548 bp, Zea mays
  Clone ID: MRT4577_101195C.1
tggactccgtacctccggcgccccctccgacaccggtcctccggcctgcgcaggctagctagctctatataccaccgtgcctccgccgcgcaggcaggggagatccaagggtccgagcaaaaggccggcggcggcgagccagccagccagctaaagcgatcaatatatacatatatactatcgagcaacaagaaagaaaggaaaaaagaaggcaagcccaccagggccggcgaagagaggagctaataaggaaggaaggaaggaaggaaggaagatgatgagcaaggaggcagtggtgaacgcgttcctgggctgcttcatgcacgtggggctggcgctggtgctcgccgtctacctccccgtggcctttgtgtgccgcctcctccaccgcctcctcgtccgccccttcgccaggggcgaggacctccgcggcaaggtcatcctcgtcaccggcgcgtcctccggcatcggcgagcacctggtgtacgagtacgcgaggcacggcgcgtgcgtggcgctggtgccgcgcacggaggcggcgctgaccg

SEQ ID NO: 1307 - DNA, 589 bp, Zea mays
  Clone ID: MRT4577_101196C.1
ggacgcctgcggtaccggtccggaattcccgggtcgacccacgcgtccgggacgccttgggtgtaaggatgatcggagacatactgctgttcgggacgctactgatgaacgccggggctgtactcaactttaaactgaaaaagaaggacacacaaggctttggggaagaatcgaaggaacccagcacaggagacaacatccgagagtttttactaagcctgaggtatttccggatcttcatcgcactgtggaatgtgttcatgatgctctgcatgatcgtactgttcggctcttgagtcctgcgtggaacccagagctcacctgctggacatcaaggctctatttctgtttctgatgacttcaagaatcttctcaatggaaaaccagggaccttcccagaaggcccaagctcatttgggtggagaatgtccatttcccagctccctgaccctcgtcagccacagtgacaaagtcagactttattaggagaaagacctaggtctttaccttgtgctggcattctatcttctcctggcccagcttctccagaaacctgacctgggctatttcttggttgaattgatggtga

SEQ ID NO: 1308 - DNA, 1019 bp, Zea mays
  Clone ID: MRT4577_101197C.1
cattgggtacctcgaggccggccgggaccgtacctccggcgcctccgactccggtcctccggcctgcgcaggctagctagctctatataccaccgtgcccccgccgcgcaggcaggggagatccaagggtccgaacaaaaggccggcggcggcaagccagccagccagctaaagcgatccatatatccatatatactatcgagcaacaagaaagaaaggaagaaagaagcgaagccaagccaccagggctggggaagagaggagagctaaggaaggaaaggaaggaagatgatgagcaaggaggcagtggtgaacgcgttcctggggtgcttcatgcacgtggggctgggcgctggtgctcgccgtctacctccccgtggccttggtgtgccgcctcctccaccgcctcctcgtccgccccttcgccaggggcgaggacctccgcggcaaggtcgtcctcgtcaccggcgcgtcctccggcatcggcgagcacctggtgtacgagtacgcgaggcacggcgcgtgcgtggcgctggtggcgcgcacggagggtggcgctgcgcgccgtggccaaggcggcgcgcgacctgggcgcccccgacgtgctggtcgtgccggccgacgtcaccaaggtcgacgacgccaagcgcgccgtcgaggagaccgtcgcgcacttcggcaaactgaatcacttggtggccaacgccgggatctggtccagctgcttctttgaagagatcaccaacataaccgccttccataatgtgattgtaaggcatcatatcaaaccctgttatatatattatgtgcttttttttccaagccaatgatttgttgcacttatattaattaatttctctgttccaaattataatttgtttgatttctcgtgccaagtttgactggcctgccttattcaaaattttttgacagaaaaatatggaaaattcggagccatacttaagtggagtagtatattgttacaacatcacaataaaaagtaacgatggttataaatt

SEQ ID NO: 1309 - DNA, 1030 bp, Zea mays
  unsure (1)..(1030): unsure at all n locations
  Clone ID: MRT4577_101198C.1
gnccgctcctcctgagcagcggggcggatgatcttctcgctggtcgggctcgccgccgggctcaccgtcatcgggcactaccaggacgaaaagatcccatgggccatcggcgtggccatcgcgtctaccatggcctacgtggccttcttctccatcggcctcggccccatcacgtgggtgtacagctcggaggtattcccgctgcatgtgcgcgcgatgggctgcgcgctgggcgtggcctccaaccgcctgaccagcggcgtgatctccatgaccttcatctcgctgtccaaggccatcaccatcggcggcgccttcttcctctacgccggcgtcgcggtgctcgcgtgggtgttcttcttcaccttcctcccggagacccgcggccggacgctggaggcgatgagcaagctgttcggcgccaccgacgacgagctgaaaccccaggacggggccacgaaagacaagcagaagctcgaactggccgccaccggcaccaactaacttcacattattagagggtcttgttgagggtggtcgtgcgaagaacttgtgcagtaggcagctagctagctagctgccattgttgccatatgagctaagctaggctgaagcaacgtgggaagattcgctcgctggtccggcgcagctggagagcgacggccagcaagctcaggccggccagctcgtggctcttaaagttttttaaatcatgtctctaagttcgtggactgtatttcacactttgttttgcccgcaagttgttgatgaagtcgccgaggccgccaatggcaggtgcccaggttgctagtaacgacacgtcgtcctctaatgactatgtaatctgtgtagcagctggtgctgctgctgctgcctcgctgcacgagtcacggagagcgaggctggaagaaaactggtagtggttcgaggattctactgagggagtcaagcaagcaagccgtgaagagtgtgtaataaggaaacgttatctatcatccatatctatctaaggattgcgcggagattattt

SEQ ID NO: 1310 - DNA, 1201 bp, Zea mays
  unsure (1)..(1201): unsure at all n locations
  Clone ID: MRT4577_101199C.1
gacgtccccatttccaagctcctcctcgcgattccaatccacgcacgcctcctccgcttccgcctcgctcaggcttatagtcagtgatggaacacaaggaggcgggctgccagcagccggagggcccaatcctatgcatcaataactgcggctgcctcctccatcgatagcattgtcaatggcggtgacggcgggaaaggacctgtaattgctgcatctgtaaatgcggcagttcctcaagttgagcagaagactattgttgtgcagcccatgcttgtagctgaaaccagcgaggctgctgctgtaatccccaaggccaaggaaggcccagaccggtgcgcggcctgcaggaagcgtgttgggctgacgggatttagctgccgatgcgggaacatgtactgttcggtgcaccgctactccgacaaacatgactgtcagttcgactatcggactgcagcaagggacgcgattgccaaggccaatcctgtggtgagggcggagaagctcgacaagatctgaggcgggcattgggggagcgaaatggttgcaatctgcaagaattcaacatgctgtctttgctgcgttatcattgaaacttgccattcttgtctgctgctgcgtcccgtgaggttcaatactgtgatgcacacagcatccaggcagccgcaagaatttcatcaaaatggtttcccgtgttggctatgtcgtgacacagcttggtgtttgagtatgctgaatctggattagctacaacctacacaagcacaatttcctggtgaatgttgacactaggtgacctgaattctcaagcaaggcgtttcatattctgcaatctctttccagcgtgcgtacaacgggaacatgcagctcgcctttccgcatgtgattgcaacacgcctaacttgtttttgtatgattgtcacctgcaaagaattggaacaagtctaagcaacttgttttttgtatgatcgccacttgcaaagaagaaatgatttgtacgaaatagtattcttctgctgggcatgnaaaaaaaaaaaaaaaaaaaaaaaaaaaaaaaaaaaaaaaaaaaaaaaaaaaaaaaaaaaaaaaaaaaaaaaaaaaaaaaaaaaaaaaaaaaaaaaaaaaaaaaaaggggggcccgttttaagggtccaaggtttccttcccgttgattgcaaggtaaaactttttttttggggcc

SEQ ID NO: 1311 - DNA, 390 bp, Zea mays
  Clone ID: MRT4577_10119C.1
tctgactttacaatcacactttgcttctctgaattggcacaagctaactacaggggctacctaagatattcatcggtccttaaaactcctaagaccttgtaccctagcgcagccacaggccgtcatctacgtctacttcctcaccaggcagtattcatgccttgtcaccgtctccgcggaccgtcgccgcgccggggttgcgaaagtctcgtcggcgtgggtcatcggtaccgccatgccgtggctcgactttgagacctccgtcttcaagaaggaaaaggcgtccctggccggccatgatgagtatattgagaggggtgggagggatctgacaacagtgtttgccgtcgccttgccaggtatccaacaggaacgctgtatcctacttgg

SEQ ID NO: 1312 - DNA, 1193 bp, Zea mays
  Clone ID: MRT4577_1011C.1
atttgtcaaccccttcacgccctattgaggaaaggtgcactgtttttgtgggcggaggaccattctacagcctttcagacactaaaacaggccctaatgttagccccggttcttgcccttccagatttctccactcagtttactattgagactgatgccagctctattggtgtgggtgttgtccttatgcagaaaggtcaccctttggcctttttaagcaaagcattaggccctaaatcctgtggcttgtcagcttatgagaaggagtttatggctattctggtggctgtgcaacagtggtgtaaatacttgcagaatggggagttcatgatccttactgatcatcaaagcctttctcagttaaatgaacagaggctgcatactccctggcaacacaaggttttcaccaagcttttagggctccagtataaaattgtctatcagcaaggtcataccaaccgggtagcagctgccctatctcgtcgccttgaacctaaattcaacgttgtttctgaagtgatccctcatggttaattgatgtacataacaactacctacatgacccagatgctcagtccttgctgactaaactcgctatagatccttcagctgttgtacaagagttcgtgcacaattgccagacatgtttgcaagctaaaccagaccggtctgcctaccctgggaaacttgaaccattgtcggttccgtccatggcctgggaaataatcattatggattttgttgaaggcttgccagtttctggtcctgctaattgcattctcgttgtggtggataagtttaccaaatatgctcacttcattcccctataccatccttacacgcctagctcagttgctcagacgttcatgactcatgtgtataggttgcatggtcttccagcttccattgtttcagatagggatccagtcttcaccagcacattttggcaacaactcttcaagctgattggaaccgaattaaaactcagttcctcttacctctcccaaactgatggccaaacggaacgtcaaccaatgcttggaaacctttctctgatgtttcgtcagtgcatgtcccaagaagcggaaagactggctaccagcagctgagttttggtataatactagtatgcactccgctttgggttgttcgacatttgaggctctacatggcagaaagcctcgaactctcgg

SEQ ID NO: 1313 - DNA, 674 bp, Zea mays
  unsure (1)..(674): unsure at all n locations
  Clone ID: MRT4577_101200C.1
aaaaaaaaaaaccgtacctccggcgcctccgactccggtcctccggcctgcgcaggctagctagctctatttaggtccaccgtgcccccgccgcgcaggcaggggagatccaagggtccgagcaaaaggccgccggcggcgaggcagccagccagctaaagcgatccatatatacatatatactatcgagcaacaagaaagaaaggaagaaagaagccaagcccaccagggctggggaagagaggagctaaggaaggaaggaaggaagatgatgagcaaggaggcagtggtgaacgcgttcctgggctgcttcatgcacgtggggctggcgctggtgctcgccgtctacctccccgtggcctttgtgtgccgcctcctccaccgcctcctcgtccgccccttcgccaggggcgaggacctccgcggcaaggtcatcctcgtcaccggcgcgtcctccggcatcggcgaggtcagccagccagccactctcttcttcttgcttgcttcgttatcccccgcgccctctctctgccgctgctggccttatcccccgcgtcgatcggccactacgtaactgaggaaatgcatgcttcgtatagtactctctttgcagagtgcagagacacatatacctagcagtgtaatacacacnaataagtaaataaataaataaa

SEQ ID NO: 1314 - DNA, 356 bp, Zea mays
  Clone ID: MRT4577_101201C.1
gccacgcgtgcgaccacgcgtccgcccacgcgtacggccacgcgtccgaccacgcgttcgccgacgcgtacgtccacgcgttcggacccacacgttcggccacgcgtacgcccacgcgtgcgaccacgcgtgcgaaaaaaaagcacaccggacaccgaacgatgatgcagtgctcttacgggcgatgggaccctacctatagctgaaccgatataaaagggcggccggtttataggccccaaagataagtcttcgcgatgccaccgcatacgttttctgacgtgctacccaaatgcaaatgacgggacgtccggtctcaacaaatttaatggcgaaaccctgtcgggtcacaaccg

SEQ ID NO: 1315 - DNA, 354 bp, Zea mays
  Clone ID: MRT4577_101202C.1
tttccaagctcctcctcgcgattccaatccacgcacgcctcctccgcttccgcctcgctcaggagattcggatttgattatattaccctgattcgtttaaaaggatgggttgagctcttatagtcagtgatggaacacaaggaggcgggctgccagcagccggagggcccaatcctatgcatcaataactgcggcttcttcggcagtgctgcgacgatgaacatgtgctccaagtgccacaaggagatgataacgaagcatgagcaggcccagctggctgcctcctccatcgatagcattggcaatggcggtgacggcgggaaaggaccttgaattgctgcatctgtaaatgtg

SEQ ID NO: 1316 - DNA, 925 bp, Zea mays
  Clone ID: MRT4577_101203C.1
gcgccccctccgacaccggtcctccggcctgcgcaggctacctatagctctatataccaccgtgcccccggccgccgcgcaggtaggagatccaagggtccgaacaaaaggccggcggcggcgagccaggcagccagctaaagcgatccatatatacatatatactatcgagcaacaagaaagaaaggaagaaagaaagaaagaagccaagcccaccagggccggggaagctaagagaggagagctaaggaaggaaaggaaggaagatgatgagcaaggaggcagtggtgaacgcgttcctggggtgcttcatgcacgtggggctggcgctggtgctcgccgtctacctccccgtggcctttgtgtgccgcctcctccaccgcctcctcgtccgccccttcgccaggggcgaggacctccgcggcaaggtcgtcctcgtcaccggcgcgtcctccggcatcggcgagcacctggtgtacgagtacgcgaggcacggcgcgtgcgtggcgctggtggcgcgcacggaggtggcgctgcgcgccgtggccaaggcggcgcgcgacctgggcgcccccgacgtgctggtcgtgccggccgacgtcaccaaggtcgacgacgccaagcgcgccgtcgaggagaccgtcgcgcacttcggcaaactgaatcacttggtggccaacgccgggatctggtccagctgcttctttgaagagatcaccaacataaccgtcttccataatgttattgacctcaacttctggggtgccgtgtacccgacctacttcgcgctgccgtacctcaaggccagccggggcaacatcgtggtgaccgcctccgtcgccggcagggtgccgacagccaggatgagcttctacaacgcaagcaaaagcgccgtgatacgtttctacgagacgctaagggccga

SEQ ID NO: 1317 - DNA, 457 bp, Zea mays
  Clone ID: MRT4577_101204C.1
accagacgcagtcggctgccgcagcactggttgtagccggagcgccgtcaccgcatcctcagatgagcggacagcagaaacccaccactctactgacgcccgacgagccatgggtcaggagaagactcacaccaacattgtggtcattggccatgtcgactctgactagtcgaccactattgtccacctgatctacaagcttggaggtgttgacaagcgagtgatcgacaggctcgatacagatgctgccgagatgaacaagcggccattcaagtatgcgtgggtgcttgacaagctcaaggctgagcgtgagagaggtattacaatcgatattgccctgtgcaagctcaagaccaccaagtactactagactggcattgatgccccggtacaccgtgacttcatcaacaatatgatcactgttactcgctaagctgactgtgctgtctattattat

SEQ ID NO: 1318 - DNA, 1558 bp, Zea mays
  Clone ID: MRT4577_101205C.1
cattgggtacctcgaggccggccgggcgacatgcttcccactccctcctgacggctacgatacgagaaaatccgtcgtccgagttagcatctttgtccagaccaacatcattgcaccagtcgcggatctctgcgggatctctccctcctctttctaatctctctctctctctctctcacacacacatttcccactacctgctcctgcttcttgcctgttcggcgtgcgctgcgcgaggatgaggagcgaagcagggagggaaggggatgaacgagcacattcgaggcgggcccctccccttttttattgggtacctcgaggccggccgggcggggacgacgcccccatttcgaagctcctcctcgcgattccaatccacgcacgcctcctccgcttccgcctcgcgcaggcttatagtcagtgatggaacacaaggaggcgggctgccagcagccggagggcccaatcctatgcatcaataactgcggcttcttcggcagtgctgcgacgatgaacatgtgctccaagtgccacaaggagatgataacgaagcaggagcaggcccagctggctgcctcctccatcgatagcattgtcaatggcggtgacggcgggaaaggacctgtaattgctgcatctgtaaatgtggcagttcctcaagttgagcagaagactattgttgtgcagcccatgcttgtagctgaaaccagcgaggctgctgctgtaatccccaaggccaaggaaggcccagaccggtgcgcggcctgcaggaagcgtgttgggctgacgggatttagctgccgatgcgggaacatgtactgttcggtgcaccgctactccgacaaacatgactgtcagttcgactatcggactgcagcaagggacgcgattgccaaggccaatcctgtggtgagggcggagaagctcgacaagatctgaggcgggcattgggggagcgaaatggttgcaatctgcaagaattcaacatgctgtctttgctgcgttatcattgaaacttgccattcttgtctgctgctgcgtcccgtgaggttcaatactgtgatgcacacagcatccaggcagccgcaagaatttcatcaaaatggtttcccgtgttggctatgtcgtgtaagcttaattcagttattcatggtggtttcggtcggtattgtggtattcccatttaggtagctctgtaatgtattgctgtctcaagcgtgttacattccaattagtaatagtaatcagcaattgtctgccccatatattttttaaaaagtatgttcttgtgatgtcccagcaacatatcacattcagttaaacgctttgcatacgattcattatttcattcagagggccagatgctagaggctgagaggttgtcatagtgttttcaggccactgctctactatacccttatgttatgtcccagtaattgttcatatgtgaagttattgaccaatcaactgatcttgctcctcgtaggaggaagcaacctctgctgctcgtgtagagtcaagggtgcaataaagtggaattcttgttgatgaacacttc

SEQ ID NO: 1319 - DNA, 644 bp, Zea mays
  unsure (1)..(644): unsure at all n locations
  Clone ID: MRT4577_101206C.1
aattcggcacgaggggaggctaactagagttaattctagttattcattgtgttcaacttacccctctgaactcattgtaccaagaagcataagtgatgaagatttatttcaagcctccccatttcgatcaggcaagcgcttgcctgttatttcatggtgtgaccctgggtctggagctgttctggcaaggtcatctcagccgatggtggggttgatgatgaactttagaaacaatgcggatgagaagcttgtctgtgctctcagcagcagaaccatcgatgagaaaggatctccaaggaaattgtacataattgatgcccggccaagagcaaatgctatagcaaatggggcaaagggagggggctcagaatcatcttctaactaccataaatctgaggttctgtttttaggaatacaaaacatccacaccatgagagagagtctttctcgccttagggactatgtggatgctcatggctcaatttcatcaaatgggagcccttcagctgtatctgttgttggagatcggaggaaccgtggatcaacctgnggtggaggcantctanatagcatgacatcatttttcttcaacactgnngggaatggctaaaccatatccagaatattctgggttggtgcttcat

SEQ ID NO: 1320 - DNA, 2562 bp, Zea mays
  unsure (1)..(2562): unsure at all n locations
  Clone ID: MRT4577_101207C.1
aaaagtacttcgcgtcggctccaccttttttatctggctcccccaccttctctggcccgacgacgcccccatttcgaagctcctcctcgcgattccaatccacgcacgccatctccgactccgcgtccgcctcgcgcaggacatatattcagtgatggaacacaaggaggccggctgccagcagccggagggcccaatcctatgcatcaataactgtggtttctttggaagcgctgccaccatgaacatgtgctccaagtgccacaaggagatgataatgaagcaggagcaggcccagttggctgcctcctccatcgatagcattgtcaatggcggtgataatgggaaaggacctgcaattgctgcaactgtaggtgtggcagttcctcaagtcgaggagaagactatcgtcgtgcagcctatgcatgtcgctgaaaccagcgaggctgctgctgttatcgcgaaggccaaggaaggcccaaaccggtgcgcaacctgtaggaagcgtgttgggttgacgggttttaactgccgatgcgggaacacgtactgttcgatgcaccgctactccgacaaacacgactgccagttcgacccggccggggtccccattttcaagctcctcctcgcgattccaatccacgcacgcctcctccgcttccgcctcgctcaggagattcggatttgattatattaccctgattcgtttaaaaggatgggttgagctgtatttgcgcaacatattttgcgacagtgacttctcttcctaaaaattagggtcttgttccgtctaccacgatccattcttgctaagacggcattgaatgtttaatgtgcagcttatagtcagtgatggaacacaaggaggcgggctgccagcagccggagggcccaatcctatgcatcaataactgcggcttcttcggcagtgctgcgacgatgaacatgtgctccaagtgccacaaggagatgataacgaagcaggagcaggcccagctggctgcctcctccatcgatagcattgtcaatggcggtgacggcgggaaaggacctgtaattgctgcatctgtaaatgcggcagttcctcaagttgagcagaagactattgttgtgcagcccatgcttgtagctgaaaccagcgaggctgctgctgtaatccccaaggccaaggaaggcccagaccggtgcgcggcctgcaggaagcgtgttgggctgacgggatttagctgccgatgcgggaacacgtactgttcgatgcaccgctactccgacaaacacgactgccagttcgactatcgaactgcagctagggacgctatcgccaaggccaatccagtggtgaaggcggagaagcttgacaagatctgaggcggggcattgggtaacgaaaaatggttgcgatctgcaagaattcagcatgtctctttgctgctttatcattgaacttcccattcttgtcttgctgtcacgtcccctggggttcaatactatgatgcgcacagcatcctggcagctgcaagaattcatccccagtcgagtcacgaaatggtttgcgtgttggctatgtcgtgtaagcttattcagttattcttggtggtttgggtcggtatcgtgtcattccccgtttaggtagctctgtaatctactattctcatgtgtgttgccttccaatcagtaatagtaatcagcaattgtctgccatatctcctacaagtatattttccagttctattgttttctcttgatgttccagcaacatatcacattcaggtaatcgctctgcatttcaattcatgtgtacttgttatttcaattcagaggaccagaggttgagagggggccatagtggttttaggccactgctctactatcgaccaatcagaggttatattcgagtaattgttatattcaagtaattgttcatatgtggaactattgaccaatcagcagatcttgctcctcgttctctgaggaagggtgcaatgaagtgggattcttgctgtcgaacacttaatttcataaatcattttttgttccagagctgtgatttttgtattaggatgcagcttggtggtggttgggttctgaatctgcattacatacagtctacacaagcacaatttcctggtgaatgttgacactaggcaacttgaattctcaatcaagaggccgcaaaggggcatacatttcatattctgcaacctcttttctatcgtgtacagttgggaacatgctactcgcctttccacatgtgattggaacacgcctagtttgttttgtatcatttgccacctgcaaagaattggagcaagtctaaacaactcgtttttgtgcaaaaaaaaaaaaaaaaaaggggcggccagatgctagaggctgagaggttgtcatagtgttttcaggccactgctctactatacccttatgttatgttcaagtaattgttcatatgtgaagttattgaccaatcaactgatcttgctcctcgtaggaggaagcgnannaaaaaaaaaaaaataaaaaaaaaaaaaaaaataattttaaaatatttttttaaatataata

SEQ ID NO: 1321 - DNA, 229 bp, Zea mays
  Clone ID: MRT4577_101208C.1
atgcagctcacctaaaataaaaatctaaaattaaaaaacaactcaaataacaaaaggaaaggtaaaaatcaactcactaacaaatgcaaataacaatgcaaatcctactacttcctccaggccatcacactagctcctctacttgattatcttgctcgtgcttacaccgatcctgctgttcatctctaccctctacttcatgtctttcttcctccactataccatcttc

SEQ ID NO: 1322 - DNA, 452 bp, Zea mays
  Clone ID: MRT4577_101209C.1
acagcagacatcaaaattcaaacaagagggggggaaacaggtcaaacaaacaggttcaaacaacaacactacggtcgggaacaaacaaaccagggcattacataaacaaaggacacaggtgggaaacggggaccacgccaaactcggggacaagagggaaactggggccaaaccttaaaaaaacggtcaaaggggttggggcagtcccctcacctttatgggacccaaggccctcccgggggggagcttctcctgggggaaaaacaagaaaggcttggagggaacccgcaagaggctaaggggccgggggacaaattcaaccatcaagaacaccctaggtaggcggggctcggggggggaacaacccttcagcaaggaatctaaaggggggggtagaggggcgccccattgatcggccaacgagccttttaaccccaacaggaaagggccga

SEQ ID NO: 1323 - DNA, 131 bp, Zea mays
  Clone ID: MRT4577_10120C.1
gcaggttcttcctcggcgagcacttcccggcgccggtctacttctacctcctccccatcatcggcggatgcgcgcttcgcgccggtcacgagctcaacttcaaaatggtaggatacatagggggcaatgat

SEQ ID NO: 1324 - DNA, 367 bp, Zea mays
  Clone ID: MRT4577_101210C.1
ctgtttcttttattgtttattacttttttttcttcagcgataatcatatcgcgcacgttgcgacacagcatgactatcatagaggccctagatcaaacgtcagctacgcaatgattcctagggaacaatggactacaggactcaaatcctgtttatgcccatagaggggaacggcatatgtcagaacatgaggttgcaccgagtgaaccagctgtgggaacggccctccaagcgcagtgctgcgccaactcatactcgtgaggttgagttggacaaactccgaatactgcttaagaagggcgctgccgtccattaggccaaacaggaggatattcaacaagcagggagcgtggtcatatctcaacgt

SEQ ID NO: 1325 - DNA, 664 bp, Zea mays
  Clone ID: MRT4577_101211C.1
ccggccgggaacccccaccaaacccagcgccggccgaccctgctatggatctatcgccgcaaaactaagcccataacgacgcttgtctaccggcgaggaggacaagaagcccacagagggcgtgtgcccacatcataccctaaggtcaagggtcaggatggcaatgaggcggtctttcgcatatacaggtccacccacctgtagatagctgatgaacgcttattgtgaccgtcagtgtgtggacatgaatgcccttgcccttctgtttgatggcctgaggcttcgccaaaagcagacccctgatgaactgtagatcagaagactgatacgagatcgatgccatgcttgaccagacctagaggcatgggattctagcaccacctatgagcatcaggcgcggagctttcttatgctctccaacctgtgtaatctaaacaaaagggaaaatgtctttttactgaacttgacatgctctggctccttgtgccattgctgatggacatccttagcctctgtccataactatgggtagcacctttgttctgtcatcactcaataatctatccctaacacatgccgccatgattgttctcccaatgacgcgcatatcattagctttgatttgcctggtcatacctacctattgcatatgcttttcacacca

SEQ ID NO: 1326 - DNA, 423 bp, Zea mays
  Clone ID: MRT4577_101212C.1
tattcactcatctccttgagtcctgacacctgtgactgcaaggcacgggaagccccatagctgccctgagtctcccctgagcttgtgagaagaggaactcacatagtctctggcccttctctcccagcctttgtgcttctgatcggaggcatcgaagttggcctgtcccacttcccctttttcgcctgcctctcatcggagtttgggctggtcagctctgtcctgggcttcagctactctcttgtctgttcgtggggaattacgagactgtcatgttctactggccctcactgctctgcctggccttcctgctgggccgcttcctgcacatatttgtcaaatctctgagggtccacctgggctgggagctccagatggaagaaaaacctttcctggaagttcaccaggcagagcatgtcaagc

SEQ ID NO: 1327 - DNA, 341 bp, Zea mays
  Clone ID: MRT4577_101213C.1
gaaaagttgatgtccatccaccagcaacgacaacaacagcgactgtgctcgcaccacctccttcacactttctgctgtagaacatctatgtaggataaagcactgctgttgctacctgccagcctcaacgtgtcgccgcccctctcctcccacatgtggtgctcaaggtttgattttagtcgcgatgcgccacttttcgccgcctacttctcacaatttgcaacgcggtggagttagttgcagcgtgtgctaattttctatttgcttttctgaatgctatttctatatgctttgtcgaatcttactaattttagcgctaaaagctatgatatacatacact

SEQ ID NO: 1328 - DNA, 722 bp, Zea mays
  Clone ID: MRT4577_101214C.1
aatcggttttttttttttttttttttacataaaagattttattatcaagctgcttagttcacacataaacgtgcagcccatcaacaatgacgtacatataaccaaacatgaatatcgcatcgacagaattgccatcgcttgctggtgacgaagactagagcaggtcccttagcactgagatcgccgcagcatgcttctcctggtcacgagatctgtcccggatgccactgcacaccggccggccgctctcgtcgtacagtatcatcccgctgaaccgcggcagctggcacttgacgcccatcagcaccctcctctgccatatcggccgcagcggagtgccgccggacagggcagcggcagctccgtccactccaccactccccacgcccatggccggcgccgccttctgctctacccccaccaagttggcgtcgtcgcctcccaagatcccgtactcgcagtcaccaccaccctccacgccggcaaccttatgaacgacgacgcggccccgcaccgaccggctgctgccgccgtcggcgccgtagagcttctccttccagagagccacggacaggcagaggcccatggtgatggcgtgatgcgatgcgatgctagcactggatcagggtgcaggaacagcagcagacagtaggggggtgtagggtagggggcagtgtggcgcggttggcttcttatggcgagcggcgccaagaatattattg

SEQ ID NO: 1329 - DNA, 383 bp, Zea mays
  Clone ID: MRT4577_101215C.1
actcactctctctctctatctccctctctctagctacccatgcaacagcagccgccctcccatggcgctgacgaccgagccctcgcaagtttcaatcctcacttaggcagatgttccaatggcgtctaccccacctctactgcagtaaggtgtaggactgagagatgacgatcgtagcagtgctgtggtgccaacacaagatgcagttagtcgacgatctgccagctgatggactgatccagtggatgctcgcccagcgagtagccactccagcaaacacgatctaagtgtaagatgaaggtactcttagatgattggtagaagtgtaatgggcttcatcctgccaccgggataacggtcgaatggttatgcttccccgagag

SEQ ID NO: 1330 - DNA, 822 bp, Zea mays
  unsure (1)..(822): unsure at all n locations
  Clone ID: MRT4577_101216C.1
gctggtacgcctgcaggtaccggtccggaattcccgggtcgacccacgcgtccgaagccccagggcagctggagtgtgagacagccattgcggctctgaacagctgcttgcgggacctagatcaggcttcgcttgccgctgtcagccagcagcttgctccccgtgaaggaatctctcaagaggctttgcacacccagatgctcactgcagtgcaagaaatttctcatctcattgagccgctggccagcgctgctcgggctgaagcctcccagctgggacacaaggtgtcccaaatggcccagtactttgaaccactcaccctggctgcagtgggtgctgcgtctaagaccctgagccacccgcagcagatggcacttctggaccagactaaaacgttggcagagtctgccttgcagttgctatatactgccaaggaggttggtggtaaccccaagcaagcagcacacacccaggaagccctggaggaggctgtgcagatgatgacagaggccgtagaagacctgacgacgaccctcaacgaagcagccagtgctgcaggaagtcgttggcggcatgggtggactctatcactcaggccatcaaccagctagatgaaggacctaatgggtgacccagaaggctcattcgtagattaccagacaaaccatggtgaggacagccaaggccattgctgtcactgttcangagatggtaaccaagtcaaacaccagccctgaagagctaggccctcttgccaccagctgaccagtgactatggccgactggcctcacaagccaagctgcagctgtggctgctgaaaa

SEQ ID NO: 1331 - DNA, 271 bp, Zea mays
  Clone ID: MRT4577_101217C.1
gttcttcgtctgaaaaagcctcctggatgcaccgggagaggtcggagaggctgaactgtctcctaactcttctcttgtcaagatggtagatgctaaatctcattctgaggaagtcgccaatggtgaaaaatgtggctcactctaaaagaccaacaacatccgcacgtgcgggacatgggaacgaatggagatcctgctgaaggatcgggatcaccaatgaccattaataaggattatcggactgaacaagcttgatcagcactaaatagtc

SEQ ID NO: 1332 - DNA, 444 bp, Zea mays
  Clone ID: MRT4577_101218C.1
agccgcgccagggagctcgcggcgctcggcccctgtcctccggcccgagatgaatgctgcggcagaagccgagttcaacatcgctcctggccaccgactcctacaaggttactcactataaacaatatccacccaacacaagcaaagtttattcctactttgaatgccgtgaaaagaagacagaaaactccaaattaaggaaggtgaaatatgaggaaacagtattttatgggttgcagtacattcttaataagtacttaaaaggtaaagtagtaaccaaagagaaaatccaggaagccaaagatgtctacaaagaacatttccaagatgatgtctttaatgaaaagggatggaactacattcttgagaagtatgatgggcatcttccaatagaaataaaagctgttcctgagggctttgtcattcccagaggaaatgttctct

SEQ ID NO: 1333 - DNA, 194 bp, Zea mays
  Clone ID: MRT4577_101219C.1
gatagatccatggatacctacttagctgatgacctgattattactctcctctggcgcgcatcacggccccttccttggcggccgcaaccgctcgcgcagtggtcaccacgacgtccttcaacgtgcgtgcctctctccgcaaggccactgccaccgccgccgtggccgttgccggcagcgtcctgcttgccggc

SEQ ID NO: 1334 - DNA, 669 bp, Zea mays
  Clone ID: MRT4577_10121C.1
cattgggtacctcgaggccggccgggatgctgtgttccgtctgtgcctcatcttccgttctatcgcttgcttgttgctgcctgtttcttttcgccgagtgcaaagtaagcagcgcgcgtacgagatgggcggagacgaaaccgttataagtccttcgcttaatcgcgtctcgagctcctgcatcctgcgcatataaacgccacaatcccgacgcccgtagaggcgatcgttctccttctccatcgccacgcgttcgcagtccaagggccggattcgaggatctctcacatcgtcccggtcgccatgagacggagaccgaaggccgggccgaccggcgcttcgtacgagaatgtttagaggagacgcatcccgaagtgtaaggtgggcaccatgacgctatacccccatggagcgagtctgcacccacggtggagtcttccaccgttcctgattcaagtgccagaactggaagactaccctctcactaaatgactattccatcatcgaatgatggacgcactgcacgagccattccgagcaggtgctcaaagccaccgggaggtacaagaagagcttccgatcacagtcacctgcaaatattactccttaataggcttcatgtggcgtgactacatgaccaagcaactctgctaggatggtttctggaag

SEQ ID NO: 1335 - DNA, 2401 bp, Zea mays
  Clone ID: MRT4577_101220C.1
gggtacctcgaggcctggccgggattctcaccgccacaagcaatccccaccggttctcgcctccggggctctcttgcgctcacactcccaccgccgcatatccgagtagagcgccacgaactccacgagctctccgcccagcgagactgtccgatgccccctccttcacccgcctcgcaagtgcgcacttgcgatgctggcgccgcgtagtcgcccacgcgcgggacggtgagtgagatggcgcgctacttccgcagcagcaacctcgcctctagggtcttcgaccgtcagctcatctccccgctccctggcgctaccgttaacacgattagacagttttatgaaaatttggtcccaagctatactatatatgacatagattgcccagattattcgtttcgcaagttcactgatgatgggaaatattttgtggcttttagccgaaaccatcaagatttgattgtataccgtccaatctggttcacatattcatgcaatgaagaatgtgaaactcatgagcttccgccaaaggcaaagaagtttgacagcttctttaagcagctttattcaattcctcttgcatctagcaatgagtatatttgcaaggactttttcctgtacatggaatgccatcgatttggtttatttgcaacatctactgcacaaagtaacgaatcaactgccactgagggtgcaatacatggggtgccattgattgagaaaataactttccatcttgtgaggctagaagatggtgtgatcctggatgaaaaggctttctgcaatgattttatcaatctggcacatagtattggtgcttacatgtatgaggacctgctttgtattgtttctttgcgataccaaacaatacatatcctacagatacgagattcaggcaaccttgttgaggtacgcaacattggtgcattctgtcgggaagatgatgagctatttcttcactcacatattcagactggttatgggggttcttttcttcctggcataaagcaacggttgttgtcatatattttttgcaagacgtggaatgaggttccagatcagactttgagggtccaacatctaaagaagaagttctattttcacttccaagattatgttgatcttatcatatggaaggtacagtttttggatcgccatcacctatttgtcaagtttggtagtgtggatggaggggtttctcggagtactgaccaaaacctagcattctttgccgtgtacaacatggagacaacagatatcgtttcacttcatcagaattcttcggaggatatctatgccttgtttgaacaattttatgatcattttcatgcaaatccacaagcttcatcacatggaaaatttatctcctctcattccaatgatattcatgctttggatcaacttcgggttataaaaaacaaagcaagtagctcctcacagtttgtgaaaaagatgatgacgtcattaccttacacttgccaatcacaaagtccttcaccgtacttcgacctgtctctttttaggtatgatgagaagctgatttcagcaattgatcggcatcggcattgcacagagcatccaataaaatttatgtcagtgaggcaaaatgttgtcaaatttaagatcaagccaggttcagattctggtgcttctgacagcagagcaaaaagaatctcgtccttcttgtttcacccatttttcccgcttgcactttcgattcagcagacttatatgcagccaactgttgtcaacatccatttcaggagatagaaaaggtataacggttgccttagttgtatttgtgtcattagtgaacttgcagcattgctggtggcaaagttttggccatatgtgctctagtagatatgctggaacaagatccattgtctggcggtgaggatggctagtttgatttctcttccaaaacaaagtacaaaatgcaaatgggctcatcattcatctattgatgtggcttcatgggctcatcagttatctatcattgtggcttcacagtgttgatctatgctttcatatgcctagctcggagtgtcagatgtgcttgttattatatttaagaactatctccagcagactccctatcacactctgtctcaccatttcaaactccactctataataagtgcaaaacagtactttgcacgatcgtttacacggtctgctagagatggccacgtcatagcatggagcgggtatattgcatgtttcatgcttgagatgagggtgatctaagttgcgaatttgttttcgaggatatataggaaatgtagcattacaaatagttttgggttgtctattatgatgaagtaactattatttagtgaaacttttatgcaaacataattataatttttcagtgctcaatatattactggagctcctt

SEQ ID NO: 1336 - DNA, 396 bp, Zea mays
  Clone ID: MRT4577_101221C.1
cgtttatttgctggtatcagttttggttcagttctccaaagcacggttttagtttgtgctgcttctcttggttcatgcacatgagctgtttttttttgggttcatgacctttggaaaggtgaagcaaaagtctcggtgcttcctcttgctatccagggcagatttttgtttgatgctgcttgacgtggaggaactatattctagtactgactttatatatcctaataaatctacttgttgtgctattcaagtttttgtgttggagcttctgacgtgaggtgattgtttgggtactgattgtccttatgagcacaatattatgcagccgagcattccacaagttcactgttaagaccaacaggactcttgagagcctagtccccaaaggtagaattt

SEQ ID NO: 1337 - DNA, 561 bp, Zea mays
  unsure (1)..(561): unsure at all n locations
  Clone ID: MRT4577_101222C.1
ccnnggccgggattcctcncttgatcgctcttggagcgtgcgacatgagatgtcgtagcagtgtctctccatctaccatcccgtaggcactgcacaatgaggtcgtcacgagcatagtgcgacttgttccggctctcaggtaactgccgacataactgtgcatgtcaacataatgccacacatcggaccactatatgcgccgccgaatacgacaagatccacgggtgctgaaagagcgcagcgtcgcgagggccaacgacacatcccaatgtgaaggtggccataactggcttccgtcgcaacgtccataactaactgccgtgctggcaccgtggtcgtgacgcctcgcccctcgacgtaatagacattaacgacaccggaggcgtcacgcagatcatgccgactgctctagtacaactccacaatcagcatcatcaaagccgacatcaaacccagaagggacaacaccatctccggctactgtatcgtgatctgggccgcgtccgaccacaacaccatgaacctgacgtgccgtcagttatgcatcgacctccctaccaa

SEQ ID NO: 1338 - DNA, 594 bp, Zea mays
  Clone ID: MRT4577_101223C.1
gttctcaacatccatttcaggagatagaaaaggtataacggttgccctaggtgtatctatgtcattagtgaacttgcagcattgctcgcggcaaaattttggccatatgtactctctagtagataagctgacagatgttacagtaggggataagatccattgtctggcggtgagaatggctagtttgatttctcttccaaaacaaagtacaaaatgcaaatgggctcaatattcatctattgatgtggcttcatgggctcatcagtcatcattgcggcttcacagtgttgatctatgctttcatatgcctagctcggagtgtcagatgtgcttgttattggatttgaggcataaggacacgtatattggatggcatggagttggtatattggatgcttcatgcttgaggcgagggtgatctaagctgcgaatttgttttcgaggatatataggaaatatagcattacaaatagttttgagttgtcatattatgatgaagtaactactatttactgaaactgttatgcaaagataataattatttttctgtgttcaatatattacaaaaaacttcataatctaaaaaaccaaaaa

SEQ ID NO: 1339 - DNA, 352 bp, Zea mays
  Clone ID: MRT4577_101224C.1
aggacccttggccggacccttggccgtccttttggccggccccttggcccgggcccggaaggagtcgttggcaaggaagctggccgcccgaataagcgcattgagcagggcaaccgacaacgcaatgaagttcggaaggaacctttcaatggcttaaaaccgaaagggccaggccaagacaacggggaggatcctgaggatcgtggccggggccaacgccctggttggttaagcctaattcccctgggtggggcggggctccggctatatataatccttttccctaattttttcaactttgccggtaattccggttattagaacaaacgcaacggagttttgggttccttgc

SEQ ID NO: 1340 - DNA, 284 bp, Zea mays
  Clone ID: MRT4577_101225C.1
tcgggacctaagggtttgggttttttatgaaaggtcactccctatggaagggggacctttgggcagtccatgaaagggaaccgaacttggccaagttccgattgaccttccaaacccgggtgcagagaggcaggtaacttatgggccaagttcaaggattaacaccaaatttggctcggtctggaaaaaaactggcaaaaggttctgcattaaaatctgaaatccatgagatcaaacatgaaagccaacatttgagatcttgtattgagcttgctaagaaagga

SEQ ID NO: 1341 - DNA, 465 bp, Zea mays
  Clone ID: MRT4577_101226C.1
cctccctttacccttccttctctcccatgcaagcaaggaatcgagggagggagggaggaagcaaagggggaaaagctcgtgcaagacaagccgccctgccctgggaccattcccacccacatcgatcgtcagccagagagaggttcgttagttccagaaggacactggacagttggagacagcgagcgagcgagcgagcgagcgggaggagaggaagaagagctagggggcgatgggcggcgagatgaagcccgggaggggcctcaggacctgggcgcagcgccacctcaacgtcaccttcgccgtcggcttcctcctcgtgctgctcacctacctcgtcgtctcgcggcagctcgccgtcgccgcgcccggcggtgcagcgtcgagggtggtggcgggtaagcaagtggtcgtcagagacgccggagacaacgcagagggcgcgagcaaaaggcggcaggaatg

SEQ ID NO: 1342 - DNA, 340 bp, Zea mays
  Clone ID: MRT4577_101227C.1
aggacgcggtgttgtactcgtgcgcccaaacagagccttgtcaaggtgagtttcacacgactgcacgcttttgccgatggatctaccagacgctcttatcgcaccgggtgccgaagatcgaacggacctccttagacactgcaacagttgcgccccaggaaacacctcaccatgatgggcctttgtatgttgacataacattctcctccgctaatcccagtgctcccccactgatgtaacaccacttctggacgacttgggcttaatgcaaacttgtataacaatgggaaagcgctccttagccagatgggtacctgaaatgggttaggtattcacaagt

SEQ ID NO: 1343 - DNA, 349 bp, Zea mays
  Clone ID: MRT4577_101228C.1
cgggttatgatgggctcatcttcgatcaaggccgagctttttttcatgggaggcttgtaattcttaaacaagttggtcctttatatcaataagaagaccctcattttttccatggcgcttcctgaccctgttaagaacacgtcccgcccgggggtgaagtacggcaaggaccctcgccctacggaacttgttaaccttttggtcctaaacggtgaccaccgtcaggagtacaaggacaggtaggatcaagccgtgttcaataatatggacagtctcatcggccagttccaggtgaagggccatattccttggatccttgcgcaaatttaccgtgttcgaaaccgggagc

SEQ ID NO: 1344 - DNA, 289 bp, Zea mays
  Clone ID: MRT4577_101229C.1
ggctactacccggcggcggtgaagccgggacgatccaacggagcagaggcgccatggctgctcccgaagcgcccgcatgctacgtcgggatcgcgcggcagttcgtcggcttccgtcttatgaaacaaatgggatgggacgaaggtgaatgcctcggcgactacaagcaaggcataaagggtcatgttagggagaaaaacaagcacgacacactaggcgttggtgtcgatagccttcataacaaatgggtatacgataccacccaatttgacaacatattgtaataact

SEQ ID NO: 1345 - DNA, 117 bp, Zea mays
  unsure (1)..(117): unsure at all n locations
  Clone ID: MRT4577_10122C.1
cgnanaaatggttttgttatgtgananccagnnctantcaatcctaaggaatnnaacttcanacgctttggaaatnctggccctttantgttctatanatactatccagaatacnat

SEQ ID NO: 1346 - DNA, 370 bp, Zea mays
  Clone ID: MRT4577_101230C.1
gattaaaaaccaaggaggttttttttttttactaacttacgggagaaccaaaaaaaacaaattttttaaaaaaaacaatggttgctgcaaaaaaaaaaaaccccttatggcaaaaaaggcctaaggggccctaaaaaaaccccaccatggcctgggttttaaacagcgggccaaggacccccataaggaagcccccggggccgggggcaggaataaccaaaacctgggggtccaaaaagttttgcggcatgagaaccgcccccaggagggccctggggcccccgaagaccccaaggaaccccgggccccccggggtgaggaaaaggcggacgggattggggagggcccaaaaatcgaaactggggggccc

SEQ ID NO: 1347 - DNA, 448 bp, Zea mays
  Clone ID: MRT4577_101231C.1
atctgtcatgactggattggggcaaaaaatttacttgcatggctgacactgtcttaaaagacacattagataatgaaaacactggacacaccaacgaaatgttattgacccataaaacgttgtccaatgacttgttatacctgacgatgtatggctaattaaaaaacagggcactacgctggtatctgctctcgacagatatataattgaccatgctaccaacgcctgtccttagtgtctaaacacgtccaggggactataaaacattcgtgtatgatacagtgggatggaaacagagttgcatatccaaaaaatggggaaatgctcttaaggtacgcggagccatgaagaggaactgatgtacccgataacttacacggtgatgaacttatttgcttgggcattagggcatgtacatgcaacgactgcctaaggatggtgcattgtg

SEQ ID NO: 1348 - DNA, 586 bp, Zea mays
  Clone ID: MRT4577_101232C.1
acccagcgtccggcgccctcacgtcgatgcctcccgacaccccgcaatggctagacagaaggcagagcgcggcatgagcaggatgaacaaaaccacgcccgacaggccctggccctatactcctccgcgcctgggtgctccccgcgccgccatccctgaagccgtacagggacgacggggacggcttcctgccggggcaggttactcgccgggacaaagtgctgtttgagctccagctcccactaataaccacagtgacaggttcctctacccttccgtactctgtgagcgcgcccattgcatcggggggaatgctcttgccctaacagatcatgacaccatggctggcatacaataagctgcgtcactgagcctacaagtttgtcgtgagaataattcctggagtcgaaatcaaagcgctatataatacaagggaaggtgctggtgcggttgagactgattatatgcttgcatactatggcttgagcgggccgctgacgtgtgatgagaagcacggaatgctattggacagtacagatggcctatacttacgtgccgagtacatgctgctaaaggtaactactac

SEQ ID NO: 1349 - DNA, 221 bp, Zea mays
  Clone ID: MRT4577_101233C.1
acatcaaaaatgttttaaaaattttgcagggtttttttttatgacacatggaactggactttcgaacactgatcatagggctagtcaaacaagcttttacctaaatcttggaagaccaaacacctagatctttgaagaccaagacccccccaaagaagggattaaaattttaacaacttaaaaacagaatgcttaaacagtatggtccctcggacccgtgg

SEQ ID NO: 1350 - DNA, 223 bp, Zea mays
  Clone ID: MRT4577_101234C.1
cactacgcccttagatatctccagaatctagcccttagcgagtgtgagcaataaccacaatcaacaatttaaatgaaaagaaaaaaaattaaaaaaaaaaaaaaaaaaaaaaaattaaaaaatttaaaattaattatttaaaaaaaaaaaaaaaaaataaaaattttttaacaatttatcatgctgaatgggaattgtactatccctttacctgcccattttt

SEQ ID NO: 1351 - DNA, 471 bp, Zea mays
  Clone ID: MRT4577_101235C.1
gtgtaagcacctactataactacacacaattcgcacaagaactgaagcctctttacacaagtgcgccttttacaaacgcttcaacggacgagagggccaaactgaaagtgaaagtgcgagtaacatccatgggaccggaacagcacgacccggggaccatgctggaaggagggcgggtgagatccagactgatctgggaatgaagctccaaaccaactatgaagatggacacggatgacgtgcctagagagcctgctgctggatctgatgagactatgcaggagcagcctcctgcggttggagagggagcacaggataatgaggaccagcccgattctatgggaactgaggcatgggatgagccgccataaaagaaaggtaacaaaactactgaagcaggccatgaggtgagctatggggccttggctgcacctgacctgcagaaggctgtagaaaaagtgtatgatatgg

SEQ ID NO: 1352 - DNA, 574 bp, Zea mays
  unsure (1)..(574): unsure at all n locations
  Clone ID: MRT4577_101236C.1
ttcctcctcattccggtgacgcaacgttccctagcaacttcctcagccatcataatctcttagactcctcctgcacacgcacaggctctagaattctctacgcattcgttcaccgcatgtcatcggccatgcggttgtgtgctcctcagccaatactttggtacgatgctcagctagtggatgagcacaatcaagtcgctggtaatttttttagttgtcgagctcgccggtgacaccatggccggtcgtccctgctcccccttgcctccctccgcacgcacgccagccgtggttccagctcacatccctggacgttgtgtggttcccagttcgtccatgtcctcttcctccctgctcaattcccatggccggtgctctgctcggattctgcccgccaagctcccagccgagtctcctcccatggcttgagcctccctgttggaatctgctcggntccgtttgccgcgcccctgcgctgnnngcggtgctncagctcggattcagtcctgcacgcagccgcttttcatcttcctgctcagctcgctgcgccgaactgccccagggtcgcgcgcct

SEQ ID NO: 1353 - DNA, 817 bp, Zea mays
  Clone ID: MRT4577_101237C.1
ctgggcgtgcgcaaggagacatgcaagcgcaggaaaatcacgggcgcggcgatcaggaagctcgaccgggcgagcagcagggagcaaggcgagctagagacggccgagctaggcgcgcgaccctgggcagttcggcgcagcgagctgagcaggaagatgaaaagcggctgcgtgcaggactgaatccgagctggagcaccgcgacgagcgcaggggcgcggcaaacggaaccgaacggagcagaattcaggcgcgcagggaaccgcccatggacgggcgcagagatggccgagcgccataggagccgcgacgggccggagctggggccaggccatgacgcgagcaacagggaggctcaagccatgggaggagactcggctgggagcttggcgggcagaatccgagcagagcaccggccatgggaattgagcagggaggaagaggacatggacgaactgggaaccacacagcgtccagggatgtgagctggaaccacggctggcgtgcgtgcggagggaggcaagggggagcagggacgaccggccatggtgtcaccggcgagctcgacaactaaaaaaattaccagcgacttgattgtgctcatccactagctgagcatcgtaccaaagtattggctgaggagcacacaaccgcatggccgatgacatgcggtgaaggaatgcgtagagaattctagagcctgtgcgtgtgcaggaggagtctaagagattatgatggctgaggaagttgctagggaacgttgcgtcaccggaatgaggaggaagctgcgttcacaagttcccggccggcctcgagg

SEQ ID NO: 1354 - DNA, 372 bp, Zea mays
  Clone ID: MRT4577_101238C.1
ttttttttttttttttttttttttttttttttttttttttttttttttccctatcaaaccaaaattttttacaaaacaaactttcgaaacaaagcaacaaatgaggagccaagtccgttgtacagttcggggcaacagcgtgcaccggagccaaacattaaccaagtacactttactgtacagccacaatgtggtgccggtgcataaaaaccctgttggactcgggcaggtgctattggagtattgggggcgggggcattgaaaatctcggggtagtgtaccccaccaccccgaggaggactttgtcctcctccggctttgcatccgtaactaaaacgtgtccgcatttgcgcggttgccccatgaccgccg

SEQ ID NO: 1355 - DNA, 2224 bp, Zea mays
  Clone ID: MRT4577_101239C.1
ggtagatgggagaaggatgtcaacttgaccatgggagccagcgagttcttcaatctttacaacgacactgccaagagtcgcctcccacgagtgatgccaagttttcctgtggtgagcttggttgatccagatgtcatttgcttccgcctcgaggacaagttccgtgaccctttctggatggttcaagtcaacatgcggaataagttgctgctgtcaagttccatctatatcaacgaagaagaagaagaaggataccctcctaaaagggactgcaggaactatttcatttttcatgacttcattgccagcaagttctcctcttacttgagtgaagacgccatcgcgttcgttgtactcttaatagagtagtaaagatgaacaacccaacttggttttatacctgtttctgataaaaaagatatttctttcttttggctagctcattattttgcatactttctatcacatgaagaagaattatgactcgatgtgcgtaatttaagttctaccacagttgtttgtaactagagattaaaaatttctatgtagcaccttatgacagtttttttcttcttccttgcagtcgggaattaagtgagacaatgtagaaggtgaaagaggcgagcatggcacaaaagtgtgaacaagcgacactgatttgttgaacgaatgacaatcttttgaagacgcccactgccaattctctgcctttgtcatgtgtgagaaaccttaatcggtactcaaactttggcatgaatctaagctactagcccaactaaatacactgataaataattatgtagtgaatttatttagcatgtgtagtgagggtaatctggatttttacactttgcaattgctatgtttcaatgtttgaactttggtgtacaatatcccgcctctgccccaaagaggatgttatccaggattcatcttgtttgggttccttttgacatcaaaataagttggtggataaggtgctgtttacaataaaaaaaatcccaacatattactctaacaagcaaaatggtacattagttgccttttttgtttgttttcttttctaccgcttgaatttttcaggtgactggaatttctggcacaaatgctctaattattctaggtacaagagcacaatggttgttgtagcatatgaaccctgccgtggttattcatgctaaatgtgaataacagaattcttgctttgtttgtggcctttgatctgcaagagggtctagcactgctaatctcctctatccaggctctgctagaactggtggaaggtgattatacgtgcgaaatgtccctactgttgctgtttacactaaaaaattgctttcctgataatttatcatgattcggacatcaatattgcagcagtttgtacgggctaaccaagaagatgtggctgaggataacgctatgcttcttcctaggtcctatggtgattgtcatgtacccagatagtcattggtaatcggagctccgaccgagggactgcaaccgtgctctgtgaccatgtccaggtcgaggggttcagctcgggagccttctctgacctcgtcatgagggttcaattcgatttgcatgtcattgcaccaaacaagtttatgcttcgtctgcagccacctgacttcaagacaaggaaggtgatgagttgcataggaactccgatgtgctagaaatcctcatgaataccaggtttctaatggtctatgtgcagtatgagcgttcactagaaacaatcataggacacgatcaaatcatctggctcgggggcctaaattaccgaatcatgctttcccatcagttagtgaaggcccttgtcgagatgcgcaattctagagaaagattaggtgagagcttggtaaccctcaggtttcttttggttacccagtagtccagctaccaacacttgaaacaagctcttcagatgagaagcagcagaagcaacttttctttagaatctacttggtttctaaggattgtcagcatcataagttttccgccacatcctttcttataggtgattgtttgatccccaacctagactcaaagaaactttactgttagttgcagaattgatgctcagttcctttaaaaatgtctcttatagatggaatcggaacacacttgtgcagattagtatcacgatgtaattatttttatttataataatgagtattatttattcctagaaaaaaaaaaaaaaaaaaactcgagg

SEQ ID NO: 1356 - DNA, 661 bp, Zea mays
  Clone ID: MRT4577_10123C.1
tagggtttacctcgtcgcccccaatccccgccgccgcagccgtcgcctcccacctcccgcctcccttcccgccgcagccccgccccgccccgcccgcgccatcttccgcccaccgcatcctccagccacatctgccgagctccttcaccagcaggtcgccgctgccggacccgtccaccccgtctcgccgccgccggacccgtccaccccggtctcccgtatcgccgccgtccagatcgtcctcggcctccagctcgcctccgctcagtttagctggacttacaagcttggaaaaagaatgtttaagaatacattccagtccgggtttctgtcgattctctacagccttgggaccaagccgttgcagatatgggacaaggaagttgttgatgggcacattaaaagaccccaggatgaagatattaagtctaacgtacttgaaattgttggaacaaatgtgcaatcaacatacatcacttgcccagctgaccctgctgccactcttggaattaaacttccatttcttgcccttgttgtgaagaatcttaaaaaatacttcacatttgaggtccaagttttggatgacaagaatgttcgccgacgattccgagcatcaaattttcaatccgtcacaagggtaaagccatacatctgcacgatg

SEQ ID NO: 1357 - DNA, 867 bp, Zea mays
  Clone ID: MRT4577_101240C.1
gggtacctcgaggccggccgggattctcaacttgtgaacgcagcttcctcctcattccggtgacgcaaggttccctagcaacttcctcagccatcataatctcttagactcctcctgcacacgcaccagctctagaattctctacgcattccttcaccgcatgtcatcggccatgcggttgtgtgctcctcagccaatactttggtacgatgctcagctagtggatgagcacaatcaagtcgctggtaatttttcttttagttgagctcgccggtgacaccatggccggtcgtccctgctcccccttgcctccctccgcacgcacgccagccgtggttccagctcacatccctggacgttgtgtggttcccagttcgtccttgcagctcggccatgtcctcttcctctctgctcaattcccatggccggtgctctgctcggattctgcccgccaagctcccagccgagtctcctcccatggcttgagcctccctgttgctcgcgtcgtggcctggccccagctccggcccgtcgcggctcctatggcgctcggccatctctgcgcccgtccatggtggttccctgcgcgcctgaattctgctcggttccgtttgccgcgcccctggcgctcgtcgcggtgctccagctcggattcagtcctgcgcgcagccgcttttcatcttcctgctcagctcgctgcgccgaactgcccagggccgcgcgcctggctcgaccgtctctagctcgccttgctccctgctgctcgcccggtcgagctccctgatcgccacgcccgtgaattttcctgcgcgcgcatgtctccttgcacacgcccagcaccctggatctcctgatctcgcgcgcccc

SEQ ID NO: 1358 - DNA, 277 bp, Zea mays
  Clone ID: MRT4577_101241C.1
accagatgtcgattgagacccgccttgacaagcaatcatatacgtttgggccgcaaacacgtctcagcttacgatgatcttgctcaaacaatacaatgagccattgtcacacgaagctgtcataatcgtgagtctcctcatcacagcacacgtcgtaagcagacgatcaagcatgggagtactgcagctcatacatgcctttgtatcagacaaagttactgattatgagaccgagtcgacggacgataccaccactattaaagaagagactcaatgc

SEQ ID NO: 1359 - DNA, 871 bp, Zea mays
  Clone ID: MRT4577_101242C.1
cgggtctaggacagagccaatggttgttgtagcatatgaaccctgccgtggttattcatactaaatgtgaataacagaattcttgctttgtttgtggcctttgatctgcaagagggtctagcactgctaatctcctctatccaggctctgctagaactggtggaagcagtttgtacgggctaaccaagaagatgtggctgaggataacgctatgcttcttcctaggtcctatggtgattgtcatgtacccagatagtcattggtaatcggagctccgaccgagggactgcaaccgtgctctgtgaccatgtccaggtcgaggggttcagctcgggagccttctctgacctcgtcatgagggttcaattcgatttgcatgtcattgcaccaaacaagtttatgcttcgtctgcagccacctgacttcaagacaaggaaggtgatgagttgcataggaactccgatgtgctagaaatcctcatgaataccaggtttctaatggtctatgtgcagtatgagcgttcactagaaacaatcataggacacgagtaagcaaagaaccttacaacggattcatgaagtttactccatatgcatttggtgtgacattggttcctttgttttgcctttcattacagtcaaatcatctggctcgggggcctaaattaccgaatcatgctttcccatcagttagtgaaggcccttgtcgagatgcgcaattctagagaaagattaggtgagagcttggtaaccctcaggtttcttttggttacccagtagtccagctaccaacacttgaaacaagctcttcagatgagaagcagcagaagcaacttttctttagaatctacttggtttctaaggattgtcag

SEQ ID NO: 1360 - DNA, 386 bp, Zea mays
  Clone ID: MRT4577_101243C.1
gcggccaacaccaccctagactgcgatcttcgtatcctccgtcgcgtcaagcatcgatcatgtcggcctattgcggaaagtacaaggatgagctcatcaagaatgctgcctacattggcacccttggcaagggtatccttgctgctgatgagtcgactggcaccattggcaagcgcctttccagcataaatgtccacaaccttgaggagaaccgccgtgccctccgagagctcctattctgctgccctggtgctctccattacatcagcggtgtgatcctcttttatgagaccctgtcccagacgaccaaggatggctaagtcttttgatgatgacccctaggagggaggtgttctccctggctcaaaggtgacaaggcaccattg

SEQ ID NO: 1361 - DNA, 298 bp, Zea mays
  Clone ID: MRT4577_101244C.1
gagctgccccggccgcttgctttcccacctatccactgcctccaccaccatgctggccttgctcccctggtcttgcttctatctccggtaattatgaaatccctccaaacccctaaatccttaaccctaaacccacagtccttcactggagaagcctcctctttgaaggctttaacccttaaagaaaaatcatctgttgtgtcactctgagtttatgatagagcttagcacactgattattttagtggattagtaattatggaagctccaaaaaaaaaaaaaaaaaactcgagcccgg

SEQ ID NO: 1362 - DNA, 344 bp, Zea mays
  Clone ID: MRT4577_101245C.1
gggaaggaaaagtcacgtatcccaaatctaactcccaaatactcacgaatcccagagagcatccatggcgacgcaccgccactgcctcccactcctactcgtggacgccgccctcgccctcgacgccgtccatgctcacgcggagctgggcggcggtcgcggcccacagctgggcgggaggaacccgatccctgacgtgagcgacacgcacatgcaggagcgaagcgggagggcgcctatgcagacgaagaaccagaagaagaacgacgacagactgagcataccccacgtggcactcggagactaccaagggaggacctggatgaaatatagcaccaacaaga

SEQ ID NO: 1363 - DNA, 427 bp, Zea mays
  Clone ID: MRT4577_101246C.1
ggttgaagagcagaagattgtcaagaaggtgttgaaattacagaagaccaaagacaaaacttcctcaaagtaactctgaaacagaagtgaaccactcttctgtaaacaagggaagatatttttgtcgatggtgatgatcaatgaagtagtctcttctagctgtgttctagtatgtcttgagccgacaactgtttctagggtaccttgaaatctgtctaccattgtggtgtcaaagattatgagatgacatatgatccccatgttgcttttgttcacttcgctaaaactgcaagtctgagttcataaaaaaaaaaaaaaaaaaaaaaaaaaaaaaaaaaaaaaaaaaaaaaaaaaaaaaaaaaaaaaaaaaaaaaaaaaaaaaaaaaaaaaaaaaaaaaaaaaaaaaaaaggggggggccggttttaa

SEQ ID NO: 1364 - DNA, 384 bp, Zea mays
  unsure (1)..(384): unsure at all n locations
  Clone ID: MRT4577_101247C.1
acctataaggaacgagggtttcgtccatagtaccacagaggcttagcgcgtatgcgatagttacaaagtggncgacagccgggctgactactcttgatacccacttgatatctcctcccattgacaagaggtattacgagagaactgatttgatgaatagattgacggagacccatagacctgaccaactatgacccattgatgctcaaccaaccgctaggatactctcaacatagcttcagacattcttatggcaaatatttattctgggaagctcttttctatcggggggaagaagactactagttcgtctgatcagaccttgagatcttcataatcttatttggtgctgcccatggggaggatcaagctgtcctggctagt

SEQ ID NO: 1365 - DNA, 437 bp, Zea mays
  Clone ID: MRT4577_101248C.1
ggataatcctttaaaaatatggacacctggattcacatttgagattgtttttgtgggatggatgctgttgctgtgatgttcgcttgtacttgtagacacttgttaggacctggaatgctttgaattttgtgcagcttagcttgacgaagcctctgtaaccacacacttgaatatgtccagtttgcaagtatattaggtggaaaactggaaatcctgtccatgaagctccattgaatatttttctaaaaaaaattgaatcgtatttgctaaaatggtgttatcatattaccattgcttcttattgcagcatgtcagccatagacttctattgttcagttgataaggttgaaggggccgacggaaaagatcgtgtggtggtcacatttgatgggaagtatctgccttacactgaacagaaatctgaacatatgatgtca

SEQ ID NO: 1366 - DNA, 309 bp, Zea mays
  Clone ID: MRT4577_10124C.1
acaatcacaaaataagtactaataatggtctaggattacataagcaacacgaatcaaaccataattaaacatgaaccaaacaaactggtagtactagtattcttcagcagcagtagatgagcagcaaccatatccatggtggtccaatgcagtggcatgacatgtcttggcggctcttggctcagaactggaacgcgtcgggcatgccaccggcggcggccagctggggcgcgaacggggactgccacgggcggagcagcgggtcggggatctccgggatgtccacgggagcgccggccacctggaaga

SEQ ID NO: 1367 - DNA, 326 bp, Zea mays
  Clone ID: MRT4577_101250C.1
gcgattcaaacatatattttctgctgcactttgtaatccatgccaccagtttttcatgaatggactcgggatatttatgtggttgctggagatcctaacaccttcatctacttactgggtcacgcattcctatcgataaggaggctcaactaacgcaggaaacccgcaattatcttgcctggaaactcacttcagctcacacatacaggaggtagcctgcttcagattcatgcatacctactacttcggtgcacaccgatccacagacggggactgatctccatcaggatacttcacggaaacttcaatctgataaattttggacc

SEQ ID NO: 1368 - DNA, 363 bp, Zea mays
  Clone ID: MRT4577_101251C.1
cccacgcgtccacaaatcatttacttccctgctaaggctattctcagatgcaaaaagaaaaaaaaaaaaaaaaaaaaaaaaaaaaaaaaaaaaaaaaaaaacaaaaaaaaaaaaaaaaaaaaaaaaaaaaaaaaaaaaaaaaaaaaaaaaaagggctgcaaaccaaaaaaatcaaaacttacattcacatgcatgccacttctaatctatcaaatattgccccctaaataaaattcaatgcccaccattttaaaacaacgtaaatggaaaaacccttactttaccaaacttaatcgcctattaaaacatcccattttccccaatttgattaattttcaaaatgcccacaccaatcccccttcc

SEQ ID NO: 1369 - DNA, 261 bp, Zea mays
  Clone ID: MRT4577_101252C.1
aatactcctgagaggccacctagttcagacattggagattgaccatgagcaatcctgtacatacgacagtgaatgatagatgtgttgtttgtattgtttcgtggtcagtgttagactgctgtttacgtgtagctgctgctattgttgtatgtgtagctgctaggggtgtaaatggtacggatattatctgtctgtattataattcggtctgtctaaaagggctgagatctgatccaaaaaaaaaaaaaaaaaaaacccccc

SEQ ID NO: 1370 - DNA, 223 bp, Zea mays
  Clone ID: MRT4577_101253C.1
tattcctggggcttcgagcttcttagccggcggacgccctttggggatatgtatatttttaagggggtgcccattcctccaaaaacttaaaatggaataccccgcgtaaatccgatctcatggcctatgcctcaacgacccccctaaacagaaaacacagactgccaattcacctcctcacacatccgacaccttatataccgaaaacgtggactcggaatcc

SEQ ID NO: 1371 - DNA, 417 bp, Zea mays
  Clone ID: MRT4577_101254C.1
gtccggtatggagggcactaacagcactaccaggcctcgagcgtgtgaatgcattgcgtgagggctattcatccaagcgggactatgcaagcactctgagctgtatgcaaactctatcgaggctgcagccacaaataccatctaggcgagcaacgatgtacgcggagaaccaggaccctaaactccagctcctactgaaacatgaactggagactccaacaatgggagagaactgggacgaccgctctcaatccaaggagcatatcgaggcaagcctaactggcgggcgagaggcagcgatactgaagagaaagagctctcgcatatgcattttacacatacaggggagagcacattaggatctgccaacccaatgcacgtagacccaaatgacttgcataggagctggagctggat

SEQ ID NO: 1372 - DNA, 187 bp, Zea mays
  Clone ID: MRT4577_101255C.1
gagccgcggacgactccgtcaaagcgctcgtcgcctccaccgaccccaacgcgctgctcaacaccgtcaccgcggacgcgctcgcgaccccgtctgtggatgttggggccgacgtcgtcgctgacaactggggcgggtgcttcgacgacagcgagcagtactacgagtcgccatccgtcgtcgccga

SEQ ID NO: 1373 - DNA, 198 bp, Zea mays
  Clone ID: MRT4577_101256C.1
tttgttagccattatatgaagatctagattggggggtccattggctgtgttcatacactgctaacctttttctcaaatacacaaggggagctgataaccattggacttgggatgaacacctaagttcacaaacataattgtccaccagtaacaacacaggacgtttcatatttccacacactattctctctataaccc

SEQ ID NO: 1374 - DNA, 465 bp, Zea mays
  Clone ID: MRT4577_101257C.1
atgtgctatatatatttttttattttttttttttaataaaaaaggattctttttcacccaaaagaataacccttcccattgcaaaggctaaccccggggatgggggccgcccccccttcgggaggggggcaaaataaggaaacaatcgcccttaaaagagacaaccgggaccccaggctacatgactgcggcacatacacctttcactaaaagaacctccttgccctgtccttgcaagcccccctaccttggtattcgagggtggggacccgcattctcaacttttagtgcccaaattgggcgaactttaacgccatcaggtccccctataaaagctgggaattgaaggactgggtgacccaacagaaaggagcctgggacccccccgtatagcatcccgggaccgaggaaagggcacaacttttgctagatggccggcaacttgggggagacgaacggggccct

SEQ ID NO: 1375 - DNA, 568 bp, Zea mays
  Clone ID: MRT4577_101258C.1
cctcggcggtagggagggcgcccgcggcccgagcgcgcggcccagcgtcgcggcggcggctcgtcggaccccggagctcgccgcggcgcggagcagccggcctccgccgccagagccccgctcggcgccccgcgcgcgcgcctgccgctcccgcctcgggccggccgcggcgccgggagcccgagcgatgctgcgccgccctgcacccgcgctggccccggccgcctggctgctgctggccggtctgctgagcggcggcgtggtctgggccgcgcgagttaacaagcacaaaccatggcttgagcccacctatcatggcataatcacagaaaatgataatgcagtgctcctcgaccctcctctgattgccctggataaagacgcacctctgcgattcgcacgtgagatttgtggatttaaaattcatgggcagaatgtcccctttgatgcattggtagaggataatgacactggtgagggaataattcgctcaaaagagaaactggactgtgagctgcagaaagactacacattcaccatacaggcctatgactgccgcaaggggccc

SEQ ID NO: 1376 - DNA, 359 bp, Zea mays
  Clone ID: MRT4577_101259C.1
aataaactagggtctcatttggtattgtagaggtgcatctaagaaagggttgggtacctttcttaaggacatttgggattacaaggtcgatttagttagtttacaagaaaccatgaataagacagtattctgaattcaatgacactgctgatggcaagtgttcgttttcgtctcccttcagctgcttcagtgcatcaacagaagcgcgtctttcccgttctccagtgtatcaacactgctgataccctcaatcgcgtcatcgcttgagattcgccacctcaatcgcggcgatcctaacgggaaccgagcagggctggtatctgcatgagcagcgtcgtttcccacgaatccaatggagc

SEQ ID NO: 1377 - DNA, 352 bp, Zea mays
  Clone ID: MRT4577_10125C.1
agcctccgcccacgcgtgggctgatccatcggagagaaaagtggcggagaccaacgtgacagagaggacggtcaagatcaaagccgaccctcctgcgcacgagggctacccgcgtgcctctgtcgagaggcagaagatctcctcctttaacgcgggtggaccagacctacgacggagcggatgatcatatctgcaatagtgtgcctatgcggagcgcccttcgtcctcgggtgccgcatgcgctaaaggtgcggtgaaagcttgacgatcgctcctcctacttactcaacgagcgcattaaggatttctgcggcacgccggctccggagaactgaacggccgacggcgtatg

SEQ ID NO: 1378 - DNA, 1223 bp, Zea mays
  Clone ID: MRT4577_101260C.1
gggtacctcggggtctgccggctgctcgagttgactcgagggagcggaaggaaaagatctcgaactccacgatcgatcactgatcgacatcgctgccggttgcgcggcttccttctctccccatttccggggcccagatcctgcggcgaattccttccaactccaggatcgagagcacacgcagatggcgaggcacccccgcgcgccgctgctccggcgtctgctcctcctggcggccctcgcggcctcctgctcctactacctcctcttcctgcaggcgcaggcctccgtcccgccgcggtacgacgggttcgcctacggcggcggcgccgcgacggcctggaaggacgccgtcctcgtcgaggcctttctcgacccgctctgccccgacagccgcgacgcctggcagccgctgaagctcgccgtcgagcgatacgcgccgcgggtctcactcatcgtccacccgttcccactaccataccacacatatgcattctatgcctgccgcgcgctttacatagctaacaagttgaattcatcatcgacatatccattgctggagctgttcttcaagaaccaggaaaagttctacaattctgccacatcatctctctcgggcccttccgtagctctaggaatgtcgaagatggctgcgcagactgttggtaactcagtatccgagtttctgtcgggcttcagcgatgggaagacagactcggcagcgagagtttcattcaagtacgggtgcacgaggggagtctttggcgcgccgttcttctttgtgaatggcttcctccagcctgggggcggatcgcctatcgactacagcacgtggatcggcatcctggacccccttgtttcccagaacggtgaacggatcgagatgtttacttcgatgtaagtgattgaagtggccttgctacggaggatacggtcgtacagatgtttcgctagtgccgacggcggacaagcaaacagctattatgcaattgcaaactgtgtgtaagctctgcggtggtaaatagcatcccactttgctcgttgtactgttaagctagcagttgtgtgctagctgtatatcgggtaagtatgtgaagctcttatattggagcctgcgatatgttaaacttcgcataatcctatattcacattcgctcttctccttgctttttcttaactattggcactcctctgccttgtcaaaaaaaaaaaaaaaagcggcc

SEQ ID NO: 1379 - DNA, 1097 bp, Zea mays
  Clone ID: MRT4577_101261C.1
gggcgtcgtcttaccctaaccctcaacctccagcctcggcggcccccgtggcggcgacgaggagaggacgacggtacgtgcctatgcccgagggtcttcttacaggctgtgaggagcggctccggaggctctcgctcgtggcggggtcgtctccagcggctgccttgccgtggccggctgcggcggcggcgccatcgtcatcggacgcggcgacgacgaggcgggtgttccccgtggagcgcgacctgatctcgaagctgcaggtgcccaaggtcatcaggcctcgccccgctcgccctctgtggaccaccatctgcatcgactccagcaacgtcgccgtcgtcggtagcggcccggagacggcggcgcctgcgtccaacaagacggcgagggaggtggaggccgaactggagctcccgggcgcgcctcccggccgtcgtgtcgggccaccgcaaccgtgtccacctggtgaacgacgcgtacaaggctatggtgggacagcccgtgtgcccgtggctcgacgcgctgccgggcgccggcgcgtcgaggaggatcaacggcatcgtggcgctggacgtgccggacgttcggcccggcgccgcgcctgccgaagaatgccgggtcatcatcagacgccttcccatgcaccgcaaggatcacgtgggagcacggtggcggcagcgccatcgcctccctcaccgtgccgtgcgccgtcgagcacctggccggcggatccggtgactatcgcttcatctggaggtttgactccagcagagcgtccatcatctactgcatcgcgtgacaaactagctagctggataagctaggccatttatttacgattcatgctttgtttccatcgcatgggctgttatatatgctggtcgactgaagctgcaaaatagcgttaggtgatggatcgttggttcgcttgtctctagctagcgcgcagcgtgttgattaatttggatgcatgtcaccgaaataattaatgtgcacatccatgcatgtatagggtagtagtttctcatgcattgcatgcatatggcgcggagtgtttactgattcaagagtattacaaaatgtaaggaaggttt

SEQ ID NO: 1380 - DNA, 869 bp, Zea mays
  unsure (1)..(869): unsure at all n locations
  Clone ID: MRT4577_101262C.1
ttgggtacctcgaggccggccgggtctattccctcctaaaatatttgggggagaagaatcggctattagtttttttgtcttattcctctataaaggaaccacatgtgctatgcttcacactttttactaggcaactgcacgaagtttggggatttcaggaaaaattatatatctgcaagttgtccggaaacttacagctactggttctcgccttcaccatgttctgcagtgttgtttcgagtgctaaaatggtaggggtgctgagtaacgtttacttggaatggttagtggaaagtgatcctctaccaataaacagcatgttctaaaaaactaattaataggccagctgtgtaggatttgtcaacgtttctttttgctacctgagcagaggatttgtgggaatttgttttttacactctatagtaaattggagggtccagtttgtgtttactatgctccatgatgttgcttcgtgttccctctgttccaaatacattgcttttgctatgcacctagattttcgctaagctagtaagctatgtaactagaaaggtcaaaatgatttagaatttggagcggagggagtagatactacttttgcatcctgcaacatgtactgggagaataatttgagcggttgttttcttcctagaatctggttacaaaatttgatattcttgtgctgatttggtgtcgaggcttggtagattcttcttgccccaaaagcacaaatgcggaggctagtgctgtatgagtggatcagaaatgccaaacttttgccagtgngacttagttgacttagttgactctgcgtgacgaatctctcaacctgaaattgttgtggtcttgttatgtgcccaacaatatgc

SEQ ID NO: 1381 - DNA, 218 bp, Zea mays
  Clone ID: MRT4577_101263C.1
caactgccgaggcatattattgcaggtacgtacggtgccgccctccttggacggaccaccggtcgatcgccatgagaagagccaccgtctttctcatggcgctcgccctcgccctcgccctcatcctcatcccgccgcccacggtggcgacgccgccgccgggtcgtcttcccctcaggagaagtcgcttccttgccagcagcagcgtcgacttcccg

SEQ ID NO: 1382 - DNA, 343 bp, Zea mays
  Clone ID: MRT4577_101264C.1
tctgcctcctccggctgcatctctgcccatccgagcccaaacctcttaccacttctcagggctctggtaatccacacggcacacgccatcaacgcaggcaaggacaggttcgaactgcctgatgatccgcacacatgatccgcattacgcgtctgctgcaagagcctcacgaacctctagaaattctgcagcaatctggtgaagggccccaagggtacgcgtactcaacgtcaaaggcctccgtgccgtattcccttaccaatgtgccttcacatcaccaccaggaaatcttcctgtggccaaggtaccaacacctgggatcgctttgaaatgaggattcaca

SEQ ID NO: 1383 - DNA, 648 bp, Zea mays
  unsure (1)..(648): unsure at all n locations
  Clone ID: MRT4577_101265C.1
agttctagatcgcgagcggccgagccgtgctcgcatctaagagttccacctaccaggaggtgctgctaaagccagacaaactgcataagtatcaggatctgcctcatgtgaactcacttggtcatccgcccccatcgaccaaaaagtcctacctccaggctgttctggaagaccacggtatggaggcacgctaccctggtgaccctcgtgtgaggccagcgcgcgccttctgtgcggtctcggcgaccggctctattcgtcgccggagagatgagttgattgacacggccgtcgtctgctccttcgacggcaacagccacgaggttgacattctttccgcaggtgatatgctgagggagaagttcagcttacaacacggtcagtatcaactggtcaagcatttccctgagcaattctttatcatcttctcggaccctaggtcgaagcagtgggcgctggataggagatctgtctcatatcgtggtcgaattttccattttggggattggtctgaggacagctacgctagaaaaacaaaccttgaatntagagttaaagtccgggtcgaagggatctcggtgcactgttggggggaaagatgtggcttcaaaggccttgggcaagaagttgtgcaatccactatgtgca

SEQ ID NO: 1384 - DNA, 113 bp, Zea mays
  Clone ID: MRT4577_101266C.1
cgcacccccatcttgagtcttgtcgccgcaagcttgtgtaaggagtaaccctagcccgaggacacttaccttcgccttcagcaccacgcttacatggaggggcgcggaggcta

SEQ ID NO: 1385 - DNA, 278 bp, Zea mays
  Clone ID: MRT4577_101267C.1
ccccccctttttttttttttttttgaattacctcactaagttgcttttaaacaattaaacattccacaacctcaacttaatcacttgaaaaaaacccaaaaaaactcattcctacacccaaacattctttatttcaaaattaattcccccactccaccaaatagaatcaaaaaagatcgttcagaccccaaaaaaacattctaatttaaaccacttccagcaccccttttatttacccaacaacctaaaaccaaaacattttttttttttaaagcaaa

SEQ ID NO: 1386 - DNA, 784 bp, Zea mays
  unsure (1)..(784): unsure at all n locations
  Clone ID: MRT4577_101268C.1
ccggccggngcagacctttcccaaagtcacaatggcctcggaaagtgccatccagatcgaataccgcggtaaaaccgcaaccatcacgctcaatgctcccaaaaagctcaacgccctgggcgcaaaagaatactaccagctcgccagtgccatgaatgaggtcgcagcccgcgacgacatctgcatcaccatcctaaccggcaaaggccgcttcttcagcgcaggcgcagacgtagcttttggcgcgcagaaagacgcttcagcactagacgagcagcaaatgtatctccggagcttcgtcgcgaataacctctttataacccacgccttctacacccaccccaaaatcctcatcaccgccctcaacggccccgccgtcggcctgtccgccgctctaatcagcttctcggacttcatctacagcgccccacactccttcatcctcactcccttctcctctctcggccttgtcacagaaggtaatgcctccatcggcttcgtgcggcgcctcggtctcgcaaaagcgaatgaagccttgataatgagtaagcgcatcaccaacgaagagttgctagccacaggctttgtgaataagacgttcgatgcggggaatgtgaaggatgaaggatacagtgacaggtttttgggacaggtgctggaagaggtggaggagaggctgggggatcacttgaataggggagagtctggtgcagattaaggcgntgattcagaagccgatgcgggatgcactggataagcagggagttgaggaagtgatgggggg

SEQ ID NO: 1387 - DNA, 420 bp, Zea mays
  Clone ID: MRT4577_101269C.1
acgggccaaaattggcgggggggcccccaggggtttcacaaacgggggggggggccaaattaagcaacacccctttttagccctttttacaggggggggctaaaaaggctaagggggcccagcccctttgaagccctaaaaaatttccgggaacaaacaaatccccccccagggggttccccagaaaagaaccccccccacacaaaaggcccctaactcgaagtactggtgaaaaccaccaacctgatgatgctcgatcggggcccctgtcattttttttatgaaaaaaccaaaaaaccgcgtttgggaaggaggggggtacccccctgccaaaataaccatttggggaactttcaggacccgggggggaacttatttcaaataccggaggatcagcatgggtgacaaaacctccatggg

SEQ ID NO: 1388 - DNA, 364 bp, Zea mays
  Clone ID: MRT4577_10126C.1
attacacctggggggggccgcccaagaacagggaagccccccggccggaaggaagccgcaccaaggccgaccccacgcgcgccggccgatccctgacagcccccatgcgatgcgcgttgcccgtctctggcactgcgggtgcgggatccgttgccaatcggacgccgtccggtctcgacggcaactgcacccgctgacccgacagcgccagaccctgccccatatggcgcccccgtacgttgaaagataagccaaggaatactgcgagtctttcgcctagcggagccctggcacgaggataggatccttatcgtaccgcgctggcatatgggcacacggcgaatgaggccaagcatgttctcag

SEQ ID NO: 1389 - DNA, 344 bp, Zea mays
  Clone ID: MRT4577_101270C.1
ctgtgctctgtgaacaccctaaaaacacactcaccgagccccaacctgaagcagcggccaacttctccacccacttcctgacccacctgaaccacctcaaggtggcgtgcctcccctggcccatctagaacctgcccatgacagacgactacgccatgagctacctgcttacccacctcgagtgcttcctccgtcccgggcatcaccactatgctgtactactgattgccctccacacctgggaggagctctccacactgtcgaggccggcacctcgtctggctctaactcaccgtgctgagcctccaatgcctgcggatgcctacctgccgagcacagtggtc

SEQ ID NO: 1390 - DNA, 1332 bp, Zea mays
  Clone ID: MRT4577_101271C.1
ccggccgggaatcccagtatacttctccctcaccgcccaccgacctaatcccctcctccactttccccaccgcgaagccatgtcggagcaccccgcgtcccgcagctccgtaggaagccgcagctccgcgctgccccctcaccagcagcgccttacgcctgcgcccgacccgctcgcctccgtctggatccgccgcctccacctctcccccaacccgccgccgccgccgccgccgcggcccccacccctgcacatccgcgcgccgccgcctgcacatcaggatgccatctccaccgacgagtcccacacgacgcctccgccgccgccgctcacgctgcgcggcaccgggttcggccccttccgctggagcccgcgcccgttgctgggggcgccggccggcgcatgggacgccgccgccgccgcttccgttggggtggctcctggcggtagtgccgtcggcggcgaccaaacgatgctgtcgccgttcttccgtctcccagcgccgctgccgtcagtcgtggattttgaggaggccatgcctttgaggccgttgatcgggctcggaagccacagcggcagtggtgggtttcctggactgtcacgacagatggtcggcggcggcgacccctgtgacggctggctgtcgtccagagttgcaggtgctgcatatcctggccatgctttggacatggttcccacaagaacccttaatgatctgcgtgacagacagcatggcgcaataccagcacaaccaaatctcgcaaggcatgatcctagctctagcagccaacgtgatgaacctttctcatactggaacatggggaggttccgaagaaatactgcaacttcgtcggtcacacctttgggtgccgctcctgccaatttcggcacgaagaggaacgctgactcgaacgatttcctccctctgaagctcaggaaactaagcggggctatttagtggctgatttatgaaaaatatctggccgaccgttttttgatatgcataagaagcacaagtatgctgttacctgaaacagcatgcagtaatacttaaccacgttagggcttcagaaggctggagatggacgcatttggtggtggcaaccattgtaaattgtacgtttgctcccaaatcgttgcatttggcatcctctgacccactggcctgcatgtttgtatattttttgtgtgatatacggggagatgtcttgtgccacgtttcctccgtggcgtgtacattcaaacaaattggcatcaaacatgtagtaattttcgttctatggaattgtacgttttctgtttgcccccaaaaagaaaaaaaaaaaaaaaaaa

SEQ ID NO: 1391 - DNA, 595 bp, Zea mays
  unsure (1)..(595): unsure at all n locations
  Clone ID: MRT4577_101272C.1
gtagatgtcctaaaaacgtgtgatataacccacgggtggcgggaaatgttgtaacagcctccacggtctaaaatataggtgatagatcgaaaacattaaattggatgtttggccatggaaacgtgtgtttgattatactatggcatgcttaggctcttttgttatattgatacaatattgttgagctaagttgttttcataattgtgaacttgactattacatgttgaatccaaaaaaatattcaccattgagattggcacctaacatgtgtaggatgtgttgaaatcctttgtgctttcactagtattctaggaggctatgtctcatgccttgagtcactcgntgtcttgattcattaattctgtacttaaatcaaaatcaagataggtgataattcagaaagatcgagatgggtttgcatgtgtcaccacctcactgtatcgagactgtttccatttgcacttttggataaacttgatcaggttagtggatgatcgaaatcgatgtctttagtttctgattacttttctgcataagctacaccccggtgaaaagntagacaatgggaatgcttacaacctctcgcactcacat

SEQ ID NO: 1392 - DNA, 509 bp, Zea mays
  Clone ID: MRT4577_101273C.1
tctgtgtcaaaaggtcagtattgttatcaacttaacatatattcaggatattgagtgacattacaaatgtttaagttgtttcccaagatagaactaacttgcataccgatgctattctttgaaaactatgcgagatgctgtttttagaaaccatgcaaattcggtacaagaattgtcaacctgtgagcttagaaatctcaatagattgcagttcaaacatggtgttatgttacatggattgataatctagatatttctttacattccattctacacaaggatgatgaggttgaaaatgtgttttttaagtttccactgtccagaacttccatatcacctgcatggaaggtgtcattaaatttttgagaaatccatgaattatgaccacttcactaaatgtgtcagagctttttatggccttttatagatgcaggcatgctgcatgcactttttttgaaaagtatgagctttgcccatttcctacttaattgaagagctttctttttatt

SEQ ID NO: 1393 - DNA, 1751 bp, Zea mays
  Clone ID: MRT4577_101274C.1
gcggcggggatcgtcgctcgtccccccctcatccgcctgggcagcatcgccctcgctcgctccgcattgcccgcatcgcctccaatctcagcagaccaggtcgagtttcgcccggattttcagtgtgggaggggagtggaggtgtgacgggagcagcagaggaagcgcgccatggacccgtgcccgttcgtgcgggtgctggtcggcaacctcgcgctcagaatgccggtggcgccgccggccgccggtgctggcgcgggcgtccacccgtccacgtcgccgtgctactgcaagatccggctggggaagatgccggtccagagcgtcccggcgccgctcgtggtctccgacggcggcgagcagacgccggcgtccggggccctcgccgccgcgttccatctgtccaaggctgacctggagtggttcaacgggaagccgtcgctcttctcgtcgcgcggggaggccagcctgaaggtgtcggtctacgctggccggaaggggagtgcctgcggcgtcagctccgggcggctgcttgggaaggctacgatcgcgctcgacctcaagggcgccgaggccaagcccgccgtgctgcacagcggctggatctccatcgggaagcgatccgggaagggcagcaccgcggcgacggagctcagcctcaccgtccgcgcggagccggacccgcgattcgttttcgagttcgacggcgagccggagtgcagcccgcaggtgctgcaggtgcgcggcagcatgaagcagcccatgttcacctgcaagttcggatgccgcagcaacagcgacctgcgcaggcccgggatgcggccggagcgcgacgccgcgtcggccaaggagcgcaaggggtggtcggtgacggtgcacgacctgaagggctccgccgtggcgatggcgtccatggtcacgcccttcgtgccctcgccgggcacggaccgcgtgagccggtccaacccgggcgcgtggctcatcctccgccccgcgggcgacggcgcctgggagccctgggcgcggctcgagtgctggcgcgagcgcggcggcgccggcgcgtccgacagcctgggctaccacttcgccctcctcgtccccggcgcggaccacgccgtcgccctcgccgactcctccatcccctcgtccaacggcggcaagttcgccatcgacctgaccgccgcgcagccgctgagccggggcggcacgccggggtgcagcccgagaggcagcggcgacctgagcaactggcccctggggaactaccgcggcttcgtcatgtccgccgcggtccagggcgagggccggtgcagcaagccgacggtggaggtcggggtggcgcacatcgggtgcgccgaggacgcggcggcgttcgtagccctcgcggcggccgtggacctgagcatggacgcgtgcaggctcttctcccaccggctgaggaaggagctctcgcacctgcaggccgacctactccggtgacccaccggaccggcggcaaccgcgaatcacgagcgaattgtacagaagtagttgaggcagacgtgtgctttgttgtagtagttcgattccggtgatcaactagttgatcgtggtcaccttttcttgtgagcgctgagtgcctttgtgtggtttgatttttttggttggtcgcttcgctttagccatgtagggtgtccgcttttacggatctccgtaatttagagaattttttttttgtgatcgtgtgcagcattgacacaaccattgagaac

SEQ ID NO: 1394 - DNA, 108 bp, Zea mays
  Clone ID: MRT4577_101275C.1
ggaaactgaagctacaaaaggttccgcacttgcaacccatacagtacagcattattggaagaactcgatttggatgtagaggcataaagataacaatggtaaaccaaa

SEQ ID NO: 1395 - DNA, 114 bp, Zea mays
  Clone ID: MRT4577_101276C.1
gatataggcaccatctatactattgttcaaggtcatgttgatgtggatgaacaccgctttgatggatcaagaacaatcgatgaaatcgtgtcctgttccattggatgagataca

SEQ ID NO: 1396 - DNA, 1316 bp, Zea mays
  Clone ID: MRT4577_101277C.1
tcaacttcattttcccctactgctgatgctatgtctgaaacaaaggttgcacctatcacccagggaaatctacatgggtgaatctgacatcccaagacacaaagcggcatgatcttgcaaatgcatgtgtagtagtcacaggaggcagaggtttaagaagtgctgaaaattttaagttgttggagcagcttgcggagaaatttggtgcagcagcgggcgcgactagggctgctgttgaagcaggttatgttccaaatgaccttcagagttgcaggagaaggctgcagcagcttgaatctcagctaatggaagcgaacagaatcaaagaggaaggcaacactggaagtatccgatggaaggagaacatattagaccaagagaatgaattacagaacataaaacaagagaacgacgacctgcagacaaaggaatcagcggcttctgagaagattaaggaactctcttcccagcttactaatgcaaaatatggcatgataaatagtaacaccaaggagataatgagaaggggggcactgaagaggacgatgaacctgttgtagtagttgccaaaatatgggagaacaacaagtttgttgactatgattcatctaaggagaaggagaatgatggtgactcacaggttgatttggaatcaaacaagggggatgcaggtcttgatagcaacgggttgcactcaactaaggagaacagtggcagggcatcaccaactaaacaacaccagcagtataagaagaagtctctgctgaagagattcggtggtctgctaaaaaagaaaagcgaaaattagcataaaactgtctgatgatattctttgttctatcatttgacatattttttgtaaaccctctcagagatgctgaaagccaacttactattgagagtactatgaaacctctcgcgcagtgtgaaataaatgacagaaatgaagtgtgtgttggtgttggtgctggtgctggagacactaacataaccggtggtattatccaattgtattggagttctattcttgaaaggtgcttggatacaaacgatcaaagcttgaaggaggcttgagtcaattgaatcatctgtaagtaatttagaagaaatattgtttttgttggtgaagcgagtttgttctttcctttgggctctatttatttatgaattgataacccaacaggattgtagtttgtagccatttagatttgaatccgagctatgactgagacgaatacaacatatgcattttgtagccatgtatatctgaatcagagctctgtgattgagatgaatatggttttatgtgccgtcgc

SEQ ID NO: 1397 - DNA, 258 bp, Zea mays
  Clone ID: MRT4577_101278C.1
cagatctacaaaaaggaatgaagagtgctggagtcggcaggcagatgtacaataaatacaaaatactttactttcaatatctagaacaagataatttttgagtgcaaaaataacgtatagtgcagttcacagcatatgtggaaggaaaaagtctgataataattcaaaggatgggagggaagtggaagcttgatgtcagccgctgccatggatactgcaagtgtctactagtgattaaaggtatgcggcgtgaaattg

SEQ ID NO: 1398 - DNA, 3152 bp, Zea mays
  Clone ID: MRT4577_101279C.1
tcgcccacgcgtacgatcttacacaaatatatggcaaaaatgaaactttttttcacataatatttttttgtactgtgaggcctataattgttccatttatctattgtgtgcaattgaggacaactgtagaaatacatttatgatttatcttgtatatttattgggcatgaaaccactggttgtctctaccaaagctctgtatgcttgcgatgtctctctgtttcaaacatgcaactttgcatgtttagctgattgtattcattctggaactcagttattgggtcgatcactgttttgtcttggactcctccttcggtatggttatcaattgatgcaaacatctgaaaatcagcttgattttcccaagattatcaacttgctccagagaaaatatcttctcagggatgattttagcttgaaggttcgagctttgcagactttgggatacatacttattgcgaagcctgaatttatgctacaaaaggatatgttgaaactcatagagacagcactatcttctgaggttgattatagattaaaggtacttcacaactccttttggtttttttgtttgaaaagttaagtaaattaatccacctgttcagattcaaggacttcaaaacctctatgagtatctttgtctgtttcggtggaggctgtcggccccaaattatggtacagcgcatacggaggctaaccttccattggcagcgcacagatcatccggggcggacctataagatgtcaagtgtgtacgccccaacaacccacagatgcggctcgacgctctccatctgcatgtctctttaattatctctatatatatggatagacgacaaccttctatctatgaattatatgtcatgtctctttaattatctctatatcaatgtctacctatgtgatataagataccgtagcaacgcacgtgcacctaattagtgaatttggaagtgtgactttataaaaaaaatgagttatatgttcaagataatgttagtagtcatactatttaaagtccttttactttcttatttggatgagtcttttttcacatatcttccttcttaatgtaccattcatggttctattgatagctcaaggtcatgagaatgttgccgctgagtactacaaacaacaggtggagatgttagagggtgatagtgagatggaggcattagcatatcgtgctttcctaccggtaatgtccaaggaagaaagcgaaattgctgccaagagtaaagcgaaacctccttggctgtgtgaaattgatgacaagggtaacgttcctgttgctgctggtgctggagaaaccaacatatgaggtggtattatccaatcgtattggaattctattcttgaaaggttcttggatacaaatgatcaagttcgcgcgagtgcacttcagactgtagaagctgaactacacccaagtttaaaagaccctattacctgtggaactcaggatatagcacttgtcatggaccctcctaccattggcggcaggggcagcacaggatctactgcattttttacaacgcagtggcagacattggagacgggttcgtgtgggatgccgactcctagctctactgccacgccagacactcttcccatatgaactttttgtgaagctctatagcaaggttgagttgcacccttttggtcttcataaccttggtaacaggccaatttatgctgggaatgcactttgtactgtgaaatataccgacgaggatccttgcatgatgagtattagatcaacttcattttcccctactgctgatgctatgtctgaaacaaaggttgcacctatcacccagtaccttttttcaaaccttagggaaatctacatgggtgaatctgacatcccaagacacaaagcggcatgatcttgcaaatgcatgtgtagtagtcacaggaggcagaggtttaagaagtgctgaaaattttaagttgttggagcagcttgcggagaaatttggtgcagcagcgggcgcgactagggctgctgttgaagcaggttatgttccaaatgaccttcaggatcctcgccggtatatttttacaccatgcccacttttaagaaaatgaaaacacagagttgcaggagaaggctgcagcagcttgaatctcagctaatggaagcgaacagaatcaaagaggaaggcaacactggaagtatccgatggaaggagaacatattagaccaagagaatgaattacagaacataaaacaagagaacgacgacctgcagacaaaggaatcagcggcttctgagaagattaaggaactctcttcccagcttactaatgcaaaatatggcatgataaatagtaacaccaaggagataatgagaaggggggcactgaagaggacgatgaacctgttgtagtagttgccaaaatatgggagaacaacaagtttgttgactatgattcatctaaggagaaggagaatgatggtgactcacaggttgatttggaatcaaacaagggggatgcaggtcttgatagcaacgggttgcactcaactaaggagaacagtggcagggcatcaccaactaaacaacaccagcagtataagaagaagtctctgctgaagagattcggtggtctgctaaaaaagaaaagcgaaaattagcataaaactgtctgatgatattctttgttctatcatttgacatattttttgtaaaccctctcagagatgctgaaagccaacttactattgagagtactatgaaacctctcgcgcagtgtgaaataaatgacagaaatgaagtgtgtgttggtgttggtgctggtgctggagacactaacataaccggtggtattatccaattgtattggagttctattcttgaaaggtgcttggatacaaacgatcaaagcttgaaggaggcttgagtcaattgaatcatctgtaagtaatttagaagaaatattgtttttgttggtgaagcgagtttgttctttcctttgggctctatttatttatgaattgataacccaacaggattgtagtttgtagccatttagatttgaatccgagctatgactgagacgaatacaacatatgcattttgtagccctgtatatctgaatcagagctctgtgattgagatgatcaagttcgccagagtgcactt

SEQ ID NO: 1399 - DNA, 1618 bp, Zea mays
  unsure (1)..(1618): unsure at all n locations
  Clone ID: MRT4577_10127C.1
ttggggtacccccttgatattacgaggcccaggcctttcctcccgtctcccactcgagcgagccaccgccgccaacgttcccgccttctatcccttaaccctagccgccgccgccgccgcttaaaccctcgctgcggaaactacagcaacccccgccggcgatggtgaaggagaataagcggaagcagcctcctgccgacgcggcgccgcctccgggcgacgagggtgaggggaggagcgggcggaagggcaagaaggccaggaaggagaaggcggaggcgatactgccgtcgcagatcaagaacaaggacaagcgccgcgaggtgcacgccaagcttaagcgagagaagaaggcccagaagcgcgcgctcgcccgcgagcgccgtccaggccgcccgccgcgccgaagagctcggcgagcagccgccggagaggcaggtgccccgcacgatcgagaacaccagggagcccgatgagactgtgtgccggcccgacgaccaggagctgtttgcaggaaatgatgcggatgaattcagtgcagttctaaagcagcacataaccccgaaaatattgattacgacatgccgcttcaattcagggaggggacctgcatttattgatgagttaatgcaagtgataccgaattctcagtatgtgaaaagaggaacatatgaactcaagaaaattgtggaatatgcaaataacagggatttcacgtcacttgttgttgtccacacaaatcgaagggaacctgatgctctacttatcatcgggttacctgatggccctactgcacatttcaaactctccaaacttgttcttcggaaggacatcaagaaccacggcaatcctacgagccataaaccagagctagtactgaacaatttcactacacgccttggtcatcgtgttggaaggatgatccagtctctcttccctcaagatcccaatttccgcgggcgccgtgttgtgaccttccacaaccagcgagactacatatttttccgccatcacaggtacatcttcgagacaaaagaaaagaaggttgcttcgaaggaaaagacatctggaagcaaaagcggatctgagaagcagcaagtgatttgtcggcttcaggaatgtgggcctcgcttcaccctcaagctgctcaccttgcagcatgggaccttcgacacgaggagcggggagtacgagtgggttcacaagccggatatggatacgagcaggcggagattcttcttgtgatgccccaactccatcctgcggaacttcttttcttaaaaaaaaactttgacccctgttttgctgaagcagttttgtggaaccatcagtgagcagcaagtgatacggacttttatttttattttttattgttctggtttcggcgccagtgcgttggcggacggtccgatcctaagttctgaacagttcgtgcctccgcgattagattaattcggatgattatctttatctcgtatgtggttatctatgtacttgtagttatctatctaattatgtggaatttgttaactattgtctagaaactggtccagatctctctcctattatatatatactagtcggttaccgtgaaaaaaaaaaaaaaaaattantcaaa

SEQ ID NO: 1400 - DNA, 342 bp, Zea mays
  Clone ID: MRT4577_101280C.1
actggagggcggcacggcgaccggagtcgtgtagcgagcagcaatttatccgtgtgcagccccagactggaaagaagatgctaattaaagtgaagacgctgaccggaaaggagattgagattgacattgaacctacagacaaggtggagcgaatcaaggagcgtgtggaggagaaagagggaatccccccacaacagcagaggctcatctacagtggcaagcagatgaatgatgagaagacagcagctgattacaagattttaggtggttcagtccttcacctggtgttggctctgagaggaggaggtggtcttaggcagtgatggaccctccattttacct

SEQ ID NO: 1401 - DNA, 1328 bp, Zea mays
  unsure (1)..(1328): unsure at all n locations
  Clone ID: MRT4577_101281C.1
gcgtgcttgtttctgtcctgtcctgtgcttgccgtttctttggcttgtattgtaggtggcggtggatgaccagctctcggagttttctgaggcgaggatcggagggcgttgcgttaggtccgcagttggtgagcggcggtcggagcggtctcgcgcgcggcggggtcgttcgatgacgcaggaatcgcgctctgggagggtgggaatacctcgcgctcgcgctcaaggtgctcgattaatttactgcctgaggctgagggagggcgcgcctgtgagctgaaccgttcccgctgcactgattcctgagctcgggagatggttgggagcgtgcacgtcaatggatcggtccacggcggcaatggcacggccactccgggggtcgtgccgattgacagcaagtttgcgctgggatttggtatttctggccgcccaaccccacaaaacccccacgaaacccacccgcatttcccctgtgcagcgcgacgctgtgctggccaagtcgtctggactctggagcctgtctgcccgtcccggttcagcttgctcgcctcgcttatgagttctgagctgtgacaagaactcaggaggtggttgacgggtgaagcgatggtggggagctacgcgaacggtggcggggctgcgccggcggcggtagcggcggagaagctcgacgagctgcggctgctgctggggaagtcggacggcgacacgctgcgggtcgtcggggtgggcgccggggcgtgggggagcgtgttctgcgcgcttctgcaggacgcgtacggccggcaccgcgaccgggtgcaggtgcgcgtgtggcgccgcgccgggcgcgccgtagaccgcgccgacgccgagcgcctcttcgaggtcatcaactcccgcgaggacgtgctgcgccggctcatccgccgctgcgcctacctcaagtacgtcgaggcgcggctcggggaccgcacgctgcacgccgacgagatcctccgcgacggcttctgcctcaacatgctcgacaccccgctctgcccgctcaaggtcgtcaccaacctgcaggaggccgtttgggacgccgacatagttataaacggcctgccctccacggagaccagggaggtattcggggagatcgggaggtactggaaggagcggatcagccagccgctcataatctcgctggcaaaggggatcgaggcgtcgctcgaccctgtgccccggatcattacgcccacgcagatgatcagcaatgcaactggagttcccttggagaacattctatatcttggnagccccaacattgcttctgagattataacaaagatatgcgaatgctcgca

SEQ ID NO: 1402 - DNA, 234 bp, Zea mays
  unsure (1)..(234): unsure at all n locations
  Clone ID: MRT4577_101282C.1
cttcaacctaaggaggccaagcagccaagaggcggatggcgagagcaataggccacccgcactaaaccagagataggctcggaataagnggaagccctacaagaaaagatcctccgcgccctaggccccggtagctgcacagggaccaaggagaggcccttctacaaagcacccataccccagatagctctctaagcacagaacccaggatcgatcaaatcagagtcccaaaga

SEQ ID NO: 1403 - DNA, 333 bp, Zea mays
  Clone ID: MRT4577_101283C.1
gtgggggttggggaatggggggttttgggttgtttttttccccccccctcccctgggggggggggccgggcccacaacctttcccccccttggggttggggcgaaccttttttttggtttcaaccgggaagggttttccaaattttggaactggtccatggaccccgcggccttctggtccttcttttttggcttttggacccccttttgaacttggggggtttaatgcttttttggtggccttatttctttggccccgtccagattttttccctttgcgaaatcccaattgttttctgggggctttttttcccttccccccccttctggggc

SEQ ID NO: 1404 - DNA, 814 bp, Zea mays
  Clone ID: MRT4577_101284C.1
attttgttcactaacatttccgccggcaactgaactctgttctccttagatatgcttgtttggtggctgaagaagctgaggcagccgaccagctgtcaaaggcactaacatttcccagattgtccaagttctataattcattaggaagaaagaaaacctgcatcttccagctgtatttgctgctcgtattgcagcacaatcaaaccgtaatctgagacgtgtgatactgttttttcagacttgcaaagtgcaacagtaagctgaaacatgagatctgtcactgggccgcacattatgaacacaagatgcgcctcggatcaaaggctatttttcatctagaagctttcgtggccaagttcatgagcgtttacaaggagttcctggtggcgacatttggttgagcaaaacctcaaggcattgggttgccacccgcgaagcgaagagaggatggcagcggctatcgcactgtatcaggcagtgtcttgcctgtgtagttttgtactgaagttgtgaacgattagcttcattgtgtctgtttaaaccaccgtcaactcgggtcgcccttctgtgagttcatcgcgtccgcctgcacgtggtcgttgatgacgacacgatcagaagttgtgaacgactagtagtttttgcttggttaagaaaaaacatcctgaaaagtaaaaaagtaacagtctgtgaacggaaccgtaacaagaaaaacgaaacaagcagatgccaatcatgctattgcaatttgcaagagtcgtcccagattaaaattcaaatagctgtatccattttacactaccacagtttgatt

SEQ ID NO: 1405 - DNA, 667 bp, Zea mays
  Clone ID: MRT4577_101285C.1
aaaatagcaactgatatacttacagaacaaagccctaaaaggctatttgctgtacgccagaaattctatgaattactcgtcaattgtatcccacccgaaagtattttgaagaagttattggcagaattactgaggaagttagatgcggatctgaaacatgaaatctgtcactgggccgcacattatgaacacaagatgcgcctcggatcaaaggctatttttcatctagaagctttcgtggccaagttcatgagcgtttacaaggagttcctggtggcgacatttggttgagcaaaacctcaaggcattgggttgccacccgcgaagcgaagagaggatgccagcggctatcgcactgtatcaggcagtgtcttgcctgtgtagttttgtactgaagttgtgaacgattagcttcattgtgtctgtttaaaccaccgtcactttagttcatcgcgtccgcctgcacgtggtcgttgatgacgacacgatcagaagccgttgatgacaacatgatcagaagttgtgaacgactagtagtttttgcttggttaagaaaaaacatcctgaaaagtaaaaagtaacagtctgtgaacggaaccgtaacaagaaaaacgaaacaagcagatgccaatcatgctattgcaatttgcaagagtcgtcccagatt

SEQ ID NO: 1406 - DNA, 1785 bp, Zea mays
  unsure (1)..(1785): unsure at all n locations
  Clone ID: MRT4577_101286C.1
ctcgaggccggccggggccggccgggaaaccctcgtctcccgtctcggagcggcggagtgcgcacctatcagtcccaagttcccgccacacacctctccattcccctcccgaagtcccgatcctgtcctcaaatcccattgctctatcttctctagcggcgagtcgaggcggggaagacgagctagcggcgaggatgttgtgggtagataagtaccggccgaaaaccctagacaaggtcaccgtgcacgaccaggttgctcagaacctcaggaagtttgtgtcggagcaggattgcccgcacctgttgttctatgggccgtcggggtccgggaagaaaaccctaatcctcgcgctcatcaagcagatgttcggcgccggcgcggagaaggttaagctggagaacaagacatggaaaatcgatactggaacaaggacatttgagatagaattggcgatgttgtcaagtgctcaccatgtggagatgacccccagtgatgctggctttcaggacaggtatgttgttcaggaggtcatcaaagagatggcgaagaacaggccaattgatgccaaaggcaagagagcatttaaagtccttgtgttaaatgaggtcgacaagctctcacgagaagcccagcattccctccgcaggactatggaaaagtatagctcatcatgtagactgatcctatgctgtaacagctcctcaaaagtgacagaagctgtaagatcccgttgcttaaatgtgcgagtaaatgcacccagcgaagatcagattgtccaagttctagagttcattgggaagaaagaaaatctgcatcttccagctggatttgctgctcgtatcgccgcacaatcaaaccgtaatctgagacgtgcaattctgttttttgagacttgcaaagtgcaacaatatccatttacatcaaatcaagtggcgcctcctcttgactgggagcaatatgtgtctgaaatagcaactgatatacttacagaacaaagccctaaaaggctatttgctgtacgccagaaattctatgaattactcgtcaattgtatcccacccgaaagtattttgaagaagttgttggcagaattactgaggaagttagatgcggatctgaaacatgagatctgtcactgggccgcacattatgaacacaagatgcgcctcggatcaaaggctatttttcatctagaagctttcgtggccaagttcatgagcgtttacaaggagttcctggtggcgacatttggttgagcaaaacctcaaggcattgggttgccacccgcgaagcgaagagaggatggcagcggctatcgcactgtatcaggcagtgtcttgcctgtgtagttttgtactgaagttgtgaacgattagcttcattgtgtctgtttaaaccaccgtcaactcgggtcgcccttctgtgagttcatcgcgtccgcctgcacgtggtcgttgatgacgacacgatcagaagttgtgaacgactagtagtttttgcttggttaagaaaaaacatccaaaaaagtgaaaaagtagccggctgtgaacggacccgtaacaagaagacacgggcggcgcgggggtaagaaaagcccccgcggggggggggnnnganacagcaaaacaaagggnnnnggggcgctcggcgggnggnncggggggggggggcgggggcggaggaggagggaggcagggagaggcggggggggacaggcggaggaggggccgcccggagagagagagagaggggggaaggcaggagaaggagagagagaggggg

SEQ ID NO: 1407 - DNA, 430 bp, Zea mays
  Clone ID: MRT4577_101287C.1
tttggtctgatttatgtgcttgtctgttgatcccgttgcttatctttttgccctacttgtgttgcctgttgggataggagggagagcacagtattaggacgttggtgatgttgatgactactggtgtttcttcggggtcgggtatttagacgcatctaaatgtctcttgtaagtcttttcatacgtgttacttacgggagtacccgccggggacgggctctggcgtagcgcccgcgaattagtcggcaaaggccgacgagaagtctaaggaggattctgataagacgtccgagtgtgttaggtcagttaatgagtagtgtcataccggggaatcgtagcgattacgaagtgtacgtcggaaattctacccttcggtacctacgccactccgtacaaccacttcatcgtaccttttaagtgcgcatctagt

SEQ ID NO: 1408 - DNA, 164 bp, Zea mays
  Clone ID: MRT4577_101288C.1
cttcgacccagttcctctccaccccgtctgtcacctgcgttatcttcacccgacaggaggacaccagcgcaggggcgcttgttcttcggtcatcggactccgccgtcacgcgctgcgccctcggccgtgcctgctccgtcctgagccagcacaggtgataaagg

SEQ ID NO: 1409 - DNA, 266 bp, Zea mays
  Clone ID: MRT4577_101289C.1
ctcatcatgagggaaaaggaactttcttttgttcacattcaggactttgagggtatagtgccataaaatgtagcaaagggccccgtgggcagcatcagtgttacattgattctgaggttacagtgtctcccaccaaacatctgctgtaggccatgcggtgtatttgaagagggctttgggagaaggaagctttcctcttgctttaaaccagtatgtgcatcacatgcttacggcagacatttgctaccagtggagttctgtggagc

SEQ ID NO: 1410 - DNA, 213 bp, Zea mays
  Clone ID: MRT4577_10128C.1
ccggccgggaggaaagaacagaatacaaattccatctcaaactcggtgttgtcgttcccttggcggctattcctggtgctcacgtcgcggcgatcttggtcgacggccacgggctgtgacagaacggtgggcgaggaggatgttggggtagacggcagcgtggatggcagaacgtgggcgagggttggtggggatggagggatagatgtggaa

SEQ ID NO: 1411 - DNA, 492 bp, Zea mays
  Clone ID: MRT4577_101290C.1
ataaactctccatattattttccctggcttgttaatacaggctttgagagggtcgaggtggcctatgtctgcctacacagctttaacgacaactacgctttacctatatacactggccgtgccccagcgggccgtgcataccggaagccacgccgagcctcaacacggtcctcgcaacttcatgcctaaccggctccgacaccgaggcggtcgctcaggcttataggggcccgccgtcgctcctgtgacccgtgcgtcgccgacggcatatcaggcggtgcacccacggacagttacaccatctacactggcgtcaccgcaatcgctggtgtcacccactaaaacctcttttgttgtggccatgctaaaaatgtgtctggcgcgcgaacaactccctgtgctgttcaaccacacctgactgtgttcttggcttgggcctgtccatcagaacttgtgacggtaagcacatcttcttgtacgaactgcatatcg

SEQ ID NO: 1412 - DNA, 407 bp, Zea mays
  Clone ID: MRT4577_101291C.1
aaaaaaaataataagggggaacttgtttttttgttaaaaaagagttacaccccaagggattttaactcattttggaatgcagggcaaatttttttttttaaaatgcaacaccaacaaagggtttctttaaaaacatggggggaatcctcatggcccttggggttaacataaatgggaaccgcttttgcaacataatttgggaaacggggtctcaaggacctttgggcatcattatttggcacattattctctgggacaccccttggaatcttgtctttgcttaaaaatactttaaaagcttctgacaccttcctcattttaactatgatacttccacccttggcgaaaaaacaaccaacttggttttcaaaaaccatcaaactacaccttggaagaccttctttttt

SEQ ID NO: 1413 - DNA, 610 bp, Zea mays
  Clone ID: MRT4577_101292C.1
cggggtattatactagctttatttgccatgcactcgtattcaccatagtcattcatgcatctaatattccaatggttatggttaactttatataatagaaaccaacatttctatcctccaccttttatgtgcaataaaatttattttcagaagcttttgaagtatatgctctaaacttctagatttagaaaaggaaaattcaaggcagtagaggaatcttaattggacagattgtaagtccatgtgcctggtgtttcattctatgcctatacgtcttctcaagtataaggctattgattagttataatctatttgaccgctacttatgtctacaaattttagctaatttaattccaaccaactattgtgaaacgaaatccatgtaatgaccatttactgctactatgtcatgttttgaggttttttattggcaaaatgaattcacctcatccctggttagcattagaaagttgaagcaaacatcaagtttgtgcttgtttgacacagttcacaagttctgaacctttttgcatccctttaatcacaaatatattcatcactttctgtctttctaaattggttattctgtaagttgaccatgttttatctc

SEQ ID NO: 1414 - DNA, 132 bp, Zea mays
  unsure (1)..(132): unsure at all n locations
  Clone ID: MRT4577_101293C.1
aagcctactaagccagcgccagataacgggtgcatgcagctagctagctaaccatgccgcctctccctcttgcatttctcttgtggtgctcgtggctctggccacggtggcgtctgcgcagctgnccccgac

SEQ ID NO: 1415 - DNA, 149 bp, Zea mays
  Clone ID: MRT4577_101294C.1
atggcgctgctctagctatatacctcttatcagcttgcccagcaacctgcaattttttaagagtcatcagcagtaatgacctagtctgcctttgatccaaagcacgatgtagttttcaacgatgcactaaacaggacaacaaagaacct

SEQ ID NO: 1416 - DNA, 384 bp, Zea mays
  Clone ID: MRT4577_101295C.1
ggaatatggggctgtttttttcatttgtttcagttgcctccaacaatacaaatcgggggtttggaataattttgcccaaaaagcttttgcccccataactgcggatcattgctttaaaaacaaccggccctcccttggtgctaaaaaaggggaacccaaattttatttttggaggtggtgggagggggaatgtacctccctttggtttcaactgccaccaaaacacagcggggggggcaatcattacagtttcacatgaatcaaccgtttttaaaacaccctggggggaaaaaaaagcaacaactgcattgccttttaaaaactacaacttgcaaaatgtttcactggaattcgatgaaataaaagttgcattgcattttgact

SEQ ID NO: 1417 - DNA, 1190 bp, Zea mays
  unsure (1)..(1190): unsure at all n locations
  Clone ID: MRT4577_101296C.1
cattgaggccctcgaggccggccgggccaccaaccgaaacctgcagtcgggtcatctcgtccacgaaacgtacggacttcgggcatcggccccaacgccagcggcaccgcacccgcaccaccaagctcgtcggcgacatgaatccgcccgcagcagccgcgtccaccggcgcaggaggccacgccgcggcgcctgcggcagccccggagtacgtgcactacccgaggctctcgccagaggaggtggccccgcccccgcccccgccttatcacgccgccaccgccgcgccgtccgcctacggaggcaacccctacatctactcccccgccggcggcgccgccacctccccgaagaatacgatggactccgtgaaggacgtgctcggcaagatggggaagaggtttggcgaggcggcccgcaagaccgagaccatcaccggcaatttctggcagcacttgaaaactggaccaagcattactgatgcagcaatgagcaggatctcacaggtcaccaaagtcattgcagaaggtggatatgacaaaattttccatcaaacttttgaggtcgcccctggtgaaaagctcaagaagccatatgcatgttatctgtcaacctcggctggtcctgttatgggtgtgctttacctgtccaatgtaaaactggcattttgtagtgataacccacttgcataccaggttggagacaaaactgagtggagttactacaaggtggtcatcccccttgctcaactgcgatcaattaattcatcaacaagcagaacaaatgcagcagagaaatacattcaggtggtttctgttgataaccatgagttttggtttatgggcttcgtttactatgacagtgcggtgaagaatctgcaggaagcacttcaggaggctcagaatttacgtgcttagtgatgttcatggattggaactagcatgtcttatacattacagttgtgatatactgttttcccgtcagtttcgactgtttgtccagatttagtttgcgtaggtatcagctgtttctgtgttttgtactgacttaaaccgatgcggttcaatatgtgacgtgcatcctttcatggttgttctctgctatgatgagcccatttgcttcgagcagtaacaatgggtgtgcctcttctgagtnttaaatccgaccacagtgatttctataggtcttga

SEQ ID NO: 1418 - DNA, 374 bp, Zea mays
  Clone ID: MRT4577_101297C.1
tcggtggattcgcctgccgcgcagagttcactcgcgcagctctcgccccctcgctgtacgagactattgggccgccagagctggagactgcttacgccaggggccgaggacttctctgatcccttccccggggacgagcagccgccggcctgtgaagccgtctacagcgagccgtaatactggctatgagtgatcgaacctcgctacccgaatgctgtgctgagtgatgacctgaggaacggtcatatgcagctgggcctgaactccatcaacatagctttctacaagtgcccggggattggccgaacaaaagagaaaagaaaccactgattccattccttcgcgacgactacgatgctgaagatgaggtgctt

SEQ ID NO: 1419 - DNA, 365 bp, Zea mays
  Clone ID: MRT4577_101298C.1
gacctcctcgcaccatctgattaacgcgaccaccccgcgacagccatagacacatatatgatcttctctgcactgcattggttcagatcgcagagctaggtgagaaagggacgggggatgccgtcgagggcgtggtccgacatcttctgcccgggttcgcaagcgcacataggggctactcgagtctgcattcgcgcaccgccgctcttccgacggcgcccgtcgccaggacagggctactcgagactctcttcttcctctagagtaccatacttgccagcagttttagatccagaaatagtagctgcattaacagattcttgggatctgcgctggactttgcgtgctcatggtcctttagcgct

SEQ ID NO: 1420 - DNA, 623 bp, Zea mays
  Clone ID: MRT4577_101299C.1
aagcatctctctgcccgcctctacaaataagaatcctactcagcggacaccgaaccgacgacacctatagtccccaccccctaccaacggctcgaatctgaccggcagattatgaccctgctccgcgaggccgtcatcacgctcgacttcctcgaggggatcatcttccacgaggacgacatcgccgccgagctcctcccgctctcgtcagctgggattcccgttgacgaggcccgcctcgtggtcgacgaaggcactccgaaggatgatggcctgccgcttgtcgctctccatgaagggaggcacggagatgtgtggggtccaccgtagatcggcaacacctatcgccgctccaagaagcagagccctgggaagatcgttgaccggaacgcagaatacacggcacgagccggctatcctcgcctaaccggcgaggcgatacatcgaaaccggaaatgagctcgaggattacgacaatgtcgcgaattacaatgtgcacaaggagactccacctcatctgtgggagattgtcacgggagctccgctcacataccatgattactaccgactgagtatactaccaatcacgtagtggatgctttcaacgggatcgacaacatgaa

SEQ ID NO: 1421 - DNA, 696 bp, Zea mays
  Clone ID: MRT4577_10129C.1
tagggggacatttttttttttttcattcaaacaagcacataaatagtttacagtggcgcgttcggctaaggcatgctttttggtccaatggatttggcgatttgcgaattattattagctgcgtctggctgctaacatgcgattatttttagagtaaatcggacaccggtacagagagtcacagaccacgaagccagtcatccagagcaaaacaccattgcagccagtcatcccgcccgtacagcgcctgttcttctacaacagggccgatctgctcgacgtctccgacttcacgctgggcgagctgccacggttcagggactccctcgccgccgcgctacaccacttctacccgttggcggggaagctaacgtgcgagctggtcgacgaggagggcgccgcaccgccggagggaccgagggaccaggagcgccgggaggaggagggatcgagggagcagggagcgccgggtggatggagcagccgagcagggagccagccagccagggaccaccgggatgagggagcagccgagcagggagcaccgggaggagggagcagccgagtgccgcgcccgagaccgagtcgccgacgccgcgagacagagagccgcggccgccgcacgaagacgcaggtgggagggaggagagtgcgttagggttagggttcccgcggcgggcgccttgagcgccgcac

SEQ ID NO: 1422 - DNA, 423 bp, Zea mays
  Clone ID: MRT4577_1012C.1
gggcgcgctggtcgacctgcagcggtccaaggtggcggtgcagaaggccaaggacgaggccggcgtcgacacgtggctcacggcggctaggctcgacggcgactcgtgcctgagcgactgccagaaggtggagggcgcgtcgtgagatgctgcatagtcaacaagatcggctatcgcttcatgatgtgctacggtgatacgtggttccgccaatcgcctatatgagccacattcgttcatgtcagctacactgagctgttaccacaggattatagatggtgcaatctctgctgaatttgtgaaagcattcattggctacatcgagaacccgacttcgatgctgctgtgaagttaggatcgatgacctaacacaattcttgtcaagttgtttaaataaccattccacccaaaagcggtgttttc

SEQ ID NO: 1423 - DNA, 377 bp, Zea mays
  Clone ID: MRT4577_101300C.1
gcactgaagaagtgagatgctcaacagtaccaacaccttcaagaagcatagcattttcaactcttaacctgcaatccagtagcatgaaacagaaaaattattgtgaaaatgcatgtgcttgaaaagagaagttcgtgttactagtttaatatgccatcacatctagcagttagaaaagggccaaaaagagttctttgacaatgcttaaccaccaagttactggtaacattttgctatgcatctacatgttccaatcgttgtatttgtaactgttagcgtaactgtgtatttctatttctctcctgtaatgggccttggcccacatactcagctatattaatatattcccaacccacattagggttagggttttcatt

SEQ ID NO: 1424 - DNA, 562 bp, Zea mays
  Clone ID: MRT4577_101301C.1
tcgagcggccgcccgggcaggtacaagctttttttttttttttttttttttttttttttatttttttttttttttttttttttttttttttttttttttttttttttttttaaaaatggtcttttttatttttgggaagccacaaacatcatcccaaaaaacctcattatggaaccataacccaaaagcaatctaaaagagggcccccccaatgaggggggggggggagaaccctgggggggttgccaaagcaaggggggggaagggcagcaatgggggcagatggaaaacggggccagcggtaggcccaccgggcagggagaaaggcaacaaccggtgctgggtcaaaaaggcaacagggctcacaaaaactagctggctgaatgggggaagccgttcgctgttgtaaaaaaacagcaaagttcaaagctgccagttgattgaaaggaaaaaattgctggggggaggcaacaactacctggctgaaagggagttgttgttgcaaataagcagcaaagctcaatgcaacccgttgggtgaaaggaaaaaactgatgttgctg

SEQ ID NO: 1425 - DNA, 139 bp, Zea mays
  Clone ID: MRT4577_101302C.1
gggccctactatgagaccagctaaacgagacaaatcctgcatttcgcacctggaatttattacaaacccactagaattaccaaaagacccatatcacctgattaaccgcgtccaacgctggggcaaacaaaaaggacga

SEQ ID NO: 1426 - DNA, 273 bp, Zea mays
  Clone ID: MRT4577_101303C.1
tcgagcggccgcccgggcaggtacatattctgagacttcctaaggctagtgcaaaactgtagcaatgatgatcagatttcccgtcggacatcgcatggtttatatgacggccttggactcactgtggacattcaccgctaacacccttaaccgaaagttgtacttctctattaccccggacggaagatatacttgtattttgagggtcaaaaagcccctgttccgtaagcaagccaaagcaacatatcccaggaaaacagcatctttggggca

SEQ ID NO: 1427 - DNA, 254 bp, Zea mays
  Clone ID: MRT4577_101304C.1
tatgtgacttaggaagtccgtagtgtctcattgcagataatttttagcttagggcatggtggctatgtcggttgctctcctatcgagtcggagacgtctgccgcaaaaatgctctgccagatcatcggtcaggcaaataagtatcagagcttgatcccactatttgtatataatggaactggagctactggagcaacactgtatatcttgcgtctggcattgttcagtccagatgtctgtagggacagagataa

SEQ ID NO: 1428 - DNA, 280 bp, Zea mays
  unsure (1)..(280): unsure at all n locations
  Clone ID: MRT4577_101305C.1
agcaaggaaccactagagacaacccacgcgcccgctcgaaaaggaacccgaagccaggccagcgggcaacaaaagaagggcggggaagngccacacgacacgaagcagccaaaccgacacaaaaggacacagaacacgggaacccaacacgacaggaagagaaaaagcgagcccgacacaaaagggcggacgaacaccaacgaaccccgagaccaaaaccaagaacggccgcaccaaaaaccagaggaagagcaaccgggacccccacaaaaaacgcaag

SEQ ID NO: 1429 - DNA, 3125 bp, Zea mays
  Clone ID: MRT4577_101306C.1
ccgcacgtgcaaaatttgtatacgcggtctccggcggggatacttactacttcacgatctggtccaaagccccaactcaaatttacatccaggccattcgccggagatggcgtcggagctgacgtaccgcggcggcagcgtggcgccaggctccgcctccaacggtggggaatactccccgaagccctccaagccgctctcctggctcgcccgcgccgcgcgctacgccgccgccgagcaccgccccgtcttcgccctcgccggcatgctcttcgctgccgctatcttcaccttctcttccccctccaccttatctccgtccgaacccgccgcgtcggtcggcttcaaccaccttgccgtcagcgggcacccgtccttccgggagtccgtcggcgggaaggttcccctggggctgcgtcggcgcgcgctgcgggtgctcgtgacgggcggcgccgggttcgtggggagccacctggtggaccggctgttggagcgcggcgacagcgtgattgtggtggataacttcttcacggggcgcaagggcaacgtggcgcaccatctccagaaccccaggattcgaggttggatccggccacgacgtcgtcgagcccatactgctgcgagcccgggcagatctagccaccttgcctggcgagccagccccgtgcactacaagtacgtccccatcaagatgcatcaagagagcatggcgtcttgggacactgaacatgtcttgggctgccggcttgtcgctaccgccaggtgcctacttactggcaatcgccggtagtggggggggatcccctccagcacccctcaggtggaaacctattggggcaatgtcaaccctataggtgtcaggagctgctatgatgagggaaagcgtacagctgaaacattaaccatggactaccatcgtggtgccaaccttgaggtaaggattgcccggatctttaacacatatggtcctcgcatgtgcattgatgacggccgtgttgtcagtaatttcgttgctcaggcgctgaggaaggagcctttgacagtctatggtgatggcaagcagactaggagctttcaatatgtctcagatttggtggaagggctgatgaagctcatggaaggggagcacattgggccgttcaacctcggcaaccctggagaattcagcatgctggagctggctaaggtggtccaggacaccatcgacccagaggcgcacatcgagttccgtccgaacaccgcagatgatccgcacaagcgcaagcctgacatcagccgcgcgaaagagctcctcggctgggagcccaaggttcccctccgtgagggccttccccgcatggtcactgacttccgcaaacgtatcttcggggaccaggaagggtccaccgagtcagctggtggcctttcttaagtgctcaaaaacttgttgaagtgacacgtttgtatggtatatgacttgatacagttttggcgctgtgctctatacgtagttgttatatagggatataaatgtttgttaaagtacggaaaatagcctggcacgctatactatgtaacgacgtaccattttgtaatgtcattgttaacgggttatccagaatgctaatagcgttataatcttacattacatatatctgagcatgagtttgaatctgcaccagacgggaatgattggtcatacataactttgacaagcataataagacctctatattacaaaccgcaggtcatcattcctttatttgccatggttgaagaaagcaggcgcccatctgatccgggaccgagacggcgattctatctttcacatctccgcgtggtgatgcgtccggccggcaagcccgcagaggaagccctggcgccgccgagggcgccccttgttgtgtgtgcactttgccgtccacggtgccgtggccttcgatggacttggccggcgctggcgccagcttcctggtcatatggcgttcctccacggcccagctccggctgcggtggttgagccaggacacgatgtcggagaagatggcctccacgttctcgtcgggctccccggcggtgaggccgtgccacatccccgggtacagcttgatggtcttgtcggcgctggccgaacgctcgtacagcgcgcggctcacctccgggtccgtcaccgtgtcggcctcgccgtgcaggacgaagaacggcagcgtcacctgtgacaagctgtcttctatgtacatgctggtcctgagcatctccaacgcagtcttgagccgcggcttgtcctggtagatcagctggttcctcctgatcttttcacgcttgacggggtccttgaaggcggcgtcgatgacgtcctgcttggtgggcacgatcttccacctggggatcacgtcctccacctgcgtcaggagcgtgatcaccagagggtgcggcttcaccttctccgatatcttgcacatgggcgccacgaggacggcgccgtcccagaaggcggggtcctcggtgtgcagcagcagcgccaccgcgccacccatggactcgccgtacaggaaccggctcttgccccggtactcctcaagctcgcagacggacttgaagaaatggccgcagtcgtcgacgaggcggcggaaactgcggatgtagcagcgcgcgcccatcgacttgccgtggccctcgtagtccatcccgaacacgccgtacccggccgccgccagccgcacgccgcattctctcatgaagccactgcactccatgccgtagccgtggcagaggaagacgagcgccttgggcgatgcggcagcgggcagccagccgcaggtgaagagctgcacgcctctcgagctccgcacgtactcctcgtggtattcgacctccatgtccgcgcgcgcgcgcgccaggcgtggccgccgaagggtgcagagatccaggaggagggctgcacactacagcgccggcgctggtgaggctcgtatcgtacgtggtgtgagcgaagaagaagcgaggcaggcggcgagaggcgacggtgaggcgagatagttggggatacggcaagggaattaacgagcgcgggaccccccgccgctttggattgggacttgggaacgcggccgcacctccgttcctgtcctggcctcgtgccgaat

SEQ ID NO: 1430 - DNA, 318 bp, Zea mays
  Clone ID: MRT4577_101307C.1
gagggaaaaaacgggttgggttaaataaacgggtccccaaacaagaactaattgaagggcgcaccgctgatcattgaacgaatgaattgttttaacagcaaaagggggcctttgggctgggcactttttttcagttttgacccttttttgatacaggggggtggggaatggaatcagatttgtccaagaagaacagcactttttttacttccccattttactaagtttacacaactgtcccatttccgccaacttttattttttctttccacctttttacactaattccgaccaacaggttaggtggcctatttattt

SEQ ID NO: 1431 - DNA, 699 bp, Zea mays
  Clone ID: MRT4577_101308C.1
tgggaccctccgagccggccgggcacactttttcttcctctccttcttctcgtatagaacaacgacaatatcccccagtcagaagctcttctccgacttgtccaacatgcacgacaacctctctgtcatcaacgagatccttacttactgcaaccttgacgacaccgaccgcatcctcaacgacctcaaggaggccctgctggcctcgtacttctcccccacaatctcaattccggatctatctagacaatccgcgaggagatccgcgacgggaaactgaagtctgccgccaacataaaggccgccctgaaaacctgcatcccgaaactgctgacgagcaagggcacccactcgaagatcactctcagattcacgtaatcccgctgtcatcatgttctggggattcgaataggacgaggaaatacgaccatctgtatggaagcttgcttacacggcgtaagaacgaaggcgtcccagcattgacttggcagatgctgataccttacagagcagcagctacgggagcaactagaagtttgggctgagagaactggcctcagagagtggccttgaccactcgcacaaaaggtacagactccagcatttctttcgcatgcagtaaagcgcgtgaatcgtgaaagatttgatgaggttctatgtgatacatcaagaagacttcatacaaattatgggttgatg

SEQ ID NO: 1432 - DNA, 359 bp, Zea mays
  Clone ID: MRT4577_101309C.1
attcttgacctctgagtcaacagagtgatggcatcgatgcccggatggccaggatcgcgagaaatggtggacgaactatcatgacagaaaaaagaactgccggcaaaattctgtccaacttgagcttgttcggttacttttattatatatggatgggatgaaattgaaaaaaaaaaaaaaaataaaaaaaattgaaatgcaaaaaaagaaggcagagaaatgcctggaaaactttaaaattgagaatatcaactaaaaaatggtccggaggctaattactgcataatggggggggccccgccttttggggctgtctttgcacacgttttaaattcatgaagaggttcattaggggggac

SEQ ID NO: 1433 - DNA, 182 bp, Zea mays
  Clone ID: MRT4577_10130C.1
aaaaggtatggacatattattcaaatgttgtcgattaaaaagcgtttacaggtggtgataacgttgctacattcaaattgggtgttaaatgcctagaaagccaaacatttttcttttcaggaaggattccattggcgttttacacatttttgttgcctttgatacataaacagcacaaatgg

SEQ ID NO: 1434 - DNA, 357 bp, Zea mays
  Clone ID: MRT4577_101310C.1
accggttctcggattaccgactcgtcccactcgctcgtcgtacccctacggttctgctccggcttcgtgaggttctccgtggttgggtttctggggtggtccgatcgatatgtcctctttcaatgttcactactcgcttctattttcattggactctgctgagccacgtaccaccactcgctgaacaacgccttctgcacctaccgagatgtcctatagtacatgatcctcctcgatctgcagacgcacatgttacgctgattaggattaaccatcttatacacatatgatgcaatgcggcacgccatcttagtgcatgaactgtctggagctatacgggcgcaacatctccgtcaa

SEQ ID NO: 1435 - DNA, 608 bp, Zea mays
  Clone ID: MRT4577_101311C.1
cccttctcgagttttttttttttttttttttttttttttttttttttttttttttttttttttttttttttttttttttttttttttttttttttagcaagacagggaacacccaaactgaataaaaggttaaaaagccacattaaacaactcctcgtaaatcctacaaaaaaggcccagtttcacaactaagggggttacaattttttttaaaaacgggggcaacccctacatgaggcgcccccaaacctccaaaaaatgcaaactttcaaaccccccccaaaaggggatttccaacctgcccttgttgtcataaaagttcgaaaaaaaaggtttatgccgcccactgcccgtttgccccttttccagaagcagcagcagcagcggggtgggggaaaaccccttttgctgaaaaaggtttttggggatttgcagggggcccaaaaaaacccttttgaatccccgttggggctgaaaactgatcaaaacttggaggatttggaggggggtgggtatatccagccgggccaaacacaggttggttggcccttggcccaaaggatgcaaaaccagcctgaccagttgcctgaccaaaaggaccataccct

SEQ ID NO: 1436 - DNA, 648 bp, Zea mays
  unsure (1)..(648): unsure at all n locations
  Clone ID: MRT4577_101313C.1
taaaaaataaaaaaaaaaaaaaaaaaaaaaaaaaaaaaaaaaaaaaaaaaaaaaaaaaaaaaaaaagggaaaaaaaaaaaaaaaaatttaaaaaaaaaaaaaaatttaaaaaaaaaaaaaaaacccaattggaaaaaaaaaaaaaaaaaaaaaaaaaaaggtttttcccttcccgggggggcctttaaagggggaatttttggaaatttccctccccctggggggcgtttgaactttcttttaaggggcccaatttccccttttggggggtgttttacaattccctggccggcgttttaaaaccgggggactgggaaaacnnnnnnnnnnnnnnnnnnnnnnnnnnnnnnnnnnnnnnnnnnnnnnnnnccctggggttccccaacttaatccccttggaaaaaatcccctttttgccagttggggtaattgcaaaagggccccccccgatcccccttcccaaaaatttgcccaccttaatgggaaatggcccccccctttaccgggcctttaagcccggggggggggggggttccccccagggggaccgtttcatttgccagggccctaagccccgttcttttggtttttttcccttccttttttgccactttgggcggttttccccgtaaagctttaaaagggggg

SEQ ID NO: 1437 - DNA, 2530 bp, Zea mays
  Clone ID: MRT4577_101315C.1
ttgcctaggagccttccctttctcattggcgggaatgggaaccttatggcttgttaagttcttggcttccctcttgaagccaagtccatccttaattgaggggtgtctaccaatcgtgtaggcatccctcgcaaattttagcttatcaaattcgctcttgctagtcttaagttgagcattaagactagccaattcatcattaagtttggaaattgaaactaggtattcactacaagcatcaatgtcaaaatctttacacctattacaagttgcaacaatttctacacaagatgttgatttactagctatttctaacttagcattcaaatcatcattaatgctccttaagttagaaattgtctcgtggcaagaagataattcacaagaaagcatttcatttcttttaacttctagagcatgagatttttgtgcttctacaaatttgtcatgttcttcatacaacaaatcctcttgcttttctaaaagcctattcttatcattcaaggcatcaatcaattcattaattttatctaccttggttctatctaggcccttaaataaacatgaataatctatttcatcctcatcactagattcgtcctcacttgaagaagcataagtagagtttcgagtacataccttcttctcccttgccataaggcatgtgtgacgctcgttggggaagagggatgacttgttgaaggcggtggcggcgagtccttcattgtcggagtcggaagaggagcaatccgaatcccactccttgcctagatgcgcctcgccctttgccttcttatagttcttcttcttctccctcttgttcccttgatcctgatcactatcattgtcgggacagttagcaataaaatgaccaagcttaccacatttgaagcatgagcgcttcccctttgtcttggtcttgcttggctgccccttgcgaccttttagcgccgtcattgtaaaatttctagcatcatttaaccatcctaatggagtaaatacccatcgggtatcgggtcgcgggtacccattgccatctctagtcttgaatctcttgatgatgagagccatctcttcatcattaagtccggccgcctcaatttgtgccaccttgctaggtagcgtctccttgcttcttgttgccttgagagtaagaggttgaggctcattgattggaccattcaatgcgccgtccacgtatgttgcttccttgataatcattcgctcgctcacgaactttccaagtatctcctcgggcgtcatcttggtgtacctaggattctcacgaatattgtttacaagatgaggatcaaggacagtaaaagaccttagcattaggcggacgatgtcgtggtccgtccatcgcgtgcttccgtagcttcttatcttgttgacaagggtcttgagccggttgtaggtttggttggtaagaagaattccacagagaacaagagcatcgacagcgtccatatccgaaatcaaaacaaaacatttgaacaccatggctttgttcttcatctagacacaattttctttgggctagcccctagcagttggtttccaggcgtatgtatgcaggcaccatcagaggacctgatcgttgctggggaagaagagcttccagtagagcagctcattccacgtgtccggcacgccggggaggcaccagtgcgtgcagtcggcgtagctcctggggtcggcgcgctgctcggccgtcggttccacccactgcttcttgtaggtctgcgtgtgcgcgtcccggcggtactcggacagccgcgtgatattgaccagcccgacgggcacccgcgacgtggccagcacctcctccgtcgcgcgcagcatctcctggctcgtgccgccacggtaggacgaggcggcgctgatcggcgacgtctggttgtagcagttgccgctgccctccgcgtcgtcgtcgccccacgcccttccgtccgtgtgcgtcggcgaagcggtgacgaagaacacccgcgacttgccggggtccacgttgcgctccagccaccggaccacctggtgcagcaccagccggtaggcctcctccgacttcatctccacgatgtccttgctcgggtcgttgtcggcgcccctcaggatctggattttgtccccggcgacccaccagaggtaggagttgaagacgaggacgtcggcgcccttccagaagctgtagtgcctgtccatgggcgcgccgcggatgaggcggtcgtcggcggagtgcaccacggcgtcgtcggagttggactcggccagcatcggcgcccagtagaactcgatggtggcgtcgtagttcttcgcccggaagacgctcagcgagtccaccgtctcgaacgacttggcgccgtcggggatggcccggtgcaggaggcagaggagggacacgtactgcccccggttcagcgagtcacccacgaacagcatccgcttcccccgcagggactccagcgtcagcgtcgcgttgaagctgggcagcgagcagccccgcggctgccagcgccagctctggtacgcc

SEQ ID NO: 1438 - DNA, 164 bp, Zea mays
  Clone ID: MRT4577_101316C.1
gacccacgcgtccttcaaatcggaggcccttgctctcccaattctttcgcgacccctctccgcattcgggagcatgtttaagccgacggcgtcgcacacaccagcgcacactccgaaaacgccgtcgacgcaacagactcccaaccaaggtggactaaaacaca

SEQ ID NO: 1439 - DNA, 375 bp, Zea mays
  Clone ID: MRT4577_101318C.1
agcaccctcccgtacgcacgctcggaattcggttcgagcacgggggcgaccttctttctcaccatcgaggccctcttcatcaccaacaagatctcatgggagttcgacatcaccatcaaattagccggaggggacactgtgatgggcacctaccaggtcttgcaccaaattgctccgacacgagaggatgcatgtactctatcgcctggggctagttcaatgtggagactacactatgcatttgccggaccaaatcataaggccaaagttactagcaatggagacactttcattatctacttgaaaaatataactgtgaccttcatatataatacgataactgcttgattagttgtgttctttctgtactatgga

SEQ ID NO: 1440 - DNA, 140 bp, Zea mays
  Clone ID: MRT4577_101319C.1
gccggccgtttcgaaactagagccagccagccagccagtttcccgcttgggcgccatctctctagagcttcgtaccctccaagagagatccggtgtggcccaataaatacccgggttactacagagtcggagatgtatgg

SEQ ID NO: 1441 - DNA, 162 bp, Zea mays
  Clone ID: MRT4577_10131C.1
gaatggattaacgagattcccactgtccctgtctactatccagcgaaaccaagcccgatccagactccgccgccgaggaccaggacgaccagaagcaagagcagccgccgctgccgcccgtatgaatcaaacccgattccttgcttgtactagctgctactg

SEQ ID NO: 1442 - DNA, 761 bp, Zea mays
  Clone ID: MRT4577_101320C.1
ttgggtacctcgaggccggccgggactctgcaggtaactgactccacacttcacagcgcagcgcaggcgcagcacacacccatgacccatccttccttctcatggctttggctttgctctgctctgctttgcttttggctgctagtaggtctttgcgctgttcttgaggccgaagaaggagcacaagtaccgggtgtactggaacgcgtaccaccactcggtggggtacacggtcatcgtgctgggcgtcgtcaacgtcttcaagggcatggccatcctggacgtggagcggaggtggaggacgggctacgtcgccgccgtctccgtgctggccgccgtcgccgtggcgctggaggccgtcacgtggggcgtcgtgctgcggcgccggaagcaggaggaaaagacctccaacgccggccgcttgccgctgtctatgtaatatatatatatatacctcatcgtcgtcgtcgtcgggggcgtctcactatatatctatctgatctgatctgatcttcagagtagtaggccttaacgatgggttgggttagctagctagtgtgtgtatcttcattggtatggtaggtgtctctggtgtgtgtgtgtatactgcacgttcgtatactggagatgagtgagtgtgataaaaaaaaaaaaaaaaaaaaaaaaaaaaaaaaaaaaaaaaaaaaaaaaaaaaaaaaaataaaaaaaaaaaaaaaaaaaaaaaaaaaaaaaaaaaaaaaaaggggggtttgctaacaggg

SEQ ID NO: 1443 - DNA, 387 bp, Zea mays
  Clone ID: MRT4577_101321C.1
gggctgcccatggtggggccgccgtctacagcggcgcaggacgtggcgccgtccaccgacgccacctcggcgggctcgaagcgtccggcctcggaccacgcggcgcgcccgacctcgcagaggcggaagtcgtagctcccgttctccagtgcgtcggcgcgcgagaacaccagcggcgcggacgtcttgaggtcgtagcaagagatgagcacgggcttgatggtgtcccgcagggtgagctcctggccgaacgccggcttcattgccgacttcagcgccgacgttggcgcggtcaggggccgtttcttgcccgggcgaaacatggacgttgacgaggaggccacctggcgctacaaaacatgcgccgcgtgtgatccgtgaccagcc

SEQ ID NO: 1444 - DNA, 328 bp, Zea mays
  Clone ID: MRT4577_101322C.1
atggttccatgaatatgggaaaaggtaggggccaaggacctcatgggactggcatcgcgcctgccaattggcgaaggactcgggcctggtaacctctcggctctagtacaggaaacaggtatatctcacatcattgattgaagactgaaaaaacaagcagttatctcaatagggcagagtgctgatgcgtgacgccagaagtcgcgagctcgaaccccgctttcgacgtgcgatctgtaacttataaagtggcatgggccataaacacgagagcctttgacaattcatttggggtatatcaaataacggaattggaaggtgctcggtc

SEQ ID NO: 1445 - DNA, 956 bp, Zea mays
  Clone ID: MRT4577_101323C.1
gggcatgccatgtcgatcggcgttgtttaatctttctactttgtcagagatcagagtaaatttaatcgcgttgcatcttcagtttacattccccctgtcactgcagacagtagaagattacctctgctctagctttctggacctgatagattactaataactagtaggatcagtactagccagagaccaagatgctgtaaactaggagtggtgtttgtacggccttctttggaagcttctttttcctgctaccaagttctgaaacagatccactcctgcattttgtgcagatgaaagcttaagatttcaactgatgctgactactagtaccagtaccaccatgcttggagctatagctcctcctactctattaggacaataagagctacagtaatttcacatcgctaatcctctgccataggaggatgcatgcttccattgcaggctctgaaataatagattgacttaacccgagcttccaaaggggatccttccacatgttccccagtagaatgtcatctgtcctacacgcattcagataaagaaccacaagtgagttgacacagttttggaaggctgctgaaacacagtttgtcagagaaagaaccacgagtgattagtaggactggtccttgtctaactgcactctggctgcctttgaaagtacagaaccaagctaaagaagacaggtgcctgctaggcctaatatataaccggcctcctgactctcttggaaaaggctaatctgaccgagctttgcaccatgggagaataatgcagagtcaaaacaagatgagctttgcaccatcagaccatcttgatcgacgatcaaacacaaaccaattggagaccatagtcgtatagggcctgatccggccctagctagcaaatcaagctagccaggtgcaggcagcagggctaatgcgtactcgagctcggcccggccggcctcgagg

SEQ ID NO: 1446 - DNA, 803 bp, Zea mays
  unsure (1)..(803): unsure at all n locations
  Clone ID: MRT4577_101324C.1
aagtgcccctaagatttcgctagccaaattaattttgcttcttcacccggcgcccgtagccgagatccttggcggcggcgacccgacctgacgttcgcccctgcgccaatcttgacggtgaccaacccatccaggatggcgatgcgtcagtgagtggggaggacgagggggccgcgagtcgtcggctgggaaacgcaatctttccccgcatgcccatggcaaacagctgaagcgcctgcggatctatcccttgcgactggagctgaaccttggaatcatccaccctcacaatttctaggacaagatttgagctagggccctagttgtggaaatcattcaaggagatctatgacgaggtgctgcaagctgtattgctctgcaacagccaggagtgcggccaacaagagcataaacttaagcgaaatttcctctctagctatgtaaaatagaccccttttcctgttagttgtgaactggtctcttcgtattttgtagtgatcctacaacattcagatggaccagacaaaatgctgcttctttgtttggttcatactgtaccaggggttcccaggtcagaatctatggagaaaattgtcttctgtggatagtggtgatgcaggcttgcaatggctatagtctaatctgtatcctactatatgatacagtgcanggagatgttaactacatcattgatcatgctgagattgatgntgtcttcatataagacaaaaaaataaagagacactatccccaaacagcaaggctgctaataggctaaaagcgttggtggcattcactttcgc

SEQ ID NO: 1447 - DNA, 292 bp, Zea mays
  Clone ID: MRT4577_101325C.1
gagctcacttgtcggcgggcgccctttattttttttttgggtttttttctctttaaacaccgcaaagaccaatctaccgcgggcccacaaagagctggttaatcaaaatatgaatggcgtgttccacttggacatgcaagcaacccaagcaactggttattcagtgctgctgcccatttacagaatttgtttattcacagaggaggccatttgatttgggtataacccacacgagatatgtactttcgacagggccatgcaacacgtctatatgatgaatcccttcgccttt

SEQ ID NO: 1448 - DNA, 414 bp, Zea mays
  Clone ID: MRT4577_101326C.1
tcgttttctttgagggttgctctaggaccttgtggtgatcagagtgtaacatccggaatcgggaatgccaacacagctggcagaccttactcttatacattggactatcacacatactaggctgtctctgacataaccaacgtgcgtgtcataaggctgccaacaatggactaccttgacaacttgcatgcacaggactacatgacggcgcatggcgaggctattgtgttataataaaatgctgataaagcgtatctcgccaaaccctttaaaatggacatcattgatcatgagacgaaacgagcattagtcgcgacaagaagaagggctttctgaagctgatgctgggcaccctcatgacaagaagggaatagccatgcctgattctgtggactcaaaatacaaaagcatgct

SEQ ID NO: 1449 - DNA, 267 bp, Zea mays
  Clone ID: MRT4577_101327C.1
atcgcacacgtaattgattttgcatgtaaacacgggggaggggacaaactttccaacaatgttgaaaggaaagggggaaaaacaaacagtttccattgtacaaaaaagggactttttttccatacgggttttccatttttgaaggaaaacaaaaacaaaaagggccggtacaaacagggatttgttccatttccctaaagagtagggatcccccccgagcgaatttttttgtgggccccgcacgcaacaccgggttgtttttccccc

SEQ ID NO: 1450 - DNA, 568 bp, Zea mays
  Clone ID: MRT4577_101328C.1
cctcgaggccggccgggacctaagatccgatctccctctctctcccaataattacagcctcgccgactctgcctacgagatcagcaccacccaaggcgcatccgagccattggcgcgctaatgccggcctctgtcgatgcaatgtcggcccccggagacgccgcgggaggtggagtacgtgcgtatgatctcctcaaaggaactccgatctcatgtgtacgacgacgacctctggaactccatctccgatgatgagcacgacggaacgccctgcgtcccccaccacgcggggggtgacctcccgattctcaccctgcggcggcaggatgccaccgacgccttcgccggctaccacccgccctcggcgcgtccgctcctccgccgattcttcgttggtcgcctctccgactacgacgtctcacccgggtccgacgactaacgtcgcctcctcgggaagctattatcagggcacctcttcgaaagtgaaggccccagccacaacgtacacgtggtcgtgacggctgtcctcatttacgtggctctctatcttctgctactctgaaggaga

SEQ ID NO: 1451 - DNA, 279 bp, Zea mays
  unsure (1)..(279): unsure at all n locations
  Clone ID: MRT4577_101329C.1
tccctgngcccacatccgtctcgcggcacgttattgaacaagaccttgccgtaggtggtggtcgacctcgtagagttacgcccaaaaccttgccgccgggctccttcgggtacaacttgctacacgacacatgcttgctatgcgtaaagatcggaacaaacaacatgacgttaacggtcatctgcacaatccttaagcactcttgcgatctattactgtccaagatgagaacacttctgacttacaacgagctacactcatacaccaacttactacatg

SEQ ID NO: 1452 - DNA, 947 bp, Zea mays
  unsure (1)..(947): unsure at all n locations
  Clone ID: MRT4577_10132C.1
ccctcgaggttggccgggaccggcaaccctaaccctaacgcactctcctccctcccacctgcctctccgtgcgacgggcgcggctctttatctcgcggcgtcggcgactcggtctcgggcgcggcactcggctgctccctcctcccggtgctccctgctcggctgctccatccacccggcgctccctggtccctcggtccctccggcggcgcggcgccctcctcgtcgaccagctcgcacgttagcttccccgccaacgggtagaagtggtgtagcgcggcggcgagggagtccctgaaccgtggcagctcgcccagcgtgaagtcggagacgtcgagcaggtcggccctgtcgtagaagaacaggcgttgtacgggcgggatggccaagaaaacgaggtcgtagaacctgagcggcagcgctcgtggctgccctgccgccggtgccggcgatggcgtgacgtcaaacttctccatggcaggtgggagggcagcttgctgtttcatctccatttctctctgttctctctcttccatctcagtcaattccttgtggtatattgcaaaatttagaacttgcaatgcagcctcaacatcggatttcagaacctgcaacaagacattgacgccataatgagatcttctcgaggacaaacggctcagttatccttccaaaaaataaagtgcttgtaaaacagagaaattgcttcatttcttggtcaactttaagaaaaatcatgagcaaacatattgtggctcatccagaaaattattgatgtgggtaggttgctagtggaataaacataatacctcatgcctcagtttcatcttggcatgagctgtcgatagacgaattatggtttccagtgtccttgctgntatttggagtgtacctccaccggactgntaaaatacgcaggtgaataaatgagagctttcaacagtacc

SEQ ID NO: 1453 - DNA, 444 bp, Zea mays
  Clone ID: MRT4577_101330C.1
aaatcacgccaggtccttttcaaaccaatctttcccccttgcaagggccccttcaagggcccggggggggtcccctaaaaccaaacctgggggggggggggttaaccccgccgggaaaaacagctttctcatggccccaagggccctgaccgcatgcttggccctttggggctatgggccccgggagagggcctttcccggacaatactaggggggcccaccctgccaaacctttcccgaaagcgcggggaatttttccaccccaacatgtctttcagccttttccccccccccgctagtctgcccccgttcgttttcccccaattctccctccctttgggggcaatccccccccggaacccgcctcccttggttattaagccctctggccgcccggtccccccccatgaacccccgcccccttgaacccattgggaaaagaaa

SEQ ID NO: 1454 - DNA, 321 bp, Zea mays
  Clone ID: MRT4577_101331C.1
caacaaccaaggcaaaaacaaatgagcggaacaccgagagggcaatcaatcattgggaacacggcgggccaggcgcagttgctgcagcaatcaagtgcactccctctgcatggccaaaaaggcacgccctctgcaattctgcatgccaaaaagctacgccctctgcatgccaaaaagctacgctcatccatcaccctctcttacggaccggatttgggccagcacggtccgatacaagcccgccgtgctttagggccgtgctgggcctacattttagaacgtgagcatgatttagtccggctcgaatacaattcgtgctag

SEQ ID NO: 1455 - DNA, 278 bp, Zea mays
  unsure (1)..(278): unsure at all n locations
  Clone ID: MRT4577_101332C.1
ccgccganccggtcgaccacctcgtacattgaagtgatatgtgctgagggggagccatcggaggatgggctggcgaatgaaagctttaaataacccngctgcttcgggtgcgcttggttatcgacctgatgacgaatcgcccggccatttgagctgttacatgccaaccggtgtcaggttcagagataggtccttgtgaacacccagactgggcataggactctatcgcagttgcggaaggtcgcatggacagacttcggtcaaagtgacatgatgaa

SEQ ID NO: 1456 - DNA, 145 bp, Zea mays
  Clone ID: MRT4577_101333C.1
cccggttcacggggcaatcgcgccgggcctccatgtgggcgtggttctccgcctgcgacctgcctatcctccagcagctgtgagcgtatggtccgagtctatgtcgacggtcgtatgaaatggtgacaactcgcgacggaagtat

SEQ ID NO: 1457 - DNA, 417 bp, Zea mays
  Clone ID: MRT4577_101334C.1
tcgggacacctacttcacttccactcaccctccctcaaaaccaccacaaccaaccaaccactttatcatcatgtctggcgaatcgaagaccttctccaacgaccacgagttcgcctctgagcaaggaaagaagggaggcgccacccagcccgacgaggtctacaagccctctgagcacgacggtctcaagaaagatggttcccctgacaagcgcatgagctccgagcacggtttcggtggcgaccgcgagcgtgcctccgaggagggcaagaagggaggaaagtcttcgggctcgactgaggacgacgagtaaatctacccgctctctcctgcacacccatgtacagactattactatttgtagctagcagtccatattgtcgaagtatcgaaattcgaagttgcagtctctcatcg

SEQ ID NO: 1458 - DNA, 167 bp, Zea mays
  Clone ID: MRT4577_101335C.1
gctcatgggctctttccaaacttatcgcatgtgctgtacgagggtctgtaagacgatctgccggatggtcttcaagcagtagttccttccaagtgggactggccatcaacccaaaggcaataggatacctttatgtcaactagatcaagacctgccgaatgcccata

SEQ ID NO: 1459 - DNA, 846 bp, Zea mays
  unsure (1)..(846): unsure at all n locations
  Clone ID: MRT4577_101336C.1
accctctcttctccctccccttccccttcacctcacacaaaccaagccaagccagccacgccgcattggtaaggcggcggctgcctcgcgtgcggcgtgctggcagcctgggccgtcgcgtcattgccgccagccaggtttgtcagaatcggatccatgcatttggtgtgggatactgcaacatcagctgattaagtttcagcacgctgtccaatccaactccgttatcattgcgtgttcaatctactgaagctagaaattccgctcttggttagtctgtcttacgagacttgagattcgcattgcgcgtgttcaaaaaaaaaaaaaaaaaagagagggttctgggtacagctgcaaggaagaggaaaagagtatcttatggagaaataagtaaccattttgctctacttgctggtgatctgattaaccggatgaaccatgcccattttcagttcggttagattgagccgtgaactgtgaacacgttctatctttaaagacagaagttatccgccttcgttttcttttggaatggtcctgtaaactggcctgaattacacaaccagctgcgcgctcagcattttcagaagcttcatcacaaatctacaggactactttttccctcgctacatctggttcactttactgacattacaacgttcgttgtttcctttactgacattactctgaacggagccaaaccgatgcgagcgtgcgtgcgttcgtggggactggggaacacgatcggccaggcgaacggngtgtacgacaagcccctcgacctccagttctgggactacacggacgagaagaccatctgaaggggcagtcccttagtcatcgtca

SEQ ID NO: 1460 - DNA, 599 bp, Zea mays
  unsure (1)..(599): unsure at all n locations
  Clone ID: MRT4577_101337C.1
naaaaaaaaaaaaaaaaaaaaaaaaaaaaaaaaaaaaaaaaaaaaaaaaaaaaaaaaaaaaaaaaaaaaaaaaaaaaaaaaaaaaaaaaaaaatataaaagaaaaaaaaataaaaaaaaacgtacatgaaaaaaaataaaaaattaattggggggggcctttttttggggtccctggctttggttcgccggcgtggggcctggttttttttttttgtgtcccctttttttatttttgggggcggtgtttttccccctgttggtggggtaaccccttggccccccccattttgtttttcttaacagtttcccctttttcttggggggtgtttcaccccttggggccccccctttggccctttccaaggggtggttcccctcattgggacgggggccctcccctttgccctccccctcggcccttggggtttgttggtttcctttctggggcccttttttattttttcccctccttgccccccgccggttgtcttttttttcgtttcttttttagcgctttggggggtttttcccggaaaatttttaattgggggcctcctttgggggccggtttttgggttttttggacctttttccccc

SEQ ID NO: 1461 - DNA, 1882 bp, Zea mays
  Clone ID: MRT4577_101338C.1
ttctctgtccagtggcggggccgcttcccttgcgttcgcggagagtctgtctgtctgtctagctagctagctagctgccgagagcgtgaggaggaagggggatccatggcggcggagaacgaggagaaggagacggcctgcgcggggtacaagcacgggccgccatgggtgttcaaaggcagcgcattgtaccagctgcatttggtgaaggcgtcgacggcgcgggccttcgtgccgcgggacctccgcctggttgaggccttcggctacacgctcggcggcatgttcctggcgcgctaccacgacagccctgccggcgaattcgacgagctcgtggtgatcgccggcattgtgtggaacccgccgacctcctgcgcgtgagttcgccttcgctccgcttcatgcctgcattgcattcgcatcttctgtggcctagtttaatcccttgtaggcttctacgccgctttctcctgcctgattggcctcgatcagggaccccccaacagaaaagaacaggggcaacttgcagtatgcgaaggggaaagaaaaaaaaacgaaaaccctcgtgcttgcgccagccggccataaacaagcgccttatcccccatatgattgtacttggcagcacggactgtgccttgcttctttcaattattcgtaggctggggaggggtgtccgggtgcgctgcacttgctccgcgtggccaacttgctgcccgttggatggaactctgaatagtggtgacttgcttgactgagctttttttcagttcttgctgcttctgatctactactgtatgagcttgttttcaggtgggctgccagggtgctggtgaacagcgtcgaagcctgccggcacggccgcaaggaggtaggactgccaagccatgtcgccacattctcgtcaaagaacgaggctgcttcgcttggggatagaccgttggctagaccaaacagcttcctcaacatgctggggatcgggtcgacagccttcgagcaagggaatggccgcgagattgaggtttcagagtccaagggcggctcgtctactcggcatctgtgcaacatcagcctgccatttaccggatcacataaggaccaccagtgggcgggcccagcaatcagaatgtcactcccgagtttcagcggacgtacagtggaccatcctgatcttctcaagtactcctgtcaagtagaatgcagggtgcgccctgtgaagcctgctaggatctggagtgcaagaaccacagagccccagcaggaaaaatccgacggcgaggtcagcagctccgggtccagcgtggcagccgacttggacgcccgaagccacagcatctcggtcctgttgtccaggcccatcttcgcgctcgagttcagctccctgaggatgcacgtcgacgctcccaggaccgttgttccgcaccgcgacgacaagaaagtcgggtactcgtccagcacttaaaacgtgatgaaggaaggagctgtgcctgtgcagtttctggttggaagcacaagaacccccgggagttttggccgcgtttgacccggttgcttgcgtgaattcgtgcagtttctggttgctttttactgcgcatcatattcgtttcttggttatttttttcttctctcccttggcggtattatttttcttgtttgtgaggaaatatgtcgggtatgcatagcatagcagagcacttgtttggttcaagattgcaagtagtttggttcctgttgcaacattgtcgcagagacttcgacgcatattatgtgttcgaagcagtaattttttttaaaaaaaaaaggcacaacgaagaagaaaaggcaatgtgccaccagtgctatcaaaaaaaaaaaaaaaaaaaaaaaaaaaaaaaactcgagg

SEQ ID NO: 1462 - DNA, 1184 bp, Zea mays
  Clone ID: MRT4577_101339C.1
ttgatacgtgggcgcaaagccgcggcgacaatcatttgtttaagccgcgacctgagtcccaccatcagtcagtgcatcagcattcatcgccccctgcctccccttccattcgccctcctcccactccaccagctcctgcctgcctataaacccagggccgccctttgactctccttccctgtccagtggcggggccgcttcccttgcgttcgcggagagtctgtctgtctgtctagctagctagctagctgccgagagcgtgaggaggaagggggatccatggcggcggagaacgaggagaaggagacggcctgcgcggggtacaagcacgggccgccatgggtgttcaaaggcagcgcattgtaccagctgcatttggtgaaggcgtcgacggcgcgggccttcgtgccgcgggacctccgcctggttgaggccttcggctacacgctcggcggcatgttcctggcgcgctaccacgacagccctgccggcgaattcgacgagctcgtggtgatcgccggcattgtgtggaacccgccgacctcctgcgcgtgggctgccagggtgctggtgaacagcgtcgaagcctgccggcacggccgcaaggaggtaggactgccaagccatgtcgccacattctcgtcaaagaacgaggctgcttcgcttggggatagaccgttggctagaccaaacagcttcctcaacatgctggggatcgggtcgacagccttcgagcaagggaatggccgcgagattgaggtttcagagtccaagggcggctcgtctactcggcatctgtgcaacatcagcctgccatttaccggatcacataaggaccaccagtgggcgggcccagcaatcagaatgtcactcccgagtttcaggttaggcgaaccaaaccgtattcccccatgatttccttcaaagaaagaatttacgtagccatgcgcagatttctactgagaaatcgaaagaagggcaagaagaaggggaaaaaagagtcctcgtcaaaatacgtattgtttctgaaacaggcacgtctcgcttgctttgcgaatttcagcggacgtacagtggaccatcctgatcttctcaagtactcctgtcaagtagaatgcagggtgcgccctgtgaagcctgctaggatctggagtgcaagaaccacagagccccagcaggaaaaa

SEQ ID NO: 1463 - DNA, 508 bp, Zea mays
  unsure (1)..(508): unsure at all n locations
  Clone ID: MRT4577_10133C.1
acacnnnncgcctccagtgcgtgtnaccacggctggtgcttcgacggcgccggcgcctgcaagttcatcccccaggcacccgccctcggcccgccggtgcacacgagcagcagggcgtgcgtggcgtcgtacccctgcgtggtgcagaacaacatcctgtggttctacccgagggctgaccccgagcatagcgacgtgctgcagaggaagcgcccgccgctcatccctgagattgacgacccggacttcgtcaccgtctatggcatcagagacctcccttacgggtatgatattttggttgagaacctcatggaccctgctcatgtcccgtatgcacacaaggggatcatgcgtggcattcgcaagaaggaagatcctggaagagtcgactactataaagagggcggcggtccagtcaagatgaagatcgagcaggcaaaccatagaaagggtttgtgtcaccgcaagagcggggctaattccagttcgtgcgcccttgcacgttctt

SEQ ID NO: 1464 - DNA, 351 bp, Zea mays
  Clone ID: MRT4577_101340C.1
attcggctcgaggttaggccaccgcttttgtgctgcggttgcgctggggctgacaggctgtgagaccagacaccagagagctcaccaggtgcagcggagctggctctgccagcgggaataccactgggggcactaagggtggcgacggccaccgcggctgcgagaggaaaggcctgactgcgctgaacaccagccagagcgagcacgaccagtggatcaacacctggcggcacaaggcggctggctcagtctgcgaatactgcgacacaggcatctaggggacgtgcagggactgcacgaagggtgggccctgacgatgcaacccgtgctgcaagagcagaaggcccgctc

SEQ ID NO: 1465 - DNA, 446 bp, Zea mays
  unsure (1)..(446): unsure at all n locations
  Clone ID: MRT4577_101341C.1
ggggggggggggggggggaaaaacaataatacccccaagaataaacataccaggtttgcgggctacaaaaattaaaaaaaacaccctcaccccatttaggagcctagtggacatactatacaaccccttaaattttattttccccccactcatacttgagaggggggggggccacaaattttctttcgagcctcntccccacataaaattaaaaaccattttgagcggggggggaacacccccaccaaacttgttaactattttcaacgctaaaaccaaaccggagcacctccattccacaacagaaacataacaagggccttgtgtgttttagaaaacttcaggacttacaagggcttacccaataactccctaagggggttagccggcttaattaaaatggccttttggggggataaaccccacaaaattgaaaaacccgtgag

SEQ ID NO: 1466 - DNA, 296 bp, Zea mays
  Clone ID: MRT4577_101342C.1
taaagggggcaaacgttcaataattttaccatctttttttttaaggcccccccaaagggggggggtttaacacaaaaattttccccctgaaccatgcaaataaccactttgtttggaatttattgtttgagggaatttttgtcaccatgctttgtttcaaagtttttacattttaccccggaaatttatttaaagaccccccccttgcccccgggaaaaacaagaacaccccatgaaaaaactgaataattttggtttgcctaccttttttagaggttgtttcacctttttttttt

SEQ ID NO: 1467 - DNA, 440 bp, Zea mays
  Clone ID: MRT4577_101343C.1
ccatcttgggtaaaagggaaaaaagcctcaaagccggggggggggggtccagcccgcccccccttttttaggccccaggaaaaagaaagcaagaagggacaaaacaaatcccgggtttgcatagcttttcccgggggtaaaaaggataaaataaaaaaattcggcacacccttttattgactataaactcccaccccacaacttttttttttttttaaaaaacaaaaagggcccttaaaactcaaaggggctttgggggaactcaaaaaccacgggccggccagggagtctccggtagacctcggagtaggagtccaggcggtagtcgaccccaccgcgctcctttttgtccaagatgaccttgagggtcttggagcccccctccttggtgcggagacccttgccgacaatttcaacggggtaaacaaggtcggtcaaaa

SEQ ID NO: 1468 - DNA, 135 bp, Zea mays
  Clone ID: MRT4577_101344C.1
aaagcattagaaccctatcctcgctgcgtgcgcccacgctgcgcacggagggaataagcgacgtgggcgtatacacctttgagtgcctcaacaacggcgggaagtggaccgcggagcaacacttcggcaagatct

SEQ ID NO: 1469 - DNA, 188 bp, Zea mays
  Clone ID: MRT4577_101345C.1
attagccccaaaaaaaaaaactagggggataaaaaaagcttttgtccgggcccctcaaaaaacggtgactcccgggggaaacaaaacccagcagcccctacttccgccgaaaagcccaaccttttggggaagccttgcgcggggaggccccccactctgggagaggggaaacttgggaacggttttgg

SEQ ID NO: 1470 - DNA, 791 bp, Zea mays
  Clone ID: MRT4577_101346C.1
tgagggcgcggaggggttcgctgacgacacgtaccgcgtggccgggtttctggacctgagaaagggaaccagtttcagagagtgtctagccgaagtaaggcagctcacaaaccttctgctgagcagccagcctgagagcttcgcgaaccctgcaaccagggagcagagctacggagccttagaccacaagaaggtggcgataatttgtgacaagttcaaggatgcccccgacagcctgttcgggagcctctcaggccggggcacggtgcagagcgcccggaagaagtccctggatgtgctgaagagaaggctaaaggattttagctagctggtgagctagatcatttagacaagctagtagcatagtacccctgttttagtgccagtcgtatccatttaaaatttcttttccgtctttctttattccctctttaatcgacttcccgtcccgtttcatgcgccgaagagaaggctgaaggattttagctggggttagctggtgagctagatcgttaaataagctagtgctctgtttagggaagaagacaagtggttcggtgtgtaaagccatttcaaatttctttccatccttatttttactcccttaatttgcttcctacacatcaaaaaaaaagaaaaaaaaaaaaaaatcggcggccgcggcacctacgaccgagaacaagacggcgacagcggcgctgagcgacttcacagcgcccgaattttttgtattttagcctttaaacagaagtaaattcacgtttagacctaaaaaaaaaaaaaaaaaaaaa

SEQ ID NO: 1471 - DNA, 121 bp, Zea mays
  Clone ID: MRT4577_101347C.1
atctttttcctgttggtatgtgatatttttcatttagtatgactatctgctggtgttggggccaatagatttgtgaatattctgtggatgtgtctatgtataggcgtgtatatatatatat

SEQ ID NO: 1472 - DNA, 864 bp, Zea mays
  unsure (1)..(864): unsure at all n locations
  Clone ID: MRT4577_101348C.1
gtaccctccgagggccttggccgggctttcgncagggccggacactacactaccatttttcctttcgcagcgtcccgtctgtctgtctgtctgccttcctccgctcacctcctctgctacttctcgctttcttccatcttggtccagcctccactcttcctgctgagccatggcggctgccgaagaagggccagagccactcaggtatcagactctggccctgagggtgagcatccactgcgagggctgcaagaagaaggtgaagaaggtgctccacagcatagaaggggtgtacaagacggacatagacacgcagcagcagaaggtggtggtcataggcaacgtctctgcagacgcgctcgtcaagaagctcctcaagtccgggaagcacgcggagccgtggccggagcctgctccagccccaccggccgccgacagcccgcccgggcccgacggatctcccggcagcgcaggcaagaagaagaaaaagaagaagggcaacaagagccccgaggcggcgaacaacaagcccgccgatccggcgccagcgcccgcgcccgcgccggcggagggcaacggcggacccaaccccccggagcagcacgacaaggctgacggcggcgcctcgtgcgatgaggcatcggatggtgagcaggataagcctgaggctggcggtggcggcggcaacggctcccctgacgccggagaagccaacgagggcggcaagggggccccttccgccatgacgccgcacggcccgcagcccatcgcggctgccaccaacagcaatggtggtggtggtggcggcggcggcggcggcaagaagaaaggcaagaaaggtggccacggcaatgccaacagaga

SEQ ID NO: 1473 - DNA, 760 bp, Zea mays
  Clone ID: MRT4577_101349C.1
cgcctttacgctcgctagctcgctgccggtcggtggcgtgcgtgcgttgcgtacccgcgcatgtgcatgcgtgtgcgagcctgcgaggacctcagatcgtcggtatctagcaggtcacaagtcgcagccagtcaccgattagatagatccccgcctcccctggcattcatcggcctgccggccgtccgcagtccatggcgcggcgcggggatgatggtcctggtcctgcggtcctgccggccgcgctgcgctccggcggtgccttgcgcgtgcgcgtctccgccgcatgtgggtttggtggactcgtgtgcacgggcgctcgctcatcgagtagacgagtacgatcggagacgacgtcgagacactgtgcggctcgtgtgctcgacagggacgtgccatccgacgagcacgtacgtctgagattatattggtccggcaggtttccaagttgcatgtatatatgcatgtggacgcatgcagtgcaggaaaggaaaacgaaaagggggcgcccacacacacttactgggctagctagctagccgcgccaataactcttggctggtggatcacagacagacagcgtacgtacgtacgtgtacgtatatgatccacgtattgtgctgtgctgtgcccccacatattgtgctagctagctcacgtattgtgctgtgctgtgcccccacatgatgcacatatatgtgtagcccataatgcttatgtacgagtatatatatgggtatatatatgaactgaagcccct

SEQ ID NO: 1474 - DNA, 251 bp, Zea mays
  Clone ID: MRT4577_10134C.1
ggagcttctgcacgcacacacaaaaacagatagacacgggacaacctccgccgctgagagttttcgtgcgcttgtgccatcctcttcctccgctgcgtacagtggtacgggcgtacggctctatcgacagacgatcatggacatggacttcaatggagacgccgacagcttcgccctcgacttcatccgctacctcatgctcggcggcgacagagcatccccgtgcccagccctgtcgccgcttcttccga

SEQ ID NO: 1475 - DNA, 235 bp, Zea mays
  Clone ID: MRT4577_101350C.1
gcgaggagaggccggcggtgggtttactacacggcggacgaggttgttgagctccctgaagaggcccacgccgcgggagaggacagcgggcaccatggacctcaggttgtggatgaactcattgaacaggaggcggctctggtccagcagccatctgcacccgcacgaagctggtctggaacgcgtgcaacaaccttggatatccacgccgggggcccccggcaccgaccgaacc

SEQ ID NO: 1476 - DNA, 257 bp, Zea mays
  Clone ID: MRT4577_101351C.1
cccacgcgtgcgcccacgcgtgcggtataatctttgtttagcgctagcttcgggggatgctggtaagcttgatcatctttccttacaggggtgataaagagcatcacaatcttcacgcttttgttggctgttgacattcttttctcggtcgctccatgctaccaagccggcggctgcgtctggaaacccaatatgttcatcgccgccggctaaaaggtcataccttttgtcctattgtcaggaccaccataactgcc

SEQ ID NO: 1477 - DNA, 1756 bp, Zea mays
  Clone ID: MRT4577_101352C.1
gtcattattgtcactgcggctatatccaacgaatagggtcgagtacacaaactatgtacagttgttgcagagagagaacagcatcaactcttgttcttcagagattgtgtgtgcagtgatacagagggtggtgcaaaacttgtattgccaataaaccagtagagaacccacttcagattgcacagcatgtactttagagccttggtccagttttcattcttattgaaactaaggacgatcgtgtggctccctactttgtcaccatcaatcttgtagggaagcttcagtgatttttcagggggaacattgttctgcttatccaaacttatggcaaactcagcaaactcttgcaggcaagtaagaaaccatgtcatggctttgtcaaatcgggtgctccagaacaaattcacgggaccaaacagttcatatgtgttattctggatgtctgtgactcttggatagcttcccatagggtgaatcttgatccggtattggaattttggggtgaaatactgagccatggtatgcaacagcagtgcagcctgaccccatgcagcatttatctcatcccactcaacctctacattagaaagacgtcctaggcgaaagttatttattgttccgattactccatcatgtgatatatagaatgcatcattgagaacattagtacgcttcaacagttccaaatgaacctgagaaacttctatcttggcaaaaactgcatctctttcttcctggtgagatgtcaactgaaactgaaaactgttgaattcatgccaataccgctcttccaattcctcaaattgtttagactttatttcaagattttccatctcagatctaacttctgaatattgtttttcagcttcttcaatagcagctttaagtttcttttcctcttcctcaatatcaataggaatggtcaccttttgtttctccttttgaaaatctgtttcactgaggatgttgtaaggttcctgctccaaacgttgaagacaagcctcataagctttaatatcagcattaacatcttcaatctccttatccatcttatcagaaagaaccctcatacattccagacaaagtggctgttcaacctgagtttgcgagctagcaatctcaaaggcccttttcagcacagtaacactagagtgaaacccagaattgtttcccagcgaggggctactggagattacacctgatggtgtgagctgtgcaccaccttcagaggcagatgtcctgtatatggaagcggcaggaggtggaagcactatatatgacccctctatcgctcttgttgattggctgggatcagcatgtgccgctgctgcacttggtgggcgtggaggaattctaggaccctgagatttgttctgtctagatagcacaacataagagttgtccatcttgcttgcacccataacactgccctgaacagaagatgcatgattaccgggcgcggcgtgtgcgggcagtctgtcggcgtaggactcgaccccgacgacgacgagggcgcggcggcactcctggcacctgaaccgcggcagagaggggtccaccgcgccgcccttgccgctggcgccggccgggggcttcatgacgccccccgcttttcggctccggggcgcgcgctctgatgccggcggatcgtcctcggccggcgagaggtgggggaggccggatcgtggaggtctggaggaggagatggagtgtccccgcaggcacgcagcagcgagacggggagatttatttc

SEQ ID NO: 1478 - DNA, 530 bp, Zea mays
  Clone ID: MRT4577_101353C.1
ggccgcttttttttttttttttttctttttttttttttttttttttttttttttttttttttatttttttttttttaaaataatgatttttttttaaatgtccgatatccatgaagagaagcaaaaaacccaccaaaaaccacaaactcaaacacaaacacaccctgctgacacatgcaaacagcgaagggccctaggggtaaaaaacaaaagccagaataaagcaaacaagccaagaaactaggaccggtaaatgcaactgcaaacagactaccgaaggcagggccttcacactagggcatgagagggaccaaacaggcagggaaaaggctaactaccaggcaaaaaccgaaaccaaaaaaaaagaatatagccctaccaccataaccaatatctacagccttaacctgtagaaaacggagataatacagggggctgaaacaacaaacaacagcttcaaaaacattaaatgtctacacaaaaagtttctggcaccagggctcaacacgctaacaggacggtaacgggca

SEQ ID NO: 1479 - DNA, 929 bp, Zea mays
  Clone ID: MRT4577_101354C.1
gcctaagctggaggccaacatgtataaatacctagctaggcccgggtctgtgtgaattaattcttaattcacagcatacatagatagaggtccattaattctagggtattgtagtgctgcaacatcgatcagctagctgcaacttgagcttcgtcagcgagagattcagagcgtccatccattatgggctggggtgactgcaagcctacggcaacaatggtgtgcgtcgttgtggtgttcgcggtgctcaacacgctgacaaagatggccttcaaccaagggatgcacaccactgtcctcatcacgcttcgtcagctcaccgccttcctcttcctcgccccaatcgcctactaccgggagaggaagacacggcctaagatgacacttgagatctttgtctatctcttcttcagtgcagtgcttggtgcctcacttacccagtggctgttcttcgtggggctacgatacaccacagcaacatttgcatgtaccttcatcaacatgactcccatgttcacttttctcgtagcactcccttttgggatggagaaactggacctcaagactggagccggcatagcgaaggtgattggcacagcagtagggttcacaggagccatcgtgcttgcgctctaccaaggtccatcactgaccaaaccctcaccagcccaagcagcagcagcccaccatgttcttgctcaccatcagtgggcgattgggtctgtggccctgctcgcaggcgcagcgtgttggtccttttggttcatccttcagtcgagactggggaagaagtatccggctctctactctggaaatgcgctcatgttcttgctcagcttccttcagatggctgctgtggggctggccacggagaggaaggacctctcggtgtggatcctcagaaccaagctgcagatcatcactgtgct

SEQ ID NO: 1480 - DNA, 327 bp, Zea mays
  Clone ID: MRT4577_101355C.1
gccatcctgagaacatgatcgatcgcacaggcccaaaaactcagttcggagaaaacacaaaccaacatgccgagcaagcattatactgtactgtcagcaagtatattgaaggcacaccaccacggaccatgtacaccagtacagcaacacatgagcacgggtaaagtacaggacatgaccgatgaggaactgtacgcgaaccaccaggggcattggccagattacttagcacggatgcgctagcatggctggcgggcaagcacaatctgcctggtatgaccacaagaccgacacaatcctgtagtcatacgacagcttcagctacat

SEQ ID NO: 1481 - DNA, 265 bp, Zea mays
  unsure (1)..(265): unsure at all n locations
  Clone ID: MRT4577_101356C.1
ccttggatatgtgcagaaggggcccttatcgttttcttgtccgacgtacacgctttttttttttttttgttttttttaactttctcctttttcctcttttttttctttttctgctgtccagcgcagtcgtgattcatttacagtctttttgtctcggctgtttggggggggggggttnttcccgctgcttnnttctgttcctgttgttctggttgtctttcccttgcttgcngcttctgtgtgtcttctctgttttcttatcttg

SEQ ID NO: 1482 - DNA, 337 bp, Zea mays
  unsure (1)..(337): unsure at all n locations
  Clone ID: MRT4577_101357C.1
gggggccgcggttctttaggggggggggtcctatcccggttgcgagcgccttcgtctcagtcccgcctataccgttccacctgtccaccaccgcgtgctaggtcgctggtcccatattttttttttagcctcaaggcnnnggggaaagcatgggaataatttttttttttggcnggaaggcgagacagagggcttacatgttgtgggtgtcctcgtcctcgaacggggtgtagccgtagcctccgttctcctcgccctcctcgggcccctcttcggcggacgccctcgttgagcctgagcgtctccggaagctccccgtctgccttgggcaggccct

SEQ ID NO: 1483 - DNA, 318 bp, Zea mays
  Clone ID: MRT4577_101358C.1
aacacagaaaattctattttttttttggtcataggcgaagaaaaaagaccaaatttttggttgccgggtctatcacttatcaaaccccgtcggtgccaaacttttacaacgaaattgagaaaattgttgggtgactgagcttagaacaggaagtttgttattatgggaagggcgggtgcttcaaaaatttacgcacttgtaaacactaacaaccctaccaaccctgttgagggtcaccatgtgggcacttgcatcctgaaatcgggtattgccaccgtatcccccgggggaaacatgattgcccctgccccttttggg

SEQ ID NO: 1484 - DNA, 352 bp, Zea mays
  Clone ID: MRT4577_101359C.1
gccttcaagcgcacacaggcacgcaaatcccctcttcatcaacctcgactcgagtccgcgcgcgtccccgaatcgaggtatggggatcccttcgctcatgctgtcgatttaactcttgatcagatgattgctgggatcttagggtcgatttcgcccaattttctggtgtcaagtcgaggccttgggggaaatctggcctgtaggcagtatgttcgcagtagcttctagtttgttcgatttctgcgcctatggagtctgcggttctgatggtgtctatcgtcatgtgctgtaggcggcgtttctgatattccccaattttttgctagcctagtgcgtttacggtatgagcgcg

SEQ ID NO: 1485 - DNA, 190 bp, Zea mays
  Clone ID: MRT4577_10135C.1
cgcctccgacgcgcgtacaatcaggagcagacaggatgccggctggacacgggctgtgctcgcgggcgcacgaccccagcgcgcgccccggcagcaagagggcctacatcccggtcaacacctacctaccgcacctacgagaagaggagatcacgaagtaggtgaatgaccaacgaacccactccactag

SEQ ID NO: 1486 - DNA, 530 bp, Zea mays
  Clone ID: MRT4577_101360C.1
gtgttgttgttttttttttttttttttttttttttttttttttttttttttttttttttttttttttctcgttaaaccccgggacatttacaagtttgtttttaaaaacgagaccccctccccaaaaacaatgtacaggccgggtccggggggggggggtcgacgacgtccaaatttgtctgactgaaggagggggggttccgcccaatccagcgggcagagcaggggggagaagccccccacgcgcgcgcgtccgtgcgcgggggccgaaaaaaacgcgcggggccccccggggtccgacaaaaccggggggggaagagggaatcgatcgacggccggccgggcctaaagctagagggggggggggaggggcattgtctcccccgcgaccgcgacggggtgggaaaaccgctgcagcgcctcccccatccaggggggggggcagcgcccgatggcctcggttggggaaacccactccctggggggcgcggccatttggggccaccggtccagctccggggggacccgca

SEQ ID NO: 1487 - DNA, 226 bp, Zea mays
  Clone ID: MRT4577_101361C.1
ccaaaagtacggtagaaaatgatattttatcgttgtagtcgagtatacgggaaggatctctggggaaacactgtacagagtcgacatctaagacggaagagaacgctgacctggcacgtgagtcggacatatggagagaaatctaagcgtaacccctcaataccgtctaaaggctcatctgtgtgcattctgccatgtcatgtcctgacatgtcgccctatatatg

SEQ ID NO: 1488 - DNA, 541 bp, Zea mays
  Clone ID: MRT4577_101362C.1
gggtcgacccacgcgtgcgcccacgcgttcgcccacgcgttcgcggacgcgtggtttgactttcttcagagcagtgcgcgtgtgggggggtggggatccttatgagcgcgcaacgatggcagcggcggccgtggcgactgtggccaccccatcccccgtctacaggcggctgttcccctccgccggcccgtctcttctccggatcccaaggccgaccaagcggttccggcgcgccctgctgttctccgctgcgggggatgaagcggacgtgctgcctggcccgggggccgagggggaggccgtggtgcccgcgatgctggatgagcagccggacgatcagctgggcggaagccagcttgacatcagagggctcgtctttcaaggcgacgtgggcggtggcttcacccgctgcggagcgggctccagagtctccggctgtggcggcggcaacaagatgctggaccggggcattaacacggtcatcgtgcttggggtcagcacctacgctttaaccaaactggttaccgtcgaccagaactac

SEQ ID NO: 1489 - DNA, 538 bp, Zea mays
  Clone ID: MRT4577_101363C.1
agtgtaaaaccaatgataatactaattgcaccgccacactattatatgtgcacatctgtgatacataaaatactgcgtactattcatgacgacgatcagataacaggagaccacacagatatatatatatatcagaggattctatacaccattgaccatcccctccccacctgtcaacaatgcacgcgcgcgcacgggacgcatgggccatgcgaattcattccctcgaagaagccaggctctcgcgcgcgccgcctctacacgtgccccctcttgctcgggccggacggcggcagccgccgcgggttcgccgcgccgctgcctgacgtcagtgcccgtcgaccaccaacgtgacaggtgctcgacaccgtaatcgaagccgccgccgccagtggccgagagagcacgccgacgtcgtcgcccgttggtggctgtaagaccgccgccgtcgacgacgacgacatagcagcagcggcaggcgccataaggagagccgcggagtggcggtagccgcccccggtccgcggcgctagccttg

SEQ ID NO: 1490 - DNA, 322 bp, Zea mays
  Clone ID: MRT4577_101364C.1
caatttcacccaaaaaaccaaactggggtaatctgcgaattttaaaagcaaacttccctaccttaaccattaacccacatatttcacaaactctataacctacctacttctatacatacctctcaccatcttttactataatgattcaaaacccaatccaccaaccctacatcatccaacattcaatctcaacattcatattaccattattaccctatttccttcaacaaccttcaaccctattacttcatttacctttacttcattattattcacatatcattatttcacaacaactacaacaactttttctatcaaacct

SEQ ID NO: 1491 - DNA, 454 bp, Zea mays
  unsure (1)..(454): unsure at all n locations
  Clone ID: MRT4577_101365C.1
gttcttagaggctccaagctgaaggaggagcgtttccgaatagatcaattaccgatagtggtattaacattgatagagacgtgacttacccttacacccagcaccttacctatactaggccgtctacgactttactcttcgttcaacatatcccggtttttcgagctcttcactttttctatcgcattgcagagggatctccgtttccaaatattttaagttaaccatgtcgtgtgtggactatctctttcgctatacaataactacggctctggtgttatcaacgcgcaggaggaccattacgctgacgacccccatcacggcgagtgatttacatttgtcggctcgcggncgtacacggctcaccggtgtgcccgacaacgtctaaagggcgcactcgctctaggcgtccctcgtagaccgttactgcgtctgcgcccacactaactaggtc

SEQ ID NO: 1492 - DNA, 411 bp, Zea mays
  Clone ID: MRT4577_101366C.1
tctgttctcgtgcttaacctctcgtaaagggaagctgaaggagaagggttgcatgctgcacgccaagggacggacaactgaaggacaagagtctcgcatgcagctgacgaagagacagacaactgaaagatttacgcggttagtggcaactgaaaggtttacgcggttagtgagtgctaaaaattaacacaaccacgcccgcccgccatgccacgcctcgcccggcccgagcccgggcggcggcgtgcgcgcgcgtgtggcacgcccttgtccgtttcttgacttctcaagttagggcttgttcggctaacgctcaatccatgtggactgagtgagattggatgagtttgaatcccaaacaagtcaaacttattcttaattttttccaatcacatccaatccatgtatatt

SEQ ID NO: 1493 - DNA, 434 bp, Zea mays
  Clone ID: MRT4577_101367C.1
tttgccgccctttgtttttgttttttaaaacaaaaacctttctccccgttgtgaggcttgcacatcttattatagtcagtacaccattcaaaacatttaataaatgaaactgaccaataaactattccaatgtattaagcacaggcgaatacacaatatattttacattggggttttacacacagtctataacacagcttcaagacaccaattacacttgctcattggagcaacaaatgatgaataaacaactttgatctcattcatatgtgatgataattcatcatctacaactacagacgcgcgttatgatccttaattgcttacatttcgataacatgaactacttatacaatcgctcaatcattcataactgttctctgcaattttgagtgcaggcatccagcaatcaatctgccgaaggacctccatat

SEQ ID NO: 1494 - DNA, 239 bp, Zea mays
  unsure (1)..(239): unsure at all n locations
  Clone ID: MRT4577_101368C.1
aattcggcacgaggtgcaaacttgagtcaccatccatggtgctgtgagctagcgagccactagcgtgtaatgactgggctgagttatcgtctgcaacactattctggctgcccgatccacccccgccacaattcctctcatggggagactcaagcaatagaaagcacggacctgcctgcacgcgtagctctcttggcagagagaccccaaatatctcctgcaggacctggcnnacgcgg

SEQ ID NO: 1495 - DNA, 307 bp, Zea mays
  Clone ID: MRT4577_101369C.1
ttgctagaagcggctctccggcgagctcgcggaccgggtctgcgcgccgccggtgatgaactacatcttcgtccggagcaacgcgctctctgtggtaatatgcaacaagctcggctactgcggctgccttgacctacttaaggtctgcatgatcaactcgtacggagctgcgccctacagcactcctcggctgggtcaacatgacctacttcaatgtctcctacaacgactctgaaggcgacatgcccagcattgctacctgcggcaccaaattctgacgcttggactcgttcagcaaccgggtcac

SEQ ID NO: 1496 - DNA, 219 bp, Zea mays
  Clone ID: MRT4577_10136C.1
gaaattgcgacatcaaatcccagtcaatctaaactttgtatgcttgcttggtttatctagtcatgtattaatactcatcacatttcagtgtctgctttgcaaaccaaattgatggttaagtgcttgcctatttgttctgcctgatttcatcgcagctcagttgtatgattgctgggtttcctacttttcagcttttgttttccgtttcatgttgtagtg

SEQ ID NO: 1497 - DNA, 925 bp, Zea mays
  Clone ID: MRT4577_101370C.1
attgggcattcgggcccgcggttctggccgggggtcgtgagccgctgccgcacacggcgagaggaatagggttgctccccccgttgccgactcgccgccgccatcgccgcgagcgtcatgaagaccttcccgctgtccaggggaagcaccatctccctagccctcttctccgacgtctccaacagccgggagctcctggacttgatgcagtcagggaagctggagccggcggtcgctctcctcaacgcgtcactggtgccggatgtgttccctatcctcgcggcagcgcttaaggcgctgttgtccaagactagggagtcactgaccacaaggactctgcactctgagctcgtctacaactactcggggtccaaacatataacagagtccctgaagcgctgtgggatctctgataatacaacttacatccttgctgcttgttttgatgcttccgacgaggagatgaaggcagtggagaagctcatcagtggcaccgagattgatctcacagaactggaaagaagagcaaaccagccacagatcttgaagcattacaagatacctccccaagaactatcgatatctacgttgccggacgcaattgtatgcaggattgctgctcgagatgctctctgaagtctcaataatcaccgtaagctatgtggtttcaggatgtaggtctctctctaccacatgtatggtgtgacattgacagcacaagtgcacaactagaattaggtatccgaaataccattgatgttcgcattccctgcaagcaacccagaagcacattgcgtggttaatttttcttgctaaactgtgctgcaaagcaacagttatgttaatttctcccttgaattcgatgaagcttatatgatacaatctagcaaaggaatgtatgatgtatctgaaaaaaaaaaaaaaa

SEQ ID NO: 1498 - DNA, 966 bp, Zea mays
  Clone ID: MRT4577_101371C.1
ctgtgattcctcgaacctaagtgtgtgtaaaaaggcaagaaaatattgttgggcgtcgagacattcacttgtaggtcgtaccatgcatatgcttgttgaaagaggatcacatattcacatcgcatcaagcttgatttacttcgatccaagaaagccacctgctaatcacctcacctgagataccaaaccgttcacgaaccgccagccgaaggcctgaagccacagctaaggagcgagatccatggggaactcatacagcgggggtggctcggcgccggcgccggcggcactggaagtgccgctgcacctgtgcttcttcctgctggtgctgctcctcttcctggcctgctcgtggtacacgagctacgagtcggccgcggagtcgttcgcctaccaggcgcgcatcgtgctcatggcgtcgccgttcgcgctgctgctggccgtgcggctgctgtccagcgtctctggcgagggcgcgggccggagcgtgggtcacctgctggcggtgccgatgcctgagcgggactccatccaccgcgccggcgggtcgccgtggggcgtcggggtcctgctcctgctgctcctcgtcatggtttcctaccagtccaacttccgggagaaatggttcccgctcgcaagcaggtgagctgaaccatccatgcatggcgcggttggtgccgggagacgtccatgtatgtaaacaaacgcttgccgattgtggcggtgcgcttgaggctttcacgtctacgtctacttgtctgtaactgtaaaagtgtacgtgatgagttatatccgcggtaaatgcaatctccaattgtcaatacaacgaatcagtaatactggctctggctgtgtggtgtgctcaatgctaagtggctggccagcacaaggcaataagttgcgagcagctctcacgctctatgtaagtgtttattattttattatttatttaaaaaaaaaaaaaaa

SEQ ID NO: 1499 - DNA, 261 bp, Zea mays
  Clone ID: MRT4577_101372C.1
attcggctcgaggccacatacaaagccctttcttggtggtgctcggctggacgactttgacctccgcctctcaacggtttcagataagcgcctcggcgccaaggctgtcaagaacctgctgctcctgtccgagaaggtggttattcattgtgacactaggagcctcggccgcatcgtgctccccataaaggtagcggaggttcacctgcccgtgttaaagacgagggatggcatttccatccccattggaggacattggta

SEQ ID NO: 1500 - DNA, 381 bp, Zea mays
  unsure (1)..(381): unsure at all n locations
  Clone ID: MRT4577_101373C.1
ctggctggtaccattccaaattaaacaaccggcggcccctaccattatactaataataaaatccccaccccaaggggnnncccaattggggggggggggggccaaatccaaaaaannnnaacaattccccacccaaccccccataaatctttttctaagggccctttncccccccttccttttttttccaattnttttaacaagggcaggccccctttttgccctaaaacccccgtggcccccaaaggcccttggcccaaccctttttgcataaagttaggcaagccttcctttacttccttttggaacacccccacccccacttgggcaaacactcccaaggattcaagttgccccctccccttcccctaacccaacccc

SEQ ID NO: 1501 - DNA, 322 bp, Zea mays
  Clone ID: MRT4577_101374C.1
cggactcgtgggttctttctttcttatttttctctttattttcctcatcacctttttcttggtctttctctattattatctctacatttttttttttttcttcttctttttttttttctctctttaaaaagcatcccctccaatcttttcaccaagcactccttccacttccactacacaccccaccacaaaaacaaactctccctcacctcctcccagatactgtccaccgtcaccaatctcaaagccatcactatgctctactgccttcaactactgcactcccacatcggctcccacatccccaccaccagcctactct

SEQ ID NO: 1502 - DNA, 178 bp, Zea mays
  Clone ID: MRT4577_101375C.1
agccacctcaagatgcgacattcataagggggagatgcaaatgatcaagacaaggatggagaagaacaaaggccgtcacacccaagagtgcaccaagcaagcaacggtatcaacccgtcgtcaccatactcggcgacattaatatgatggtagccactagagcttaagttgcacattt

SEQ ID NO: 1503 - DNA, 345 bp, Zea mays
  Clone ID: MRT4577_101376C.1
attggggttgtgggggtcttttttaccaattctgggttgggaaagataaggcccgttaaagggtgaacggggacccttggcccgggcaaaaaaagggtcacttggtgctaaaccaacccctacgatccctttacccccgttttggggtttagacactcggattaaaaaatttttttttgggaaaccctttcggggaagaaacacaactttttttggggggtttaataaaactttgggggcttccatccgttggggaatttacttggggctgttcatggggggggtcagggccacccctggggggctgtatccccatttttgtcggacccggaaaaaatttttaaa

SEQ ID NO: 1504 - DNA, 250 bp, Zea mays
  Clone ID: MRT4577_101377C.1
ggtcatggtggttaatcccatcgacattttttgcccgcagagtccgaacgaccatttctccgaatgcgtcctgcaggtcaaccgcgtcaccatggtcgacaagggagggagggagctctcctaccgcgcaatcgacgtcgttggcgacgtgaagggccacgtttggtgtcggagagaataaaggacaaggaagtcacggtaggccctcaccaacgccgccatgaatgaccggcgcgaccttgccacagtg

SEQ ID NO: 1505 - DNA, 275 bp, Zea mays
  Clone ID: MRT4577_101378C.1
attgctaccgtgccctggcccttgatgtttgttgagatgggcagaggggggcaactaaaagtcagggagacgcaaaagaacaacaaatccacatccctccgatgtctctcttaggttagcttttgacattggagggatgtggatttgttgttctattgctaccgtgccctggcccttgatgtttgttgagatgggcagaggggggcaactaaaagtcagggagacgcaaaagcctcttgtatgtgatcagatgggtaaaacaagttattatatta

SEQ ID NO: 1506 - DNA, 312 bp, Zea mays
  Clone ID: MRT4577_101379C.1
cggatcaaaactggatagatgggtatgagcattctaatctagagaggctatgaaaatgtaattggccctctccctccgtgtcgcgcatcggatctacctctacctaatcctatattcctggtattatcgctagaactgctatatgcgcccagaatcaatcccgtccttactggcgcattcttaaaaaaaaaaaagaaaagaaaagaaaaccaatcttctgtagtataaaaagaacaaaggaagctccacgacccagtcgctttcaaattgataaacatccccatcttcatgcccatatgtgatgcgatttct

SEQ ID NO: 1507 - DNA, 389 bp, Zea mays
  Clone ID: MRT4577_101380C.1
cttcatgtgcttctactgctgaaaagctcagcatctctttgatcaaggaaagagctgagcggcacagacagtacttcatattgtcaaggacggcacccacagctctttattttaatgagcctgtccaaggatcttatcattcaacagttaactctatgtctgagtcgtagaacagcccagacattatatgtaggcccctaacaacctccaactacgggaattataactgtgggaccagcgatctctcaaaaaattatcggcgccttaattagcatgaatatttttgtatagtgacacataccctgctcgaatggcattcgtatctagaagtggctctatctacaattgccactgagcattttacaatccattattgatatgatcagaaa

SEQ ID NO: 1508 - DNA, 363 bp, Zea mays
  Clone ID: MRT4577_101381C.1
gggctaaccatcaaccctgacggtttcaaggcggaccccaaaactgaccacaagatgaaggagaggctggtcggcgtctcatgaggagaccaccacgggtgacaagaggctctaccagatgcacgagacaagggccctcactctaccctgccattaacggcaacgatatgcggcaccaagagcaagccagacagcctgcatggatgacgacactcactccctgatgcactgatgagggccaccgacgttaggatcgccaccaaggacgccgaggcctgcggatactgggatgacggcaagggatgagccactgcactcataccgctggtgcccgcacagcgcaccgagatcgaccccactgcg

SEQ ID NO: 1509 - DNA, 287 bp, Zea mays
  unsure (1)..(287): unsure at all n locations
  Clone ID: MRT4577_101382C.1
ccccnctttctcncccccncgaagccaaagagcggagaaaaacaacaggagagacggccggcacacccggaacaagccgcaaaanaagcaggccagacacggagaccacacaggcananggaacgacgaaaaggcaaagaaccgcaaccgaacaagcacangggaaaccaacaagggaggacgaagaacccaccaagaaaacggcaagngcaaccccgaaagggcagcgcacngaacagcaaagggaacgcacggacaagccccaggaccacacggcgaaggggcag

SEQ ID NO: 1510 - DNA, 770 bp, Zea mays
  unsure (1)..(770): unsure at all n locations
  Clone ID: MRT4577_101383C.1
gccggccgggccggcacctcccatcgcatcattgcttgctccatgtggagtcactttattactgcatcacactagctagctggccacagccagcttcatcttctcgtcgattcgatccatcggtgctgtgtgtaccgtacgccagcttgctgatccatcgccggccgacgatggaagtgagcacgtgggtgatgctggtggcggccgccgccgcgtacatggcgtggttctggcggctgtcgcgggggctcagcgggccgcgggtgtggccggtgctcggcagcctgccggggctggtgcagcacgccgaggacatgcatgagtggatcgtgggcaacctgcgccgcacgggaggcacctaccagacctgcatcttcgcggtgcccggggtggcgcgccgcggcgggctggtcacggtcacgtgcgaccctcgcaacctggagcacgttctcaaggcgcgcttcgacaactatcccaagggccccttctggcacgccgtcttccgggacctgctcggcgacggcatcttcaactccgacggcgacacgtgggtggcgcagcgcaagacggccgcgctcgagttcaccacgcgcacgctccgcacggccatgtcccgctgngtgtcgcgctccatccacctcaggctgctgcccatcctggacgaggcggccaccgagaagacgcacgtcgacctccaggacctccctctccgnctcaccttcgacaacatctgcggnctcgcgttcggcagggaccccgagacgctcgcg

SEQ ID NO: 1511 - DNA, 412 bp, Zea mays
  Clone ID: MRT4577_101384C.1
caacgggtgagctttatacatggggagatggaacttacaatgttggccttctcggacaggggaatgatgtaggacactggatacctaataggatttctggagcactggaaggtcttcaagttgcttatgtttcatgtgggacctggcatacagccttgataacatccatgggccagttatttacctttggggacggttcatttggtgtattaggtcacggacatctgaaaagtgtttcttacccaagggaggtagagtcactatcagggttgaaaacaattgctgtggcatgtggtgtgtggcacactgcagctatagtggaggttattgtcactcggtccagttcaagtgtaaagctatctgctggaaagctgttcacatggggagatggtgacaagcatcgacttggtca

SEQ ID NO: 1512 - DNA, 442 bp, Zea mays
  unsure (1)..(442): unsure at all n locations
  Clone ID: MRT4577_101385C.1
cccaaagcgagaaaggccgccaggccggagaaacgaganncaaancggcaggcagggnngangaaacaaanacacacggacacaccccaggagnacacnacacgacncccaacaggaaagggaaagcggaagccgggaccagnncggggacggcanacaacncanananananaacaaacgncncggggggggaanaancngganaaaaaacncaaaggaaagaacccncgcgcccgggcgggacgnnccgncgnggaaagaaccgnggccncaagcnnggnacaccnngcacncgncggnnncggggggggccnngcagaagnccnccagagggacgccgcngccggccgccggcgcgccgggccacnnggccgccaccaggggcgccagagcaaccacgcgcgggcggaacccccacacgnggncgaaccaggcgacgac

SEQ ID NO: 1513 - DNA, 323 bp, Zea mays
  Clone ID: MRT4577_101386C.1
tctcactctttcgctgacacctcagcaacatcttcagctctaccgacgagaatcccaatgggcgacaagtgcatttttacccgccatcagcacaatgccactacccatcactaatactacaaccaccaccctatgaacatgatcaaatctcagaatctgctacatacagcatttaatccgttcactatgcacccactattcgatctccaactctaccccaaccgctatcacatttacatctacagtctacacttcaaccctacatactctattctccatctgtacattgcgtctctgctaatccacgaaaactaccctactta

SEQ ID NO: 1514 - DNA, 363 bp, Zea mays
  Clone ID: MRT4577_101387C.1
gggaggggggaaaaaccataggggccgaaaaacccatttgggaatggatttgaaaaaaaactgggttacaacggggggttttagattaaaaaaaacgttaaagcatttcccccgggggtttaaaatttttaaaaaaaattttttttgggaagctttttttgctttggaaaaaaaatttggaattacataattagccaaatttttgaaattctcaaatctaattggttccccctttttttatcggtcttttgaacaaactaacttttattaaaaagggtgctttggccttattttttgaaccctttcccttttttaaaaaaaaagaacccttacttttccttgaaaggtgggtttttttttatt

SEQ ID NO: 1515 - DNA, 615 bp, Zea mays
  Clone ID: MRT4577_101388C.1
ggggtgtttcttcgattgtagaggcatagtatcctatcaatgtgaaatgtaaatccaaatccttcagtaggtcatgaccaagctatttttctaaaaagggatggacatcttgactcttgaggaaggttcttcagttacagatttggatttttgctaacatcatatgagcatgtcatgtgcagatgcaaatgacatttttgcaggagtgtcagaccttttttgaagtgacaggattcaagtggatatcgtatccattaatctgtgcatcactcaaaagaagagcaaaggagcctctaatccccatctgtctctgattctgatcatctccagggagccgagtaattgccactgcgctgggactgaacaactgaaaggagggaggctgatgagccgtgtgagctcactgggaggtgcagtcgccatggtgaccaagatggggaccatgccagtggaatgtgccaagctgctgctcctgaagaccagaactatgatgagatgaggctgggggccctcacatactcatacaatggcatcaacgacacattcactcacatctttcacgagtaggggtgccgcttcaaccaggtcaatgacatccactacttcccacccaat

SEQ ID NO: 1516 - DNA, 212 bp, Zea mays
  Clone ID: MRT4577_101389C.1
gcaggtgccggaccggaccggcaagttccggcccaacccttccgtttcggaacccctccagaggtattcggataggggccccctggaaatgaatttccagaggagagggggacaagctgaacctaccacagcggaacccaaaggaaaggatggtgccccggacagggcaagaaaaacctgaaggaagactacagcggaggggcagcaggaag

SEQ ID NO: 1517 - DNA, 828 bp, Zea mays
  unsure (1)..(828): unsure at all n locations
  Clone ID: MRT4577_10138C.1
acatcccagccttgtgctcctagtaggaaattaagaaataaagatggcttcttctatcactagcagcggcagcaagactctgcgtgtcctgctattgccccactttgcgactggccacatccaccccttcaccgagcttgccgttagcctcgccgcgtcgtctagcccaaacgccaccgtagaagccatcatcgcagtcacgccggcgaacgttccgatcgtccagtccttgctggagcgccatagcgcagcaactgtcaagatagttacctatccgttcccaacggtggagggcctgcccaagggtgtcgagaaccttgggaaggcggccactcaggcggattctatgcgcatcaacatcgccgcctcgaccgaatccctgatgcgccccgtgcacgagacgctcgtccgggcgcagtctccagacgccatcatcaccgacttgctcttcacctggagcgccgacatcgccgacgagctcggcgtgccatgtgtcacattccatgtcaccggcgccttctcgatgctcgccatgcgccacctcatgatggaggacgccgcgatcgacggagatgacacggtgacggcccctccgttcccgacccctcagatacgggtcccgaggaccgagctgcccgacttatcgatatttcgatacgtcttcggcaaggttcattccatgcaagctgcctgcttcggcctcgccgtcaacacattctcaggcctggagcagcagtactgcgacatgtacacggngccaagggtacgtccagcgctcctactttgtagggccgccactgcaatcctctgagagcccccagatgactc

SEQ ID NO: 1518 - DNA, 329 bp, Zea mays
  Clone ID: MRT4577_101390C.1
gggacaatcgtcaatacattatttaaaggggggccaattttgtccaggaacaaacaaaaacccccaagccccattcttttttattaaaaccaattttttttttttaaaccacactgcactaaaagctgtgagccatgggcgttcctccccttttttatgcttgggatgggggacaggatcacaccttttaactacccaaacatgttttacatacattacagaaggaaacccaaacatgcagttacctgcccagggcaagaaaggaagaacaagttttgggaagtttttttaacgctttggtacaacactggaaaaaggtgaagaacttt

SEQ ID NO: 1519 - DNA, 192 bp, Zea mays
  Clone ID: MRT4577_101391C.1
cttgactctttgagacatatgagcaccctgcgtttcggttggtgccctcgctagggcggcctcagggggcgctgttctatcttttgcggtggccgaccctcgtgacaggctttttttttttgcctgcctgcttcctgccctggcctgcacgcctgcgttgccggttctcctcctcgcgggggctccctgctt

SEQ ID NO: 1520 - DNA, 407 bp, Zea mays
  unsure (1)..(407): unsure at all n locations
  Clone ID: MRT4577_101392C.1
ttttttttntttttttttttttttttaagtaaaagtaaccatccttatcattttttttntttttttttttttttttaagtaaaagtaaccatccttatcacaaaatacatcggaaaaactatcaactatacaagttaaaactgtcactgtcatgttaccgaaacaacaaacacacccatccgctcacaacagtaacatgattcctactttcatctacaaaggtgatcgtttcttcctgcactgatcaaaccaacacacataaccaaatctaatgacatgccaaacttatgttcctctaccagcatgtttatacaatgtttcagctgtctacatgattccaatgtaattaacaagcaggggatctctaggcatgggaatcgtgctaatttctgcnaagcaataatata

SEQ ID NO: 1521 - DNA, 270 bp, Zea mays
  Clone ID: MRT4577_101393C.1
agcgcttctacgagcacgcaggctccaactgggaggggctcctgtacgtcgacctggtcgtgcagaccctctaccgcgtgctcgacaaggacatgcgtcggatcaagagcgagatcagggcctgcatctacctgatggacttcccgaccaccgtaagaagatgaacccacccatgcgagaacatatctatccaaactcccatgaaagaccgccacagagtgaactttgctaggaccttccacatgagacaacagactcacgtgctcacat

SEQ ID NO: 1522 - DNA, 1819 bp, Zea mays
  Clone ID: MRT4577_101394C.1
atggccgtgtaccgccgggtcgtggacaacatcctcgccgtcgtggcggtgccggtcgccgcggccgcgctggtcgccgcggcgcggttcgggccgccggaggaactggccggccggctcggtgaggtgcgacccgcgcacctcttcctcgccgcgttcgtcccggccgcggctgccacggtgtacctcatgctgcggccgcgggcggtgtacctggtggactacgcctgcttccgcacggcgtccaactgccgcgtccccttctccaccttcctggagcacgcgaagcaggtgccggtgctcaacgagcgcagcatccggttcatgaccaagctgctggagcgctcggggctcggggaggagacgtgcctgccccccgcgcaccactacatcccgccctacaagtactgcaccatcgacgcggcgcgcggcgaggtggacctcgtcgtcttctcgacgctcgacgacctgttcgccaagacgggcgtcagccccggcgccatcgacatcgtcgtcgccaactgcagcctcttctgccccacgccgtccttggtcgacatgatcataaacaggtacgggctgcgcagcgacgtccgcagcgtgcacctctccggcatggggtgcagcgccgggctcatctccgtggggctcgccaggaacctcctccaggtcgctccggaaggcgcgcacgcgctggtcgtctccacggagaccatcacgcccaactactacgtcggcagcgagcgtgccatgctccttcccaactgcctcttccgcatcggcggcgccgccgtgctgctgtccaactcccgggccaaggcccggttccgcctggcccgcgtggtgcgcacgctgacgggcgcccaggacagcgcgtaccggtgcgtgttccagcaggaggacgacgagggccaccgcgggatcaacctgtccaaggacctgatgaccatcgcgggcgacgcgctcaaggccaacatcaccgccatcgggccgctcgtcctcccggcctcggagcagctcctgttcgcgctctccttcatcgcgcggcgcgtgctgaaccggcgcgtgaagccgtacctcccggacttccgcacggcgttcgagcacttctgcatccacgcggggggccgcgcggtgatcgacgagctgcagcgcagcctgggcctgtcggacgaggacgtggaggcgtcgcgcatggcgctgcaccggttcggcaacacgtcgagcagctcggtgtggtacgagctggcgtacatcgaggccaagggccggatgcgccgcggcgaccgcgtgtggatgatcggattcggctccgggttcaagtgcaacagcgcggcctgggagtgcatcgcgccggcgcgcaccgccgaggggccctgggcggagagcgtcagccgctaccccgtggacatccccgaggtgctcaagcactagccgctatcccgtggacatcaggccgggcatgcatgtgaccggccgacgacgtgacagcgtgttttggacttgcttgtggtgctggccgggccggacgcgttgaatgccgagcctgacgcgtccatgtgtgcggtgcgctccagcccggacaggtggttgcgagagggtacaccgtgttaaatccgggccatttacacacgtatagtactcgtgctcctctagatcgtgtaccccttccttctcttcttgttcttcttctttttaccttccttttcaacatttgttttcccactaataatttacttgtgtccattttaaaaacaagccaaaatgtaccgcgagttggatcgattacattacatatgttactatagcaagcattatt

SEQ ID NO: 1523 - DNA, 408 bp, Zea mays
  Clone ID: MRT4577_101395C.1
ttgttcatcctccataaatatatggtgcaatttgcaaaagcaattgacaaatccaactataataaataaatggaccatgtagacaaaccagaggatgcggtgccgcaaacattcctcgctctcatcctcatccttctctctttcttttttgggtcagttcagggccggccctggacaggtgccggcggtgcggtcgcaccgggcctccaagaactaagggacccctctttttttccccaagtttacgatttcccatccgccctttcgcagactgaagctaccgtttgccccggatttcgactttacagttactcctatttctgagttcacctgtgattttgtcctcacttttttccccaagtttacgattttccatccgccctttcgcagactgaagcggacgcgtgg

SEQ ID NO: 1524 - DNA, 518 bp, Zea mays
  Clone ID: MRT4577_101396C.1
ggttttttttttttttttttttttttttttttttttttttttttttagatgcgaacaaaaaccttgctcattcttctctcgtctcgtttcatagcgggggcaaccaaagcgaacaaaaggggtcccaacccctaatccaaaggttggggggggggggacacggtgacagaagcgaacggtaacccgatactttggataggaaagataacccggccgaagccaggatggggccacacatcagtccctccagccgccgccgccgccgccgtagccgccaccaccaccctcgcgccgaccgccgtatccgcccccggctccgtagccgccgcctccaccctcgcgccgtccgccgttgccgcccccgccgccctaaccgccgtctcggggcccgccaccttttccgccgccgccgtgaccggcgccgttgcccccgtcgtcgccgccgccgccgccggcccggggctgggcctgggtaccggggatgttccggccgtcgggctccttgccggtcatgttct

SEQ ID NO: 1525 - DNA, 521 bp, Zea mays
  unsure (1)..(521): unsure at all n locations
  Clone ID: MRT4577_101397C.1
ggccgcaaattttttttttttttttttgcaggactactcgttgctttctttttaaatggaaacgagaaaaagtgtacagtaatcccttgtgcagacgaccgggcaaaactcaacaacccattattgaatatatgtcctctcgaacgcttgccggcgtcgccatgcattggaggtcttcagcaaccctagttccaacaaattggccatgagaggcgatgcccggggacgcagacgttggttccccgagatccaactcgcccatcgctcgcccgcccgagaggcacagacgctcccactaatgcgggcgcgctcacctcacccgcgagacccgagggagggaagtggtgaacgggtagaggggatccctcaccttcccgggagagggtaggtcgcggcgcgacctcatgctacctctcatgctcaaagaccgcgacatgactccccgacggtctaaccccggcgtcggcgccggcgtaggcagaggagagagggcagcggngatgggtgatcgggccggccgg

SEQ ID NO: 1526 - DNA, 552 bp, Zea mays
  Clone ID: MRT4577_101398C.1
gtgcggcgctcgaggcggcgggctgcaaatcactctcagatcaagcacacattggccgtgagatacagagcatccatgatctccggcatctctgcctacgccatctgccgtgctcatcatcggtctccggccgcatgacgcacaggctcaggatctgacgaaacggcacgcgcttcgccgcccccggcagcgtgcacgccgatggaccccaccgccagagcgcttgaagagcgcgttccagaagttgaagaccaaggtctatgacgagaagccggagctgatcgagcctctcaagtacgagcagagccccaaggacatggggatcgcctgctccgactcccgcgagtgcccgacggtgacactgacgctgcagaccggtaaggcattcaccgaccgcaaaatcgcctccgtgatgccgccctacgacagagatcaagtacgtcggcaccgtgaccgccatcgagtacgccgtgcgtgcgcataaggtgcaggtaatcgcgtcgatcggccacagctgctgcggtggcatcaggtggctcctctcgctcaagg

SEQ ID NO: 1527 - DNA, 338 bp, Zea mays
  Clone ID: MRT4577_101399C.1
tttgcatgtaatctcctcgtatgtccaaaacgttttggggggatctacaaaaacaactctatccttatttaagaaacgctaacacaatccgactgcaaacacccacacacagacagagagatacacatttcatgcttctactacgttcacactattacttgtacggaactcagattctgtctgccccgcacttaatatactgccacagcctatcagacacagcccaaattagcatccccaccttcctgcactccaagagttatgcagcccactctactaccagcagcacgcccaaggacctgcccacgaaccccaactgcgagatccacttcgactcc

SEQ ID NO: 1528 - DNA, 981 bp, Zea mays
  Clone ID: MRT4577_10139C.1
cattgggtacctcgaggccggccggacagcgcaccataaaatctaatccgtctccttcctcttgttcaccaaagcaaaccgaagccgcactctaccgcgctcctcccgaaccacagctatgctcgcccaccgcctcctcctcctcctcctcgccgtcgccgcggcgagcggcaccgccttcgctaagccgacggcgtacgaagccctcgctgactacgacttcccgccggggatcctccccaagggcgtggtcgcctacacgctcgacaacgccacgggcgccttcacggccacgctcgacgcctccgcgtccggcagcgggtcctccgtctgcgagttctccatccagggctcctactcgctccgctaccagaccaagatcaccggaaagatcgcccccgaccacctcaccgacctcgagggcgtctccgtcaaggtcctcttcttctggctcaacatcgtcgaggtcacccggcgcggcgacaacctcgagttctccgtcggcatcgtctccgcggacttcgggattgaaaacttcctcgagtgccccacctgtggctgcgggttcgactgcaacgacctgctcatgctgcagaagcccggcgccgccaccgccaagctgcgcctgcggggtgccttctagaactccacttctgcagatttggtgactgctgctgtaagctgccacgactagtagtgctgtatgtctagtagatgtgggttaataaagagggcaaacttgaaagatcccagcttttagatgtgggatggggtaaccaagttcaggactcgatgtcatgtttcaccaactgtttcagacagttctaggaacagccagagaagcaattaagacctttcaaatattttaatttatacatctctctatggaaattgtcttatttccattgagatgtttgcccctcatgtgaattagtttgtgaagtggtgatagttgaatcccatggatatggatggttgctt

SEQ ID NO: 1529 - DNA, 196 bp, Zea mays
  Clone ID: MRT4577_1013C.1
gctctcccacacagaaaaccctagccgccgtcaccgtatcggcctcccaggtaagcaagatcgtcgagtccgtcgccgtcatgaatcgcaatccccgcgtcacgtgctatcgccggaagtgccgcatggctcactttattgcatcgttctctgtccgtcgagttctcatgtatgtggagctgtcgactgatctcct

SEQ ID NO: 1530 - DNA, 970 bp, Zea mays
  Clone ID: MRT4577_101400C.1
cggccgggtggggcgtttagcagcaattcatcagctagaagttcgaaatgggggtcaagtttttagtccttctcggtgttgtcctggcctctcttgtcttccaggacgtggcatttgctagagagctcactgaggccaataatgaggatgagggaaagaacatgaaacaaggaggaatgactgaattaaaggatgagaaatggggaggtggatataatggaggatatggatatggaggtgggtatggtggtggatatggaaaaccgggctatggtggtggatatggtggaggatacaggcccaaatatggcaggggctacaggtccggatatggatacggtggcgggtatggtggaggatacggtggcggttatggtgggggatatggtggcggtggtggctatggagaaggtggaggctttggaggtgggcatggtggtggtcgctatcctggtgagggcaccatggtggtcatggtggatggaattaagaagcattgctacataaagtttctctatgtccgataacaataaatggcgacgataaatttgaatgctacatgtagttccgtgatggaaatcttatgtattttgtataaaacatggtacatggactgttacgtatgttgcatgaaatactgtactagaataagatctttgtatgccatgtatggtattagtgtgcatgtgtctggcttttgaaaggtgtacctcgtcatttatggacttatatgtatgtatagataaaaataatatttttatcaaggcttgagtcaaaaaaaaaaaaaaaaaaaaaaaaaaaaaaaaaaaaaaaaaaaaaaaaaaaaaaaaaaaaaaaaaaaaaaaaaaaaaaaaaaaaaaaaaaaaaaaaaaaaaaaaaaaaaaaaaaaaaaaaaaaaaagggggggccccttttaaaaaaaccaaatttaactacccgggcctggaaaggaaaaagtttttttttgggg

SEQ ID NO: 1531 - DNA, 385 bp, Zea mays
  Clone ID: MRT4577_101401C.1
ccgggacaggcggaggcggctggccaggatgcgtcagtgggtgggggagaggggactggagcgagagcagcagcaatggtggcgagaagcggaggaagagggggcaggcgagcaggctggccaaggccagttcctcctcttcggcgtcagtggcgtcctcctccgcgtcatgggcgagtggctccactgtcatggactggggcagcgccgaggaggcccagctgcagagcggcgacggcttctccctcctcgtctacgcctggaagaactagtgtgacgggctagcggcggcaattcagtgaaccggctttggttcttaattcagtgaggatttctcttcccattgttgtaagttgcaattgttcagcgagcaatgttcttgtgc

SEQ ID NO: 1532 - DNA, 832 bp, Zea mays
  Clone ID: MRT4577_101402C.1
aacccatgtgcgtttagcatcaattcatcagctagaagttcgaaatgggggtcaagtttttagtccttctcggtgttgtcctggcctctcttgtcttccaggacgtggcatttgctagagagctcactgaggccaataatgaggatgagggaaagaacatgaaacaaggaggaatgactgaattaaaggatgagaaatggggaggtggatatggaaaaccgggctatggtggtggatatggtggaggatacaggcccaaatatggcaggggctacaggtccggatatggatacggtggcgggtatggtggaggatacggtggcggttatggtgggggatatggtggcggtggtggctatggagaaggtggaggctttggaggtgggcatggtggtggtcgctatcctggtggtggagggcaccatggtggtggagggcaccatggtggatggaattaagaagcattgctacataaagtttctctatgtccgataacaataaatggcgacgataaatttgaatgctacatgtagttccgtgatggaaatcttatgtattttgtataaaacatggtacatggactgttacgtatgttgcatgaaatactgtactagaataagatctttgtatgccatgtatggtattagtgtgcatgtgtctggcttttgaaaggtgtacctcgtcatttatggacttatatgtatgtatagataaaaataatatttttatcaaggcttgagtcaaagggcgatgtatggatgaactcatggttcttccatcgttgtgtttttatttcattttcactacatatttctggctccactgcttgtga

SEQ ID NO: 1533 - DNA, 1052 bp, Zea mays
  Clone ID: MRT4577_101403C.1
cacggaaccgtcgaggggcaaggcagtggcggaccgcgtacgccgtggacgggtggatgaccggaggcagattgtggatggcaaatccatggattggaggcctgaagggcactagctcgccgtcgttcactgcgctaggactccggaggcctggacggtggaccggtggacgtgatgaagacggattgaaagagcagatgacttggcgagggcaagcagccgccaggacgcgagccgcgagcgtgaggaagcagctgccaggtcgctggacatctttactgggcatgtgggccaaattttatgtggtgaaaaccccttggtgcaaaaaaaattttgggctacgccctgggccatgacctaggtggcccggggcccaaatccacccctgggcgacgcctttaaaacagtgagtatcgggatactatgtgattttatattttaaaatatcaagaaatacaaacaaatgtgtttacgaaaataaaaccacacactaatatattgattattatattcgaatttaacatatgtttgtagccttctactcgccggtgtcacggtgtgccttgtcagatgcgaagatggcccctagatcactcaaacgctcataaaactcaacacgaacactgaaagaacacaggtttttggccctgccaaattatactgctgccctaggtgtgttctattgatctatttatatacacaattacaaaggttcacagccataacggaaactatccaatcagctatcaatagctaagaaatgaaactaatcaattagcatcaatagctaagaaaggaaactgattaatcaactatcaattaactaagaaaggaaactacccaatcagctaagaaaggaaactaatcaatcaactatcaattagctaagaaaaggaactatccaatcagctatcaattaggtaagaaaggaaactaatcaatcaactaagaaggaaacaaataaaccgagctggattgtgcaacaatgttcccaagataaattgtgtatcgtttagtgtacaaaaagtaatatatttgtgcaaacatcgtcc

SEQ ID NO: 1534 - DNA, 151 bp, Zea mays
  Clone ID: MRT4577_101404C.1
taggccccctggggtctctgacagatacactgatcatcctgacctcctacgcacaccgatacatactgaactagtgacctagtctggagacgtttagagacgcggatcataatccccactttttccatggggctgattagcaaatatagga

SEQ ID NO: 1535 - DNA, 124 bp, Zea mays
  Clone ID: MRT4577_101405C.1
gctcgaaaccaaagctttgctcctcaacgtttccgggggggacggccatcgtaaacgattttttattcaaattcaacaagccggttcatgccgtcctacaagagattgcggatccaaaataaag

SEQ ID NO: 1536 - DNA, 660 bp, Zea mays
  Clone ID: MRT4577_101406C.1
gtagccttctacacgtacttattctttcataacacccttccgctccgtaatacgtctccccctcgctcgccacctctactgttcctaccgaaaatctccctcacccttagtgatcgcaatggccgccttcaacaagattggtgaacttcaaaaacacaaagctcatgaagagcgaaatcactggagactcttctcctgctgtgctcaatgatgcacccatcatgtataccatgctatccaatgtggcccttgactggagagcagaccatccgtaataactagaagcattcagcagctttggatcacttgactgaaacgagcatgatcacacacatgtagactgggatcataagaatcttcgcttttcatgaactactccgacagatactcctgccaagacacaactaattctgcaatgtatggcaacgaaattgatgtatcacacgaaactaccagcatgtgtaatgatagacctgctgataaccgcggtggtggagcatacttactgctgcggctacatgacgaacattttacagatgatggtactattgtaatatcatgctatgttatgaatctaagagcatgctggcatccaaatattaatcttgctgcggaatatcaaccaatctctgctctgcaactacgattgcggaataaaaa

SEQ ID NO: 1537 - DNA, 385 bp, Zea mays
  Clone ID: MRT4577_101407C.1
aagcagtggtaacaacgcagagtacttttttttttttttttttttttttttttttttttttttttttttttttttttttttttttttttggggggaaaaaaaaaagggctaaggaaggggctaattcaaacgggacatgacaagcagctttctttgttcggcccaggcgaaagggactttggggtttcgtcttaaaaacccccctccccaacatggggcaaacccaaaaggccccgatgggcccggcccgtcttgatgtccccccgggagggcccctttgggtcagccagggaaaatttttcagcttttgggccttctgcgcccccataggaagcttatgggcaaaaagggtcggccccccgtcccctgcgttgttccccctgct

SEQ ID NO: 1538 - DNA, 429 bp, Zea mays
  Clone ID: MRT4577_101408C.1
tttcttatttctgggaagccacaaccatcattcaaaaacataattattgaactatatctcatatcgatctaaaagagggcactaccaatgatagcatgttggtagaaacgctgctgggtttgataaatcaagttgtttgaatggccctaatagtagcagttgttagagggtgccaaaactaggcgcttcgagcgagcagaacgacaacaactgttgctgtgtgaagaaggacactttggctcacatgatcttgctagactgaatggtgcgtagctgatgatgttgctaataagcagtagagttcaatgctgccagttggttgaatggaagtaattgctgggggtaggcaacagttagctgtctgaatggtagcagctgttgcataataagcaacacacttgaatgcattcaactgtgttaatggtagaa

SEQ ID NO: 1539 - DNA, 314 bp, Zea mays
  Clone ID: MRT4577_101409C.1
gacgcgcaagccaatgccgagcccagatctgcgcgacatatcagtcgttcgtccaactaactgcactggacgcaatggccaccggggcgaccgaagctaccaagacgactgcaccggcgcatgagcagcaggccaacggcaacggcaacggcgagcagaagacgcgctactccgagggtggtcacaagagcctgctcaagagcgacgacctttaccaggacattctggacacgagcgtgtacccggggagccggaaagcatggaagagctgcgccagatcacctgcaagcacccatggaacctgatgaccacct

SEQ ID NO: 1540 - DNA, 485 bp, Zea mays
  Clone ID: MRT4577_10140C.1
agttcttgtgttttttatctttttatatttttgatcattttgttttcgagcgttggacactagcaaataagcaatgtcactaatgcaccagcacagggtcggcgggctgtcggaccaataaacggggctaacgtaccgacatccgcaaaggacactccgcgggcgagggggcgacatgacgcgcctattgccctgcctgccgcccgcctccgcgtgcgttttgagggagccggcgaccccgggctgcgccggcgcgaacttggtggtgcctccagggaacgtccccacgaacggacccatgggcacttcatcggggagcgccaccagagggtcgagcgcccccacaacccggagcatggaggggcgcgccaaaaccactctaagaaagaactggagccccaccccggcagccttctccggggcgcgcgccgagtactgaatatacagccccggctccttgaagcggtgcagcccgacggggcggg

SEQ ID NO: 1541 - DNA, 585 bp, Zea mays
  unsure (1)..(585): unsure at all n locations
  Clone ID: MRT4577_101410C.1
ggtcgcctgcgtaccgtccgnattccgggtcttactactgttacggcgagaacaggccaagggaaaagaaaaaaaatggtagcggtagaatgcgcaacggctacgaggcggcggttgtgaccgtgaccgtgaccgagcacaccggacgcgacgggcgcaagtgcaacaaccgactgcacggtcttcagcttcatcctcccctacgtcagcttctactaatatcctgcaagctgctgctgtacctcaccgcccacgacttcccgtacgtcgcggagggcatgaaggtcgagctttccgtctcgctgcggagtattaccactagagggccggatgcgacaggacacggcggtgctctgtcaggcgagggcgacgagggcgccgaggtcttcgaggctaaggctcacggcgtggtcgtcgatcacctcgccggaggggactgtaccgacgaagctgagaaggtcttgcagaaatctggtgccctacaccggtgctcatgaacctctaaaggctctccgccagcccggttctcatgcgtaacaatttacaaatatcaacgacggtctaggcggtgtacgtgccgccttc

SEQ ID NO: 1542 - DNA, 119 bp, Zea mays
  Clone ID: MRT4577_101411C.1
tcgattctgcgatgacgcttatgaccgcctatgcccgccacgatgccgctccgcgactccgaacgaccgacagcattcagactacgccatgaggcgctccaagcatcgctccctacaac

SEQ ID NO: 1543 - DNA, 973 bp, Zea mays
  Clone ID: MRT4577_101412C.1
aaagttgaagcaaaacaccaaagttaatcatctaatatacatgtaaacaatgaaccgaccttactgaaaacactcgcactggaccctctctgcgaccaaaaaaatagctcctagagtttttagggactagaggctcaactcatctttgtagaagtgttgtgctgatggaagtgatggggttgcaccataaaaaatgttcctgtaattccataagtacttatacaatagggtttggaggctcgtcggcaaccggacaggaaaacagcaaggcggaagggcattgctcgatcgctggtccgatgagtggcactgtcagggagcgtgacaggggcgacaaatctagacctccacgtcggtaagatgttgtggcaaaatgtcagtgagctcacattttgaggagctgagggtcaatgtcagcgagctcactgttgaggagctgagggtccctgagtaccttggtccaacaggatgaagattgctctaggtgccgcgaaaggactagccttcctccatggaggtcccaaacctagtatatatatatatacgcacgtggtgcagtcgaagttgagggtgagcgggaacggcagcggcgcgccgcactgcgcggggaggtcgcggatggcgtcggcgttgagcggctggtaattggccgccgcctgcttgacgcactcgcacgcctgccgccgctccgccgggccggacggcatggccctgatccgcttcacgccggcgcagcactcggcggccggggccgcctccttgcccgtcacgtagccgacgcaggggcgcaggcttgcgtccacgtccgcgcagttcacgtccgccctaaccgccgccgccgccagcaggaccaacgccactgctgccaccgctgttgttgcggcgccgcccttcttcttcatcatcgccatcgatcgatctgtgtctctctctctcccgaacttgacttgctgctgctggagctcgatcttag

SEQ ID NO: 1544 - DNA, 163 bp, Zea mays
  Clone ID: MRT4577_101413C.1
agggcaagctgcagacacagacatgacaacccagctcatttactccaacctagagctccactcactctacactggccgtacttccagagttgtgacagccaatcggatgctgaagcagatgcctttcaggtatcaaggttacattggtgcaggcctagtttta

SEQ ID NO: 1545 - DNA, 526 bp, Zea mays
  Clone ID: MRT4577_101414C.1
tttttaaaattgcaatcattattcttgaatttcaatgtatcttatcataacatgttcactccgtagcaacgtacgggcatttacctagtatatatatatatacgcacgtggtgcagtcgaagttgagggtgagcgggaacggcagcggcgcgccgcactgcgcggggaggtcgcggatggcgtcggcgttgagcggctggtaattggccgccgcctgcttgacgcactcgcacgcctgccgccgctccgccgggccggacggcatggccctgatccgcttcacgccggcgcagcactcggcggccggggccgcctccttgcccgtcacgtagccgacgcaggggcgcaggcttgcgtccacgtccgcgcagttcacgtccgccctaaccgccgccgccgccaggccctaaccgccgccgccgccagcaggaccaacgccaatgctgccaccgctggtgttgcggcgccgcccttcttcatcatcatggccatcgatagatatgtgtcgctgtatatcccgaaaatg

SEQ ID NO: 1546 - DNA, 637 bp, Zea mays
  Clone ID: MRT4577_101415C.1
ggttatcacaactactgccgcatttacattagtaggagtacattacattacaatgataatttacaccaaccaaaccacacactccatgcctgcgtgtatgtacagtacacaagagaagagcctaacacgtgacacaccgcaccaacagatactaaaacacaacatccccatccagactgccaaatagcgtaggagtactaaccatcaccaactaatccacctgcagcagcagcagcagcataaaccccagcgatagcagcaagcaaagaaagcaccaaacctaactaactgaacagggcgaagcgtagcgaggggagggacctgactagtgggacccccagaggccccacgccttccagctcagcacggagccccaccagcgccgccgcttctcatcctcggcgccggcggccgcggtcggagcgtcctcctccttctcgtcctccgccgtcaggtactccgcgccgtcctccgccttgggggcctcctccggggcggggagatcggacgggggcgggagtgaatcgacgccgacctccacctccttttccttcttcaccttccacctccccttgccctcggcgcgcttcttccgtccgcggcggggcccgcctcccttcccggtcgtgccgaatcg

SEQ ID NO: 1547 - DNA, 305 bp, Zea mays
  unsure (1)..(305): unsure at all n locations
  Clone ID: MRT4577_101416C.1
tctttcgacccacgccttctttttgatcctttttgggttcacttcattgccgggtcaactcaataggtgggatggcgtctcccactttctccccatcattcactgtccccctcctcttacaaaatattacaacgttttttaatcaccttatgaaaccttttaccatcatcccctttttcctcctcttttttttcctcttctccaaaatttcccattactatcnncaggttggttaattttcatatcaaaattatcattaaaccccattttccattcctttttattaaccccttcaaaaatttctt

SEQ ID NO: 1548 - DNA, 445 bp, Zea mays
  Clone ID: MRT4577_101417C.1
tgggaccctcgaggccggccgggatattgcctgagaacacgagactctgagcttatggatactgcctcaggcacagtcgacaaggtctgcaccagagagcgagacaaggcaacgctctcttgatacgtcctcctcatgcgtcgaattacgtctcttaccacactagggcgcccgcgctgcattgcccatgatatgacgcacgccttcttcggattcctcggagacggcctgcgccctcgtcttctcatgcctggtggcagagtacgggaccgcgaagagcggcgtcggcgtgtcgtcgatgggtgtgatgcggccggagctcgtcatgaagtccatcgtgcccgtggtcatggctggtgtgctcggtatctacggactcatcatcgccgtcatcatcagcactgcgcgtctaccccaaggtccactcctactatctttatgatgt

SEQ ID NO: 1549 - DNA, 1029 bp, Zea mays
  Clone ID: MRT4577_101418C.1
ccggccgggtacaacaagtttgttgcctattggttgcatcaagatagggttatcacgtcaccgtgccctacttttcaagatccttgccgatagtgttgggattccatgcaaacttgtcaaagggagcaattatactggtggtgatgatgacgatgctataaacataattaagatggacaatgaaagggagtttttggttgatctgatggctgctcctggtgctcttattccagcagatatcttaagttggaaaggcaattcgttaaattctaatcgaaaactcggcctgaatcgaacagctggatcatcaagtactgttgatgctaatgtggatcctactgtattgccacttgaacctaaaggtggccaactgcctttgttcagcagtggtgattggatgtcagacattgattctggatatgaggcagcagaaattgcagcttctactcaaacctcttcgggtgtcacaccatatctgtttctgctggaagtgtttttggcagttcatggatgctggttaatcatgaccaatcagatggaccatcaacttctgctggtacatcatcgcagcagaaagttgtacctcaaagcgagcatcagcggaatttaaaccgccttccagatctgcaggaaattccagagtcaaaatacctttttgctgatcttgttccttctggggataataagtctaagaaaacttcagtaccattcaatggaccagtttctaatgctgtcggtcgctccaactactctggttctatttcgtctgcagttcctggcactggaggatcttctaggacaaaatctaactctggacctctcaacaagcatggagaaccaacaaagaggctatctggcccccaatcttctggagtaaacccgatggccccgtcagaactctggccctctacctcctgtacttcctacaactgggctaattacatcaggtcctatcacatctggtcagttgaattcgtctggtgctcaaaagaaagtatcaggcccctcttgattctagtgtatcaatga

SEQ ID NO: 1550 - DNA, 523 bp, Zea mays
  Clone ID: MRT4577_101419C.1
cccacgcgtgcgcccagcgtcccgggtcgcgcgggtagggctacaacgcatccgccggcggaggctagggcctccccacctgcaaagcattggcactcccaggcgctccatgaatctcattaacaggcgcacatgtttttatttaaactccaatataaagtaagataaaccagaggggaggtatccaaaactcaaaagtaaagaccatccgacctgccaaatgactgaccacatgcccagtaaacagacaacaagccgcgccaactaacagcagacaaagcgaaccaacaaagaacaatgcaacacagggtaataaagcaaaaagtgacacatctcatagcatactaaaatggaatccatatatgaggaaaaaatggcctcaaaatgaacagaaaggagtgccagagaaagaccaagccccaattatgggaagacacaagcactgttcaatgcaaagtcataaacactgtgcacgcccagataatgtcattcttaagactccaaaaatgtgcttttcaataac

SEQ ID NO: 1551 - DNA, 210 bp, Zea mays
  unsure (1)..(210): unsure at all n locations
  Clone ID: MRT4577_10141C.1
accagggggggagcaccgcccagaaagacaaggacgcgangacaaacaccatattattggacggcaaggacaaggacagagcgggagaaacagacagcggggggggcaccaacacccacaaccctggcagcaacaaacagaggacaccgaacgcaaaacccaaagagctaacgggccagaaagcacaagaagcgaggaacaaggaacaaa

SEQ ID NO: 1552 - DNA, 397 bp, Zea mays
  Clone ID: MRT4577_101420C.1
cgaacgctaaccctagcttctgttagccactctaccgtctgggcccactgataccgaagagagccttatcagcacaacgccgctcaccctcagaccactccataactgcctccacggaccgcagtccactgactccgtcagacctacttcgctgcctgctacctactacggctgactggccataccttctgcgacactcttcattagctctatctaccgcgcgcacccgtctgtacctgccagccgcgcgcctgccgctagtgccccgccgccaccccacgcgcgccccgccgtccccgcgcgctggctcgagtactccgctgtctgctcccattccactctggcccagctgcgtgctgctcttgcatcggccggcggataaacccagcatgcaaac

SEQ ID NO: 1553 - DNA, 277 bp, Zea mays
  unsure (1)..(277): unsure at all n locations
  Clone ID: MRT4577_101421C.1
cagctcgagcctatcattcttctcataaaaaagnacctcgtnctgtacnaatcattacactaaggttcacncnacctaancnccttatcctgctagggctcgtcaattcatcgcccgctcgacttctgatctcgcgggcagagcatctcgcctgctctattgcttcgaatccggatgtgtccgtctactaccaattaacctcccaactatgtgaacaaccccaacttccaccaggtcaaccccaccatcccctactacaaatccaaggagggggggg

SEQ ID NO: 1554 - DNA, 449 bp, Zea mays
  Clone ID: MRT4577_101422C.1
atttctaaaaaaaaaaaaaaaaaaaaaaaaaaaaaaaaaaaaaaaaaaaaaaaaaaaaaaaaaaaaaaaaaaaaaaaaaaaaaaaaaaaaaccaaaaaaaaaaaaaaaaaaaaaaaaaaaaaaaaagttttttccttccccgggcggcctttgaaaggggcaatttttgaaattttccttcaccttgggggccgtttaaccttccttttagggggcccatttccccttttagggagcgtttttacatttaattggccgtgtttttcaaaatttgggtttggaaaaaccttggctttcccaaatttaatccctttgaagaaaatccccttttcccaagttggtgttttaccaaaaaggcccaccccattcccctttcccaacttttgccccccctatttggcaattggcccccccttttaccggccttttaaccccggggggttgggggg

SEQ ID NO: 1555 - DNA, 403 bp, Zea mays
  Clone ID: MRT4577_101423C.1
atctatgacgtttggggaagcccttttttctttcgttcgttttcgttttcttggataaccacgaaacacggaacaacgcgacttcttttctattccacctattaggggggaacgagatcaaacggtattggccccttttgattcacctaatataaagccttttttgcgaagaggagaaaactcagattgcgaatttatcacaacagccggcggggacaggctcggtctagagaggaggttctttttgggccactacttcgcacccttaaacagaaaataagacgcccagaatcaccctcaagtgagaaagctcaaccgccgcgtacccccaggaaaacctaactggtgcccccattgctgatccgaaccacacggggatcaatccaaatgggatgtttctccc

SEQ ID NO: 1556 - DNA, 192 bp, Zea mays
  Clone ID: MRT4577_101424C.1
tttaaacataccgggttatgattgtgtagggtgtgatctactgagacgttgtaccgaagtcacatactaagcatggacaatatttatctgaatgcaagtcgttagcactcagtatgagctaatggttgttcagattattgacgcacgacagagctacgtgtaactcaaatagatcaagagcccgaggtgaat

SEQ ID NO: 1557 - DNA, 344 bp, Zea mays
  Clone ID: MRT4577_101425C.1
cccacgcgtccgtctacatctccggcttcccctcttaataaatattttttatggttggtgtttatttaaaaaggtttgccgttttatatgatccaaacttacataaacatgcattcgaggtaataattattctataatgacacctaaatttaattcactgaccatttaattacaatgccataactgaaaaaactctcaccttaccaatgttaatcgcattccatcacatgcccctttctaaatctgcagtaatactctaaaggatggtaccaattatccttaccaatagttccccaacctgaatcctaaatgggactcgcattgtataagaacattaacaactt

SEQ ID NO: 1558 - DNA, 127 bp, Zea mays
  Clone ID: MRT4577_101426C.1
attgggtcacccggcgtgcgtttaacttaagaagcgccgaaagcaaacacggcttacagcgcttcaagtactaccaaacagaacaacccagaggtgcccaaccgaaaagaatatgctactgccagaa

SEQ ID NO: 1559 - DNA, 417 bp, Zea mays
  unsure (1)..(417): unsure at all n locations
  Clone ID: MRT4577_101427C.1
agcagtggtaacaacgcagagtactttttcccttttttatttttaaatatgagctggaaaggagtattcaaaatgatgaatacgcgatgtacaattttgccactggggctaggttccatgcctagagattattctgttttctttactctgctgagctgcaaaagcatttcaccaacgggtacattccacgttccttctgcatggcactgcctggatgttatcagcagccttgccacttaacagctgatgagagctgatagattcttgaggccctagtccgcagcgatcttgagctcgttcatcctattgctctctgccttcgctcccttgctgtcggccgtgatcctgtgnatggcgggctttagctgccctttctccngctggnccccngcgccttctgcgtggtttcctctgctt

SEQ ID NO: 1560 - DNA, 248 bp, Zea mays
  Clone ID: MRT4577_101428C.1
ggagagaagaagaattggccgttagcaatggtaacaacgcagagtacgcggggtaaatgcaccaatgggagaagattagaaaaaaatatatttctcaccatttcaaatcttcaccatctcgctgaataccaaacgttggtggcactagcaatgtcttagcactttcaccatatactaaacaattacatgtatgcaaaaaaaaaaaaaaaaaaaaaaaaaaaaaagtactctgcgttgttaccactgct

SEQ ID NO: 1561 - DNA, 371 bp, Zea mays
  Clone ID: MRT4577_101429C.1
cccacgcgtccgcgcgtccgtatgatcgaccagatcaagcgcgagatctccgtcatgcgcctcgtccgctagacgaacgtcgtggatctgcacgatgtgatggtcagcatcatcaagatatacttcgccatggagtacgtccggggcggcgaactcttcgcccgcgtcgccagctgtcggctcaacgaggacgccgcgagaacgtacttccaccagctcgtcggcgccttcgactctctgccacagccgctgcgtctagcagcgcgaccgcaatcccgagaacctcctcgtcgaccatcagggcatgctcaaagtctccgatctccgccgcagcgctctcatgtagtgccagcatcaagatcgcctgctgc

SEQ ID NO: 1562 - DNA, 139 bp, Zea mays
  Clone ID: MRT4577_10142C.1
gcacgcgtacataagactaggatgcagctctactggcctcgagcggctccagaagcactgtaactgactctacctaaccaattgaatgcacctaccctaacatggagggacctgtcttagcttatgcagtaactaacat

SEQ ID NO: 1563 - DNA, 186 bp, Zea mays
  Clone ID: MRT4577_101430C.1
gagctcactattcggttttccgcctcgccttttttttttctaaggaaaaaaaatgtgtagctgatgttatcaattttgtcacaacgcgaaaagggaccagaaaactattttatgaccagggactattggattacacacacgagactgtgctatcaacctacctgcaagcagttggtaactgctact

SEQ ID NO: 1564 - DNA, 374 bp, Zea mays
  Clone ID: MRT4577_101431C.1
ggttagaacaggtgctatacgaggaggggcacagattacttgaacatacggccaaatttattccgggtttacatccaacatacttgttatctcatcagatacccaaccaataacccgggggatgcttaaaatataggacagagacacactttataatttaacggtcgggacggacgacaacaggccgggagcaaagagctctgcgttattttgttttcgaccgcgtaacggggacggatgggcacacacaaagaggagggtacgtactagggcatgagggggctcttatcatcattattaccatcaagggatcctttttgccggggggctaggacaaaaccctttcattgctccagaccacctaaatggttcaa

SEQ ID NO: 1565 - DNA, 383 bp, Zea mays
  Clone ID: MRT4577_101432C.1
ccttcttcggctctcaggagcgtcggccattgctgctggaaaagcagaccatggggagtccctagtgcgttctccaaatcagtcatgtcgatggcgatggacggaccacttttatgccgccctgcaatgcaggccaaatcgactgctgatgcgctgatcaacaactccctgaccagattctggcagcttgggaccatttgaaaatacacgaacgtatcaagattcatttgtcccatctatgatccatctactaagaacatacttacatgctgtagctacagctcgtcttctgacagcaatggatacatagctaaaaactttagcgacagtgatcaagattatagttaattctactgtgctcgcaccagctgaagtgaaaagag

SEQ ID NO: 1566 - DNA, 213 bp, Zea mays
  Clone ID: MRT4577_101433C.1
cgattcccggtcttctcattcctcgacatggagatccagcacgacagctactggtgtctgtttttggcgattctgatagcgaggggtttctccaatgccgcgctgggagagacagcaccgtcggttgtggcgggtttggccaattgttgggatgtgccaggaggaacatgaacgccgaggcagcttttagaggtctttatgtggccatcaagt

SEQ ID NO: 1567 - DNA, 439 bp, Zea mays
  unsure (1)..(439): unsure at all n locations
  Clone ID: MRT4577_101434C.1
cggtccggcttcccgggtcgccccgctccgacagtcctttactcagggaaggtgctcagcgatgacaccacttagaggaaatcagtgactgagnataatttccttgttataatgctcagacggtagcctacttgtttgtttttctggttgacacatggcaattcacgagtatgacttgagatgataagaagttattgccaaaaccaaatatgaataactgttaacgttaactgaataactgtcatagtgcattgtattgtttgaaagaatttgtgcttcatttcgtattattagcttattaggcaatattgtatatatgggtgcaaggctactgtgaatttggaatgtctacaatttcttcaaaagttatatatcttatcacagtacaattgtaacctttcacagaacaagggnatcatncaagtgcagcaccggctac

SEQ ID NO: 1568 - DNA, 447 bp, Zea mays
  Clone ID: MRT4577_101435C.1
ttcgctgccaagggctgctccggctggggggtcgggcggcagcccgtgctgagggcgctcctgtactctccgcgccttcacgctcggcgagtccaacacgttcccgcccgccctcaaggactgcgcgcgtatcaaccccttgaagcccgacgccaccgtgctcgtggccggcagcaacaccaactcggcctacaacttcagcggcgtcgacttccagaccgaggtgcgcgtcgagcgcttcaccccgccgtacctcgccccggagcgcgcggccaaccgccccgcgatcgacgtggccaccgtccccggggacggcatggcgtacggggccaagttcacgttccagttctcgacgcccgtgcaggccgtggccgagcccgacctgaaggtgaccatgtacgcgccaccgttcacgacgcacggttacttcatgaaccagcgcctgct

SEQ ID NO: 1569 - DNA, 311 bp, Zea mays
  Clone ID: MRT4577_101436C.1
ggcggctgaggcaacgcctcttcctcgcaccaccacgggcactcaacacagcacaggcagttcgagagagagagagagagagagagagataaagatgtcggggttcgggcaccatcaccacaacgagccggcttccccggcgtagggccccaaccaggtgttcaagatctactgccgcgccaacgataactactgtctggccgtacgcgaccgtgcccttatgctggccccggtgaaacttaaggacgaccaaccacacttgtacaaggacatgcgcttgagctcccgggacaaggacgaggaaggtatgc

SEQ ID NO: 1570 - DNA, 2328 bp, Zea mays
  Clone ID: MRT4577_101437C.1
ccggccgggaccccacgcgtccgcgaggttctctccgacaatgggtcctctcctccgcgccgccgcgctctccgtcgcgctcctcgccctcgccgccgtgggcgaggcgcacagcgccaccgaattcctcaacatcttcaaaccgcggaatgagcacgactacttccacaacgcgaaccaggaggaggatgtgatgccccgggccagcgaccagcagaacctcataacggcgccggtgaccaagagcggcctcatgaaggtgccgccccggtccgcgcccaccgcggtggcgcaggacacggtggtgctccccgtggacagcgccgcggggttccccggcgcttggtccatcatcagcgagaacgcgggcgtgtccgcgatgcacctggtgatcatgcggagcgacaaggccatcatgttcgacacggtcaccacggggccgtcgctgctgcggctgcccaaggggaactgccgcctcgatctccgcagcaagcaggtcggcgccaaggactgcgccgcgcacgccgtcgagtttgattacgcgacaggcggggtcagggccctcaaggtcttgacggacgtgtggtgctcgtcgggcgcgctaaatgagaacgaaggcggctcggagacgaatggcagtcgcgtttggcacgacaatacacaagtgtccaccggagtagctggacctctcacaaccgcacggtcggaggacgtgcccgaaggaagatggtacgggacgcagcagctgctcccggacggccgctccatcgtgctccgcgtgttagtgctgccctaatatttggggcaacacacatatgtggtagcgaatgcccaagccattcccctccagatactccgtgacaccaccgacgacgtggagaacaacctgtacccgttcgtccacctccttcccgacgggactctgttcatcttcgccaacgaccgctccatcctgttcgaccccaggaacggccaggtcgtccgcgagttccccgtcctcccaggcgggggtcggaactaccctgcctccggcatgtcggcgctcctgcccctcgacctccgccgcggcgacgtcctcagtcccgaggtcatcgtctgcggcggctcccccaagaacgccttcacgctcggcgagtccaacacgttcccgcccgccctcaaggactgcgcgcgcatcaaccccttgaagcccgacgctcggtgggcgctggaccagatgcccgtggcccgcaccatgggcgacctgctgatcctgcccaccggcgacctgctcattctgaacggcgcggccaagggctgctccggctggggcttcgggcggcagcccgtgctgagcccgctcctgtactctccgcgccaggcgcggggctcgcggttccgggcgctggcgccgaccaccatcccgcgcatgtaccacgccaccagcgcggtgctgcccgacgccaccgtgctcgtggccggcagcaacaccaactcggcctacaacttcagcggcgtcgacttccagaccgaggtgcgcgtcgagcgcttcaccccgccgtacctcgccccggagcgcgcggccaaccgccccgcgatcgacgtggccaccgtccccggggacggcatggcgtacggggccaagttcacgttccagttctcgacgcccgtgcaggccgtggccgagcccgacctaaaggtgaccatgtacgcgccaccgttcacgacgcacggctactccatgaaccagcggctgctggtgctgtccgtcaccgcgttcgcggccaacgggcagaggtacacgataacggtcgacgctccgggaaagcctgagctcgcgccgccgggatactatctgttgtacgtcatagcgaaaggcgtgccgagcaaggccgcgtgggtgaaggtacacaaatgagaacgaaggcggctcggagacgaatgccagtcgcgtttggcacgacaatacacaagtgtccaccggagtagctggacctctcgcaaccgcacggtaggaggacgtgcggcggtggctgcgcctgtgcatcggatttcgtttgttttctccatgaattttgcatcgcgtgttagtgctccctaatatttggggcaaaacatatgtttagtagagggatatgggtcgactcagattaagtaattagcgagccaaatgtggtatcgtcgtccggttattggtaatgtatctgctgtggtataaatgtatctgctgttggtatacattatgaaatcacattttaattttctatgtagagaccgacgggccattttatcctcttgtacatcacatgtgtgaaatgaaagtgtgggttctaattgagggtctgtttg

SEQ ID NO: 1571 - DNA, 311 bp, Zea mays
  Clone ID: MRT4577_101438C.1
aaaaaaaaagaaattttttcctggaatggacaaaaaaatttcggggggcttcccaaggtgatacagaaaagagagaaagaaaaaggacagtttttgggcaaaggattgactccggggatttttgcaatttttacaagatcagttagatttgcaaggggacgcttttacattgggatggccaaaaaaaggggggaaacggatttgatcttgtttataaattaaaaaaatccactaattttgggggaggtgaaatcaacctatttgtttatttttccccttgccttttaatggggtttaaagttgggaaaact

SEQ ID NO: 1572 - DNA, 687 bp, Zea mays
  Clone ID: MRT4577_101439C.1
atgtatggtttacaggtggtgatgaggaggatggttatgatcatgcttatggtaatgaagaaaagaaaaagagaaaagaccacctgggccgattctggcgcccttggcccagctctctactccctcggcccaactcccactccgcgcggccctgtccctctggcgcgtacgcttctcacttgcatgcgggcccggggcgtcgggagcttcttctttctccgctgccatcgcgtcacgcctgcgtccaggaaatgggatcgcgccgccggagctccctggaggttccactcgatccgaaaaccacaccgagatcccgggctgcgtccgccgcccctgtgcgctggtgtctatcctccctgcgccttgcaacaggcttgcgcgatccgcgattcacgcggtcggctcaacggactccacagaaatcgcgcgcgcgtggaatccggattggctgctcaccacctctatccagatccccctgttgcgcatatatatccgcgctgtgctcgcctctcccacaatcctagcccagtcctcgtgttcgacatcgagagtacaggattcaccatagcagcgggtgtgcggggagacctaccaccgccgccgtggaacatcgtccctgcttgtgccccagtcgtgatggttgcccaggatgctccgccattacccaacgatggcgcgggcgtgtga

SEQ ID NO: 1573 - DNA, 171 bp, Zea mays
  unsure (1)..(171): unsure at all n locations
  Clone ID: MRT4577_10143C.1
agccacgcttttcgcggnacgcgtgnggtatcaaaaagcaaaatggtgtagaattagaacctactcatncaagnacagtaaaggcgttctgaagggttcagtaataactagtaccaagggtgcagggngnncagttggtaaaagaagctttatccnntctaacnnttcaac

SEQ ID NO: 1574 - DNA, 586 bp, Zea mays
  Clone ID: MRT4577_101440C.1
aagtccgagcaaaaccaatcaaccacaggtcgatcgattcgcgaagtaccctccgatcacaacccaagaccgccatggctgacaagtgcggcaactgcgactgcgccgacaagacccagtgcgtgaagaagggcgacggctacggcatcgtcatggtcgacaccgagaagagccacttcgaggtgcaggaggccgcggagaacgacggcaagtgcaagtgcggcgccagctgcacctgcaccaactgcacctgcggccactgaacaggcccgccccgctgggcctctcggtcatcgcgtacgcctctacccgtactagtaacccgtgtcaataaaggtcgatctgtacgtgtgtgtctacgtatgttgtgttgtcgtcgtgcaagaacctgaaggttggctgatgcgtgcataggataggatcttggatcagccgatcggtcccgtgttcctcccctgtaaccagtggctgagcctcaggtactactactatgtggttgtgagctcgtacgtgttgtggcatgtgacttcatttcgcgtatgcgtgttgcacggaatgaaatttgtcgtgtggttaactagtaaaa

SEQ ID NO: 1575 - DNA, 411 bp, Zea mays
  Clone ID: MRT4577_101441C.1
ccgtgggcgagcaccgcgggcacaaacaaagacacagcgagacagggcgacggccggacgaaaccctgcgctcaacgccggaccgaacctgactgaggcactcacggctatgggcggcgaccatggaggggggcacagccgggggagacgttccaccagaaggggggggggatgacgggcaggaccctacgtgacgacccggaacactggcgcacggaccacgcgccatcgcacatggtaggggcactgcctcatgctgcattcccatagacatgaaggccggcgagctcgaggtatacatgtgtatgcccatcacccagactctgaccctacgatctcctggttggcgtgcacggcctataggacgagagcggacgcgggatatatcctagaaattagagctgcgcgaaa

SEQ ID NO: 1576 - DNA, 526 bp, Zea mays
  Clone ID: MRT4577_101442C.1
catctccaatacgcccaccactagtgtttgcttgtggagtccttacagggacctgtgatcagacagactacggggccacacagaaggctgattacccaagactactatactactcccatacccccaaatacggaattggtgggcgatccaccaacaaggacatcacagcacatatcatctctgctagtataacaggtgatatggctcttgctgctgctgactcccatgactggccacgatatggtctcgaaactggtacgaccaactatgcagctgcctactgaactgcccttctgatggctcgccgggtgctcaagacccgtggattacataaggaatatgtgtgtcatgctgacgccactggtgaggatttctctgttgagccagctgatgagaggaggcctttccgcgctctcttggatgttggccttattaggactacaactgcgaaccgcgtcacttggggacatcaacggagctttggatggtggcccgaatattcctcaccgcgagaagaggcttgctg

SEQ ID NO: 1577 - DNA, 611 bp, Zea mays
  unsure (1)..(611): unsure at all n locations
  Clone ID: MRT4577_101443C.1
gtaccccctcgagnggccggcccgggaaaaaaaaaaaaaaaaaaaaaaaaaaaaaaaaaaaaaaaaaaaaaaaaaaaaaaaaaaaaaaaaccaaaaaaaaaaaaaaaaaaaaaaaaaaaaaaaaaaaaaaaaaaaaaaggtttttttttttcctctttcttgggcccttccttttccgaatttgggggggccattggggggggggaagttagggaacaaaagttccttgaaggggaagggaggggcccaaaggttaattttagggccgcctaaaaaaaagaagaacgggggggttcttcgctaaccccgccgcgggggttgcttgcgcggttgccctcccctgtttggggctttccgccgggaactcgcgggatttgggggggcgaaaggagggggggcgcttccgcttgtcttggggttaacggggggttgggcccaacctggggttaaacgggggggggggggcccccaccgccgcggggttcctgggttccgggttgggacccgtcgggggggtcggggaagggggaattttggggccaatgctaaacctcgtcgggggtttaaaaacaaaacccgccgccgggctctcaaaaggcatgaccatgggg

SEQ ID NO: 1578 - DNA, 521 bp, Zea mays
  Clone ID: MRT4577_101444C.1
gaggtgtcgtgtctcgtcccggcatcggcgaggaaggagcacggagcttctacttccacagcatggcaccacggtggcatcaggcaggagcggaggcccggcgcccccgccgtcgcccaaggtgtaccgcgtggatgccagggacttccgggagttgctgcagaggctcacgggcgccggcacgcccggcgccgccgccgcggcgaacggggccggcgaccctggccgccgcaccagagggtgccggtgaactccggccatggccgcggcgatcgtcccgcgcccgcttcggcatagcagttctgactacgcgccctggattctccgcgccgctgctcagcccggagtcgtacggcgcgccgggcttctgcggccccgccggctacccgcaccacgggagcactggccctttgctctagggccgcccgcctatgctagaaaacagagccctcctgtacatctcgctttgccttgcatttcggtcatgaatgaatgactactactagttcactacactacat

SEQ ID NO: 1579 - DNA, 403 bp, Zea mays
  Clone ID: MRT4577_101445C.1
cgtaagctcggaattcggctcgagcgaacagataaggactttttctagtagaacgaggccgccctcagctcggtggtatctctcacgagaagcaagctgacccctgatgagcacatgactggcaggctactcaccattctggtggtctccgtatccacactcgacgaggcagatggccagcacctgtacgtgtgccacaatgacacagaccaacagcggctcatgttcacgcagatggtgcagaaggaggggaggacgatggctgagcacaaggaccggtacgagaccaccaatgccttggaggcacacgctacctgtatctgggaccactgcggataaaccctcaccaggaagaacatcaacctggacatggagtactccaataccaaacacatcggcatgg

SEQ ID NO: 1580 - DNA, 350 bp, Zea mays
  Clone ID: MRT4577_101446C.1
ggcgcgtgcgtgcgttcgtgcatccaccgccacgcttctgggcaccatgtctttcaccggcacgcacgccacgtgtccggcgtgcgactggaccgtccacgtcatcgccgtcttcatggccgtcggttgcatctaccatatcggatgcttcaagtgcagctaatgcatcggggtcctctcgatgtgcaggtcctcctccatggacggtgtgctgtactgcacgacctagttcgatcagctcttcaaagagactgggaccttctcctacaccttcacgccatctgccatgtcaatagatgacggtgaagtgacatggtgctcaaccaatctgtcgtctgcattttctggtt

SEQ ID NO: 1581 - DNA, 2244 bp, Zea mays
  Clone ID: MRT4577_101447C.1
atggcgcagtggcttaccgggtctacgctcgccggcggtcggagggagtccggcgatcgtggactggcctctccggcgaagcagacttcgattcctcgctcggggagcttcaacgaggtgtgctcagtcctctccgagggtcggacggggttgggaaaggcttggttggccggtctacggtggcaggggctcgggtggccgcggacacgccgtgcacgggcaaacgccggtgagtttgagctccggttatcaagtgtacaacaacttttatatttggcccaagccatgatcataaggtttcatgaccttttgatcccacttacatctagggttcctattgtccaaaaagggtttgctttagggttttgggaaattctccccttagatgtgcatgacaagctagggcatgatatccaagatgggtggcacttgcttaggaccttgaattccaagtttgagatactttgctcaaactatcccacatgtgatagtaggcttaacaggctcccatcgttttctcaacgagtggtgaccgccgccaccgataactggcgctacggggccctgcgcgaaagacagaagaatctccagccccttttgaaggccttggaggagctgcgagaaggagggctcaccaccgcgggggtggttgcctccattcatcgccggagggtgctccccttgacggagcggcgactgccgctttgggagatgacgccgggggtcgacttggagggtttgcagatgtcctcggacccccttcccgccgacgacctccacaggcgggtagccgacacggtagggaagttagacgccggcgccttttcccagctctcgatgcgtcccgatcgcgggtgtgtgtccctggtggggtttcacaagccttccctgccaccggtcctagaggatgcggtggaccgagctgcgcggagggtcgccacagagaagaggaaggagaagaaggacacgaagaaggctcgggcccgcgagcggatgcgggctcgggacgccttggaaaggcttcatcgtcggcaggagagggatgggctcccgagggagctgtcaccggagacgcctgatgacgacgacgacgatgaagacgatgatgaagacgacaacatggctgcccgcctcggccccagcccggatctgaggttgggccaggggtcgtcgagccagcccccgagcgggctggcgccgtcggtatccggggccgggacgtcggggtcccggtccgaagaacgggggcaggccaagggggtacttgaccccttggctgaggtagttgaggtgaccccggggagtcaggccgagtcgcctgttccccaagaatcgttgcccgtgccgactgcgcaggagggtggtcctcgggtcgtcgtggctgcgcctgggcagtccgtccctctggtgcctcgggcgcccaaggcaaggatggtgccgaagccggcagcggggctgacctcggtgccggccttcttacaagatgccccaaagcggggggcccaggcggcacaagttgtcgtggggcgagctcccgaggctgactcctccgtcggggcggccgtcgtgccgagggagactgctggcgcggctgcagcctcgagcccaccagacgcgttgccggcgctggcaccggcttctgccgaggcggttgccgttctggccgtggagccacccgtcgccgccgacgcggagatggccgaggcatcgctacttgatgcctcggaggagggggcgcagaaccgcgacccgtcctggggagcggcaacctcgtccccgcgcggcgtagtcccgacgggcggcgtcagtcgctccggttctggaccagtggggcttcggatcccctcttcgttcttgacgatgagcgagaggagcagtcttgggacgagctttgacctgacggatctgagcgccgccaagtcgtcgttcatccgccgcgaggccgatgtctggggttcgctgcggtccctgaggaccacgcttactggggctaccgagcgcctctcccaacggagcgctgaggtggcggaccttcggttgctctgtgtcgatctgggagcagaggcagcggcggcacgcgcagaggcgcagcgggtcagcgaggggtattgcccaagcgcggtgctggcgaccaccttcaaaggagagatcctcccgcttgtgccgtcgtccgaggccggggcggatctcgccgagggtggagacgaagccgagggcgcggctccttctccgggcgacgcctga

SEQ ID NO: 1582 - DNA, 2541 bp, Zea mays
  Clone ID: MRT4577_101448C.1
atggccgaccgggtggccgtcattccgccgcgcgacccgtggcctttctccaccgtcacggtggacgatccagaggcccttgttgccgatggcttgcttcgtcccctctccggtgacccgcagtcggagtggattgctcccccaagcggagccgccccatccctgccactggggtatgtgctgagtttcgtctctttccacgagcgggggttcagagtgccagcgagtcgtttcatgcgggcgattctgcatttctacggggtggaactgcacaatctcagccccaactccatcgtgcaagcagccatattcgcggcggtatgcgaagggtttttggggattgaccccctctgggatctgtggacccatctcttctccgcggagccttttgccttgacgacgggggaaaggagagttcgcatggcggtgcgagccggtggctgcatcctccagttgaggcaggtgcgtgcgcaacagtacatccccgccatccttgtgtcttcaaacaaggggtggcagcgccgatggttttaccttcagaacgacgatgggaggctcccatcgttttctcaacgagtggtgactgccgccggcaccaactggcgctatggggccccgcgcgagagacagaagaatctccagccccttctggaggccttgcaggtgctgcgagatggagggctcaccgttgcgggggtggttgccgccatccatcgccggagggtgctccccttgacagagcggcgactgccgctttcggagatgatgccgggggtcgacttggagggttcgcggatgtcctcggtccccctcctcgccgatgacctccacaggcgggtagtcggcacggtaggaaagctggacgccggtgctcttacccagccctcgatgcgccctgagcgcgggtgcatatccctacccctgagtgggctggcaccgtcggtatccggggccgagacatcagggtcccggtccgaagaacaggggcaggccgagggggtacttgaccccttagctgaggtagttgaggtgaccccggggagtcaggccgacccgcctgttccccaagagtcgttgcccgtgtcgactgcacaggaggctgatcctcaggtcgtcgtggttgcgcctgggcagtccgtccctctggtgcctcgggcgcccgaggcaaggatggtgtcgaagccggtagcgaggcaaacctcggtggtgcccgcggggaccgaggctcgaggggcctccccgcaggcacgattggtcgtggcccgaagtggcaaacggaggcacggttcgaccggtctggctccccggaaggtcctcaagacggcgtcggcttctacagccagtgccgcaccgggcctcgccggccgactggcctcctcacaagatgccccaaagcggggagctcaggcgacacgagttgccgtggggcgagtccccgaggctaacccctccgtcgaggcggccgtcgtgccgaggggggctgctggcgcggccgcggcctcgagcccaccgggcgggttgccggtgctggcactggcttctgccaaggctgttgtcgttctggccgtggagccacccgtcgtcgccgatgtcgagatggccgaggcgccaccacttgaggtcggcgatcgggaacatgcccccttgaccgaggaggtacccggtgcgtcggctgcaggaggtgccggcgcctcggaggagggaggcgcagaactgcggcccgtcctggggagcggcgacctcatcctcgcgcggcgaggtcccaatgagcggcgtggggagaggctacggttctggacccgtggtgctttgtatcccctcctcgttcttgatggtggggtcgcttcggtcgaccctggaggtcctttccagggatgttcccaggatcttccaggtaaggatttcaggcatacctttcatgtgatcaaggcattctttgtgacgccccgcttcccttcctcgggatctgatagatctaagcaccgccaagtcgtcattcatctgccgcgaggccgacgtctagggttcgctgcggttcctgaggaccacgcttgccgagaccaccgagcgcctctcccaacggagcgtcgaggcggcggaccttcggcggctgagcagagggaggccgaccacgtggccatgtccgaggctatctcggccttctgccagatcttcggtcttgacgacgtcccctcgggaagctcccctcagagtcgcctgcaggccttgggtgaccacacgcgcggcagactccgcgaggcgctgcatcacggcgttaggcgggccttcgccgtgctcgcttcccactacgatgtggatctggagcgggtcagcgaggggtactgccttcccgacgaagatgaagccgccctggccgaagttcagaggcttgacgcggccgccgcgggcccaagcgcagtgctggcgaccaccttcgaggcggaaatccttccgcttgcgccaccgtccgagggcggggctgatttcgccgagggtggaaacgaagtcgagggtgcagctcctcccccgggcgatgcctga

SEQ ID NO: 1583 - DNA, 837 bp, Zea mays
  Clone ID: MRT4577_101449C.1
atggttgcccgcctcggcctcagcccggatctgaggctgggccaggggtcatcggggtcccggtccgaagaacggggggaggccgagggggtacttgaccccttggccgaggtagttgaggtgaccccggggagtcaggctgacccgcctgttccccaagagccgttgcccgtgctgactgcacaggagggtgatcctcgggtcatcgtggctgcgcctgggcagtccgtccctctggtgcctcgggcgcccgaggcaaggatggtgccgaagccagcagtggggctaacctcggtggatctgacggatctgagcgccgccaagtcgtcgtttatccgccgcgaggccgatgtctgggagctcgagtctgccctcgatgagtccaccaaggcacttgcccaggcggccgagcagagggatgccgaccacgtggccatgtccgaggctatctcggccttctgccgggtctttggtctcgacgacgtcccctcggggagctcccctcagagtcgcctgcaggccttgggtgaccacgcgcgcggcagactccgcgaggcgctgcatcacggcgtcaggcgggccttcgccgtgctcgcttcccactacgacgtggatctagagcgggccagcgaggggtattgccttcccgacgaagatgaagctgccctggtcgaagtccagaggcttgacgcggccaccgcgggcccaagcgcggtgctggcgaccaccttcgaagcagagatccttccgcttgcgccgtcgtccgaggccggggcggatctcgccgagggtggaaacgaagccgagggtgcggctccttctgcaggcgacgcctga

SEQ ID NO: 1584 - DNA, 174 bp, Zea mays
  Clone ID: MRT4577_10144C.1
atcagacactctcgtctttcatccgccttcgcctccaatcgcgagggctctacgtctcgtccaggaaagcgagagctctgcataagaacaacacatcaaaagcgtgatcagctcgacgccaacgtaacctcaacaagcaagcgtcaagactgatctcgacgtccagcttcgatc

SEQ ID NO: 1585 - DNA, 374 bp, Zea mays
  unsure (1)..(374): unsure at all n locations
  Clone ID: MRT4577_101450C.1
acggccagggccatcaccacgctgcntaactacgatctcgtagcggcggcgcacatagcgagcgacggctcggtggctactccagcgaaggtcacccaaaagataggcactatacctgaacacatactttatttagcaggtgtagacgagaccatgttcgggttaagaaagagtaagggctacaccgangacacgcggttgggcaactggaagctgggaatcggagccgccaggattgctgacaccctgcctgctcagtattgaccccaagaagttcccgcagaaccgacattacctccttgactgcatagacctgtatgtagtgctgaatggggagctgctgatccttagctacaccaaggagaaggatgcca

SEQ ID NO: 1586 - DNA, 270 bp, Zea mays
  Clone ID: MRT4577_101451C.1
atggcgcagtggcttacccggtctacgctcgccggcggtcggagggagtccggcgaccgtggactggcctctccggcgaagcaaacttcgattcctcactcggggagcttcaccgaggtgtgctcagtcctctccgagggtcggacggggttgggaagggcttggttagccggtctacggtggcaggggctcgggtggccgcggacacgccgtgcacgggcaaacgccggatcacctgttggctacttgttctcaagtgctaagagttaa

SEQ ID NO: 1587 - DNA, 305 bp, Zea mays
  Clone ID: MRT4577_101452C.1
aaaacacaaaacacggggttttacatgcccaatagtggcttccaaaattacacaaaacaaccccccttccattttgccccccggtttacccatttttttcccgaccaacccaacagcatttaacaccgacataaggaatgacttttatttggggaccaccaaaatattattggggcaggacgacttaacccgacgactaaagaagcaaaaaaaaaaaactccacatgtagtctcctccttttcccaggtcccagggcagggcagggcagggccccgccttttttaattccccctctttatttttt

SEQ ID NO: 1588 - DNA, 1698 bp, Zea mays
  Clone ID: MRT4577_101453C.1
atgcgtcctgatcgcgggtgtgtgtccctgatgagtgtccgctccttcttccttcttgtgtcggattgcccttggttctcacagccgagacttttcgcccgtctccaggaggtggggtttcacaagccttccctgccaccggtcccggaggacgtggtggaccgagctgcgcggagggtcaccgcggagaagaggaaggagaagaaggacacgaagaaggctcgggcccgcaagcggatgcgggctcggaatgccttggaaaggcttcgtcgtcgacaggagagggatgggctcccgagggagccgtcaccggagacgcctgatgatgatgacgatgacgatgatgacgaagacgacgacatggccgcccgccttggcctcagcccggatctgaggctgggccaggggtcgtcgagccagcccccgagtgggtcggtgctgtcggtatccgaggcgggggcatcagggtcccaacccgaagaacagtggcaggccgaggggttttttgaccctttggcccaggtagctaaggtgacctcggggagccaggccgtcccgcctgtgcccctagagtcgttgtccgtgccggcagcagaggaggtcgatcctcgggtcgccgtgttcgcgcctaggcggaccgtcccttcggcgccctgggcgcccgaggcagggatggcgccgaagccggcagcggcgcaagcctcggcggtgcccgcgggggccgaggctcgaggggcctccccgcaggcacgattggtcgtggcccggagtggcaagcggaggcacggttcgaccggtctggctccccgaaaagcccttaagacggcgccagcttctgcagctggtgtcgcaccaggcctcgacggccggttggcctctgcacaaggtgcccccgagcagggggttcagtcggcacaagttgccgtggggcgagctcccgaggccgactcctccgtcgaggcggccgtcatgccgggggagactgctggcgcggctgcggcctcgagcccactagacgtgttgccggcgctggcaccggcttctgccgaggtggttgccgttccagccatggagccacccgtcgccgccgacgctgagatggccgaggcatcgctacttgatgcctcggaggagggggcgcagaaccgcgacccgtcctggggagcggcaacctcgtccccgcgcggcgtagtcccgacgggcagcgtcagtcgctcagagctcgagtctgccctcgatgagtccactaaagcacttgcccaggcggccgagcagagggaggccgaccacgcggccatgtccgaggccatctcggccttctgccgggtatttggtttcgacgatgtcccctcgggaagctcccttcagagtcgcctgcaggccttgggtgaccacgcgcgcggcagactccgtgaggcgctgcatcacggcgtcaggcaggccttcgccgtgctcgcttcccactatgacgtggatctagagcgggtcagcgaggggtattgccttcccgacgaagatgaagctgccctggccgaagtccagaggcttgacgcggctgccgtgggcccaagcgcggtgctggcgaccaccttcgaagcagagatcctcccgcttgcgccatcgtccgaggccggggcggatctcgccgagggtggagacggagccgagggcgcggttccttcttcgggcgacgcctga

SEQ ID NO: 1589 - DNA, 258 bp, Zea mays
  Clone ID: MRT4577_101454C.1
gccgattgtcgtcgttcgttatcacgtcgtgcgtgcagcagccccggatctgtgcagccctggtcttgttgtcgacattgctcgccgtggctcaacttgctagttcgtcattgtttcgtcgccacgtcgttcgccgttgagcctcactgcccatcgtgaagtcccctgctgtcagcctccgcactcgtcctaggccgtcgtagccagtttgcctctatctcgtggtggtgttgcgttgccgtcgagtcccgatatcga

SEQ ID NO: 1590 - DNA, 1044 bp, Zea mays
  Clone ID: MRT4577_101455C.1
atgggcgaccgggtggctgttattccgccgcgcgacccgtggcctttctctaccgtcacggtggacgatttggaggcccttgtttccgatggcttgctccgtcccctctctggtgacccgcagccggagtggattgctccccctagcggagccgccccatcccagccgccaggtgccggcgagtcgtcgttcatccgccgcgaggccgatgtctggggttcactatggttcctgaggaccacgcttgccgagactgccgagcgcctctcccgacggagcgccgaggtggcggaccttcagttgctctgcgacgagctgggggcagaggcagcggcggtgcgtgcagaggcgcagcggcgtcagtcggagcttggccaggccctcggcgaacgggaccaatctctgggccgggccgccgaggctgagagtcgggctgaggcccttggaggccagctagccgaggcgtctgcccgggccggagcccttgcgacggacctggccgtggccgtcaggtctgctcagtccgcccaagccacagtcttggatcagcgtgcccgggccgaagggcttgagtctgccctcaacgagtctgccaaggcacttgcccaggcgaccgagcggagggaggccgaccacgtggccatgtccgaggctatctcggccttctgccaggtctttggtctcgacaacgtcccctctgagagctcccctcagagtcgcctgcaggccttgggtgaccatgcgcgcggcagacaccacgaggcgctgcatcacggcgtcaggcgggccttcgccgtgctcgcttcccactacgacgtggatctggagcgggtcagcgaggggtactgccttctcgacgaggatgaagttgccctggctgaagtccagaggcttgacgtggccgtcgcgggcccaagcgcggtgctggcgaccaccttcaaagcagagatccttccgcatgcgccgtcgtccaaggccggggcggatctcgccgagggtggaaacgaagccgagggcgcgactccttctccgggcgacacctga

SEQ ID NO: 1591 - DNA, 312 bp, Zea mays
  Clone ID: MRT4577_101456C.1
gggggcgggcccctaaaccaccgaaaaaataaattgcaacagggttcactggggaggaaacggggtgggtaaaaaataaaaaaggggattacggggggaagaaacaaaacccacgggtaacagtgggggaaaaaaaaaaaaaaaaaaggggtttgaaggaaaaaaaacccccccacaatgggtaaaaaaggggagcgcgaacaggggaccaaccaaccccctttttggaatttcaacagccctgggggaggggggggtttttggcagcctattcgcccttggcggaaccggcgtcgccggggagggaacttt

SEQ ID NO: 1592 - DNA, 335 bp, Zea mays
  Clone ID: MRT4577_101457C.1
agtacgtatcactgcaaataacattgagaacttgagatagaagtaactggtctgtttcgctcaaaagtactttgagcttgtattcagtcttggacaccaataacctgtaagctgagaatgtttggccaaaaaaaaaaaaaaaaaaaaaaaaaaaaaaaaaaaaaaaaaaaaaaaaaaaaaaaaaaaaaaaaaaaaaaaaaaaaaaaaaaaaaaaaaaaaaagaaaaaaaaaaaaaagaaaacaaaaataaaagctcataatatagagccacataaaatacaatatattgggcaggggtgtttataacggtcttaattggtaaaaaccctggcgtt

SEQ ID NO: 1593 - DNA, 262 bp, Zea mays
  Clone ID: MRT4577_101458C.1
ggggttgcctttctgttttttacagtcctgctgcttatgcacatgataaacggcccggttctagccagcagcagtaatatcttttggtgtttctgcaccttcataaattgtttttttcgctcggttagggaagccaaattgctgtcatctaaaatatttccactagctgcacggactagggggcagccagaaaaaaacgggccccgtataatcatacggctctgctttaaaggtccccaccgggatgtggtttgttacaggg

SEQ ID NO: 1594 - DNA, 167 bp, Zea mays
  Clone ID: MRT4577_101459C.1
acgcttctcgttgtctgagacggtggctgtgtctccgacacggatcagcggactcacactgtgcttcctgttgggcaggagcgttaccgacttaaccatagtgttaaggcaacctcgactgttgtgggggagcatggtggcagatgcttacaaacacttagtgcctg

SEQ ID NO: 1595 - DNA, 548 bp, Zea mays
  Clone ID: MRT4577_10145C.1
gggggggggggggggggggggggggggggggctccacccgctacacactggtaaccgggaacgtcagacatctggactaccgagagcgtcagacacctatccaactgaacccgtaccctcacagctgctggacggcacctcagcttcacacggcggcgaaataatgcggagggctactccgtaccccccccccccttactacacgtatggtacattcccacgtcgttcgagacacagcagaccgccaagccgatctacctgactcgcgatcgggaggaggtcacccattcgactgctattaccgaccctggtcacaccacagtggttttccccgtggtgactaaggacgaagagagagtccgaacgcctacttttaaggctacgtgcacgcctacattctactacaagttgcacgaagtcgaagaaactgtgctaattcagtaataccaggtggtccacagggagagtctggtattcatgagaagggagggtctgctagttacctactatgacgtgcgtttggtcgcgcttaggtcgttttgagttcg

SEQ ID NO: 1596 - DNA, 277 bp, Zea mays
  unsure (1)..(277): unsure at all n locations
  Clone ID: MRT4577_101460C.1
tgtaagtacacagggattgngnacttgattccgcaaaagacctccttgncggcaaccgattgaccntgnnnganccaagngnttctccnagtttnatgncgtacccttctagaggngcacaccacnanaaagagccccaagngcctcancaagcttgaaacatcacatggattaacntttccttcacgagacacnctcttcatnaggcncaactgcaatggancnnntgnggacnaccntagtctcaancctaagcacctgcaatttggtanatnag

SEQ ID NO: 1597 - DNA, 799 bp, Zea mays
  Clone ID: MRT4577_101461C.1
attgggacctcgagccggctttgagcctgagaccgccgggaggaccaccgcaccagcccttgccgcgtataaaacgtctcgtgcgtaggcggcggcgactagctaggctgtccccgtggcacgtatacgcgcacactatactggggttcgggttgcattatcaggcatccgaccgacggctatgaggaggaaagggagcgactgtacacggatcagcccagccgagatcacgcccatgatctccctggcgtccaccaggcggtccgcgggccggacggcgtcgccggaccgggaccgggaggaggagcgacctcggcaacggcgagtgcggggcgcgtgcggctctcgcctgctgcggaccgcgcggtggacggccgcgcgcttctacaggcgagcgcgggtaagcatcgccagggcgtttcggcccccgtcgacgacggcggccaagagagcacaagcaggcgccggcgccgcttcgcccgactgcggcacgccggcgaggcggcgtagtagcaggcggcagcagcagtcgtccgcgccgacgacggtcgtcgtcgtcgatgactcgcacaagagcgaagcggtggaggagtgcatcaggttcatgaactcgtcgtcgaggaagtaccggtagagtctctggaggttccgtgtgcgcgcggatgctagcggcctcgttcttgtatttgttccttcctcttttctatctctctctctttttttttgcctttcatctgtatgcgcatctgttctgatgacttgagaaacatactggtactttcgaaaaaaaaaaaaaaaa

SEQ ID NO: 1598 - DNA, 354 bp, Zea mays
  Clone ID: MRT4577_101462C.1
aaaaaagggctttttatcatgccgcttatcaagttcccaacaaaaaatttcatgtctgaataaaaaaaaatagcttatgggccaaccgcaggggcttgcccaaagcccaacccccctaatttaaattccctttaaatccctggcccccccgcagtcccaaataagttgctaaagccgcctggcctaaaaaaaaaaacataacatccttttttccctttgggggccaaccattgctaataagccaaccctgggtggaaaaccaccaaaagtcggcagcatgacccctggtgggaaaaatgggtttatttcctcatcggccccaatttttggcgcccggtaaaatctaatgtaacc

SEQ ID NO: 1599 - DNA, 339 bp, Zea mays
  Clone ID: MRT4577_101463C.1
gccttggccgcttcttttccggttccccctctatccgaagaagcaggggcaagactgaaattggccgcggggccttcttccttggggtcctccaatttttttggcttggccgacctccgccgggcgggggggccggccattccaaccgtccaaaagaagtttggggtgggttgttcgggccgccgggccaagggggtggtggccatggttggacccggcaggtttttcgtcggaggcaactggaagtgcaacggaccaaaggactccgttggcaagctggtctttgaactgaatgctgctaccctcgaaactgatgtaaatgttgggggggctcctcca

SEQ ID NO: 1600 - DNA, 393 bp, Zea mays
  Clone ID: MRT4577_101464C.1
ccagattcaaaaccttttatgtgtgtcactgctgattctgttcccattagagctctctcttgggcaccatatataagtgaagaaagcacaaatacctttgtcactgctggagaggatggtctaaagttctgggatttaagagatccataccatcctctttgggagctaactactgctccaagggctgtattaagtcttcattggctaaaagatggaagggggatcattatctcactggaagatggtacattgaagtttctaagcttggctcggattgcaaatgatgttccagccactggaaggccattttccggaacaaaaactcagggtgttgcaacttatcagttgtcagaatatttgatttggagtgtccatgcttaaaaacctacaggt

SEQ ID NO: 1601 - DNA, 377 bp, Zea mays
  unsure (1)..(377): unsure at all n locations
  Clone ID: MRT4577_101465C.1
ttttgcgagtnttttttttttttttttttttttttttttttttttttttttttttttttttttttttttttttttggaggaaaaggggtagcggtttgcacttggttttgttttgttagttacaatttacaacacgttgacttgcaaatgcagttcgggggccccccccaaaaagggacagcaaaaaggctcctatggatcctgtccttaggggccgaacaacaaaataccaatttggcaataatttgcacatggacctgccaacctttcgtttctggtttttgggttaataatcaataagccggagtttaaaactgttttttttgttggggggggggagctttttaagggaaaatttcaaaagggacttttgggat

SEQ ID NO: 1602 - DNA, 456 bp, Zea mays
  unsure (1)..(456): unsure at all n locations
  Clone ID: MRT4577_101466C.1
ccgaaagctgctcgaactccttccaaatatggacaatcataccaacacatgtcacatgctggatttggctgtcgactacatcaatgatcttcacaatcaggctaaggtgctaaaggacagccatgataattgcacctgctcagcatgcatgaaccagcagcacttctgttgaaaccgncatgctgactgtacatgacctctgaagcatgttcacttgggacacaaaaacatgtaagacagctctcatgcatgtcgcttcatgaggttttgaactgcaggagttgcgaggctctatataccaagcactgtggcttttgtatgatcaaagacggatggagccatggcatcaccaagcatatgaatgattggtagaagaggaaaaataagtggggagagatatatatgtaggagaaacaactgtatagtttggctgcagctattctatatatacacaca

SEQ ID NO: 1603 - DNA, 387 bp, Zea mays
  Clone ID: MRT4577_101467C.1
gggggaacctaacccaaagtttatttttaagaaaagcccaggaatgttcatttccaaacaatttaaggtttctgtacaaagcaaaacttgctcaaacaaaggccctacaattttcgtattaaaaaacccataatttaacaagcaaacaacccaaaacagattgggtttttttctattcaccgattgacagggcacccgtttcaagaaaatggttaaattagggcagttaccttttggacaaacggtctcttaatcaaaccaaaccaccaggccttaaaatgcgggtagggttccagctccaaatgtctagggccgtacaaaccggcaaagagggacaaacccatgtttcatatctgccaggcttatgaaatctccagcaaggcactt

SEQ ID NO: 1604 - DNA, 440 bp, Zea mays
  Clone ID: MRT4577_101468C.1
ggggcaaaaaggtttcatttttataatttaaaaacccgggcccgattaaagagcccccccagacgaaaaccgggggcccgcaaagcaaacccaagggccttggggggctgctttggtagcggccgggctacaacatgtcacggaggggccccgacgaccaccaccacattgaacggggggcccctaaacgaagggacccctagggggggcaagaaccacttctttattatgggcccgcctgaggcatgacccccccctagctaggacatttttgttacaacaacaactgcatgctgttgagggccacgtaccctgccatccaacgggggagctacccccactaggggcccacccaccaggtgatcttggggcaaccaacgggggggctgatgggcccccccacggaaaccccccacttgccggggaatgttggcggcgtt

SEQ ID NO: 1605 - DNA, 152 bp, Zea mays
  Clone ID: MRT4577_101469C.1
ttccgagctacacacgaagacatgcacttatacaggttgttcgaccgtcacaaccatcctagaatactgatggtggactacgattaactagcgtacatgctgcatcagttctatgcgtgctcgctacagactgttcggaggacatcaactca

SEQ ID NO: 1606 - DNA, 239 bp, Zea mays
  Clone ID: MRT4577_10146C.1
ctgccggtctgactgtgctgcacttataattgactcgcacacaactgtcggttacgctggctgctatagtctagggatgcgcccaacccgacatacatgcgtactcgcttgggttaactcttggagcgatgtatatgatctgttgctgcacactagggatgaccgcactgccagatactcaaaggcacggtatgaggagatcgtgaaggaagcctcatgctacctgacgaaagtggtgt

SEQ ID NO: 1607 - DNA, 335 bp, Zea mays
  Clone ID: MRT4577_101470C.1
ctagtacagtctgctaggtaatctgttggtactacgactgaccaccacatgactgagaccagcagaaagtcgtcgtgggcctggacctcggtacaaccatcaatatctgcacgacttactcttgcgttgtcctgtctcatcacgaccgcgtcgagatcattgccaacgaccaacgtaaccgcacaacgccctcatacgttgccttcaccgactacgaacgcctcatcggagattcggccaagaaccatgtcaccatgaaccccatcaacaccggctttgattccaagcgtctcatcagcaagaggttcagtgatgcgtctattcagaatgatatc

SEQ ID NO: 1608 - DNA, 543 bp, Zea mays
  Clone ID: MRT4577_101471C.1
accacacgagcggccgcacgagcggacaaggagcaggccgaggaggagttgtgccaagccacaatgggtatctcgcgtgacttgatgcacaagcgcctacccaccggcggaaagcacaaggcctggaggaagaagcgaaagtatgagcttggtcgtcagccagccaacaccacgttgtcaagcaataagacagtgaggagggcccgtgttcggggacgtaatgtgaaatggagggctattcgccttgatactggtaactactcatggggaagcgaatctgttacccaaaatacccctatcctgaacgtggtctacaatgcatcatacaatgagcttgagaggacacaaacccttacaaagagtgtcattgagcatgttgatgctgacccattcaatcagtgatacctcactcactatgtaactgactttggtaggaagaataaaacccctgctacaaacaatgataatgctgagggacatgatgttgaagcagcagctgaggaaacgaataagagcaaccatgtcacgaggaatcttgagaag

SEQ ID NO: 1609 - DNA, 437 bp, Zea mays
  Clone ID: MRT4577_101472C.1
attcggctcgaggttatcctcaattttcaatggctcaatcccattctggaaaagccggttccatgacttcaatactcctcctgtttatgcttcttatcagtaatacaggcacaacaggtgcacaatctggtgtatgctatggaagagttggcaacaatctgccatcgccacaagaagtagtttccctttttaaacagtacggcttccaaaggatgagaatctatgatcgaaaccatgaagtcctccaagctctgagagattccaacattgagttgctgctagatcttcctaacatcgacctccaatatgtagcttccagccaagataacgcaaacagatgggtgcaagacaatgtcagaaacttttggaatgtcagattcaggtacattactgtgggaaatgaagtgaagccttgggactcatttgcacagtttgta

SEQ ID NO: 1610 - DNA, 311 bp, Zea mays
  Clone ID: MRT4577_101473C.1
gcagcggaaatcttattaccaaattttacaagttacatcaatttttatgatgtacatgatcggagtgattacaaaaagtgattcaaagaagtaactttgaactgttatagattattggtagttttgaaatatatgctagcttaagggaccatcctcaataagaagtatagaagggttacttaaaacttacaagaaggccgagcccaccggcacttaacaccatcaatagcagcacaaagttatgacctaaaaaacaatagggaataaaaccctgagtacggaattactcagcaagacttacccgactaaag

SEQ ID NO: 1611 - DNA, 399 bp, Zea mays
  Clone ID: MRT4577_101474C.1
tcgcttacacgatgtcgaaacgagggcgtggaggttcgattcgaaacaagttccggatgttactgccgctaccaggggcatctactgggaactgtgccgatatcactggagccaagaacctggacatgattgcatgcgaagggaattaagggcgcgccttaacaggcttgcttgtgcctgtgggggtgacatggttatggcgaccgtgaccaagggaaagcatgatcttagaaggaaggcgatgcccgctgtgattgtgaggcagcgcatgccatggctccgaaaggatggggtgtacatgcactatgaagacaatgctggggtgattgtgcacccaatgggagagatgaaagggagtgccatcactggggccatcggaaaggacatcactgatatctg

SEQ ID NO: 1612 - DNA, 557 bp, Zea mays
  Clone ID: MRT4577_101475C.1
gcagcggaaatcttattaccaaatttttacaagttacatcaagttttacaatgtacatgatcggagtgattacaaaagtgattcaaagaagttactttgaactgttatagattattggtagttttgaaatatatgctagctcaagtgaccatcctcaataagaagtatagaagagttacttagacttacaagaaggccgagcccaccggcgcttaacaccatcaacagcaccacaaaactataacctgaaaacaacagggaataaaatcctgagtacgaaattacacagcaagacttacccgactaaagaaaagacactcaagggtatgctggctagagggattcaaggtatggctgttcaagaagcaaagactctattttgcagaaaagcttactatgagtggatccttaaaatccatttttaattgtcgggttaagtaaagttacttgcatctagaattctttctaccctagttcaagcacttggcctatactagcccgtctttttatcatcccttcagttcactggattgctacgtgtggggcagtgaccaagt

SEQ ID NO: 1613 - DNA, 445 bp, Zea mays
  unsure (1)..(445): unsure at all n locations
  Clone ID: MRT4577_101476C.1
cccacgcgtccggctgcttctagtgtctgccccgttcgtcctttaagcagataatgacttgtgttaacaaaaatagatgcccctcacatttccttttttgtccccccacaacaacaccatgcatgattacttctcctgaacaatgcatgcacacctagggtaaaataaaatactctcacatccaccacccttaggctatggagtgtgttgattacattacaggcatgccagcatccgtgtttgcttgtgtgtgcagataacaggcgagacggttggggaggtgaaggccgtggcaggtatgcatcagaggaaagctgacatggccagtcaatctgacgccttcatagcacttcctggagggtatggaacccttgaggagctgctggaagtgatcacctgngcgcagcttggcattcacaacaagccggttggcctgctaaacgtg

SEQ ID NO: 1614 - DNA, 508 bp, Zea mays
  Clone ID: MRT4577_101477C.1
aaaaaaaaaaaaaaaaaaaaaaaaaaaaaaaaaaaaaaaaaaaaaaaaaaaaaaaaaaaaaaaaaaataaaaaaataaaaaaaaaaaaaattttaaaaaaaaaaaaaaaaaaatttttttcctttgggccggaacccccttagggggaatttttggaattttccttccctttggggggcgttttaccttttttttagggggcccatttccccttttggggggtggttttacatttaattggccgtttttttacaacgtgggaattggaaaaaccttgggtttccccattttattggctttgcagaacttccccttttccccagttgggttattaccaaaaaggcccgaaccattcccctttccaaaaatttgcccaccctgattgggaatgggcccccccttttaggggccttttatgcgcggggggtgggggggttccccccagggggccctttacctttgccagggccttagggccggttcttttggtttttttcctttccttttt

SEQ ID NO: 1615 - DNA, 220 bp, Zea mays
  Clone ID: MRT4577_101479C.1
cttccccgtcgccattctcattgacctactatcgagttctacccccaacctcgcaccgtgtccgtcttcaacgacctttccagatagatcaccccacattcccacaatcaccttacctacctacatacatcgacgaacctagccctaatctctgacaacgcatagagcaacgaccacttaatctccacattaaccagcaatctgtcacaagatcatatca

SEQ ID NO: 1616 - DNA, 156 bp, Zea mays
  unsure (1)..(156): unsure at all n locations
  Clone ID: MRT4577_10147C.1
gggtgccgggggggcggtccctccattntgccctacgagggggggtcacctgtctgcgcccggcctcgtttactatggcccctcgcttgtgcccgcattcggtctctagactctagtcttcctgggaaccctctctgggcgctcactcacatcttt

SEQ ID NO: 1617 - DNA, 226 bp, Zea mays
  Clone ID: MRT4577_101480C.1
aattaatgccagatgactgaagatacttattctttctgcatttatagaatttgttctgggagtgttgtgtgctatattgttcatatagtaacttggcacgtttgtacttccacgttcatgcccttgtgacatccaccctataaaggcttgttctgatattttcaattcttatggatttgaagggattgattctgaataaatagggattttgatttactagggattg

SEQ ID NO: 1618 - DNA, 489 bp, Zea mays
  Clone ID: MRT4577_101481C.1
gactaggcccaaattattaaaaaaaagggtggggcataatagcccatacataaaaaaatctaaaaacgggggccacaagccccaaacgggaatttttgggaaaacccctacaaaaaatagccctaatagaaatcctcctttacatacataacaagacctcaatttactacttaagggtgctaaaatcttgcagggaaaatgaacccaccccatggcctggggcatgaacatcctaagcctattcctttcgtccttaatcctaaaaattttttggacaatttttttcttggaaaaggacccggaaagcaaaaatttttttcggttgaaagcaaaaatcgcaccattttggttcaaaaaaattggccccccacatatggggatgcccatctcctcaaaacaggggctaataagggtgtccctaaaccatgaaaaatgatgggggtttttatattgcacatgggttcataattaatttctttatgcaaactt

SEQ ID NO: 1619 - DNA, 363 bp, Zea mays
  Clone ID: MRT4577_101482C.1
tagcgcccaaggtaaagcattcttttagggcatggcctggcactatggaggaggccatctcttttctcataggaggatcttcctcttcatctatagattccttttcttgcttaactcttgctcgaacgcaaacatcatataatcatatacgccctgcgccaatgggaatctctttttctcttaggcaaagcatatcatatagaagtgaagtaaagctttctcgattccatatataatataatagtgactagaaagggcaactagatcacaggatggggcatgaaagcattgtattagagcttttaaagaaaaattcattccatcagtgcgggttcactggcttgcttgaagccaatctctata

SEQ ID NO: 1620 - DNA, 361 bp, Zea mays
  Clone ID: MRT4577_101483C.1
ctagggccagggtggagtgtgggccgccgtgattgttctcgcaccgcatggtatagtacgggtcgaaacgctatgtgttcggacccatggagagaaatgacccaaccgggagcgcacagtgctgataggcggtcactaaaggcaggctcacgctgggcacgctaatgacttggatgagctacgcgctcttaatgctgcggctggagcagcaatagctggtgacacacaaattgcattgaaagacaggaggtccgttcagacatatgaattgcccagaaaggctggctcactgaagctactcacagatggacataaaggtgctgctgctaatgcccatcaatgatgataccatcactatgtc

SEQ ID NO: 1621 - DNA, 255 bp, Zea mays
  Clone ID: MRT4577_101484C.1
gacaggcaataatgagcagagtttacagctactttaataaaatgtgtcagtacttttaaggtttatagttccctcaacacaattgctaatgcagaatagtgtaaaatgcgcttcaagaatgttgatgatgatgatatagaattgtggctttagtagcacagaggatgccccaacaaactcatggcgttgaaaccacacagttctcattactgttattaaatagctgtagcattctcagtcacctctctctcctcc

SEQ ID NO: 1622 - DNA, 374 bp, Zea mays
  Clone ID: MRT4577_101485C.1
gggaaaaagcgcaattcacaggttggggtaaaaggcccacatctacagaaaataaaaaggggggggcctaggggaaactagatttgcattttccgaaggctatcggtgggagacaaacaaattaacaagggccaaaccccccaaaaaaatccccaaatccgaccccttgctacacggggggccaggggcttaagggggacgggtaagctgggtgattggggcccgtttaaacgcgcaggctggtttcacgacgggccaaaaatttggcgcctgggaaaatcgtcccgagctttttaaacgctttcgctcgcagtttaaggacattttgggggaccgggttatctttaaaaactgtttggcaaacacgggaaagg

SEQ ID NO: 1623 - DNA, 616 bp, Zea mays
  Clone ID: MRT4577_101486C.1
gccattgaaattgttgctgccagtagaagggtaaggaagctatcattgtctaaatgtcttctatgtaaacataaatttcttctatgtatacattattaacagaatgaagtgacgactccttgaacgtcgggttagcagattttttctttatgaatcattaccacattggtaacttcattctgttaacctggagctgccacttaagagttaccatttgttttaaactgttcacatgaaattttctatggtgctatataggaaacaaagtcagctagtaccagtgaagaaaatggttatgttgtattggaaggaacaaagaagtctaaacaagatgtagattcatcacagctggacatgttttggcttatgaacaaaaaggatttacacttgtcttacattttgaaatctacttcttttctctatagttatattatttatgattcaatagcacagctggactctaggtctatcaacagtacatttgtctcaagtagtaatgctgatggtggtgattcgaacatcaacatttccaaaaggtgttcacaagttgaggagaacggacttgaagacaacatcaccgtgctatacccattcaatttggagccagttgatcgga

SEQ ID NO: 1624 - DNA, 249 bp, Zea mays
  Clone ID: MRT4577_101487C.1
gcgctgacgcatgggatcccaactccaactctacctctctctttcgcctggcaaatcctcggcggggcgggagcctgcttattcaccggcgcggctgactgcttcttcgactacgcggatgcctgctgcagacgcgacgcggcagcctaccggtcgaacggatccgccgacgaacggatctcctgcgcctgatacatcttttgcacgcggactaccgattggaccgatctccgttgcctggtatatcct

SEQ ID NO: 1625 - DNA, 574 bp, Zea mays
  Clone ID: MRT4577_101488C.1
cacttcccgtgttatgaactatggtgagtacccaactacacagcctcccagttagtccacccctaccactggctgtgcaagtcgccgcagactctgcctaataaaaccatcactctacctgcccggccatcgacgacatccattaatgtgtaggatttgacgcacgccatcctctctgtcgcatacggaatgctaacgggtgatcactgtcggatctgtgatgtgggtgacctctgcgcactagtatcatctccttttcagggagatattactgctccgcacgataagccacctcacagagaattgttataccacctccatcataactaatgcatgagctgacctgccatggatgatctcctctccacgacattgtcgtatgagcgctatttctcgtattactccttttatgagctgggcggccttgaccgcgatgacgaacgggaagttctcacctattacgcggttgctcctagtcagagaactggacaacgtgctcaggtatcgctatcgtactttgattatgcctgttctgttacctcaactaagatcctcctgtcctctattgctccct

SEQ ID NO: 1626 - DNA, 256 bp, Zea mays
  Clone ID: MRT4577_101489C.1
aaataaagtaatttaaaaggggctgtttacaagttttttcgtataaggaacaccgcgtacgccgggtgtatttatatgtattaccaacatacggaataagtgcagcagcagatcatgacgtgtctaagaattgatcaggactccgcgtcaactatgttagcactggcagaagtagtagaatcctccatgtagtaagattcttaacgagcgcaacgatcctcgctgcttctttctaatcctttaatgccaagctttt

SEQ ID NO: 1627 - DNA, 403 bp, Zea mays
  Clone ID: MRT4577_10148C.1
attataacacaacaaacaccacaacaaaactgtgtttctctctactatattcataatataaccctgatcctttgttttcctgtcctcattcattcatgttcacctatctactactgttccttttatagagtatgtctttgtcagtgcaaacactgctctaaattaccgaccgcatcaattaatcagtcaattataccaatcagtcaaccataccgaagctcaggcaggcagcggcatacatgccacacccacagtggcctgcatttctcttctcctccgcttcctggccctccgcgggatctcctggctctcctccgcgcccaccttcatcaggtcgcattccctctcacctaagctgcctgatcccgagggcctgaggatcacgcaggaagcacggacgtcg

SEQ ID NO: 1628 - DNA, 329 bp, Zea mays
  Clone ID: MRT4577_101490C.1
gcgggatcaaccctcattattgagacacccacgcaccatataaagtggaatccacaagcaacactatagcaacactggcgaccacaatattttccctccttatactccttgctctttctgcatgtgttgctaacacgacacttttccctctatgctcacacactcttatattttttcttttttccccatacatttcatctatgatagctctagaatgtgaaaacccacctctttaaccctatatgctccaacacgcactcgcagcaagcaacatacctctatcacacttgtttcaacactctccacccctatatttgttgcacacattg

SEQ ID NO: 1629 - DNA, 413 bp, Zea mays
  unsure (1)..(413): unsure at all n locations
  Clone ID: MRT4577_101491C.1
aaaaaaccgaacgacaccncaccgcaccaccgccaccngccagcagccccccagcgggccaccgcgcgnccccancggcggcgggagggcagaacagaacaccgngagaggagcgggagcgcggcgcgncggcggcgcggggggggcacgcgcaccncccactgcnggcgcgcgccgggnccaaggagncggncgagnacanccngcaggcgggggggcgcacgcgccgcacgggccccgacgccgccgaccgcaccgncgcccgcgacgcccnccagcncnccnccgacgccgagcncgacccncngcnggggggcccgaggacaccgagcagacggngcgccaacgaggaccccgccaaggacgacagccccaagcnccgccccggggaggggccccccgagccgcagaag

SEQ ID NO: 1630 - DNA, 268 bp, Zea mays
  unsure (1)..(268): unsure at all n locations
  Clone ID: MRT4577_101492C.1
ggagagaatggttcatgtagccgagcagtacaaggctgaggatgatgcccagagggacagagtggctgccaaaaactcgctagaggcccatgtcttccatgtgaaaggttctttgaaaccaganagccttagggacaagattcccgaagaggacatgcgcaaaatgcaagacaagtgtcgggaagtccttgcctggctggagcacaaccagctggcagagaaggaggagtatgagcatcagaagagggagctggagcaatctgtcgcc

SEQ ID NO: 1631 - DNA, 862 bp, Zea mays
  Clone ID: MRT4577_101493C.1
atggagcggcgggggcaacagcctggcgacgcgcagcagccaggcaaggacggcgccggcgactcccctcctccaccgccaccgttcctggaggtgagctgcaggagctccggcaaggttcggcggttcgcggcggggacgacggcccgctacgcgctgcacgccatcaaccgcaagctcggccccggggccccgccggcgctgcacgtcgaggccgtcagggacggcgaggagcccgtcagcttcggccccagcgcggccctcgccgactacggccgcggctggaggctgcagaccgtcaccgcgcacgacgcgcccgggatccatcacgcgccgcacgcggacacggcgacgcctctgacacgcgaattagtcgccgtcagatgttttgtttcggttgacggtgtcagcacaatgcctcccgtgacggcttacctgatcgccctgtcgaagcgtcagaggaacaaacagggcgacaggcagccgtccaaagaagatgccgatggtacggagacagtcaggggcacttgcatctacgtcgccaagatcgtgctcgcgtttgcgtttctcttcctgctaggtggatcgctcacgtacctgctggaggtgatccctgacatgctgcagactgcatcggcgcttgagttacctgattttttctacgacccgctgactgaaaatgtatgacgcacatatcatttcattaccattatatggcattgtgtgcggctttgtaacttggtcaaaaaaaaaaaaaaaaaaaaaaaaaaaaaaaaaaaaaaaaaaaaaaaaaaaaaaaaaaaaaaaacaaaaaaaaaaaaaaaaaaaaggaaaaaaaaaaaaaaaaagggcccctagggcc

SEQ ID NO: 1632 - DNA, 288 bp, Zea mays
  Clone ID: MRT4577_101494C.1
ggctcgatgtcatagacatatacaaagtcagtaatctcacccagtcctgctgtgtgaagctgtcaaagcacctgggagtgccctttacaccattaggtgaaattcatcaggcacttcagacaaccaggttgcactgttttctcactaaattggctttatttatacagtatcctggtacctagcattcctaaacaagctccaaaatgcagaagtagaaattgtgccacagtgatagagtttttaatgaatatccatggccacagttttgagtctcatgtaagtcttggg

SEQ ID NO: 1633 - DNA, 265 bp, Zea mays
  Clone ID: MRT4577_101495C.1
ttcagcccggtctccgcctctccatctcgcccggcgctctcgtccttgtagatctcctctcacctccaccattttcttgatcgggattttaagatcggtgtgcacgttgactaagctggggaagctgggcgtagaagaaacgcgtgagcgggtgttgggttcgaagcacaggctgctcctactacctcgagggatgggatacgaactagcaggacgaacgatcagccccccaccgacgagaagtgacgaagagctctgcgagcag

SEQ ID NO: 1634 - DNA, 560 bp, Zea mays
  Clone ID: MRT4577_101496C.1
aagaaaacttgcacaatatatttccaccggtttccctgaatattttaacaaagaaaaacgactagtaacacaagggacgttcagtttaatgcacgacagttaaatgcccagagcatcagcaagcactgatacattatgtccgcaagtcgagcaggaaaatcacacgatcaagcagcaatatcctcgggagggcactgcgcaggttgggcatcagaagacaggtctgtgatggacatcagctttgatctgaacttatccgccccatcgcccagcttcccgttttctgcaatggagatcggtgccttcaccggctcgggtgaaggtgtctccggaatggtctgggagattgcgatgagagactgacgagctgcttccctactgaactcggttggtgaaggtgaggccatcaatcgtaggctcccaggactgcacaaagcgttgttcgtctacccagcaagcaacactgaatggggtacaagtctgcctacaggcgtcaagtttaaatggctgccgacctgccgtccgtgcctctggctcttggccgcctgacgcctgtgagc

SEQ ID NO: 1635 - DNA, 126 bp, Zea mays
  unsure (1)..(126): unsure at all n locations
  Clone ID: MRT4577_101497C.1
ggactgccttgatattggtggcttgaattttgaacataanaaagctactttgcccaggttcacttttcccctctcaacacgcctcataacatcactttccaataattttatactaccaataaacat

SEQ ID NO: 1636 - DNA, 888 bp, Zea mays
  Clone ID: MRT4577_101498C.1
tcgaggccggccggggcaccactcaccaactaaacacaccagcttctctcacgatcacgatgatgagagccctggcggtggtggccatggtggacaccgccttattcttccctgtgcccgctcgggccgggtcgtgatcacgaatccgccagtcacgcccagatcgtaattaccgccaacatgcctcccaagcagaaggtcgcccgcgctccccaggagaacatccagctcggaccccaggtccgcgagggtgagctcgtcttcggtgttgcccgtatcttcgcctcgttcaacgacaccttcgtccacatcaccgatctgtctggccgcgaaaccatctcccgtgtcaccggtggcatgaaggtcaaggccgaccgtgacgagagctctccctacgccgccatgttggcagcccaggatgtcgccgctcgctgcaaggaactcggaatcaccgctctccacgtcaagatccgagctactggtggtaacggcaccaagacccccggccccggtgcccagtccgctctccgcgctcttgcccgtgctggcatgcgcattggacgtatcgaggacgtcacccctaccccatccgactcgaccaggagaaagggtggtcgccgtggtcgtcgtctctgagcgtatgcgcgcaagtggctctcagtggtggaatatggcatggcatggtttgcacgatttatggtttcatgaccacaataaagtcgcggggaacggcgaaactgcctggtctccatgttgaacttggcttctcgtgcgagagatagtcgagctaaatcaacagaatcctttttagtttgaaaaggcttcccgacaatgaagtgctattgctgtgttgatcaaaaaaaaaggttcatttatactttacgatcc

SEQ ID NO: 1637 - DNA, 1071 bp, Zea mays
  Clone ID: MRT4577_101499C.1
cccagcccaaccgaagcgaagcacgccaccggcctcgaagggatcagcttctctagcactcatcctcgtggccttgttcctcctcttctataagggactgcgtcggagtggagatccgtgccgacatagtccgactttgtcgctcgctgctgcttccaaatttcaatcggcaaacacgtctgctccccatcccacgacggcggacgatcgacgacggacgagaccacagaccaggcgcgggcgcaggcgcagacgcgcaggccacagcccgcagctcacaggcgccaggcggccaagagccaggggcacggacggccgcagctcacaggcgtcaggcggccaagagccagaggcacggacggcaggtcggcagccatttaaacttgacgcctgtaggcagacttgtaccccattcagtgttgcttgctgggtagacgaacaacgctttgtgcagtcctgggagatgcaagacttgataatgtcatgaaagcaattgattgtggtgaacttcaaactggaagtggattaaatcaagagatgggattgcctaggccaggcgagactcgttggggatctcactacaaaactgttgtcaacattattgcctacgattgatggcctcaccttcaccaaccgagttcagtagggaagcagctcgtcagtctctcatcgcaatctcccagaccattccggagacaccttcacccgagacggtgaaggcaccgatctccattgcagaaaacgggaagctgggcgatggggcggataagttcagatcaaagctgatgtccatcacagacctgtcttctgatgcccaacctgcgcagtgccctcccgaggatattgctgcttgatcgtgtgattttcctgctcgacttgcggacataatgtatcagtgcttgctgatgctctgggcatttaactgtcgtgcattaaactgaacgtccttgtgttactagtcgtttttctttgttaaaatattcagggaaaccggtggaaatatattgtgcaagtttccttaccgaaaaaaaaaaaaaaaaaaaaaaaaaaaaaaaaaaaaaaagaccggcc

SEQ ID NO: 1638 - DNA, 167 bp, Zea mays
  Clone ID: MRT4577_10149C.1
atcacactgaattttattttagcccaatgccccttatctccttatgcaattgatatttttatattgaatattagaggattggtcattgtcatcaagtcgtctgtaatacagaaaacgataaatacaacctaacagttcaaacatgacgagttaaataaatgatggtt

SEQ ID NO: 1639 - DNA, 237 bp, Zea mays
  Clone ID: MRT4577_1014C.1
gattgctgcggaagatacgccaggggtgcaactccagcagcaatagcagtgacggcgttggcggcgcggacgtggctgagcgtgtggggcgtgaggagcatgcaagcccgaggcttcggatcggatcagtccgagaatgtcgaccggggcgcgggctccatccgggaagtcggtggggccttcggaaacagagatcggctgaagaggaacgatatttccgagcactcagtagagaac

SEQ ID NO: 1640 - DNA, 1264 bp, Zea mays
  Clone ID: MRT4577_101500C.1
tgataacataaaaaaaatcaacatcaaattttatacatatctattttaaaatattaaatttatcctaacagtttggattaccaatttcatccctaattacgagtctcatagttttgaatttttgatggccttcaatcaacactccgcgtccgctgacttggccggccgggaacgtttgtccgttttcctctcagtccagccttttcaccttgcgcccgccgtcctcctctccctcttcttcgcattgcctttcccttcagttgcaccgacctccagacgaaaccacccaagacgcgtgcttccattcctagcccaacagaagcgaagcacgccaccgaccaccggcctcgaagggatcatcttctctacaactcgtcctcgtggccttgttcctcctcttgtataggggactgcggcggagtggagatccgtgccgacatagtccgacttcttcgctcgctgcctacgattgatggcctcaccttcaccaaccgaagagttcagcagggaagcagctcgtcagtctctgatcgcgatctccgagtccactccggagacaccttcaccgcagacggtgaggacaccgccgatctccagcgcagagaacgggaagccgggcgatggggcggacaagttcagatcgaagctgatgtccatcacagacctgtcttctgatgcccaacctgcgcagtgccctcccgaggatgtcgctgcttaatcaatcgtgtgattctctgctcgacttgcggacacgatgtatcagtgcttgccgatcctctgaactggacatttggctgtcgtgctttaaactggacgtccttatggcttatgttattactggtcgtttttatttgataaataaatattcaggggaacgggtggaaatatactgtacaagattcctgactagttgatgaggaaccggtttgtctgaacatgctgtcatgcactcatgctcggacaacctctccaggatattgctgcttgatcgtgtgattttcctgctcgacttgcggacataatgtatcagtgcttgctgatgctctgggcatttaactgtcgtgcattaaactgaacgtccttgtgttactagtcgtttttctttgttaaaatattcagggaaaccggtggaaatatattgtgcaagtttccttaccgttgataaggaactaattagggggtgtttggtttctaggactaatttttagtccctcaattttattccattttagtcccgaaaaaaaaaaaaaaaaaccggccctcg

SEQ ID NO: 1641 - DNA, 395 bp, Zea mays
  Clone ID: MRT4577_101501C.1
gaaagccacccaacgcccttttaaatattggatggatgccaaaaaggacacaatagggggaggggaaatataccaaattatgaacaggggaccaaccagatagaaaaatgatccctgacaattgggaaggatccaccggggcttgcagtacaaaaaaagcttctaaaccatgcaaaaggaaaaactgaacttaaattttgccccgcgggcccggttggggggggtcctgaaggccctttttgatcgggaagagggccggggacccccaccccctgacgtaagccaaaaagaaacccccccccaacaacaggaacttggagaacaaacctctttgggggaacggagccccgaacgtcttaaaaaaactgctttttaacgggttgtagggcgaaggc

SEQ ID NO: 1642 - DNA, 297 bp, Zea mays
  Clone ID: MRT4577_101502C.1
ggggccccaaattcccgggaagcccgggaagggggggaaaccccacctgagggggttttaaaaaacaggaatggttgggtggcccgaaaaaaaccaaataacattgccccccccggaaaaaaaggggggggcagttcccaaatcccaagtaacaagagcctttcccttttacccccggaaaagctcaaaccgggggggaaaacttttttaaattgaagggggggggaaaaaaaccccccttttttttttcgggcccggcccaccggaatttgtccccccaaagggagccccgggccc

SEQ ID NO: 1643 - DNA, 496 bp, Zea mays
  Clone ID: MRT4577_101503C.1
acttattatgttatggaacaaacccagaacttttagggtatggtaataccaatgcatagcgagcgatgacatgtattcaccttgacgagcgaccgtgggggctcatccggccgctgagcagtatgaaggagtacctacggctgtccacgtttcttacatcttctactgagaagacaaactatctccctggtgggaacctctctctttttgaagctagggcttcgagcaatttcttggcaccggtgttcatgataaatgggtgctgccttagttcagggattgacttaaaagcctcgtggcaccgggcaccaggatatggagacaagttccatgcttactgccgaacgttagccatgaaaatctattataagggccattgggcaccaagcgagacgtatgaagggaacttattatatgtcaagcagaccatattatggataccacccgaacactgaaacacccatctttatctcttgaagactgacaactagtaaat

SEQ ID NO: 1644 - DNA, 229 bp, Zea mays
  unsure (1)..(229): unsure at all n locations
  Clone ID: MRT4577_101504C.1
gacccacacgaacgaatcctcccttccttccttccccncccgatttatttaaacagaactctccttcctcgtagtctctattaaaacacatcaccaaacatacctcactcaattccacctccatccacacactcatcaactacttaaccaacaaactcgcactcaacttctatccactcacttccttcaacaaacaagtccattctctaccccccacttacctactctc

SEQ ID NO: 1645 - DNA, 824 bp, Zea mays
  unsure (1)..(824): unsure at all n locations
  Clone ID: MRT4577_101505C.1
gctctctctctctctctctctctcgttttgttgtagaatgcgtagaatggcgccccaagaactctagggttcccggcccttcattttcgttcccccctgcaagtgttctggatcttgagtccagagtcaagacagacatcgactcttaaaggaaaaataacttcttaaattatgttatagggaagaatcaagataataatgcctcaagacagtttcagatcagtggtttgcaggtccctttcaaagagtcacccctccagctccaggagcaaagatggcagctatcccgaagggattcagtgtgatgccccttatgttgtcacactgcaacccacggtctgccgcagctgccaaagccaggattggcgcccctcgcaaagcaaccgggaggggaggtccatcttatcgcaaagagattacgtgatgggttccacactctcgaggcatttcgccgaggacctcctgagaggcgccatggacctccaggactcccttgtcatgcttgagaagttccaaactgtgtcacagagcatgcggcaatcaactaagcagagaaggccagggaatggcgaggaatcgttggacgtgagcggaatccgggaagcactcttcgaagcatcaatcgccaagaagctgggtccctggaagtgtcagcagtagattcgacgggcaactaaggaattctaccgacgagctgaagagagtgatcaaggacagcctttacagggcgaaactcttgtcagtgtccctcaatggtgagcagctgggctccttgagccagtcatcgcggagcacgccanacagtaccgccgtatccagtctac

SEQ ID NO: 1646 - DNA, 259 bp, Zea mays
  Clone ID: MRT4577_101506C.1
cacataaaactatgagaattaggaagagggtggcgggacctgtggggtgcctcccgcttctcctcgtggagcgtgcagtcacagctcctgcccacgaaccacgggccaaggatgcccactacatggcatgcattatcgcacgagagctacctcacgaacgaggcctcccacgacgtgaactacctggtgccgtgcttggcactcgacctgctcgccgccacgtacgaccattcgtacacccagaatttgcggatccgct

SEQ ID NO: 1647 - DNA, 190 bp, Zea mays
  Clone ID: MRT4577_101507C.1
aaaaaaaaaaaaaaaaaaaaaaaaaaaaaaaaaaaagaaaaaaaaaaaaaaaggaaaaaaacaaagggaggccgccctaaaagttccaatctaagctacacgtgcatcgcacgttcaatactcttcaaaagtgtctccaaacttcatttcagtgaccgtcgttttataacatcgtgacgtgggaaatccc

SEQ ID NO: 1648 - DNA, 475 bp, Zea mays
  unsure (1)..(475): unsure at all n locations
  Clone ID: MRT4577_101508C.1
ggcgcccgagtgaccctctgcataagcttccataaggtcactcgccatgggccgcagcccttctttctcacactcctgttccagcctctacgtgtaccagtagccagcaaggcatctgttgacggtcgtttcagatatctcggtaggagatgtgcaggtccntgcaggtagatgcgtgaagtctcaggcagaagctgcactgcacaaaccaggatataatgtggctacatgttctgggaaacatgcgagatcggacaactaattacttgcctagaaaatgattggaggcgttgtggcagtggtatttcttggcgaaacgctgtaagcagcacctattttcttgtaaattctgcgatcttgatgataggatatgctcgggtattggctgcaccatcttcctggggaggatactgcccggctagatctaacataactttaagtgggagaactatcttttgccaggccagaatgcttt

SEQ ID NO: 1649 - DNA, 770 bp, Zea mays
  Clone ID: MRT4577_101509C.1
ttgggtacctcgaggccggccgggctctttctcttagactatctgccgctccagcctttcgctagggtttaaccaccggcggcgcgcgcgacggcggcaagatggtgcagcgtctgacctaccgcaagcggcacagctatgccacgaagtccaaccagacgcgggtcgtcaagacccctggtggcaagctcgtgtaccagtacaccaagaagagagccagcgggcccaagtgtcccgtgaccgggaagaagatccagggcattccccatctgaggccagctgagtacaaaaggtccaggttgtctaggaaccgcagaactgtgaaccgtccctatgggggagtactatctggaactgcagttagagaaaggatcatccgtgctttcctggttgaagagcagaagattgtcaagaaggtgttgaaattacagaagaccaaagacaagacttcctcaaaaaagtaactctgaaacagaagtgagccactcttctgcagcaagggaagacatttttgtcgacagttattatcaatggcttagtctcttctagctgttctattgttcttgtatcttgagcggacaactggtttctagggcaccttgaaatctgtctacgagatctctaagattatgagatgacatatgaccccctattgcttttgttcactttgctaaaactgaaagtccgagttcacatgagttgggcatcagttggtgtttaaaaaaaaaaaaaaaaaaaaactcaagactagttctctctctctctctctc

SEQ ID NO: 1650 - DNA, 1007 bp, Zea mays
  unsure (1)..(1007): unsure at all n locations
  Clone ID: MRT4577_10150C.1
gcatgctccatgtcccttggccttggggagagcaccataagcgcttcatcggtgcttgccatgcctatggtctcatcaagaacanccggcttcagaggaatcgaaaatgaccgtccaaattgctgcctgtatggcgcctcttctgttgcgtccacttctagctggtgaatgtgagatggatgaagtatttgatatggatggtgacgattctgcgcagcttcttgctgcagcaaacgccgcaaacagtgctcaaggaattgtcgcaactctcttggaggaatatgagggcatttttcatgatgaacacctcatatgttccttgtcacctgaatctcaaattgaagttggtaatttggaagccaagggcaatggatttcatgatgcagaaaatgatgtagatcaagaattggatgatgacaatggcgtggagcgtatacttagtgggaaattgagtgagaacagtggatatgctggcagtgacctctatgactacaagtctcgagaaccagattactgcattggagaacaagtgctcaggtgattaccaatggattggtttctgtcacaatgatcttcagaatggcaatatcatgattgatgaaaagaccaacgtgctgaccatcattaaaatggccatcggtgtccctaaaaagcggaatgacaaatggatgtctaatcagcttttgaagctacatctggagtaaaaagcttcgaaggatgctcatcttcagtttatgcactactatttgttgactgacatggacttgcaaaagtgcacttaatacttgtcagttattcatttgttgcattggtcgatgtcttcgatggaacaatctcagttagggatatttccttcctattcgttagtgttcaacattataataagtgtttattagttttgttcagatgtttgtaattatctatgacattgtaaccttcatcaatcatacatgcatgtcatcgcttcattcaaccgaaaaaaaaaaaaaaaaaaggcccctagggcc

SEQ ID NO: 1651 - DNA, 239 bp, Zea mays
  Clone ID: MRT4577_101510C.1
cccacgcgtccggtttgttgaatatgataaaaacagtgatgatactgtgacttgggatgaatataacattcagatgtatgatcgtgtgattgactttgatgagaacactgctctggatgatgcagaagaggagtcctttaggaagcttcacttaaaggacaagaagcgatttgaaaaagctaaccaggattcaggtcccggtttgagtcttgaagaatttattgcttttgagcatcctg

SEQ ID NO: 1652 - DNA, 456 bp, Zea mays
  Clone ID: MRT4577_101511C.1
cctcgagccggcgggaattatttccagaagtgcctctgcttcgaaatataggacgggtgcagcaaacgcaggagcgcagtgcacaggatacgacccaccgtcgtaacatccttcagatagccagaagctcctcgcatgatcgcacctcatctctacgagcgtacactcctgctgatgtcagcccatcgatcgagcgcttgaagagagcaaccctgaagctcaagaccaagggatatgactacaagcgtgagtgtgcagagcctctcaagaccggccagagccccaggtacatggtgttcgcctgctccgactcccgcgtgtgcccgtcggtgacactgggcactgcagcccggcgaggcattctctcgtccgcaacatcgcctccatgggcccaccctacgacaagatcaagtacgccggcaccgggtccgccatcgagcacgccgcgtgcgcgct

SEQ ID NO: 1653 - DNA, 213 bp, Zea mays
  Clone ID: MRT4577_101512C.1
agttgtacgagagacacctgtaggttgatcaggttcccgatgctatctggtatggagccatggagctcgttgttggccaggcccaagccagacagctctgtcagtttcccgatgtgtgcggggatagttccagacaacatgtttaatcgattctgtgatggattgcgggatttccccgtttaatcggttgtcgcggagatcaacgaacgagac

SEQ ID NO: 1654 - DNA, 804 bp, Zea mays
  Clone ID: MRT4577_101513C.1
ccgggttgctgaataaggaacccctaatttacctatccctcactcttgcatgctgtgctctgcctaatcttgctttaaatgttgtgaggaagttggtaaagatggaagcatacccacctgttgcagcatggtcggcaattttagctcatatgtgtcaaactaacactggtgcatttctcggtgcagaccttgtaatggagcttggttatcttttccaaaataatagagttgatccacggaagaagagtaaccgtcctttgctatcaatgaaacccaattcatttacattcaacatagttttgaccgcttccctcgtgtttggcactacaagaaaagctgagcagcttctcgaactaatgcctaggataggggtgaagcctgaagtcaacttgttgattgttatggcccacatatatgaaaggaatgggcgcagagatgagattcggaagttaaagaggcatgttgatgaagcttatggtcttagtgaatcagaggtcaggaagttttatgattgcttgctctcctgtcatttgaaatttggggattttgattatgcagttgatatggtgctggatatgattaggaaaggtaagaatgcaaagcggtcattggaagcagctaaagcagttcttgaaactgttaaaaatagaaaattgtattttccttatgagaaagctgatgctgaaaaccacgctgttctagtagccaaatgctaagttacgcttcattcttcaaagacaacagctttgggagacttgaattggacgcaagagaatcagtcaggctattgacagataagctgca

SEQ ID NO: 1655 - DNA, 282 bp, Zea mays
  Clone ID: MRT4577_101514C.1
tcatcccctttgcgagtatagtctctctgctaagcgacggagctcaggctagtctcggcggctctagaagacgatgggcaaggacgacgtgatcgagagcggcctggcggcgcgagttcgctgcgaaggagtacacggacgctcccccggcggcggtgatcgacgcgggcgactggggtcctggtcgctgtacggcgccgtgatcgccgagttcatcgccacgctgctgttcctgtacatcacggtggccaccgtgatcgggtacaagcaccagacggacgc

SEQ ID NO: 1656 - DNA, 199 bp, Zea mays
  Clone ID: MRT4577_101515C.1
gcgcatgtatctgctggcgatggtggtgactgtgtaacaattgatggtatagaggaaaaggtggttacctatacaagctgatactcctgatcaatcataagtgacaacaatacaggttgtacaaaatgcattacctcactgcatacatagaaaaactcacacaaacatactttgaaaacattccttttatacagaaccc

SEQ ID NO: 1657 - DNA, 366 bp, Zea mays
  Clone ID: MRT4577_101516C.1
cccggctcgacccacacgtacgatgaattatagacaattctattagctttctaaaaagtctaggatcgcctgatttggatttctgaaactccagttatggatttttgaagtaagtagtcgaattctgtccaaatctggacataattaaagtttagcactgtttgaccttttaaactgtcgaatctcattatgatgataataccaaagttgtagaggactttataagctttccaaaaagtcttagtttactatttttggatgcatattttgtgagttatgaataaaacaattgactactgtgctgctgtccagaaaatctgcacacgttaaactgattacttagaatcattcttgcttggctagata

SEQ ID NO: 1658 - DNA, 995 bp, Zea mays
  Clone ID: MRT4577_101517C.1
gcatcttgcctgcttatatgtgataatatctcgaggccggttgcgccgggatagatccaattgttcccttcctatattgctattgctattactataggccaagggccgcagcggcaggccacgcatctctctcccttccttctccccgttctccgtgcaatctcggccgtttccgctcccgccatcgccatggaggaggccaaggttgtggagtccaaggacggaacgatctcagttgcttcagcatttgctggtcatcaggaagctgtgcaagacagggaccacaaatttttatcaaaggcagtggaggaagcataccgaggagttgactgcggcgatggaggaccatttggtgcagttgttgtccataatgatgaagtaatagttagctgccataacatggttttgaagaacactgatccaactgcgcatgctgaagtaactgcgataagagaggcttgcaaaaagcttgggaaaattgagctgtcggattgtgaaatttatgcatcttgtgagccatgcccaatgtgttttggtgctgttcatctatcccggattaagaggctggtgtatggagccaaggcagaagctgcaattgccattggatttgatgatttcattgctgatgctctcagaggaactgggtactatcagaaggccaacatggagataaagcaggcagatggaaatggagccatgattgctgaacaagtatttgagaagactaaagagaagttccaaatgtattgaaccgtggaattacttggtgggatgatttaacattgtgatagccctctgattctcaaaaaagaataacacaacctctggtattatgtaatttatgatgggccacaaattgccattgtgcttccatttctgaaaacaagattgatgtcactccttgttcttcaatgagcagttgattcttaacttacctgataaaaaaaaaaaaaaaaaaaaaaaaaaaaaacaaaaaaaaaaaaaaaaaagcggcc

SEQ ID NO: 1659 - DNA, 521 bp, Zea mays
  Clone ID: MRT4577_101518C.1
atgacaaagcttgcacgcctgcgtgtgccgggctgctatagagcggtcgacctacgcgttcggacatcgacctaggacacgcacgcaagacagaaccacttctctggcccgatgacagctgaccctattgccatgtaccacactgactcgattatcaccagcacatgccaagaaacagatggaagcgcgggcaccggggggcaggacgaggccacatcttgttcatttttcctgggctataccgaggacagcatggcctggatggtcaggataccaagtctaacattggttgaactgtagcatacatgagtgggtactacccctatacagaaacctaacggacactcactgcctgtactcccgaaatagaggaattaatctacagcaacatagataactgcgatcccaattataaagcttatgacaggaagactgcgataatttgttccatgagccgtgatcagccttggattgaacatgacaagtccaccaggatatgcacggcctgaacgctcgcctga

SEQ ID NO: 1660 - DNA, 811 bp, Zea mays
  Clone ID: MRT4577_101519C.1
ctcgcctggccacgtggcagggactcggagctcttcctatattgctactgctattgctattgctatacgccaagggccgcagcggcaggccacgcatctctctcccttccttctccccgttctccgtgcaatctcggccgtttccgctcccgccatcgccatggaggaggccaaggttgtggagtccaaggacgggacgatctcagttgcttcagcatttgctggtcatcaggaagctgtgcaagacagggaccacaaatttttatcaaaggcagtggaggaagcataccgaggagttgactgcggcgatggaggaccatttggtgcagttgttgtccataatgatgaagtaatagttagctgccataacatggttttgaagaacactgatccaactgcgcatgctgaagtaactgcgataagagagatgtggaatgactcattccatctaaacattcaatttgcaaggttcaaatttagttccacagtagattgtatggaactagatgctttcaaggcttgcaaaaagcttgggaaaattgagctgtcggattgtgaaatttatgcatcttgtgagccatgcccaatgtgttttggtgctgttcatctatcccggattaagaggctggtgtatggagccaaggcagaagctgcaattgccattggatttgatgatttcattgctgatgctctcagaggaactgggtactatcagaaggccaacatggagataaagcaggcagatggaaatggagccatgattgctgaacaagtatttgagaagactaaagcgaagttccaaatgtattga

SEQ ID NO: 1661 - DNA, 643 bp, Zea mays
  Clone ID: MRT4577_10151C.1
ggccgcttttttttttttttttttctttttttttttttttttttttttttttttttttttttttttttttttttttttttttttttttttaacagaaaaaggctggttcattcatggcttaaaacaaaaccccaaacttgaaagggccgcataccaacgaacgggacggacggcccaaacgggaggcggaagttttttcttcctacacacccagaacagaactgggcaattcacccaccccagggaacatgctggggaacacattcccaacggagccgggtaaaaaccaaactttaatagttgcaggcttcaaagtttgttaaactgggcggccagccccctttattttataaaattcacaagcctcgggacccccctgttccaatgttaatgcattggaggcttggggaagggggaccccccgaaatttggagtaatatcccaggtggggcccggaattggcacatttaactttgggtgttgacccccccctggagaccgacggttttgccccaaaaaacaaaggggttccagccccacaattagggccgggccccttaaggataaaaaaacccgggactatagccttaggaaagggcggccctaagaacaatattaggggcaaagcagcaacccatgggaa

SEQ ID NO: 1662 - DNA, 293 bp, Zea mays
  Clone ID: MRT4577_101520C.1
gccaatgcatctaccacatcgtcttcaggtggggtggggagaatattaaattatggaacactttttacaaatgcaagagcaacatgggcacacagctcccctgaatcgaaggcctcagctgatgcgtatgctgcgttagcttatccctaaacaccttaaagcccaccatttgctacagattctcgtaccgcaccgtcaggatctgcaaccttaccaactgctagagacgctgtatctttggatggacacaaactttacataaacgatgacacttgtagccacaaatttaatat

SEQ ID NO: 1663 - DNA, 496 bp, Zea mays
  Clone ID: MRT4577_101521C.1
gatgacattaaaaatttccctctttaatgtaccctttttggaacaaatcttgaaactgaacatattgaacgtgctaactttacccctccccaacctgctctgcctacaggacaccggacatgacacatggggtatctatcgaacacaagatgacctggttaaaatgggggaccgtgcccgattcccaaacgcatacctggggaaaacccattaatttacaccttgatgaggagactctttaacaggaactgttctaagctcaccctacacttttcggaacgcggcttagatggaaaaaaacccttatcttcttcgctaccaggaaaacaagcccccaattcgcgatattcaatggccattaactgccgcccgctggaaaatctatctctggaccattggctcccaccgctaaagctcttcccttaaacaccttctattgaagtcttattaagacagccaaggaccctactcctcccattatggctactgacaggac

SEQ ID NO: 1664 - DNA, 987 bp, Zea mays
  Clone ID: MRT4577_101522C.1
tgtctctcagtcacccacccccaccccaccccaccggcaccctcaccctcaggcctccgcctctttctcagcttctctccggttccttccttccggtcgccgattcttctacgcgaaagattcctggctggctctcgtctctcgcgtctcgttctcgcgtgcatggggctggacgtcggggagatcgggatgggcctggatctggggctggacctcaggctgttcgccgcgcggagcgccggagggatggccaagggcgctgcgccggcggggatccagtcctgcatcaggagcctcgaggtggagcgcaggaagatcgaggtgttcaggcgcgagctcccgctctgccttcgcctcctcgccgacggtgaggactagaggcctctcgttctcctctcttgcgtgatcgacgagttgaagttggaggctgccaagagaggcgaggacgacgacggggcgacggtggtggacgacggcgacaaacggaaatggatgagcaccgctcagttgtgggtggacagcgacgccaaatcggacgagtctgacaaagagcaacagagtgaaatcacgtcgccgccggagccctgtggcgcacccacgccgatcggtgccaccacccctagcctcggttcagaagagcagctccgccagctcttgtcgtatcgttgttgcgcacaagcggtctacccaagagatagcgttgtcgcggcttgagcatgcatcggtggattcttgagtctgtccgagagagtggttgtagtgcaggcaggcatgtatacagggagattgggcgcgcgcggcccgtgtgcgcccaagagatgaactgatcatgcggcgtttgggttgctgtcaagtacgtaccagctgataggcgttttgtttgagtctttgctgacttctgttaacttccgggcagatcacaaaattttcgccctgagaataacttattaataataatattactgcggcggctgctgttattttata

SEQ ID NO: 1665 - DNA, 821 bp, Zea mays
  Clone ID: MRT4577_101523C.1
cctcgaggcttgccgggcgactggtgttcgagaaactcgttctgggatgctacgcgttcaatggcatctcctgtgagggcagcgacctcgtgctgcgccctgagaagtatagacagtggcaggcaagaaacgagcgagcaggcctacggcagctgccgctgaaaccaagcattgtgaaggttgtgaaagacgaggtcatgaagcattaccacaaagatttcttggtttgccaggatggccaatggcttctgcaaggatggatggggcgggtcctcactgcccacacgacatgggtcgcgaacggagacgcctcttctggatgaagccgaagctctctatttagaccaaagacccccctccctccccctttgaagatatgtttactggaagcaaaataagtcccacatatgtttgctggatatgagcatacaagaaagttttgctaccatatcaaggaaagagacactgtaagcaaagatgaagcgaaagaagagatttttcttccttctgctaatgaaatgatacatagctctcctgcgtgttcgagaaaaaaaaaattgaactatctagtctccacatcatctacattttgggcggctgacaactgaagcatcaatcattctgtcaccttcattcatcacccagtttcgattcggagccgaggaggttccatttccgcggagaaacggtgcactattatgacatcagtagaagatgttgttatgtttcgaaaacagaccatttcttgcgagccctaaactcaaatcaatgtggaaattgtggatactgtatctgggcactccctgtgtggacagcatgct

SEQ ID NO: 1666 - DNA, 355 bp, Zea mays
  Clone ID: MRT4577_101524C.1
ccactcgttcgcggagcggacaagagcggccagagcttctcgccggctattgtcggcgtgcagcgcgaggtgtactccaaggagggcgtgatgcgtcggctgatgccctgaatccagccgcagttggccgacgcatagcactctgagttcactgtgtacctgtactagttcctcgcgtgcgacttgctgacgcacctgcgctgcagacaccgattacactggtcctgcgcgctgccctggctcgagggcacataccggtgccccttctgtatctacggcgtggacgcctgttactgcgccgacgtctactgcgcatagaatcaggcgaagctctgttcttgctataacttgccct

SEQ ID NO: 1667 - DNA, 588 bp, Zea mays
  Clone ID: MRT4577_101525C.1
ctgtgctgcgctcgagccggccgggcctggagatcccctcacagtcatcctccacccaccccacccaccgcctccgcctctctctctctctttcgtttgttcgtctcggcttccggtcgccgattcttctctgcgcaaaagattcctggtggtggtgcccgtaccttgcttcacgcatcgctcgcgtgcatggggctggacgtcggcggcatcgggatgggcctggatctgggtctggacctcgggctgttcgccgcgcggagcgccggagggatggcggccgcggccaagggtgcgccggcggagatcgagtcctgcatcaggagcctcgaggaggagcgccggaagatcgaggtgttcaggcgcgagctcccgctctgcgtgcgtctcctcgccgatgtgatcgacgaattgaaggatgaggccgccaagagaggcggagacgctgaggccaaggccgacgacggcgataagcggaaatggatgagcaccgctcagctgtggctcgacagcgacgccaaatccgacgagtctgacaaagagcaactgagtgaaagctgccatcacgtcgccggagcccaacatgct

SEQ ID NO: 1668 - DNA, 475 bp, Zea mays
  Clone ID: MRT4577_101526C.1
gccggccggttcggggctccagatcctactaaatcaatatgtcacttctatttgtacataccctcgaagtgttgcatcaaaaaaacggatactgccgatgctggcgacggagtctcacgcgcgctggccggccaggaaaggcccggggcgacagaccatcgggacggcccgtgcccccgaccacaagaagaagactacgtgtagcctcgccgccgtcgccgactcatcccgcccagatagattacagctcgagccttccaccgttcccgatgcagcgatgccacctgcttgttgctcttcctcgacatctccctcactgctcgcggaggccaatctccaactccacgctccaagtgcgccaccatgagtgatccacggcatggacatggtactatctgcgcctatgatcttcccacctcctctactgcacgcgccaggatctccaggacctccatgaacacgtctgcgagctgcc

SEQ ID NO: 1669 - DNA, 1770 bp, Zea mays
  Clone ID: MRT4577_101527C.1
ctcgaggccggccgggccgggctctcagtcacccacccccaccccaccccaccggcaccctcaccctcaggcctccgcctctttctcagcttctctccggttccttccttccggtcgccgattcttctacgcgaaagattcctggctggctctcgtctctcgcgtctcgttctcgcgtgcatggggctggacgtcggggagatcgggatgggcctggatctggggctggacctcaggctgttcgccgcgcggagcgccggagggatggccaagggcgctgcgccggcggggatccagtcctgcatcaggagcctcgaggtggagcgcaggaagatcgaggtgttcaggcgcgagctcccgctctgccttcgcctcctcgccgacggtgaggactagaggcctctcgttctcctctcttgcggttgcggccttgcctttctctcctacagtatacgcgtcgcgctctgtcttgctccgtttctcgctgacgcgctggtctgtgcggccctggattgcgctggctgcagtgatcgacgagtttaagttggaggctgccaagagaggcgaggacgacgacggggcgacggtggtggacgacggcgataagcggaaatggatgagcaccgctcagttgtggctcgacagcgacgccaaatccgacgagtctgacaaagagcaactgagtgaaatcacgtcgccggagcccaagttgctcggtggcgcacccatgcccataagggccgttgcggcggtgccacccctgccgcctccattcttcaggagagaagacagctcttccggcagtggtctgtcgctggtaccacccgcagctaagccgccgattcctcccatgtctgccagcgacaacgcgagcggcagattctgtgccactatgccaccgtctggctctggggtcaacttgcactctcaggctcagcagcaagccaggaaggcgaggcggtgctggtcgccggagcttcaccggctgtttgttgccgccttgcatcaactcggcggccctcaagttgctactccgaagcagatcagggaggtgatgaaggtggacgggcttacaaacgatgaagtgaaaagccatctccagaagtaccggctgcacaacagaagatcccccggcgtcgtggctccggtgagccagtcggtcatgctggcgggcggcctctgggctcctcctcatcaggagcaaagcagctcgcagtccgggtctccccagggcccgcttcagttctctggatccggtgtagcggccaccgtcggcggcgatagcagcagcagcgacgaggacgacaagtccgaaggctacagccggaaatacgtgtaaaggccgcgttcgacggatgagagtgtagagatagcgtcgcggcttctgcttgcccgtctgtggcaataacagattcatcagtcttgagagaggttgtagtgcgtgcgcccaagagctcaactgatcatgggttggattgtttgtttgtcatgtacgtacatggaaagctgatggcttcctgacttttaatttctgggcaggtcccaaaattttcgccctgagaatgagatattatatagataacataaatacataccaaataacaaaactaaaaacaagggataaaatataaataacaatagaagacataaaaaacgtcacacgtgtggaacaatgcggtacaagttttggcccaacaacaagagcaaaaatgtatctactgggggggcgcccgggactttgttcgttccaaccagctacattatttggat

SEQ ID NO: 1670 - DNA, 1789 bp, Zea mays
  Clone ID: MRT4577_101528C.1
cattgggtccctcgaggccggccgggctcagtcacccacccccaccccaccccaccggcaccctcaccctcaggcctccgcctctttctcagcttctctccggttccttccttccggtcgccgattcttctacgcgaaagattcctggctgcctctcgtctctcgtctcgtttctcgcgtgcatggggctggacgtcggggagatcgggatgggcctggatctggggctggacctcaggctgttcgccgcgcggagcgccggagggatggccaagggcgctgcgccggcggggatccagtcctgcatcaggagcctcgaggtggagcgcaggaagatcgaggtgttcaggcgcgagctcccgctctgccttcgcctcctcgccgacgtgatcgacgagttgaaggaggaggctgccaagagaggagaggacgacgacggggcgacggtggtggacgacggcgacaaacggaaatggatgagcaccgctcagttgtgggtggacagcgacgccaaatcggacgagtctgacaaagagcaacagagtgaaatcacgtcgccgccggagcccaagttgttgggtggtggcgcacccacgccgataagggcggccgtttcggcggtggcggtgccaccacccctaccgccgccgttgttcagaagagaagacagctccgccagctctggcctgtcgttggtatcgttgtcgccggcaaccaaggcggcggtgccgatttctcctccggtggtggctgccagcggtactaccaccagcgccagattttgtggcaccaccatgccaccatctggctccgaggtcatcaacatgcactcgcaggctcagcagcaagccagcaggaaggcaaggcggtgctggtcaccggagcttcaccggcggttcgttgccgctttgcacgaactcggtggccctcaagtggctactccgaaacagatcagggaggtgatgcaagtggacgggcttacaaacgatgaagtgaaaagccatctccagaagtaccggttgcacaacagaagatcctcccccggcgcggcggcggctccggtgagccagtcgatcatgctggtggatggcgtctgggctgctcaggagcaaagcagcggctcgcagtccgggtctcggcagggcccgctccagttctccagggcaggtatggccgtcggtggcggcgacgacagcagcagcagcgacgacgacgaagacgacgacaagtcggaggatggctacagcctgaaatgcgtgtgaggctgaggcaggctgcgtttgcggaagatcggatgagagtgtagagagatagcgttgtcgcggcttgagcatgcatcggtggattcttgagtctgtccgagagagtggttgtagtgcaggcaggcatgtatacagggagattaggcgcgcgcggcccgtgtgcgcccaagagatgaactgatcatgcggcgtttggaaagctgataggcgttttgtttgagtctttgctgacttctgttaacttccgggcagatcacaaaattttcgccctgagaataacttattaataataatattactgcggcggctgctgttattttttaaaaaaaaaaaaaaaaaaaaaaaaaaaaaaaaaaaaacccacacaacattgtcactcagaactgctgatcgacgatttgcaggcagggtgcctgccttcgcccaacgtgcacaagactacgaggcgcttggagcccccctcttggcctgatgacttgcacgacatttattgagaaaaacctggacctgcacccgctgacgatgga

SEQ ID NO: 1671 - DNA, 541 bp, Zea mays
  Clone ID: MRT4577_101529C.1
ttttgttttttttgacgcaattcagatggggattactgcggccaggccattccatatgtgtacatcccgtggagtgacgagagagacgcaaagcaaaccaccagggaggggaggagaaatcatcaaattcagttcatgagagaccagggggggcggggggtcattcttgagcatagcgaaacacagggaaatcaatatctcaacctataggatcgagggggaggagagaaactgagctggtctagggggcgtccatatctccttccatgagggagactctatcgcgaggcttgcggagcaggttccacaatctacagatttttcccttctttctcctcaatgggctttgcgttgcgagaatccttgtgcgtgccgagcaaccaggccatgtgaacaaatgtggaggcgtaggtccctgagtttgtgtacaggacacggtgaggggagtcatgggagtgcgagcgcggatacagcgggaggaaatttgagggggtccatggggaaggagagccggtgtgagcgttaactgggtccaaaaccc

SEQ ID NO: 1672 - DNA, 815 bp, Zea mays
  Clone ID: MRT4577_10152C.1
tctgtgtcttcgtgttcgcagccgcctcccaaggatgtgggagccgtcgggcacatgcaaccggaagtggatgcactcgacacttagatgaagaatcccttgtagattatatgccaaatcagcaattattttagttacgtttaggagactttggtagttgcatattcctatccttcttcttttgaaatgcctttttaatagattcaagatcaattcctttgaatatctccctctcaatatacaccaccattaaatcattaagccaaccatcagacatcttgttccgcaactcggttttaataatcttcatggacgaaaaagctctttcaactgatgcggtcgctaccggtaatagcattgccaactcaattaggcgataaaccaatggaaacactatatgtctcttaagttcaaccatttttattgctaggcttgcaaggtcatgacaaactctaaactcctcaagtcttcttacatgaataatgaaggttgctaattgatcttttattgcttttcgatcatcaagagaaaaatcatccaaatatatctccgtgaggtgagcaagcttattcacatcaaacttagaaaatgactctcttggatcaaggcaagcaaagcaagtaagcaattctgtggatacctcattgaagcgatgatcaaattctgttgtaatagagtctatagttgcatagaagataccaacacggaagtaatgatcttaagtgatattggttttccctccctttcttgatctaccaaatcttggtacactatcttccatatttgggattagaatatcatttttctggcaaaat

SEQ ID NO: 1673 - DNA, 168 bp, Zea mays
  Clone ID: MRT4577_101530C.1
atggaatcgccgtgtacgtgaatatctgatactggcacgtgcatcggtccgcatacggtctaccttccaaaactgcgggtgacataagtggtataaaagctgcgctgactgcaggaccgccggcctacagtagaactgcggcgagctaaggactgactgactattacc

SEQ ID NO: 1674 - DNA, 384 bp, Zea mays
  Clone ID: MRT4577_101531C.1
ccggccggatacccgggcgcgccacgcgtccggtcaaatgccaatcattttcttatcagcaaagatgtaatttccactccgattcatgggtcctcaggtccctaagaggctggattcccaactggcaccaccaagagcctaagagtaagacaggacacagaggagatgcgaggcacacattactttattatgagttggagctttggggccaagtccttatgtggcctcctgctgtggaaagtggaccaggaaccctgaatccccagtcaccttatctgagcccctagacagggtcaggctataccaagtctctgtaacagcagccacaggggaaggaagaagagacaggaaatggggcaaggctgaaacgcctgcacgctcccc

SEQ ID NO: 1675 - DNA, 813 bp, Zea mays
  unsure (1)..(813): unsure at all n locations
  Clone ID: MRT4577_101532C.1
ccctcctctctcttcacctcagcacgggctctcttccctccgcttcctcccgtctcctctcctctctcgcacaatgccattgcgcggtgcgtgagagggagtcagacacacagacgaggaggaagagggggtagccagccagccaaaggcgaaagcgagaagaagaagaaaaaaggacattgcgcccgtgcaaggcgtgcgggcaggccggcgatgctgcggaggactgtgcccgaccgggccgcggactcgtccggctccgccgggggcggggacgcccggccccgcgccgacggctccggagccgcgctcttcgccgtgccgcgcctcttcgtcggattcgccgccaagcgcgcgccggacgcggagtcgtcgaggagcccgacgtcgccgctagaccccaaggcgctgctgctccggtcgccgaggagggcctggggcgcgccgggactagtcgacgccctcgccgccgacaccgctgccgccaactgcctgctcagcccgcgcctgcggctcgtcaggcagcacagctccccgcccaaggaatgcggcggcggcggaggaggacactcgcagccggagctcggcaagacgatgtcctgccccgcgccggacaccgcggccgccgncgccgccaccgncatgtcggtgccgtgcagcatgttccagttccgccgcggggatctgaagtctggtcctgaggaggccactaggtcggacaccggcgcgtacctcgtcagcaacggcaacgccaagcgcaactcgttcgacttcggtaagctcccgggcccgggctcgctgccagtgccagcg

SEQ ID NO: 1676 - DNA, 569 bp, Zea mays
  Clone ID: MRT4577_101533C.1
actcctatgggcgattgggtccctcgaggccggccgggtggcttacccgccagcttgaaaagtcagacccagacctttcaggcactaacaaaccctcaacaatgacggcagaccagtggaagcgcttccaaatgaccaaagcagtgcaacgcggctccacatcagcccaaggggactcttccggaagcagtgaagcagatgctcgcattgataatctttttgagattattcggaagtgggagagcaactttagtcgtcatctacaaatcttgcttgacgcgcttaatcactatgctgcgacggagacagtggtgctgctgagtctttgtgcgcgtttgagtaccgcgaaccaaggaacagagtatgctggtctgcggcaggaagaagagtcaacttagagtataggaacttgccggataaaaagggttgatatgtgagagaggcgttataggggttagtaggctggtcgggttcattgtaaaacaagataccatcggattattcaaccatgacagctaatcatctgaaaaccttagcgatacaaaaaaaaaaaaaaaaaacccgcggcc

SEQ ID NO: 1677 - DNA, 427 bp, Zea mays
  Clone ID: MRT4577_101534C.1
ttacagaggcttgtggtttccaaagccaagtgtgtactagcaaccaactagctcgggcggcagcaggcagccatcatgtcggaggagaagcaccaccacttcttcaaccaccacaagaaggacgaggagcagcccgacggcgagtatgggtactccgagaccgttgtcacggccacgggcgtgggcgagtacgagaggtacatgatggtggagaaggagcacatgcacaagcagtacctcgacgaggccagcgccagtcgcggcggcgccttcggactctactagaagcacgaggcgaacaaggaccccgagcacgcgcacaggcagccatcatgtcggaggagaagcaccaccactttttgaaccaccaaatgaaggacgaggagcaacccgcccggcagtttgggtacttcgagaccgttgttac

SEQ ID NO: 1678 - DNA, 802 bp, Zea mays
  Clone ID: MRT4577_101535C.1
tctctcgtgtcgtctcttcagctatcagacggcaagacgatgctgccgctgaggtccgccgccgccgcgccgtgctcggttgcaggacttctgctccaccgattctcatcctactcgtcctcttctgtctattctgtccgccaccacgcctcgtctgctctctcctcccagccctccacccgccccaccaccacctggtcctcttcccccaattccagcagccgcaggatcagggggtttgcggcctgggcttcggcgccggggccggcggggtctgcggattccctcgctacaaaggcgctagaggctaagatcaaggagcaactggaggcggacacagtcacggttgtggatacctctggagatggccgccatgtttgcatagacgtgatttccaaggcatttgagggaaaatctgctgtaaacaggcagagaatggtctacaaggctatatgggaggagcttcagagcactgtgcatgctgtggaccagatgactaccaaaacgcctgatgaagctgctgccaacgagtaatcgatagatgcacaatacctgtgaaagcacagattatctgtgcttcgaagatcaggccattgcttcgaccaaaatttttctcttgggtgctattactttgcgtgtcagctgaatggtcaataatctgcgatgtggtgcggatgggagatggcggtgtagactttcctactgcatgggtggtccatgtcgggggcagagcggcggcgtgggactgagccgtcggatttttgtgtcatcccagctaggactggataatcggttaaaatcg

SEQ ID NO: 1679 - DNA, 334 bp, Zea mays
  Clone ID: MRT4577_101536C.1
agagaaagaaacagctttattatgtcgcgacgataaggcaaggcatacctcatcagctagctgtcttcatccgtgatgtcaaatgcctcaccgcttcaagtcacatacattaatgaaccccataaaaaacggttcccggcgaaataacgcaaacctatcgaacttgggaaagagataaatcttaatacaaaaacagtggctgctagttcaccggtcacgccgtcacgtgactggtacttccttaagcagtgacgtataacccccaccccatgtgatttccctgctctactacgcggcttggtcgccggatcagtgacactgcagatgaatctgg

SEQ ID NO: 1680 - DNA, 361 bp, Zea mays
  Clone ID: MRT4577_101537C.1
tttggcccggcaaaactctgcatatttagagtcccattcccatcgaacccatgaacattacacgaaccagcaggtgaaactgacatccatgcgaagaggatcccggttccaggttaacagacaggaagcagaatacaaccatgacagaggcagagagcacgcaacaaaatgcaaaaaaaaaaaggagagagagctccggttccattgcttcctttactcgcaggccaatttggtgtcgaagctactcaagcagatggcgaaagcctggaaggccgagagcgggtatcggtagtccatggtgaacatgtccttggccaccttaccgaactggaggatgaccttgtcctggtcctgcggagcc

SEQ ID NO: 1681 - DNA, 1004 bp, Zea mays
  Clone ID: MRT4577_101538C.1
tctcgtgtcgtctcttcagctatcagacggcaagacgatgctgccgctgaggtccgccgccgccgcgccgtgctcggttgcaggacttctgctccaccgattctcatcctactcgtcctcttctgtctattctgtccgccaccacgcctcgtctgctctctcctcccagccctccacccgccccaccaccacctggtcctcttcccccaattccagcagccgcaggatcagggggtttgcggcctgggcttcggcgccggggccggcggggtctgcggattccctcgctacaaaggcgctagaggctaagatcaaggagcaactggaggcggacacagtcacggttgtggatacctctggagatggccgccatgtttgcatagacgtgatttccaaggcatttgagggaaaatctgctgtaaacaggcagagaatggtctacaaggctatatgggaggagcttcagagcactgtgcatgctgtggaccagatgactaccaaaacgcctgatgaagctgctgccaacaagtaatcgatagatgcacaatacctgtgaaagcacagattatctgtgcttcgaagatcaggccattgcttcgaccaaaatttttctcttgggtgctattactttgcgtgtcagctgaatggtcaataatctgcggtatggatagcgcatggcttaaaaattatattttttccgttttttttttattgatgtgtgtgtgtgtgtgttgggtgggggacttgaacgctgcattggtgcctgaaggcgtgcttcatgtacgacattgctcgctcttcgaactccagtttccaaagcggacgccggacgccgtgcttgaagcagatgtggtgcggatgggagatggcggtgtagacttccctactgcatgggtggtccatgtcgggggcagagcggcggcgtgggactgagccgtcggatttttgtgtcatcccagcttgtttggtttaaatcggttaaaatcgaaagtttgtttggtttt

SEQ ID NO: 1682 - DNA, 543 bp, Zea mays
  unsure (1)..(543): unsure at all n locations
  Clone ID: MRT4577_101539C.1
aattcggcacgaggccgctctgctcctcgctgtccccgatcccttctcttcagatctgccgcccatgccggctccccgctccgcaccctagccgctagccgcccgggcccacccgccgcgcccccaaaatgggccgccccaggatgctcaccgccgccggcggcatcgaccccatcgccgaggagccccaccacgcgcgctcccccgccgatggcgggctcgggcccgacccggcggccctcgcctgcgcgatctctgccgaggccagcaccgtgctcgccgtcatgcgacggggcctccggcacccgcgtgccacggccgcggacgacgccgcggccgaacacccgctcgttgcctccctccgcgggctccgccgcctcgccttctcgccgtccccctcggccgccgccgcgctccccgccgccgcgctgcggcccttcctcgatgccgtccgctccgaggacgccggcgccgncgncacctncgcctcgctcgccgngctccacgaggtcatgtccctcacgggccccgcgctcccgggcg

SEQ ID NO: 1683 - DNA, 434 bp, Zea mays
  Clone ID: MRT4577_10153C.1
aaaccccgaaatcaacatttaaaggaaaaacattaatcccccctttaaaaaaaaaattaaaacttttaccaatatctcaaccccacacttggtttccctcaaaaaaatccattaaaaaattcctaatttaaaacaaacttcattaaccttttcccggtcaatttcaaaaaaaatttttccaattgaagctacaaattaaaaaagggtaaaaaataaagcttactccttgggccctctgccttttttttttttccatttgaaaaaaatttggaaaaaaaggcctaaaaaaaccattacaacccttccccattttttaaaaaaaaatggtttgcccctgaggacggataaaaccacaattcttataaatttacgggtggtagtaattttttttttaaaaaaaaaacccaaccccctgatgtttaaaaaataaaatt

SEQ ID NO: 1684 - DNA, 1233 bp, Zea mays
  Clone ID: MRT4577_101540C.1
cccacgtgtccgccggccgggcccgtcagccccaatcaagcttttttcaacaatgatcagctgtgcctaaagccgcaagcaccacagccggagaaatcctctcgtgtggtctcttcagctctcagacggcaagacgatgctgccgccgaggtccgccgccgccgcgccgtgctcggttgcaggacttctgttccaccgattctcatcctactcgtcctcttctgtctattctgtccgccaccacgcctcgtctgctctctcctcccagccctccacccgccccaccaccacctggtcctcttccccccattccagcagccgcaggatcagggggtttgcggcctgggcttcggcgccggggccggcggggtctgcggattccctcgctacaaaggcgctagaggctaagatcaaggagcagctggaggcggacacagtcacggttgtggatacctctggagatggccgccatgtttgcatagacgtgatttccaaggcatttgagggaaaatctgctgtaaacaggcagagaatggtctacaaggctatatgggaggagcttcagagcactgtgcatgctgtggaccagatgactaccaaaacgcctgatgaagctgctgccaacaagtaatcgatagatgcacaatacctgtgaaagcacagattatctgtgcttcgaagatcaggccattgcttggaccaaattttttctcttgggtggtattactttgcgtgtcagctgaatggtcaataatctgcggtatggatagcgcatggcttaaaaattatattttttccgttttttttttttgcattggtgtgtgtgtgtgtgtgtgtgtgtgtgtgtgtgtgtgtgttgggtgggggacttgaacgctgcattggtgcccgaaggcgtgcccccgggcccccgttagtcacacaccattaacatacatcaagaatctcactgctgcgttggagccaaacacagcggatgagctccatgagggcgtagagggggcaaccaaggttctccttagcaagctggatgaccttcaattttttgtgggcgacagcatgatatacgaagcgctcgtgagattcgcctatgacgaggatgatgtcactactccgacattcctctatttctctcatggccttaaggagatcgagggccaaattatgtacccatgctgagtactagagatgctctaatggtatagtcgctagtatagctgccctgcctgaact

SEQ ID NO: 1685 - DNA, 675 bp, Zea mays
  unsure (1)..(675): unsure at all n locations
  Clone ID: MRT4577_101541C.1
caagctttggatttattcggcagtgtgcacntatgcagtgcgccttgggctgcgctgatgctttcatggggagcgcactagtgtggcagtaagatcggtgattgctgcagtgtggccttgccatggaagctgcgagcttctacaaacaaatgttgagggccggtgagaaggaaaatggctctgcttcattaatgtgctcagcatttgatgcccttgtgagtctcgagcatggcaagatggttcattgtcgcagcatgaagtctaggttttgttttgaaatgatgcacttcaagtgtggcaggctggcagctcagttaatactcaaattgtcttctaatgggaaaataggtctagtggagtggtgagagttttctccctaagtcatcaggtcatgagttcgacatagcctcttcgtatttacggctgaatgttgccttggtttatccctttccaagagccaactcatgtgggagccttcagcactaagtctgttctttcacttagcttatctttatgctgctttgaatccgataatttcatttgcggcttatgacaaggaaaaacttattgaacctgcaaaatttcatcctcaatatttgacaactataaatttggtccaactttgttcccaacttaatatgtttatttaatgtagtttgaaaacgcaggagagct

SEQ ID NO: 1686 - DNA, 431 bp, Zea mays
  Clone ID: MRT4577_101542C.1
ccccccccaccacgcagggccacacgaaaaaaagagagaaaaaaaccgacacagggggcgggcaaaacaaacccagggaaagacaccaccaaggccggccaggaccacaacagcagaggggcctcaccactccgcggccaccgcaagaagcaaacccgagactaaggagccactcgacgaacgggaaggcagcctagacaaccagggaggccaccccagccgcgacagcacagagaccaaccacaagggaaccccgcccaggaatctccaccgagagggcaaagaggacaacgggaaccacccgcagcgcccgaggggtgcaccaaccaccaaaagcccgcaaaggcccgaaccagaagggccggggcacccccaacagacacaagaaccgcaaggaacgacgggcgccacacaacccacgggggagaaaa

SEQ ID NO: 1687 - DNA, 381 bp, Zea mays
  Clone ID: MRT4577_101543C.1
cttcgttcattcgaccagcaccggaaccatagtgtcacgtacatacatattgtgggttccactcctaccacgtttagagccggtaaaaatccacccttgcaaaaatgaccttgcccgaagaaaaaaacatttttatttgctggcgcattagtgcagatgtaccactcaatcccccttgccaataccttacaaaattggatggggcagagaacgctctcttgaccgaagcatccatcctagcctgatcataggctactcacagggcttcgggtgctctatagaagatgggtctcgaaacctaatgctgaaacctgacctgcttatcttgccatgagatgacacttaaatgggggagctctccatcatggactccctttgggg

SEQ ID NO: 1688 - DNA, 426 bp, Zea mays
  Clone ID: MRT4577_101544C.1
gccactgccacacgtctgaccctctccaccccatagtgaccggctgcttttccctaagccaagggcctcttgcggtcccttcttactcacacacaaaatgtacccagtattctaggtagtgccctattttacaattgtaaaactgaggcacgagcaaagtgaagacactggctcatattcctgcagcctggaggccgggtgctcagggctgacacgtccaccccagtgcacccactctgctttgactgagcagactggtgagcagactggtgggatctgtgcccagagatgggactgggagggcccacttcagggttctcctctcccctctaaggccgaagaagggtccttccctctccccaagacttggtgtcctttccctccactccttcctgccacctgctgctgctgctgctgctaatcttc

SEQ ID NO: 1689 - DNA, 263 bp, Zea mays
  Clone ID: MRT4577_101545C.1
atcttggcccacataactcagctattaatatattcccaaccctgattagagtgaaagtttctcccattctaacatagaatctagctatgtcctcgacgaccacgtccttgttgatgttgtctcccggcgagtaccggcgtcggatgaagggtgtggcgaactccctccacaacctcggcgagaccgtgtctggccacaccctcgtcctcaaccttctgtgtgctcttaggcggcggtatgaccatctgaaggcgctcatcaag

SEQ ID NO: 1690 - DNA, 375 bp, Zea mays
  Clone ID: MRT4577_101546C.1
ccaacataaaaaccggaaaaggtacctttttatttggggggggccacaccccccatccaaaaaacctttattagggaatcccctcaaaaaagcattcaaaaaggggccccccccaaggaggggtggggggaaggaggcggcggggtttgacaaaccaggtggaacaaaggccaccattggtggaagttgaaaaagggtgggggggtaacccgaaaccggggggaaaaacggcaacaccggtggtggggcaaaaaaggaaccccggctggctgaacctagcgggcaaaagggaaaaagaattggcggcggcaaaaaaccgggggggtcaagggcacccaattggttaaaggaaaaaatttgttgttgttgaaagaa

SEQ ID NO: 1691 - DNA, 277 bp, Zea mays
  Clone ID: MRT4577_101547C.1
gggaaaaaaaaaaaaaccttcccccccgttgggtccgggggtccccaaagtttggggttaaaataacaaaccagggccccagggaccatttttgaggggaaaaaaaaggggatttcaccaaaaaacctgggggggggcaaacaaaaccctccccacgggaagaccctcgtccttccaaacgtggttgcttgtttaacccccccccgggaagtttaaaacctgtttttgaccgggagggccctgataaccccctgggggaaaagggcacccagggggg

SEQ ID NO: 1692 - DNA, 378 bp, Zea mays
  Clone ID: MRT4577_101548C.1
cgggtcgaggcacgcgtccgacgcggttccctcgggcgtgcaagcggtggagagatctggggcaggccgccgtggtgccccgaggtgggtgactcatgccgatgctcccgaagcaccaggcacgcagcggtggttctcccctaagactgagtgatggcgatgctccagaggcgggcaggcaaacagcgacggcattcccgagtcaaacgagtggcggcgtcgcaccctaagctcagtggtaaccgtgattgtgcgaggcacaataggcttcggcaatgacggtggtggccatgggacacgcgggtatctccgacaggcgcgtgacgcgcagtcgtctccatccgtggtggccacatgaagcctcgttggctcccgtgt

SEQ ID NO: 1693 - DNA, 217 bp, Zea mays
  Clone ID: MRT4577_101549C.1
cgagtctccagagtcactccgttctaaggttgatgaagctgtagctgtactacaagcccaccaagctaaagaggctgcccagaaagcagttaacagtgccaccggtgttccaactgtttaaaattgatcagggaccatgaaaagaaacttgtgcttcaccgaagaaaaatatctaaacatcgaaaaacttagatattatggaaaaaaaacatggcaa

SEQ ID NO: 1694 - DNA, 430 bp, Zea mays
  Clone ID: MRT4577_10154C.1
tctttttgacctgactacatcctagaaacctgggggtcatctgctgacacgattgagaggattgacggtcaggtggatgtaggtgacacctatgaaggcagaagtcagcgtaatgaccataactgatagatgagaccagaggacattgactacaaaaggccagacaccgagtgtcactatagctcacatctaacgtttgaaatggctgctgccctgactgcagcttacatagagatcaaggacaacataacctacttcgacaagcttcgggaaggcgcaaacgccctgaacaagttcggaaggctgcagaacgtgcgatacagccccaatggatctgaccaggcaattttctacaattgcaccacctactgggactagcttgagtgctgtggtgcgtgggtgtactttgacacatggaacaattcatacc

SEQ ID NO: 1695 - DNA, 387 bp, Zea mays
  Clone ID: MRT4577_101550C.1
atgggtgatgtggcatcaatgacatatctacctagcgtgcgctttttgtctggtcatagttggttctcgtcggatttattattggtagagacctctctaattgtcgtgttttcgcaggggacatccactgaccaggacataagcttctcaaataagcatgccaagatgctcaagacgcagaagttcacgtccgagcttgaccatctggtggatacatcaaaggtcaatttggaagtgttgaagacctggattgccaagcaggtcaccgagctacttgggttcgaccaaattgtttcaattcagaggacagtcttctacaaagagagggttgctgggatgtactctacaatgtcatatgccattgctcagtttgcatcaagaggttga

SEQ ID NO: 1696 - DNA, 145 bp, Zea mays
  Clone ID: MRT4577_101551C.1
aaagggtcgccaattattccattcaaatctggggagccctgaaccccaaaattttttccacacacccatgggcatggctatatatttggattctcaactatacgtttatactacctcacatctaaacccccccaacccttttttt

SEQ ID NO: 1697 - DNA, 203 bp, Zea mays
  Clone ID: MRT4577_101552C.1
aaaactaaaaaaaagggggggataatataacatgggccgacgctttttccgatcccattcttgctccccctctcttgccagaacacactttccctgtagtgtcccctaattcaatctaactgcccctgtttttataaacgcttctcctgggaaacccctggctttcccacctttactcgctttactatccttcccattctctt

SEQ ID NO: 1698 - DNA, 673 bp, Zea mays
  Clone ID: MRT4577_101553C.1
caggaatgatgctggcatacttgtacgacggaaaagactaagaaccaagatattacacaaaaggtaaggcaaagaactactggcagggtggcgtttgccttgcctttgccgatgaagtcttatgttggttgtatgggactgtcaaagagaatgaagactatgttcttcaatttgtacatccatttaaccgcctcgaacttctgcgagcccagtccccctgtccggaagccataacgttgcatgtgcagcagctctcaggtgcagcggactagattctagcagtgacctcggcggagactacttgccttggagaaaaacccaattctagcagcagcactgaacaatggttgatctgccaacttactcaaccccaattaccaagcagatgtgctaatgcaccaaagaactgatgagatcgatcactggtctagctacatccatggtttacactcttgagtggccaaagagattttgaatccatcaaacatgtatttccattgtaacattattacataataaacaatacagacagagctactagtgctgtgctactgtaacattattgcatcaaatcttaaacatccgaattgtcagcctttataagtcataatatgtaagcagaactttttcgtactctagcgttttgaaataataaatttcatcaatgacgatt

SEQ ID NO: 1699 - DNA, 725 bp, Zea mays
  Clone ID: MRT4577_101554C.1
tttctccgctctgcttctcgccttgcgcgccctgcctccatcctcagcgcacgcgctgggccccgcctcacatcgtctcttcgacaaccgaatgccttcagaacgctaacggcgactgcctcacaacagggcaaagttctactcgtcctctacgatggcggcatccacgctgagcaggagccaaagatgctcggaaccactgagaacgagctaggcatccggaagtggatcgaggagcagggccacgagctcgtcacaacctctgacaaggagggcgagggttcagagttcgacaagcaccttgttgacgctgaggtcatcatcacaacaccattccaccccggttatctcacagcagagcgccttgctaaggcaaagaacctcaagctcgcagtcactgctggtatcggatccgaccacgtcgacctcaatgccgcgaacaagaccaacggcggtatcaccgtcgccgaagtcaccggctcaaacgtcgtctccgtcgccgagcatgtcgttatgaccatcctcgctctcgtccgcaacttcgtgcccgcccacgagcagattgccaagggtgaatggaacgtcgctgaggtcgccaagaacgagtacgatctcgagaacaaggttgtcggtaccgttgcagttggccgcatcggcgagcgtgtgctccgccgtctcaagccttcgagtgcaggagctcctgtacttcgactaccagcctctat

SEQ ID NO: 1700 - DNA, 2203 bp, Zea mays
  Clone ID: MRT4577_101555C.1
ccggccgggaggtttcttttgttccgtgtcgtgtcggaccccaccacaaccctcttctccgtttcgtttcccgaccaggcctcgccggctcaccgcccccgccgcgcccgccatggacttctcggaacaggacgtcgacgtcttcggcgaggactacgacgtccacgacggcggcgccgaggccgaggccgaggccgacggcggcggggactcgtcgggctcctcctccccatcatcgtcctcgtcgtcctctgccgccgcgtcctcctcatcctcaagtggcggctcaagcctcagcagcagcggcggcgctgccggtgagggcgaggatggcgccgatgcgggggacggggaggaatacgattcgtccaacctcatagccacaaggagcgccggcgccgccggctatctggacgatgagaggagggaatatgagaaccaggaggtagaggaggagagagatttgttcggctcagataacgaagagtacgtcagaactccggcgcgcagccactacctagtcccagtgcttcctccaattcggaacactaataatcattctcgaggaggctttggaggacgaggtggtagaggcccaccacttcttccaaggccaggaggccatccagggcgacataactttggttacgggagattcgggaatgggcgtcatgttgaaggtttagtttcagatatgaagcttaataagagcgatgaaacatagaatagaagagctgttacttttcaggagccttgtgagattgcatgcttatgccgtggcgagggtggatttgtgtattttgatgatcgcagctccaatctcttcaaacttacaatctaaacataccgcgcagcgcttctcgatcaatggattcgggtcaattattgaatcaaatcatgtaaacttcagaaggatttgggatctactcgcacataccgaaattccaacatacttcttcagaatactatacattttgtgacataccgcaacaatcttaataagatattggccactgcttacctaagagaaccatggaagatgggcgttcataaaagaaggggtgttgtatatcttgatgttcataagctccctgaaagaccaaaaagtgaagttgagcgtaagagatgttattggggctattcttttgaaaaccttgccactgagaactcattcagcgacgatggaaggggtatcgatgcaaatgtagagttttgttctgtaataaagacaaaattgggtgcccatcggattgtcatgggtgctgagatggactgctgtgatgcaactgatgatggcaggaggttctatgtggagctgaaaacaagcagagagctggaatatcatacagtggaagcatatgaaaaagaaaagctacttagattttggattcaatcgtttcttgccggtgttccttatgttgttgtgggattcaggaatgatgctggcatacttgtacggacggaaagactaagaaccaaagatattacacaaaaggtgaaggcaaagaactactggcagggtggcgtttgccttgcctttgccgatgaagtcttatgttggttgtatgggactgtcaaagagaatgaagactatgttcttcaatttgtacatccatttaaccgcctcgaacttctgcgagcccagtccccctgtccggaagccataacgttgcatgtgcagcagctctcaggtgcagcggactagattctagcagtgacctcggcggagactacttgccttggagaaaaacccaattctagcagcagcactgaagcggggttgatctgccaacttactcaaccccaattaccaagcagatgtgctaatgcaccaaagaactgatgagatcgatcactggtctagctacatccatggtttacactcttgagtggccaaagagattttgaatccatcaaacatgtatttccattgtaacattattacataataaacaatacagacagagctactagtgctgtgctactgtaacattattgcatcaaatcctgtaaacttcagcaagggatggatgttcttaaacatcccgaattgtcagcctttataagtcataatatgtaagcagaactttttcgtactctagcgttttgaaataataaatttcatcaatgacgattaaaaaaaaaaaaagcaaatattgagctcattataattaatttaatatattttaaattatataatata

SEQ ID NO: 1701 - DNA, 218 bp, Zea mays
  Clone ID: MRT4577_101556C.1
ggacgctgggcggacgcgtgggcgcggcacctccgggtagttcaccctagccgtcctccctcccagcagctgcattggagaagacatgtgccaaagatctgccagaagtcagaacacatgcttgcacattcacgggcaagagcaggatcccaattctgtgaggtgtggaagtgctgatccaattggccggtgcggtacttacggcgccatcgaacatc

SEQ ID NO: 1702 - DNA, 740 bp, Zea mays
  Clone ID: MRT4577_101557C.1
cattgggaccctcgaggccgcttcctcccgccggcctggcccgacagtctgcgcaccctgccacgacgagatggcttcctgttcctcatcgccacggccacccaccatccctctcctcctcctcttcctcctcctccacttctcctccgtcctcgccgcaccagctcctccagccttgtcacaacaggctggtaccggcggcggcggcaatgcgacggattcggcggcggcgtggacgccgcggctgaggaagacgttcttggacggcggcatggagcgctggcgcgggcggcggctggtggggcggttccaggtgtgcgcggtgtgcacctgctgcgggggcccgcacgggatgtgcatcccggcgccctgctgctacgccatcaactgcaacatccccaaccgccccttcggcgtctgctccttcaccccgcgcacctgcaactgcctcacctgccacctctagctagcctcgccgccctggatccatggttttgcttgtctagctggtcgtgtcgtttcgttgtcgatggaagggatattcgtgattcgttcatttgggggacagattcgacgaagagttcatcctgccctaaaactgcttgcttgtagccatgactcacagttagtagcagtatggtgatggttggattaatccagctttttttttctgcacttgcttgctcttcaaaaaaaactgaagaaaaaaaaaaagcctggcatcttttttttgtggcccc

SEQ ID NO: 1703 - DNA, 616 bp, Zea mays
  Clone ID: MRT4577_101558C.1
ggccgcttttttttttttttttttctttttttttttttttttttttttttttttttttttttttttttttttttttttttttttttttttttttttttggccccggccagatttcacaatcaaaaaaccgaatatttcactgggggggagccacgtttggagtataacattgggagcaaaacatttctcaaacatgaccagagctccaaaaaaaccttaacggggacccggaattttacatggaacgggggcgtctaaaattttggtggggaacggggggccatcctttttgagccccccgggggtagcgaccggggggggggttttcgcccccttggcaaagaccttgttttcggccggggaccccccctccaggaaggggcccaaaaccttgccgcccttaatccaataccagccgaacttgggcttggtggaggggggggcactggccccaaacaggggggtttcccccaccttggccccgtaaaattgcccccccaggccaaatgaccgggagtaaaaatatggccgggagtcaaaccccggaacggggtcaccggactttttgcccttgaacgcctttacagcccggtttggaaactttttaaaaggggca

SEQ ID NO: 1704 - DNA, 581 bp, Zea mays
  unsure (1)..(581): unsure at all n locations
  Clone ID: MRT4577_101559C.1
cgaaagagaagagnaccacaaggggccaaagncccaagggggggggagggacgcgcgaagccaccacaggacaccaacggcccagccccagccccgacccaagcaaaaaccgggcagaaagaagcaccaaccgcaacccaccccccaccacgacagggaaaagaacggcacaagggnaaaagacaacccgcggccacacagccannccaggcgccgcgacccaacagaagatgttttttttgaccccccccccccccgccggggaaagggggncagnnnnngggcgcacggacanagaacaaagaaaaaacacgaccaggcaacgggcggcggcacggcgacgacaaccgaaacgagccccgaagccgcacgggaccggccggcacgggacgagaggacaacgccgacgacgagaccgcagagggcaagcgccccagcaaaaaaaaggaagaggaccatgcccacaaaaaaccccggccgccgagcgcccgcccggacaccagcaccaccaacgaggccaaaggccaagcccgcaagcagcccagcaagaacacaggcaaggccagacgacagggggggaa

SEQ ID NO: 1705 - DNA, 311 bp, Zea mays
  Clone ID: MRT4577_10155C.1
attccacgctctttgtctggattaccaatttcatgaccgagaggggcgcagcgtacatgccgatgtcgtagaagatggacatcttgcctatcagcatgtgctagagctcgtagtctcggattcggtaaaaactatcatgatcatattaaacggtacgggagttaagagtgtactaaaataggtcggacagtacgaggaggggtacacaatcaggaaaagtttatgtaatgctagtagatcaagaaaaaagaaaaaattgaatatgatggagctgccctccgacgaatccggcacgcaaccgtgggaacgaa

SEQ ID NO: 1706 - DNA, 530 bp, Zea mays
  Clone ID: MRT4577_101560C.1
agcagtggtaacaacgcagagtactttttttttttttttttttttttttttttttcgggataaacacacccgccatgtattgacaattgtgttaaccgtgagtccctgacctaactttcttctgcactaccatcaatccatacacataaacacgacatataccaaatcatctgaagcgactaatgcattgaaataagttttatccctacgaccatgacacacacatgcttctgtcaagaggaccgacataattaaaacattcaactaatccatttgtccaacccagaagagaaatcgggaaccaccttaccaatacaaaatgctactgagagccacattgtcaacaatgaattccaattcaaacattacgaagaacacctggcggccgtaatattggaccatgcttctgtatcaccaaatcctgggatttccccctcacatgtcacacataagcacacacattatcacaatgaaccacaaaccacatgtatcaatttatgagataagtatctcaagacacagggacctca

SEQ ID NO: 1707 - DNA, 367 bp, Zea mays
  Clone ID: MRT4577_101561C.1
agcagtggtaacaacgcagagtactttttttttttttttttttttttttttttgggtgcttcagcggtgtagctgagatgcgaggctagcggcacccagactctccctgcgtcggtgatgggggctcacggtcttgctgtggctctctcggtgcgatgctttatgctagatggtgaggcgatagcggccttagataaatacacatggaggagtccagccgcacgggtagatcctttcggcttccgatcgaatcctaacgaactctaccatggaacgtggttacggtggggagaggaaagtgctaacgcccgcgtactctgcgttgttaccactgcttcagggcgatttccggcgctctggcggccgt

SEQ ID NO: 1708 - DNA, 575 bp, Zea mays
  Clone ID: MRT4577_101562C.1
attttcaaagcttttgggtttcatttcacgagttgcttaacttatgctgtaactgttactcatgtcagaggagcgatacatagaatgaaaggaatatacttgttcgtaaaactgtctgttccatgcatagagcgactaacaagagagaccaaactatgccttgatcgaaaggcagaggtcttacagatcactgtaaaccatatttatgacatcagtaaagtaatgctttacacggagctcggcattcacgctgggaattatttggactatcagacctgccaataggactgggcatagaaaccgaaaaccgaacaccgaaaccgaaaaagccggaatcgaataaaccagattatttttcggttaccaatatgcagaaaccgaactaattttggtgttcgatttttaatttcggtttaaaccgaaccggaagcacatgagccatcccatattttcccattccctatcggtcggcccattaggcattcaggccatcacgctgcgtaggagctgagccggtcacgcactcacgccaatacgccatcgcccatcgcggcatcgcccagacgcggtcacgc

SEQ ID NO: 1709 - DNA, 227 bp, Zea mays
  Clone ID: MRT4577_101563C.1
gttggatctcgtgctctggaatgcagtcaacatcaagctcagtttgcgggcaaaccacgaaaactattagaggggctggcataaggaacccgctgtgcttgaacgccaacgtctgacatagagctttatccagcgaagtttgtgaatgagacaacatctattataggaatctccatactacgtgatacagttttttaatataacgggattattgcagtgcgctaaga

SEQ ID NO: 1710 - DNA, 827 bp, Zea mays
  Clone ID: MRT4577_101564C.1
gagtccctctgccctctctgccctctctctctctctccgtgccccccaggccctcctcccaggctcccagcccccctcccgtccctctctctgtctctctccacgcaccatggcgatctccgagctcgggtgagcggacaaggtgggcgtcccgtacctagtaccgttgcctgcctcgggtgaacgagcgtcggttcggctcggtgcagaatgcggccgatttgagcgaggacgggagggcgcgatggatgcgggttcgggcggattcgcgaggaggctctagaggaggttaggtttcggccccggccccggcccggctgtgggagatgagctgctcgtccgcggccagcatcgggcagccgccgccggaggaagagaagaagtgcctcaactcggagctgtggcacgcgtgcgccggcccgctcgtctgcctccccaccgtcgccacgcgcgtcgtctacttcccgcagggccacagcgagcaggtggcggcgtcgacgaacaaggaggtggacgggcacatccccaactaccccaacctgccgccgcagctgatctgccagctgcacgatgtcacaatgcatgcggatgtggagacggatgaagtgtacgcgcagatgacgctgcagccgctcaacccacaagagcagaacgacccgtacctgcctgcggagatgggaatcatgagcaagcagccgacgaactacttctgcaagacgctgactgcgagcgacaccagcacgcacggcgggttctctgtgccccgtcgcgcgggcgagcgtgtcttccccccactggatttcacacagcagccttcagcacaggag

SEQ ID NO: 1711 - DNA, 324 bp, Zea mays
  Clone ID: MRT4577_101565C.1
gaggggttccgcgccgtttcccccaacccggagattttaattatttcatcaccacgggttcggaacccagggcctttaaacggtgttttgtatatggcaattggtttaaaatcccccccttaaaaagggctcaatgagcaagatacaagggggggggatcccgggggccaccttttttaggccccccttttcttttgggcatttcggctctgggatcaacctttgaggctcaacccctggcgcccggggccggggaaacgggaaatgttaccattttatttgttaaaacctttgcaggggcccctttttgggtgtgccaaggtg

SEQ ID NO: 1712 - DNA, 884 bp, Zea mays
  Clone ID: MRT4577_101566C.1
aattcgacttcggcatgccttctcctaccaccccacaccctctccccatctctctctctctccccgtgccctcctccccccagtccgccccacccttccggccctccccctcttttatatccagtaccatggtgatctccgagctcgggtgagctgatgagaatgcggccgatttgaggaaggctgtgggcgcgatggatgcggtttcgggcggattcgcgaggaggctgtagaggttaggttccggtgtcccccggcccggccggtcgtgggagatgagctcctcgtccgcggccagcatcgggcagccgccgccgcccgcgccgccgccggaagaagagaagaagtgcctcaactcggagctgtggcacgcctgcgccggcccgctcgtctgcctccccaccgtcggtacgcgcgtcgtctacttcccgcagggccacagcgagcaggtggcagcgtcgacgaacaaggaggtggacgggcacatccccaactaccccaacctgccgccgcagctgatctgccagctccatgatgtcacaatgcatgcggatgtggagacagacgaagtgtacgcgcagatgacgctgcagccgctcaatccacaagagcagaacgacgcgtacctgcctgccgagatgggaatcatgagcaagcagccgacgaattacttctgcaagacgctgactgcgagcgacaccagcacgcacggcgggttctctgtgccccgtcgtgcggccgagcgcgtcttccccccgctggatttcacacagcagcctccagcacaggagcttattgcacgggatattcatgatgttgagtggaagttcaggcatatctttcgaggccagcccaaaagacacctgctgacgactggctggagt

SEQ ID NO: 1713 - DNA, 741 bp, Zea mays
  unsure (1)..(741): unsure at all n locations
  Clone ID: MRT4577_101567C.1
tgggaccctcgggccggccggggaacggctttaactaattcctcctcctcctctctctctccccgatccagctagcctgacctcccaccctccctcttgaatccgctcaagttcccgatctcccacctcgtcctccagctcgatcgcgttcgcggcaccccactccgtgctccagaaataagtagccggcggtttcctcgccccaggttttgcggtcgctggggagtgggaattcgttcggctccggtctggccaatgctcctgcggtttcttggagaggccgctgagattgggatccaagctgcgttaggcgagcagcagcagtagccgcatcgagattcgccgtcgttgtccgagggattctccgtttcttgggcggggatttcggttgcggcgggaaaaaaaaagaattctttcaccggacttggcccaactccgctgtatgttagggtagccttttcgacgcgtttctttcgtcgccccagatccgtctccccgcccgattctttcggagtaatcggcggcggatcggaggcagaggggtttggaggcctgagctccgatggagatgcacgccgacgtcgacgggtgcagcgtgcccctggccgtgctcctcaagcgggagctgtgcaaccagaaggtggagaggccggacatcctgttcggggaggccaacaagagcaaganaggggaggacttcacgctcctcgtgcccaggtgccaccgcaccccgggcggcag

SEQ ID NO: 1714 - DNA, 2668 bp, Zea mays
  Clone ID: MRT4577_101568C.1
gggaccctcgccggctctggccgggaattcctcctcctcctctctctctccccgatccagctagcctgacctcccaccctccctcttgaatccgctcaagttcccgatctcccacctcgtcctccagctcgatcgcgttcgcggcaccccactccgtgctccagaaataagtagccggcggtttcctcgccccaggttttgcggtcgctggggagtgggaattcgttcggctccggtctggccaatgctcctgcggtttcttggagaggccgctgagattgggatccaagctgcgttaggcgagcagcagcagtagccgcatcgagattcgccgtcgttgtccgagggattctccgtttcttgggcggggatttcggttgcggcggaaaaaaaaaaagaattctttcaccggactggcccaactcctcggttgatccggtgatccgttacaaaaggcctccgctgtatgttagggtagcctttccgacgcgtttctttcgtcgccccagatccgtctccccgcccgattctttcggaggaatcggcggcggatcggaggcagaggggtttggaggcctgagctccgatggagatgcacgccgacgtcgacgggtgcagcgtgcccctggccgtgctcctcaagcgggagctgtgcaaccagaaggtggagaggccggacatcctgttcggggaggccaacaagagcaagaaaggggaggacttcacgctcctcgtgcccaggtgccaccgcaccccgggcggcagtggcggcggcgagaatgccggcgacgacgacaccatttccgtatttgcgattttcgacggacacaatggctctgcagctgccatatacacccgggagaatctaataagcagtgtgttggctgctattcctccaaatctcacaagtgaggagtggaaagctgcgctgccaagggcactagttgctggttttgtaaaaacagataaaaacttccaaataaaagctgcacgctcagggaccactgtgacttttgttataatagatggatgggttgtcactgtagcatcagttggcgattcacgatgcattctagaatctgctgagggttcagtatatttgttatcagcagatcatcgcctggatgctaatgaagaggaggtggagcgtgtaacagcaagtggtggtgaagttgggagaataaatatcgctgggggtgccgggattggtccactcagatgctggccaggtggattgtgtttatcaaggtcaataggtgatatcgacgtcggggaatttatagttcctgtcccacacgtgaagcaagtaaagttgtccaatgctggtgggcggcttgtcattgccagtgatggtgtgtgggatgcactgcgctttcaagaggctctgaactacaccaggggcctgccagctgaagctgctgctaatcgaattgttaaggaagctgtcacttcgaagggattaagagatgatactacttgcatagtagttgatatactacctccagagaagttaagccccccactaaagagacctggaaaaggagtcatcaaagctctgttccggcggaggccctctgatgaaatgtctgaagatcagatggacagaggatgtttagaaactgatgttgtggaggaaatatacgaggagggctctgcaatgcttgctcgaaggttgaatataaattacccagaaggaaatatgttcaagctgcatgattgtgctgtctgccaattggagatgaaacctggtgagggcacctctgttcatggtaacatgcccaagcattcaagagttgacccctggggtggcccttttctctgttcctcctgtcaattgaaaaaggaggccatggaagggaagctacattcaagaaattcccaatctgctgttcaacctctgcctaagtaggcattccttgacgggttctatacattggttcatagacactaactaccactaacaacagcattagcaaataaagtagactcgtcaatgccatcttattcatcaatcaatgtttgacagagtcatgaattttcacctactacattcttatcaaatggcgatcggtacagattttagagatttatggtgtcgtttatatgatgcactacagttgttcggtagtagaaggttcaagtctgagccttatcaagtctatattcagagagaccacagctggcctctaggatcaaatgaactggtggccttaaggtgtgctgctttctgtagttctttcattgattatcaagtctgcacgacttgtctatttgtgaataccagtcgttggttgaaccccatttagtcctaagtcccaacgtagattcctttttgtttcttcacatgacatactgcttgatgggtggccataaagaccatgctttttccactctctcagtcacatgtgatgcttccttattaatcctctcacaacgtggatttccctttttcattctttaccatgtgtatagtcacgaggcacatcagtacatgacattggctattttttttgtatttgcaccataattctgcagttgtaccattgtactctcaattttctaacatttttttattttttttgttattggaactttcgcttcctatgtacttgagatggtgttgctgaatttgaatatatttctaagctttatggatgtaatttggtat

SEQ ID NO: 1715 - DNA, 1262 bp, Zea mays
  Clone ID: MRT4577_101569C.1
ccgcggcggcgtcggtccgggcgtccggccgaagtgaaaagtcgatcgggattgggccgttgggggtgcgatacccctcgcctcgaatgcgagctccgtaggtccgcccccccggcggatggccgagctgggccgccgccgccgcccgctgggatgaggcagcgtgaggagtcgcgctcgcggcttccctgcccccaggcctccgctctgaatatccccgacgcgacggtaaccgaacaagcctcagttagaaaggctaagatcagagcatctccgtgtctccacaacacatcctggattcgcaattattgaggtgcctccactataaaaggccaaccatcctcaaggaatgaacacagccagccagcaagcaagcagagaacaaggataacacagcaactgaaaaccttattaccaagaacaaacaactacaagaggctttgcaagttcacagaggcagctgttcactgcgaatgaacaaccagaggaagcctggagactggaactgcaagaactgccagcatctcaacttcagccgccgtgactactgccagcgttgccgtgatccacgccctgacttgcagttcggcgacggctatagcacggttggtgtgctgacctccctggacatccgcccaggtgactggtactgcagttgcggctaccacaacttcgccagccgcagcagctgcttcaagtgcggcacgatcgtcagagacttcccagcggggcaaggcgcagccggtgctgagggtgactttgctggcggacgcgacagcgccgcagtccgtgctgggtggaaagctggcgactggatctgcacgaggcctggttgcaacgtacacaactttgcgagcaggatggagtgctataggtgcaatgcaccaagggaggcagaggcaccgggaggtaagaggcgactggggtgataccaagagcgtgagatgtgacgagctggccgagcagtggaaccaactgccgtcacacactcaccatcaggcatccaggaaggatgagtctactacgtacacgactatattgctgattgccgagcgtagtgccgctgctgtggtttgcgtgggtggagaagtacccaagcgcaacacctgttacgtgtgttgtttgctcctttttgaggttgtgttgattcagtgacagctgagttgtacggcctgatgatgtacttgcattgtgtatttgtcttaaacagcatatataattatgtaataataagtgcttgcttatctatgctctgctgatgc

SEQ ID NO: 1716 - DNA, 684 bp, Zea mays
  Clone ID: MRT4577_10156C.1
ggggcgcccgggtacgcggcgccggagctgtggatggcgctgccggcgtcggagaagtgcgacgtgtacagcttcgggatggtgctgttcgagatcctggggcagcgcaggaactacgacccctgccggggcgagagcagagagtggttcccgagatgggtgtgggagaggtacgagcagggtgagattgagtacgtcgtgtcgtgcgatgggatcggggaggcggacatggagaaggcagagatcatgtgcaaggtggcgctgtggtgcgtgcagttccagccggcggcgcggccgacgatgagcagcgtggtgcggatgctggagggggagatgccgattgtcccgcctgtgaacccattccactacgtcatggacagcagcagtggctcaactagctcggggctgtggagtgacacataccaaagtagcagagagaccattggcattgccatagacagtgagctatcggttagccctattgccaagtcgacttgattgtaagatgatgatcggactcatatgttgatgttgatgaaatcctgtactgtttgcttattataaacaaaaaaggctgaggtttgtaaattagcatcatgcataagaatcaaagatatgcgagttgagtggattagtgtggtgtggcacatgtaggctatccctggctaataagctaagtaccga

SEQ ID NO: 1717 - DNA, 175 bp, Zea mays
  Clone ID: MRT4577_101570C.1
acgcccacgcctacgcctacgccaccttttactcttaggaaacaacgcatatatctagataagagtttaacgtaaaagagggctaataattactacatatacccaaataccgccactacagactacctcatattaacgataataatgttcacctccaacaaggttttaaaatttt

SEQ ID NO: 1718 - DNA, 368 bp, Zea mays
  Clone ID: MRT4577_101571C.1
attggtgatatatctcagtgcccaccccctagataagcatctctataatttgatattcatttctagattttggggaaaacctcagaaactcctgctacgttacctcacttgagagttggacgacaaattatggcatacattgggcaaaaggaaaagagaaccccgagctttgttactggtgtttggtttaccctttggctctatgggttatgacaatgtttgcagactggatgtaagccggttcgtgtttaccgacggcatttgtaagaagttgctatgtgaatttggttgtaagagccatcatattttaccagcgacctttacagacttttatttatttttttataatatttcgaaacattatcgcc

SEQ ID NO: 1719 - DNA, 398 bp, Zea mays
  Clone ID: MRT4577_101572C.1
ccacgcgtacggagccacaagggcatcaaacggctcacggttaggcaagagggcatctaagtttgtcaccaggacagactccaacacaagttcagcctttgggaaaaggaaagcaactgggggggggaggtcacagtgcagatctatcaccagcgaggagggtcctgattcgacctcatcactacaacagacatctctttcaacgtgaagcagcatcagctttttgcggtccaggaaacgcccacagctattctgggctggctctctcaaatgatgctggcccaaggctcacctggacacatgagttacatcacccactcgtcgctgttttcaatcatttaggtggagcactccaagctgctccaatcacagtcacgacgtccacgagaatcccaata

SEQ ID NO: 1720 - DNA, 306 bp, Zea mays
  Clone ID: MRT4577_101573C.1
ggcgaccacgcgtccgaacggcctaaggtcatacccacccctatcattttcattctccaggcaaccacgcaactgctggctgaggctaatctcatccaagtggtcgccgactccatcatcaacactggactacgtgaggaacccaccctgcttgacccagctcctgtgatgagacagctggccttcattatctaactcctgagaagggtgaacccgcccatactcctcctaaccactgttgccagggagagcgctttcaagaacatcacaaccattcctgacctccccgccgattacttgatcaac

SEQ ID NO: 1721 - DNA, 264 bp, Zea mays
  unsure (1)..(264): unsure at all n locations
  Clone ID: MRT4577_101574C.1
ggcaaaaaacacctcctaaaccttagctcaaaataagttagattatatnaatctgggcagattataaattataatcccaaacaaacaggcccataaatggtccaaactgtaatttgacttatgctatccctgggcctcttgttgagtgatcacaaaacttcaccccggatctttactgatttagctcctttcttgaactttgcatcttatcttttaatcaatcctgttcttatgacacctatttgttttatttgcacattttgc

SEQ ID NO: 1722 - DNA, 259 bp, Zea mays
  Clone ID: MRT4577_101575C.1
aaaagttgggactttttttttttttgacaaattaaaacccacggtaggagcaaaaaaacatattcctcaaacaaaggtttatacattatttcattacttggcacgtttaatccaaaaaaaatggggttttaatagttacaaaaatataccaactctgccaatttggggtttttgacatttcatattttaataattatgggctttttttaatttgaaaactgtgtggatatgcaatatttcacataaacagggtttttaa

SEQ ID NO: 1723 - DNA, 870 bp, Zea mays
  unsure (1)..(870): unsure at all n locations
  Clone ID: MRT4577_101576C.1
cctcgaggccggccgggagtcaggctttcgattcaccttcgactatctggaatcatggcgccctctgtcgtctcaaaggtgctttcgggctctgccctcttggctgcagtcagtgctcagaacttcggaggtagtggtcgcggcgaaggcgctttcagctacgtccagccgctcaacactaccattctgaccgagtatggctcctcgccggctgtgtatccttcaccgaagatttctggtgctggtggctgggagatgggccttgagaaggcaaaggctttcgtggctcaacttactctggaagaaaaggctgacatggtcactggtcaagccggcccttgtgttggtaacatcgttgccattccccgcctgggcttccctggtctttgccttcacgatggccctcttgccattcgcgtggctgattacgcaagcgtattctccgccggtgtatccgccggtgctacatgggacaaggacctcatgtatgagcgcggctacgccatgggcgaagagttcagggcaaagggtgctcatgtcttcttgggtcctgtcgcaggaccacttggacgttccgcctatgccggccgtaactgggagggcttttcctcagacccttacctcagtggtgtagctatggagaagaccatcctggcatctcaagatgcaggtgtacaggcttgccctaagcactggattggtaacgagcaggaaatcatgcgtaatcctacttaccgcagggacgacnacaccgaacaagcgcaagctgctatctcatccaacattgatgaccgcaccatgcacgagctctacatgtggncattcggcaacgctatcaaggcccgcgctgccagtgtcatgtgctcgtac

SEQ ID NO: 1724 - DNA, 316 bp, Zea mays
  unsure (1)..(316): unsure at all n locations
  Clone ID: MRT4577_101577C.1
aaaagcacgaacaaacacacagaaaaagaaggncacgacgncaacaaacaccnncaaaaancgcaagcacaaaanngcgagccaaaancngggaccaagccaacccnaangagcncaccccgagcnggaagcgccaaaccacaagcnngcanaacacanggncngaaccagnagagccaaaggaaangaaccnggnaacagcgnnnncaacccccaggganncaaagacgncgnccccaaaaacaggaaggacagaannaaagncagccaaancaagcccagcnagcngacagnnccngnngacgcaaagagcaac

SEQ ID NO: 1725 - DNA, 822 bp, Zea mays
  unsure (1)..(822): unsure at all n locations
  Clone ID: MRT4577_101578C.1
ccggccggactaatcctcccccttcatcccgtgtcacaaagccacaaagaagtttagcaggtcctccatggcagcctctctgccactgtcagctgccatcgttggagccgaagagtcggttgacaaggaggtcttggagatggagtacctctttgagaagtttttgatgccaagtgacttgtgcagcaatactgaatggcttgggatcccagaagaacatgttaggaaatttggcatgatgttggaggacagggacggttactccgtcattttctttcaggacggtgtggtgcctgggaagttgtggtgctttaggtactggaaaagcaatggagtccatggcttgaccaagggctggaggtgctttgttagggagaagggcctcaaagccggagacaccatctccttcttccgaggatctgcatgtggccgtctcttcatctgctgcaggttaggcacccatgcaacctttgcgtcatcctccaccttgcatcatggcttttctatgcccccaccacctgcccgcccgctggtgggtcttcaatctggcatgttggcaagagatgtcccatcattaggacaagctaggttgcatgatggaaatcaagatggaggcggtgcaccatcaagacatgttccatcctcaggacgacgtgtggaggcacagctatcacgtgtgtcgtcgcgccgtcaacgccgtactatgaagcactcgataccagagcccacgatagagacgccaccaattncttgagtcgatgttcctcatagccgcaccacccggcagtggagtgcttacggctttttggcgtcaacatctat

SEQ ID NO: 1726 - DNA, 310 bp, Zea mays
  Clone ID: MRT4577_101579C.1
cgcgtgcactatcaacaaagcaggcaggcaggcaggccgcactgtcgcaggcagcagcagcgttcgttcacaatgacagctagtcttgcctgagctccaaagagcgcgagcgaggggctacagaagcgcattggcgccgcgcgcccgcagcgtggcctcccgccgccgatcgccggcaccccgttgctgcgttggcttggctgaacagcttagccagcttgctgcgccatcaggcagccgaaacgcggcgtccccgcagatggcgggccgccgtctggtgacgctgacgctgctggcggccgcgttcctg

SEQ ID NO: 1727 - DNA, 180 bp, Zea mays
  Clone ID: MRT4577_10157C.1
tttttgttttttggtataattactacagggaggtgggcaacaaagtgatcgaaagcaacggacatttacacagagaaggaaaggccccgaatggcacatgattacgccaggtgtactagacaccaacttatacaggcctgtcactaggatagtggcgcggactgaataatggcggcccat

SEQ ID NO: 1728 - DNA, 326 bp, Zea mays
  Clone ID: MRT4577_101580C.1
ctatttgtttttcatttcatatgattaacaaccattgcaaagggacacttatgccgtttttatgataatcaaattctcacctcatatgccgcggcccaccgacacaccaaaaaaaaacccatgagcggtgaaaccaaacacgggggagtgtctgcttcctaaactgcctcacgaaggatcccaaatggaacaacccgacccagaaccatctagtgtacctcatagctctacgttaacaccacttccccgcagaactttcttccttgaccaagaggtgaactatgatcctcaaaagcatctcttggtcaataaaaatataaaccacc

SEQ ID NO: 1729 - DNA, 1448 bp, Zea mays
  unsure (1)..(1448): unsure at all n locations
  Clone ID: MRT4577_101581C.1
ataatattgttagagcatgaagtccaaaccactgtaacatgagtacacgaaaagtatcttggtagagacatatggtctcccctctcgttatataaagccctactattaaatcagttgcgtgattaagcagctttgtttgaatcattaagcaactctaatttggttttttttctgggtaggaaatggcaaggctcatcaatcagggcacaatatacctaaacgtctctagaagcaccagaacagtccatccgaagattagggccgtgcttgaagctcgaggatgatgtggacgagtaggctcatgtcgttccaaggatccatcgctgggtcaagtattttgctgcatgcgctagtaagcagaccacgaaacaatgggcttttggaaactgcggaacaactgcaaagaaacggtatactcaggtctcacaacattgaacagaacttacacctaaataaagaaatagaattgtcacaaaatcagtacagaaggaagccatcaatacatctagaaaaaattgaagaaaaaattaaggcaacacggttaacatggggcatgtcttcacactagtacactaccatttcagaaaactctagaagacgtcgatgtagattgtagacgctgagtgagaccaagatcgatcaaataattatataggatacaaagtgcatgccaatattccggacttgatcatttgacgtcagaactgaactgaagacatctggccctttccatctaaccatggcatatatgttcgtaggaaaaaatggcagaactaatagaaaaaactacgaccatatgtcagttgacgctacacagaaccctaacatagttttatcttatgctatccacggcctatgctcgctccatgaatgttttttatgtgtaagcatccttacacctagaaaaggtctaagaatactcaaataaatgtctcaatttatgttatgcaagaagcgtgccgtacttaccaagactgttactaatgtatatatgcatcccactgactagaaaacaaacatttcatcgatgaatataacagatgatggaaactcccaaaccatcattgtgaaaagaaacaacttgaagtagcatgaaacgatgacagccaacagaatgtccctataccatttcacttgttaaatccctgaagcgccttggcgactctcgacctcagccggtcaagctttaccgctcgaccctggtctccagccatctcgctgcctcttcagcttcgcctccagccgcgccgccgtgtcgtcaccgatgcgcccgaatgccctcttgcagcgaccccgtagcgcgcagcctcgactaccaattcgtcctccaccctcccgcggagaggcaagggtacagctcggccagatcgtcgaacctcttgggtcattgcgcgcgtcgggcacacggtcttcttatgctancctcccctgcgcgttcctcccagatg

SEQ ID NO: 1730 - DNA, 1933 bp, Zea mays
  Clone ID: MRT4577_101582C.1
gtaaaacaggtgaagcagtggtcttactttataatattgttagagcatgaagtccaaaccactgtaacatgagtacacgaaaagtatcttggtagagacatatggtctcccctctcgttatataaagccctactattaaatcagttgcgtgattaagcagctttgtttgaatcattaagcaactctaatttggttttttttctgggtaggaaatggcaaggctcatcaatcagggcacaatatacctaaacgtctctagaagcaccagaacagtccatccgaagattagggccgtgcttgaagctcgaggatgatgtggacgagtaggctcatgtcgttccaaggatccatcgctgggtcaagtattttgctgcatgcgctagtaagcagaccacgaaacaatgggcttttggaaactgcggaacaacaagactgttactaatgtatatatgcatcccactgactagaaaacaaacatttcaacgatgaatataacagatgatggaaactcccaaaccatcattgtgaaaagaaacaacttgaagtagcatgaaacgatgacagccaacagaatgtccctataccatttcacttgttaaatccctgaagcgccttggcgactctcgacctcagccggtcaagctttccgctcgccctggtctccgccatccgctgcctcttcagcttcgcctccagccgcgccgccgtgtcgtcaccgatgcgcccgaatgccctcttcagcgccccgtagccgcacctcgcaccaatcgcctccacctccgcggagaggcaagggtacagctcggccagatcgtcgaaccctcttgggtcattgcgcgcgtcgggcacacgggtcttcttctctatcctccccctgcgcgttccctcccagatgagcttggagagcctgtagatggtgacgtcgctgtccttcgccgggatcgtgccgcgtttgaggcggataacagtgttgtcgtaccggttgcggagcgcgcacagccgcctggtgatctgcgcggcgctgaggcggtcccccgcgctgaggcggccccgcaccgcggcggcgaggtcgtctgccaggggaagtcgcccgtgcttctgccggtgcgacgcgacggtctcgaggatcgcgatctcgtcggaggccggccacgagcgcacgggtgggcggggtttcttgaaaatgatgggctcggactctgaagagccgtctgagagcagcgaggaggcggcggagtcgtcggattcaggaggagagtcgaaggacgtcgaaggtgatggcgaggggtcaagatgttcgtcggagccgatggtggtgctgccgtccgaggacgcagacgaggggtgctcctccgatgtcatcggcggcggcggcgagggtttacgaagctatggtttgagtattttttttttcgtttgggctttgaacggtagacaaggctgggcagctgcttgagccaaacggggatagagccttgtacctggactcctccgtgtcgtccttccccctgcggcaggggcagcggcggccagcaagacggccaaggcggatgcggcgcccaacgccaccacctcgctgggattgtcgcctctggccacccacagcccacggcgaaaacctagaaaatgactagctccgcaaagctacctaggacacggtttcatcgcatcatcatggaaagaagaacgcagcggaggcgagggaagaggaaccttggcccgcatcgcgtcggcgcaggtggggcgcgcgctcgagctccctgtccctgattgcggcggctgagtactggcgagttggagacggtcctgatgctgcggccactcgctctcctactacaagcccatcatgtctcgcagcttggccgagatgaaagaggcgggggtccacagcgagtgcgcggccacgtacgggagatcaggcactataagaccg

SEQ ID NO: 1731 - DNA, 639 bp, Zea mays
  unsure (1)..(639): unsure at all n locations
  Clone ID: MRT4577_101583C.1
acccaaaaaccaaaacaagctagaagctccacaggcaaangaagacaccaaggatgcaaccagcccaacacaagccataaaacgtccccaaggagttaacctgaacccatcaacgggcgagggaatgcgtttagagaaccccacaattaagaaacttctaaaccattatattttgcggcaatttttagggttgtttgatttcaaattatatctgaaaaatctagtctgaggttggttcatgtctgttcacttttgtcccaattcttagaggttggcgttgcaagttgcagtgttgcacattacctttgacaatcattgtgaaagtaactgttgtgtcagattaaactaacatgaactttgaatagtgatgatgcatatcttttaacaggaaccatgtatgattgcaattgcaataatttccattaatctttctttacttgtgatctagtttcttaacatgttttagatatgcaaaatcacggatgggccttcggaagcgtgataagcacccctaagtgcagctgaaagacgacacggcagttgtattttcattcagcacaagcggcagctgagcatgctcaatgatgtctaatagcagacgacctgtcctgacacctgagtccaatgtcatcttcatgc

SEQ ID NO: 1732 - DNA, 197 bp, Zea mays
  Clone ID: MRT4577_101584C.1
gtaggaaacacccaaacatttcccagggggccaggacaaaaacaaaggtttttaaacaccacaacctgggtggccagccaaacaaattaatgcaggcagataaaaatttctttttctaggaaccggcatcactgccgccctttggggagacctccttggaatcctttttcagggggggcaggtccttcggtgcctgg

SEQ ID NO: 1733 - DNA, 464 bp, Zea mays
  Clone ID: MRT4577_101585C.1
atctcttggaggggttcttctttctgtaacaggtactgaagccatgtttgcaaatcttgggcgtggacctcggtctcaatcagagttgctttcgccgttgtcgtgtacccctgtctggtggtacaatacatgggccaggcagctttcctgtcaaagaacctcgggtctattcctaacagtttttacgattcagtcccagatcctgttttctggcctgtctttgtcattgccacacttgcagccattgttggcagtcaggctgtgataaccactacgttctcaataatcaaacaatgccatgccctagggtgcttcccacgcatcaaagtagtccatacttcgaaacatatatatggacagatctatatcccggagatcaactggatcctgatgatccttactcttgcaatggctataggctttcgagacacaactttgattggaaatgcctacggaatcgcatg

SEQ ID NO: 1734 - DNA, 259 bp, Zea mays
  Clone ID: MRT4577_101586C.1
tcgcccacgcgtccgctagcaggaaataaaaaatctgtaagagagaaccagtataataaaggagtcaatatccagcaacgggtaccgatgtacgctagacgcaatcgtgctataataccgagacctacggctccagtgcccttagtgattgacagtctcgcacatgtagtcacctatcttgagccatcttaggtgtctaccaaatttgaagccctgcttggatggtgtgtcttcaattattgtatttataatttttctt

SEQ ID NO: 1735 - DNA, 380 bp, Zea mays
  Clone ID: MRT4577_101587C.1
gggggctcccacccagcatatttgaatttttggcggcccccacccaacatataaaaatggttttggcggtccatagcccgaatttccgggttgttggttgaacaaaaaagggggggggtcggtttttcatcgggggggcccactttcccgaaatttaacagccaaggggctaatttacctaccaattttaaggtaaccctcctcccccataggaagcatgttttttgggtggccgaaaataagctttaacggggaaaccacactccggaacctaacttggaggggggggttccaaaacgggccccccaagagaaacaacccaatacttggagtccttgacggggaggctctcggtgtcggggggagcatcacccttttag

SEQ ID NO: 1736 - DNA, 368 bp, Zea mays
  Clone ID: MRT4577_101588C.1
aaacccaacattgacccctttttttttttaatttaaacaaacacaaccaaccaagttggtttaaacttaaaaaatcttcttacccaataaattaaaaacccttttacaatgctttaaaaaaaaaaccaaatggacttcaaaaaataccagggggcccccacccagggcttttattaaggaatcgggggaacccctcaaatggctcccaaactttcaggcctttaaattcctcggctttttaaaaccaaaactctaaagtatccaaagggttaaaattctgctttccccgggccaaaaaaaccccgtctttcaccccccccctgaaaaaaaaacttttcaccccccccctgtttggcttttatttttta

SEQ ID NO: 1737 - DNA, 224 bp, Zea mays
  Clone ID: MRT4577_101589C.1
taaaagaatgcagcgtagtagtcggaatcggctcgaggggatctgggccaggggctctgattgccgtatcatccgagtccagatggagttgggggaagatggcagtgtctataagagcattttggtgagggagccttgggatggagttagggtgaaggatggtgtcttgttggactataaatgttgtctgaggtttgggcagccaaatggaattgaatgtagtt

SEQ ID NO: 1738 - DNA, 438 bp, Zea mays
  unsure (1)..(438): unsure at all n locations
  Clone ID: MRT4577_10158C.1
ggggtcgcacatgaagaagaccatctcctaggagcagacggtcaaagcggtcatgaagtggcgggagactgccaacgataatgtgccgtagcgccaggctgaatgcttactctacgtgctgacgagcgccatcactacgccgagctcacaatcgcgcgacgtacccgagccatgtcatctatccggttcacactgctacacaagtccctgttcaggtcgtaagtagccgaaagcgcgccagcgattccggctcatgagctcggngacatgtacccggtggcctaccaacatcagctggacaagcttgaacccgagaggcttaagccctgcttgtacaccgtcgttaacattgacatctctgatgccgatttttcttttaacatgcggcgaccttgaacaaattctgcgtccttactcttgtatagggatgcaaaggcc

SEQ ID NO: 1739 - DNA, 676 bp, Zea mays
  Clone ID: MRT4577_101590C.1
ccggccgggactgccaactcgcacgcagcagtacgacgtctctcctctgggtctggggccgagacaccgagcacgtactacctggtgacgtcaaggaagtacagcccggtgcccaggaaccagctgctgagcccgctgatcgtgcacgacggccgcctcgtgcagcgcccgacgccgctcgtcgcgctcgtcaccttcctctggatgccgttcggcttcgcgctggcgctcatgcgcgtgtacatcaacctgccgctgcccgagcgcatcgtctactacacctacaagctcatgggcatcaggctcgtcgtcaagggcaccccgccgccgccgcccaagaagggccacccgggcgtcctcttcgtctgcaaccaccgcaccgtgctcgaccccgtcgaggtggccgtggcgctgcgccgcaaggtcagctgcgtcacctacagcatctccaagttctccgagctcatctcgcccatcaaggccgtcgcgctgtcgcgggagcgcgacaaggacgccgagaacatccgccgcctgctggaggagggcgacctggtcatctgccccgagggcaccacctgccgcgagcccttcctgctgcgcttcagcgcgctcttcgccgagctcaccgaccgcatcgtggccgtggccatcaacaccaaggagaccatgttcccac

SEQ ID NO: 1740 - DNA, 2340 bp, Zea mays
  Clone ID: MRT4577_101591C.1
ggccgcttttttttttttttttttgcattgaagggttatttcatttatcaacggaaatacgtaaaactgatgtggtattaaagtcaattgtttagattgttacagctataatctatagagacaaaattattatataagcagttacagattaaagccaaacaaaccgactaatgtgacgaaactttgtattaagacggctctaacaactcttccgcccttcttccggaaaggaagaattgtagatatactaatcatcatcaagcttgtactagtacacggcccacatcacactggccaacttgtcgacaaggaacaataaattggaataaatttgagcagtaattaaacggcagtctgctgggcagcagcaagagagcgacgttggccgttagttcttatccttctccttctccttctccttctccttgttcttggacgggacacggccgtcggtgccagcgagcatgccgtacttctccttgcgcgtgatggacgtgcactcgaagccaagctgtccgctgagcgtcttctggatatagttggccacctcgatgggcgacttgccgccgctgcacgtgaggtctttggggagctgggtgaggaacgtgatctcgtacgtcgggcgcgggttcatgaagaagaagtagggatccatgagcttgaagccgcgcacggtggagccgtggaacatggtctccttggtgttgatggccacgggcacgatgcggtcggtgagctcggcgaagagcgcgctgaagcgcagcaggaagggctcgcggcaggtggtgccctcggggcagatgaccaggtcgccctcctccagcaggcggcggatgttctcggcgtccttgtcgcgctcccgcgacagcgcgacggccttgatgggcgagatgagctcggagaacttggagatgctgtaggtgacgcagctgaccttgcggcgcagcgccacggccacctcgacggggtcgagcacggtgcggtggttgcagacgaagaggacgcccgggtggcccttcttgggcggcggcggcggggtgcccttgacgacgagcctgatgcccatgagcttgtaggtgtagtagacgatgcgctcgggcagcggcaggttgatgtacacgcgcatgagcgccagcgcgaagccgaacggcatccagaggaaggtgacgagcgcgacgagcggcgtcgggcgctgcacgaggcggccgtcgtgcacgatcagcgggctcagcagctggttcctgggcaccgggctgtacttccttgacgtcaccaggtaggcctccttgcagatggacatgaagtcgaagtcggtctccctatcccccatgccgacgtcgggcagcgcgtcgccgagctccttgacgacggccttcttcttgtggtcgccgacgagcacgcctggcctggccatgaagcccgtggccttgccgtccctgccgacctccagctcggtcccgacgaccttgtcggcgccgaggaaggccctggcgaagggctcgaccatgaccctggggctggccgtgacgacgtagcgcctgccgaaggagctgaacaccctccagctctccgggtgcacgtcgcccgcgtagaacctggggagcacggagcgcgccaccatctcgatgctgcgcaccttgagccccgccacggagatgtacaccagcgtgctgatggccagcgactcggagaagaaggcgtaggtgacgtagacgaacggcacggacaggagcagcagcgcggcgcggaggacgctgccggcctcgagagccacgaggaggtagtaggggaacgcgctcctggagatgagcagcgtgccgtccaggtcggcggccaccgtctgctccgaccgcccctccgagcagcactcctcgatgggcttgaattctgggagacgccaccatcttgctggtagtacgtgctcggtgtctcggccccagacccagaggagagacgtcgtactgctgcgtgcgagttgcttggcagtggagtggggcggcgaggtggagttaatatacgcgcgcgaggttggtcatgacattgcattgcatttgcaggccagggccacgacgcgcgaggtgacggtgtataattgcagtagtgcagcaagtcatcctctcctcgcagtcgcagctaacttgagtggccattacttctagagagcgatgtctatgcggtgctccagtgaccacgggagagcaccgttcgagtagcgcctagctagcagcgatacctgtcgcttgtttagccccaagctgagctgatgaggtcgctgtacgccgcgccaggtaaggtgaatgaaagccgttgcgttatctcgtctgttcccggcccggccgg

SEQ ID NO: 1741 - DNA, 925 bp, Zea mays
  Clone ID: MRT4577_101592C.1
cacttcaacaatgttgaggtcaataaacgactcctggaggatatgattgagccttcatttagtgataagttgcctgtacctaagaaattcaagggacaccggaacgaggaaaccgtgaagggggttgacttccttggccccaactgtgattttgttacctctgggtcagactgtggcagcatatttatttggagaaagaaggatgcagaactgatcagagcgatgcgtggagataagcgggttgtaaactgtgtcgaacagcacccttctgggattgttctagcaagtagtggcattgagaatgatatcaagatttgggaacctggtgaaggtgaaaaccgctccatcgttcaagctgacgaggacgatgacaatactgtttggatccacggcagcagtgattctgatgacttctttgacgacaatggtttcggtttgatggtcatggaaccgatccatttatatgaaaacagcgataatgattcatatgaggaggatacatcgtcagaggaacatgacagtgatggtgacagcagtgccggagatgaagattccgatagtggaaacagtgccggagatgagggcgacgattgatgatcaaggacacggatccatgcctagttcccagggagcaaatcttcatccgagaacagctgattctttcgtggttgtggttgtagccttgtaggttattttgggaggagcaaggcttacccaaaaaaaaaaaaaaaaaaacgtttttagttaggattatcatgggttactgtttggtgttcctctgtgtatatatttttcgtcggaattggggtagtctaccgtaccgatgcaaacgtactgtggaagctaatgttcgaacgggagactgaaatggtcatgatgttgaatggcatcaagtattcaaccatttcatacaatagtttggtgg

SEQ ID NO: 1742 - DNA, 338 bp, Zea mays
  Clone ID: MRT4577_101593C.1
agcggcggcacgagggacggcggttcttgccagcgctcgatcgcgcctgttcataacgccggcgcctggtgtagcggcgacctccgcttcaaccaatcgccgccccgtgaattatccctgcatataaagacttgtatctgtactggggtgtcttttacatctacacgcccgtgacttacaaactgcccgccgctggaattttcatggacaaaaatctgagctgacattgtctactctatcaaacatgaacccactcactagaacaaagtgccgccagatgtccttttggtgctcgactcccagatgtgtatttctctactcgacggaaaattgcacga

SEQ ID NO: 1743 - DNA, 604 bp, Zea mays
  Clone ID: MRT4577_101594C.1
gatatttgccggtcaggacactcattaccatgggggttgcaccccaccgggagcatcactgcccgacagagtcggcgccgaggtgcctcgtgccgctgcccgtggcataccggcgtccggtgccgtggccacgcagccgtgacatgatttggtataataatgttcctcatccaaaggtacactggtggcaaaccattgttggactgggtcaggaagtctggtaactattttgttttccctggaggtgggactcaattcaaaaatggcgtggcttcatacattaaattcattgaacagattttaccaaacattcaatggggaatccatacaagaactgtccttgatgttggatgtggtgtggccagctttggtggatatttgcttgataggaatgtcattaccatgtctgttgcacccaaagatgagcatgaagctcagatacagtttgcactggagcgtgggattccagcatttttggcagtgattggaacacaaaagcttcctttccctgataattcatttgatgtcatccactgtgcaaggtgtagggtccactggtatgctgatggtggaaaaccattgttggagctcaatagagtactca

SEQ ID NO: 1744 - DNA, 371 bp, Zea mays
  Clone ID: MRT4577_101595C.1
ccggccgggatctttccttcttttaccaccctatgaataatataaggtaacaatggggaacctctgaattttccaatctcttgatatccgtttgatgtgaattttccccatacccggcgcctctttgtttcgttctgggtttgtttggtctgcgcatttctgttcaacagtcacatccttttctgcccatcatgtcggcggtgcagatgggtcccgtggactcttcagtccaggttcctatgccaatattgggcttcgtcaaagctgaactcgccgtcaactgtttcattgtgcttttggtcctcgctgttgtcggattgcgagctgttgggcgactggccggacctgatcttggatggtatgacggcctt

SEQ ID NO: 1745 - DNA, 641 bp, Zea mays
  unsure (1)..(641): unsure at all n locations
  Clone ID: MRT4577_101596C.1
aagcagtggtaacaacgcagagtactttnttttttttttttttttttttttttattngtttttttttttttttttttttttttttttttttttttntttttttttttttttttttaaaannnataaagggcaggaatttaaatttttttgttttttacacgcaaaaccaaacattttaaaattttttccttaacagggaagtttaaaatttaaccgccacagttgcaaccaggggtttaaaagaagttttgctttttgggacagcaattttttttttttttgggatcaagagggaaccacggggaagtttaaacggggtcgggggggggaccaccgttttgggggcggccttaggggggggcgttggaaactttaacttggggtttaacgccgggaaggtgggcctttccgagggcagggagcatttccatggtttttttttggacggggatttttttgacttcaaggggggatttttccggcacaaagtccttggggggtttgggttttttttcttgaagtttgggggaaatgccggggattgggccgcgctggatgcggcgcataaggtgggtattggagccagccaccttgttgggcccgggttttttgggttggtaccactggttaagggcgaattt

SEQ ID NO: 1746 - DNA, 252 bp, Zea mays
  Clone ID: MRT4577_101597C.1
gcactcttaactcaggggacacgatcgtcatggccgccacatctaccgtcgtcggcgtgctgagccaacaggacggtggcagagtaaatattctcaacttacaactacgtgaggacctgatttttcggacacctaatatgttgatactgctactctttcagtaaggcatatctatgtttgggcattagctcgtgatgacacatttttaaagtgtgacatttatgttatttcctttcatattttttattcaat

SEQ ID NO: 1747 - DNA, 269 bp, Zea mays
  Clone ID: MRT4577_101598C.1
gtcttctctacagactctgtttaatacgcttgtcatctccatctgcacggaggcactatttacggtgaggaccccgctgtacacatacatcctgcacttctctgggccgtcaccgctcattttgtgctcggttgaactctacttattcacctgcttatttgaattcaccattgccaagatctgttactcctttctgaccactggttctttgtattcattagctgcacattcagcaagtccaggctggggtcccatagacgtacatggtt

SEQ ID NO: 1748 - DNA, 397 bp, Zea mays
  Clone ID: MRT4577_101599C.1
gcagcaccaataaacaccattccattaccttaatattaatcttagaataagagccaggcggcgtgtaacataactacatcgactccgcagaaacatgctgtaagatgcctgaatttgctagcaaccgaggatgtatcacagtcactaacatcgtgacacagtagcaatctcgcgatgcaaaacacacatgggcaccggcacccactactcgaacgaaactaaacccaatggaccagggtgaacatcaccgcagcgtacaagatttctggcaacgatgcgggccccaccgttcagtttctacaattccccgctgaattaacgaaagggccgacaattttttcatcgccgtagccttggtcaccatcaccccagtcggggccttcttctaaccctcttg

SEQ ID NO: 1749 - DNA, 546 bp, Zea mays
  Clone ID: MRT4577_10159C.1
ggccgcttttttttttttttttttggtaagggttttgtccatttctatctaggttttgtcctacaatcaacatttcctctgataccacttctgtaacacccgaatttaagggataaagtcgggtgcgtctcatatatgcgccaaagaagaacaacacatataataacagaatgtatagagataaatgtcacaatatcataaaagtaattattacatagcggaagtcttatgaaaataaaagataaatgtaaagtgaactaatggccatgcttggcgccataaagtcaactgggagacgccacctagaccaagtcgaactcctcgttgtgcggctcctcctaggccacctgttcttctccttcaatgagctcatactcatcaacttctacctgctgaacaccgggatcttcagccactggctcttcgtcgaggaaggcagaggagagcatggttgcggagtcggttgtctcggcggcaatggtggcactcttcacaccctcgaaggtgtcacaggggcggtctgggtgaaggaggggtcccggccga

SEQ ID NO: 1750 - DNA, 2015 bp, Zea mays
  unsure (1)..(2015): unsure at all n locations
  Clone ID: MRT4577_1015C.1
cggaaaaaaattcgccgccgcttccggtgctgttccaagaaggcatcgacacaaagccccctcttgatacgcagtcgcccggcctcctccaccagtaccagcaccagccgagccccgccacaaccttcctcatgtccatcccctccttccccagctacaatcagcactcgccactcatccatccaccgcccaaacgtcatcaatccataggaggcgacctctatctcgcccgaactcggcttctgccgccgccgccgacggggcaaggtcatgcctttccaccactaaatggtcctgctccattccagctccagccttcgccgccactgccccacggggcgatgaagaggacggctgcggaggcggcgcagcagcagttgctggacgagctggcggcggcggcaaaggccgccgaagctggcaattccattggcgcgcgagagatattggcgcggctcaatcaccagcttcccttgctcgggaagccgttcctccgctccgcctcctacctcaaggaggccctcctcctcgcgctcgccgaaggccaccacggcggctgccacctcacatcgcccctcgacgttgccctcaagctcgcggcgtacaagactttctctgaccactcgcccgtgctccagttcaccaacttcaccgcgacacaggcacttatcgacgaaattgcccgcagcacatcgtcctgcatccatgtcatcgattttgatcttggtgttggaggccagtgggcttctttcttgcaggagctcgcacaccgccgtggcgcaggcggtgcggctctgccgtccgtgaagctcactgcctttgtatcagctgcttcccaccatccactggagctgcgtctcacgcgtgacaacattgcacagtttgctgcagaccttgggattccctttgagttcagtgctatcagcgctgatacgatcaaccctgcagagctcgtttctgccaccgctgatgaagttgtagctgttgtcctcccggttggttgctctgctcgtgcaccaccgctgccagcgatccttcggttggtgaaacagctggctcctaagattgtgatagccatagaccatggcgctgatcgtgctgaccttcccttctcgcagcacttcttgaattgcttccagtcctgcatgttcctccttgattcgcttgatgctgctggcattgatgctgattctacctgcaagattgagaagttcctgattcagccaagaattgaggatgcggtgcttgggcggggcaaggtggacaagccaattgcatggagaagtgcatttgcagctgctgggttcgcacctgttccacccagcaatttggcggaggcacaggccgactgcctcctgaagcgggtgcaggtccgcggtttccacgtggagaaatgcggggtcgggctcacactatactggcagtgtggcgagcttgtcactgtatcagcatggcggtgctgatcagcgatccacgcctgtgcgcaccatgttccaccaacatttgctggcatcttcaaccccagtaatgtgtattttgtcttgcaattaaatgctgctaaggaaactgatatattgctgttgaaccctccatgttcatcatctttgcaacttacgagctagaactagtggatttttagcaatgttggtgccaatgtctctagtgtaatgatgttggtctaagattttaccctgcttgctctcgggtcactagacattctaatgtgacttgaaacactgcttgtgaggagagggtataattaacctatcaaatgtctgtggtacagtactaatacgtgtttcatgttcttttatatcagttcttcttcttatggtatttcattgtgcagtttcatccctgctggccctccggccacttgtcttgctaccgtgtctgctgcctgcgcctgtgtggtggggccatactgcccccctccatcgtcgctcctccagtataatccgtttttcatgttcttttntntccctttttctttggatcttttaaaaaaacccaaa

SEQ ID NO: 1751 - DNA, 858 bp, Zea mays
  Clone ID: MRT4577_101600C.1
tacctcgatgccggccggtacttcgcgttggagttcctgaaccggagcccgctgccctggcgccggaggtacgtcaagcactacgtcatggcgtccacgggcgccggcgggttcctgctccccctgcggaacctcgtgtccgtgccccgcgacgcgctggaggcccccgacgcgctcgtggcgctgccgtcgccggcggtgttcggtcccggcacgccgccgctggtcgtcacgcgcgccaggaactacacggcgcgggacatcccggagttcctggcggcgatcggagtgcccccgctcggggtcatgctgtacgagacgcgggcgctccccctgcagctcggcttccgggcgccggtggtgcccacgacctgcatcaacggcgtcggtcagcccacgatggagcagctcgtgtactggggcggcaacttcagcgagacgccgcaggtggtgtacggcgacggcgatggattcttacccgtggcgagcatagtggccctcgacaccgtcatcggtggtgacccgaggcaggagtactacaagtctatcaagcttgccggcacgtctcacgctggcgttgtctcagatgctgcggctttgaagcgtgtcgtcgatgagattctttggagccctccaatatgagcaagtctgtcagagaccaactctatcgcctgttttttttttcttttggcagccaatcgatttggaagtattgcctatgtccgaaaacacaataccactaaatcaaattccctaaaagaaaaaaaaaaaaaaaaaagcggcctggatagagtaaccgagtaagagctaataccctgttgtataacctatgcatatctagaaagatggaactcgact

SEQ ID NO: 1752 - DNA, 380 bp, Zea mays
  Clone ID: MRT4577_101601C.1
ctcacgcgtccgactacccgttcggtttaatcgctggagtgcataacaatgtgttggaattcgtaatcaaagaaatatgcatgactggtaacatcgctatgagacatgaaatgatgggtgcaacagcccatttctggcgatatcgtgctgcttattacccagacctgattgaagcgttgacgatacatgcaccgacatttgtatataggacaaattacgtcatttctagtcaaacatacaatgcttctactgatgcctatgctgtggaatcatacgatagctatttactgaaccatgtactctatgctcattgcagtgttctggatgaagatgatgcgactgaacatcgatcggatactctttccattcttgtgaatgac

SEQ ID NO: 1753 - DNA, 315 bp, Zea mays
  Clone ID: MRT4577_101602C.1
tcgcccacgcgttcgccctcgcttccgtgtctgcccggtcacatctggaacatgacatggaagaaaaatgagagcattgtctttataaccatgatattgtgtggtcacacactcatccatggatacattcttgttctccttgttttcccttactggttgactttttaatgtgcttactattgtcgtaagttataccgcactatactcatggttttcaatatctaatactctatccgttccttgcgttcttgagcctctgagatattgtgatcacgtatgatccatcattctaatctcatagactaagggtcggtt

SEQ ID NO: 1754 - DNA, 479 bp, Zea mays
  unsure (1)..(479): unsure at all n locations
  Clone ID: MRT4577_101603C.1
ngnttncgtnnntnnntganantgatttctttttttttttttttttttttttttttttttttaaaaacggttaagggggcaatggttaaggttttacaaattattacccccttggtccccttaaaacttagattgttcccagttagataatatcccggttggggccccccccccttaggtgggcccccttatttcccccatttaaacttccaaatttccaaattaccccatacaatgggcttacaccatagggccccataaaaagatgggcaaaccgttcccaaaaccaattttgtaacaggttcattacaggttcccctttgggtaaaaccttgagacccaaaagatccttttgaggtgttcatgaaacccaaaaggttcttgggatcttggaaatggctacttgaccttgacttggtcactacatgtcaacagccaaaagataaacgccccctaaatccttgaaaagaaaatgtcaa

SEQ ID NO: 1755 - DNA, 339 bp, Zea mays
  Clone ID: MRT4577_101604C.1
gggccgacccactcgtgcgcccgcgcttactgaccttgcatttatgcattttaaaacggaatcatgggctacgagaacgaggtatctattttacagggactaaaccattgacagcaggtcaagcatcttctactccaaggccactattgccctcaacgaccacttcatcaaactcttctcgtgttacaacaactaatgagtctacagcaacctcgtcgactacctgatccgtcacatgttcaatacccactatgctactatagagatagatttctacctcactatcgagggtcgtcaccaatgtcctttgaactctgaccatctttgctgcttgtctat

SEQ ID NO: 1756 - DNA, 2310 bp, Zea mays
  Clone ID: MRT4577_101605C.1
atggcggcggcctcttctgcggcgccggcgaggcacagctgcgcaaagctctcggtcccagtggaggaccccaaagcagtgacggcgggcggtggcaccgtcttcgtcaaagccacgtggctgccgtcccgcttctccctcgccgtgaccgatggtgccggcgcctgggtcgccgacgcctctgaccacgaggtgcgcctccgcgccgagcagtgggatcagcccgtcgccgattacatcgcccttgccgagcgctacctcgctttccaacagcctggttccacgtattccttccatgacgccggcaaaggccaacgcaggagaacacaacgtatcttgcgggtgggaggggattttcataaaaagctcgcttggacatttgaaagacaaggtaccaagttggaatggcggtggaagctgcagccttcaccaaacacgcagcagactatatctgagatcctggattttcttatggatgcaaatatacgcttaagtgtatgtccctttgcttcacctcttcactttttcagcctacctgtgattctgaaacaggaagaggttgtgaggaaaacacaatcctttgacaagttgaaacaagaagctgagaagtgcttgcaacaaagtgaaagatttaacaatgagaaagctgagttcgaacaagccgccttttcaaagtttgtggccgtgttgaattcgaagaaggccaagctcagacaactcagagataaagttgtggagctcgaacccgctgtcaagcctccaaaggaggaggcaggtcaggagcaggaggaggaggaggagaactcaacggaccggacagagctcttcgagggagagaatgacaaagaagcaagcgccaaggatgaacactccggcgagacaggcagcggcaacgttcctagttctcctggggaatcggcagctacctccagaggaagaggacgagggagaggtcttctggtgagtgttctttttcttcctttcctgaatcctgatcgtttgagaagatggctttttggagggtttgtcattgaaaacagtgcgaagagtgagatgggtgaagctctgctaagagattcttcaggtttcttcttggggatggaatcattgccgtgtccatcttggtcagttgagttggagatgggtgcaaccctgaacaaggaattgagaactcgagattgttcgtggggctggaatgttgggcccatctgttccagcacatatctgcgccatattgggactgttattcttccgaactctgttaccgtctatgaactgtggcgctgccctcctctggtccgagctcgagcaggtgagctcgccccatggcctcggctcctagcctccaggctcggctacgaggacaccacgctcgccctcaccctccgcctcccgggctccgactccggccgttcctcctcgctcgccgcgccctccgctgcgccgtcacccaaggcgcgggtggtggggtggccgccggtgaggtcgtaccgcaagaacgcgctcgccgactccagcaaggccaaccgcgcagccaatttcgtgaaggtggtcgtctcccgccgctcctcggcctctgctcctcccgcgcccggttcccatcgccgctctcttccccagcgcgtcttcttccccagccgcgccgtgccgagctgcttcttgcgcacgcgccgtgccgagctcgcccccgacctctgctcttccctggcgcgtcgcgttcttccctgcacttgcccatggcggccgagctcccagcctgcgcgccctccggttctctgtgtcgcgcgctgctccagctcccacggcgcgcagcctccctctcggctcaccggatctcccagcgccgcgcccagcttctttctccctcagctcccgcggttctctctccatctccctccgttctctgttgcgtgcccagcagaactcccctgcgcgcccggattctctccttccctactcgaatttggtcaggcccgtgcagctccctggcgccctgcttcctctgttctctccctggacgcgcacagcgttccgtcgaactcctgcgccgtgccctgctcaggttccatggccgcaccaaattccctgcgcgcgctggcctacaactcgactgcacacctccctacttgtcatggccaccgtgccctgctccctgatttctgctcgccgcgcgcgctcatctctctgttcgcctctgcgcacaactctccgagctccatggccggttccctgctcgccggggatgctcctgctccagctcaacctcgccttgtgcgctctgttttcttggtctcacgcgcggcaaggtag

SEQ ID NO: 1757 - DNA, 1334 bp, Zea mays
  Clone ID: MRT4577_101606C.1
aaaaaaaccggtcgcgtcatcggacggtccacagtcctcgcgtgcgcccagcagccgtctccaacggccgatccatgcccgtctggcgtcttcctcagtcgcatcccctcgttgaggtcgacagcgacggccatggcggcggcctcttctgcggcgccggcgaggcacagctgcgcaaagctctcggtcccagtggaggaccccaaagcagtgacggcgggcggtggcaccgtcttcgtcaaagccacgtggctgccgtcccgcttctccctcgccgtgaccgatggtgccggcgcctgggtcgccgacgcctctgaccacgaggtgcgcctccgcgccgagcagtgggatcagcccgtcgccgattacatcgccctcgccgagcgctacctcgccttccaacagcctggttccacgtattccttccatgacgccggcaaaggccaacgcaggctcgcttggacatttgaaagacaaggtaccaagttggaatggcggtggaagctgcagccttcaccaaacacgcagcagactatatctgagatcctggattttcttatggatgcaaatatacgcttaagtgaagaggttgtgaggaaaacacaatcctttgacaagttgaaacaagaagctgagaagtgcttgcaacaaagtgagagatttaacaatgagaaagctgagttcgaacaagccgccttttcaaagtttgtggccgtgttgaattcgaagaaggccaagctcagagcacgaggttgaattcgaagaaggccaagctcagacaactcagagataaagttgtggagctcgaacccgctgtcaagcctccaaaggaggaggcaggtcaggagcaggatgaggaggaggagaactcaacggaccggacagagctcttcgagggagagaatgacaaagaagcaagcgccaaggatgaacactccggcgagacaggcagcggcaacgttcctagttctcctggggaatcggcagctacctccagaggaagaggacgagggagaggtcgtaagaaggcaagaagataggctgcctagactgacaatagcaggtcctactcggaaattcgctaatcgtcgtggtgcgtctttagccggctagtctcatttccaagagcacgtgtctttcatgtacctttgtgttcgcgtgctgttggcaggcagagtattgcctgtgaaactgattgtccgtctgcttcgtctcatcagtggaaaatattttccatttcatcacatgtgtcagtcatgtgacatgcttttcacctgcacgtggaaaaaaacgaatgaaaaagggggaggaatgtttgacccaaaaaaaaaaaa

SEQ ID NO: 1758 - DNA, 605 bp, Zea mays
  unsure (1)..(605): unsure at all n locations
  Clone ID: MRT4577_101607C.1
cagagagcttatggatctgagcccgaaaaaganatttactgagacctttctttcagcagatcttcatggggcccttctaatagtggcagaatgcaaagctgcttcatataaaggtgtaaacggcatcatgattcgggatactgcagagacgtttggaattatatccgaggacaaccgcttcagagttgtaccaaaagctggttcagtgttcgtacttcaagcagatcgctggaagttcacactgattggcgacaagctctcgcccagggagaagttgaaggaggatcaacgtcaacaacatgcgcaatcgctaatcagatagtttccaatatgccagctattctctcacaaattttttgctccacggaatacttgcttttgtttaggccctgccactgaagcatggtagttttatcgctctagaggcgttgacatttcttagcgacttactggcagctcgagttgtggaggggtgtgtgatcatgagccctgtactccggtgactgattattgattagtataggcgaagcaagtccatttacgattgtttcatctagtcacacaaacctgtggcaaatatttattacgccttgtttctgccgccc

SEQ ID NO: 1759 - DNA, 453 bp, Zea mays
  Clone ID: MRT4577_101608C.1
ctcgcttggacatttgaaagacaaggtaccaagttggaatggcggtggaagctgcagccttcaccaaacacgcagcagactatatctgagatcctggattttcttatggatgcaaatatacgcttaagtgtatgtccctttgcttcacctcttcactttttcagcctacctgtgattctgaaacaggtttgccaatcgctaagctctgcttatgttgatgaccaagggatgaattggttcttgaggcgcagatgaatataaacttgatttccctgaattattcctaccaaagctactgaaccacttcagcacgtttcttacttggccctaaatttacggaattctctatattttcctcactttaggaagaggttgtgaggaaaacacaatcctttgacaagttgaaacaagaagctgagaagtgcttgcaacaaagtgagagatttaacaatg

SEQ ID NO: 1760 - DNA, 1237 bp, Zea mays
  Clone ID: MRT4577_101609C.1
ctccacttgaacttttttgtcgtttaatacaaaggcaggagagctacagatcattgcattaatgagaagtatttagtgtacaacccacacaagcacacaaccaaacatatattgaactggttctattgagaatgctatagtgataggttgatagtataacgtgatggattttaaacccactatgtctaatgtagcaaatagttaagggcacggatttccagactttatacaatacaataaaatgagctttcttgtataagctacgtcgagaccactcaaagactctagttttcttgaactgaaatttattgaccatatgaattatgaactaaactaaaaacactaaatcatttgttaccatataagcattatattttatgaaatatcaacgaatttgaagatttgaacaaacaagaaagacaataattaacctgagtgtgaagcaagcgcattcagagtagtggaccaactcgagcttttggaaaactttaatgtaaaccctattattgtgcctgttcctgtaatatgtacccttgagctaattacatgtcctgtcttcaccacaggaaaaataaatttactgagaaccttctttcagcagatcttcatggggcccttctaatagtggcagaacacaaagctgcttcatataaaagtgtaaacggaatcatgattcgagatactgcagagacgtttggaattatatccgaggacaaccgcttccgggttgtatcaaaagctggttcagttttcgtacttcaagcagaccgctggaagttcacactgattggcgacaagctctcgcccagggagaagttgaaggaggatcagcgtcaacaacgtgcgcaatctgctaatcagatagtttccaatgtgccaacaaaagctctcaaaatttttgctccacggaatacttgcttttgtttagaattatatccgaggacaaccgcttccgggtttatcaaaagctggttcagttttcgtacttcaagcagaccgctggaagttcacactgagtcctgccactgtagcatggtagttttaggctggctcccgcaatagtctctaaagcctcctctatcttaaatatagaggatcaaacggtcctatatgctcttcaacagcgtactctaaattatcctctaaatttagaggacgctactggattctctatatatagagtttctctaaacggtcctctatccatttgaatactttaaaaaaaaaaaaaaaaaaa

SEQ ID NO: 1761 - DNA, 583 bp, Zea mays
  Clone ID: MRT4577_10160C.1
cagaatgatgaccaaacgaggaagccgtaaaaagaagcggaaacgccaggactgatgctagaaaacaaatacgggggggggaccctaacggaatcaaagaggtgggcgactaggagctaccctattctgccttgcgctccgcgaccccagatgcacgctctgggaggttctaccacaagttcctccatggcagaccgttggacgaggatgggtcttgttattatggagaggatgccaactgtggcaatacccttttactatcccttgaggcgcttgtaaaagattgcctactagtgccagatgaacttactgatcctgaggataccgagtatgttgaatttaacactgtcgcatatctggaagaaccacttattgcaccggtagcatgagacactcctactaagccatgtagtgtgtataacacactatgactgcttcaaaaaaaatccaaatatatcattgttggctacgaagatgcagctctctttgatggtattgacataaacgtctacgctttctcttgccacgagaggtctgaacctctgaaaaatcaccaaattggaccctggggagatatatatga

SEQ ID NO: 1762 - DNA, 568 bp, Zea mays
  Clone ID: MRT4577_101610C.1
accatctccgcctcccgccgcagtctccctccacctctgctatattcaatccaccaaccttctccatggagatcaccatgtagaaaaccggctccgtgcggaagtacaatgccaaggacctcccacaagtcgacttcggacgcatcaagctcgagctcgccaaggtggagatgccgagactcatgaccagcaacgccgagatatgaaccatcgagcccttcaagagcgcccggagctccgcatccctccacacgaccatccaaagcgccgcgccaatgaagacgctcagcggcctcggcaccgaagcacgatgagttcccgcaacatgatgctccacccaggacgacaccgcctgccgaatcgagcactactcagtcgccgtctgattgtggaagggtgatactctagaggagcactggtggtgcacagagcgctgcctccactgatgagcagacgagtgaccacaccccacttgctaccactgctggagcgacgcagaggacctgctgcagcgacaagatggagggcacgactcctaaagactcgaagaagcgccatgacgaaagtg

SEQ ID NO: 1763 - DNA, 962 bp, Zea mays
  Clone ID: MRT4577_101611C.1
cggacgcgtgggcacagaggttgttcacaatgttatatatgacataattcagaaaggtggagatgctgggaaaattacaaagggtgccaaaaagttgaaactggaaaaagggatccttttggataattatgttcagaggggttctagattagtggattcccaagcaagatctttgttgattcattcaaagcgatcaaaaaggcacatgtctctaaaacaacataagaaatgtggttcatttgatttagatggtacattccacaagtacgacctctataagccaatgcatgagatgtggaaggactatatcagagagcttatggatctgagcccgaaaaagaaatttactgagaaccttctttcagcagatcttcatggggcccttctaatagtggcagaatgcaaagctgcttcatataaaggtgtaaacggcatcatgattcgggatactgcagagacgtttggaattatatccgaggacaaccgcttccgagttgtaccaaaagctggttcagtgttcgtacttcaagcagatcgctggaagttcacactgattggcgacaagctctcgcccagggagaagttgaaggaggatcagcgtcaacaacgtgcacaatcgctaatcagatagtttccaatgtgccagctgttctctcaaaatttttgctccacgaaatacttgcttttgtttagctgttttaccctttttagtttgcctctaacattgaaggtagataatgggtgtctgtttttgcaactattgattttattttacacagcaagatgtaactgcaacggccacgccgtcattgtttaactgtcattcatgctctccatgataaatatatagagttaataggaatgggaatgaggttgacctactaaaaaaaaaaaaaaaaaaaaaaaaaaactccagattaggtaaaaccaaaaaaaaaaaaaaaaaaaagggggggggggac

SEQ ID NO: 1764 - DNA, 599 bp, Zea mays
  Clone ID: MRT4577_101612C.1
ccgtccgctccacggcgttctcgcctacgctgtgcctgctagctacctattggtcaagagagcattgtctgacgctatcgtccttagagtcgcagtaaatgaaagcttgaccgacagactgcacgtggatctcacagcggctttctacgtattgaacgctgttggtggaggaacgggctctggccttggttcccttctcctaaagcgcctgactgttgactacggtaagaagtccatgcttgggttcactgtgtaccctaccccccaagtttatacttgggcagttgagccatacaacaaagtactgttcatccactccctcctctggcacactgatgtggctatactgttggacaatgaggccatctacgacatttgccgtcgatcccttgacattgagcgcccaacctacaccaacctcaacaagcttgagtccgaggatatcttataccttactgccttcctgaagttcgatggagctctgaacgtggatgattaccagttccaaaccaaactggtaccctacccgaagatccactttatgcattctttgaacgctgcaatcatctctggtgaaaaggcctaccaccagcagatct

SEQ ID NO: 1765 - DNA, 134 bp, Zea mays
  Clone ID: MRT4577_101613C.1
ttttgattcccaaatacttacacgctgctgcgtcctcattcaagaggaggcggaccctccaacctctggactcgtaccctacttgcttcaatcactacatcaactaccatcctgccagcgtcctcccacttcct

SEQ ID NO: 1766 - DNA, 404 bp, Zea mays
  Clone ID: MRT4577_101614C.1
cacgaccaaccaattacggggtttgggtcactgtttggcttgaagctgattcagctgttcagtgagctggctctcggagtggagcttctccttctgtgccgcatccaacacctttcctgctgctgcttgctccttcaactgtgcaatctgccggagcttcttcgtcaaagctttgatccgcttctccacatccgcacctccagttggctcggtttcagctgcttcagtggctccagtttcagcttcagaactctcaagagcaggctcgcctccattttccgtctttttcttgttttgcctcttctttttgttcttgtttgcggtcttcgagacaaagacggcaccagcaggcaagtctttctttggagctgctttggcactgtatttcacggggccagtcgact

SEQ ID NO: 1767 - DNA, 401 bp, Zea mays
  Clone ID: MRT4577_101615C.1
attagtacttcactgatcagggcataaaatgtattttatgacatgcaagagtagctctatgaaattcttgagtgctggcaataatgattctatctaatgtgcagcccgatatttgctgagattgtacctgagaggtcaaggacaagcatctatgcattggaccgttcttttgagtcagttctagcttcattcgctccaccagttgttgggtttctagccgagcatgtctatgggtacaatcccgtcccctacggagcatgtcactgtacctaaatggcctatcatttctcatcttttttaaattaattagctcgcattacataatgtgtgaatgtctttttatggttaaactatagtcttgattcagattcacttctatttggttcaactattggaaatgc

SEQ ID NO: 1768 - DNA, 291 bp, Zea mays
  Clone ID: MRT4577_101616C.1
aaaaaaaggagggggctctttgtttccctaaaaaattattacttgcccgggggaagggaaaaactttccagggggggcaaaatttaatccggctcccgggaaggcttttaaggttttttatttttaaaaatggcctccccaaccctaatttaaatagctgcagcagttgaaactgtttaccccgcccttgaacattttttttatccccccacgggggggaaaaggtaactttgggtcaaggcccgaaaaaataaaaagggtggggacccccattaggagggggcccacggg

SEQ ID NO: 1769 - DNA, 415 bp, Zea mays
  Clone ID: MRT4577_101617C.1
acggttctagatcgcgagcggccgacctttattattttatttataaataaaatcccatatacatatggcacagttctttcagctctttgatgcgcgcatgcttgctaccagacatctttcctaaaaaaaatttcaataatacccatttcaaattattgtagctgataccattcatcacctgtgactggcagcataaatgctaccaccctcatgactcgtaccgcgcacgcaacaatcaaaaacacaaactatctatgctacatcgtgaagacaactcttgaccaccttctcttatataaagacagaaaggcttgcagcttatactatgaagtcagatgcacggaaaaacctgactgctcaggcaatccattcacggagtacataactgacatgaactacgagcctatcaatccct

SEQ ID NO: 1770 - DNA, 134 bp, Zea mays
  Clone ID: MRT4577_101618C.1
aattcggcacgaggcgactccaagcccagaacctacgccagggacgaggacacatgaggagagagtcctgatggagaatgactagtgggctactgcaagcaactcctcctcacggacggcagtgacggccagga

SEQ ID NO: 1771 - DNA, 315 bp, Zea mays
  Clone ID: MRT4577_101619C.1
ttcgcggacacagtctggaccaccacctgccggccgttcccagctcgccggtgccgttgcgccctcgagctcacaccttcgccagcccaggtccattgtgcggagatacccatgttcccgtcgaggatgctcgtccggtcgccgtggctgacgaatttaccctttccggctccccgatgcctgggcacaggaacaagaaagccaccaggtcgaagacgctccagccatcccattctttaggctccgtaccaagtgaaggttctgcgtatggggtgtgagagaagactactctttcactccgatagatattgccgc

SEQ ID NO: 1772 - DNA, 660 bp, Zea mays
  Clone ID: MRT4577_10161C.1
gtcgtgatggttgtgccgcacgtagtcgccgcgataggtggccggcgtgaacgcttcgtgcaggtagagactctcgacgcgctcgcgcgagaattcgagcgcgaagtaggcgaacgtcgagaagcccgtcaggtgcagcaggctcgagacgatccggttgcgctcggccgtgctctgcgcgagcgcgagcgtatcggcgacgccgagcttcggggcgtgcgcctgcacgacgtcgccgcgcttcgcgtcgtcgcaccagacgacctgcacggcacgctcgcgcagcgcgtccgcgcatgtgttcaacccgcgcggcggacgggaaaagattggggcgaccgcttcttcatgcaatgcaatatcggacatgagccatccctcggaatcgacgcgcatcgcctggcggcggccgtatcgtgtacggcattcgcggcggtgcgatcgagcatcgttatgatatgcgccgatcgtcatccctgacgaaacgcgggggcattgtacaaaaatgcctgtgtacgcgtaatatgccgtaatactaattgcggcgaaagaatcatattcgcgtgcatataacgatggccagaaaatcataaagaaaagaccagatcgtgacggggcgcagtttcacatattgggaaagggcgggctcctcatgacata

SEQ ID NO: 1773 - DNA, 930 bp, Zea mays
  Clone ID: MRT4577_101620C.1
aactgctcagcgtcaccaatcctccgacgcatcctccagcgcgccgcccaccccgactgcggccgttggggccgtcgtcatcgccgacaactggggcgggtgcttcgatgacggcaagcagtactacgcagcgccatctgtcatcgccgacaactggggcggactcttcgagggctgtgatgctgacggcgatatctcttcgaacctgctcgactccgaccccgacgaggcgttcgtcacctctcactcggacaaggcgctgctcgacaaccaccacgccggtgagctcatcgccaccggcatcgaatatggctcatacagctccgtccattgtagcggcggcgctgcgctgtctcacctcgcgcacagcaacaccaacttcgccatgcccaccacctgttcgacttgggggctcaccgagcatgctatggccgaggccgtgcaccgtcgcgcgctatggatgccccgacgcgagccacttccgcgcctacttcgtgcgttcctaacgctcgagcggctcaacctctccgcctgcgcctcgctcgctgcgtccgtcgccgatggaccagcagccgcgacaacctggtggtggtgcgcttcggcttcggcgacgggcgacatggagagcacgctcaaggggattcgcggcagcgacacgccgttcgtgatggacctagacggcgcaaccaccgtggcgggcggcatcgaggacacttacggcgaggaccgcgccaccgaggagcagctcgccacgcccttggacacgctcatgtgcgcccgcctcgaccctgtcaagtcccacatcgggtgcctgctgctgcagcacctcaagctttcgcctaccttgattggcgccaaggtggcattcaaggaaatgcagcaaagcaccatcctctgggacgcgcacaccgctatctgcaccaagcccga

SEQ ID NO: 1774 - DNA, 206 bp, Zea mays
  Clone ID: MRT4577_101621C.1
aaaatagtttactagtaagttaattattagcgctatgtaactgtaacataagtaggggcaagttatcggggttctaatatttagaaactttcattcgtgggcagcacttaactatttaagtttgccctcctttattataaattgaacgaggggccatgggcgctacatgtttatattactggacatctcgcctggcatatattatc

SEQ ID NO: 1775 - DNA, 1085 bp, Zea mays
  unsure (1)..(1085): unsure at all n locations
  Clone ID: MRT4577_101622C.1
ccggccggggccctgttctcgttcggccttgacaacccggaaatcctccagccctctagtccccaacgacgcaggaagcaggatcgagccgaatcctccggaactcgccgccggggccaaccgacctcacactattgatcgaggatgtcgtacgcctacctcttcaagtacatcatcatcggcgacacaggcgtggggaagtcatgcctgctgctgcagttcacggataagcgcttccagcccgtgcacgatctcaccatcggcgttgaatttggcgcccgcatgatcaccatcgacaacaagcccatcaaactccagatttgggacacggctggccaagaatcattcagatctattactaggtcatactacagaggagctgctggagcccttttggtttatgatatcactaggagggagaccttcaatcatctcgcaagttggctagaagatgccaggcaacatgcaaatgctaacatgacagtgatgctgattggaaacaaatgtgacctttctcataggcgtgctgtcagctatgaggaaggcgaacagtttgccaaggagcatggtctggtttttatggaggcatctgctaaaactgcacaaaacgtcgaggaggcattcattaagaccgctggtacaatatacaagaaaatccaagatggcatatttgatgtatcaaatgagtccaacgggatcaaagttggctatgctgttcccactcatctggagtggtgctggctcgtcctcacgtttcatccatgaacaaccccgcttcagttttagtttgttattcaaacttgtgcgatctttctgtaaagccaatcattcacgattgctaacgtatgtgctttctgtaaccaaattgaaatcagttctatggtnnaaaaaaaaaaaaaaaaaaaaaaaaaaaaaaaaaaaaaaaaaaaaaaaaaaaaaaaaaggaagaacgataataggggatcaaagattaacgaacgcgtgcatgacaacgaaatagctacttatataggggnacctaaaanaaaaaaaaaagggncaaaagagggaaaannnnnnnnnnnnnnnnnnnnnnnnnnnnnnnn

SEQ ID NO: 1776 - DNA, 1268 bp, Zea mays
  Clone ID: MRT4577_101623C.1
gcaaggggcaattatccaccgcccagccagcgaggaatcctgatttggagcactggacgggacgcgttgccattagctgtcgcgtcagttacgttttgcttgccctgttctcgttcggccttgacaacccggaaatcctccagccctctagtccccaacgacgcaggaagcaggatcgagccgaatcctccggaactcgccgccggggccaaccgacctcacactattgatcgaggatgtcgtacgcctacctcttcaagtacatcatcatcggcgacacaggcgtggggaagtcatgcctgctgctgcagttcacggataagcgcttccagcccgtgcacgatctcaccatcggcgttgaatttggcgcccgcatgatcaccatcgacaacaagcccatcaaactccagatttgggacacggctggccaagaatcattcagatctattactaggtcatactacagaggagctgctggagcccttttggtttatgatatcactaggagggagaccttcaatcatctcgcaagttggctagaagatgccaggcaacatgcaaatgctaacatgacagtgatgctgattggaaacaaatgtgacctttctcataggcgtgctgtcagctatgaggaaggcgaacagtttgccaaggagcatggtctggtttttatggaggcatctgctaaaactgcacaaaacgtcgaggaggcattcattaagaccgctggtacaatatacaagaaaatccaagatggcatatttgatgtatcaaatgagtccaacgggatcaaagttggctatgctgttcccaactcatctggaggtggtgctggctcgtcctcacaggctggtggctgctgcagttgagcggtggcagcaagtcatacaattgcaagggttctctctgcagtatcttgatgtttgcctatagctggccccggatgatttgttctttcagccatcacgtttcaatccatgaacaaaccatcttcagtgttagttgtcattcaaacttgtgcgatctttctgtaaagccaatcattcacgattgctaacgtatgtgctttctgtaaccaaattgaaatcagttctatggtattcatttgttcaaaatgtatatatatgcttctctgcaaccctatcgctacgatgaaatctggtggtgcttatagcaacaacctgaggcatagatcttgctggacaaactcccctaattgtattactggattctgattcacgattactgtccaatgggttgtcttctat

SEQ ID NO: 1777 - DNA, 279 bp, Zea mays
  Clone ID: MRT4577_101624C.1
cgaccgtacgcgtccggcggtccggttccgtttccttggataagcacgacgtccgtccgccagccggcaagcgaaagctaagcgagccaagacatccatggagaacgcaatcgatagggagcgggtcttcctggcgcagctcctcgcagcgggctcctccgcctcctcgtagcctcagcttgcggcgtcggcgtccacggccggggatatcgctgcataccagacgtcctcatccttcagggaggatgtcgtcttcgtcgctgcgtacatgacgccgat

SEQ ID NO: 1778 - DNA, 686 bp, Zea mays
  Clone ID: MRT4577_101625C.1
aattcggcacgaggcgcgtctgagagaggagagaggagagaggagagaggagagagagaccacctcctccgcttccgctctcttctctctctgactcttgactcgcccgctcctgttcgccgctccgccatcgccggcgaccactccggcgacgctgcgtctccggcgaccccaccgacgcctgtcccagctaccccattcctccgatccccgcctcacgccctgcgctctcccggctagggttcgtgctcctgcccggatccaccccgcctcctcgcgcccccgttcgcgtgcgccgatcggcaggcggcgtaggcgccgccgccgctacgcgagcgagtgggcgtcggatccatcgatccgcgcggcctccgcggccgccatggacgacttcgagggcctgctggcccgcgacttcggcctccgtccgcaggggaaggccgcgcccatgtcggccgcccgctcctcggggccctccggatctgcctgggccaataccagatccgccgccgccccctcctacgacgagctcttcgggtccgccccgccgctgcccaaggccacgccgtcgccgtcgccgtcgctcgaccacatcttcgactcgttcaaggagcccgcttccaccgtgccgccgcctaagccgaagcactcgtccatgcccggtgttcgacaagccggtctacgac

SEQ ID NO: 1779 - DNA, 403 bp, Zea mays
  Clone ID: MRT4577_101626C.1
aaaactattagtttggtatggtgactttttgaaccacctccaaggggggggggggatcagtcagtaaaaccaaaaggggggtccctatttagcataggatctaattgtaccgaagaaacatactcgactgggatccatgccccaggataccggaagattcttgacgcaccagtccaatgtgacccaagtttcccctgcctttggagccattttaggagtctgtaacggtaacccttggaggtcaaatagagatggagaacccctcgcttaaaagtgcacttgaaccccttttgtgggggagttttcccccctccttggtcaaaaatcgggaagaaattttcttttttaggggggtccacgtggaaatttatggagcagggttttacgggggttccattttttt

SEQ ID NO: 1780 - DNA, 272 bp, Zea mays
  unsure (1)..(272): unsure at all n locations
  Clone ID: MRT4577_101627C.1
attctctttccctttccgcagcagcgattttacatcagaantaaccttctntgttcgtagatatgcgcggttactgattagttgatgatagctgtcgacaaatttcacatggaaagagaacgaacacggaaacgccctcgtcttgcatgggacgttgcccctccctcagtgtccgaggtgcaacgggctctgccagtgcccggtgacgtttattcgaaagaagcacgntcgcctccgataagggacgacgatcgagagggccatatgtcttc

SEQ ID NO: 1781 - DNA, 359 bp, Zea mays
  Clone ID: MRT4577_101628C.1
agcggccgcccgcgcaggactctcatctacagtcgaggaagctcccataccaaccaacatgaatgtatatgtaactgtgctagatcattatgcaacaacatctaccatggcacccacctagctggtgcctacccccaaacgctgcttgcattcaaccaactggcagcatggaacgctgctgcttatttacaacagcaacggctaccaccattcacccagctagctgatgtgagccctattgccttgttgacacagcaacagttgttgccgttctacctgtacgctgctcctaacgctggcaccctcttgcagctgcaacaattgctgcccttcgcccaacttgctttgactgacccaac

SEQ ID NO: 1782 - DNA, 411 bp, Zea mays
  Clone ID: MRT4577_101629C.1
aggcccctaatccggggctttattacacgggcgggtaactctgggggggggcatcatagggtcaggaggacaagagcccaggaggttttcattgagcgccccagggctaggcgggggggggggctactcaaagttggagggcttggcaacggccctggggaactcccaggggcaatttatgcccttggggaaaaaaaaaagggttcccgggccgaattccaaaaaatcctccccgggggcttggggggacaactttaaccttccctggagaagggaaaaactttccttgggggggaagggccaaaggaaattggtttttttaaacccccaattgggccaatgggggacccccagcttggaaaaaaggactcggggggggtgcgccccaccttgaggcccaactttttcggg

SEQ ID NO: 1783 - DNA, 453 bp, Zea mays
  Clone ID: MRT4577_10162C.1
cggacgcgtggggaaaaggcagagaaggtttttgaggatatgtttgtgaaatggaaaaacctctcttccaaatactacaccgctttgctaaaggtgtatgctaatcagaacctcttagacaagggtgaggaactagcaaagcggatggatgaggagggtgccaagtttgggaccccaactttgaatgcacttgtgaagctatatgctgacgctggagaggtggagaaagctgagtccctattgcacaagctatctctgaagaacaacgtcaagcccagttacagctcatacatgacactgcttgatagctactcgaagaaaggagacgtccacaactcggagaaagtgttcaacaagttgagacagataggctacactgggaggatcaggatgtaccagtttctgctccattcttatctacatgctaaggcccctgcgtatggattcaaagag

SEQ ID NO: 1784 - DNA, 501 bp, Zea mays
  Clone ID: MRT4577_101630C.1
atacgcaccaaccagcgacaacgactcaactttatacaaaacatcacgagttccgcatgagagaaaaacatacgcctatatgaaacagactgtatcaactcaccactaccatcagaccaagatgatgatcaacaactcacacatgcacatggtatttgatattaacgaggaagggcataacaggcttcatgttgcaaactatactatgctcacccgttgccgctgtccaaacttcagaaactgtacctgttcatgcttgcaggaaagccactatgagccaactttgggacctacatcattgatgggactgttgccaaaggggagactcaaatggtactgtgtatatacacaacaccagggacatttgagaacatgatcccaatcttgtatgataccgtttcaacatgcacaagctaaggagctatctcatgtcagacccttgcatttgaacactgctgacagtctactacacacttttcataacagtctgatagaacactg

SEQ ID NO: 1785 - DNA, 332 bp, Zea mays
  unsure (1)..(332): unsure at all n locations
  Clone ID: MRT4577_101631C.1
gagcacacgctnnaacnccaaacaacaaagtgagccatgacncgncataggccngggnaggacgcacacacaacacaaccggnccattattaaaccaacactgacacgaacagcagatacttcgacaacctccatattgagagggcggggggggacgcaggcacatcggcagcttaaacgacccatgacttactgaccaccacggagacggagcacaagggggagggtgctctccttttggatgctgtagcctgctagggtgcggccatcctccacctgtttgccggcgaaaatcacaccctgctggccccgggggaagccctccttggact

SEQ ID NO: 1786 - DNA, 540 bp, Zea mays
  unsure (1)..(540): unsure at all n locations
  Clone ID: MRT4577_101632C.1
ccggccgggttnttacatctacatcgtccggttcggatcgtctccgccagccaggtgctggatccgtagcggcggcggcggccatggacaagagcatgctcggcgacctggatggcctccccgaggaggacaagatgcggatggccgccatgatcgaccagctccagatccgcgacaggttcgtgccataccaacgcatctcgtgggcggagcagggccgctccttcatggtgtggaagcccgtggagctggcgcgcgacctcctcccgctccacttcaagcactacaacttctcctttgtccggccactcaccacctacgtgagcacatccaaaacaccctctaccatctatacaacatctattctgttggtgactgagattgttgctgcaaaatcaaggtttaagtttgggtcgatttgtgtggcttttgtttatgtccaatcgaaactgatggaaaaaaaaactctcgcatccggcggcgttacagttgccttgtgacgatggaaaaacaatgctacatgtaaaaatgactaaaccc

SEQ ID NO: 1787 - DNA, 485 bp, Zea mays
  unsure (1)..(485): unsure at all n locations
  Clone ID: MRT4577_101633C.1
aattcatttttttcaaancacccaatttttttgtggggggtggaattttattttctanagaaattagttaaaactggtaccaaaattttttttttttacacctttccaagatctcatattttcgaagcgaaatctattcccttcttcttcatctcctggtacgttgtcttcggcggcttcttcctgtttactttggtgatgggctgtttcttatcgttctacctgcctttttgttacagtctgattacctttccgttcttcacctattagttgcctaattttttttttctctttgtttttttttttttttttttctttttcttttttctccttcttttatgttcttattcactttcacgttcaattccattcattgttttcctgaaatttactaagtttaaactatttttattcatttaatttttccttttttcttcgtatttttttctttctcattgtctttttttttttaattctttttttat

SEQ ID NO: 1788 - DNA, 780 bp, Zea mays
  Clone ID: MRT4577_101634C.1
gtctccatcttgttcatcggtgagcatagctccacgtacgggaaggcccgcagcatcagcaccgcgcgagctctccgctcagctcaggaggctctacgcgtccgcgctcgctccatcggccggtaccgctccttcacctactgcataccaagcaccagtctgtctatgtctatctacggttccacgccgccgccgccgatgagcacgccggggagcagggccagggccatcggcctcaccatcacgctgctttccgtcagcggcggcatccacttcagcagcacctgcggcttcggcttgctcctcagcttcacggggatcctcgccggcgccaaccttgtcgcctttggcgtcagcaaggccgacgacaacccggcgcccaccttccatacggcgttcgacagtgcacgtgctctcgcggcgttcatgcgccgcagcaccgccaccgcggggctcgtcatggcttcctgtgccgtcacggctgtctccagcggcgaggctgacccggtgctcttcttcgccatgttcgctctgctcctgctgggggtctcactggtcatcgccggagctcgtggtgagtaatcgggttttcagctcttaatccggtgcgtcggcgatcttggatcctcgattaagtgtcctctgtctacagcaataaaatttggtttggcaaaatacagtccgttgtgtgtgacctgatgaacatcgtgtttcgaagtacatgtttgttagctagctcctatgatctctccaatcaaacggtactcgagtagactactc

SEQ ID NO: 1789 - DNA, 1251 bp, Zea mays
  Clone ID: MRT4577_101635C.1
tccacgcgtccgggagggagtacacaacacacgatttgattttgcaccatcctcgacgctaaagtacccaggtctggtagctgggtcgcacctcttgtcctcttcccaatccatcaatcgtcctctcgcgagccagagctatggagaagagccgggtgctggtggtgggcggcaccgggtacatcgggcggcggctcgtgcgggcgagtctggcgcaagggcacccgacgctggtcctgctgcggccggagatcggcctggacatcgacaagctccagatgttgctctctttcaaggcccagggcgcgcggctggtggaggcgtcgctggaggaccacgcaggcctcgtcgccgccgtggcgcaggccgacgtggtggtctcagccatgtccggggcacacatccgcagccacaatctctccctgcagcataagctcgtcgaggctatcaaggaggctgggaacatcaagcgttttataccatcggaattcggcatggatccatccaagatggggcatgctcttgaaccaggaagggttacatttgatgaaaagatggacctaaggcgtgcaatagaagatgccaacattcctcacacctatgtttctgccaattgctttgctgcttacttttgcccaaacctatgtcagatgcgcacccttttgccgcccaaagaaaaagttcatgtatatggagacggcaatgtcaaagctatattctgtgatgaagacgatgttgcaacgtatacaatgaagtctgttgatgatcctcgcgcattgaacaagacactatacataagaccaccagaaaacgtcttgactcaaaacgatgttatctcgaagtgggaaaagctttccggaaacgttctggagaaaatccacattcctgcagatgaattcttggcttcaatgaaaggtactgacctggccaatcaagccggagtgggacactattaccacattttctatgaaggctgcttgacaaattttgaaatcggcgacgatggagcagacgctactctgttgtacccagaggttcagtatacccgcatggatgagtacatgaagagatatctgtaaccgctaaattgaactgttggcttgtccgaacgaattcatatatggcggtggttgtatgtgatgaccctttcagattattgatgctatgttgtgtattacctagtctcggtatttcatatttttaatattatttcgcagctcctttgtttgattcatctaaaaaaaagcggcc

SEQ ID NO: 1790 - DNA, 196 bp, Zea mays
  Clone ID: MRT4577_101636C.1
aaagaccctaagacagtctcttatgaagacctgaagtgttttgtcaagttggacaacctatccaagatcaaggaaaagaataacatcggtgctaagaactgatctggagtctcagaacaaaacatgacatgttctattgtactttttttattcatatagcaccagacaacattaacatttttatggattttttggc

SEQ ID NO: 1791 - DNA, 407 bp, Zea mays
  Clone ID: MRT4577_101637C.1
aatagaaaaaaaaaaaatctctttctcccaccagaggggggccaaacaaatatcctgcaccattctttgcaacttggggtaaacccgcctggccccctaaaggtgaacacttgcttattaggaggggctgagcagggggcactattggcaagcccacagccttacaggcgaaaaatttttaaaacgttgggcgggttcggttgttcaaagtaatgaccaaccaaaagccccgaatttgcgaagttataaaaaaaccaaaggaaccccttgttccccccagaagcccgtgtaaataagaaagcggtcccgcttttttctaaatggaaaccggatcctcccccaaggaaagaacattccccaccctggtgttccttcttaatagggggaggaaacccctccaggttttt

SEQ ID NO: 1792 - DNA, 545 bp, Zea mays
  unsure (1)..(545): unsure at all n locations
  Clone ID: MRT4577_101638C.1
ctcccgtgcgggcggcggngctgatgagggcccgggcgtggcgggccccacctcgcgggtgctcatcctcgcccgccgcgccgaccgacgcagatgcctcccttttctcgtgccccgcgccttgcgagcggcccccccgaccttttctccggggtggccgctacctccctgcctccgggcgggggcgccggtgatgagctattcaagggcgtttacaagtgtgcatggggagaggccttcatcagaatatgcgaagagcaggaggggggcactgggaacccagtgtgggggagtattgggtgcaaggtcacgcgggcgttttgcggacgcggggtttgggccattgcttgctctatacaggggtgcgactatctcctttcatgtggtgaaactcactatttggggtttgtggcgcaatgagatgcataaaagagcataaaagtgtcgagagagcctgagacgcttgggtcctttttatatcaaggttgggcaagcattgagcacacgcgctgatatacttcctagtgcgtgctgtgaggagcttg

SEQ ID NO: 1793 - DNA, 274 bp, Zea mays
  Clone ID: MRT4577_101639C.1
tggaaagccagtacctagtcctacgagcagtcgaacgcaagtgtcaagagacgaatcggtcgacatggctcgcacgctatctatcgtatcggtcgccgtggtggccgaggtgctgctgctggcatccgcggcgacgacctcggaagccgccatcacatgctggcaggtgagcttcggcatcgcgccctgcctatcctacgcccgctgcacggggtccgcccaatcctcgtcctgctgtaacgtcgtcaggaacctgaagagcgccttcagcacc

SEQ ID NO: 1794 - DNA, 297 bp, Zea mays
  Clone ID: MRT4577_10163C.1
gccgaccggccggctctcctccatcgcaacatttcaagggggccgggcgaaagcaccaaaaatcccagcgcagatcactcgaccgccgcctgctccatttggaccctcccaaccgacagcgtaaggctctctgcaacagagccggggttccggttcgacccgacggacgaggagctggtcgtccactacctcaagaagaaggccgccatcatcgcctttacaagttcgatccgtgggagctaccttgtaaataccctgtgatttataatcatgcgaaaaatagtgagattgttgttg

SEQ ID NO: 1795 - DNA, 267 bp, Zea mays
  Clone ID: MRT4577_101640C.1
aataaaacgagccctaggcgaggaggcctctcaaataaaaaaggaaggggggcaaaggggcggggggggagaaataatacgggcccccatgaatcggtccgacgaagggcggggttgccttgaccccaaaaatttcaaaggccagggccttggtttgacggggcaaatggggcaaaaaaaaaaactggggctcgtttcagcatgaacaaaagggaacccccctggggcatgaaaccgggtggggcggggaaacattgggcggccccg

SEQ ID NO: 1796 - DNA, 260 bp, Zea mays
  Clone ID: MRT4577_101641C.1
ggttagtcagaacgcccaacgctgcttttcttaatgagaagataatcaaaaggcgttacagtggggggttgactgtctctacgtattcgcatagcgagatgaccttatgcgtaactgctggattcaaccaacaacgtatggagaaggctttccgcgggaggggaaggggaaccccccgaatgtggatgcttctcttatggaacatccccggctcctggtttgctcatgaaaaagaaaaacatatgccactgaggatttta

SEQ ID NO: 1797 - DNA, 1623 bp, Zea mays
  Clone ID: MRT4577_101642C.1
gtaccctcgggctcgccgggactggagtgttcgaggcttcccctccccactagcgacagtagcacctcagcccaggtccccgtcgcctccgctcaactgccgccgcagggcccgctgcaggcttccatgtgtggtagggcccggtgtaccctcagcccggccgaggttgccagggccttcggcttccccaccacctccgccaacgcgggcggcggtggagacggccccgctgtgccgacgctccatcttaaccggttccggccgtcgtacaatgtgttgcctggggcgtacctgcctgtgggcgccatgcgggcactaccaggttgcgcccacggaggaggaggttcggatggggaggggccggtgatccagtgcatgaagtgggggctggtgcccagcttcaccggcaaggccgagaaacccgactatttcaggatgttcaatgccagatcagagtccgtaaaagaaaaggtttcattccgtcgactaattcaaaaaaataggtgccttgttgcagtagaagggttttatgagtggaaaaagaatggatcaaaaaaacagccatactacatacatttccaagatcataggcctcttgtctttgcagccttgtatgatgcatggacaaattcagaaggagagatcacccatacattcactattttgactacacatgcctcaacttctctaaattggcttcatgatagaatgcctgttatcttaggcagtaaggactatgttgatgcttggttaaatgatgtttctgtaaaacttgaagaaattactgcaccttacgaaggagctgatctggtttggtatccagtgacatccgcattgggtaaagcatcatttgatggacctgagtgcatcaaagaggtacatatcggagctactgataagcctatttcaaaattcttcaccaagaaatcgactgcctacgatctatcagggaagtatgagaatatgtcacgggagcttgctcatgcttacaaagcagcgaaagtggaatgcgatggatcagtagaaaatcaaggaggggacggcaaccaacaccagtcccgagagaagcaaactactaattgtactataaaggatgaacctgtcaccttggaaccacaagttttcgagacaccgtggagcatcgagcatgaagatactatgactctggctggtgccactttggaaacacaacgtgatttgggattcaagagaaagatcgaggacactcaagtcgaagctagcatgaagccctctcagcttaccaggaaggaaaaagctgtaaaagcagcttcggatgggcaggcatcgttgctttcatatttcgcaaggaagcagggtcgctcgatgaagtagtttgcggtagccgtgccatgtattcctgtgtaactcaaactttaccagtacctgtcctccgtgttcgggacaaactatttcggttttaattttgttttggctaccactaaaatgaaccagctagatttctgcggtcattaattttctgcggcccaacttagccgaggccaatgaaaaaagaactttatttccggtagtctggtccaatcactgaattaagaaccttgtttttggtggttatgttaagccgctgaacataagggtgacgat

SEQ ID NO: 1798 - DNA, 164 bp, Zea mays
  Clone ID: MRT4577_101643C.1
acgatcgagtcgtctaattttttactatgagctagcagcgagcgggtgatacgggacgactgcatagggttggggtttactaacgtgaaagacaccatggacgactactactaccgccgccgctcgccggaccttctaccgacagcggtgctggcgctactcgc

SEQ ID NO: 1799 - DNA, 1149 bp, Zea mays
  Clone ID: MRT4577_101644C.1
ttggcattggcgacctcggccgcggccgcacataacaacgagcagcacagctcacgctcggctacgactacgatccgcgcgcatcgatggcgatgagtgacaccggctcgagcttcgcgcagtgggccgcgctctaccaccaccacgaccccgccggcggcccggtcctgcccgacgacgacgacgacgacgcggcggacgctggcaacggcatcggcatcggcagcggcaccgccaccgccgcgagcccgacgtcgggagggtccagcggcgggagccccaccaccaaggcagcgtgggggcagcagcatctgcttcacggggtggaggggccccgggtcgccgggaagccggcggcggcgcggcggcggtcccgcgcgtcgcggcgggcgcccgtgacgctgctcaacacggacgccgccaacttccgcgccatggtgcagcagttcacgggcgtccccgcgcccctcgccggcgcgttcagggtcggggacggggccccggtcatcagcttcgccgccgactacggcttcccgcccgcttcttcttcctcggccgtcaacgtgtccttcttcgaccaccagctccaccggagccaacaacaccctgcagcgccgccggtccacaggcagcagcagcagtacgccggcgcgtcgccgttcggcggctacagcagcggcctggtgcaaggcggcggcgcaagcgacgtcttccccgcgtcggcggaggacaggatgctcctgcagagcattctggccgcccagatgccgcacatgccgccggtgtccggcgctaacaccagctctcatggcttctttgcttgaataagtaagtagctgaccaaggtactacgacggcgtcatccatgccagtatgccacatgcatggaagctagagaacatgggggagatggagtgaggattagcagcctagcagtagcaaagaagaagaagaagaaggggtaatcacaagtttccctggttgcgtttgattagttttcttatccgcgcgcgcagcttcatttgtttctccgctagctgcagcgatgtaaatatctttatcttgtttttaaaagatgcagtagtctctgtacacgtactagctcatccgagatttgcataaaaaaaaaaagaaacaaataaaaacagg

SEQ ID NO: 1800 - DNA, 558 bp, Zea mays
  unsure (1)..(558): unsure at all n locations
  Clone ID: MRT4577_101645C.1
aagcccaaagtcgattcagtatcatcatagctctgtttttacataagttacaaatagaatctcacatgataatgattttaagatgaggagaaggtatcgatgatnggtggtgtggagtggatcactgaggtgagtagcccaattgttgagtggacctttacctgttgcagccgcttgaaccgcgaatcccaagaaggcgaccatcgcaagacgtgcatgcttgatctcagctaactgaagttgagcagtcttctccgggtcagccgctaaacctagcgggtcaaagaacttgcctccggggtataaacgcttctccgaatcaagctcggcgttgcgctggaactcgatgtagccgatcactaacacctcgatccatatncaatgtcgagatcgagaaaggtaatggctgccccaagtaggacgatccatctacaagctccaccttgccagcgtcttgccatgtaacgccgggtagccattcgacggagagagcgccgagagtagcgagcatcgcccaccgtccgtggatgagttcgcattccctgaatctctggattc

SEQ ID NO: 1801 - DNA, 323 bp, Zea mays
  Clone ID: MRT4577_101646C.1
ttgtacgcgtgcggagtctcatgcttgcccttctagggtcggcatgaggcggcttgcctcaactcgatctcatatgctgatacttgctcgatggggccaaaaaactgacatccacgttgcacccacacgaggcgtggtaccgagtcagcactagaccagcaacactagacactgcatgacacaggcggtactgcataacgagcactttgctgctccccaatctaggagatgcctgtgaacatctttggacctaggacgacaaccgtagttggctgaaccaatggagagctctgtgacggctatgcctcaagcggtggtcgctg

SEQ ID NO: 1802 - DNA, 280 bp, Zea mays
  Clone ID: MRT4577_101647C.1
gccagcaacccgctgtacaccgaggcgtctggccccgccggcatgtacagtgtcaacgtcaccgccagcaccacgaaccctgtggtgaacctttccactggcgtcgtcgacgtgcccatcagcagcacgctgtttgctcgcttccagttcgccgtgtacttcgtagacagggtgctgcggcccccgcagctattccacacggcttcttctgcgccggcaccaggacatgtatgaagaggcgcctgttcttgtataggcggtaccagagcacaaggtgggc

SEQ ID NO: 1803 - DNA, 767 bp, Zea mays
  unsure (1)..(767): unsure at all n locations
  Clone ID: MRT4577_101648C.1
cngatcgtctagactctagnacagcccggctgcgcatttcgatgcaaatacgtggaggatggagtaaaatactaagtaagtgagagagaggatagaggaaaattcggctcttttcttttcttgacccaaggtccaaggaggggatcaggggggagtgagcgagggggaggttttgccgccggcaatggagacgaatctccgggctcagagcccgctctgctcccggacccgccccgcactcgccgtgcgcccggacgctgccgccactggcctcacgctgtctgtcataaggcgcagccgatttacgagaggcgggctcgttcgatgcatggtgtcaagttcagattatcataagagtagtccgagaaggacgtcgacttctaagagcaagggtgtcccttccggagggtatgcttcaagacctactgctgaatccagcacgaagaagatagaacagagcagcgacgatgaaggtgattttagcagaaccaatgggtcactctatggtgaggcagcggagcaggcaagtactgcagaagagtcgtctcaggtgtactcgacaggagacatttcaagcagcgcagaaaggggcgaagctgggaccgaagaagaggctgaccaaaatcaatcttcagcgttgttttctgtatctgtggatgatgactcaatcgacaggaaacttgatgagtaccggtggtaaaataagtgcatgnncnaagttcgaaacctaaatcttcatcacttgcaaagtgttggctggacaaaac

SEQ ID NO: 1804 - DNA, 296 bp, Zea mays
  Clone ID: MRT4577_101649C.1
tcggcctgaggccacacacccacacggacgggaacccagatgagcctgtcgtttggatcggcgtccctgcctccgttctcgcgaggagaggaaggcctgcagaaaatggagccgatcaccagtgccacggcagtccatgagatgggcgtcgtcgccacgctcgccgccgctgctaacgccgtggtccccgccgcagcacctgtctaccactgacggaacatctgtactaccatcgagtcgcctacgtccacatgctggtggagcatgtcctcagctacctcagccaaccattggac

SEQ ID NO: 1805 - DNA, 617 bp, Zea mays
  Clone ID: MRT4577_10164C.1
tcgggagctctctcaagattaaccggcggcagaagagtagaaacaccaccaagagagatcccgcaatggctacttcatctccaccatagtgagtccccctctacccgccgccgaccatcctaagtgtaaagaggtgcacgtccaatcaaaaccaaactacgtactctcatggagatcgacacaataaacaccaaagactatggctgatggaattctcgcaagcgtatgtgcgtacatctaccacttcatcaacacgagctacgagaacctgtactcccgcttctgcgatgacgtcttcctcacggacgaaaactacgaggtcgcccatgtcacaatcacatgcaacctacaggctgagtccatgttcctgatggtcaaagaggtcatggacccaagcagcatctatggttttaataaagacaagatggacaggaaaagcacaagggtctatttctcatctttctctgaacatattatgactggagacgctcactcattatgactgagtgctcaactccgtggaagtcgcctgaaaatttgttgctgaaatgatgaactactgtcaatacggtatgacagcaacagatctttatgtgcccctgttggtagacgtgtct

SEQ ID NO: 1806 - DNA, 377 bp, Zea mays
  unsure (1)..(377): unsure at all n locations
  Clone ID: MRT4577_101650C.1
aatcttacaatagcagttaaccaatttaaacaatcctctggtactctaaacagggggcctctaaaaatagttgcgggaacctanccatcaacaaaaaaacaccaaacctcacccccttcgtagccacagtcgccacctccgtatacttccccgccacgcaccacccatacctcgtcgccgcctcctcggaccaacaacaagcattggcttctaatgtctccacaccatcagtcatcggcaccgccataccttctctctacttctagacctccgtcttcaagaaggaaaaggtgtccctggccggacgagaccaattattgtaaggggtgggagggatctcctcccgctgctaccataggccttcaacctaatcaaac

SEQ ID NO: 1807 - DNA, 417 bp, Zea mays
  Clone ID: MRT4577_101651C.1
ggagaaaccaatttttagtagcaaacaagtggagccttttggtacacggaaagaacgaaccaatccagcgagatctggggaccaagaacaagatccagcgagctgcagtcgagtgcgatcgtttcaacaactccgatgccgaatcagaacgcaagcttcatgccgccgcaccaatccaccctcctacggtacagacaaggccagtcaactcccggacacgccatcgccaccgtcccccatcagcgacgcgtcagcactcgacggcggcgcacgcggcccgccggaacccgggcggcaggtcgggcgcgcggttccacctgccgccgtcgatgtcgtacaccagcaccagccctttcacagcgccgcccgcggcagcgtggcccctcacggcggccacgttgaccaccgccgccaccc

SEQ ID NO: 1808 - DNA, 2009 bp, Zea mays
  Clone ID: MRT4577_101652C.1
ccccgcgtccgccccgcgtccgccccgcgtccggtcggcacttccacatgcatgtgtcatctgttcgtttctcaataaattctgcgtcatttgctgctgattgtacttgacaagtagagacatggatggactcttaaaattccatccatgtgttaaatgacatattcgagacatccttttctcaataaactctgcatcatttggtgaaaaaaaaaaaaaaaaaaaaaaaaaaaaaaaaaaaaaaaaaaaaaaaaaaaaaaaaaaaaaaaaaaaaaaaaaaaaaaaaaaaaaaaaaaaaaaaaaaaaaaaaaaaaaaaaaaaaaaaaaaaaaaacagaaaaaaaaaaaaaaaaaaaaaaaagggggcccccgtcaacttgcgtaaaataatttgcattctgtactttttttcatggtgaaacctcctatgtcaagcatcccgaaaacaacaatccaattccttttccatgcgaggggccggggcatcttcagactagtctagcaagctagctccgcacggaacctgcgctccgatccgccacctctcttatctgaaaacctccagagtccagcctcccttccgattccacctccaagctcccagtcccagccatggcgtctcatgatcatcaccactcccactcccacgacgaccaccaccaccattcccacggggacggcggtggccatgcggctgggggatcgtgggtaggggaggacggacgcgtgtggcactcccacgacggcctcgcgccccactcccacgagcccatctactcccccggcgacttcaccaagcgcgcgccgccgctcgcctcgcgcgacttcgctgaccgcgccttcaccgtcggcattggcggccccgtaggcaccgggaaaactgccctcatgctagcattgtgcagatttctacgcgacaagtatagtcttgcagctgtcacaaatgatatattcacaaaagaagatggagaattcttaattaaacatggagcgctccctgaagaacgtatacgtgcagtggaaactggaggctgccctcatgcggctattcgcgaagacatcagcataaatcttggtcctctggaggagctatcgaacttgtacaaagctgatttgctactctgtgaatctggaggagataacttggcagctaacttcagcagagaattagcagactacataatctacattatcgatgtctctggtggggacaagataccaagaaaaggtggccctgggataacccaggccgatctgttggtaataaacaagacagacctagcacctgctgttggagctgatctgtctgtaatggagcgagacgcacttcgcatgcgcgaaggagggccctttgtgtttgcacaggtgaaacatggagtgggcgtggaggggatcgtgaaccatattctgcaggcgtgggagatcgcgactggtaataagcggcgataagatctcacgacttggggccatatgttggatgcagatttgattcagtcggcacttccacatgcatgtgtcatctgttcgtttctcaataaattctgcgtcatttgctgctgattgtacttgacaagtagagacatggatggactcttaaaattccatccatgtgttaaatgacatattcgagacatccttttctcaataaactctgcatcatttggtgaattgcacttgagaagtaaagacatggagccttaaaattccatacttgagtttaatgggaaaaaaaaaaaaaaaaaaaaaaaagcaaaaaaaaaaaaaaaaaaaaaaaaaaaaaaaaaaaaaaaaaaaaaaaaaagaaaaaaaaaaaaagagggggggccggttttaaagaatcaaagtttaggtacccgtccttgcaactttttatttttttttttgtgtaacctaaattaatttaattggccggggttttaaaaggtggggattggaaaaaccctggggtttcccaatttaatggctttggagaaaattccctttttcccatttggggaaaaagcaaaaagg

SEQ ID NO: 1809 - DNA, 232 bp, Zea mays
  Clone ID: MRT4577_101653C.1
aaaggggaaaaatttaaaccaatatattgattatttttaggaaacacatgccggttttagggccccatgtttgaatacatttaatatggaatctaaaaaatggcccctccaacgatgggttgttgcctcaacaaaacaggatttataaaaaaaaaccggttgtatgggaaaaattgttgttgttgtaggaaaggaccaaccaatgggttagccattagccaatggattaaaa

SEQ ID NO: 1810 - DNA, 501 bp, Zea mays
  Clone ID: MRT4577_101654C.1
acaacataaacatgtaagtaaatcacagttgcataacattttggcgggcctggtaccacgatcatacacaagggcacgcttacacacacgtgtacgttcaatgggatgacggagccatgctcattcgagcataataggagtgcatgcatacgtacgcgggcacaacacggaggtcgctcgatatcactgtgacacgcacgcggagaacacggggagggaccacgatgcgggcggatcaatcatacgaagaagtggtgcttattttggccgacggactgctatggctgcttgcggtgctaaatctttttgcggtgctagtggaaggagaatacgacggagccgactgaagtggacagcctgagctgcttattgagcttgctgaagcacactagctgcgggtccttcattgcctggtgcttatcggagaaagctaaggcgccagctgcaataacgaatggctcaacgaggggctggaggcgcttgggctacttgtcctccttg

SEQ ID NO: 1811 - DNA, 199 bp, Zea mays
  Clone ID: MRT4577_101655C.1
aacaggcatggcacaaaccgaaggaatggttgaatgcttgaatgtgtgctccgagagatttattactagtcagacactagaatatcttagcaaaaccctgtctgtttgatacaaacaacaaacaacagttggtgtacggtaccttgaacaaagacccatactatttcaaattaaacttataccggtatccaaattccca

SEQ ID NO: 1812 - DNA, 787 bp, Zea mays
  unsure (1)..(787): unsure at all n locations
  Clone ID: MRT4577_101656C.1
tcagatgatgtaattatacgttccgcattcggatcgcaagtggtcagatgagtcttctngtcattccactgtccatattcatgcttcacactgtagggttttacttcaaaggccactatcctagaaacatccctttgtgcatccctgtgatatttcaccgtaaaggacaaatgattgtggatgaagtacttttcatccttactccctgagtattgtcctttggctccaacatggaacccatgttgatagaaataagcaccttcttgatccactctttgaataggaacaactagaggtaggttgtcaagaatcatgttcacgcggtactcatcttcaatcttttccttgagaacctttccttctttttccccaactgaaatcttgcagactatttgacacatctgaggtaccctcatttcaaacacatatggagagttctcaatgcgatccccacggagaacttcacccagattttcagcactgtcaacgatcgtatctggcttacagaatgggagagagtagaaggagtagggaagttgtgtcttaattgaagtcagtttattgactttcacagggagatggtctttcttttcgaagtcgttgggcgcgacgcccgggaggtagaatccggcggccgggaccacgaggaggcagagcgcggcgaggacgacggacagagccgccgccgtcgccggcagcgatatcgtcatggggaacggacgcggtgggcgagggtcgctcacggttcgctcgagcgctcgggccggtgagagtgcgagaggagaat

SEQ ID NO: 1813 - DNA, 211 bp, Zea mays
  Clone ID: MRT4577_101657C.1
ttaaagttcctgtctaaccccatcccaaccatatgctctctacaatgcgcatctatctcttggggtcaggttttaatttaattttctttttctaacactcctatacgtatttgtgagtactgattaattctctactgcatgataatacatttagacatatcatatttattaactgcatgaactatctttacatatcaacaaatatgttaaa

SEQ ID NO: 1814 - DNA, 273 bp, Zea mays
  Clone ID: MRT4577_101658C.1
cggacgcgtggcgcgacgcgtgggcggccagtacttcgtgcgcttccgcgtgggcacgccagcgcggccgatcctgctcgtgaccgacaccggcagcgacctgacctgggtgaagtgccgccgccgccgccacgacgcgccagcaccgggctacagcgccccagcgtcgaacggatcctcgtcctcctcctcgtcgctcgcgccggcggcatcctcccacgcgcgcgtgttccggccggacaggtcccggacgtgggcgctcatctcgtgctc

SEQ ID NO: 1815 - DNA, 174 bp, Zea mays
  Clone ID: MRT4577_101659C.1
cggacgcgtgggtgcaaaatctgactagcctgttgtcctgtggatgatgagtgcagctgtcctaatagctgttcacaagaacaatgtatttgctgataacctgtcttgttagtgtgagtactggttgtttccaatgtatagcttcatcctggttcgattgctctattctttttt

SEQ ID NO: 1816 - DNA, 730 bp, Zea mays
  unsure (1)..(730): unsure at all n locations
  Clone ID: MRT4577_10165C.1
tttgaggtccgcgggttttttttttttttttcgttttttgccaggaatcgtcaggcttctattcatgcatatagttttatcancagcatataattatcctcagtttacacaagaaatagcagacaagtgatgtcttgcagcagtcgcatagaagcaccattattataggtttcattacaggacaagtaatccatccaatgcactgaaatgccctacagttaaagagttcatgacatgcaccattgtttatgcatgaccaggcctcgcacacatggccaacaacaagcagcaatcgttgttgtcgtggtacaagtagcaagcagtagcaggcggccgtcagcaataagcagcaatgcatcatcaccattcaccggcacaagtgaaagattggacataagtgaaagatagcagatcttttggagagcctccatgtgtctttgaagcagtagctataggagattttttcttttgtgcacctttagataagagcatgttaaatctaggagacccccttgcaagcatgtttaatcttggagacccccttccaagcatggtaactaaaggagaggatatagggtcccaagacggtggaagttcgtcttctccaactcgaactggtgcagggataatcggtgagaagcagcctccgtaggagatcgacgccagcaggcgtgaggaatccggtctccgtgccacagttgccgtgcgcattcggcgtgcccttcgtgac

SEQ ID NO: 1817 - DNA, 112 bp, Zea mays
  Clone ID: MRT4577_101660C.1
cccacccgtccggggacccaggcttttaccaagaaaatgggcatggggccagaagcatcggcggcctgcgggcagaaaggatcagctgaaaggggacatgccatggacatca

SEQ ID NO: 1818 - DNA, 470 bp, Zea mays
  Clone ID: MRT4577_101661C.1
aaaaaaaaggagggcccggtgaaaagggggcgccgatgattttccccccacaattttcccagcaacgggaatcccagtcgggttgaagagggggggcttttttacccgcaagccagagcccccggggggggggaactaaattacaacatcggcccacttggtatctcctagtcttcaagccgggggccccggccgggtcgcttgtccggggaacaccccaaaaaagggggagctgtttcatggaagccgctccacatggggcacgcccttttgcccgggggctggtttcctgaagcaacagctttgggttaacaggcacattggtacggggtaaaaaccctcctccggttggttttccagcataagcagcagcttttggtgcctaggcaacagcagtttggttgggcgggttttaacttctcgacttgggccttgggccctttggtggaatccacagcaagggccaacat

SEQ ID NO: 1819 - DNA, 524 bp, Zea mays
  Clone ID: MRT4577_101662C.1
cccgggcaggaggcaatatcagaatatactggcaccgtcataaccagtttctcatgaccggtacttcataaaacaaattgtcaacagagtcatcgaagtgaaagatcagactatccaagactatcaaggagattacaatgtgagctgtcctacggtcttatactttcctcagctatggttttcagatctctgattccaatgggaatgaaatatgctgaactctttgcatataacagttcaacttaacatccattacatccatcaatagtgttctctgcttaacatggcataaatgatcggtattgtcgttctcagtgaaaccattagatggtcatgcaccaaattatatggcaggaacttttcagtgtaagggaacctacctaagaaatctatctagtgtcaaaaggttcccatgctgaacctgacatgaaccaaatgggcaacaaaaccataatggctccagccatccagtgagataaattagcatcggatcaatgcgcttatttaggccattggaagacgag

SEQ ID NO: 1820 - DNA, 309 bp, Zea mays
  Clone ID: MRT4577_101663C.1
ggcggacatgatcatcaatcactgacccagcgaacgaaagcaggggccactctcacacgatccaaaggatcacgtacacaataaactacccgcatggcatgtaagtgtcgtgtcctcgctagcctaccgatcgctcctggagaggaccttcaaacgtggccgccccccgctggccggtctgcgctacgcaggacagtgtctgcagatgggatgcacaggctgttgccagctgcctcttgatactacaccactgcatgagctagacaggagcccatcaccccctcagcccaagtgaactacacaaagctc

SEQ ID NO: 1821 - DNA, 3303 bp, Zea mays
  Clone ID: MRT4577_101664C.1
cggccgggacgtcctcagccgtagtcgatcggtgcacggtgctcgcgcccccgttgcagcgcgcagctctcccgcgctataaatgccccggctcggcctcgctcccacagccacagcctcacacagacaccaacgccactgcactgcaaaagcaagagcagctagtagctagtaaagatgctgagcgggatcatcgacgggctgacgggggcgaacaagcatgcgcggctcaagggcacggtggtgctcatgcgcaagaacgtgctggacctcaacgacttcggcgccaccgtcgttgacagcatcagcgagttcctcggcaagggggtcacctgccagctcatcagctccaccctcgtcgacgccaacaacggcaaccgcgggcgggtcggggcggaggcgaacctggagcagtggctgacgagcctgccgtcgctgacgaccggcgagtccaagttcggcgtcacgttcgactgggaggtggagaagctgggcgtgccgggggccgtcgtcgtcaagaacaaccacgccgccgagttcttcctcaagaccatcaccctcgacgacgtgcccggccgcggcgccgtcaccttcgtcgccaactcctgggtctaccccgcgggcaagtaccgctacaaccgcgtcttcttctccaacgatacgtacctgccaagccagatgccggcggcgctgaagccgtaccgcgacgacgagctccgcaacctccgcggcgacgaccagcagggcccctaccaggagcacgaccgcgtgtaccgctacgacgtctacaacgacctcggcgagcccgacggcggcaacccgcgccccatcctcggcggctccgccgaccacccgtacccgcgccgctgccgcacgggccgcaagcccaccaaaaccgaccccaactcggagagccgactgtcgctggtggagcagatctacgtgccgcgggacgagcgcttcggccacctcaagatgtccgacttcctgggctactccatcaaggccatcacgcagggcatcatcccggcggtgcgcacgtacgtggacaccaccccgggcgagttcgactccttccaggacatcatcaacctgtacgagggcgggatcaagctgcccaagatccaggcgctcgaggacatgcgcaagctcttcccgctccagctcgtcaaggacctcctccccgccggcggggactacctgctcaagctccccatcccacagatcatccaagaggacaagaacgcgtggaggaccgacgaggagttcgcgcgggaggtgctcgccggcgtcaacccgcatggtgatcacgcgcctcacggagttcccgcccaagagcacgctggaccccagcaagtacggcgaccacaccagcacgatcacggcggagcacatcgagaagaacctcgagggcctcacggtgcagcaggcgctggacggcaacaggctctacatcctggaccaccacgaccgcttcatgccgttcctcatcgacgtcaacaacctggagggcaacttcatctacgccaccaggacgctcttcttcctgcgcggcgacggcaggctcgcgcccctcgccatcgagctcagcgagccgtacatcgacggggacctcaccgtggccaagagcaaggtctacacgccggcgtccagcggccgtcgaggcctgggtgtggcagctcgccaaggcctatgtcgccgtcaacgactctggctggcaccaactcgtcagccactggctgaacacgcacgcggtgatggagccgttcgtgatcgcgacgaaccggcagctgagcgtgacgcacccggtgcacaagctcctgagctcgcacttccgcgacaccatgaccatcaacgcgctggcgcggcagacgctcatcaacggcggcggcatcttcgagatgaccgtcttcccgggcaagtacgcgctgggcatgtcctccgtggtgtacaagagctggaacttcaccgagcagggcctccccgccgacctcgtcaagaggggcgtggcggtggcggacccgtccagcccgtacaaggtgcggctgctgatcgaggactacccgtacgcgagcgacgggctggccatctggcacgccatcgagcagtgggtgggcgagtacctggccatctactaccccgacgacggcgcgctgcggggcgacgaggagctgcaggcgtggtggaaggaggtgcgcgaggtcgggcacggcgaccacaaggacgcgccctggtggcccaagatgcaggccgtgtcggagctcgccagcgcctgcaccaccatcatctggatcgcgtcggcgctccacgccgccgtcaacttcggccagtacccgtacgcggggtacctcccgaacaggcccacggtgagccggcgccggatgccggagcccggcagcaaggagtacgaggagctggagcgcgacccggagcgcggcttcatccacaccatcacgagccagatccagaccatcatcggcatctcgctcatcgagatcctctccaagcactcctccgacgaggtgtacctcggccagcgcgacacccccgagtggacctccgacgcccgggcgctggcggcgttcaagaggttcagcgacgcgctggtcaagatcgagggcaaggtggtgggcgagaaccgcgacccgcagctgaggaacaggaacggccccgccgagttcccctacatgctgctctatcccaacacctctgaccacagtggcgccgccgcagggctcactgccaagggcatccccaacagcatctccatctgagcgactggtaccactaccaccccaggagtgctacgtacgagctggtacatgaataagctaatataagcaatcgtgtaaacgggaagagagcggccggcacgagacggaccatgtattttgcgtaaacgtgtgggctggtgaatcgaattactaccacgtaataagtgaagtgcttgttgcaatcattggcctgccaaaaaaaaaaaaaaaaaaaaaagaataagctaatataagcaatcgtgtaaacgggaagagagcggccggcacgagacggaccatgtattttgcgtaaacgtgtgggctggtgaatcgaattactaccacgtaataagtgaagtgcttgttgcaatcattggcctgccaaaaaaaaaaaaaaaaaaaagaataggcttttataatcattcgtgtaaacgggaagagagaggccgccacgagacggaccatgttttttgcgtaaacgtgtgggctggggaatcgaattactaccacgtaataagagaagggcttgtggcaatcattggcctgccac

SEQ ID NO: 1822 - DNA, 486 bp, Zea mays
  unsure (1)..(486): unsure at all n locations
  Clone ID: MRT4577_101665C.1
ccgcggacgcgtgcggtaagtgggaacactatgcgatatgcacctaccatttatactgccatgcactggacactctgacacgcaagggagccgattgtgctacacgtattcagggaggggggtgactcaccttgcatgagtgagtgatcgaggagcgcacggtgcgactggacacagaactcgtgccgaacaggngaggcacgaactctcgagcggaatcgggccgcgcaccgcctacctatggcgaggaggcagacggttctacaagctaatcgaccctcgcctggagggcaacttatcggtgaaaggcgcgcaaaaggtggcgcatctagcacaccagtgcctgagccgacacccccacgcgcaccccctgatgagacaagcggaggaggagctgaatccgcagcacaacctgaaggacatggcgagcgcctactacttctttcagaccatgcatgccgagcggatggcgcactcgagcagcat

SEQ ID NO: 1823 - DNA, 164 bp, Zea mays
  Clone ID: MRT4577_101666C.1
taggtccttttttttttttttttttacaaaaattgagttttctgttgctctgtaaccagatacaggagcccgacatttacaagaggataaatggtgggctataatcgccaacgaaaacaaagatctattacagtgggcgtgtaattagaccaatggggtattat

SEQ ID NO: 1824 - DNA, 347 bp, Zea mays
  Clone ID: MRT4577_101667C.1
gcgttctcttccagccgtcaccaccggcagaggctgtcgtcatctttggtgcggccaagaacctccatccgcccaccaaatcacttggtatactttgttgcggggagatggatgtctcttacacaatcctcaacaccgaggcatggctaaaaaagcttgatgagtacataatcactcgcagctgcatcactggctaccaagctttcaaagatgactgggctgtctacacttcgttatcgtctgctccctcctccaaatatatcaacgtcgcaaggcggtttaatcacattgatgcgctcccgcggctaagcgctattactgcacacggccatggtgtgaaggttgaa

SEQ ID NO: 1825 - DNA, 368 bp, Zea mays
  Clone ID: MRT4577_101668C.1
taccggtcgaccacgcgtccgagcgcttcaacacctacctctctaccaacttcctgccaccgtttaactctacacctctcggccatctatcggaactaatcttagcctatctgctacctctgttaacatatctgacctcacaacacacctttagcccttacatgttattcactaccgataatgccactaacgcatcctctacaagaacctgacacgctacgattccccaatatcaaactccctaatcagtgaactcacggtaaaacacttaagactctactatcattactatgctcattatcattctacacatgtcatgtcatttcaataaaaatgtactaacttaacagctcaataatatcttctct

SEQ ID NO: 1826 - DNA, 112 bp, Zea mays
  Clone ID: MRT4577_101669C.1
ggaaacactctttgtagccatgatattggcttttgatgagttgttcattgtttttaagaatatacctgccatgtaagtgcttttgtttacatcttaatatgacggtttccat

SEQ ID NO: 1827 - DNA, 724 bp, Zea mays
  unsure (1)..(724): unsure at all n locations
  Clone ID: MRT4577_10166C.1
gctctcaccacaaacagcaaagagattactactatccccagttctagacgaagagagaggaagaccactgcagagttaggatgctaataacttgaaggagaagcacgaatgggggcgacgagtcgctctctcttgctttctcctcgccgagcttctggaaggagtgaccgctgccaccaccttcaaccaacggcgtggtggcgcttccaggcttgggaactcagggcgtgtcgcgtgtaacgatgcacgagctgccagtgagatgccacattcgtcttcatctacaactactaactcggcgtcatgtatgcatccaatgccacatccaaaagctacaccgaaagctatgacagattcagatgcaacttcgaagcatgatcttggccctcgctgaatgcacagccgtgatctacgctgaacacatatacccagcagagaccttggctatagcgctggcggggaagatgtcccacaccaaggcagagcctaacatcgtaacgaaaagactggcagacatctgacgctgagccagaacgcagaggctatccaggaggatatagccgtagcnaacgcagaggctaaacccgaaccgaaacccgagctacaagccagaggcacgacccgaaccacgagactaaggcagagcctatacccgaaccgacagcggagtccgagacagaggcccaaactaaggcagagcctaagcctgagccgataccagaac

SEQ ID NO: 1828 - DNA, 483 bp, Zea mays
  Clone ID: MRT4577_101670C.1
aaaaaagcaacaaaaaccctttttatttggaatggggggggatattaatggtctttcccttccggtccttgggttttcatattggagggggggcccaacaagggccaaacccattttggcttcatttattggttccgagaaatattatcaaactttaagaaaggcccgtacatattctggggaagcctaatacaagaacaccggcactttttcaaaaaaaaaaaaggcctatttcccattactgggaaagacgaggtacaacccaatatatgattggtataccctctatctatgaagactgacatcacacatgggagggatactaacaaatctaaggggggatttaactgataaaggtgacgctgaataacaaaacttgcgcctctccagtgggagtaacaacaccccgctaggtgatcgctcttccctcctgcggcaagcgctttaaccagtaataataccggcaagcacatcgctctttcc

SEQ ID NO: 1829 - DNA, 467 bp, Zea mays
  unsure (1)..(467): unsure at all n locations
  Clone ID: MRT4577_101671C.1
gggggtgggggtttttttttttttttttttttttttttttttttttttttttttttttttctccccgaagtttcgggggttttttcccaaaaaaaaaaaaggggccggtttcaaacaactactacggttaacccaaaatanttatcaagacctggggggaagggccctttttctccggctctcccaaggcccttgcctatttccccaagcccccaaccaaattgccctcgggcccacatagagctcagagctaattcatgtctgcccccgggaagtcgggatcgggagaccacggccacctcggcgggtttaggtgctggcccccttgaacctggcccacctggcgccgttgccgaagttgntgaggttaaaaaccccggtgccggcgatggtcccgttgaagagggcggggcggcccttggtgaggtcttgccccagccagttctgcccgggccccggggtccggg

SEQ ID NO: 1830 - DNA, 299 bp, Zea mays
  unsure (1)..(299): unsure at all n locations
  Clone ID: MRT4577_101672C.1
accaagcgaatttacgagcacaaccnaacgcaanggcnagcaagatatagcccnccnagcgccacacgccccnacagagagcgcaacaaangcgnncacnannccacagagcncacncgcncccagngccanaanaccacagaaccncccaccagaaacaacaaggggcgccgaacagccagccgagcaagccgacaggcgacaacaagcgcaagcggcgagcgacaaacaacaaccaanngcccaaaagcaacaacaagccacggcacaacnaaaccaacaaaccaacgcaacgcaac

SEQ ID NO: 1831 - DNA, 800 bp, Zea mays
  Clone ID: MRT4577_101673C.1
cgtcattccctccgatctccccgtcggtgccgcggaggctgaggcaggtggtgacccatcgggagaacaccatgctcacgaggtaatgtcgttgtctcaatctgaatcggagactgagggctcagaggactacgaggactcgtcatccactcaaagtgacggcacaacggcaacagcggaggagaatggaagtgccactcccaagcctattaggcgctcggcgtccatggattctccattgtttctcgtagctgttcctgaagctcaggatgatgtcatgcagtataattgcaagttgccaaatgctcgagagatgaaggtcttcagggtcaaggagaaggacgcagcaggcacttcttcgacctcttgtcagtcaggccggttcaagattggcaggtccatgtcaagcagtgggcaggggtttttcttctcacggaatggccgctccagtggtgctgtgctgccactgtgagttggtatgtttttaccgtcggttgcagcctcagcaaagccgggagctggtagtgtgtcggtgtctgttgatagaaggtgcagagagctgaggttgctctcagagaaaatctcctttgaggtgtgaattattgatgagaacaattgttgccgataaggattgcttgagtgatacggttatgttagcttcaaagtcccaagtttcctgtatgataactccaagcttggcttgagtgaatttgggggaagctgatgtttggcatctccatagtccatatatacctgttatgtacgagtaatcatgcaagaaggaatggactttcacctgt

SEQ ID NO: 1832 - DNA, 366 bp, Zea mays
  unsure (1)..(366): unsure at all n locations
  Clone ID: MRT4577_101674C.1
accggcccggaaataatccgccggggacgaccagcaattaaagggcggcgcgccgccctanaaaataanggggggggctttaaaaaaaagggggggtgaacacccccagagacaaagtcaatgaacgcacacctcaggggcgccgacaccatgggaggcaaaccagcccaactacacaaaagacgccccactagcccaccaaccaaagcagacaaaggaaactatgacgcaggcaaacaagacacaaagctcgctgctgccgaacgaactggcgcgccgccacgggacacatcaccgcttccagaataccagcaaccaagggggccaaaagagcgtccatggggcgcgaacagagctgccaactga

SEQ ID NO: 1833 - DNA, 143 bp, Zea mays
  Clone ID: MRT4577_101675C.1
cgacgcggtgacgatagagctgcccccgcaaggacaacggacatgagaggcggccgctgataggcgacggagacggacgaccaagagcggcgtcgatctaaaagcgttggcggcggtcatggccaccgcggaccggccccgga

SEQ ID NO: 1834 - DNA, 563 bp, Zea mays
  unsure (1)..(563): unsure at all n locations
  Clone ID: MRT4577_101676C.1
caagctggtcgtggtcgttgttcctgttgtccttctttcgctccttcccctgtggttttttttttttctttttcggcccctgcctgttttttgggtcttggccccacctgctcttggcgtgccccctctccgctttttttcctttttgcntngggcggcccggcttggggggttttgaacgncccctgnttctgcctggggcggtttggccgcggggccccccccccggttggngcgggggctgggccgcggggtccccggcccngcccccccccttgggccggcttccggcggtttggggcccccttgcgggccctttcggggccggcctttttgggggccccccgccggccccccccggggggggttccccggtcccctgccgttcccttcccccccccggggtttgggnnccactttcccccttccccccctcccccgcgctctgttctccttcccccctcgccccccctcccgggcgcgcggccngccccccgtgccgggggggcctcccgcccccccccccccccctttgccccgttgtgtccccccccccggcaaaa

SEQ ID NO: 1835 - DNA, 607 bp, Zea mays
  Clone ID: MRT4577_101677C.1
ggccgcttttttttttttttttttctttttttttttttttttttttttttttctttgttcaaaccggactagagctgaattgtttttaaaaaacattgtacaaatcgggtttgaatatagggtataaagctgtgaacttgatacgactaaccaaaaaagtgcaatcaagaggacccacatttgggcgcaagacagtcgctgaaaatgccataagatggagcgatcttgccctgctttctccgtactttcttcatggaaaattcaagctatatacccgcacggacgcaccaaggaggtacgccacactttccacgaccggaacaaaggcatgccaaaaaccggccactgcccaatcgctcccaaatgggtgggtcaagggaacgtccctggttgcgctcttcatgctttcttgaaacatggttgctacatggcggttccttagctgatgcctaaacctcttggcccccagcattatcctacttttaaccatgggttctccatgggctaccaatgtccaccccatggcgagtgcagaaccaatgggggaacggggcatcatcaactgggacaaaggcactacaaacaaagttttgggaacggacaaggt

SEQ ID NO: 1836 - DNA, 298 bp, Zea mays
  unsure (1)..(298): unsure at all n locations
  Clone ID: MRT4577_101678C.1
ggaaggaacgaaaacccgggcgacccacacgtccgacaatgcatcatataacatttatttctataccaacaaaacactaacacgcggcggacaatataaaagggtggtgtaatctaaccaagtaagtanctccaatccaactacatacacttatcattaaatgctcacacattactctccatctattacttaactcattccttcaaaccttattggcaactttctacaaactaccaacattttaaccactatctcttacaacatataatctctacctgcaacatacaatactcactct

SEQ ID NO: 1837 - DNA, 384 bp, Zea mays
  Clone ID: MRT4577_101679C.1
cgttacgtgtgggcggactcgtgggccctaggtgctgcttcacctgtgggctgggcgcgatccaaacgcacggagctcggtcaaccggacgtgccaaggccccaacggcaccagacagcgccgtgtccatgaacaacgagaccttcgacatgcccagaaacacctaattactgcaggcgcactaccagcaccactacaggggtgtgctcgtggtcaacttccccgtcgtgccgaccacgcgcttggactacaccggggcgccgcccaacaacactgttcggcacccacggaacccagtggcgtgccgctcagcttcaacatcactggacaggtggggctgcatgacaccagcaaccttggcgcccacagccacccggtgcacct

SEQ ID NO: 1838 - DNA, 1249 bp, Zea mays
  Clone ID: MRT4577_10167C.1
gtaccctcgggttcggccggggttgatggttcccctttgtctgttgctggacagggcactcttttatctacctcgttccgtgttcttgaagtttcttatgttcctgatatcaccatgcaacttatgaccgtcagtcaacttattgatcatgactattgtgttattcttgatcctgatttctattatgttcaggatcgttccacgggtcgtctggttggtactggccctcggcgtcgtgagtcatgactctcatcgcctttgggagcttgattggcttcatcttccttccacgacacctgccagttctgtcggctctgcattagttgcttcatccatgtcatattttgctcaatgacatcattgtttgggtcatctttgtggatcttatttgtctaccttgatttgtctagtttcctaggtttggtttcaggtcataagtccttagcttattgttagggttgtcgattaggcaagcagattcatcttccttatcattctagtgagtctatgtatgggcgatcttgttcactcagatgtatgggccccggctcccttcgcttcaaaagggggtcatctatattatattatttttatagatgatttttctagccacacatggatttgttttacgaaaaaccgtagtgaggctttatccatctataagatattgtctactatgttcaacactcaattcaacacatttattcgtgtttttgtgttgattctgcaggagatacctttctggagctctttgcaaggttcttgatacgcaagggtatgtttgtttacttttcttgtcctagtgctcatgctcaaaaatggtgttgctgagcgcaagcatcgtcatcttcttgaaaatccccgcgctctcatgcttgcttcttctgtttcccctcacttttggactgaggttatctctactgccacttatttgactaacattcagccttcttcagctcttcgagatgacattccttttcagcgcctttttggcaagatgcctgattgatctagccttagtctttttggttgtgtgttatgtgcttgcaaatcacgagcactcaaaattgactacacagtcttatgagtgtcttccttgggtatagtgttgagcatgagtgttagagccctgtatagggttttggggttagccccttgtaattaccgtcatacccttgtgcaatgggtcaggcccaacaactcttggtctattaatacaagtcccaaccctagttagggttaatgtttc

SEQ ID NO: 1839 - DNA, 784 bp, Zea mays
  Clone ID: MRT4577_101680C.1
ccggccgggaggactccagagagcccagcaccagcggcagccttccaaagcccaggaggccaggaccgcctcaccgccaatggccgaccgcgtgtaccccgccgccaagccgaacccgcctccaggcgcggcgggcaacagcaacggcgtcttctacctgctgtaccggccgcagcggccgtcgttcagcgtgtcgtcggtgcggctggcgtcgctgaacctgacgtcgtcggcgacggcgcccgtgctgagcgacgccatcacgctgaccgtgacggcccggaacccgaacaagaagatggtgtacctgtacgacgacctgaccctgctggtggccacggccgccaacgccgtgccgctggggagcgccacggtgcccgggttcgcgcacgcggccggcaacaccaccgtgctgaccgccaccgtctccgccagcgcggtgggcgtggaccccagcggcgccagctccgacatcaagcggtccggcggcgggtcgttctccgtggtggtggacgcggacaccagcgccggcgtccgggtgggcgggctcaagacgaagaagatcggcatccaggtgcactgcgagggcatcaagctgacggcaccgcctccgcctccgccggcgcccaagagggccaaggggaagaacagcaccgccgcgctcgcgcctgctctggcgccgtccgccgccgacgcgacgccggcgaagacggccacggtgagcacggcggcgcactcgtgcaaggttagggtcccgcgccaagatctggaagtggactttcta

SEQ ID NO: 1840 - DNA, 275 bp, Zea mays
  Clone ID: MRT4577_101681C.1
ctaagctgcggacgtgcgatctggtattttattcactcttcactctcataataacgttgattaggcacagacttgatttaattagtagctgtttacaaaggatgtttgtttataactagttgggcgcactggttaatatagttcatgccgttatgggggaattaccatttctatccgattattaaagctgattatgctctctgataaccatatatatttatactgattttcttgccacccaaagaaaaactgtacctgcccgggcggccgtttga

SEQ ID NO: 1841 - DNA, 1561 bp, Zea mays
  Clone ID: MRT4577_101682C.1
tgcgggtgcgggcgcaacgccaacgggcccatccgcaacgccaagcgagcacagcaccagcggcagccacccgatccgccgccgccccacagggccaagggccgaccgcctgcatccccgccgccgcgccgcccccgccgccacccgccgcgggcgccagcaacgccggggagggggagaggggtccatccacaggaccaccagagcagagccacagcaccagcggcagccacccaaagcccaggaccgcctcaccgccaatggccgaccgcgtgtaccccgccgccaagccgaacccgcctccaggcgcggcgggcaacagcaacggcgcgcaggcgtcgtcgttccctgcgcccaagtcgcagatgtaccagcggcccatctaccgtccgcaggcccccgcgaagcggcagcgcgggcggtcgtgccggtgcagcttgtgctgctgcttctgctgggcgctggtggtggtgatcctgctggcgttcgtggccgcggtgtgcggcggcgtcttctacctgctgtaccggccgcagcggccgtcgttcagcgtgtcgtcggtgcggctggcgtcgctgaacctgacgtcgtcggcgacggcgcccgtgctgagcgacgccatcacgctgaccgtgacggcgcggaacccgaacaagaagatggtgtacctgtacgacgacctgaccctgctggtggccacggccgccaacgccgtgccgctggggagcgccacggtgcccgggttcgcgcacgcggccggcaacaccaccgtgctgaccgccaccgtctccgccagcgcggtgggcgtggaccccagcggcgccagctccgacatcaagcggtccggcggcgggtcgttctccgtggtggtggacgcggacaccagcgccggcgtccgggtgggcgggctcaagacgaagaagatcggcatccaggtgcactgcgagggcatcaagctgacggcaccgcctccgcctccgccggcgcccaagagggccaaggggaagaacagcaccgccgcgctcgcgcctgctctggcgccgtccgccgccgacgcgacgccggcgaagacggccacggtgagcacggcggcgcactcgtgcaaggttagggtccgcgtcaagatctggaagtggactttctaggtacgggcagcgggaggagaggagacacctttaggggctgcagcgcgcaaaaaaaagattttcgctttcattgctatttatttatctatatatataaatatatatatacggcgataagtttgttatcaccatgattactatatatcggagcgggcaggagtatatgtattgtaggaacaagacatgcgtgcgtcggtgtaaattcattcccccaggcattttcttttccttttgcttcaaccattttccccccctgtgattgatcagtggaacggatgatgtataattacgtgtgattgtacactattcgattttatttgagcctgagagaaggctgggcgaaccactgagagggacagtgggcaattgtaaaacttgtcacgggccctcaaagtgtcggcaccttgtcagaaaaa

SEQ ID NO: 1842 - DNA, 757 bp, Zea mays
  unsure (1)..(757): unsure at all n locations
  Clone ID: MRT4577_101683C.1
ctcggccggggcaagtcctacttttgctagttcgcggtcggaagaagccatagccatccaggaagaagaagccatagcaaaagcagctgaggggggattagagaagaacagcagcgcatcagatagggagaattgaagctgatcttttgtatcatatatctttcctgcatgcttcatcagtccgacacttgagagaggttcgagagagaagttattaagctgcctccacactggtagcaagtgattgcatgcatgggggataggacatggcagcagccacatgcgcaggcttcttccccagacgcagggaccaaggtccaagcttcatcatcgtccgtccatggcaacatcatcagaaaggagccagctggaggcggcggatacgacgacatggccgagttcgatcaagcgctcttcctctatcttaacagcagccaggatcaagcatcagttattcaagatcaacctcaaactctcaacatcttcccttctgaaccaatgcatgtcgtcgagcctgctgcaccaaaggaatctatgggggctacgactaacaacacggcgtggaacaacgccggcgcaggcccatccaagcagccgccatccaaccttccgtcgaggacgacggcgactccggcagggccgcgaaaggacggcagcaaaccgccggcagccgtcaagagagaagggagcagcagcggtggcgccatgggaagcggcacaccgtcnacgtcgaaccaacaggaggggcccaccagga

SEQ ID NO: 1843 - DNA, 128 bp, Zea mays
  Clone ID: MRT4577_101684C.1
gccgacccactcgtccgaccaggcgtccggtcgttcacgtaatcatttttcagtttcctgccatacgcacggaccagggtaagggtactgtctatattgctgcccggactaggtcccaaaacacaagc

SEQ ID NO: 1844 - DNA, 521 bp, Zea mays
  Clone ID: MRT4577_101685C.1
aactgaggcatagtaactgaaacacattgatcgataaggctgccacatcataataggctacatcacaatacattcctgctgatacatatgagactgcaacactttttttaacaatgctcactgtttgcacgagcatcctggtgcaaaagctagtgctcgagagagaatccacatcattgacctgctgtcctggcaccgtttatatcaaacattcagggctcaggcataacactgctgttcatagttgccggagaccctatcgacggacgacccccgtgcctgctgctacacgcttgatcgtcaagaaagcggcctccttagactcttgccaaacttattcgactttcttcctacagacagaagaatactcctacaccgaacacatgctaccaagtactgcccttggtcataaccaactaataggacatgcttctcatgatcttgcccaaccacattacagcccactctgattttggtgcgctcgacctgcatcctgaatgttcaaacatactgctcaacgt

SEQ ID NO: 1845 - DNA, 296 bp, Zea mays
  Clone ID: MRT4577_101686C.1
cactttgttttcgcccctccccgatcatcatcggcgcgtctcaacgcgcacggaggcgtaccttattcacatccaacatcagtgccgaacgagatctgcttccatttcttattgtcccccatcgcacgaggattgaacctcttcaccttcggtcgtcggtctgtcttaggcttttaccattcaccctcatcgaattcttctcttgccaccaagggaatttggatctagtagcccatgccactacagctttacctcgtccactgattagcccttagcttgggagatgctttccccca

SEQ ID NO: 1846 - DNA, 305 bp, Zea mays
  Clone ID: MRT4577_101687C.1
tacgtaagctcggaattcggctcgagagcatatacaccggaatcttataaccatgaagggcgccgttgactcgagctgggtttataacgaaatgacgcacgctaaccctcgagcgttcagacagatgccgggtgaggtacgtctgctgatggaacatcctaagggacaggctacacatggacgcaacccatccagcagccaaccctagcgcgaacatgcggacaccaaggtaagtagccaaggtagaccgcgacgctggagacggctataatggaagacccatatcggaagtagacaaacgaccg

SEQ ID NO: 1847 - DNA, 498 bp, Zea mays
  Clone ID: MRT4577_101688C.1
ggaccaaattggattaagattgggctttattcacattcatttttaaactaaaattaattgatagcctaacttattgtgagaaacatttgatttattaccacccctaactatactataattgcattttttttctgattatatggagtaatatctcattcatttgattgttttgaaaggttctttatcttcagaatccagccatcaatcatcccttggtccggcgttctttgggttagggaatcttaaaagaatgtataaacagcctctcaaggtagtgcttgggacaggaaattccgagtcccctccatgacctcttcaatgcaccattgactgcattattgagaaggcagaagacatcattgatcggttggcacgtgcgaacttgcaatcgctttgacctaaaacaatatgccatcattattgagaattcgctatgcgccatttaaaaccaatatgtatatcattatatgccatcaaaatgtttgctgcggcttctat

SEQ ID NO: 1848 - DNA, 328 bp, Zea mays
  Clone ID: MRT4577_101689C.1
aaaatttgattgcacaatcaaaaactccgcatgatatgcaatattgatattattttatttatttattattctatttaagcaattgcctttaaatgtataactcccacacatttaatataagggaaatagtttatattgtatgatctctattaaaagatgctctaacatatatcctcatagaatacttatataattcatcaagggataacttagttcatataagaattattttaattaaatatttattataaaacatattcattttaggggaagcaactttaaaggtaaggaaaaacaaaatctttgaaagatattaaaatatgggttc

SEQ ID NO: 1849 - DNA, 559 bp, Zea mays
  Clone ID: MRT4577_10168C.1
gattccaagagctactgactactatatgtcctcatctcattcgcaagcgcggagccaagagagcgccatggacaacctccaagtcactcctacttctgcgttcactcagtgcaatgatctgtggcccgaaggtctggacttgtgccacaagtaccgggtgtcaagcgccatgcaaactcaggtcataagcaacaaggcgccgattggcatactccgccaccgtagataacacactgggacagtgcgagacacgccatcgagctaacgcagagctcgctggccgtgacaggccttgaatatccaataccgcaacatgagtcaacgtccttcagccgtatggatcgtgtatcgaaggtccactgcgtacacggtcgaagcgaccgcatatagagctgaatcctgcggagtcgacctacttggtgcccgtaacgctcagcttgatatgcaacaagtgggcatctactagaacatacatgcttaacatcacccaacgtagacatcgtactacccagcatgcatgatctctggacggtgttcaggacgatgaagcgctcgtgca

SEQ ID NO: 1850 - DNA, 411 bp, Zea mays
  Clone ID: MRT4577_101690C.1
gaaacggaaacctccaaaatcccttgggggaaccccaatggccgctgccaagttaaaaatttgaaaaatctaaaaaccattggggtttggaaaaaaaaaaaaaaccggaaattaattttttttgcccaatgggcaaaaaacaacccccatttggattgcccttggacctcctttaaaaacaggggagggggaaaccttttaatgagactcacagagggccccttttttgccctgggcccaccgcccccccagttggggctaacaataaaaacccccgccatggggccaccaatttgatgggcaatttgggtaaaggcccggcaaaaaacgttacttgggccccccccggagggaacccccccccccccgatgggggcgccccccccctggaaggggggggggccccccctt

SEQ ID NO: 1851 - DNA, 1685 bp, Zea mays
  Clone ID: MRT4577_101691C.1
gtgtcgtgctgttcgaccagaccgacgcgaatccaaaagcggacgcggcgtcacggccggcgaggtgcccggactggctcagaccggagatgttgcagtgcccgatcgcgctggacctcatgacggaccccgtgactgtgtctactgggcagacgtacgaccgcgagtccatcacccggtggatcaaggccggatgccacacgtgcccggtcaccggcgagcggctccgcaccgccgacgtcgtgccgaacgccgcgctgcgcgggatcatcgagcggatgctgctcagcaacggcgtctcgcttccggacccaagcagctcagggcaccgtcacggcgcgctcggcaacacagccgtgccattcgggccggccgccgcgggcgcggcccgcctcgccgtcgcctacgtcgtggcccagctctcgatgggctcgacggcggagcgcaggaaggcgacttgcgaggcccgcaagctgtgcaagcacaacatgttctaccgcgcgtgcctcgtggaggccaacgccgtgccgtggctgctgtgcctcctgtcctcgacggacgcgtccgtgcaggacaatgcggtggcgtcactcctgaacctgtcgaagcacccgcggggccgggcggcgctcttcgaggccggcggcgtggggctcgtggtggacgtgattaacgtgggcgccagggcggaggcgcggcagaacgcggcggccgtcctgttctacctgtcgtctaacgcggagcacgccgaggagattgggcgcatcccggaggccatcccgactctggtgcagctgatccgcgatggagcgcaccgcgggcgcaagaacgccatggtcagcctctacggtctgctccagtgcgcgagcaaccacggcaaggccgtcggggctggcgccgtgtcggctctcgcgggcctcctgtccggcgaccgggacgacctcgccagcgacgccgtgacgctgctggcgaggctcgcggagcagccggcgggcgcgcaggccgtgctggcgcggccgggcctggtcgcccgcgtcgtcgaggcgctcgccacttcggcgtcccggtcggggaaggaccactgcgtggccctgctggtctcgctgtgccggcacggtggggacaaggtggtggccctgctggggaggatgccggggctgatgtcgtcgctgtacacgctggtggccgacggcagcccgcagacgtgcaagcgggccagggcgctgctcaacctgatccaccgccattacgagatggacggccagcagccggcgtcggaggtgcccggcgagcgtgtcgttcgcgtgctatagccgcagattccggacctgccgtaagtacagtaaataggtgtagatctttacggtgtgccatttgagaccatttcttgttttctgttctcagctcgtgttttagaagagctgagaacgatttttgctgcttccgttttgaagactgctgtagtcacagacacacacacagacgcgagagtatagataaatatgtttgcgagcttgagacttatagcagataatgaaagtgtgacagcatgggattactgtttgcaacgctttcgtgtgtacataccagtgaaatgttttggtttgtgttagtaatgaggggatttgagttaaaaataaaacaacagctcaccgcccgggccatgcttggttcgttttcaaaaa

SEQ ID NO: 1852 - DNA, 384 bp, Zea mays
  unsure (1)..(384): unsure at all n locations
  Clone ID: MRT4577_101692C.1
accgggcctgaatggccgggggggggggggtccacgacttcntgcaggagatgggctcgctcatggccagagaggagcccgtntacagcggtgggcgagctncaatgcgggggggacgggatggtcaagggtttcaccgggccacaggcttgggctancggcttctacactggtggcgggggcgggggggcttcntctccggcgccggtctggaaaccaagcaggcaagagcagaggacgggttcgtcacgcttggatccctacgggttcggggacgcgcgctgcttcanccggacgggggtcttacaatggtggggatggtgaataaatcggtacatggggggggcttttatccttctggcagcgatggggggtgtcctcctt

SEQ ID NO: 1853 - DNA, 167 bp, Zea mays
  Clone ID: MRT4577_101693C.1
cacccgccctgtagcgtccctttaaacgcagggggggggggggtgacccccaatttaaccattaaacttgccagagcccaagcgcccgctactttcgctttcttccctacctttatcgccacattttgacgtctttccccattaaactttaaattgggggctccctt

SEQ ID NO: 1854 - DNA, 127 bp, Zea mays
  Clone ID: MRT4577_101694C.1
ccaagccagcggattaaagtgttttttccacaacaagcgtcgcaccccacttgccaggaaaccaaataagagccttgcgggcaccataatacttgataacccacgctttcgtcttacacatgagact

SEQ ID NO: 1855 - DNA, 264 bp, Zea mays
  Clone ID: MRT4577_101695C.1
gtgatacgccctgccagtctgccagcctctccccgcctcgcgatcccgcaggtactgatgccctatgggtctaagttattatatactggtgaagtttaacacacggagcccactaatacttagaaggtgggtttacaaatgatagcgacagccgagcgactgccgtaataggcgctcagactaaggactcgcactcaaacagaccctatttatagctgacaaaaccttaccatctgccacctgcagccgtatctaaatttggct

SEQ ID NO: 1856 - DNA, 355 bp, Zea mays
  Clone ID: MRT4577_101696C.1
gagaacccgccgccgacgcagcagcaggagacgcgccaatgagagcccacaaggaggcgactatgacggccaactggaaaaagaatcgcatgaggaggctgaagatgaatcgccaatagatgatgcatagatccaagtacgctgatggggattgtggatggtggtgtcagcataattgtgtaacctctcttcgatgcatgagttcaaggacagatgtcacatcctagttcgtcgtcaatgtttgccatgggtccaatggcacgtcttggtaacctgcacttcattaggccatctatcctggtttcgatctatatccatagttctgtgctaacacaaatcagtcagtcgttttgtg

SEQ ID NO: 1857 - DNA, 599 bp, Zea mays
  unsure (1)..(599): unsure at all n locations
  Clone ID: MRT4577_101697C.1
ccgggtcgcccagcgttcgccccgcgtccgcccagcgtccgccccgcgtccgcggccatgtctcctaccactaaaaacatccctnaaaatcctagaatacatatataagaaaagtggacccgtatcaagtcgatgaattaagaaaagtgagcatttgtatcaagtcgatgaattaactcacactgtcaccacgagaaacctaatcagttgagctgttttcgtttttacaagttgaacttttttgttgccccctccccccgttcaattggctttaatccatatcggcttctactgcttctatagtgttttgtctctacggattgcagctgcaggagtctgaataactggctttaatcctaagcgaagagtatagagttgtactaattttggtttttctctgaaccttattttcaacggacatgtctcctaccactgaaaaatagtgcctcaatcctagaatacatatataagaaaatgtggactggtgtcaagtcagtgaattaagaaaatgtaagcactcgtgtcaagtcgaggaattaacttagaacggtcaccacaggaaacctaaccagttgagctgtgttcattttttacaagtt

SEQ ID NO: 1858 - DNA, 343 bp, Zea mays
  Clone ID: MRT4577_101698C.1
actagctatagaggtgcttgatttgggaatagcagaggtaatagtgtcttatccatgacgactaatatgtcaagcgtagtagcgacaccggcgaccaacctgttttagtactatatatctgcaattacacaataccctgtatactgtggaacaaaatgccaaatggcgtccagtgaattaattttagtttcccttctatggatggctcatttgaataaaaatctggcctactcttcgttccaagactggtggcggtcaatctgataatggctagctgtgtgactattaaccaataaacgattaattattattgtgtaaccaaaattaaattcactggccgtgg

SEQ ID NO: 1859 - DNA, 302 bp, Zea mays
  Clone ID: MRT4577_101699C.1
cattctctcattctcttcacctatttttactttatcaatctctcaacactactattgtcctgtttaaatattacagttggtaccataaatcactatcccctcttcactccatcttctacttcgctacaaacacttatccttcactacactttcattaccactatctatcactcaatgcttaccacttatactaccaaccctacatctcaatatgaaactaatctaatcttccctacacaactcctatttaatacctatacactccacaatctactacatcctataatccatatactatacca

SEQ ID NO: 1860 - DNA, 443 bp, Zea mays
  Clone ID: MRT4577_10169C.1
ggccgaccgggaaatcccaggaactccacctttgggtataacaagtttccctatatctagtcgaaaaaaaggttataaaagttaggcggataaatgttttctgggggaactggtgcacacctcaaactagccaaaaacatacaacccgaaaccagggggggcaaaggcgggggcgcctaaagattaatttgagtgaccttactggcatttttctagttggcaaatttgccgggttaaaacctttaatgcctggtgcatcaatcaattagataaagccccgaatatagggggccagggtggtgtgccttaaggccaccaagacggtcaacatttaaacgggcaacaccggctggccctgaaagacttgcaccaagaagaccacgcagatttgccccaccctggtaaaaccctgttggagaaaagtctaaaaaggggggtaaaag

SEQ ID NO: 1861 - DNA, 425 bp, Zea mays
  Clone ID: MRT4577_1016C.1
gggaggaaaaactgctccatgctaaaatgtttacaaagaccctccatgctaaaattcagtttttctacacagtgggggactttgatgcttgatgaaaattagttcatcaaatgatcatttgatgatcttggggccaccgagggtcctttttccattcaataaaatgttgggggtaacctggatgcaaacttggaggaaaaccattgattaaaagttaatggacttcttttcgttgggcaccggaagcaccaaggaactccttagcctgtttaaaatttcccaatttttttccttatttttggaataaaactttcgttttccaggattgggttcaccttttttttgggaattgaatccaatcaaccagtttttaacacaaactaaagcttaaagtgtttaaggaaatagggatgtccttttttttc

SEQ ID NO: 1862 - DNA, 864 bp, Zea mays
  unsure (1)..(864): unsure at all n locations
  Clone ID: MRT4577_101700C.1
gcaaggccgagaagttcaccagttgctgacaacgtttngaacgtcactgtcagcctcgcaatgacaagccactcagtcctcgacgaccttaccccttcatcgtcatcgagggagcgcagcggactggcaggcgcattcttggcaagaccctggcaaaaagcatcggcgcacgagtggttggtggagttccgaggtgcatgatcaaactgcgacatctgtttgaagaggagacagaattgaaacgcttatttttcggagtttgcaactacgttacagccttcaacgtgcgccacatgttggagcatatgcccgttgtgctgattgggtactggatggatcaagccactttcaacatagctaaagagtgctcggccggacttcctccgccagattccttcctctacaagttccccgcggatctgcttaagcctgatctggtcttttacttgaacacacctcgagaagagggtctggccacggctatgtttgcggatcaaatgttcaacaacagactgcccgtccacatagactgtgcgtggaacttattaagcagtgcaaggggtgagcccctacagtacaagcttttaagagtttgtggcgggcccgatttttgaaccccccccaggccccctcccatggttccgggtcccaacccttaacccctaccccagctcctccccagcccagtgcagggtgtccaaaaataagcccttgttattttttttataaaataaaatttcccaaaaaaaaaaaaaaaaaaaaaaagaaaaaagaaaaaaataaaaaaagaaaaataaaaagaaaaaaaagaaaaaaaaaataaaaaaaagaaagaaaaaaagggggcgtgccgcttctagagga

SEQ ID NO: 1863 - DNA, 1251 bp, Zea mays
  Clone ID: MRT4577_101701C.1
ttttttttttttttttcccatgaaggaattggctaatctcattacaacgactcaggcaccaaccgtttccagattaacatttacgagaattatattgggcctcatctctcaggtgtcacacaactaaataatcttaaaccagcaaaaatgttcatgtctactttttttttccctgcacacaggtgagatcagaaaaccacggcatttgcatagggggcgaggaatgcttcacttgatggaatggaaaattccagtgctgcaccatacatctcgataacataaaggattcaaaaaactgcaagcagcaaaggttctcaccagacattccctataattggttcttttctcaaacaatcctacaattgtttctgacagggagaatgattatcagatataaaattatcatcagtttcactgccctcccacacgtaacagtggagtccatcttgaggcttcagccagtccagtttcatattgctatcctaaccctacaatggaaaaggaatgcaggataaccaacctatcaggtcacagtggcacaatccttccttcgggcattttcctgtcaactcggccaattctgtggggtggccagattatgtgtgtgaccctgccccgtaacagacccataggaacagggccataggatctcgagtcaaagctggtggcggcattgtcaccttcaacccagcagcgcccctgcgggatctgctggatctcctgcttctccgggatctggatccaatccccaggcagcgcaatcagcctcttcaccaccagttcacgatggtccctcggcgacctgaagacgacgacgtcgccgcgggagaagtggtagcggtggaggcagcgcttatctaccagagcgcgttcggcctgctgcgggtcgaaggtggggtgcatggaggcgccgtgcaaggtgacgtaggaggcgctccagtcggcgatggtgatgccgaacacgccgccggtgatgcagcctttaacgatcggccagacggcggccaagattctcgccatgcgcgcggaaaggaaagggaccagcggatgacagcgcctccgccgcttgccgtcccgtcagggtgactgggtgagggaagacgggatgacactactatctccgtctctcccccccgttccgtacttttttgttagggcctctcggcatttccggacctcgccatgcgcgcggaaaggaaagggaccagcggatgacagcgcctccgccgcttgccgtcccgtcagggtgac

SEQ ID NO: 1864 - DNA, 496 bp, Zea mays
  Clone ID: MRT4577_101702C.1
aaaaaaaaaaaaaaaaaaaaaaaaaaaaaaaaaaaaaaaaaaaaaaaaaaaaaaaaaaaaaaaaaaaaaaaaaaaaaaaaaaaaaattaaaaaaaaaaaaaaaaatttctttggggcggaacccccttaggggggatttttgcaattttccttggccttgggggccttttgccctttcttttggggggcccatttcgccttttggggggtcgttttccatttcatgggccgtgtttttccaacttcgggcttggaaaacccctggggttccccattttaatcgctttggggcccttccccttttccccggttggggtttttgcaaaggggcccgcccctttcgcctttccaaacatttgcccatcttttttggtaattggcccccccttgtaggggccctttaaccccggggggggtggggtttccccccagtgtgaccttttcttttgccagggccctagcccccgttcttttgggttttttcctttcctttttg

SEQ ID NO: 1865 - DNA, 222 bp, Zea mays
  unsure (1)..(222): unsure at all n locations
  Clone ID: MRT4577_101703C.1
ctagttctagatcgcgatctagaacgtggcgcgcgtctacctgggcggccagaacgtgaccctggacctcgctaggttccggcagacactggcgaggatgcactcgcacgcgatgcggcagaggctccggcaggagagactgtgatggccggccggccatcggcgacaggtgtacgcacgcacggcggctgactatgctgntccggaccggtagagggagcg

SEQ ID NO: 1866 - DNA, 596 bp, Zea mays
  unsure (1)..(596): unsure at all n locations
  Clone ID: MRT4577_101704C.1
gntgcatgagggggatcagccattgtttgatctttgtaaattatgcgatgaggctgttcgatcaaatgtctgtttgtgaatacagttggttatgccaccgcagataaccattttggagttctgcttctgcatgaattttatgctgaaaacagatatagttctgaggttctgaatacttggatccttttttggattggtgagggctaacaaagtcttcagttagctaacctgttaattcaactcacaggagcagttttgcacattctatcctgctgcataccatgttgatagcaatgtcccaacaacaatccctgcagacactcaaactgcagcacctatgggacagatgtagaaagtgtgcatctgaagaaaatccggcagatgcggttggtgcggtgcacattttcactggcagaagcaacgtctgctggataaagagagaaagggaaaccgagctggaaagtggttcggcaattttgacagatcgatcgtagaacccatagacaattctgcagcagcaactagcaagtgtggtgtgtgccgaagagatctcccaaccagagttgacgctcatgtttccttagcagcacgatttc

SEQ ID NO: 1867 - DNA, 365 bp, Zea mays
  Clone ID: MRT4577_101705C.1
actagttctagatcgcgaggccgcccttggtggtttattttttttttttgggtttttttttttttttttacaaggacaccatccaaaaagcacataaacgattaacgctagcatctacctccatttacacagtccacaattgctctaaaactcaacattatgtattagcaggggatgtaacaaggtacaatattcaaagtcagaaatatgggaatgtcatctttagtccgacccaactatagcttgcatgaggctcgagagcaaggacaacttcaaactgctgaggggattttaaactggtttagtatccgtaattttcgtcgcaaaagggaatttccccccacaattctatctcggctttagct

SEQ ID NO: 1868 - DNA, 321 bp, Zea mays
  Clone ID: MRT4577_101707C.1
tcttcctcggactcttggtcatactcatgggcttttaaaccaccgtcacgctcacgcctatacgacgaacttctcaagttctgcgggggagactagaaacgaacctaggatctcaatccttttgcgcacctctcatcatactcctatcctatctagtatcccgtccgaccctagtctacactgatccactatccactgctatttctactacatcacctacattctacttcgatgccaatatattcaccttatcttaactctacactatatatccattcgaacccttcgagtcagtactcttcaaccacctttacttcatct

SEQ ID NO: 1869 - DNA, 585 bp, Zea mays
  Clone ID: MRT4577_101708C.1
gtaccgggccctttctcggttttttttttttttttttttttttttttttttttttttttttttttttttttttttttttttttttttttttaaaaagaattttggattgcccctggcttgacccgaaacaaagtcagtttgtaatacccaaccccttgtttattttgtaaaaagatgggggcaaacggccattgtccacacacaatacattgggttggttacccgggagggtttttgcagggggaaatcaacacccagcacccttgaggaagttgtcgaaggggctcgacgggggcaccctaagaaacggttgttggacgtccccaaaaacctgtgccttcccggaattgttgttttgaaggaggaacggttttgtcttttttttgtaaggcccaacaaccatggccgtttgtttgttttgtttgaagctcatgagcagggacattttggggggttttcccataaaaaaggcctcacaggggctagtcttttcctggaagggggtgtctccggcctttgacaccaaacattgccctgcggtttggaaagacacattatttacgacgtgttttaaaagttcatcga

SEQ ID NO: 1870 - DNA, 1535 bp, Zea mays
  Clone ID: MRT4577_101709C.1
atggcgagggtacgctccactgctagggttgatcgtgagggagatgaaaccgaagctactgagactgttcccatttccgaagcgatgaagcggtctggactggtaacatcggaggatgcacctgccgctgaagcagagcaggctgatattgaggaaactgattccgaagatgattacaacagtgcagtgctgagtaaacccagccacctggatttcggaaaatctactatctctgaaggtgatttacctaagatggtgaagttgggctattttagtgaagcgaagaaagagctgattcgctttggaggggaagaagctactccgaagccaggaaaagatgaagtagtggtcttcaaaagtttctttaaggctggtttaagattccctttgaacaagatgattgctgatgtgctgaagaagtttgggatctaccttcatcagctaactcctaacgctatcgttaggcttagcgtttatatttgggccctccgaagccaaggggtggaaccatttgccgaaggcttttgccgagtgcacgagcttcattaccataccaaggctagagcagatgggctacatgaaaactttggctgctacaattttgcctaccgcaagactacaaaatttcctgtgatcagttaccgtagcaagtggcgagctggctggaaatccgaatggttttacatcaaagttgacgaagataaggagaaattggtcgagagtccattggaattggtcttcggagagaccaaaccccagtgcaacatgacaccagagggtccgacccaaattgctctggctgaatttagagttattgcagagcacatcagcactagggacttagtgcaagaatttttggccttcagagtgttcccaactatgaaagagtgggccatgccgaagcttgaaggaaaaaagaaggaaggggagcttgttcggttgccttatcattacaaattcaagagacatttcaaagtgccttgccaagaatggctggacacgatcgaagtgatgtgcaacgagatactcggcaattactctcgaaaagaagatcagttgatgactgcagccttcggcacccgaccgaagtgaaatgatctttggtggttgtaattgcccaacacaaataattggactaactagtttgctctagtgtacaagttatacaggtgccaaggttcacaacaagccaattaaagagaccagaagttgggttcaaaatagagagctataaggcatcccgaaaggctccctggtctggctcaccggactgtccggtggcgcaccggacagtgtacggtgcaccacgggacctcgcgcagaactcctcagactcgggaattttcagaagccagcgcgctataattcaccggactgttctgtgtacaccggacagtgtccggtgctcctagaggacgcggctctggaacttcgcagtctaggaaatatgcgaaagctgctccgctatagttcaccggacatgtccgatgtacactggactgtgctgtgcaactgcggagtaacgactatcttct

SEQ ID NO: 1871 - DNA, 1498 bp, Zea mays
  Clone ID: MRT4577_10170C.1
aaagcaaatcataacaacagcgcaatagaaagggttgggaaacataaactctccaattcacaagtcctctccgctaaatgccatacaaactaagatggaagatctgcttccaattctataccaaaattgtcgtgggttgtggcgattatatttgtatattccctctctcttgcccctgttgattcatagtacaagtatatatagtgtgatatgtaaaagtactaaaagttgcagacgaactccccaggaaatggaattgcggtgctgcaccctgaatgtgaccgattgctcacgaacaaacgccatttgcaacaggcagccctggcgtcgtcatcgagaaggacgggtcaagccatccatccttcttggcgcgctcgatgcagcagccgagctgcttcgcggcgtcaggcacgtcgagtgcgaggtcgtcgacgcagtcggccatcctgtcgaagcccttggtcatctggttcggcgtgatcagaccgcggccgtagcactcgctgaggaggccccagagccgctcgtccctgcctcgcttctcgatgatagccaccagtgccttcttcaccacctcgtggtggaagaagggcatgccaagatccttgatgcatcggcacgcctcccggatgtcgccgccgcagtcgtactcctgcagcagcttgccgatcttgtccttcacctcgtccagctcccagcctgccttgccgctgccgccgccgccccagcaccgcaagatccgctccgcggagagcttcgcgccgagcagcgcatgggcgttccgaagcgccagcatgccggcggatccatccaccttgacgcggccggcgtcctcctccaatgcctccaggtccgacggcgcgatcacctcgtcaaccacggacctagcaaagaacatggtcaggtcctcgactatggccgggttgtccagcgcggcgtcctcggcggcgtcgatgaggaggtggaaccctgccacgacgtcctctggcggcatgcagagcgaggagagcagcaccgacgccatttccttctcgcggctcttccggtccatcgcggcgttcaccagcttctgcacgaagatggcattgaaggagggacaacacgagtagttctctgcttccaaccagctcatgacctcgatgatgtcgccggtcaagaggtactcctttatgatcaaaacggccttctccttgaactgccgcaccgcggcgtcgtcgacctcgctacccttcttcggctccggtggcaacggtttgaggcacgactcggacagccagccctccgacgaagccttatggatcaccgatttcagaaggcacctcgcgttcggcacgtcgagcgccagatcgtctagagagtcgatcaaacggtcgaaccctttagtgatctggctctcgttgataacgccttccttcgacgccgaagaagggtagcgaggtcgacgactccgtggtgcggcagttcaaggataaggacgttttgatcataaaggagtact

SEQ ID NO: 1872 - DNA, 541 bp, Zea mays
  Clone ID: MRT4577_101710C.1
tgcttttttttttttttttttttttttttttgtttttttttttttttttttttttttttttttttttttttttttttttttttttttttttttttttttttttttttttttttttaaaaaaaccttcccggggggccgtttaaaggggggatttccaaaacattggggggcgttttttggggatccaaatttggaaccaattttggggaaaaaatggaaaaaattttttccttggaaaaaatgttttccggttaaatttccaaaaaaaaaacaaaccggaagtataaagggtaaacccgggggtgcctaaggggggaaccaacccaaattaattgggttgggattactgccccttttcaaaagggaaaacttgtggtgccagcttttttaaaaaatcggccaacccccggggaaagggggtttgctttttgggggcttttccgttttctttttaaataaatcggtgagctgggtctttcgggtgggggggggggtttcagctaactaaaaggggggaaaagggttttccacaaaatgaggg

SEQ ID NO: 1873 - DNA, 217 bp, Zea mays
  Clone ID: MRT4577_101711C.1
tacgtaagctcggaattcggctcgagccggaacgaaacgaagactatatttacatggccgttgtttaatgaacggttgggatcgatataagcatggcatcggactggattgaactagcgatggtgcgactcaatacgaaaaaacgattcaactttactgaccgtccaaagaaattcgggggtaggagcaggtatctcaacaaacacccactggttta

SEQ ID NO: 1874 - DNA, 1144 bp, Zea mays
  Clone ID: MRT4577_101712C.1
aacgcgtggaacgggaaagccggaaaggcccccgcccgcacacgccgccgccgctgccaattcggtcaacgtacgataccagccgcgggccggcgagtccaggcggtcgcagtcgcacgtcgcgacgcgccttagcattggaccgagccgcggccacttgctttgcaattgcatttgccgggatccatgccaacagctccgtcctatatgtgaagcacccggccgcaaggctctctcgggccttgacggcaaattaagcgagcgccggccgaggcagacacaacccgcagcaacaacttgcatcggcacggacgaccgattgagagcctcggcgttcgtacgccacgccaccaagagactctgtgcaacaagtgaagggacgaaatgtatccggccaagcccgccgcctcctccagccagccagcggccgagatggcgcagccggtggtcggcatccccatcagcagccccggcgcggtcgcggtcgggccggtcgtcggcaagtggtcctccggcctctgcgcctgctccgacgactgcggcctctgctgcctgacgtgctggtgcccgtgcatcacgttcggccgcatcgcggagatcgtggaccgcggcgcgacgtcgtgcggcgtggcggggaccatctacacgctgatggcctgcttcacgggctgccactggatctactcctgcacgtaccgctccaggatgcgcgcgcagctcggcctccccgaagcctgctgctgcgactgctgcgtccacttctgctgcgagccctgcgcgctctcccagcagtacagggagctcaaggcccgcggattcgaccccgacctcggctgggacgtcaacgcgcagaaggccgccgccgccgccgccatgtacccgccgccggcggaggggatgatgatccgctaagctaagctagctacctcgtcgccgatccggcccaacctccaacgctaaactcagatgcgttgcgtcagtcagatcatcgcgtacgtacgtgttttgtacgtatggtcgtgtatatttgtacgtgatgcgtatatatataatgttatgactgaatgtctgagttttaagatttgtacgtttgaatccttttcttaaaaaaaaaaaaaaaatgtgtgaaaatctttttttcttg

SEQ ID NO: 1875 - DNA, 617 bp, Zea mays
  Clone ID: MRT4577_101713C.1
gctttttccggcaagttaagcgagcgccggccgaggcagacacaaccagcagcaacttgcatcggcacggacgaccgattgagagcctcggcgtccgtacgccacgccaccaagagactctgtgcaaaggagcaagaatgtatccggccaagcccgccgcctccgccagcgagccggtggtcggcatccccatcagcagccccggcgcggtcgcggtcggtccggtggttggcaagtggtcctccggcctctgcgcctgctccgacgactgcggcctctgctggcaaagcagccccctactaccctagggctaggctagccgctagcttctctctcctctcttcttttctctcttcacgcaatatgcactaaccgctgcctgcatctgcatctgcatctgcatccaacacaacgacgaacaggctgcctgacgtgctggcgcccgtgcatcacgttcggccgcatcgcggagatcgtggaccgcggtgcgacgtcctgcggcgtggcggtgaccatctacacgctgctggcctgcttcccgggctgccactggatcaactcctgcacgtaccgctccaggatgcgcgcgaagcttcgccctccccgaacccttgctg

SEQ ID NO: 1876 - DNA, 171 bp, Zea mays
  Clone ID: MRT4577_101714C.1
cccacgcgtccgctcaggcatccggtcactcgtacccgggcgcgtccggatacgcttccgcgcgagatggcgatagagcgctgcgaggacctcaacataagcatccgacatcgacatcgagatggacctagcacatgagcacatcgtgagcacccagatcacgctgcacag

SEQ ID NO: 1877 - DNA, 295 bp, Zea mays
  Clone ID: MRT4577_101715C.1
aagagtgagtattataactcgactacatagaagcacaaacctcatgggttaaggttgaacttgcacaacatttcgccagtccacaccttgtgaactaaccttggggccggtgcagctttctggtccatgagcggctaaatagttggggttttctgatgcattggaggtggatgaatgaatacagtaatgtggcgttgcttgctttacttgaaaacagcacttcaagactggcactcggcctgtagtaatgggtgtttgtcgccggtttgttgtttggcctggcccatttgtccgc

SEQ ID NO: 1878 - DNA, 1058 bp, Zea mays
  unsure (1)..(1058): unsure at all n locations
  Clone ID: MRT4577_101716C.1
tgttcaatgccgaaaaccagggagctacgtgtggtccaaactaggatatgttcacagctaagagcatttaaaaaacagcctaaaagcatttaaaaaacactaacagccgaaaagtattaaaagcagactttaatcagatcgtaacatcatgttcacagctcaattccacccaacaggtatgttcctaggtcaaaacaagtccatgtacacctgacactctcaatacatgtcagcgaaacggaggttgtaatgtagtcaggcgattgatgcagccactcgtaatcatgctgtctacagtctcaagcttcatgtaatgaaaatttagattgtcctgctgatgcctcgcgagaagttgctcctctcgcagttcattcttgatcagtgctaagttctccaactcatgcctcttggacnnnnncttgaactttctgacattatgatagctcgggtacgcgcnnnnnnnnnnnnnnnnnnnnnnnnnnnnnnnnncggtgacggacggcggggcggtgtacactaacatgttcgacgcgatcgtggacgcgacgcacgcggcggtggagaaggccggggtgcaggggctggagctggtggtgtcggagnnnnnnnnnnnnnnnnnnnnnnnnnnnnnnnnnnnnnnggagaacgcggcggcgtacaacaacaacgtggtgcggcacgtcgacggcggcacccctcggcggcccgggaaggccctggagacctacctgttcgccatgttcaacgagaacggcaaggccgagggcgtggagcagcacttcggcctcttccagccggacatgagcgaggtctaccacgtcgacttcacggcgggatnnnnntagggaggctcacccgcttctgtgtttactttatttatgtagtaggaatgatcattcttcattcagagactgatcgacttcatcggagctgctcgatactcgagcggcgcggataggcttactgcgtactggtagtattgttggagacttggagtagcattactatcgacnnnnnnnnnnnnnnnnnnnnnnnnnnnnnnnnnnnnnnnnnnnnng

SEQ ID NO: 1879 - DNA, 937 bp, Zea mays
  Clone ID: MRT4577_101717C.1
gcgccggccgaggcagacacaacccgcagcaacaacttgcatcggcacggacgaccgattgagagcctcggcgttcgtacgccacgccaccaagagactctgtgcaacaagtgaagggacgaaatgtatccggccaagcccgccgcctcctccagccagccagcggccgagatggcgcagccggtggtcggcatccccatcagcagccccggcgcggtcgcggtcgggccggtcgtcggcaagtggtcctccggcctctgcgcctgctccgacgactgcggcctctgtaagcaaagcactaaccgctgctaccttcttctctctcttcacgcatgcactaatgactaaccgctgcctgcatatatctgcatccaacacaacgacgaacaggctgcctgacgtgctggtgcccgtgcatcacgttcggccgcatcgcggagatcgtggaccgcggcgcgacgtcgtgcggcgtggcggggaccatctacacgctgctggcctgcttcacgggctgccactggatctactcctgcacgtaccgctccaggatgcgcgcgcagctcggcctccccgaagcctgctgctgcgactgctgcgtccacttctgctgcgaaccctgcgcgctctcccagcagtacagggagctcaaggcccgcggattcgaccccgacctcggctgggacgtcaacgcgcagaaggccgccgccgccgccgccatgtacccgccgccggcggaggggatgatgatccgctaagctaagctagctacctcgtcgccgatccggcccaacctccaacgctaaactcagatgcgttgcgtcgtcagtcagatcatcgcgtacgtacgtgttttgtacgtatggtcgtgtatattaatttgtacgtgatgcgtatatatatataatgtcatgactgaatgtctgagtttcaagataac

SEQ ID NO: 1880 - DNA, 746 bp, Zea mays
  Clone ID: MRT4577_101718C.1
aagctctcaccctctgcccttcaatctacccagaaatataccaagaaaactagcttgcttttggcttaggattaggacttacgattacgagatgtcaacgaccacagcggcacccccacgctgagcatgaagctcctcatcgacaggaaggcgcagcgggtgctgttcgcagaggcgagcaaggacgtcgtggacttcctcttctccctcctcacgctgcccgtcgccacggcggtgaagctggtcgggaagaaggccatggccggctgcgtcggcaacctctacgccggcgtcgaaaagctcgactccacgtacgtgcaggacggcgccgccaaggacgccctcctctgcccgacggttgtctcgccggcggcgaacgccagcagctccctcctccctctgccggagccgtcggtgcagccaaagatgtatagatgcatcaacaatagctactgcagctgcctcaactacatcacggacgagcacggcaaggcgtgcccgcgttgtggctgctccatgacgacggaaatgcaatacctgccgtctgcgagtcccagaagcgactccggccaggtggcggcggcgcagcgcactgcaggagggttcgtgcagggcatcgtgacatacatggtgctggatgatctgacggtgacgcccgtgtccgccatcgtctccagcatcaccctgctcgagaccttcgccggggcggacatcggcgacatcgagcagaagaacgttcagctggg

SEQ ID NO: 1881 - DNA, 2859 bp, Zea mays
  Clone ID: MRT4577_101719C.1
atccatctggcggaggcgggatcctccccgcccttgccctcctctgctagtggcttgggacagcggccggccgcttttttttttttttttttatctttttttttttttttttattattaaaagcagactttaatcagatcgtaacatcatgttcacagctcaattccacccaacaggtatgttccgaggtcaaaacaagtccatgtacacctgacactctcaatacatgtcagcgaaacggaggttgtaaatgtgagtcaggcgattgatgcagccactcgtaatcatgctgtctacagtctcaagcttcatgtaatgaaaatttagattgtcctgctgatgcctcgcgagaagttgctcctctcgcagttcattcttgatcagtgctaagttctccaactcatgcctcttggacaaaaacttgaactttctgacattatgataatcagggtctgtagggcccacccaacggaattctaactttataccaggtttacatggacggtcattgaacatttcagctgtggcatgcttcgccctcacaggccttggcatcccagatatcatgaatgggaactcatctagtatcttgaccacagaatcagcatccttctcagtttccatttctactaatgcagatttgggaatgtcaaatggaactgtatagttggtcagaaaactaacgtgtttgacactaccgaactggttcaaagccgtcgtaatgactccatctgtagctaggcaagacaagttgtcaaggtatacagtcctcttaacctgcttctcaaactctttatacacttttgtggcctccgagaatgcagtgctggtactttgttctacagccacgccaacagaggtaggaagtttcattccagaaatgttctggcagctgtcagtagcttgtaccgcagagctacacagttttttgctaaatttcttgtcattagattgatcagcagaccgtctggttaggaaacagtcatttgcctctccacacttcactgcagaggttttcaggttcttgcttgggttgttgatcttagcttcttcagttactctcttccttgaggtattgctgtttgtctcatagagtagcttcttgcttaagatattttcactagcaggttcacagggtttcttaatggagttattcttttccacttcactttgcactcctgtgattgaaggttccatgctttgggtgttgtccatggctcctacacatgcttgcttttttgttgttttgctgctgtcaggaggcagcccattgctcataatgtccgtgtgtcgctcttcacatgacccttttcttacagggcaaatgctttcccttttatcctgcgtgccagcagtgattgtcagattcaggtctgggacaatgaaattagccttggcagtgtcatcagtatattcaggtacttccttagcagcgtgttttgttgtatcctcaggtaatcctgtgctcatggtctgaaggccttcggccaaccgctttctcagtgataatggcaaacgaattcggattttgttcccagttgggccaattttcatggcacttttgtccattctggcttcagcagcctggttttcagaggcagacatttcattggcacagaatatactcctagtcggtgctcaccgccggcgagggtcccgaagaaggccttggcgcctggtgtacggttgcgactgcggcggcggcggctgtcgcccagtcgtcgccacggcagggagagagcgcacgggggtgaatgaacaatagaaaaggggaacaagacgggagtgaccagcccggccgtgggttcggaaacaaattcggtaatttttttaactttttgtgttgtagagagcaaataatacataaaacaacttatataatattttattcgtatttgtactaatgtgtttgataacataagaaaagatcagcatcaaattttatacatatcttttttaaaatattaaatttattctaacagttcggattaccactttcatccctaatcccgggggacccggcggcgcaggtgctcccggccatgaagaacctggagtcggcgctccggtccgcgggggtcgcgggcgtccccgtcacgacggccgtggccaccagcgtgctcggcgcgtcgtacccgccgtcccagggcgccttctccgaggcggccacgacggtgatggcgccgctcgtctcgtacctgtcgtccaggggcgcgccgctgctggtcaacgtatacccgtacttcgcctactcgagcagcggcgggcaggtagcgctcgggtacgcgctgctgtcggcggacgccggcgcggcgtcgtcggtcacggacgccggggtggtctacaccaacatgttcgacgctatcgtgggcgcgacgcacgccgcggtggagaaggccggggtccaggggctggagctggtggtgtcggagaccggctggccgtcggccggcggcgagggcgccaccgtggagaatgcggcggcgtacaacaacaacgtggtgcggcacgtcgacggcggcaccccgcggcggcccgggaaggccctggagacctacctgttcgccatgttcaacgagaacggcaaggccgagggcgtggagcagcacttcggcctcttccagccggacatgagcgaggtctaccacgtcgacttcacggcgggatccccctagggaggctcacccgcttctgtgtttactttatttatgtagtaggaatgatcattcttcattcagagactgatcgacttcatcggagctgctcgatactcgagcggcgcggataggcttactgcgtactggtagtattgttggagacttggagtagcattactatcgacgtgattcattacagtgc

SEQ ID NO: 1882 - DNA, 390 bp, Zea mays
  Clone ID: MRT4577_10171C.1
aattattcagttcttgcaagaatgacatgattttgttactaaatagtgttccttttatgcagaaatgaccaagacaatgcaagtgcttaatgaagcaagctggcaggaaacatttaaagctctttggatttccacccttcgtcttgtacaacgggctagagaacctcttgaaggaccgattcctcatctagatgcaaggttatgcatgttgttagctcttataccattatcaattgctgcgaatcttcaagaggaaagtgatatgtttggagttgaatggaacaaaattcttccacaaagacaagggcttatatcatctctccagaatctgatcccatattcaggacttcttgtaccaccttcatcagtggtgaatgcagctaatgttgc

SEQ ID NO: 1883 - DNA, 391 bp, Zea mays
  unsure (1)..(391): unsure at all n locations
  Clone ID: MRT4577_101721C.1
tgtcgaggacggggtgcgctgcctccctactctcccgtcccaccgcatcgctcaccatggccgctgtcggcgaggcctctggccgccgggcggccagctgcttcttcgaggtcggccagcgcgagatcggctcatccagctcccgcgcttcgtcctgccgaatcagcggctccgagggcctaattttgcggatgaaccaatatggaaagttgcgaggtcatagtggctgtgttaatactataagcttcaatcctgctggtgacctccttgtgtctggttcagacgacacagacatcatactatgggactggcttggtaaaactgaaaaactaacttacccttctggacatnaacaaaatgtntttcatggtcgtgtgatgncatttacaga

SEQ ID NO: 1884 - DNA, 280 bp, Zea mays
  unsure (1)..(280): unsure at all n locations
  Clone ID: MRT4577_101722C.1
cggaaacccgggggcgcgagcgccganncgcaagcngaganncnncgccgcccgagcaaaacagcaccggcggggggaccagagggaagcaggnacgaaggcgagagccacacaaccagagaccagagagccacgcgaagaagcccgccgggccacccggcgagggggagcaacaaagaagcaaagaacncgagcgcgagcggcgacccgacagcgaaaaggaaagaggccggaaagacaggagcacagcgcacagaagaaaagccggagagncaaaaag

SEQ ID NO: 1885 - DNA, 326 bp, Zea mays
  Clone ID: MRT4577_101723C.1
cccaagtctccttgtgcacttgtagtgtaaaaaaacatcgtttggtgtccagttgcgcaaaccatgtccaagccatatttctttccatagaacctgtcccgaatcttcacaaactttctggtgctcatcctaattcgatctcatgtgactacctctcctttcacctggatctggtaatcctttttcttatgaatcatgttggctttatcatccgaatctcgggatcccctatcgattctgccccgttatctggttatctgctataacctattctcaagtatcggatgttgatcttgcctaaatctctcatttctgcgacagcaacg

SEQ ID NO: 1886 - DNA, 288 bp, Zea mays
  unsure (1)..(288): unsure at all n locations
  Clone ID: MRT4577_101724C.1
ttgtatagccccgnaaacataattgcccaggaatgaaaagctggacatgaattacaaaagcccgccaggccacaacacaagaaacggcacatcagacgagcaactgaactttacacggagagggcaagagatgtcaaacctagccagcaaccgaaaacgatgaatgcacaaaagggccacaccacaagagagatagcaacgcacctggcacaaaccgacaacatgaaagacgcccgtcagtcacagatacagatacgactgaggtgggacaagcagagagcgaaaaca

SEQ ID NO: 1887 - DNA, 364 bp, Zea mays
  Clone ID: MRT4577_101725C.1
cgttgctgtcggttgccgatgaagtgcgcgttgatgtggaggccagcgtcggtgaaaacgcagaagtcccagtccctgctgccgtggaagtagaaggtgctgccgccaaccaaggagaccccagtgagccggctctaacctcaacgatttctcgggcttgacctttcctcgctcctctacatctacttgcagatcttgttgccgacctgctcctagaccgtggtcgtcgcccccctactccaccaccgccaaaccgttgtcgtacccttagatccagcggttcctagggcaggagaatgggcaggtgaggcctgtagcgcttctcgaggtgtgggaggggaaggatggcgaggcgacagcaacg

SEQ ID NO: 1888 - DNA, 778 bp, Zea mays
  Clone ID: MRT4577_101726C.1
ccggccgggatcgcgttcacagcagatggcggggaaggaggagaggaagcgggtgttggtggtgggcggcagcggctacctgggccagcacctcctcgcggcgtcctccaccgtcgaccgcctcgacgtcgctttcacccaccacagccccgccccgccgcagccgctcctcgagacgctcccctccgtccgcgcattccgcgccgacctccgctccggcgacggcttcgaggcgatctccgcgtcctttggccagccacacgtggttgtcaactgtgctgcgatgtcagttcctcgggcatgcgaattggatccacctgctgctatggctaccaatgtgccttcttcgcttgtgaattggttgctaagttttgggaatgaagactcgcttttgattcagctctcaaccgatcaagaggacgagacaatgccggtgaacatgtatggaaaatctaaagttgcagcggagaaactaatcgttgagaaatgctcgaactatgcgatcttgagaagcagcattatatatgggccacaaacaatctctcctgtggcaaaatcccttcccattcagtggatggatggtgttctttcacaaggccaacaggttgagttcttcagtgatgaattccggtgccctgtctatgtcaaagatatggtggacgtaattttgtcactgacaaagacttggttcccagatgatggcaaaaaagtccaggtcctccctgatgtcggtggtccagatagggtatcaagactgcagatggctgagtctgttgct

SEQ ID NO: 1889 - DNA, 672 bp, Zea mays
  Clone ID: MRT4577_101727C.1
atataaacacacaaattgcagctcagcgtgcagccaatcctaaccttgataaactatatattacaaaaaagcagtgatcgacgtcctagaaaccctagctccggaagaagggtaggagctcgacctcctagaaatagaaccttcgtgtcatgagaacttcgaagaagggtcaagagaaaatcgaagggagcgaaaaccgactaggccacccttcgagagcgccccgacccagggaactaagcgaacgcgaagagttcactttccggttagttgagggtcataccgatggtgctcttttaagttatgcagttgctgcctcaagctttctgcctccctttgccagagctagtaagattggaaaagctttcaattaattaacataaatgagagtgactggacaaccatatgatctctactttagagtagggactacaactacaacgaaaagaacaaaacctttcgcttcaaaggaagctggtaaagttactttgagtttgttaaaccgcccatatatgtaacttttgggaacctgagtacagtcctgctagcttgtgtcttttttttttttgccatgctggagattttctaagacaaataagttatgagtttgttactgtattctcatcttcgtttacttatcaaaatatgtttactcgcaagataacttgatct

SEQ ID NO: 1890 - DNA, 1381 bp, Zea mays
  Clone ID: MRT4577_101728C.1
ctgaaatgaagggtgggtgggtggggggacccacggtccgccgccgaagccgagctccctcgcaaatctctcgcatcgcgttcacagcagatggcggggaaggaggagaggaagcgggtgttggtggtgggcggcagcggctacctgggccagcacctcctcgcggcgtcctccaccgtcgaccgcctcgacgtcgctttcacccaccacagccccgccccgccgcagccgctcctcgagacgctcccctccgtccgcgcattccgcgccgacctccgctccggcgacggcttcgaggcgatctccgcgtcctttggccagccacacgtggttgtcaactgtgctgcgatgtcagttcctcgggcatgcgaattggatccacctgctgctatggctaccaatgtgccttcttcgcttgtgaattggttgctaagttttgggaatgacgactcgcttttgattcatctctcaaccgatcaagtttatgagggggtgaaatcattctacaaagaagaggacgagacaatgccggtgaacatgtatggaaaatctaaagttgcagcggagaaactaatcgttgagaaatgctcgaactatgcgatcttgagaagcagcattatatatgggccacaaacaatctctcctgtggcaaaatcccttccgattcagtggatggatggtgttctttcacaaggccaacaggttgagttcttcagtgatgaattccggtgccctgtctatgtcaaagatatggtggacgtaattttgtcactaacaaagacttggttcccagatgatggcaaaaaagtccaggtcctcctgaatgtcggtggtccagatagggtatcaagactgcagatggctgagtctgttgctgttgtccgtggatataaccccagtataatcaaatctgtgtctgcatcatcggttaatcgcggagtagcttctccaccagacatatccatggacatcaccaagctaacccagatccttggtatcaagccaatatcatttcaagatggagtcagaagtacacttgatgcagaagacagtacatgacgcttcctcactggtttgcttgagttcttaagggggagttgtttgcattcaaatgtagtagtgtgacataaagaatcacatttgatttgcaaaatttcagtatcggtaaatttctgttgggtttatgtgaaatatgtaagttttgtacccactaaacaccaatgccaccatccgtgttactgcttgattctgcaccattatgaataaagatggtctccattttaaatcattttcttccagaagtatgtaactgtattgtgcatgtagattacaatttataggatatgttatccccatgtattttaaaaaaaaaaaaaaaaaa

SEQ ID NO: 1891 - DNA, 512 bp, Zea mays
  unsure (1)..(512): unsure at all n locations
  Clone ID: MRT4577_101729C.1
gttgcattaacttgtcggcttgtgtgcccgttgttctggcttatttttgccatcgaagcaaactggtcagctaccgccaaagaatctggctgcggccgaggccccgggcctgggatctttgcatcaccgtggccgccaagccagccatgttcttgtccccaggccccggacagcgatgccagcatgtcgctgtgaatccatctgcagtcaatgcgagagcgacctgttccttcnaaaaaaaaaaaaaaaaaaaaaaaaaaaaaaaaaaaaaaaaaaaaaaaaaaaaaaaaaaaaaaaaaaaaaaaaaaaaaaaaaaaaaaaaaaaaaaaaaaaaaaaaaaaaaaaaaaaaaaaaaaaaaaaaaaaaaaaaaaaaggggggggccggttttaggggtcccaagtttacttccccgtccttgccacgtaaaagtttttttttgggggccccaaaattaaattactgggccgggtttttaaaccttcgggccgggaaaaacccgggttttttttt

SEQ ID NO: 1892 - DNA, 280 bp, Zea mays
  Clone ID: MRT4577_10172C.1
gtccagcactggggtatggcgtcgaggcttccatggggtgggggaggccagcttccttctgacaggatgggcgcatacagtgcctggtgtgatttgtgcacaacccgtgttccaggtgtacatcctcccaaggagacacccagacccttccagcacgggccggccaagttgctgcggcggaggcagcatttcagctgtgaggaaggtcattggatccagggttttaaccggtaaacatggttgtcttaacttcttaacctcatattggtaagtgattgat

SEQ ID NO: 1893 - DNA, 635 bp, Zea mays
  Clone ID: MRT4577_101730C.1
ccggccgggaatcaaaacacgccgaagcgctccattttggagcgcacaagcgagagagatccggagcagacgtagtgccaccgaccccgccgtcgtgcgacctccatatcctcgccgatgactctcagaaatctttttaataattaagatgataccgtgggggaagagccggaggaggtaaagtcaatctgatttatatcttcagaagcggggaccctgacaaagcagctagggcaccagctgtagcgtgctccatctgccagaaaaaccatttgctgactagactgaagcgggcaatcaggacgctgctgtgaataccacaccaaaccaagtaactagccacatggtctgaagatgacaacactggcaacttccttacagaccgttcttgaaccataggctcacgctgatcatgaaggtgacatctctgcttgtgactacctgtgtggcggaaaactgatgcccgagctggcgcgctcaccaaactatcctaccctgcctggtagccagctatgtactgaattgctaacaaccgctgcctgggattgtcatgtaaataccccgcgcaatgtctttgtgctgcatgagcagatcttctctgcgacaaacttgccgttctgcatgtgaagcagctg

SEQ ID NO: 1894 - DNA, 302 bp, Zea mays
  Clone ID: MRT4577_101731C.1
gcagccgagttataacattaacaggttttaccaccaaattttttattacacaagccaaaattaatgaagacttggcccccaaaataaagctaacctcccccacccggttaaaatcctggggcaaagagcccagatgcgagataaacagaggagaccctcataagggaggcaacccacgtttggaacaccaaaaacacgtgcgcacgggcacgacagcttctggccgagggtgaatcagcaaatgatctggttgcacctgttggtgttgactgtttaggttactccaacgaatgggtcgatct

SEQ ID NO: 1895 - DNA, 236 bp, Zea mays
  Clone ID: MRT4577_101732C.1
gcgacgaggcagtgatggacgatgaggattactacgactactgctacagcgtcgtgggtgacgccggcgacggcgggagcgtggagtcgcttgtgcccgtggactatgacgatggccttgaggccgatggtaccgaacgctgtgctgtccatactcgatcagtcatgtgtggttctaaatgacgactttatatctgcgcgtcaagaggaagatgtaaccccggtatcagccgtgtt

SEQ ID NO: 1896 - DNA, 349 bp, Zea mays
  unsure (1)..(349): unsure at all n locations
  Clone ID: MRT4577_101733C.1
acgacctttctagagatcatcaaggaggatttcaacaggagatattcaaganacgaggctggaacgcatacatacatggtgggtcacacnaaatctcnaacccantcttatataccanattcattacttcacttatcacccaaatgaggtgagcaagctgttctattaaaaacccacgtggatcaaatgaaaagcatcatgatccaaaacatacacaaggccttttatcgctcacaccagatcgaccaacttcccacaaggacgcatcaactccactacgagtccgttgatctcatgcggcaaggcgtgcacctacagctcaagatgtgttaccagaacataaatgtga

SEQ ID NO: 1897 - DNA, 210 bp, Zea mays
  Clone ID: MRT4577_101734C.1
agccaaaccgagcggactcctccatggatcgctagtggggctccaagcccggcagctgcggcgccgtctacacacataatgagaccatcgacccgctgtagcgccttcgccgactggccctgtataccatcgaccttatcgaggacccctattttatgcgcatccacctcatcagctactagtgcaagctgtgcctgacactgtacaaca

SEQ ID NO: 1898 - DNA, 173 bp, Zea mays
  Clone ID: MRT4577_101735C.1
ttcttttctgttcctccctcgaccccgttggggcaccttattcgtcgggtgggggcgtccttctcaccctttcacctctacaccaaccgtatacctggacggatccgttcccacctgtttcctgatccgtggaagtcaaaggggatatctaagcttgagcatttgcagccatt

SEQ ID NO: 1899 - DNA, 439 bp, Zea mays
  unsure (1)..(439): unsure at all n locations
  Clone ID: MRT4577_101736C.1
cttactcttcatttcatatcctcttctattttttttccacatattcctacacctcacgaggggccttactattaccaccagggcatcccccactctccattcacntcctcacaatccatcaacttcctacaaaacctcctcaacaatcctccaactcatatgttccaattctattaatcttccctctcacaataatcttactattatccactattacatacacctatcaaacaccctcaaaacttttaaccccctcttcttcatccactttctattccataaccacatccttttactatttcacctataaatccataatttacatttacttacattatccactttccattaatcaccctataacattataacacaataccttatctttaatactacaattttcattctccataatcttaatttatataaattttactta

SEQ ID NO: 1900 - DNA, 2916 bp, Zea mays
  Clone ID: MRT4577_101737C.1
gccggccgggctttgaaaaaaaaatgttaagtggcagatgaggaagctgaagaaattgggcaaagttgttaaagacatgaggtacacaatctactctccgttggatggccaaccttgtgctgatcatgatagggccagatgcacacctttgtagacactggtaatatgcatgggaaagaaagtatcttcagtaaggccacctgccatgacaaattcattgtgggattgggtgttttgtgagggcccggcaacaataagcgagaacactgtggctcggtagaaaaatttcaagctccaacttgaggatatgtatggattttatgaccttgagtctgctgaagacttcatccttacagcttggtctgcttttaatcttaaacaccaacacctatccagggtccctgaaaaaccaacctgcttatgtgagctatctggcagtgatttgattggtttgccactgaaatctcctcttgccttcaatgaaacaatatatgctcttccaatgctcactgtcttgactgacaaaggtactggcattgtgactagtgtccctagtgattcacctgatgatttcatggcactgcaagatttagtcacaaagccagcattgagagcaaagtatggagtgaaagatgagtgggttcttccttatgagattataccaataatccacattcctgaatttggagacaagtcagcagagaaggtttgccatgatcttaagattaaaagccagaacgacaaggagaagcttgctgaagcaaaaagaatgacatatctgaagggatttactgatggaacaatgattgtaggtgagttcagtggtagaaaggttcaggaagcgaaaccgctgattaaaagtaagcttttggaagaaggcacagctgtgttgtatagtgagccggagaagaaggtcatgtctagatctggtgatgaatgtgttgttgccctcactgatcagtggtatataacttatggcgaggctgaatggaagcagaaggcagtcaaatgtttggaccgcatgaatacattctcaactgaaacccgcaatggttttgaacatacgctgggctggctgaaccagtgggcttgttcacgttcatttggactcggtaactcgaattccatgggatgagcagttccttgtagaatctctttctgattctaccctatacatggcttattatacagttgcacaccttttgcaaaatggtaatatgtatgggaaagaaatatcttcagtaaggccagaagaaatgacagatgaagtctgggatttcgtgttttgtgatggcccggcaccaaaaagcgagatccctgccgctctgttgaacaagatgaaacatgaatttaagtattggtatccatttgatatccgtgtgtctggtaaagaccttattcaaaaccatttgacattctgcatatacaatcatacagcacttcttcctgagcaccactggcctattggtttccgctgcaatggacatctaatgcttaactctgagaaaatgtccaagtccacagggaatttcctaactctggaagatgccataaaaaagtactcttctgatgccactagatttgcccttgctgatgctggcgatggtatggatgatgcaaattttgtcactgaaactgcaaattctgctgttatgaggcttacaaaagaaatttcatggatggaggaggttacagctgctgaatctaaattaagaactgggccgcccactacatatgctgaccgtgtgttttcaaacgagatgaacattgcaatcaaagaaactgagaagagctacaatgctttcatgttcagagacgccctgaagtctgggttctatgacctccaattggctagagatgagtacaggctctcttgtggtgcagcaggcatgaaccgtgatctgttgtggcgatttatggatgtccagaccaggcttatcacccccatttgcccacactatgccgagcacgtgtggcagaagatcatgaagaaagaaggctttgcaataaaagctggctggccagtcgcggacaccccggatcctacactgagaattgcaaataaatacctgcaggattccatagttttgatgaggaaactgcttcagaagcaagagtctggttctaagaagcctaagaagggagctgcaccggcacctccgtccgaggaaaagaagatgagcattggtctcatatatgtgaacgagcactactctggatggaaagagcagtgcttgagggtgctgcagtccaagttcgacagccaaagccgctccttctcacccgatcaggaaatagcagaagctctgaaggagtgccccatcgggcaggaaatgaacctgaagcaggttcagaagctgtgcatgcccttcatcaagctgaagaaggacgaggcaaaggaggttggtcctcaggcgctggacttgaagcttccgttcggtgagatggatgttctccgggagaacttggagctgatcaagaggcagctgggccttgagcaagtcgaggtgctctccgcgtcggacgaagctgctcgcgctaaggctggtgaacatgcttcgctgctggagaagaacccaccatcacccggcgaccccatcgccatcttcctcagcaaacagagctgaaaactgaacttgcatatggcccttttgttatttacttcgccgcacatttgcctcttttttgtttttgtttttgtgaaaccagtttcgtgtctgtcaacagagtatgttgtccttcggtttggtgaaaccagttttttttttctgtcaacagaatatgttatccattgtctgggtaaaccagttcggctattgtcgacaaagtatgttaaggtgatgcggctttacatcaaaaaaaaaaaaaaaaaaaaaaaaaaaaaaaaaaaaagtactctgcgttgttaccactgct

SEQ ID NO: 1901 - DNA, 446 bp, Zea mays
  Clone ID: MRT4577_101738C.1
aaaaactggcggttttttttttttgtttttttttttgggtaccaaaccacttttttccccttttggatcccgagttaaaatttttccaaaaaaggggggtttgggaatttttttaatcatgcaagggggggcttaagcatccaaattccccctaattgggggaaaaaccaaaacccttttgtttggggtttaaacttgccctttttgggggcatttcaaagggctcccaaaattttgtctttttttttcccccccccgggggttcctcccttttcgacttttttcaatgggcccgtgctacttttaaaaagttttaaccaattggaccgggaccttgttgggggtttctggggccccatttttgggggggcccgctccattaaattgttttaggggttttttgttaagggtttctcccccggaaaaaaattgcccgcccgggtttt

SEQ ID NO: 1902 - DNA, 726 bp, Zea mays
  Clone ID: MRT4577_101739C.1
gccggccgggtcgggcacttccgcttcctctcagtccaaccgcccctcgtgcccaccgctcctacaatggcgccatccgccgctaccgcgagcatcctcctcgccctcatcgccatcctactcccctccgtaacggcggccgcggcgctgcagatgcggcaccgcctcggcgcgtccttgcaggtcgcctccctcaacgcgtcggagccgccgaccaccttcttcgaggtcgatcgcccgatccgccctccgcgcggcagcgcggggccttgctccacgcttctcctctcggctaccttcggcgccacatacggccgtccccccgccaccgccgcctacgcgccgccggcctgcctcggcgacgcgggcggcgccggtgccctcgcgctcgccgtgctcgagtgggccgccgactgtcgcggccgccagttcgaccgcatcttcggcgtctggctctcaggcgccgagctcctccgcagctgcaccgccgagccgcgtcccaacggcatcctctggtccgtgtcccgcgacgtcaccaggtacgccgccctcctcgcggagcccggtgaggtcgcggtgtacctcggcaacctcgtcgacaaaacatacaccggcgtctaccacgccaacctcacgctccacctctacttccgcaccgattcgcagcccgagacgcagccgccaccgcagcaacagcagcaggctgatctgaatgggcccatttca

SEQ ID NO: 1903 - DNA, 2269 bp, Zea mays
  Clone ID: MRT4577_10173C.1
ggcgggcaattccttcaccgacacgaaagggcgtcccttgctgcacatatatgggccgggcgtctccgcccggggaggcattgcattgtgcattgcattgcataaacctctcgtgggaagtgcaaacaccaaatccgcaatctatctatctatcagccattcaggcctgcaggctgcagctctctccactgcacactagagcgagctgccacagacaaggacacaatgccacccatacccaagagaggcgagcatctcctggtcctcctaattgtcgcatgcgctgccaccgccgccaccgccgccggcaccgtccccttctacccgtccgcggagtccgccgccgccgcgcactgcgacggcacgctgtacccggagctctgcctgtcgacactcgcggacatcccggacctacacaagaagccgctcccggacgtcatctgcgcggccgtgaaccgcaccgaggacgtggtggtcgccacgtccagcaactgctcgtactacctgcaggacaggtccctgtcggcgcgggaccgcctggccatcaacgactgcctggagctgctgtccaccacgatggacgagctccgcgccagcaccgccgacctggcgtcccccgccggcagggggtcggcgtcggcgggcgtgtcgcagggcgccaggcgcgcgacgatggagcacgtgatgacggtgctttcggcggccatcaccaaccagtacacctgcctcgacggcttcgcgtaccagagcggcgggcgcgtgcggcgctacatcgagccgaccttccaccacgtgtcccgcatggtgagcaactcgctggccatggccaagaagctgcccggcgccggcgcctcagcggcgccagcgccgccgcggcagccgttcacggggtacgggcagatggtgaaggggttcccccggtgggtgcgtcccggggaccggcgcctgctgcaggccccggcgtcggccgttgccgccgacgcggtggtggccaaggacggcagcggggactacacgacggtggcggcggccgtggcagccgcccccaccaactcgaagaagcggcacgtgatctacattaaggccggcgcgtacatggagaacgtggaggtcgggaagaagcacgtcaacctcatgttcgtcggcgacggcatcggcaagaccgtcatcaaggccagccgcaacgtcgtcgacggctacaccaccttccgctcggccacagtcgctgtggtgggcaacaacttcttggcccgcgacctgacgatcgagaactcggccgggccgtcgaagcaccaggcggtggcgctccgcgtgggggcggacctgtcggcgttctaccggtgcagcttcgtggggtaccaggacacgctgtacgtgcactcgctgcggcagttcttccgcgactgcgacgtctacggcaccatcgacttcgtgttcggcaacgcggccgtggtgctgcagggctgcaacctgtacgcgcgcaagccgctgccgaaccagagcaacatcttcacggcgcaggggcgggaggaccccaaccagaacacgggcatctccatccagaggtgcaaggtggcggcggcggccgacctcgccgccgcccagtcctccaccaagacctacctgggccgcccatggaagcagtactcccgcacggtgtacctgcagtcggagctggactcgctggtcgacccggccggctggctcgagtggaacggcagcttcgcgctcgacacgctctactacggcgagtacatgaacacggggcccggcgccggcacgtccgggcgggtcaagtggaaggggtaccgcgtcatcaccagcgccgccgaggccagcgccttcaccgttggcaacttcatcgacggcgacctctggctcgccggcacgtccatccccttcaccaccggcttgtgagcgcgcggcggtatgtactatacgaggggtttcacggcaaagggatgacaataaaccaaattggcggcggcggaagttcgtcgtttgtacgttcgttcatttcaatcagagctaaaaaaaaggcaccgtatcgatccggtcgatcgtgttactgtagttgattattttgtgcttggggacgcaggccaatatatttatttaatttaaccgtcccatatatatgtacacgtgcttgttatgattcggtgtattatttatatgtattgatacggtatcaatatataattaataatgatacgggttctaataaaaaaaaaaaaaaaaaagggcgccgctcgcgcccacgcgtccg

SEQ ID NO: 1904 - DNA, 461 bp, Zea mays
  Clone ID: MRT4577_101740C.1
gcgtccggctttccctgaggctccgcacctggcgctggggtgcatgcttgggcgctatatacgacgggtggatacattgttgggttactgttgggttccactgccgttgcatacctgaccgacacaccgatttctgacaagtcggaattcggaggttggacccgcaagtctgagtatggctaggagtggtggctagccatagtgaccaagttgcaggcctgttctgtgactgctgtgacaccggttggcatgaaccccgttagccgactgaactggatggtatagtgcactgaacccgtaagggctggggaagctggatctgctacttgaggccgtcgtgcacccagagttgcttgtatacggtctatatcaatagctatgatatgactgacaggcaggggaaccctgcgatttgttactgcgatctgcgagcgaacactgagatcatacaccttgtgatc

SEQ ID NO: 1905 - DNA, 480 bp, Zea mays
  Clone ID: MRT4577_101741C.1
acaataacgccaatcttaataacccagtttcaaagcgggggaataaagtcttacaacgtcggttgttaaccacacaacggctgatagataaaaaccgacagaaacataacacgataggagccactcacggcggatcacacgtatagcaggggcacacatagcccgacgacgccgcgccagttgagcgtgtagtactcgctaccctcgtccccatgctaacttttctaaaacttaccacacacctcctcttaatccttatggagcgcagccagatactcacgaacctcccagaactaatgactcactctataccctcaccgacgtaccagtgcacgaaggcgctcttgaagcacattaggttcaacttttgttcaatggtggagaaaaccttcacaacactggtggagatggagatcatgtcaacatcacgcttctccttgggcatatcaccggcgaaaaccaccctttgaggatgggagt

SEQ ID NO: 1906 - DNA, 578 bp, Zea mays
  Clone ID: MRT4577_101742C.1
ccggccgggatgtatgccgcgatccacgtacgagccgtgctcacatgatccgactgcgtatgtgaggctcgtagacgtctgtaccaggcaggataggcgagaggcaacaccgcatgcgagtactgacagagattccgagcgagagagagagatggacgtgtagaggaaggcggtggatgcgcacgacgactgtcgtgtttgaacatggacggtgtggacggggacgacttacggcatcaccgccgtgataatgctccggtcgtgctgcgcgctgcacctggagcgaggcgttcatgggctgggacttcgtgcccctcgcggcctcgacctctgccgctacgtcacctactacgccgtggccttcctggaccgctggtatccgtccgcgcggcgccgatgtgcacgaccacaggctaccgcgcacttcatggacgacgcgcggtcttgcatggtatctgagcatgcgcaggtgtgcctcatctcacagctacggcgatgcctctccacagaccatggttatcttcacgatctccactgccacgatcatcatgctcggctcgcacacgcactggcgccac

SEQ ID NO: 1907 - DNA, 256 bp, Zea mays
  Clone ID: MRT4577_101743C.1
taggttggtaggagaagaccctgccctacaccggcatcatgcatgcacctagacaacatggctacctcctagaagagaccgggtgtgagcgacttgcatttattcatgtcgtggagccctcctactatggggccgagcactcgtcccagttgtacaaaccatgaggtcttgggggggtgtgttacaagcgagactagtcgggcaggtaaggccctgagtatatacttgttagaagctggatgcccaagttaggcat

SEQ ID NO: 1908 - DNA, 257 bp, Zea mays
  Clone ID: MRT4577_101744C.1
atggcgaagacgctggaaaaaggccagtccatcgacgacatgatccctgcgcaaacgtaagcgccgcacagagcgcaccagtcagcggcttgcagctggtgcaccgccccctggaagtccaaccaaccgactttgccctctgggttctggccaatgagaacctgcctctccggggcaccgcccgcctgctggaactcctgcacttgggcgctacttccccacgccctaccttaaataaaagtccgtggtggtcttaa

SEQ ID NO: 1909 - DNA, 476 bp, Zea mays
  Clone ID: MRT4577_101745C.1
tcgaggccggccggggtattcattctagcagacacgtcgtggcccagaatttagttgcttgactgggatattcattgactttgtgttatttatttgattcagattaattacagggactttttgcagtctcctctgcagcctctaatggacaatttggaagctcaaacttatgagacatttgagaaggatgttgtgaagtacactcagtatcgaagagcagttgctaaggccttggttgatagggttgctgatgatgcagtctccacaactaggacggtgctgatggttgtgggagcaggacggggacctctcagacgagcttcatacgcacggccgtgaagaaactggtcttttttttgccccgcacgccgaatgagtcccgaccgctcgccatcacccccatgggcgggatgaaacacagccgcacgctcaacccgggcggatgcaccagatctacaaactgagaatgattccgc

SEQ ID NO: 1910 - DNA, 377 bp, Zea mays
  Clone ID: MRT4577_101746C.1
agcagacctgaaagaaatctttattataattcatgccccccacaaactctactcacttcttcttagctatctcttcttcataaacttttaaaacattcacttcttaatactcctaaaaattatttttttttttctttctattcttcattataccattcacccattaccattttaattctttatttattaacacatacatatcatcatacaactaccattattcactccttctttaaataatatattaatatcaatttcttttttcaccttaataaatttattctctttctccaaactcccatcttttcttatcttaaatatcaccttctttaaccacaaaactatatattgtttctcaaaacatttattgctctttt

SEQ ID NO: 1911 - DNA, 263 bp, Zea mays
  Clone ID: MRT4577_101747C.1
tgccggcaggaagacctaacacccaaccgtgccggggctgcggaccggaacgggacaggaccccaaaatcttagatgcttgctgcccgcccgcccgtgcccgaagacgcgtggttctttccggccggaccccacatacccttcttgtcttcttcagggggatcagatacaacccaagctgccctatggtgctgtggggcttccggtacagctcccttatatggtaccccggcttcaaccttgaccacaaaatactaggcttca

SEQ ID NO: 1912 - DNA, 1769 bp, Zea mays
  Clone ID: MRT4577_101748C.1
acgggccgctggacacccaaatccagtggttcaggcagctgctcccctccgtgtgcgggaagggtacgtgtacgtcgatgcatgcataacaccggccgggttaaagccgaacgcactctaaaaatctcccgtgcgcggcacgacatggccgcaccgcctagacacgggtcgcgcgcaataacccaccgatcgagctgagcacgcacgacctggcgctcgctttaaactctcgctctcaatcgtcgtcgcctcgggctctcggcagacagctgcggcggcgtgcctggcagtgacaggctgacagcagcggtaagtagccagccagtctagcttagccaccacactagtgtgatggcgaccaccggcggcggcaaggcggcactggtgctggggcggcttctgcttctgctgtgcgtgctcggccatggagctgcgcagcggtacaacgccatctggagcttcggcgactccatctccgacaccggcaacctctgcgtggggggcgggtgcccttcctggctcaccacggggcagccgccctacggggagaccttcttcggccgccccaccggacgctgctccgacggccgcgtcatcgtcgacttcctggccgagcactttgggctgcccctgctgccggcttcgaaagccggcggcgacttgaagaagggggcgaacatggcgatcatcggcgccaccaccatggactttgacttcttcaagtccatcggcctcagcgacaagatctggaacaacgggccgctggacacccaaatccagtggttcaggcagctgctcccctccgtgtgcgggaaggattgcaagaactacctgtccaagtccctgttcgtggtgggcgagttcggcggcaacgactacaacgcggcgctcttctcggggcggtccatggcggaggtgagagggtacgtgccccatggtggagagcaagctcgtccgcggcctggaggcgatcgtgagggagcggacccttggaacctggtggtgccccggggtgctcccccatcggctgctttccccatctacctcaccctctacggcacctccaacgccgccgactacgaccgcgacggctgcctccgcgcctacaacggcctctcctcctaccacaacgcgctgctgcggcggagcctgtccggcctgcgcaggacgtacccgcacgcccggatcatgtacgccgacttctacacccaggtcacccacatgatccgggcccctcacaacttcgggctcaagtacggcctcaaggtctgctgcggcgccggcgggcagggccagtacggctacaacaacaaggcgcggtgcggcatggccggggccagcgcctgcgccgacccgggcaactacctcatctgggacggcatccacctcaccgaggcggcctaccgctccattgccgacggctggctcaagggcccctactgcagccctcccatccagcactgatcgagctagctgggccgggggactgaatagctaattaagctagcagcatattattcatgagtgacatcatcgtgctttgtttgtttacggctaattgccatgtgcatcatcctagcgctctagcaggttcatcaatgatgggtttgctatttggtttgtcaattagttgttcaattggtgaggaaggggtagctggtgtttcggcggtgtggtgggaacagtgatgaataaacgtgtaatggactgtttacaattagctacgacgtacgtgaacaataagctcaaaaaaaaaaagtgcgttcttt

SEQ ID NO: 1913 - DNA, 326 bp, Zea mays
  Clone ID: MRT4577_101749C.1
cggacgcttgagcttcctcgcccgatttatatctacatcttcccgagcaaatactagggtaaccgctaccttttcagaccacctccaaggctcttaatgtatcttaacactctcaccaatcaaattttcatgtctgatctcgacattcatatcccaactaccttcaatcccttcgcttagaccaatgctctggactctggtgcgtcatcagggtcaaaggactacgtacacgttcgcatccagcagcttaatgttctcaagagccttaccaccgtccattgattgaataataagttcatctacagcaagatcctcaaagatctcaa

SEQ ID NO: 1914 - DNA, 478 bp, Zea mays
  Clone ID: MRT4577_10174C.1
atcctgaggcttgttagcctcgcccttaacaaagttggacaatgggttaggttgggcattaagttggacattgcctccctgtcggaagccaatgccatccttaatgccagggcgtctccctttatagagcatgcttctagcaaatttaaattgttcgttttctaagtcatgctcggcaattttagcatctaattttgctatgtgatcattttgttgcttaattaaagccatgtgatcatgaatagcatcaatgttaacatctctacatctagtgcaaatagtaatatgttcaacagtagatgtagagggcttgcaagattttaactctacaaccctaagcatgaatatatcatctttacttctaaggtaaaaaatggaagcattgcaaacatctaatttcttaagccttagcagaccaatttttcatttctcaatcctacaagctagcaagagtaaacactaacttcttgattcttag

SEQ ID NO: 1915 - DNA, 326 bp, Zea mays
  unsure (1)..(326): unsure at all n locations
  Clone ID: MRT4577_101750C.1
gtttaaatgcgtgggcggacaccagcttcgaccgggggcgcttttaaaggatagcgccggttcataccacaccannacgcaggagcggcccggcggcggcgccggcaaagccaaaggcaagaacgtccgggcgcgcgccgaagaagagcgacaacaccaagcactacgagatcctcggggcgcccaagtcggcggcccaggacaacctaaaaaaggcctaccgcagggcagctgtcaggacccaccccgacaggggcggggacctcgagacgaacaaggagctcgcacaagcctatgaggtgctgagtgatccagagaaacgtgag

SEQ ID NO: 1916 - DNA, 792 bp, Zea mays
  Clone ID: MRT4577_101751C.1
cctcgaagccggccgggccgggtttcgagcgagcaagaggcctcctcctcaatcttcgaatcctccccttccgcgctttccctccccctcctcctcctccccttttcagttcccagcgcagggaagattacaaagacggcccaacaccaacggccggctcctgtgaatgagcaaacccctgctcgacatcttcgccgtccccaatgacaccttcctgacaaggaaagacatcaagttgaacaatgctattctcgctgaagataagcacttgcctatgtatgacgagaacgactagaaagaggaatggtgaatatatgtagacacatgacccacccacaactctatcacgagagcgcaatgaatgatacaaactcccgccgctacaagctacatgccatgaattggaaaggacaagattggtgagtaaatgaaaaacaactgtcaagctggatgaggtactgctcattactacgaggatgagactgctcctactggcacatgtgctgtatgtgttgatggtggagaaacgtcattgattgcatagctgtgagcgtcaaactgttgacaatctatagcatctagagagaccagactaactgcgtgactaactgaaaaggtgaaatacatctacattgctggactcttcattagcgagtcggctgactctatccagctagtggtgtgatctgatgccaaaaataacaaggtgttcctgatgaacctctctgctcccttcatctgcgagctcttacgcgatgcccaaaagaacgacctcccgtatgctgactacat

SEQ ID NO: 1917 - DNA, 115 bp, Zea mays
  Clone ID: MRT4577_101752C.1
aaaaggccgggccacgaacggtcgctgttttgttcctccgaacacgaactactgcaatcctctaaggctatgtcaaatcacagaatcagtctaatctgcatgttgggcgtcgttt

SEQ ID NO: 1918 - DNA, 328 bp, Zea mays
  Clone ID: MRT4577_101753C.1
aatatttccctttttagtaaattatttttgtggttattttaaaataaattgtgggttttacacgtaacagcaaattgctgttttttatagacaggcccatacacagcagggatcgtgccacaggccccagagacacattctttttcggaacaaaacaaaacaccaaaaaagaagagcatacaccagaagtcccagaaaatagaaccgaccaccgaccatgaggatcacccccagggagaaaaaccccacaaacactgaaaaaaaaaaccgacggtggaaaccgcccaccccccatgttgggtcaaaacccagaccaccggcgcccggg

SEQ ID NO: 1919 - DNA, 536 bp, Zea mays
  Clone ID: MRT4577_101754C.1
actggggacacaatatatatagggggccatataaagactcttactttttcaattaacctagagaccttatttttaatttacataccctcactccttatcctccgtcgcgggttcgtacggggcccgttctgctgccgcgaccctttctccgaggttcgcttctcatcccctctcgcaggggagacgacccgactccgagatctctccccagcctttcgccttctctattccctcacttcgtttgaggaatctcttctctagtctgaagttctgaatcccggccttccttttttccacttcgattcgatacccggatggcgtcaatccaggcccaatgatggcgccaggactaacattggtcagttttggatacaaataacctaacatgcttaaaacctgctcaggatttgggattaaacttatttcttggggctagcgacagaccagcgttagttgggctccttgggcacgcccaacaatcagaatggattacctaattgtctgggcttggcaaggaatttgaactgaggtttttt

SEQ ID NO: 1920 - DNA, 357 bp, Zea mays
  Clone ID: MRT4577_101755C.1
aaagaacaactagctctttgcttgcgttatgttgatgcattgggaaggccatgtgaacacttcattggagttgttcatgtagatgatactagctctttatcacttaagaatgcaattgaagctttacttgttagtcatggcttgactttgacacgaattcgtggacaaggttatgatggggctagcaacatgaggggtgatattaaaggattgaaaacattgatcatgcaagagtcaccttctgcttattatatccattgttttgcacatcaactccaactagttcttgttgttgttgccaagggaaataatgattgtgtgtggttttttgatcaagtaactctcttattgaatatt

SEQ ID NO: 1921 - DNA, 1230 bp, Zea mays
  unsure (1)..(1230): unsure at all n locations
  Clone ID: MRT4577_101756C.1
gggacttggagtcccgtgcagcagtatagtcagcagcacacgcggtgattgcaagaattaggagggcgacaacttgccatgttaattaccaggacgaaagtgattaagaatgactatgaatctgactgaatctccaatgtaatatttcaattttatcttattttataactctgtgtaagttaaactcaataatgactgtgtgactgttcggaaaatagtggacacacatgaccaaccaattgcaatatcgtagttgcgctgattgcaactgtatgtatacactgaataatacatgaatctgtgttatctgtttacatctcgacatataattaaaatatatcttgttttattatcatataacagttgctactactcataaacaggtttgcaaagtttgccatcatgctggttacaaaatatagaaataaaaaggagtggtcatggtcagttgcaactacgattacaatttcaattgcaactgtaacatatacgctggctgcaactgcctcacatggaagggctccacctcgccggtgggtacagaacaccaacatacacactggttgcaactgcaaaaccatacactgttttgcaactacgattataatctagttggaactctaaaacatacactggttgcaactgcaatgactgggatttttcaaacaaaattggaaactgcagtttagagtacgataacaactagatgaatagaccagttgcaaatggaaccagtgcactggttgcaacctaaacaacattactggattgtttctggagataacataacacaactgattgtttctgactactgcataacacaacaaattgtttttgcatgaatctaattgttcgactgactactatcccattcaattggcaacggacgaccaccaattctaaacttatcaagcgaactaggaatttcagcttggttcaaagggtagaagatctcgtaatgcaacagctcacatctgtatatcgggcccttgaacggattgatttccttggtcattttgtccccatcataatattccatgtacttccatacaaaaaaagacaatcgctttgacctgcttgctttggcacatcaataaaaggccgcctccacttgctaactctgggtaacttgaggttggaaactttctggaaggctgcatcaatgattgggattttggcaaagacaaccttgtgccgttcttcctgattagaaacattcangaagtagtc

SEQ ID NO: 1922 - DNA, 375 bp, Zea mays
  Clone ID: MRT4577_101757C.1
atggctggcctgctcatgccgtcgtcgtggctgccccacatgatctccctcgtcctccgctctccacccaacaccttcaccgccgacctagctctcgatggtgttcttgtctgggagcgacatcacgatatggccccggaaggcctcgatgaggcagtctacgagtgtgacaaagtcgtggaagcgacagagcacggaatggcggcgttagtcggggtcagcacaacggacgctggtgacgaggtaggagacataggtgggcgcggatccggggatgagcgaggtggcggcaggctcggcttcttcgggtcagaaacagtgaggagggcatactcagaggctatgtcgcgtgcggatctcggcgacgcggagtaa

SEQ ID NO: 1923 - DNA, 587 bp, Zea mays
  Clone ID: MRT4577_101758C.1
gaggctggccggggacctaggacgtgaagccttaggaattagatgggtagctaggtggctagttatataggccataaaggctactactctattaaataggatgctgtagaagcacccgaaaaattagttaggtctgagaagacgactagaatgagcatgcatcctgattgtcgcattataattgtctcttgtgcatcaacatgcttctctcacctttattccaagaataagaaattgtgaataatgtgttgtattgctatgaactgcaaaaaaatgtcttacctcgtgtcggattggtaagtcttgttaggtcgtgttatgtgtttctcttgtcttgctatctaggtggcattgcaattgttcaaccctttttgccaataaaaaaaaatgttgtctgttttgcccataaaagacccccactttaaccagcctagtggttagcaagtgaaacctcttaaaaaaaatcctgcttgtgttggtattttctagccctggtgtgtttgacacttgaagttacacctgcacagcttatagacccccacagcttgaccgctagaccaacccaagtctccttgtgcacctgtgcc

SEQ ID NO: 1924 - DNA, 1018 bp, Zea mays
  unsure (1)..(1018): unsure at all n locations
  Clone ID: MRT4577_101759C.1
ccgggtatcttgttttcttataatataacagttgctactacttataaacaggtttgcaaagtttgccattatgctggttaccaaaacatagatataaaaatgagtggtcatggccaattgcaactacgattacaatttcagttgcaactgtaacatatacactggttgcaactgcctcatatggaaggactccacctcgccggtgggtacagaacacaaacatatacattggttgcaactgcaatggctgggatttttcaaacaatattggaaactgcagtttagagtacgataacaactagatgaatagaccagttgcaaatggaaacagtgcgctggttgcaacctaagcaacattactggattgtttctggaggtaacacaacacaactgattgtttctgactactgcataacacaacagattgtttttgcatgaatctaattgttcgactgactactatcccattcaattggcaacggacgaccaccaattctaaacttatcaagcgaaccaggaatttcagcttggttcaaagggtgcaagatctcgtaatgcaacagcccacatctgtatatcgggcccttgaactgcaatggcataaaaacatcataatggtcagtgactatattatgatgcacacatagaaaacacacaaaaaaaagcaccaaaatagatagaaaatcagttgacagcatggctaaccggattgatttccttggtcattttgtccccatcataatattccatgtactttcatacaaaaaaagacaatcgctttgacctgcttgctttggcacatcaataaaaggccgtctccacttgctaactctgggtaactcgaggttggaaactttctggaaggctgcatcaatgatgggattntggcaaagacaaccttgtgccgttcttcctgattagaacaattcangaagtagtcgttcgagtccagcacatcaatacgcttatggataaaattgaaagcatatacaaaatagtgagcaccatctttgatagg

SEQ ID NO: 1925 - DNA, 777 bp, Zea mays
  Clone ID: MRT4577_10175C.1
catccccatgttgtaactgtggatctgggaacagagaaggcccgctggggtcttaacaacaagaagttcttggtccatccacgctggattgaagcagcaaatttccggtggcataggcaaccggaggaagattttcctgtcactgccctaaggaaaagagcaaagagaaagatagtgataatgatgtggctggcaagaaggaaacgagcgaggataaagagaatactgcagctggcatgaaggaaacgaggaacgatgaaggaaatgtaaccggtaaagacaaagctgatgccaaagaaaacgttgtgaccacatctgctacgtgtcctgcagactcgtagtctgtgttgggctccaaaggctttagatctgtccataaaaaaaagacgttacatctgctccattgcaaattttgctgctgacctgaagctgattgggcctccggccatataacttacgctacgatgaaactataggagttgaagcaaactgatgtctttatgggacaatttttggtgaatccgtgcgactatgtgcgcagatgtacttaagtttgtgcctgcttcggtaggtactgccccctgatgtaagcattcgtgatcgctagtggaactacgttattctagttgaaaaaaaatgttccacacataaattcttgccctggaaaaggcataggcgtaggtcgctatgatgttgccatacattgagtactaagtgatatgttgtccggcggagctgtagggcttttcgttatagtgatgaattgatgatggccag

SEQ ID NO: 1926 - DNA, 2526 bp, Zea mays
  unsure (1)..(2526): unsure at all n locations
  Clone ID: MRT4577_101760C.1
cgggtgtgatggcaactggacctacaccaccaccggaatcgggcctgaatccagattctgcaaactgcctcactgatctaagattgactgaaccgccagtgtcgcgcacgaagggtaggaagtctgccagtggggctaaatgtgctaaaaaatagtgtggaacctgctaatccatacagcacatatagtggtggtcagggcataagagagtgccaaacctgccatgttagggggcactatagcacaacatgccctcagaacccaaacagaagcagagcgaccgagaacaaggacaaaaagagaagtgcaaaaactgtaggttggactccaagaaaaagaggtcgcccaacaataaaaaaaggactagatgggaatcaagatgaggcacagagtgagggggatgatacacagcaatctgggtgcactatagcggtgcaggagtcagcagcacacgcggtgattgcaagaattaggagggcgacaacttgccatgttaattaccaggacgaaattgattaaggatgactatgaatctgactgaatctccaatgtaatattttaattttatcttattttataactctgtgtaagttaaactcaataatgactgcgtgactgttcggaaaacagtggacacacatgaccaaccaattgcaatatcgtagttgcgctgattgcaactgtatgtatacactgaataatacatgaatctgtgttatctgtttacgtctcgacatataattaaaatatatcttgttttattatcatataacagttgctactactcataaacaggtttgcaaagtttgccatcatgctggttaccaaacatataaataaaaatgagtggtcatggtcagttgcaactacgattacaatttcagttgcaactgcctcatatagaagggctccacctcgctggtgggtacagaacacaaacatatacattggttgcaactgcaatggctgggatttttcaaacattattggaaactgcagtttagagtacgataacaactagatgaatagaccagttgcaaatggaaccagtgcgctggttgcaacctaaacaacattactggggacacaactgattgtttctgactactgcataacacaactgattgtttttgcatgaatctaattgttcgactgactactatcacattcaattggcaacggacgaccaccaattctaaacttatccagcgatccaggaatttcagcttggttcaaagggtggaagatctggtaatgcaacaactcacatctgtatatcgggcccttgaactgcaatggcataaaaacataatggtcagtgactatattatgatgcacacatagaaaacacgcaaaaaaagcaccaaacagatagaaaatcagttgacagcatggctcaccggattgatttccttggtcattttgtccccatcataatattccatgtacttccatacaaaaaaagacaatcgctttgacctgcttgctttggcacatcaataaaaggccgcctccacttgctaactctgggtaacttgaggttggaaactttctggaaggctgcatcaatgattgggattttggcaaagacagccttgtgccgttcttcctgattagtacaattcaggaagtagtcgttcgagtccagcacatcaatacgcttatggataaaattgaagcaatatacaaaatagtgagcaccatctttgatagggacaaaaacctggtgcaagaaaggagtagaaaactaattactaaaaatggaaaacatatatgaaaaaagaagttgcaagaaaaaagtatagacagttgcaaagtatgtgtcctggtgattgcagctgtaaatgatggaaagtaaaaaattgtaggtatgaaaaaagtgggttggggaaaaggtctgctaaccaattttgctcttgacaaatcatagttttcgcactcagacatcaaattattccatacatatatgaattcttccgtctcagatttatcagcgttgagtattgcttcacacgttgatacattgaactgtatgtgttttccagtttggagaataaataaaaaggaaaaatgataaatgattaaattagtttaaacacataaatgcaagacagtatacaaaaaatacatggttttggagaagaaacttacataaaaaccagtggtcagaaacactctgtatccacaagaatcaaccttgtgcacaatatcatcatatcgcatgcagtgcacgaaaaagtctatgattcctgactcgccaagggtgtcattagaaaaagatgttaaaatttcctcgccagttagtccaacaagaaggccaaactccaacaaaattctcctgcatcaacaaaaaaaagaaaaaaaaacatatgngattagtgangaagaacagntagaatgtgcaactgctagagtgctgtgattgcaactgttggtctagtgtgatttcaaagtactgaataactctgggaaactcttttacacaaatatgattgcaaactactgggtgtagnataattgcaacta

SEQ ID NO: 1927 - DNA, 310 bp, Zea mays
  Clone ID: MRT4577_101761C.1
gcgtggggaagccttgacgccctgatcgggcgactacgggcggcttacgaggaaaacggaggccgccctgagtctaacccgttcggcgccagggccgtcagagtttacctcaaggaggtaagagaaggtcatgctaaagcaagagggatcccttatgagtagaagaagcggaataggaccatcgtggtgatggtgagtagtggtggtggtggtagtagcggtgcagttgcctctccgagtggcggtggtgataccgctattggtggtggagtcggttctagtgctagtataactcttcagcaatgccaca

SEQ ID NO: 1928 - DNA, 397 bp, Zea mays
  Clone ID: MRT4577_101762C.1
gggagccacccaggcagtgcccagaaacggagtctatcgtatggagcatacgcttcaggatcgccgatgccatgacagctggactgctcttgctgcaccaagcgaagacagaaccacttgatcaccgggacctgaagcccgccaacgttctggtataccactacttgctcagcaagatcagtgacgacacgctcgcgaggctgatgccacagtccgcggcctactttacgcggacaggatgacattgccgccgctaccttctgatacatctagccggaggtccaacagactggcgtgctcaccaccaagtccaacatgtactcggtaacattcatgctgctccagagcatcacggccaggagtgccatggggctcacgcaccatgggggagaacgcc

SEQ ID NO: 1929 - DNA, 798 bp, Zea mays
  Clone ID: MRT4577_101763C.1
ggaccctcgggccggccggagcagcttagttcagttttgtatttcctttccattgagcaattgctgtttcatgcgttgggttatccgttggaaaccgccatggccacttcaacttcgacagaacatcagtaccgaactgcgaccaataccatggccctcctttagagcattccatgaagctactgccagggaatattatcaaggaccaccaacaggatggcttggtcgactgggaatccgtcatcagctgatcgcgttgtatcactcaaaaattatcggcgtgtgaaggggttatgcgcctgttgtgctgaaaagtggttctcgggtcgtaaatgtgcagccacagtccaacagccccaactacatgccatggaggaggtgtggaatttgtttgctgaagaatttgttactgcacctgacgcagagtctattgaagcacctgatgatcagctgttcaagaacttgtctcattctgcctggttgggaactgaaacccatcagactccgaagctacatggtagtattcaacaacaacctttgctcattctattggacagtattagttctcatacaaatgtaaatgagcaagttgttgctggttctacaaggtgttcagacagtctctcatcctctgaaagtgtgggtagcaaatggcattttggtggcctatcgccatcagttacttcaagcccattggtatattcaggagtatggaatttgtttctaacatcatgtttttgccttctgccctattatgacaatggacgtgggacatggattggctagcttccttcaatt

SEQ ID NO: 1930 - DNA, 829 bp, Zea mays
  unsure (1)..(829): unsure at all n locations
  Clone ID: MRT4577_101764C.1
agggtccatcagttccgagtcccccccacccccgaaaaaaagataacctagggttagggttgcggcggcggcggcggcggcggcatcagctttattcccgatcccggtcgccgtgtccaccggagtcgcgccagagctggaggaggagaccgccatggccacaggagtcgcgccagagccggagaagaagaccgtcgtcttccccggttgggtgatgctggatcgcttcggccgcacctactgccacggcgacctagacgctgcttgtgaggaggccaataagaagaagaccgccgttgaagtcgtcacgtccaccggccaccactgcttcatgtcattcaccttctcggatcataaagaagggatctcttacctcgatctacactggccgctggaaggctcagccaaatccgagtcccccttcagcgtccacgcatatccctacctccgggcaaccgacaaggacctcgtcctcttcgacatctccctcccgagccagactagcttcttcgacctgccgccagatctgttcgtctacacggccgccggtccttccccctgggtgcagcggctccctctgtacattgaggacagggaaaggccgttcctgaggtctaacttcaccacgggcatcctgcgacttgcgcaccaccgcttcattgttgccgacctcaatgtctacctgngaaaaaatgagggctctcacgattgttccatgcttgccgagctctgtgtcttcaactccgagactgaagagtggaaagtcatcgagggagtgcccgncccgcagccccaggaccagagcaatggcggncagttccccatcctt

SEQ ID NO: 1931 - DNA, 766 bp, Zea mays
  Clone ID: MRT4577_101765C.1
accaaatgtcatcatgtcaattcagcaagcttcagttcagttttgtatttcctttccattgagcaattgctgtttcatgcgttgggttatccgttggaaaccgccatggccacttcaacttcgacagaacatcagtaccgaactgcgaccaataccatggccctcctttagagcattccatgaagctactgccaggtgggggtgttctagtttgctcatgcttccatcatggctaccttcagcttggtgttattctgggtaccaaagtgatgtgcagggaatattatcaaggaccaccaacaggatggcttggtcgactgggaatccgtcatcagctgatcgcgttgtatcactcaaaaattatcggcgtgtgaaggggttacgcgcctgttgtgctgaaaagtggttctcgggtcgtaaatgtgcagccacagtccaacagccccaactacatgccatggaggaggtgtggaatttgtttgctgaagaatttgttactgcacctgacgcagagtctattgaagcacctgatgatcagctgttcaagaacttgtctcattctgcctggttgggaactgaaacccatcagactccgaagctacatggtagtattcaacaacaacctttgctcattctattggacagtattagttctcatacaaatgtaaatgagaagttgttgctggttctacaaggtgttcagacagtctctcatcctctgaaagtgtgggtagcaaatggcattttggtggcctatcgccatcag

SEQ ID NO: 1932 - DNA, 1045 bp, Zea mays
  Clone ID: MRT4577_101766C.1
cgtcggggaggggggggtgatgaaatactgaccgtgtcccattggtccgttggttcgtcaggaccgcatgtaccgagcgaaggacggcgtcgacacgcccaacttcccggtctcaatgccattggcagcgcccttgccagcgtcgtcgccctggggtctccagagcggcgggtcgacgccgtatagtgccgaccggcgaaacacgcagccggtgcccacatagatgggtccctgaaggccgtcgaggccgagttcagtgcagtcgaagaagacgcggttgtggttcgcgtagcggtccgcggggtcgacgccgtcgaagcgctgcgggaactggacgaacgccacgtcgttgccgttgccgccctcgccgtcgagcatgtggcagacgccggcgcggagagcctgcgagttgttcacgtagtggtcgcagtcaaggttgaggatgaagggtgcgttggagaggacggccgaggcacggagcagcgcgttcagggcaccagccttgccgtggttcacgcgaccgcgacgcttctcccggcacatgtacaccagcgctggaacccgcacgtcgacggagcttaggtccagaagattgctgacaccgtctacggtgccgctgacgccaagccgtggcgtgctgccgggaccgggattatcgactagcaattcaacagctccggcatgatcttccgcggcgcctcgccgccagcagcttctatcggcagcgacggcgtctaccgccgcacgtcctccggcttgcagagcgtcgatccccacgcgcccgcccacgcgctcgcggcgcacgcgcctccggtcccttgccagctccggccacgccgttcccttatagtcagccctccacgccttgaagccattactggcgccggggctgaagtaggcctctgggttcctcggctccaccgcgtgcttccggcagaacggcacccacagtgcagagaaccgggcagcctcggcgaccgcgtcgcgcgtgagcagagcgccaccgtcgtccgagacgtagcacgtgagcttccggacgaatggg

SEQ ID NO: 1933 - DNA, 338 bp, Zea mays
  Clone ID: MRT4577_101767C.1
tcatctccgccgcaagaccgggaccgccatggacgtcctctacgctttcactcgccactggccgcaccctctacgggttcagaggctaggataagggcctctgctgatgccaccactggttaggggacatgtctctgtgagatgatttctgacgaagaattgctgccatagatgagtaatccatcgcttctgccatgaagcgctttgaagcgtgctacgtatgtggtgtctgagagggattgtacttctgggatgaacagggaatcttcctgaattttgcataataccagctcattctcggtactttctgatgcgagatcagagaaaactacgcggcc

SEQ ID NO: 1934 - DNA, 351 bp, Zea mays
  Clone ID: MRT4577_101768C.1
ccgttcttttttgctctgtttcttttggacaattattggggaggctaggttgacggtgccgaggatgactgctcccatgagcgcggtgttgctgtcgaacccggctcgcttggaacagcacgggcgagacgacggcgaagacgaagacccccgagagctgcaggaacagcgggaccgccacggacacgggcaggaggagccggagcacccgccggaggaccccgcggaacgcgccctgctcgagggcgcgcgcggcccccacggagcgggccacgtactccagctccgcgtccacggcccccccagaacccctgaccctcctgagggcggtgcgggccctcttcgggcgcc

SEQ ID NO: 1935 - DNA, 185 bp, Zea mays
  Clone ID: MRT4577_101769C.1
tctacactggggaccctagaccccaagcaccggcgcggctgcggcggcttccatggcaatcgggaagaacaagaggatctccaagggaaagaagggtggttagaaaaagaccgtcgattccttcttttagaaggactggtattacattaatgccccatcggtcttcaatggtggcaacaattgga

SEQ ID NO: 1936 - DNA, 752 bp, Zea mays
  Clone ID: MRT4577_10176C.1
gtaccggtccggaattcccgggtcgacccacgcgtccggtaactgtggatctgggaacagagaaggcccgctggggtcttaacaacaagaagttcttggtccacccacgctggattgaagcagcaaatttccggtggcataggcaaccggaggaagattttcctgtcactgcccctaaggaaaagagcaaagagaaagatagtgataatgatgtggctggcaagcaggcgcggagcgaggataaagagaatactgcagctggcatgaaggaaacgaggaacgatgaaggaaatgtaaccggtaaagacaaagctgatgccaaagaaaacgttgtgaccacatctgctacgtgtcctgcagactcgtagtctgtgttgggctccaaaggtatctgacacattgtgtaggcgtgcaggtttggtatgggagatgaaaattcagcttttcttatccgttcgtgcaggctttagatctgtccataaaaaaaagacgttacatctgctccattgcaaattttgctgctgacctgaagctgattgggcctccggccatataacttacgctacgatgaaactataggagttgaagcaaactgatgtttttatgggacaatttttggtgaatccgtgcgactatgtgcgcagatgtacttaagtttgggcctgcttcggtaggaactgccccctaatgtaagcatttgtgatcgctagtggaaataggttattttagttggaaaaaaatgttccccccac

SEQ ID NO: 1937 - DNA, 700 bp, Zea mays
  Clone ID: MRT4577_101770C.1
gggtacctcgaggccggccggggccttgccggcttgccgccggtcttatctcccacggcagctgagcacgtcgagctgcctggttgtttctgtccgccatggtccgcccagccgaggtctcgcccagctcgcctggccgctgcgcagccccctcggcttcatctccctccttctgccctctgccggcgctccaactttcctcccatggcgcgcccagctccctctgctcggtgctctctcgcccatggcacgcagccgcgtattctcgctcggcctccagctccggcgcccggctgagttccctggcgcgcgcccctgttcttcgttcccacgcgcgcatctctcctggccgccgagctccctttcctgtggtggctgtcttcctctgagctcgcccccgacctctgctccttcctcgccgtagagtttccttgccgtgcccctgctcctctcttctctgcgcgcgcttctccttgctgcgcgcatcggtctccagctcgcggagctccctagctcgctccctcagctcgccggcgctcctccctgtttcagctcggtgcccagccccagctcccgggtccagctcgtccgcgtcgtctggcgcagtgcttgccccagcgccatcagtcttctatccagcttcaaccccaccggcggtctctaggtcgtcatggcgctggatttcttcctcggggcatcc

SEQ ID NO: 1938 - DNA, 292 bp, Zea mays
  Clone ID: MRT4577_101771C.1
cacggtgcccgtgatcgcgtcgggggtgtgagttcgcgtcggcgcaaggcgaggagtgcgcgcgcctgtcgcggtggaccgtggccatcatgagcgggctgctcctgatggccgcgctggcgggcttcgtgggcgcgtactggatcaggcgcggactgctggccttcaatctcgtcgcgatgacttcgcgcgtggtactcatcatctcactcctcgccatctccgacacagtcatgcgcgggtccggcgcctacaacgtgcacagctgcacatacaactactatagcatcga

SEQ ID NO: 1939 - DNA, 482 bp, Zea mays
  Clone ID: MRT4577_101772C.1
tttcttttttaacatagaaacatctggtccacgcattattttttatatatatacgtggctaacagacagctaggcacgacatgtcacagtaccacgtggtatggaaagggaactggagagacgctcacgcttcactatactatgatagttgatcgactccgaagacacgtacggagctaacgtagatacctaacagcaagagcttgccattagctgggtctgaaacgcaccactgttgcaccgctgcggggcaagcatcccattatttgccaccatatacttaaatagcagacgatcttaaattgtacttgttctgcctgaggatgagcttcgtcacaatctagcttgatgcttcccttattcttcacatgcatctgcttgttcatctctgtgtgatcatacaccatttattgcagctgtgccaggagaggatcccattcattgacgccacatacgtcatgatgcagactgatgcacaatgg

SEQ ID NO: 1940 - DNA, 221 bp, Zea mays
  Clone ID: MRT4577_101773C.1
gtcttgctctgcggtttgatttgcttcatctttttttcttcaatcttgtcactcctaaggtttcccccctctggttttcttgattccccgcttgggaatttgtgaagtttaacaggatttttttggctgagcttgcatgtttctgttcttggccatgccccatgctatgcttgcttggataagctttggcttcagcctagctcgaattgcacgatgcgttg

SEQ ID NO: 1941 - DNA, 377 bp, Zea mays
  Clone ID: MRT4577_101774C.1
aaaaaaaaaaaaaaaaaaaaaaaaaaaaaaaaaaaaaaaaaaaaaaaaaaaaaaaaaaccaaaaaaaaaaaaaaaaaaaaaaaaaaaaaaaaaaaaaaaaaaaaaaaaaaaaaaaaaaaaaaaaaaggggcggccgttttaaggaacccaagtttacttccccggccttgcaacgaaaaactttttttttggggcccccaaatttaaatcaactgcccgtgttttaaaaacgtggtgccgggaaaaccccgggcttacccaaatttaatccctttgaaaaaaatccccttttccccggttggcttataaacaaaagggcccgacccattggcctttccaaacatttgcccaccctttatggcaaatggaacccccct

SEQ ID NO: 1942 - DNA, 336 bp, Zea mays
  Clone ID: MRT4577_101775C.1
gcactctcctgttccggccaccagcgtgcccagcatggtgcaacgctcgggtagaggagggcggagctggtcttcaggggtagcttgaactggcgaccggattggtttggagaccggtttgtccctgatttggtgccccaagtgcaagatggcccgagtgattgaactgaggatgccaggaaggtgcccatactacagatggcagagggagtattttgagaaattggtgaaggagaggttgattgccttgttattcgatgattgggaggaagatgatggagaggtggattccaagaaggtttctgaagtaagaaatagtgaagacattgcaacttc

SEQ ID NO: 1943 - DNA, 514 bp, Zea mays
  Clone ID: MRT4577_101776C.1
ccggccggggatcccctgtagctcttagttcttctcctctctctctctctcctctcccctctcccctctcctgttccggccaccagcgtgcccagcatggtgcaacgctcgggtagaggagggcggagctggtcttcaggggtagcttgaactggcgaccggattggtttggagaccgatgccaggaaggtgcccatactacagatggcagagggagtattttgagaaattggtgaaggagaggttgattgccttgttattcgatgattgggaggaagatgatggagaggtagattccaagaaggtttctgaagtaggaaatagtgaagacattgcaacttctgtttgtaatggttgtagtacctgtggtagtagtggtgatgtacatgttttaatgatctgtctgtaatgatgtatatgaacaattgaagaagttggaagggaaaaaaaaaaaaaaaaaaaaaaaaaaaaaaaaaaaaaaaaaaaaaataaaaaaaaaaaaaaaaaagcggcc

SEQ ID NO: 1944 - DNA, 537 bp, Zea mays
  Clone ID: MRT4577_101777C.1
ctctcctctcccctctcctgtcgcactctcctgttccggccaccagcgtgcccagcatggtgcaacgctcgggtagaggagggcggagctggtcttcaggggtagcttgaactggcgaccggattggtttggagaccggtttgtccctgatttggtgccccaagtgcaagatggcccgagtgattgaactgagggtgaagagggagaatgagaacctaggccaaatgccaggaaggtgcccatactacagatggcagagggagtattttgagaaattggtgaaggagaggttgattgccttgttattcgatgattgggaggaagatgatggagaggtggattccaagaaggtttctgaagtaggaaatagtgaagacattgcaacttctgtttgtaatggttgtagtacctgtggtagtagtggtgatgtacatgttttaatgatctgtctgtaatgatgtatatgaacaattgaagaagttggaagggaatgttgaactttgtcaaaaaaaaaaaaaaaaaaaaaaaccaaaaacc

SEQ ID NO: 1945 - DNA, 545 bp, Zea mays
  Clone ID: MRT4577_101778C.1
cggagctggtcttcaggggtagcttgaactggcgaccggattggtttggagaccggtttgtccctgatttggtgccccaagtgcaagatggcccgagtgattgaactgagggtgaagagggagaatgagaacctaggccaagtgtttatcaagtgccctaggagtgttgacgctttgattgccattactttgtgtttttcgaaatctgattttggattatttgatttgcttttgtatgtgtagatgccaggaaggtgcccatactacagatggcagagggagtattttgagaaattggtgaaggagaggttgattgccttgttattcgatgattgggaggaagatgatggagaggtggattccaagaaggtttctgaagtaggaaatagtgaagacattgcaacttctgtttgtaatggttgtagtacctgtggtagtagtggtgatgtacatgttttaatgatctgtctgtaatgatgtatatgaacaattgaagaagttggaagggaatgttgaactttgtcaatacagttcacagatcattg

SEQ ID NO: 1946 - DNA, 586 bp, Zea mays
  unsure (1)..(586): unsure at all n locations
  Clone ID: MRT4577_101779C.1
agcgccaanacccccaaccagtgcgaggagcaggggcgagtccatgaagaagcgctaccgggccgagaccgccgcggtggcgcgcgccggcccggccgccgccggcccgtcgtggaggttcttcgcccggataaagcggagaaggctgacaacagcatgcagaaggagagcgggcctgcgggtggcgatgccaacgtcagttctccgaggagtaaggtggcgagcgaggacgtggaggaggtggaggacaaggtctgggaccggcccaagaagagaaagagcacagacttcgatatagccaagagcatcgagctgctggctagctccttcttgaaggttgagcaggccaggatggagatgtacagggagacagaaagaatgagggttgaggctgagatcaagaagggggagatggagctcaagaggactgagatcatggcgaaaacacacctgcagatcgctaggcttttcgcgaggaagttgaagcagagcagtggaaagaacggtggcagttcgtcagtaacggctgaagtggacacccttaccaagaaggcgagaatggttagtgtcaacgcaacatcatgat

SEQ ID NO: 1947 - DNA, 109 bp, Zea mays
  Clone ID: MRT4577_10177C.1
tggaacagaacgctccgcaccaatcaattttcgaacccatgatatgccattacagacgggcttaatcactgtctgcgccgtccagcctcaactctttcacactgcccca

SEQ ID NO: 1948 - DNA, 245 bp, Zea mays
  Clone ID: MRT4577_101780C.1
gcttagaatcaggagcdgaagcdcgtaccagacgggcccbtatbagtccgtcacaaccacaaccaggcagaacccagtgtcaaacakaaatatacaatgactacscaatcgagckccataataatcgtcgaaacttaaccaaaaaaaactatatataatgtgcacgtkaagaatcttgcycgtkctggtcagckttgccgttctkcaaatkccctactcctacatcctagaaatcgaaatcgtcc

SEQ ID NO: 1949 - DNA, 317 bp, Zea mays
  Clone ID: MRT4577_101781C.1
gcgacctcgtcatgtaaggccttcaaatatggagaggctgcgtgaaactgtccccctggccgtcgtggatagacaggagactcacaccgggataaagcgcccttgacaggctctgcctgccttcactcctgatatgatgaacacgggctgcagatgtgaggatagcacatatggagagaaccgtggcgacagaacacccgcgagggagaaggacgctaatacacagacactatataggagggcatatgggatacgggagagaatataatcaaacaaacctacagacagcgctaaactgagacagatcagtgatatat

SEQ ID NO: 1950 - DNA, 429 bp, Zea mays
  Clone ID: MRT4577_101782C.1
ctgccatcgccagggccttcccacacatctagtgtaccgtcatggacctccctcacgttgtcgctgaggctcccgcgggcactggactgtgcttcctcgccggcgatatgttcgaccacatcccaccggctgacggtattctgctcaagagtcaatcggcggcatcgaacaaccctcacgcttcgtccagcccttcggcgaaccagtccagatgcccacctcgttgatgacctgttttgtgatgatccagacttatattcgtgagtgttggtgatgttagttatacttggtcctgtgagatacttattgagacttatgtgctgtgaaacctgatttatgtggtgatatttgtgatatatatgatgttgatgataaatgtgttgattctgtgaaaaaaaaaaaaaaaaaaagggcggccgctctagagga

SEQ ID NO: 1951 - DNA, 504 bp, Zea mays
  Clone ID: MRT4577_101783C.1
ggggggtatgaggtggtggaatgtaatttgaagtgctgagaacggtgagaacaggcatttatttgtaaaggtttttttttggtcggatgctgaaagcgcttgcaagataagatactactaatgcaggtatgctttatacgcttgagcaattgagtctgatgatgtgacttcaaaccggtgcgatgactctaggaaggtgttagactgattgctgtgaaatccaccttgttgatctcgtgctaacatagctgtaaacgcgagaaagtgcggttgtgatgagttggtcgggatgccatgataggcatttttgactcatgtctagggcgtaggtaataacggccatgatgcacatcatactctgtgcttgacgccaggccatgcacggtgctatcatacatgtggtgtgtagtacaggttcatagtatagacccacaggctctacagtgaatgcagatgcacaggttgaatagacagacacgtattaatgagcattggtattctttt

SEQ ID NO: 1952 - DNA, 249 bp, Zea mays
  Clone ID: MRT4577_101784C.1
gccttaaaatccctgactgctgcggaaatgcagctggcagcataggagcttgctcgtagtgaactgcaatgaatggataccaagtgttgttaaacctaatgtgtgagtatgcagtaagctgaactatgataactgtaatatgaataataactgcagacaacataacacagattgaagataacaattgttgtatttgctaataagctgcattacttaaggcccaggacggatttgaaggaagccatgttt

SEQ ID NO: 1953 - DNA, 219 bp, Zea mays
  Clone ID: MRT4577_101785C.1
actgggactacaaaagatatgattttcaatccaattaaaattatacagcataaaaacagggctacaggtggggaatgcaggggcttttttgagggggggggaggggaattatgttgggaaagggaaaagttaggaaattggaaatccgaaaagggaaagaatgggtatttggtcccatttcggctaagccaagggggggagtttaatttgggttagggg

SEQ ID NO: 1954 - DNA, 867 bp, Zea mays
  Clone ID: MRT4577_101786C.1
ctcgcacgcacgctccggcgtcatgtcgtggatcgcgcgctccatcgcggccactctctcctcgccgcgcagctccgacgccgacgacgccgactacgaccctgcctccgcgcagagcggggcagggccggaggaggaggagtcccacggcagcagccctaacccgggccctgaggccggggaacccgagcagcccggcacaccgagccgcggcgtcaaggacgacatatccgagctcaccgaaacgctcactcgccgcctctggggcgtcgcatccttcctcgcaccgcccccgaccccgccggaggcctccaccccgcgcgccgcgactccggcacaaggggaagatgaggggattgaggatggggaggaggccgcggtgctgtccccccggactgcggggatccgcagcgatctagccgagataggcggaaggatgtggagcggtttctcgatgctgcagaacaacttggccgtggccgagatctccaagatcgcctcgtcgctcctgccgttcgggcaaggggaggcggacgagggggagtccgtgcccggcatcaccgaagaggtggtggtgttcgtcaggcacatctccacgcggcccgagacatggctcgattttcccctcttcatcagcgagcgctacgcggatggtatagctaaggctctccgcacatgtgtactctacttcagcatttggtcgttattaacgtggaagggaagtgattggaggggggcttggttcagaactaatgattgatttttgaaagataattaatgatcgttagattctttccactttattttaatgagggggattgctcctgccattactcataaataaataaataaaatttattggattgt

SEQ ID NO: 1955 - DNA, 330 bp, Zea mays
  unsure (1)..(330): unsure at all n locations
  Clone ID: MRT4577_101787C.1
nnnnnnnnnnnnnnnnnnnnntgtttgttttntatttttttgtgagaaaactgaggacaacagtcctgcatacttcttattgccgatgtatgtatgtatatacatacgttatgggtatacaaatccggcagcccgatatatacacattttacccgatcgatcagtcaatcagtccaggcgaccaaaaaagtacttgaccttcaccttttttgtaaacggaattacccccttgccatacaagttgtaaacgacccaagggtcgacttttaataaactagagttagcctggcttttggcattcctttggacttgtccgtccaaacttaccct

SEQ ID NO: 1956 - DNA, 290 bp, Zea mays
  Clone ID: MRT4577_101788C.1
ggggaaccaggcctatttgggttccccagaaggatttttaaagacccccgaatgccccaaatatagtagcaccagctagggagggggcttggctaaacgactgatcgtcccttgggggaccaacaaccaggggtaacaattttgttcgctagccacttttatttatttttgggggcgtactacgtactaacaaggagctgagctgggccccttttatttatttaaggatttagcaaggacctgagccgaacttattggttttaccgaaccaaaaggggggcacctggggc

SEQ ID NO: 1957 - DNA, 685 bp, Zea mays
  Clone ID: MRT4577_101789C.1
agtccgctccccgcattcatctactcagtccaactacgttcccaccaaaccagtcggcaccacccatgtacttcggctgagatccagatccgatctccattctctgctgccgcgcgccgccccgttgaggcgccacatgtcctcctccgtccacgaccacccctatagaaacgtgcaatcgatacaacatcacctactgcgggatcctgacctgtaccctcctggcgcggtactgcctgccccagggacaccccctcttcgatgatccggcggcgtacctcgctatctggacatccgcaacaaggagctctcgcatggggccctgatggcttggttgagacaaatgactcaccactcgaccctgattacacaccttcatgagctggtgcatgcttgaaagagttatatgctagcttcaggtgattttccttttcccttgcacgacgctatttgctgcaacaagaagtaggagtgacctgactctggcattgacagtgacgatttagctgtgctcattgataacggcttgactatgttatcgtttgccgtctcaccctatatatgatcacactggaatatgctgatgccctgaggctggcatcttcttcgctattatcgacagctgtgatcagatccggatgggttccatacaatgcaaccctgtctgtccatcctatggccctca

SEQ ID NO: 1958 - DNA, 413 bp, Zea mays
  Clone ID: MRT4577_10178C.1
gaagatatatgtaaggaacttcataaatcatattcatcaatcaatgtaagccaaatctaaataaatgcttctatcaataggaggacatgattttgcacactgaaaggataataattctttttatattacagtgataaaaatgaatcatacctattgtccagaatttgtgaagaaaacagcatgaaaagatcatcaattttacttcaggatcaacaacaccattcttacactgggaaatgggctaaaacctaaagcagtttagggcctttggcgtgaatgtgtgctacagtcaggatttgttcaattttctttttaccccttcatgcattctaagacaatgtcgatacttctttcattttagggagacaacttaagcagtagcaaacatcaaacaacaaaaattgatagtgggt

SEQ ID NO: 1959 - DNA, 226 bp, Zea mays
  Clone ID: MRT4577_101790C.1
gcacgagggacttctttttcgtgggtttaggcgtggggaaagagagctccttttattaggctcctttaaccaccttttttttgggggttcagttttttttctatcttttcagttcgacgctttttgtacaagaggcttgcaacaggacctgtaattagtagtagctgttaggtaggtggtcagcctcatgcaaatctttcaacatgttcgttcgttgtctcaaaaa

SEQ ID NO: 1960 - DNA, 313 bp, Zea mays
  Clone ID: MRT4577_101791C.1
acgcgttctttccgatcttccacttagcgtatctttgtccgccgtaacaccttcggtatcaatatcgtgtcagactgtcacacccctgacctctctcctatcgcaataaatgtgttcattatacaacaaatccctctaaaaacaactgcgattataactcacggaagatgacgatacaattgatgcagcctaggatacacattctttcatcgctacgacgaaccataaggtagcgatgcccgatgccatatcctctacgtaggctaatggaactaacaatcttcaccgatagtaaaccttctaatactacatc

SEQ ID NO: 1961 - DNA, 371 bp, Zea mays
  Clone ID: MRT4577_101792C.1
gcgccgctgaccggagcgcggcatggcagcgccgccctttcgtggatgaagctagtgcccctttcagcttctccactgcagcaggccgggcatccccatgcctgcgccttccctctcttgccgtgccttccccatggtcaggatcagcggcagaagtcgtgtgctacctgttagatgatatgggcagcaaccacgcttcgcagctccttgcaacagcaatcaatccctgccgcatgccacctgctcgatatattacgcagccacatcgtcgttgccctttctcgcagcacgccgttgttggttctaggtgctgctacctacatccctcgcactcaccttgctcgacaaaaatgcctccccgttcgttgacc

SEQ ID NO: 1962 - DNA, 438 bp, Zea mays
  Clone ID: MRT4577_101793C.1
tattacaacctaacaacattggctaccaagatatgtgttgctgcctgtgggcttcttgaacattttgcaagcgcaacaaatgcatgagttattccacaatgctcacttgctccaaggtgcatatattacacagtttctctgaccagttacttcaatgggcttggaacacccagctgtacaagcctatagactacatggggggggggggcaagcgtgttacaacaaccaatatctccaagaagacaacaatggttgtgacataggacaacaagaggagtaagttggtagcggtggagctgtgtgctaagaagagtcgagccattcagagtcgcttaaccaagcaccagccgttgcggggggaccgagagggaaaagaatttttttaagtattttccgatgaggaagaacgctattaagggctagattagggaaagaaca

SEQ ID NO: 1963 - DNA, 839 bp, Zea mays
  Clone ID: MRT4577_101794C.1
cattgggacctcgaggccggccggggccacacatacggatccaacaaaatctcccgcaaagacaacggcgagccaaccaccaccagcgtcccgcgctagctgcggcaccgcatggctgccgtgaccagcaccgcctccatctgcccggccgcagccggcgccctctcttcgctgccgtccttcatcacgcgcaagcccaccagcggcagcaggaggttgcagcaggcagcagcgacgacagtctgccactgccgccctgctcgggtagaggagggggaggaggggctgctgggccggagggacgccttattgctcggcatcgtcttctccgccgcgaacccgccgctgctcgcccctgccggcgctctggcggacgaggccaccgccgagtcgcaggagggcttcactacgtacgaggatgaggccaacaagttcagcattcaagttccgcaaggctggctggtcggcgccggcgaggccagcggcatcaagtccgtcacggcgttctaccccgagcaggccgccgccgactccaacgtcagcgtcgccatcaccgggatcgggccggacttcaccagcctcaagtccttcggcgacgtcgatgccttcgccgagggcctggtgaacggcctggacaggagctggcagaggccgccggggctcgccgccaagctcatcgactctagggcggcaaacggcctgtactacctggagtacacgctgcagaaccccggcgagcggcggcggcacatcgtctcgggccatcgggatggcccttcaacggctggtacaaccgcctctacactgtgacgggccagtacatcgacgacgatgactcg

SEQ ID NO: 1964 - DNA, 656 bp, Zea mays
  Clone ID: MRT4577_101795C.1
atttaatttgatggtgcccccacaggaccattgaactcctcagttgctggctcatggcaccactttgttgttcatgtgcttgggttgatgggatttatgaaatcaataaataaagtcttaatgaaactaactgcttgtgccacatgcctcatagtcatatcatgtcaattcaggaaacacgaggcacttcaaaaccatgattccataggtactgtcctattttaagtttatctaagtgggttttcagctagagttctaacttaaggaagcctactttgagtcaagcgtagatttggctgaaaggttagagaaacatagccaggtactcttgttactttactcctagttgcacttgcactccgtctcattactgctgctcttttttgtatggtttctttgatactttggtcagtgatagttatgtgatgaagtattctagggactaagacgtagacgttgatgatgttctgataattgttatgcaattcttctattaatatgtacatggtgggggccacgtcataatttgtatgggacacagcatacgactgtagtcatgtaatatggaaaaggtcagtgacattagctactagttaatggcattcattcgcctacctgataagctctgcaggttagaagcccaagtacaatctggt

SEQ ID NO: 1965 - DNA, 380 bp, Zea mays
  Clone ID: MRT4577_101796C.1
tgtatatttccccaatgttacttttctgttaatgctgatcatgaacgattttggtctgatttggtgtagagaatcaacagtctctagaacacttttatggctgattggctacagttcggctctgtttttgtcatatcatttagtagccaagttcctactgaagattttagtacggatcctttctaattaagctcactgtttggaaattgtgagttgaagctatcatttgattctttggagcccatggatttgacatcaatgttaagttttcatttgtacaaacaccataatcaatgattgatgattgcacaagcaaataaccagttggagtgctgaagtgacagaccagctgaaacgagtataacacaacagaagtttgg

SEQ ID NO: 1966 - DNA, 1312 bp, Zea mays
  Clone ID: MRT4577_101797C.1
gtgcggcgctcgaggcggcggtcgggaatacggacccacaaatctcccgcaaagacaacggcgagccaaccaccaccagcgtcccgcgctagctgcggcaccgcatggctgccgtgaccagcaccgcctccatctgcccggccgcagccggcgccctctcttcgctgccgtccttcatcacgcgcaagcccaccagcggcagcaggaggttgcagcaggcagcagcgacgacagtctgccactgccgctctgctcggtacacacctcagtctcctatcggcgcgcacctcgctcgccggcacaattcggcgtcaccgctgctcgaggagctccggatgacgtacgcgcgcgcgccatgatgtattattacttgtgtcttatatgtggttgtcagggtagaggaggggctgctgggccggagggacgccttattgctcggcatcgtcttctccgccgcgacgccgccgctgctcgcccctgccggcgctctggcggacgaggccaccgccggctggctggtcggcgccggcgaggccagcagcatcaagtccgtcacggcgttctaccccgagcaggctgccgccgactccagcggcttctgcgtctctctctctcttcttccctcgccaccagtcagcgtcgccatcaccgggagcgggccggacttcaccagcctcaagtccttgggcgacgtcgatgccttcgccgagggcctggtgaacggcctgggcaggagctggcagaggtcgccggggctcgccgccaagctcatccactccaaggcggcaaacagcctgtactacctggaatacacgctgcagaaccccggcgagcggcggcggcacatcgtttcggccatcgggatggccttcaacggctggtacaactgcctccactgcgacgacccaggtgagccaggagctgcaccaagttcacgcttcatattcgcagagaagaatgcaaactatgttctgcttacctgaacaataagtgtcttgagaagctttttctggattcccccgtggtcaagccttgtgatgaaatcagatgatgatgacgcaattggcttctgtgacctacaattatgggcatgctgatgctacctagaaccttactacactggatgacaggtgaataagcagacaatagttgagtgttgtcatcaggttgcatctagaagccccatgactgagattgtgagcttatgtatctgtcgatcattgtattactcactctttctcagtataagttgagtactcagcatactacatatatcacttaatttgttgtttctataatacacagttccatt

SEQ ID NO: 1967 - DNA, 360 bp, Zea mays
  Clone ID: MRT4577_101798C.1
attacacatttttctcccaaacaggcgggttctctatatattatgccggtccattctaatggttcattcaggtcatagttcacactgtcccccaaggtgatgggtgacactcctttacttaatcgacgttaaacgagggaacttgctatagccctataggcagctagtcagcgttccattacatataactcagccatagtctcttatagtagaaccgcggagctgtgttcaagggcagggacctggttgctgcatttgcagaccgtacatcgcctgcagttgttgcgctacctgggccgtcattagtgccgtgagctcgccctgcggttgttgttgcaggaaggactgcaggaccacacc

SEQ ID NO: 1968 - DNA, 289 bp, Zea mays
  Clone ID: MRT4577_101799C.1
ccacacgacactgaaaattgaatttcattcaaaacgggggggggttttcattttattacacgacaaacaaaatcagcaaacggcggaatggactcgtaggtccctgcacccgggaacggagcttaaaaagcagcaagacacttttgacttttaaaaacgacacaaacagcacctttttaatggacggcggcggtggcggcggcccaggtagtttattcttcggcggaaagggacggcaacggctaaaagtgccgctcgttttgaaccagccgttggtttttcacccccg

SEQ ID NO: 1969 - DNA, 418 bp, Zea mays
  Clone ID: MRT4577_10179C.1
cctactcgtccgcggacgcgtgggtgcattccaaaagaacatcttgggccaggattggagtatcaagcaaagaattgcagcagtgttggttggtggtctgaaacttgccagtgttggtttcatttctagtgttggggctggggtttcctcagatctcatctatgctgcccgaggaattgtgaaaccttcagaaaatgtggaaacgggaaggaagagatctcccatctggaagtcagcagctgtttatagttgctttcttggaacatcaacaaatttgcggtatcagattattgctggtctagtggagtatcgactaggagagagcctggtgacatactacaaccaaccccttattgctggtttgttgtcattcgcggctaggacactgaactcatactggggaacacagcaatgggtt

SEQ ID NO: 1970 - DNA, 394 bp, Zea mays
  Clone ID: MRT4577_1017C.1
attaatccatgcaaatttttgtttggtttttcagtattttgtggggtaaaatgaacaacgagactcaaaaccgctcattaaatcaacaataatctaaatttttggttgttgccaagacagcctagggatgacacgtggtaaaggctatagctaaatcacgcggtaatagagagattatttgactgcccatagactgagtgtaattatgaatagatgttaccgagagttgacaagaaactgaaggagagtgattgatagaacaagagtggatcttacaccttgagacttcgagcccaacaaccccctgccctatcatctgttgactgttgcataaaacgctaccgaggcgatgtcgggttacaaaaaattatggtttgattccggggtgggagca

SEQ ID NO: 1971 - DNA, 501 bp, Zea mays
  Clone ID: MRT4577_101800C.1
atcgaagatagcgctcgcgtaggacagctgattactcgctgcttgatacgagggctgtcctgtgccacgctccaacactccctggacaacaacttcatcacactatgaccaggtcctcaaaaccaatacattctcgactgcatatactaaggaaggacattaaggtctgcttcgcgaccttctccaaggctgaggctaagctgactaccgtcgacggcttgaacgagaccgagcttgtgacggtcggaaccatcaaccattcaactgaggcacgagtgcccggtgtaaatctgcctggcggatcaggtgctgacggaggtgctcctgcaggtgacgcttacgatgatgatgacctccatctttgtggtgatgaatctgacgaggacaacaagtcaggtgatgagcgtgcttacggtgccaaggcctcttctaaaaagaaagaaagagcgaaatcctccgtacttatgcatgtaaaaccattggacgatcagactgatatga

SEQ ID NO: 1972 - DNA, 2341 bp, Zea mays
  Clone ID: MRT4577_101801C.1
gggagagatgcaggcattcctgactggtactctgtgtccgaaaccaaaactggtggcggtccgacctcaccaaatgttgctacaaaggaaagtgcagcattatgtattgaagacattgagatactccatggggaccttcaaggattaacagatacagtggactttttgaagagcttatctgaacttaatggaaatgatttgaagagccctaagaagcaagacctagagagaactgctgcatctgttctttttgactgggagacagaaatatatgtagcaagggcacctggacgtttggacgtcatgggtggcattgctgattattcagggagtcttgttttgcagatgcctcttcgggaagcttgccatgttgctgttcagagaaaccatcccagcaagcagaagctttggaaacatacaaaagcaagacagcttgttaacggaggcttggtacctgtgatacaaattgtatcatttggttctgatttgagtaaccgtgcaccaactttcgatatggacctgtcagattttatggatgatggtaaaccaatatcctatgagaaagccagggagcttttctgtcaggatccatcccaaaaatgggctgcctatgttgctggaacaattctagttttgatgactgaacttggtgcccagttcactgacagcattagcattctggtttcatctgccgtgccagaaggaaaaggtgtttcatcttctgcatcagtggaggttgctacaatgtctgctatcgccgcagcctatggtttaaacatcataccaagggatcttgctttgctttgtcagaaggttgagaatcatgtagttggagctccttgtggagtaatggatcaaatggcatctgcgtgtggagaagctaacaaactccttgcgatggtttgccagcctgccgaagtgaaggaattggttagcatacctactcatatacggttctggggtctagattcagggatacggcatagtgttggcgggggagattatggatctgtgagggtaggcacttacatgggacgaaagatgatcaagtgtacagcatcagatttagtttcagaatccttgacttcagggtcccctgctcagtctgattgttataaagaaaatggtgtgggcgtactgaaatctgaagctgcactggagtatttgtgcaacctaccacctcacagatatgaagctgtttatgcaaaagacattccagaggtgattagtggagaagcattttcagagaaatatggagatcacgatgacacagtgacagttattgatcctaaaagatcttacagtgtgaaggctcctactagacatcccatatatgagaacttccgtgtcgaggccttcaaaacgttattagaggcaggtaatacagacgagcagctgtcagcccttggagaacttatgtaccagtgccacaacagctacagcgcatgtgacctcggttctgatgggactgacagactagtcaacctggtacgagaagtgcaacacaggaggacatccgaaggcggaagccctagtctgtttggcgcaaagatcaccggcggaggctccggcggcacagtatgtgttgttgggaagaactgcgccaggagcagtgaagagattgcagagattcagcacagatacaaggctgagaccgggtatctgcccattcttttcgacgggtcgtctccaggagctgggaagtttggttacctgaagatccgacgtcgttgtccctagtggctgattgggaaacgaagaacttcagttcgagctttgtcattgttttacagaggacatatcactcaattgttaagaacctcactccaactctccaagccattgtagaacatagaggcgtattgccacttgcgatgattcgtcgttcacacacaaaatattatcatgtgctacaccaattctggaagctactagaggaaaatgtgaggaatataaagaaactcttgttgagcagatgtagtctagtggtctccgtgtgcttgctgcagtgtaaccaaactccaagtagatgtgctctgggctctggcatgtggtatgtgatgaagtcgaggatggtttcttgccgtttgatgaccagtgtagtcgttggttaacttgtcagtcgtaaactgatgttgtcagttaggagcggataaagtttgtgtgtgttgtcagtgtatctgtgtgtaagtttattggacagaccgaaagatacaccacgaacccagatgaagtaggtaatagtcgtatgtgaagtttttatcattagggttgcaaatgcattaaatcacttataaatatatgatgattataaacttcctctgcatttattcaaaaataa

SEQ ID NO: 1973 - DNA, 601 bp, Zea mays
  Clone ID: MRT4577_101802C.1
gtgcggcgctcgaggcggcctgttctcatccctcatgctcacagctcctatagcttcccttcttcccccataccttccatcaatgatagcttcaatatgtgaaaaccctactcttcaagcatataggcttcaacgagcaatcgcagcaagtaacatacctttatcgcccttgctgattcaacaatcaccatccctatatttggcgcaatcattggcacaaaccatcaaggcacaacagctgcaacaactcgtgctacctgaggatcaaccaagtagctctggtaaacctatctccctagtctcagcaacaacaatttcttccattccaccaactgcctacactgaaccctgctgcttatttgcagcaacaactattaccatttagacaggtagttactgactactctcagtaacaacaacttcttccatttaaccaattggacgcactgaacgccgctgcttatttgcagcagcaaatactactgccatataatgagctagctgcagcaagtgcctgcttccttcttgacacagcaacagatgctgtctttctacaagaagtcttgcgctaatcccgcaaccctcttacaactacaacaat

SEQ ID NO: 1974 - DNA, 275 bp, Zea mays
  Clone ID: MRT4577_101803C.1
cgatttgttcaggacagcggtgctcttttacatacccttatgcaacagactcatgtcattgagcaacatgatatgtccattgatgaatactattcagcctttgatcgtcttatgaatgctttgacctctatggtgcctgcttgtacaactgtgccttgcccagcccacaagttcattgagaagtttttcacatacagatttgttatgggagttcgatctgaatttgattctcttcgtgcaaggttgcttcacagttctgatactctcactatggc

SEQ ID NO: 1975 - DNA, 1095 bp, Zea mays
  Clone ID: MRT4577_101804C.1
ttttttttttttttttatatcaatagtaacaccaggagattcggctcgaggtggttacaatcaaaatcttcatctggccttatttcagcaaaggaggacaaatataagaaggaagttgtattgcttgctatcaatcacaagcatccagactacatggcctttagaccggaaaagagggtacaggagcttgttgaacacgaaaaggatgttgctgaaagtagtgtcactaagcaattggaggttgcagagatttataagccaagttctcatgttaaacccatatttgtggctgtcgaagctgacatggagaagtattacagtgcaccagaggcttcagatatagtcttcaggtacgttgaaaaggaaaaattggttaaacctacagacagggccaaggtgattcttgatgttacattatgtgatgcattgtacaaaggggctatcaaaaagggctcggcatacccaactgaaatccacaagaaagacttaggttcagcattcttaaaccgcatgcaagttcaccacaaggtatcgagaggaactcaggaggtcatacgcaagggtgccataagaactatccagatcatgacagaaagaagacagggcaacaagaagatgactcggctttctgggctcgagtgtttcctgatggatcctgattcattggcttctgagctccagaaaaaatttgcttgcagcaccaccacagcagagcttccaggtaagaaagggcagtacgaggtcttggtacaaggtggagtgattgatgaccttgctaaacaccttgtcgaccattacgatgttcctaaaagatacatcgaggtttatgacaaaacaaagaggtaggaagtgggggctgatcatgtccgtttaggtgttggagcgcttggatggtctacgaaatgatcccaggattgtttcatgatactttttgtcatcacatgtctgagcaatattacgacattgttgatctacgagtaccttacgatatttgttttcgttcctgcctttggttgatggaaaatgctattgtgcttactgaagaaatatggttacaggatggataatgaggtttcctcatgcttttggtgctgc

SEQ ID NO: 1976 - DNA, 389 bp, Zea mays
  Clone ID: MRT4577_101805C.1
gaattcagatgcattaattgggcacaacctgacaagattcattaaacagaaaaactgggacataacgggcagttcaggccattattcctactacctaccaccaacagagagcctgatatgaatcatctaagcactcactaactgaaaagggcaagaacacattaccatgcaagacatccagcagtgccaaaacactgacttgctttacaacacaagggcgagcccaaacacgacacaattattaaggaaccctcctaatacatactgtaaggcgagtcggaaatggtctgaacacctcccctagacatgtgcctacgcatcagcttctggcttgacaggagagcgggacgcgttaacagagcagtagtggtgacaccccagagcagcac

SEQ ID NO: 1977 - DNA, 513 bp, Zea mays
  Clone ID: MRT4577_101806C.1
ggggcagaaaccaaagcaatttttaacgcattcaggttgcccagccgaattacaacgcgcaggtggttattatttaacaaacccagttcacaacattcagaccggccgggacttttgacttggaaccaaaataaaacccgttcgttccacgttcttcacaaggaggaacacttactggcaggcacgcgatccaccttaaaaaggacacgggccttggccaggggatccaccttgaaacaaacttttggttaaaggaaaccagaaccgaacccacatgccaacgcttggttccttttgattgcccaaaggccgggcacgggcaagaaacccccttggaatgggaactttagagcttgttctttgcttccccggggggttccccttgtgggctggtttctcaaatgagcttttgtgggagcccgggattttgttcattatctttgccaaaaaggccttttttttctttgcattcggggtggttaaatttttccccttgggggcccgggcccgggc

SEQ ID NO: 1978 - DNA, 581 bp, Zea mays
  Clone ID: MRT4577_101807C.1
aaagattcacaaaagccagctcgctcgtcccagctgatccggtggagcacctagtagcgacctgctcgatcatcagagtagagcgtcggtaggagtctgtctctcttggtggctggttgcaacggtcatgccgacgacgcctcaccaggtgcccttgctgctgctgtgcctgagcgagctggtgtcctgatccatcacggcgggcagcttgaaccaacagctgcacatcacgatggggcgacgggcggggcaaggcccttgacaacgggcggctgctgacgatgtcactggaccacacgtccgaatccggtaccagtcccggcacgagtacatgttcggcaagatcaacatgcagctgccggtgtggtcggacaactccgccggtaccgtcacagcctactacctgtcgatgcagacgcgagcgcacaacgaagactacttcgagatcctgcgcaacgcgtccggaccaggcctacacgctgcacaccaacatgatcatgtggtggcaggaaaagccgctatattagatcagcctctgtgtcgaccccaccatcgagttccacacttactccatcgtctgg

SEQ ID NO: 1979 - DNA, 447 bp, Zea mays
  Clone ID: MRT4577_101808C.1
cccaggcgggcggcggcgttctcgactctcgagtcccagacggcaggccaatccttctaggcccccatccccaggcggcaggcggctgcaccgccggtccgccgcagtcacgcgcatcgcaggccagcggcaccgcgcagcgctcagtcacgcacacgtgctggcggcgtcctcacccagcgtcgctgcggcgggcggccaggcggcggcaccgtgcaggtgcgcagtcgcgcgcacgcagtcgcaatcgtagtctcccactcccgggcggccagtccggcagtcgcagcctcccaggcggccagtcctcccaggcaggaggcacaagcgcgcagccaccagccgcgagccaccaaccgaagtgccgaacagccgcgaggaccattttatcttattagggctgattattacttcatttggtattacaatactttatctcattgcaaa

SEQ ID NO: 1980 - DNA, 159 bp, Zea mays
  unsure (1)..(159): unsure at all n locations
  Clone ID: MRT4577_101809C.1
ccggggtttgcagagaagggagcgagctctgtctgtcgacactcgacaatcaccatttggccagccgcctttgaccgccatggagaagttggccctcttccacaagcttcgagnnagcgacctnngttccaccgccttagnntgcgcgacctttcgcgc

SEQ ID NO: 1981 - DNA, 399 bp, Zea mays
  unsure (1)..(399): unsure at all n locations
  Clone ID: MRT4577_10180C.1
cgggnagctaaccacactccactccagcactgaacactcgattgattcagcgggtagctagcgagctgaatacaatggatcctaccaagttccgtccagccagcaggcaccacacgacggagaccacgacgaacgcgggcgctcctgtgcaggaacgacaacgaggcgctgactgtggggcctcgcggtccatgctgctcgtgggactaccacctgatcgaggaggaggggcacttcccgcgcgaccgcatccttgagggcggggaggacgctctcgacagcctccttcagggggactggcgctgggaagcacgaccccagtgctgtttctgttgaccttgagcccactgcgatcgatgaggggaggactggcacggggggggcagctgttccatgctg

SEQ ID NO: 1982 - DNA, 246 bp, Zea mays
  Clone ID: MRT4577_101810C.1
ctgggaggcccatccaagccggggggcctgcaggtagcacagacagaccagagaggacagaccaacaaaccaagctattatactgaagacaaggatatgccgcaccacaggcacgacacaccgaagcaccacatgacaagtgaaaagaaaaaacgccctcacgagactaacacacaacgcagggaggaaagccaaacgaggcaactagaccgattctgggaggcggggcaaggaaccttggacccg

SEQ ID NO: 1983 - DNA, 1031 bp, Zea mays
  Clone ID: MRT4577_101811C.1
aaggtctcaatttcatcttaaagatggattcagtcagctgcctttgctcagggcagacatatcttcttaccgtgtctcagtggttctggtgacatgtttgtgcatattagctgtggacttcaaaatatttccaagacgctatgctaaggctgaaacatatggtagtggcatcgagtttcaaggcagttctttgttcgataagtccactagtatttcttggctttgctcgcattatatccacatggggtgttgattatcaggtccatgtaggagaatatggtgtgcattggaacttctttttcaccctcgcagctgtctctatccttacatccgttgtcaggattcatccaaaacattgtggtttagttggtctgcttatccttgctggataccagatttggctatcttctggattaaatgagtacctcatttctgataaaagaagtgctgatataatcacccagaataaggagggcatttatagcatccttgcgcccggggaaggccatacccatggttgccgccaagacacatttagagatctcgactcgggaaactgactttgaaatccactactcctggggcccctagtcgtagggacctcctctggccccgaccaagggagggcttagcactagaagacattatagaagtgtccggatgcaatgacttctcaaatgtcagaaggccggtgttctttcgggcgacccacatgcaatgaagatgggacccctagcgccccaatacctccatgttatgaccggcatccaatatgtcagacgccataagcaccatagcagctagctagtttattgcccagtttattgctggtttgttaacagccggagagataagatgagaattagcagtcgtctagataagatagggttagttgcccaataatgtggagatccacctagatagatggagattagttgaagaggcaatcaaataagttagaaatggcctatatgtacagactattatcattaatgaaggattaagcagggcaactcttgcctactgctctc

SEQ ID NO: 1984 - DNA, 396 bp, Zea mays
  Clone ID: MRT4577_101812C.1
gagcacctctgtctcctgtgactctagtactgcagctcctgcacgcctattgcaaaacctcaggtcaatgccaggtttcaaagacgtgatctttcggacacacaccacactggcctactccagagctgagctagctagctgctctctctctgcctgtatttacccaagcgagaacatgagccaagatgcctgaaaagaaccactgttcttccctcgcatagctggtcggctgtctgtactatcagtcctaccagctgcagctaccacagcagccctcttgcttaaaggaggagggagaaggaggcgtagctagcactgtcggagcctccgcagccattggcgcactctctgagcaatatgcgggaggctctggagaatgaggacaaggagaaggct

SEQ ID NO: 1985 - DNA, 318 bp, Zea mays
  Clone ID: MRT4577_101813C.1
aacctattggtattttttttttcagaagaaaaaaaagactccaggggaaacgcaaccccatctggtgtctgactaggcccaaaaagcaagggggttactcgccccttttacttttacgccccaccttaaaaaaaggggccgccctgatgaacacacccgtgtaaaatggctttaagcggcccccccaaaacaggagcccatcctccccctaagggctctcccaaaaggacttaaacaaaacaactgcggacttttgtttaaaaaaaaaccctcgggcaacaaaccctaaaatgcccttcgtttacccccccccggaag

SEQ ID NO: 1986 - DNA, 512 bp, Zea mays
  Clone ID: MRT4577_101814C.1
ctttggcgctctgaacgttgatgtgaacgaggatgagaccaacctggagacctaccctgggatctactttatgctttagtactacgttccagtcatttctgctgagatggcctatcacgagcagttgtacgcgcacttaatcaccaccaggacctgcgagccatcctccatgatggcctagagcaagcccctgcatggccagtgcatggcatggtgcctcatgtgccgtggtgttgtgactaggaaggacgttaacaatgctgtggactctattaagaccaagctcaccatcaagctcgtggactggtgcccgactggcttcaagtgtggattcaactaccagagtaactgcgaggttcccagcggtgacctcgtcaatgagcatgctgccgagtgcatggatctgaacttcaccagtgttgtcgaggtcttttccccgatcgtccacaagttcgacctcatgtacgccatgatctcctccaagcactggtacgttcgttagggcatggagg

SEQ ID NO: 1987 - DNA, 377 bp, Zea mays
  Clone ID: MRT4577_101815C.1
tcgttgacgcgtgggcggacgcattggggaaatagggaaggtaatgctcgagcaatgcaaggccttggccctgcggatgcaggccctgtatacgcaagctgatgaggtatactccgagaggacaagggaggtcttgctgcaagcattagttaagctgacgatacaggctgacacagcacacatggacctgagcgtggtatctaccgaaagtggtcaagagggacaggaatatatcatgatggcagcttgtaactccgcagactcgaacaaggatatgacaacaacaattacggctcttgaaaaattgaatggggcatcacagtttgaggattatcatatgtgcattgcgattgatacctatgttaccgtctggggct

SEQ ID NO: 1988 - DNA, 239 bp, Zea mays
  Clone ID: MRT4577_101816C.1
ctccatgtgttcgttggacgtcattctaacaattagccaatagacttcatattggagatctcgtcaccatgaaagacatgatcgttgcccatgtactactgcctcccattgcaagggccgattcaagtactagctgacactggcacccatggagaagggcgacacttcttcccccatcgccgataaaagagtatactagcgatctggggccctagcacgaggcgccattacattattac

SEQ ID NO: 1989 - DNA, 722 bp, Zea mays
  unsure (1)..(722): unsure at all n locations
  Clone ID: MRT4577_101817C.1
cattgggtacctcgaggccggccgggaccaagtgatcaccgaagatgtctgtcccttcatcgccaacacggagcccaagctcacatatgatcaggacgcagccctggatctccaacgccaaatcggcaagatggcacagcaaatcggcaactccgtcttcgacacgtaccagacatctctgacggggcgctactgctccaaggagatgtcacagctgttcagccagcgcagccgtcacagcacctggaggtcgctatggctgtacctggctgagtcagagaaagagcttgggattgagaccgtcacggaagaggcgctccagcagatgcgcgaccacctcgttgtttcggactctgactttgaggttgcccgcgttgaggagaagaggaggaggcacgatgtcatggcccacgtccacgcttttggtgaggtcgcgccgaaggctgcgggtatcattcactacggcgcaacaagttgctatgttactgataacgcagagctcatcctgatgcgtgatgccatgaacctgctcctccccaagcttgccaaggtcatcgacaacctctccaagttcgccctgcagtggaaggatgagcccactttggcctacacccacttgcagcccgctcagctcatcaccgtgggcaagcgagccgcccaatgggcccagnatctcctgatggacctcgagtcatccagcacgtcaagggagagctcctctt

SEQ ID NO: 1990 - DNA, 623 bp, Zea mays
  Clone ID: MRT4577_101818C.1
ctcgaggccggccgggccgggatcgtatctctagctctagctctagctaagtagaccaggggcggcaacatgactccgcttctctatggtgccgtgaaccacactgcagaccatcctgcgcttaagagccacctaagaaccaccgagaatgacagcctgtcacgtaaccacctgacgttcttcttctccacagattataaagggagggtgtccccttagctcttacacgcaatcgtgaagagcacgcagacctactgccgcccaaatgatgatgccctcctcaatcccgcaccggtactggatcccctctgacttctccttcgccgtcgacacttcagcgtaccagatggaacgagcatgaaatgaaaacgtgaagacagaatgcagctgcgatcacttactgacacaatcatccaggattgatactgaacgggaccaatctctcacattgtgatcgaactcgaaccgtatgaacgacacacacggcagattgctctaggaaaagtacatgcacgcgtataggatctctatctcgtggaccaaaatactgactgacgcaacctaagacatgagtgttaaccctaatgatctcgagcactatctctgcctcatcacacttgttg

SEQ ID NO: 1991 - DNA, 555 bp, Zea mays
  Clone ID: MRT4577_101819C.1
cgttgctgtcggttagaagtgagcagactgaaatatgaagtgagatccattttctatgtgtaggtgcaggtggcatccatttcagtgaaagcggactattcctttttttgccatgggttcctgtttttgcaattttgttctttccatttgagtattagaattgctgttagaatgatacgggtttgtttttctgtaataagacttgcactttcagcaaatggaaagtagtgacatccttttgctactttgggcatcctccctactgttgttcatttagatggtataaaacctgtttctgatgaaatcagagctctccaagtagctcagctggtatgtatgctgcacgagtaaatactacaggcagcaagcaacgagacagacttaatcgcatctcagccagtccatgtacccaactgtgtagatccccgcatcagattcttccagcacacagggagtaggttgacgaatactgcccacttgtcagcatcgtctcactccctgagacagcaaggcatccttccacccaagcctgaacccaccacttctgcattgaag

SEQ ID NO: 1992 - DNA, 413 bp, Zea mays
  Clone ID: MRT4577_10181C.1
ccaacccttccgaaaaaaaaaaaaaagggatcgggggagccaaatgaatcaaaggattaatgtttggttcgggaggggatcttaaaaatggtaaacttaataccaggatattttattttaattaaaggattaattagatattcgaaaccagaggattttaagtcctattcgaaattcggaggaatggcttaaggggccctttgaccacctcgaaaaagctcgttttcgattccagaaggtcgacctggaaccagatgagtttcgattgaatggttcctttgaattggaccgggaaaaagaaaattggattaatgctccttttattagttgggaccatttagaaaggtttaaaaccgaaccctttatttttgaaaaccaaagggcgatgaataaggtccgccaccgggttttcc

SEQ ID NO: 1993 - DNA, 567 bp, Zea mays
  Clone ID: MRT4577_101820C.1
ctcacagtctactacagtaacaacgttgagctcatgagagtcgctttcttaaaagggaggaacacattttcaatggtgtttccgttcgggagctggacattacatcaagaaaggtgagaagaggacaggaaaggctcgccttggtaatcagccatgtggcgtgtgcctggtaactgacgtgatgaattgatgaaactggacgcctcagccttgctctatcctggtctggagtctggactctatagaatggactcggcggatctcctccgctctccctcacggatatgacccctcaagcttccatgccatggaggcggccgcctgactgccgttgaccagcaacctccctcccggagctctctgcagtggcgtaggccctcgattaggacctccaagcatgggagggaacatgcaacaatagaaggtaacaatgccatgacaccatcatcgttttcagtatttggcatctcatgttgatgcatcttctcctccccatttagatcatcacatttcacatctgagaccacctgaacatacttcaccgcaaggtgctccctgagttgccgc

SEQ ID NO: 1994 - DNA, 291 bp, Zea mays
  unsure (1)..(291): unsure at all n locations
  Clone ID: MRT4577_101821C.1
gggaggagggggagccggcctagggtttggatcccgcagccatggacgccgccgacgtgtggggccgctcgtcgtcctggtcttctttttccgccgncgncgncgngaggcgcctgctggcgcgctacgatctgtntntggggttngacgacgcggacgccggtggggatgacgtgagggacccgtgcggnggnggggtggagccctacaactgtcccttgtgtggngaggacttngagttngtggggctgtggtgtgtcgtggacgacgagcatgttgttgaggttaaga

SEQ ID NO: 1995 - DNA, 1077 bp, Zea mays
  Clone ID: MRT4577_101822C.1
gccggccgggttgggatgtgcttgctttgcttaaaccagctcggcctttgcttttttgcagcggggtatatatcttcgctatatatacaactcctcccctgctccgcgcttcaagcccacccagagctctgtagaagagaggggagaggaaggaccgaggaccaaccggagccccactcggccgccgcctctcacctccaccgactgcctgcgtcccaccgctcctgctgccgcccgttgctctcgtcattgaagccctcaccgcctccgcccgcttgcccgccctcccgtcggctgccttccggatgagaagcggcgcaacctgggcggtggaagcgtggtcggcctgagccttcgtgggggttagcgccgagaaggatcctggagattaagcgcatgggttccttggatgcccggtacaggccggccggggcagctgaggacacagctaagagaaggacccagaaaagcaaaagtttcaaagaggttgagaaatttgatgtttttgtgctggagaaaagttctggttgcaaattcccggtcgttgcaacttttgctcttcgctatcatgtctgctgcgtttctaacactcctatacacaccatctgtgtatgaacatcagttgcagtcaagctctcggtgagtatacctgcgcaatctccagtaatgcagtagaggatcatgatacctcccccttagttcatggcatcatgttttcatgattgatcagtgaagtttttttaatacaacaacacaatgtctatgtggtgcttatgctctctgtgatgcttttgcaggcctgtcaatgggtggatatgggataagaggagttctgatccccgatatgtatcttctgccagcattcaatgggtggatgtatataaaagtatccaaaatctgaatgttggtgaacaaaagctcagtgttggactcttaattttaacaggactgagtttggtgcttggacacatatgctcccagaaagtgatttttcagtcataaggctagagcatgccaatgaaatcatcacatggcaaactctgtatcctgaatggatagatgaggaggaagaacccg

SEQ ID NO: 1996 - DNA, 987 bp, Zea mays
  unsure (1)..(987): unsure at all n locations
  Clone ID: MRT4577_101823C.1
ctcgaggccggccgggaagcccacccagagctctgtagaagagaggggaggaaggaccgaggaccaaccggagccccactcggccgccgcctctcacctccaccgactgcctgcgtcccaccgctcctgctgccgcccgttgctctcgccattgaagccctcgccgcctccgcccgcttgcccgccctcccgtcggctgccttccggatgagaagcggcgcaacctgggcggtggaagcgtggtcggactgagccttcgtgggggttagcgccgagaaggatcctggagattaagcgcatgggttccttggaggcccggtacaggccgaccggggcagcgtaagatctcactgtccagtctcgatctaccctccccttcccctacctcttcactcacctcagcccgcttgctgctcacgcttttgtgctggggttctgctcggtgtggatagcgatagcgtgctaatccaggttcagtctcagatgcgccatttgctttaccatgtgcggtcatgtgctgcgtgctgtattgatttgcatctaagctcgtattgatgcctgtgtctgggngtgtggtggtgccatcctccattcttatcatgcaatcttgcagcagtgagtgttgcggtactactaccatgtacctttgtacaagatgccgtcccttcccttctggtcgctgttccgttcaccatgctctgccccctctatttggtaggtggtgctggcagtggtggttatgcttttatgacatcttctaccagtccgtcagagaaactagcaagaactttgccccttctcccagcccatgatatgcatggatgctggtggttcgccgacgatgcgtttcaaacttgtaaatctgcccaccctcacactcgtcgggatcttcacggttctcctggccgaaagttactctctggtgtggtgattttgtatcccatatctggattctaataacaatcaacaaagattttgcttcgagcc

SEQ ID NO: 1997 - DNA, 2788 bp, Zea mays
  Clone ID: MRT4577_101824C.1
gccccggcggacccgatcagcttgctttgcttaaaccagctcggcctttgcttttttgcagcggggtatatatcttcgctatatatacaactcctctcctgctccggccgggaagcccacccagagctctgtagaagagaggggagaggaaggaccgaggaccaaccggagccccactcggccgccgcctctcacctccaccgactgcctgcgtcccaccgctcctgctgccgcccgttgctctcgtcattgaagccctcaccgcctccgcccgcttgcccgccctcccgtcggctgccttccggatgagaagcggcgcaacctgggcggtggaagcgtggtcggcctgagccttcgtgggggttagcgccgagaaggatcctggagattaagcgcatgggttccttggatgcccggtacaggccggccggggcagctgaggacacagctaagagaaggacccagaaaagcaaaagtttcaaagaggttgagaaatttgatgtttttgtgctggagaaaagttctggttgcaaattccggtcgttgcaacttttgctcttcgctatcatgtctgctgcgtttctaacactcctatacacaccatctgtgtatgaacatcagttgcagtcaagctctcggcttgtcaatgggtggatatgggataagaggagttctgatccccgatatgtatcttctgccagcattcaatgggaggatgtatataaaagtatccaaaatctgaatgttggtgaacaaaagctcagtgttggactcttgaattttaacaggactgagtttggtgcttggacacatatgctcccagaaagtgatttttcagtcataaggctagagcatgccaatgaaagcatcacctggcaaactctgtatcctgaatggatagatgaggaggaagaaacagagataccatcttgcccttcgcttccagatcctagtttttcaagagcgacacactttgatgttgttgctgttaagcttccctgtactcgtgtggctggttggtcgagagatgttgcaaggctgcatctgcagttgtcagcagcaaaattagcagcagccacagcaagaggcaatagaggaatccatgtgctgtttgtgactgattgcttcccaattccaaacctcttctcttgcaaggacctagtgaaacgtgaaggcaatgcttggatgtacaaacctgacgtgaaggctctaaaggagaagctcaggctgcctgttggttcctgtgagcttgctgttccactcaacgcaaaagcacgactctacacggtagacagacgcagagaagcatatgctacaatactgcattcagcaagtgaatatgtttgcggtgcgataacagcagctcaaagcattcgtcaagcaggatcaacaagagaccttgttattcttgttgatgacaccataagtgaccaccaccgcaaggggctggaatctgctgggtggaaggttagaataatacagaggatccggaatcccaaagcggaacgtgatgcctacaacgaatggaactacagcaaattccggctgtggcagcttacagattacgacaaggtcattttcattgatgctgatctgctcatcctgaggaacattgatttcttgtttgcaatgccagaaatcaccgcaactgggaacaatgctacactcttcaactctggggtgatggtcattgagccttcaaactgcacgttccagttactgatggagcacatcaacgagataacatcttacaacggtggtgaccaagggtacctgaatgagatattcacatggtggcaccggattccaaagcacatgaatttcttgaagcatttctgggagggtgatgaggacgaagtgaaggccaagaagactcggctgttcggcgccaacccaccgatcctctacgttctccactacttggggcggaagccatggctgtgcttccgggactacgattgcaactggaacgtcgagatcttgcgggaattcgcgagtgacgttgcgcatgcccgctggtggaaggtgcacaacaagatgccgaagaagcttcagagctattgcctcctgaggtcaaggctgaaggctgggctggagtgggagcggcggcaggccgagaaggcgaacttcaccgacgggcattggaaacggaacataaccgatccgaggctgaagacttgcttcgagaagttctgcttctgggagagcatgctatggcactggggcgagaacaagaacaactcgacgcagagcagcgcggtgccggcaacacctgccgcgacgagcctgtcgagctcgtgaggcctgttgtgtagatacagctttgttgagagtagtagtataccagatacgaaacttctgaagctcctccatacatacatagcaacagctctgtaaaggtagctatgtaggccttttcccccccgaatgactatactcttgttcgccgtcacggctgcagcgccccctcctgctgcttcctgatggctgacaattcttttggtttttgccaataattcatcagtataggctgtttttcactctgggcggcttgaggtccggtctggggctgttgttgcttcaaaccctaccggggctactgcttttgctgcggtacgccagcggtttgatgtatggtggttgaacagtttcagtgataaatctggagtgatgcaatatgggattgctgaccagcaaacactgcatcatcaatgaaaaaaaaaaaaaaaaaaaaaaaaaaaaaaaaaaaaaaaaaaaaaattaaaaaaaaaaaaaaaaaaggccccta

SEQ ID NO: 1998 - DNA, 727 bp, Zea mays
  Clone ID: MRT4577_101825C.1
cattgggtacctcgaggccggccgggaggaatatcgtacagagaaaacatctgcgcgcttctctccctccgctatacccccgcccgaatcgatgtagattaagggtccggcaacgagcctcagagtcgcgtcggcggccgcctacgatatcttccgccgagacccgcttaagaccttcttccttaacggcagcgtttcgcttaaaggtcggcaagcacgacaatcaaatgtctacagatttaagcgcaataacgtacaaagtaacctctttgatagactacacgaggctcgccaggccctatggcaatgcaattctaagttcatttgaggaccatgagcaagattctctaccatgcagatctggacatgaacgatgactcgacgcgatgagccacgacacatcacaggacttggcgttttgcataatacttgagaataaatacagaactgcacaacaagcttctgctgattgctatcgaaggactcaacatgctcttcacaagggtgacgaggatcttgctcgcgacgcccttaaggggcgtaatcttatgatgaccatgtaaggtgcttaagggcccagcttgatcaacagaagggcgtactagaacatactgatttctaagtacccgttttcttgatatcaagagtacacagggcacagctgaaatagatactgcttagagctcgtgctcagtcagcatggactgcctcaaaagtgagcgaaatg

SEQ ID NO: 1999 - DNA, 435 bp, Zea mays
  Clone ID: MRT4577_101826C.1
ggggggggggttttttttttttttttttttttttttttttttagccgaggaatttaatccttttacattccatttcagaacacgttccgggttcattgacacaagggcgatgggaacaacaaaagttttttcttttagatccaatccttgggggggggggggggcaggaacctgccagccaaacaagggtgcaagggcttttacatgaatttcagacaaaaatgtcttgaaaagatcagcatactccttttgggccctctgggcaatccccacatttttagcaattaaaccaactgccttcatgattttcttgatagcacgtttgtcaagggccggggcctttaattcaacgccttcaccagcaaatttgcgggtgcgacgtggcaccggtctggggggcagtttgttggcctttttcttcaagatgactggggg

SEQ ID NO: 2000 - DNA, 315 bp, Zea mays
  Clone ID: MRT4577_101827C.1
cattgggtacctcgaggccggccgggtttgtcctcccccctactacagtgctttggttgctacacttgtaaagtatgagtagagcagggattttctgcttttttggttttctggatcatggaaaaggttttatggcactactcctatgaaattttgcatttatttctcccaagacattattactgttgaaatttctttgctggggctttccttctacttttttgattcctcattttcttccgagacagtgaattgctcttgcaataaaaaggagtgcagatgtgtgtgtttaaaaaaaaaaaaaaaaaagcggcc

SEQ ID NO: 2001 - DNA, 301 bp, Zea mays
  Clone ID: MRT4577_101828C.1
gtctcattcacgcctacgttcggctcgagtctatctaccatggagatgccgaggatgaacatcgatgcctccaagtgtcatggctcatggccaaccgaatctattgcttcttggagcggacaagaggttgagtgaacatgcaggtctcttgagctgctatgcttcacgcatctcccacatgctcggtgtctgagcccatactgagagcacgtgttctacttaagcaactgctttcatcgtaataaacactggctttggctagctgtctttagtgatctcaaccagaaaaatcttgagccca

SEQ ID NO: 2002 - DNA, 425 bp, Zea mays
  Clone ID: MRT4577_101829C.1
gggggggggggggtttttttttttgtttttttaattttttatttattattttggtattttttgtttttttttttttatttttttattttttttttttgggcatttcggtataatccggtatggtatctttgggcgggccggggtgccctatagtgtgacgtagcaaaggttggagcaggggggggggcaggggcataatgggttaaaaagggaggggggcacacggtcataaacccacccggccgggggcggggagccaaatcctttaaggcagaaagagtaaacgagcggacaaaaatagaaaaatgcccactggccaaatggccgtgcccaaccccgtaaagccagcggcacaaaagaatgaaacaacactccaaaaaagggggggaggcaaaggggggaaaagaccaaaaaaagggggagca

SEQ ID NO: 2003 - DNA, 236 bp, Zea mays
  Clone ID: MRT4577_10182C.1
ccgccggccgggtgatccatcttacacagggatcgccatgtcggactcggaggagcaccacttcgaatcgaagggcgacgctggggcgtccaagacctacccgcagcaggctggcaccgtccgtaagaacggattcatcgtcatctagaactgtccctgtaaggctgtgcaggtctctacctctaagactgtccaccctcgtcactcattgtgtccctatcgctgttcttcacact

SEQ ID NO: 2004 - DNA, 627 bp, Zea mays
  Clone ID: MRT4577_101830C.1
cccccgtccaactatccaaggagtgaggaaggcacaatcagcaactgacctgcaataccttacctagctaggtgtagtttgtttgagccaagatgttggcggtgttcagcggcgaggtggtggaggtgccggcggagctggtggcggccgggagccggacgccatcgcccaagacacgggcgtcggagctggtgaagcgcttcctcgccggcaacgacccggccgtgtccgtggagctgggatcactgggcaacctcgcctactcccacgccaaccagtccctcctcctcccaaggtctttcgctgcaaaggatgagatcttctgcctgttcgagggagtcctggacaacttggggcggttgagccagcagtacggcctctccaagggcggcaacgaggtgctcctcgtgatcgaggcctacaagacgctgagggacagagccccctatcccgccagcttcatgctctcccagctcaccggcagctacgccttcgtgctcttcgacaagtccacctcctccctcctcgtcgcatccggccctgagggcgaggtgccgctcttctggggaatcaccgccgacggctgcgtcgccttctccgacgacatcgacctgctgaaaggatctt

SEQ ID NO: 2005 - DNA, 631 bp, Zea mays
  Clone ID: MRT4577_101831C.1
gaatacgaccagttgcatttatagacttatggaaaaacatactttcattgcaatataccatgaaattaataatgcacaacatggtaagacctaaaacatcatatatatatatatatatatatatatatatatatatataaatgttagcatatgaaatataattgtatatgaaaatgttagcttatgaaaattcatcatgttttacctgtccattaaccacacatgacagtaacaccatattacttccaatcatctttgaatttggccatgtgagcctccatatcttcattgttaatatccaaatatttgtcatataattcctttccaatagggatgtgcaccccttgtccacattttttgccaattcaatggctaattaaaaatatggataatatgctttccttccaggaatatcattggcgtgaaactacttcgtcaatgtttttcctagcatatctctgctaccacccctaagcatgatgtccacccgaggttgtgcttgtgccctactatgtgccacatctatgtcacaaggaccccgtgaaacacttgggacttcgtagaacctatccatccataaaaaataatagtgagtacacaaataagatctaataagattgttaactaaaaa

SEQ ID NO: 2006 - DNA, 531 bp, Zea mays
  Clone ID: MRT4577_101832C.1
attcggctcgaggccgtggtatccccaaacatttaaagcgtctcaatgcccccaagcactggatgctcgggaaaatgggcggcgactgggctcctcatccctcgcctggtcctcacaaactccgtgagtgccttcctttggttgtcctcttgcgaaacagactgaagtatgccctcacccgtaaggagactcagttgattgttgcccagcgtgtggtgaaagtggaccgcaaagttcgaactgacctgaacttccccgctggtttcatggacgtgattcaaattgatcgtaccaacgacaaattccgtctcctttatgacaacaagggtcgatttaccactgtccccatcgatgacgaggaaaccaagttcaagcttctgaaaatcaagaagaagtcaattggccccaagggagtcccctacgttgtttcccacgatggtcgcaccatgcgttaccctgaccttgttgccgggccaacgacactgtcaagtatgatttggactccggcaagattttggagtttgtgaaatt

SEQ ID NO: 2007 - DNA, 306 bp, Zea mays
  Clone ID: MRT4577_101833C.1
aaacaagctgatttaagcgatttaaacgcaatttcatcaatcaccactttattttgattttaaacaacaacaaacctctacttaaattatttcaagatgatgatgtgctacactactccgtctttgctcttgcgcagccattctctgccttgaactgggttgatgaattggccgatgatttgttcgaacctcgtttggaagtttggcctgcatctcgtttgcatcatagtttcttcaatcgtcaattgcgcaatttgaacgattctatgttcggatgggccaatcaacaattggaatctcttaaca

SEQ ID NO: 2008 - DNA, 818 bp, Zea mays
  unsure (1)..(818): unsure at all n locations
  Clone ID: MRT4577_101834C.1
caaactatgctaatttggttgaccaagaagagctgcaaaagttgctcatagcatcccagcaacagattgaacaatcaaaggcgaaggatacagagctcgaagcgctgaaggaacaacttggccatcttattctggaaagggacagcttgcttgatgacatggaccaaagaaagacggacctattggaggctcaactgctcgttgaacagctcgagcaacgggagcagatgctagaagcgcagattgaaatgttgcagctggagaaagacagccttcagcaaaagaccttggagatggacgagacaatcgagcttctagccagatcaaaccaaccagatataaatccacgaatgggcgacaaccaccatcgcggcagcagtgagttcagcaggcggctcgctcagtccgacatgctcctctcccacgcgaggcatgagcattctcgcaggcacgcggccggaagctcgaggacgcaccacggccggcaccgatgaagctcgaggatgcttgctagtagaatgctggtgcgtcagccgccagacaccgcttgtgtttgtagcggactagcggcgcggcttctctggccgggactgtacagaagctgcaccgaatggcagtggccagaagaaacttcccacgtctgtaagatctgcgcgcctgtaaatctgatagtgcaatgtacgcgttgttgtcatttgggccattgtatgttcttccgcgaggcttttcagcgagatctccctgaaagaagacaaacaactgaaaagtgacataatcccacagatttgtttctnnnnnnnnnnnnaaaaaaaaaaaaa

SEQ ID NO: 2009 - DNA, 554 bp, Zea mays
  Clone ID: MRT4577_101835C.1
ccggccggggctcgttaccgtcatctatgctacgttaggattggaacagttatgggatatgccgtccttctggctccatcagtaccatagtggcgcctcgcgtgctgccgactcccggagatgagcaccccaagatctaccggatgaatctctgtgccaccaacgaggtcctcgccaagagcaagtctggtacttcttgaggaagatgtacaaggctatgaagagcaacggtcagtgcctggtcatcaacgagatctttgagcgtaacccgacgggaatcaagaactaccgcatctggaatgagctaccagatgcagaaccgtgctaccacaacatgtacgaggagtaccgcgacacaagctctgaatggcgtgtgtgcgatcaaatgtagaactagatggcctctcgacaccgggtgaggaccccctggatccagatgatcaagactgccacggtgcacttcgagctctgcaagagggactacactaagcagttccactacagtgagatgaagctaccgctcgagtaccgcaaggacaggccgcccaccagga

SEQ ID NO: 2010 - DNA, 601 bp, Zea mays
  Clone ID: MRT4577_101836C.1
aagacagccttcagcaaaagactttggagatgggccgaggacatcgagcttctagccagatcaaaccaaccagatataaacccacgaatgggcgacaaccaccatcgcggcagcagtgagttcagcaggcggttagctcagtccgacatgctcctctcccacgcgaggcatgagcattctcgcaggcacgcggccggaagctcgaggacgcaccacggccggcaccgatgaagctcggggatgcttgctagtagaatgctggtgcgtcagccgccagacaccgcttgtgtttgtagcggcgcggcttctctggccgggattgtacagaagctgcaagacccgaatggcagtggccagaagaagaaacttcccacgtctgtaagatctgcgcgcctgtaaatctgatagtgcaatgtacgcgttgttgccatttgggccgttgtatgttcttccgcgaggcttttcagcgagatctccctgaaagaagataaacagctgaaagtgacaatcccacagatttgtttctactttaccgagggttagctagggttttgtgcaatacgttgacccttgtaacgaggcgcagatatttgcatgctcc

SEQ ID NO: 2011 - DNA, 545 bp, Zea mays
  Clone ID: MRT4577_101837C.1
acttctgcactttcactctatagtacctaggagatacccggctactatcataccaaggcgccaatccctccgcgagagagagtcagaaaggggatcagcctcatagctgctttcgagggtgacacagcacgagccacgtgggaagctcgcccgtgcgtcctggctgatcctgagctcgtgacgtgtctccgtgaccggcaggagcctcgttggagctgtacaagccgccggaccgtgcgctcctgacgtaccacaacggtgccgcgctgcaggtccgtattccggtgtacataatctggtacggccgattcacgccagcgcagaatgacgcggtcaccgacttacttgagtccctcaccaccgccggcgattgggagctggctccgtggccttgcgatttactgcggcggaacaccccacaccaactgcgcctttgccaacctctacagactgcactcctggctcggcatcgggaccatggctctgtacgcacatgcagagggtgctcgggttcgagaccttcttcctctgcgcagcacgccgag

SEQ ID NO: 2012 - DNA, 623 bp, Zea mays
  unsure (1)..(623): unsure at all n locations
  Clone ID: MRT4577_101838C.1
tgcagcgtccgatgacctccgactcgagatccggccatgaacatcatccaaatccaatgcagcacatcacgagcttaggcatactacacggctgacaaccagattgcttcctaccatgccatgcagcagaaatgtatggatctggcattgcccagatgcaagagatgagagactggaacgacttttatttactgttagcagtcaaacacatgcccagaatagatgcggaggtccaagttacactgtgtgactcgggatccaagaagattctaatcgcacacaccaatatacgcgaacctctaggacaaaaccacgacaagccgcgattctgaacgacgctgacttcttgatgcccgtagagggtgcaagtggagagattcagtgaatccagctgatacccgaggaatgggtcttcctttgacatgccctgaagtgcctcagggatgagacgcataacaatacacggattggtgcgccctagctgaggagtctcttgactctcgtatcatagcaattccccgatatgcacatggcgtatcaatacctcaggctgaacaactgattagtaaagtcgncactgcactacggagaagactttgttgattacgtcatcatccggtact

SEQ ID NO: 2013 - DNA, 453 bp, Zea mays
  Clone ID: MRT4577_101839C.1
ccggccggggcagccaaccatctaccagcgactcagagagcgagagcagcacacacgcagctagctaggagcagcaacagcagcggagatggagggctccatgatctcctcgtcagctctggcggtggcgcctcagggcctgccgcccctcggccggcgggcctcctccttcgtcgtcgtctgctccaagaagaagatcaagaccgacaagccctacgggattgggggtggtctgaccgtcaacgacgacgccgacggcgagaaagggcaagggcaaggcggtgtaccaggttgtccacgaataccacgcaaacgtcgacggatacagcccaatctacaaagaggatgactgagctcccaacggccgaggatacgtacatggaaccattgggctactgatatgggtcgacactgctctattcgatcctcggcggcggctgcctcctctgctac

SEQ ID NO: 2014 - DNA, 413 bp, Zea mays
  Clone ID: MRT4577_10183C.1
ctcgtccgcccgctcgtccgaaaggtttcagcacgcctccttttcccaaggtagcttctaagcttcggtcggtttctcaacgacctgggcggcttaaccaatgtcacgttcccttggaacgcgaacgccctaaccaccttccgtgcctacagcgagcatacactcacattgctatcttgaattcttactcaaaggcctacaaccataactcgtcacactcgatcatctacccaatctccaatcaacccttcgccttttccaatttttttaaacaactttacccatacgactaggtataaacactaacacagcgccgtcatcagactgacaaaaccaaaccctactaccacattccaaacccactcgaacttcccaacatcatagtgtacattacatcacacttcaaaaatcac

SEQ ID NO: 2015 - DNA, 172 bp, Zea mays
  unsure (1)..(172): unsure at all n locations
  Clone ID: MRT4577_101840C.1
accgtcgagctgcccgcacacgacacacctgcagacgaactgaatattcgtggaaccattggcaaaccgccgggatcgccctggctgtgtgcctctggcctgcgcggcccggccgcggcanactgcggctgccagcctaacttctgctgcagcaagttcgtactgcgacacg

SEQ ID NO: 2016 - DNA, 561 bp, Zea mays
  Clone ID: MRT4577_101841C.1
ataaactttgctatgacagtggctgcaaccaatcgtatcacataatttatccaaagcgatgtaaaggcacccatcgagtgcagggatgtcaagctacattaaactctcacaggtcaagaaaagaaggacgaccctcaacttaaatctactacaaaccgggatgtatacgcctttcattatttgtcgcctatgctgaccaatctgttgccagtggtgtccaagactgcacataacataatcaatcaaaggcttgttcgtgaccaatgatagactaagaaactgaagggtctgcctcctgtgcgcactgatcagaaccacgggacgagtgcgggtgacctagacatggtgggactggtccacgagcctcatgcctggcggtggctcgtgattatatcctgtcgactgaggtgccctgtgcctgacactccatcgaggcctgctctaccacgacctgacattatccctcgtgcactaccaccatggacaggtcaagattggaaacatagctctcattgtcaccgccatccttcacaagtacgacaccgtccactgcctagttgg

SEQ ID NO: 2017 - DNA, 767 bp, Zea mays
  unsure (1)..(767): unsure at all n locations
  Clone ID: MRT4577_101842C.1
cggccgcgtgggtgggtttgcttttcttcccttgnacatttccttccattctgataaagaaaacttagattcctacgttgtgtaggttgttgactaactccagtcctctgattgtgttagcgaagttctgttggatggcactgttaatttcttcatgatttgctgtcaattgttatatagctgcctacttgtagaacaatagaggtgttctctacctctgagatacattcatttaaaatgtcagataaagaaaactcggacatttatccttataatatcgttgatacccctgtttgtcagtttgtagaggtgtcatcctgtagcaccagtagtctggtggtactttttttttgcatgtgggcaggtacatagattaaacattctaggtatttctattttccctcaactgtaataactcccagatcacattgaggattaatactttttgacatgtttcttaatttttatagtataagataacatgttaaagctcgaacttctagttgattgcatgattgctattactgttgagtgttcgcaccatatcatgattggaatgccgcctcaaaatggtttaaatctttaagctgtcttcctcggatattttccagttgaagtgatttgagatagtagtgagtaatgtttggctgacataacaggctgcatcaccaccaaggaacttggaactgtgatgcgctcggtggggcagaaccctactgaggctgagcttcaggacatgatcaacgaggttgatgctgatggcaatg

SEQ ID NO: 2018 - DNA, 676 bp, Zea mays
  Clone ID: MRT4577_101843C.1
cgggacgaaggcctacgacgaggtcgccccgtcccacgtcctcacccaacctggaggcccacgtgggattcgacccattgtaacaggccccgcatggagaagtgtgttacaggctcgacttgtaatggcttttctgtaatgacagtctgtaaccctcccttatgggaatattccggggatagtccaggtgcctgagggcacatgcgtccttacatcaagacgttgggcactcaggcacctataaatacccccgtatagtgcccttgagaggctggattaacagagcgatcgtcatctcgagttaaaaccttgtttgcattcctttcactcccccgttggatcatcttgcccaggagagcaagttccaacagaggccatgactagcagctaaggacgagactcctgtgagcaccgtccacgactatcacaaccggcacgtagatctgatgcctagcggcaatctcctataagccaggactatgtccaggttaagaacgagtccgagacacaagattcagtgccgacattgaggaaggcgaaaggtggcgtcggggagaagacaataggacaagagttcacactcacctggtcgaagcaaagacgaacgagagtactcatcgaatggggaacgaagacggtgcaaatggaagaacggagtgtcgacgtcacgaggggc

SEQ ID NO: 2019 - DNA, 541 bp, Zea mays
  Clone ID: MRT4577_101844C.1
cccagctgtacatatgtatctagactgtttttaaatgtctttcttcatgaatgcttcatggggctccaggaagcctgtatcacctgtgtaagttggtatttgggcactttatatttttctaaaaacgtgttttggatcctgtactctaataaatcataagtttctttttaaaaattttccaaaacttttctccattttaaaaagccctgttataaacgttgaactttcacaatgttaaaatgttaaatatttggatatagcaacttcttttctcttcaaatgaatgccaagatttttttgtacaatgattaataaatggaacttatccagagaaaccaaaaaaaaaaaaaaaaaaaaaaaaaaaaaaaaaaaaaaaaaaaaaaaaaaaaaaaaaaaaaaaaaaaaaaaaaaaaaaaaaaaaaaaaaaaaaaaaaaaaaaaaaaaaaaaaaaaaaaaaaaaaggggggggccccgttttaaagaaccaaattttacttccccgtctttgcaaagtaatagtttttttttggggcccccaaaa

SEQ ID NO: 2020 - DNA, 293 bp, Zea mays
  Clone ID: MRT4577_101845C.1
ggcacccccaaaatcatagatctacttgtttcagctggatacagccccaaaaatttaaaattttggcaaacggaaaaggggttccgatttaaccatagacaattgcccaagaacagatatattttttacaaagaagacccttgacaatttgttgggtcaccctgaatcggacgagtccattcaggcagtattttgtgtcccgccccaagatatgggccatttaagcattagcaatccccatgtcggggagcttggggggggcccttttgtaagcattaaaaaaagccttttaa

SEQ ID NO: 2021 - DNA, 324 bp, Zea mays
  Clone ID: MRT4577_101846C.1
ctggttcggttttttctgatttgtgactttttttttatcatttttttctttttcttccaaagagaaaaagccctttttccttgcattttggccccccttttttgggggtttacccccctgttgggtgcattacccttacattcccccacaaaacaccggggggtggagaacttttgggcgggaccccctcttattttaaaccgcccgctccgctaaaaaccggccgggagcgaaaaacccctggtttttttccccctcagtcgcttaacggggaccggggggatcccccaaaggggggggtccctattaagggtggaggggcct

SEQ ID NO: 2022 - DNA, 315 bp, Zea mays
  Clone ID: MRT4577_101847C.1
aagaaacttggtaagattgaacttctttcagacttcaatacggaatacacggttaccgttccagaacagagcaaacgagtgacgctgaaacccaagccggggcgagaattcgggtcgaaatgttgtttttgctttttttttattgcttttcggagtacccaatttgccctgtacaaacaaaggagccggccggccctgagctcacagctaggaccgggtccacgcgccaaactccctatctactctcgacggccggatcagccggacagcacgccgccggcgaggagctcgtacggcgcgtcccgccttgcgcgt

SEQ ID NO: 2023 - DNA, 472 bp, Zea mays
  Clone ID: MRT4577_101848C.1
atttttcggattggatttggatttggatttggattgcccggctggttgctgtcagaaagaaacgttggaacatggcaggcaggcaggcaggtgcagaccccgggccgacgcggcggtgtgtgcggcctactgtccccacggccgacgccgacgccgacgccgacgccgtggtttggcatttcccggcggtgaaagaaaggaaaatcaatctcgagtggataggataggaccaatccacatcactgctcctcccctcccctccctgcatacattgctcttctcttctctacaaacaagattcagagaatccaatccagtccaatccatcttctctttgccactcttctccgctggagctgctgctgccaaagtttgtgtctttctctctgtccgtccagtagatgagcatggcggcgacggcggccacggccacggtgtggccctccacctcctcctcctgtcctcgcccccc

SEQ ID NO: 2024 - DNA, 384 bp, Zea mays
  Clone ID: MRT4577_101849C.1
tcggttgactggtcgtagattgttgtacgaccttttttggtacaatgacgattacatcttgtacgattacttcttggagaaagaaaagttacacaaattcagttttgctcaatctaggtttaatttcataacttctcgagttatggttcctgtttttaacgtttgggttttactaaactgcttctgatttaatatctttctggtctcactcttagtcttcgttcgacctttgcaaaattagatacaattttctgctcgttccacacaattttgctcctctcttggtggtttagatgtgagtttccttagatcaatacgtgtagcccaagcacattaaagtcaacatccatgttgcttggtcatacacaaaggttagtctttttt

SEQ ID NO: 2025 - DNA, 273 bp, Zea mays
  unsure (1)..(273): unsure at all n locations
  Clone ID: MRT4577_10184C.1
atcgagcaactgcgcgcgttgatcgacggcgcgatcggcgcgcagttcgacgatcccgacgtcgtgcgcngatacgcgcaactcgacgccgccttcgacggccacctccttccgctcgtcgatgcgaccgtcgccgccggccagacgggcgcctatgcgacgagcgccgccgatttctcgcgaacgatcgtgccgtatttccggccgagcgaactgctgcgcgaccgcatcatcgaccttgcgcggcgccgngccatcgccgaccgggacacc

SEQ ID NO: 2026 - DNA, 433 bp, Zea mays
  Clone ID: MRT4577_101850C.1
gtcatgccttcgtccacgcgttcgctgacgttttgagatgtacacactcgaaaccaaacggggggatgtggaaagacgtgtaaactgcctggtctgtcttctgtgacgaacggctcgtctttagaacaatggccatgtctatgacgagttgccaatagtacgcttactggctatgaacttgcacctacggcaacattttacacattttgagtgagaatcatgggaagatccatggatcgtctattatgatgtacgttgcctgcttaataatgggaccaatttcttctgctgagtttgctaaaggagcacaagaattttctgaatgcccatcatggtagaaaggttgagatcttggttggttcccgcgtggcaagatggctggtcctttccaggaagttgctttcaacacacctgacggaactgttagcgcacc

SEQ ID NO: 2027 - DNA, 251 bp, Zea mays
  Clone ID: MRT4577_101851C.1
agtggttcatcgatacaaatgtaccgacatagcataatatttttctagtacatcaagggcagcctcacatgccacggcacgagttccggacaacaaaacacataaagaaggtcaaaacagctccgatacttagatcatacaggttctcgtcatacatatatcctggaaccagaatggtgaaacccacccaggcatattattaacggcgtccacacaccaacgctaaatctctagcatacatgagcacgatc

SEQ ID NO: 2028 - DNA, 438 bp, Zea mays
  unsure (1)..(438): unsure at all n locations
  Clone ID: MRT4577_101852C.1
acgcaacaagcaacatagaaagtgtaatccattttcaacaatatagcatcaatgtctaccaatgtattatcggtcattatgctcgttgctgtttctacatgtgttgctaacgcgacaattttccctcaatgctcacatgcttctatagcttaccttgttnctgcatacctttcatcaattatagcttcaatatgtgaaaacccagctcttcaaccatataggctttatcaagcaatcgcagcacgcaacatacctttatcgcccttgttgtttcaacaatctccagccctatctttggtgcagtcattgttacaaaccatcaaggcacaacatcttgaacaacttctgctacctctgatcaaccaagtaactctggcatacctttctccctactctcagcaactacaatttcttccattcaaccaactgtctacactg

SEQ ID NO: 2029 - DNA, 266 bp, Zea mays
  Clone ID: MRT4577_101853C.1
ttttgggccgcgatgactcctgcggttggggtggtgaatcctcgcgcgcccggtcctggcgcagaggtggtggaggacgaggaggaggcggcggtcgcgtggcgtgagctgcgcggcaaggccgtggatgtcgcggctgcggacgatgaaagggctgtcctggcccgatcgcatcaaggccgccctcctagtaaggagggaggcgcttcggctggcggaggagctggaccagttgacactgatggtggatctccatcaagctcatt

SEQ ID NO: 2030 - DNA, 560 bp, Zea mays
  unsure (1)..(560): unsure at all n locations
  Clone ID: MRT4577_101854C.1
gtggactttttttttttttttttttagctcgtgatataattaaaaaaaaccaagttaagctgagccaaactgaccacgaatcgagcaagctcgtgacccacaaatattttgttcaaccctactacccgttttattgagaaggacagcgcttggcccgcgcccttcttcttcttcctttctcatttcattccgctccgtcaccatcgccaactttctctaatcttctcaacgctggctcaccctgcccagggctgcaccaccttgattacaattccttatttgacactagtaaagttactagttcaatttcttggtactcaaaatataaatcttcccagtgtaaatttcatttttttacatggaaattgacaccgtcattttttaccgtacgtcatataaagagccaaatttacacccaatgtcaaatagaaaagacttatattttgagggccaagaaatgaactaggacgcttactagcgtatgctactgaagtaccagtagaatttgatttccaatgtggttaactttgtccggtgccggctntccaagtttacaacta

SEQ ID NO: 2031 - DNA, 796 bp, Zea mays
  Clone ID: MRT4577_101855C.1
actcctaagggcgattgggttcctcgaggccggccgggacatcgcatcacattgccaagaacaagagctcctcctgctgctgctgctgctcctccttgtcctcctctgggtggtcacaacaatggagagcaaatcaccctccacctcatgcgtcatcagcccggcggccactctcaccatgttagccggcgagagcagctgggccatgcacatcgccaacttcctggcctccacgccgcaggacggcaccagagtgacggacggtcagcaaccccctgcagttcctggcggcagcggcagcagcttctcctcttcttcttccttcgattcctttagcgacaacgacgacgcctccttcatcacgtccgagttcatgtgcaacgacgacgaggatgacgacgagtccgtgaaggacaccgcctgcagttcttctgcagctgcccaacagaaggctaccatggagaacttccacatgaagcaaatggcagccaccgatgcgaaacagttcaacgacatgccccagctcatggccaagtacttggaagctatgagttcaaagcagcaggtgacgaccggcgccgaccatcaagccgccatcagtagttctagcgccgacgagaaggcgatccacgagagcaatgagctgaggaagagaggcctttgcttggtccctatctctatgctgataaactatctcggatgactgtttcttttagtttcatgtatacaccagtatatttcaatgcaactgtatacaacttctatagctaacacaatacatcacgcttcttctgtc

SEQ ID NO: 2032 - DNA, 454 bp, Zea mays
  unsure (1)..(454): unsure at all n locations
  Clone ID: MRT4577_101856C.1
cacatccctacgcatgacctttcatcgctggacagccccttttctgaggaggaaatctggaaaaccatcttatccctgccgtccagtaaagctcctggcccggatgggtttacagggaaattttataaatcctgttggcagattattaagggagatattttggctgctgctatggcagtctggaataggaggctgctgaattttgacttgctcaattcagcctatattattcttctgcccaaaaaggaagacgcctngctcgttaaggatttccggcccatcagcttggttcattcttttgctaagctcattaccaagcttttggctaacaggctggctggtcatctggataaactggtgtcgcatactcaaagtgcctttattaaaggtagatccatccttgacaaattcatgctagttcaacagacagctattcttttccatcagaaaagac

SEQ ID NO: 2033 - DNA, 1483 bp, Zea mays
  Clone ID: MRT4577_101857C.1
tccacttgtcctccgccccatatccgggctaccctagctcgcgatgttctccggcaccggaccttccggcggggcagcccactctacgtccaccggtggtgggggtggctcgccttccgacaggggcggccccgcgccctcggcctcggcgtcggtctccacgccagccagcgagagcaccgtcgcccgccgcctaaacggacttgacccccacggcgacgacgctccatcgtcgcagccagccacgagcaagaagaaaaagagaggggcacgggcagttggtcctgacaaaaatggccgtggattgcgtcaatttagcatgagagtatgtgagaaagtcgaaagcaaagggagaacaacctacaatgaggtggcagacgaactggttgctgagttttcagatcccaatattaatattgactctccagatcctgataattcgtctgcgcaacaatatgatgagaaaaatatccgaagaagagtttatgatgcgctgaatgtcctaatggctatggaaattatatctaaagataaaaaggaaatacagtggagaggtctgcccaagacaagtatgaatgatattgaagaactgaagacagaggtcaatggactgaaaggtcggattgacaagaaaaatgcatatctgcaggatttacaagatcaatatgcatgtctgcaaaacttggttcggcgaaatgagcagctatatgggtcaggagatgcaccttccggtggagtggccttgccatttatactagttcagacacgtcctcatgcaactgtagaagtggagatatcagaagatatgcagcacgtgcattttgatttcaatagcactccatttgagttgcaggatgattcatttgtactgaaagcaatggcattatctggcgaagaaactgattgtacccaagctcctggtgcgaatggaggcgagtgctcaagtacacggaacaattattggcaccaccaccaacaaccgcagcctccagggccaagagtagttagggtaccaaactcgcctcctattccagggatactaaaagggcgtgtcaagcatgaacactaggcttcaatatgcttagtggtgtcaaatgagctatttactttattgtccccagctagttttacctgtagaaaatgcatgtaaattatgcctgtaggggcagccgcagtctaatttggcttcgctgatggatagttcgatttgtgtcatgatatgccatacgcctagctcacgttaactcctagtattcagttgtttggtcgaggaaaagagtctgtggttaagtgtaattgtgtagtttatcttcaaacagtcggcatatcgtatctatgggacgatttgaggaacagtgttgtcagtacactccaattgatatacaataaaatgcaaatgtttgttttcaaaaaaaaaaaaaaaaaaaaaaaaaaaaaaaaaaaaaaaaaaaaaaaaaacaaaaaaaaaaaaaaaaaagcggcc

SEQ ID NO: 2034 - DNA, 284 bp, Zea mays
  Clone ID: MRT4577_101858C.1
tcttcctcacgaccgctatttcgacgcccccaccgccgggggcgaagagcccgacgaggacgtcgagaaggtaaccaaacccaaggaccggcccagcaccagacacatcacagaaaacggcctaaccaagagcaggcggctgctgacaagctcgagcttcaacacagagcacgccacgatagacacgcccagggacacacaaaggaagagggctgaatctggaagaagcaacggggccaacgggcataccacaactaggatcatggcgaaagacccacccaggg

SEQ ID NO: 2035 - DNA, 489 bp, Zea mays
  Clone ID: MRT4577_101859C.1
aggggaatatatatttaatattgggtcaatgatatttaaacatttgacgtgacaaactagactttaatgggggaaactaaacacccggtaagtcaaacagtttcataggggattagttgctttttaataaatctcagagccagattcactatcttagcaaaactgggttaaacaggctttaatatatgggggttttgatcagacctactccattaacatacctaggtttgcctcaagcccttctcgtttctaaacagcttgataagcctccatacattccggcaatttcttggttccgtatttagaccctgtttgagatagcttcaggtccagccctgtttgggatagcttcagctccagaaaaattcatagaattagggaagcatgtcaattaaaagtggtcgacagctggagcagtcatgcctggctgaaccgtagattgaaggttacttcttggcaccatttaaaaattcatggtacgcttgaaca

SEQ ID NO: 2036 - DNA, 383 bp, Zea mays
  Clone ID: MRT4577_10185C.1
attgttgaggtctccattgggaaggccacggcattgatttctgcaagttcttcgcgacactggacatagtgaactgactactggggaacacgaatggccgattcactggggaggctcacgtcggtgtcccaacagctatgcaaacagaattcgccttgaatcggaacacgcagaacatgggccgagggtatgacgaggagaccagatgtaagaagcaagagtactacagtgcattagacaaccaggtgagccagcggggttcttttgagtaggagtaaacacgttcctcacctccttcgaggcccacaatgaagcctgctgaagacaagggccgcatggaggacaactaatgcgcatgaattacaggggcactcctactatgc

SEQ ID NO: 2037 - DNA, 268 bp, Zea mays
  Clone ID: MRT4577_101860C.1
cttcccccatcctgtgtggatgtgttctctcactcatgcggcataagcacacatactctcgcaacccggcatccctcaggagagcctcggtggtcaacaaggcctttctgttaccgtggtgcactgtctcactggaatggatgtagaaggcttcttctggagctgtcctccctccctggattgagtgtccccatcacctgttccaagctgcgttatgaggtgggaccctttactggctgacagcagtcaacaccgagcgagggggaaa

SEQ ID NO: 2038 - DNA, 410 bp, Zea mays
  unsure (1)..(410): unsure at all n locations
  Clone ID: MRT4577_101861C.1
gcggcaggaggggggatgcatggatagtcatccacatgaactttcagagttgcagtatcagttttttcttatgcagaattcattgactatcatgaatgaaatgagttcctattgatgttgtttcttgaatcataggattgttctgtgtaccttatggtactttgtgttgtagggactgttatagaacattagatcagctctatgaagaattataattggaaccatggtaatggagtgtttgttttcttgtaactttttccagccctatgaatcgtattgcttgctcactttggttcattctttccaggtgactcgtaagactatctttgtgatgctaagaaaatttacatctgactctctctcccncccagcacacacaaacaactaattagatagaaaagaagtgaaaa

SEQ ID NO: 2039 - DNA, 593 bp, Zea mays
  unsure (1)..(593): unsure at all n locations
  Clone ID: MRT4577_101862C.1
ggctgacttgagcagggggaaaggaactaaatactcattataaagataagcactgtgtggctggtactagctatgtagatcaaacctaccacgcctctaggaattcgcttctcgccggcgcgcatgctcgcaccccgtacagaacgacacacatgtacgaggatgcgcaggtntacacggcagacgcgcgacacgccggcgatgcgacttctcgaaactcggcgcgtgctgagctgtgcgtggggggtgagtcaggtcatatcagagctcgacggagcagatgctgggcgcgacacataccatgcgcggggacctgacggaactgttaaacacccgatctacccgacacggcggaggaagtgaacgtgctgcccgcatgcccggatgatcagtcttacatacacatctcttcatccgaggagtacgagatactgaccagctcgctcacctggtggacgccgagtacgtggacaagtacgaaaaggccatggcgctgatgaatcagctgacggacgacgacccgcgtaactgagagcaggagtggcgcgtgcactgcgcctactgcgacggcgcgatacgaccaggtggggttc

SEQ ID NO: 2040 - DNA, 226 bp, Zea mays
  Clone ID: MRT4577_101863C.1
acgtattattactcactaaccagttaactttcaaaggacagactggcaccaacggggggcacaaaaatactatgttcacttatgttgatagctcttaccgcaagtgttgccacaaggacaatattgacacaatgctcacatgcatggatcgtttcgatacatcaacgataactataagcatcgttgcaataaactgaaggaacccctgcttatcaaccctgcctta

SEQ ID NO: 2041 - DNA, 273 bp, Zea mays
  Clone ID: MRT4577_101864C.1
cagctctcctatgaggctgtcggcacggcagcagcgacgctcgcattggctgcgtggatgctcgctgccagggggccggagggcgtgttcggacacaagagtcaggccgggacgaaacaagtagctgcagctgcagtagccgcagcagcagcagcgtcatcttcgtcgcccttggagaagaaggaactgtgactctgattctgtctgacgacgcgctgcctgcccgctcttgctcgtccgaacaaaccacacatctagcatgcacatcatttg

SEQ ID NO: 2042 - DNA, 498 bp, Zea mays
  Clone ID: MRT4577_101865C.1
ttcaccaaatcaaactaagaaaacggccgagcgatcgatgaatagaagaacaacaataagacgacgacgacacccaccaccacgcagcaagaagaaatcagaacaacaaaatgcagatcaagtactgggaccaacacaaggactgggagaggcaacgtatgtaccgactgttctgcgcctccctaggaggaagtcatcgggttctgactcctcatcgagctcatcgcctggatctgcctccgccacaccaaacctcgcttcttcctcaacgactgtgtagcatgagtgagtatcaacgtcagatcagcctcctacctcacacaggcacatgcaggtcacactgtggtcacgcgacaccaacgaccgcgtcggaaactactacgacacgggcccacgtgtacgccgagtacctctcaatgcaaatcacggagcgcaccacgctgctacccttcttccagccacgaaaacacggcacaatctgagggcccttactctccg

SEQ ID NO: 2043 - DNA, 446 bp, Zea mays
  Clone ID: MRT4577_101866C.1
tgatggccggtgcagtgggggcagatcgcaggcgtgttaggcaatggaacagggttgaggccagacatgagagcagttccagtctcagttccagagagcaatgagtggccaccgggcctctgctccttcattcttggagtagtgcgtcttgcgcagatgggcaaggcgagccagtggctcaaaaacttgttgctgtccggcaggaaagggaggaaggccaaggacagggctgaagccgactgccagtcggtgctgtccgcgccgctgccctcgcacgcgcaggcggcggcgacaccgcacgggagggagaagaggcggtggagcttccggcggccgggcgcggcagcgttcagctcccagggcccgcttgcgtcctcgtcgtcgcactgcttctcggaggcggagctgcatgtcgtcgtggtgcagcatgagcagggacagcagca

SEQ ID NO: 2044 - DNA, 460 bp, Zea mays
  Clone ID: MRT4577_101867C.1
attttgttatttttttttttttttttttttttttttttttttttttttttttccaaagtaagaggagcgcattgaattactgcccgatcattctgggtttttgatcatcaagaggaccacattgagcaactgtttggtgcccacgtcatttcctgtttttgatggcccttttaaccattttcccgggcatggaggacaatggcgtaacgcccttccgaattttaaaaaggttccaccccgtccccacggggtggccggccgtcaaaaaccctttttgggttgcctttcctgcgttttcgccgtaccttctggacattgccccagcaacaacttttaaagttgcagggagtgattttttttgggggttttttaccgaatccattatttttttgatggcgtaaaaaaatcccagaataacctccccgggcacggggggaagaaatgctcccccttgcttgga

SEQ ID NO: 2045 - DNA, 320 bp, Zea mays
  unsure (1)..(320): unsure at all n locations
  Clone ID: MRT4577_101868C.1
ttagcgggggcggggcgggcgggcactgtcttgtttttttttttttttttttttttttttatggtntcggctttcgctttctttgccggctgcggccccgacccgctctttccgttctggctttcacatgtgcgtatgtccttacactggaagaattcgaactgtagataattgtggggggccttttggttggcgcgcggcgccaccgttccgtttgctggtggcgcttgcttggggcgactcgcgnggtggggggggttggggatgcgcggggcgctcgcgccgcttttgagagcccagtggaggcccttgtgaaaagg

SEQ ID NO: 2046 - DNA, 569 bp, Zea mays
  Clone ID: MRT4577_101869C.1
gccgggcgtgcgcagcgccgcgcgtttgcgagtccgggacgactacatggggaggggccgcatcgagataaagcgggtcgagaacccgacgcagcgggagtccaccttctacaagcgcagggacgggctcttcaagaaggcggggagcagtacacggtgccgtcgctggagctgctggagcacagcctggaggcggccgtgcacagggtgcgctccgagaaggaccgcaagatcggcggcgagatcgactgcctccagaacattatcagaggacgccacgaggagcgctacgggttgtgcgacaaggtaagcacacgattttgtgagctacagacgctcagaacgccccgagactgcacttaataagtatacatttcttgcaccataaaacgtagcgtcgtgtgagcaacttaaattacttgcgtacatttctttggctatatataagaacatttcttcatttgcttgcaccatacaaaacaaccgaagagatggttcatagcaggcaaaagaatcttcctgcgggcctgcctatggctttgcccgctagcagataaacaacctatctg

SEQ ID NO: 2047 - DNA, 414 bp, Zea mays
  Clone ID: MRT4577_10186C.1
gcctcacacggctagctacctacctacctacacgaagaaccagagcttctctcgctcgccttgccgtgcgtgatcttgctctttctttctctctatggaggcctcgccgcctcgcagcgacaccttctcccgcgactacaagccggggccatcgttcgagcgcctggacgccgacgccgccctcggcgagtccttcagcagctccaccgcgtccttctccttcatcgacatggaccccgaggagcagctgttctcgatgcggtggacgtcgtcgtcgtccgagggagacgggctccgcttcggcctgccgcgcgctgcgggggcgtgcagctccccgctgctggccgccagcgccggcttcgtgttctcggacgacagccttcttctcccctgcgacgcgtcggcgtgcttcct

SEQ ID NO: 2048 - DNA, 960 bp, Zea mays
  Clone ID: MRT4577_101870C.1
ctcgaggccggccgggaggcataggcatagcttggctcgcacggtgtcgctggctcccctccccttccctccccactgttacatccagcgagctgttcacggccgtgccgagctcagtgaggcagcgtttgcgagtccgggacgaggggagcggcgggcgacatggggaggggccgcagcgagataaagcggatcgagaaccccacgcagcggcagtccaccttctacaagcgcagggacggcctcttcaagaaggctagggagctctccgttctgtgcgacgtggacctgctgctgctcctcttctccacctccggcaagctctaccactacctctcgcccaccgtcccctccgtcaaggacctggtcgagaggtacgaggccacgacgcacaccaaggtctggaccgacatccgccaggagcggcgcgcggagctggagaaggcggagcagatgtgcgagctgatggagaaggagctgcgggtcatgacggtggacgacggggagcagtacacggtgccgtcgctggagctgctggagcacagcctggaggcggccgtgcgcaaggtgcgctccgagaaggaccgcaagatcggcggcgagatcaactacctcgagaacattatcagaggacgccacgaggagcgctacgggttgtgcgacaagcttgcgcactctcaggcctcgaacaacggcggggaaggtggagggtcgaccccaccaagcggcggcggcctggaactcaaactgggattcaactgacgctggctggcttggaagctggaggatggatcgaagactatgcgctgcttcattgtaccctatcactctgtcaggctacctccccccctgcaccctgttggttatggtttaaaatggttgttgaccaaagttgtcctggatcaaacaaggctcagcttgatgttaatgagctgagggatctaatgtattattagcctt

SEQ ID NO: 2049 - DNA, 286 bp, Zea mays
  Clone ID: MRT4577_101871C.1
gatagtttactctaaggatcaatccgcttgactattgcctgacatacaccagacagcaggggtactgctctttcagtagcgccagttactcacgactgaccataagtgatactgacgtaccatcacttgctgacttagtcaacaagcagaagatcacagtattgcataatactggctctgatgatccaaactccaaaggtgcaccaaaggctgatcttgagagaatatgttgagtatgatcaagcacgagctctcataaccgatggttctggtgacgtacattgct

SEQ ID NO: 2050 - DNA, 264 bp, Zea mays
  Clone ID: MRT4577_101872C.1
acgaagcgtattggcttccgatctactgaagcggttcagccgcagcagactgcgacgggcgacgaggacaacgcaggctctatacatgggatgccagctatgcggcgccgtgccccggttccacggcctgcggggctacgccgtgccgacgtccgcggtggtagagctgacctacgagaagctgatcacgaagtaaggtgtcctcgaagggcatccgctgccactacatccgctgcgccaccaacctggtcatggtgaccacga

SEQ ID NO: 2051 - DNA, 542 bp, Zea mays
  unsure (1)..(542): unsure at all n locations
  Clone ID: MRT4577_101873C.1
ccggnccgggacacgttaccacttcacctccatttattgtgccaagaaaccagcgcatgcgcacccttcaaaacgacacccgctcgccgtcagttgcttcgcacactaaccgaagtcccaatcccaatggcgccaacctgccgtcctcggccggatgcggcgctcctgctgctgctgctgacggcgagtagcgtcggcgtcgcacgggcggcgccgcgggtgccggcggtgatcgtgttcggggactcgacggtggacacgggcaacaacaaccagatccccaccccgctgcgcgccggtcccgcgccgccgccatcgtccgcggcgcgctccacgtggtgagcatcggcaccaacgacttcctggagaactacttcctgctggccacggggcggttcacgcagttcacggtgcccgagttcgaggacttcctggtggccggcgcgcgcgcgttcctggcgcggatccaccgcctnggngcgcgcagggtgaccnttcgcggggctggccgccattggctgcctgccgctggagcgcaccac

SEQ ID NO: 2052 - DNA, 1011 bp, Zea mays
  Clone ID: MRT4577_101874C.1
gccacgagcgctgcggccctccaatttaaagcagcaacgacgggcaaagagcagctcggcgggggctgctgcagcgccgcgcgtttgcgagtccgggacgacgacatggggaggggccgcagcgagataaagcggatcgagaacccgacgcagcggcagtccaccttctacaagcgcagggacgggctcttcaagaaggcaagggagctcgccgtcctgtgcgacgtcgacctgctgctgctgctcttctccggctccgggaagctgtaccactacctctcgcccaccgtgcccactgtcaaggacctggtcgagaggtacgaggccgcgacgcacagcaaggtctgggccgacgttcgccaggagcggcgcgcggagctggagaaggcggagcggatgtgcgagctcatggagaaggagctgcggttcatgacggtggacgacggggagcagtacacggtgccgtcgctggagcagctggagcacagcctggaggcggccgtgcacagggtgcgctccgagaaggaccgcaagatcggcggcgagatcgactgcctccagaacattatcagaggacgccacgaggagcgctacgggttgtgcgacaagaacttcttgcaaatttggccgcagcttgctcattctcaggcctggaacaacggcggggaaggtggagggtcgaccccaccaagcggcggcggcctggaactcaaactgggattcaactgacgctggctggcttggaagctggaggatggatcgaagactatgcgctgcttcattgtaccctatcactctgtcaggctacctccccccctgcaccctgttggttatggtttaaaatggttgttgaccaaagttgtcctggatcaaacaaggctcagcttgatgttaatgagctgagggatctaatgtattattagccttatccggctcttgtttacgtgctcatgtatccatcgcaatccatgcacgttaggatagattgtctaaaatagttcaaatttcgtt

SEQ ID NO: 2053 - DNA, 1166 bp, Zea mays
  unsure (1)..(1166): unsure at all n locations
  Clone ID: MRT4577_101875C.1
ggtaccctccnggttcggccgggaagacccaaagcgacgactcgacgcaacagacacgtcgcttgtgattgtcccctgctctgcagtcttctagctgtcgccacagttcccttcccagttcccaccagttcaccacttcacctccatttatttgccaagaaaccagcgcatgcgcacccttcaaaacgacacccgctcgccgtcagttgcttcgcacactaaccgaagtcccaatcccaatggcgccaacctgccgtcctcggccggatgcggcgctcctgctgctgctgctgacggcgagtagcgtcggcgtcgcacgggcggcgccgcgggtgccggcggtgatcgtgttcggggactcgacggtggacacgggcaacaacaaccagatccccaccccgctgcgcgccgacttcccgccctacggtcgcgacatgccgggcgggccgcgcgccaccggccggttcggcaacgggcggctgcccccggacctcatctccgaggcgctcggcctgccgccgctggtgccggcctacctcgacccggcctacggcatcgacgacttcgcgcgcggcgtctgcttcgcgtccgcgggcaccggcatcgacaacgccaccgccggagtcttgtcagtgatcccgctgtggaaggaggtggagtactacgaggagttccagcggcggctgcgcgcgcgcgtgggccggtcccgcgccgccgccatcgtccgcggcgcgctctacgtggtgagcatcggcaccaacgacttcctggagaactacttcctgctggtcacggggcggttcgcggagctcacggtgggcgagttcgaggacttcctggtggcgcgcggagcgcgggcgttcctggcgcagatccaccgcctgggcgcgcgcagggtcaccttcgccgggctcagccccatgggctgcctgccgctggagcgcacgctcaacgcgctccgcggcggctgcgtcgacgagtacaaccaggtggcccgcgactacaacgccaagctgctcgccatgctccgccgncttcaggcggcgcgcccggggctcaaggtagcttacgtcgacgtgtaccagaacatgctcgacctcatcaccaacccttccacgctgggtagagagagagagagagagagagagagagagagagagagagat

SEQ ID NO: 2054 - DNA, 291 bp, Zea mays
  Clone ID: MRT4577_101876C.1
aagacgggcgttccctaataacctcccactcccatctgcgtctcctcgccgacacctgagccgtcagagcacggagcagtccgcgaccacgctttcgatgccgctctccgacaggcgacggaaccgcaattccagaagaagacggatttttttaatggggggtgaccaaaccccctcaaatcgattgcgaccaaagaccggaacttcacggggcaacagaagccgccaccacctgaccaggcggacatgagaactagaaaaggagggagcagggaactcataaggtgaagg

SEQ ID NO: 2055 - DNA, 643 bp, Zea mays
  Clone ID: MRT4577_101877C.1
gctgatggacctatagatggtgaagaaaacaagagactaggttaggatagcagaatggttactgtggtgtgatttcatctatgcttacaacatggtgtccatgctgcttgattttgcttgccctctgctcgatcttcgctcctagggttcatgtacgcaagcagagtagaggcagtgcaccattgaggagcagatggatggtgtgcgcagacaggcacagatggtgtgccatggagcaggggcacaggtgaggggtgctgtgcatgcaaaaagcatagggcaggcgaacggcatggtttggggagacaggacaggtgatgcagctgcatgagaatgaaggcagcagctgttaatcggtggtggtagaggtaggccgtacgggattgatgggaggtatggtgcttagatgagctagtgggcttccctaaggcagtgggctgtctagactgtagacattctgtcttcctttcccatttattctttcatatttgtgcagattgcagttacatctcctgtctagcgcctagtgttcttttgaatcttaagtttatccatatccttattctttgtaagtggcgtttattgtctgaatacaggctgtgccaacttcaagagggcaggcccttgctgatgagtatggcat

SEQ ID NO: 2056 - DNA, 410 bp, Zea mays
  Clone ID: MRT4577_101878C.1
caacccaacatctattatctaagctctgaaggcaagggtggtagaaaactgaactctgccctgttgtcttcagctccgtctcggatttctccaacatcttatcttcattgccactatcggtagccgccactgcaaaatcaagcggaatactcctacatggattagagtaaggtacttagcttggccagggagggaactccgagctgaaacttgggcaatttctggttgagaaagaaaagacgagacttggtttccaccaatttctcatgttcggttgatcagatgtgtaagtggcagtgcagcaagatgagacctgtctgaagaatttggaagctgaaggtgagcgtttgtggaaaccaagtctccagctgcacgcaaagcacaagatttggttcccattcaatgtctca

SEQ ID NO: 2057 - DNA, 490 bp, Zea mays
  Clone ID: MRT4577_101879C.1
ggaaaagaaaataaacctttttaaacacaaggggcacacactgtccacaataggcctaaaaaaacaaaaaccaaggctttttatgagtccccatcgcttcaggaatgaaaaagtcaataaaataaattaactaaaacatggcagggccctttgttggggggtgcctggattttataagggttttgaccttgtttcggaaccttggagagggaaaaggtcaccggtaactggagagggagcgggatcggtcccttttggggcttttgctcctacaaacgattttgttataacgcccccttttttgggggggaacggttaaaacttatactggggctacaaacccttggttcgaccaacttaagaaaggttttccctgcctttggtcgctcttgtttccgttttttggaattctaaaaaccctgttctttaaaatttgttgaaaagtggtggctaataacccttaagttttttggggggttttttttttagg

SEQ ID NO: 2058 - DNA, 1012 bp, Zea mays
  Clone ID: MRT4577_10187C.1
gccttgggtactccctgtgtggcaacggatgtgacgggcattcccgaaattattcagcaccaggaaacgggattgctggtggcccaaaatgacccggaacagttagccaaagcgctccaaaccatcttgaaccaagcagatttacgtcatcgttacgcccagcaggcccgccaacgattagaacaggcttttgacctgcgacgcaatagcgcccaactccgtgacttatttcatttaggggaggccaaacgatgaagattgcttacatctgtgtcgatcccggcattccagtctttggttgtaaaggtgcctcaatccatgtgcaagagattatccgcgcttttcagaaccagggggcaacggtgaccctgtttgcggcaaagctggggggggaaccgcccaaggatttagtcgatttacccgttcactgcctgcccaaggtgcccaaaggagatttagcaatgcgggaacagggcttatttcaacaaaatcagacgttgcaaaatttattaacccaggcagctccctatgatctgcgaggagccatggtcaccaatgccaccctcaaccgagctaatttgacttcggctaactttgcctttgctaaactctacgacgtggatgtgaccggtgccaccgttgagggtatgaacatccaaaatgcggaaatttacaacacgggcattggtattggcggcggcgacgattgatggccttgactggagttgggcgaggaaaaggcgatcgccatggctcaatggttaacggccatgttcctgtctttcctgttcaatttccattctgatttccgattccagttctttaccaagaaaatagtttaaaaaagtcctgattacagcgattagccctagtttgctcaagctttctagggtaggggcgatggtggtggaaaggatatctgcccccaattggaattccagggctagagccaaccacaaaccgaattgcaagcgaatactgttgaaaaatttgggcgtattcatagtacggc

SEQ ID NO: 2059 - DNA, 206 bp, Zea mays
  Clone ID: MRT4577_101880C.1
tccaaatttagagcacgagcgcccgtgattggaggttcctagtactaccagctaggccactgctcctttgctacccgataacgctccgccggtataattcaccgagcagggctaccaatccgcaggctgtggacacccctcctactggacgttaacggcgttgtggcctatgccgccttcggcaactggaggtgtagcgaagagca

SEQ ID NO: 2060 - DNA, 202 bp, Zea mays
  Clone ID: MRT4577_101881C.1
gacacgcttacgcccacgcatggttgatcctatgtttgccagcaaaagatggcagacactgagctacgtcatgatgtcaatgtctcgtgatagaatgacattacactacttgcatcatgcgcccatatcaaaaaagctcgcgcgaaatactgggatttgtgcgcataaatgtagcaagagccagtatctcctctagttgtag

SEQ ID NO: 2061 - DNA, 531 bp, Zea mays
  Clone ID: MRT4577_101882C.1
aaacaaatatatttattatttagaaataatttcttgaattacaatagcatccacatacaacgttatttttcttgttccgtacaaagattgtaaggaaaaatagtatcaaagccatattgaaatctaccacatgtgcgatgctccatctctagtgcaacaaactctttactgatttatgttcatccattcttagtcaacaaatgaacttgcttcacattactgcttggtgataagaagagaccaatgcaaaggatgcatccatctactttgccaatcatgacaagatgataagattgtatgtcttctttacttccttcaattcatcatacattgctggttgtagtgctacctactgctaagcagaccacactagccctctacaaaagaagatataataaatatcagatgtcatgaactgctgacaactcttttgaacatcagtgtgccctggttcctgaatgaaatttgttaagatcgacaggcagcagtattactgtatgagcatgatatcctgcaagttaaggtactcat

SEQ ID NO: 2062 - DNA, 122 bp, Zea mays
  unsure (1)..(122): unsure at all n locations
  Clone ID: MRT4577_101883C.1
accacacgcgtccgttgttaaatttaacttttttgatggcttaatttaactgctgccagggaagcctttttttaagtngcagtaaggttcttttagtctgaacccttttctaaccgttggat

SEQ ID NO: 2063 - DNA, 113 bp, Zea mays
  Clone ID: MRT4577_101884C.1
gacctaatattgcagtcgttgtaacagtagggttcatacatttagattcaaatacatctacagagacagtttgtctcttagtatcgcaggagagaattagcataacaaagtcc

SEQ ID NO: 2064 - DNA, 840 bp, Zea mays
  unsure (1)..(840): unsure at all n locations
  Clone ID: MRT4577_101885C.1
agtacccccaacaccgacaacctggactgcgcgtccacgaactcactcgccgaacagacatcattccccttaccccgacgtttgaaatcctctccagccgatgcatcctccccatcaatcttctccggttcgttgcattgcgtctggattggcctgcccctgctagattcagggacttcgcatccattgtgtctgatttcttctattcagagtgaattgcagaagtagactggtttcttcttcatccagtaagctcagtctgtaccctgcactgcaacaatggtgctaggcctccgaaccaagacaaggaaggattctgccttccatgtggatttcaatattctcatccaagaaatcagcccatggcccccttctgaatcgttgaagtctttgcgctccgtagtactcttctgggaaaatggcgagcgcaattcaggaaagacgagcactgttgcgccttcaattgggtcaggttccacagcagggaagattgaatttaatgagttcataaacttacaggctattttccagaaggaggggtcatccaagagtggaaagtggcagaagaacctgcttgaattgaacttgtatgagccgaggagggagaagctgaagggccagcatttggggtctgcaacactagaccttgcagagcatgcaatgtttcatgaggacaccagtgttcctggtgcctctcagttccaagagaagtttcaaaaacaatgcccaacccatggtttacctccgaatccagcctttggatggcgataactcaagcgtttcttcaagagatgcattatcaccagaggcatcagntgataaagattcaaaggaatttgt

SEQ ID NO: 2065 - DNA, 791 bp, Zea mays
  unsure (1)..(791): unsure at all n locations
  Clone ID: MRT4577_101886C.1
ggggtaccctccnggttcggcctctacgtccacctccgcgtcggcccctacgtctgcgcggagtggaacttcggtggctttcctgtttggctcaagtatgtgccgggcatcaggttcaggacagacaatggcccattcaaggcggcaatgcagaagttcgtcgagaagatagtgtccatgatgaagtcggaggggctgttcgagtggcagggaggcccgatcatcatggctcaggtggagaacgagttcgggccaatggagtccgtcgtgggcagtggcggcaagccatacgctcactgggcggcccagatggctgtcgggaccaacgccggcgtgccgtgggtgatgtgcaagcaggatgacgccccggaccccgtgatcaacacttgcaatggcttctactgcgactacttcacgccaaacaacaagcacaagccgaccatgtggaccgaagcctggactggatggttcaccaagttcggcggcgcggcgcctcaccggccggtggaggacttggccttcgccgtggcacggttcgttcagaaaggaggctccttcgtgaactactacatgtaccatggaggaacgaactttgggcgcaccgccggtggccccttcatcgcgaccagctacgactacgatgcccccattgatgagtttggtctgctcaggcaaccgaaatggggtcacttgaggaacctgcacagagctatcaagcaggccgagcctgcgttggtttctggcgatccaacgatacgatctattggagactacgaaaaggcatatgtctt

SEQ ID NO: 2066 - DNA, 672 bp, Zea mays
  Clone ID: MRT4577_101887C.1
gtgcggcgctcaggcggcggtctcgaccaccattcccagcgtcatatgagattctacgcaacgtggctgcaaagatcacctgcgtcggacaaatggattactaccaggaggtggactactgctcggaggaggagaggtcgttgcccccggccggcttcggccgactcttcggcggagtccagtacgacgtggtcgaggtatgttcgagtacgactacacgaacgaacgcagccgtcgccttgcaccaccaccaccatggtgaccacgttgaccacttgcttcgataggtgcgttgagcatccagggtacagagtgaggacatacatcgactctgcacgcgaaggaggtaccacacagtcgtgccgagacgaggttctgtcgactgggcgtaactgaacaggccgggaggccgacatcctcgcccgctcgagcatgcctgacgtagactaatgtatgtctgtcgattgtgtggggacatcatacttggctagcgtatgtacgagttggcactcttgtcttgtacgaattacaagaataagctcgtgatatgtataccacttcttctgaatactatgacctgcttgacttgtctcgcatgtgactatgtatgaaggcgatctacatgtagagtgtatcgcttcatgttcgaattccatatccttcttatcgata

SEQ ID NO: 2067 - DNA, 406 bp, Zea mays
  Clone ID: MRT4577_101888C.1
gctccgaacctttgggctgacttatctgcttgtggatctccgactccaaatgatccgtacgcgcctgggcacatctccacaaatcgggaaccacgtaatacgaatacgcgtaagcgtaaggatacgttccagctaaagagtgccacacgcgatcagtattcgaacgatagctgatactatcgcatggtacggtactacggagtagatactgcagtgattgctatgactattaatattgcaagcacgccaggtgaccatcgtcctcttactcattgaatacatctctacggacaatacaatagcaccgattcgacgttttggttatcgtactagtactggtagttcacgctggcctaaggatcacaaggatgctatggacactaatgctcatgatcgtatgtccaac

SEQ ID NO: 2068 - DNA, 455 bp, Zea mays
  Clone ID: MRT4577_101889C.1
ggggatatcccccccgcagtagccgggcgcggcagaacgcgcgtgggtgctacacactatctccgcactccgtagacggcgtaaacgttgtacaccacccagcagtttcggctaacgtcacgttgaccccccgctacgcgattctactcgcacccgtttcatcggacaacaacgaccaccccgagacagcgttagagcacagctaccccagtacggtcgcactaacgatggagaatttggtgggtgccaggtctacgcgggaaaaacccaccaggggaactatttctggcaactcaacctagacagtcacgggcaagaccgtcgatggaaaaggtgacgccacaacctctcctgtgcacggttcaacgggtttgggggaggacactcccggcgtgaccttggtccctgtacaggactagagtttgtctgacacgtctagggttgtcccatactca

SEQ ID NO: 2069 - DNA, 250 bp, Zea mays
  unsure (1)..(250): unsure at all n locations
  Clone ID: MRT4577_10188C.1
aacctagggccgctgtgggcgctgcagcacgtggaggtacccagcgatctatgaacggngtccgtctctaaccacctcacttttactggtatctaccgcacgctcacacacgagatgctcgaggacccggcatttaagggccgtgacaaggacatgcaacgtactgaccgtgagtaggattacaatgtgcttggctaaaattgccatccaggggtagctgtggttcaaacctacaaaattatgaatggag

SEQ ID NO: 2070 - DNA, 452 bp, Zea mays
  unsure (1)..(452): unsure at all n locations
  Clone ID: MRT4577_101890C.1
gttggnttgggggaggagcaggtatgataatttttgttttttttccttgtgaaaggaaaccctgttttaatgggcgggattactggccccattaaaaaccccccctgataagtggggggcaatgctacccccggggaccccccttcccccttaaaacagaagattccccgggccggtgggtgcctcatccaccgggcagggggcacctgaaaaaaccccaccttttcaaagcagcctctttttttccgggaaaggtcttgggctgtttttttggtttaaggccccgcccgcccccccacaaattttggaaccgggggtttttttttccccctttcccgttccccttgggggtagagggcccccccccaaacctccgggggggcccccgggtgtattttttgggccccgggggccgggctgaaaaaatatgggcccccctggttggccccctt

SEQ ID NO: 2071 - DNA, 339 bp, Zea mays
  Clone ID: MRT4577_101891C.1
tcgggccacgcgccacgctgtacaggattcagaacgccgcccgttgggaagggggctttaagggggccccccccgtcccgttggcggggcggctttatccaatggaacgggcccttggggcccgaaccccctaacttggttcgggccggccgcgaaccaaaggcccccgtggttactttggattttaacttaaaggcgttaagtattaatccgcaccacggtagtttttggccatgggctttttaaccaaccccgagaaccaattggttgaataaaacggtcctttcttactaggttgaattactaatctcggggcggtcatcattagggtaaaactaa

SEQ ID NO: 2072 - DNA, 284 bp, Zea mays
  Clone ID: MRT4577_101892C.1
aaaatacgaagggagcccctgggaaacacgaatgaccactggttttcctagatcgcttagggtcgagccgtcctacacgaactaccggacaatataaactggtacagcctgatttacactacgtgttcgacgagccgtttctacgcgaacataccgcggaccgtctcaagtgggactcgtgcatacgtccgccgccactggggtccggcgcgagatacacctacgcgcgctcggcagggatgctgccgacaagctagatgtctattggcttgatggggacccgc

SEQ ID NO: 2073 - DNA, 1207 bp, Zea mays
  Clone ID: MRT4577_101893C.1
atacattcatcacattcacaactgaaaaataaagtgtggtttaaaataattgtactttttgaatcttgtatcacaagctgcatccctatttattattgcaactgataatgtaggcctatcttaaactacagatatcttaaaatacagtttgctccatcaacagaatataacgggcatacaaattcggctacaacccaacacagatgagtcgtgctatgatattataggacctactttgatcatgtgtcggaagcctcctgacacaaggaacacatcaatattattggattttagcttcttaaccaaatcagccattccaggagaaatccttggtggcctcttctccaggcactcctccacctgggagagagatggcttgattaaagacagcctggctgccagcgcctcctcaaacggaacagtccctgtcatggcctttgcagtccactcagcaacagctttccccgccccgcagaaatcagcaagctcgtcaatgccctcgtccaggatgacggtgctatcaacgtcgaaacacactgcatcggcattccgcaacgtctcgatagccccttgggaaggcaggctgttggccagaaccgcggcggaaccgtccttagagatctccagtgctgctgccagtagactacggctcctacgaagtttggcacagcgaaacagtgggcttggcaaacgaaccgccacatgtgaagccggtggtgatgcccaggcggacgacgaccgggcaagtgacggtgaactcctcggaccggcgcgcaagctgatcaggccggccataccatgcgcacctgcagatcagaggaggcgacctctcaccagtcaggcagtcgctgttggctgggcgctggcctgccgcaggccgctgtcctcagggtcggcggcaagcaggcgagggcgcgatgcggtggcggcggcctggtgggattgggagggaagctagggcacctctcttgggccgggtcgaggaggtatggcgcgggccatactaggccgtaacgggccttccgcctcccgccccagcgccgtgcctgtcaacagcgagcgcccgtgcagccagcgtctgctcagcaccatttttttttttttgtaaattagccttgtttcagttttcccccatggatccaaaagtccccgtgaatagtattgccgcctagctaacactgaccgaatcattcccgacccggccggc

SEQ ID NO: 2074 - DNA, 532 bp, Zea mays
  Clone ID: MRT4577_101894C.1
gacaatattcattgagttcattgatgatgcatgtatttattaggacatagagagaccacacagttgtgtacaaagaagtcaccattgagatcggacacaatgacgggtagaaatagagcacaaatcattgttactatgttttctctaacacataactaacaagtttatattgttacaaactaacagacatgtctcaatctggtaccacacttgcctgaatgttgaattgcttcttgaggatggagacaatcccgaggtaaagttaaaatcaagttggtctttcaaggctgacaaagtggttagaagtaaaatatgattgcaccagtctgtccagcaagtccaacttgcagtctgattctctccaacaaaatatttagaatggctggcgcacattttattggagcatagactctgaaggaagcaagatccgagattggctttccgcatgttctttccaaaccgatagcatgaacagctgcaaaaagttgcaagcaaacaggaacaaaacatcagtgtataacaacagcaccgt

SEQ ID NO: 2075 - DNA, 760 bp, Zea mays
  Clone ID: MRT4577_101895C.1
aagggccgttacggcctagtatggcccgcgccatacctcctcgacccggcccaagagaggtgccctagcttccctcccaatcccaccagtgccgccgccaccacatcgcgccctcgcccgcttgccgccgaccctgaccggctgagcccctgaccagctcgtccaggcggacagcggcctgcggcaggccagcgcccagccaacagcgactgcctgactggtgagaggggctatcgagacgttgcggaatgccgatgcagtgtgtttcgacgttgatagcaccgtcatcctggacgagggcattgacgagcttgctgatttctgcggggcggggaaagctgttgctgaatggactgcaaaggccatgacagggactgttccgtttgaggaggcgctggcagccaggctgtctttaatcaagccatctctctcccaggtggaggagtgcctggagaagaggccaccaaggatttctcctggaatggctgatttggttaagaagcaaaatccaatatattgacgtgttccttgtgtcaggaggcttccgacaaatgatcaagccagtagcatttgagcttggtattcctcctgaaaacatcactgcaaaccaattgttatttggcacattgagggagtacgccggatttgatcccacagagcccacttcacgcagtgggggtaaagcataagcagtgcagcaaataaaacaggaccatggctacaagacagttgttatgattggtgatggcgccactgatct

SEQ ID NO: 2076 - DNA, 595 bp, Zea mays
  Clone ID: MRT4577_101896C.1
ctcgaggccggccgggtcactaccacaatctgacgtccattattcgctgcttacgatggagcaatgatggcgcgagccagaccttgtggctgaacttccgattggacggtgatactgttgctacagagagatattgctcgaacatgacgagaacattggagaaacctcttattgtcgccacaaatatgctggaaagaatgattgaccatcctactccaactacgggaataaggttccgacatagctcttggagtcagggaaagagctgatgccatcatgatatctgaagaaactgctcatgcaacgcacccactaaaggaacatctcctgctgcacactgagggcctcagaacaaaatcctgcatttataacccaactacttcccctatagctatagcatctggacactgactacacaacgatgagttttcccctcctcagcttgcttgaaagcctgcatgccatgcaactatcatgggcccacacccttcgcacaccatctcttgatttacgcagacacgatccatgcctggcctcctgaaacactatcgttcatcgactacactattttcgtttaccaacgaggaactagtga

SEQ ID NO: 2077 - DNA, 376 bp, Zea mays
  unsure (1)..(376): unsure at all n locations
  Clone ID: MRT4577_101897C.1
cgnncgtacctttttgtcttttgttgtcgacttccgcggggnggagagtagatccggagagggtcggggagagtaccagtgatccttattgtcgacggaggaggctgttgtggctgaggacccggagaccgaggngccagtggaggtntaggaggtttatgttggntgaggtgntcaatgtgaagaaggtgcccaaggtgaagaaggcgcctaaggagaagaagcttttcgcggtgaaaaaccggcggcgcacccttcctacgctgagatgattgtagaggcgatcgctgcccttcaggagaggaagggttctagctctgtggccttaaactagttctttcaggggaagcatggtggtaagctccctaccaacttt

SEQ ID NO: 2078 - DNA, 768 bp, Zea mays
  Clone ID: MRT4577_101898C.1
attgggacctcgagccggccgggacagtcttcgctctgcgtcctaacccacgctccccctgccctccgcgatgctcgcgccgcatccgcgtccgccgcccacgctccccctaccccgcatcccctccttgcttatcctcatcccccacctcccttcgctaccgcccccctcgtctgagctccacccccaccgtcgcgggtgctcgacaccagctcggaggcagtggccgccaccgagggtcagatcttgccgttctccaacgggccttccaagaacatcaaccagaccgtgtagctgctgctcctcaaggcgcaagtccacccgccgctccgtcaagtcaaggtcggaaagtgtgcgcgtcgtcgttctctcgccggttactccgcccccgcccccgccgcctcccttcgcaccgacactgccacctcctcatcggaaaccgctgtccccatcgccaccgtgctctccactaaacgacaaactagctcccagatccagcaccgacgccatcgaaacaaacccattcctctcccagccaccatccctaccgacgagcacacacccgccacggccacctccggttgcaggtccgcctccgccgccacctcctcctccgccaccgccaccgccgccgtcggtgggctactgggagagccgtgtccggaagcccgacatgtcgaaagaacccgttcgctggcactatcgccgccaccacaagctgccaacttcaggagtgtccctgcacccaccgatgcgttcccaagtcgt

SEQ ID NO: 2079 - DNA, 279 bp, Zea mays
  Clone ID: MRT4577_101899C.1
acaaacaaaatatttttttttggcagagggttaaataaaccacattttcaattccaaccctttatatatttaacatttgcaggcatggggcacaataaaagcccccatcttattatacacaattttcacaggacaaatcattttaccatcagcaccactaccattattaaaaaatggagccatcacaaaacaaaaggatacaattgtcctttatacgttaagattaccttggcaagggatcatatcttctatgccaccataaaaaggtcgcgatggacc

SEQ ID NO: 2080 - DNA, 712 bp, Zea mays
  Clone ID: MRT4577_10189C.1
ccggccgggccgggtcctcccaccaacacctacctgtgcaaagttgatacctagtgaatcatcctcactcacctacactcccttgacagtagctacgtggatactgctgaacactctgcgacgagcacgggcaacgaagaataaccatcctgctggacgactatctgcgactctcctactgcgatcctctactccttattgacgctcatgctcatgctcctcaagaccctcatatactggatacctagtctggtacaagctcatgctgctgatcatcacgtgcttctggataccacacttcaggcgcgccaccttcatctacgagaagttcgtgatcgagaaactacaacatactacaagctcatctgaccaccatatcctgcaacgctgcgtccgcgtcacccaatgacctttacaatgccatgaactaatacctcacattcgacaacccacagaaagattgtgaaacatactctaatgtcttgcatagatgcctttcctgtaccatgttgcatgcatatgtatgtgtactagcactacactatagttctcggtgtgcttgatactcgacttctaatacagacagcatctatgtgtgtatggtcatatctgcattagagagcatcaaactctcacatggaatgcacacgatcgccaactttctccgcttatgatgatgtaaatgcgcgaaatttatgtccttatacagagc

SEQ ID NO: 2081 - DNA, 581 bp, Zea mays
  unsure (1)..(581): unsure at all n locations
  Clone ID: MRT4577_1018C.1
ccggccgggcgaccaccgcctcgccacttgccccgcgtgcgtcccccgtctccaactccaatggcggcgccctcccacctccacctcccgggctgcccccaaaccctagccctgcccctgccctggccacggggcttctctgctccgcccggcctcctctcccgctcccgacgcctccgcccggtcgccgcgctcgggcccgccgacgccggcgacttgctcggccgagtcgaggcgttactctacaccgtcgcggacgctgctgctnccgcggagcccgtcgcggcggccgggaccaaggagtccgccgccggtgactggctctccggcatcaccaattccatggagaccgtgctcaaggtgctgaaagatggtctattgtctctccatgttccttattcatatggctttgcaatcattctcctcactgttcttgttaaggcagctacgtttcctctaacaaagaagcaggttgagtctgcacttgcaatgaggtcactgcaacctcaagtgaagaccattcaagaacgatatgctggtgatcaggaaaggatacagctcgaaactgctcgcttatacaa

SEQ ID NO: 2082 - DNA, 243 bp, Zea mays
  unsure (1)..(243): unsure at all n locations
  Clone ID: MRT4577_101900C.1
tgcggtagcgactagcactggttcgctcagagtgtgaatatgcatatgtataaagaggaatatgctncacctggtgcaccattagggtctgattttgttcaatgggcgatgcggttgacacgttttggaagaataatatgctagatgctcttgtaccagactcttcatgtagcgggcatggtcgattgacgttacaactgtgcgatgacgatgttggntattgcaccgnaatacatgtggtnc

SEQ ID NO: 2083 - DNA, 213 bp, Zea mays
  Clone ID: MRT4577_101901C.1
gcgactcgcagctagctgacacggctgacaagcagcttgcattgcatgcgtagtacgtacccagcagcagctagcactagcagttcatcggagcgacgatggtgagaaggacggtgctggcggcgctgctggtggccgccgccctcgctggctgcgcgtgggcgcagctcaaggaggggctctacgactactcctgcccacaggcggagacga

SEQ ID NO: 2084 - DNA, 160 bp, Zea mays
  Clone ID: MRT4577_101902C.1
gtcgggagactcgatggggaactgagcggagcgagggcattgccgggagccgttcggctccgccagccggagcgccggccgtgtcttgggctgtccagtttgcttgcgccgcgagcggttagacgcgagaacgcgacagggcttttggatcccctagagg

SEQ ID NO: 2085 - DNA, 487 bp, Zea mays
  unsure (1)..(487): unsure at all n locations
  Clone ID: MRT4577_101903C.1
gaaagtttcatctgaatacctttgtgatgataaaaaattaccaatttgtttttatgcacctaaatgttaatagttcatacttgtgctggtttgattcagccattcagggtgtagtggttgggacaatcacatatcttagtaacttgtatggcatctaacttgcatatattcttttttagtttttctgaataaatgaatctgaacaattattcacagtgatgccctatttgtctgccaagaatcagttaacactggtattttttatctggctaactggtctggtagctttgatgatgtttcaggaacctaatgcagaattatttgacaggtctcgtgccttcgttcattaggaaatatcccatgcagtacatgagacggtcttgttaatactatttgctgtcagctttctttcattcacttctactcttcatcagagtaaaggttccagattaacttcttgttgaaagggtggctggangatgacttg

SEQ ID NO: 2086 - DNA, 486 bp, Zea mays
  Clone ID: MRT4577_101904C.1
catgacatgcatcacttcatgttcttagtgcatgcttctttaaaaaaagaagaaatgaacataaatcgtccagcgggcatcatgtggcccacgagacaataaacacagtgccctccactggctagaggaaacattttatccaaaaggtcacatgaaaatcgctgacacaggaaaaccttcaacaggacactctctgcacttacgacgatgctttttttatccaaaaggctgttggaagacatacggatgcctcaagaacgcctacatttgctccggcctgttcctgaatgaaatatcaagcaccttctgaccgaatccaatcactaatcctcccatgatgctgaccccaatcttctgagcaaccaaaatacctttgttttccccaaagatatactgcaaggattcctcgagacactttctactactacttggtgagcgaacaaactgtcctgaccacaaccttcatttcccccttatgttccatag

SEQ ID NO: 2087 - DNA, 420 bp, Zea mays
  Clone ID: MRT4577_101905C.1
aaaaggaactggggttcagagtgattaggggtggggtgctcagggcttgccagctcagaggcagagctgaggtgaaacttcaggttgactgctctctgaagctgaattcttcctgtcctactacactccttctcatgaaatgagccctcgggaaggtctcagtgcgctgtgcatgctgatgacccagcccctgtgcacgaggccaattagctttgtagccagaggacaacaggtcaagccatagtgccgggggaggggaggggggcctgctacaggaaaaataagaagtgtgggtccccagttgggttaggatgtgtggctcttctcggaaacacgtagcatccctaagtcagagctttctgctacacttccggaagaggctcgagagctgaggctggggtccctctcccatgcccaggc

SEQ ID NO: 2088 - DNA, 809 bp, Zea mays
  unsure (1)..(809): unsure at all n locations
  Clone ID: MRT4577_101906C.1
ctcgaggccggccgggaaagaatatagaaagagaaaacagttgaaacctccatacctgagtattgtgaggtcggtggatgtggctcacgcctcggcgacttcagccggcggccagggcgttagacggcggcactgtacgtggtccgcagctgagcaattggcagatgtagtgataagctgatccgtcgtctcccgtcttcccgacccgggtctcgcctcgcccgtcgccgccagatccgacgcgctggatcgccagcggccggctgctgtcgatccgacgtgcggcagtctgctcttcctgccgtttccctgcgcttggggtccataatagcacgcatctggccggctcaagagcatagtggatctgaccggaggaggccgctgctgctgcttctccctcaccgatggcgagggttcgggacaggacggaggacttcaaagaggctgtccgagtcgccgcactctcccatggatacacggaggcccaattggccgcgctcatgtcttctttcatcatccggaagccgtcgcccaagtcaccattcactaatgccgcaatcaagacgcttcagagcatcagggaaactcgagaggttcatagtgaagcatagggagggattatgtggatctgcatcgctctaccgagcaagagagggataacattgagcatgaagnttggtgtttttgtaaaagcatgcaaggaacagattgatatcttaaaagacaggatccacaaagaaganaagaatgggagtggaaagacatggcttggcactaggggatgaaaggttcacgggtggacttgatag

SEQ ID NO: 2089 - DNA, 475 bp, Zea mays
  Clone ID: MRT4577_101907C.1
cccccagaggtattaaaatagagtacctactcattgcattcctatgcatacattgaagtgatatttgcaggtattgtttacgcagggaagtgttatagaacctattgtggtttttcaaggaaaaaaaatggtgcttgttgctcatcaaggggagtgggaagtagcagcacatccaccttcactctcataataatgctgcccagacacagccatgatttaattagaaacttcttgtcaaaggatgtttgtttttaactagtcgtgcgcactgattaattcagttcattgttgttatggttgtcttcccattgctagcagattattaatgtcttatatgttttcttatcatgataaaaatttatactttgttgcttcccccgtttatgcaattttcaaaggagatgctgtcgaaattttatatatgaatgttagatgtgtagtttagtagcatcctggggtgtatgtggataccggg

SEQ ID NO: 2090 - DNA, 1164 bp, Zea mays
  Clone ID: MRT4577_101908C.1
gtcgagtgtccaatatcagagaaccaggactgatttgtggccaccgccgtgcgtcttcacgatcgagggggaccgtgatcgggtcaaagttgcgcgcaataccttggggacttgctcctgggggtaatcatgagcgtggagccggggatcccacacaatttgtcgccggagttggagcaaactcgcgacaccggggaacaccgtgggcagcatcgatttttccacagtcgtagacgagcaagcaaccgaggaccccgatactcatcaggtggataatactgagcaggagctcgttgaagcccccccactcctgaaccctcttggacgaccccatgaggactatgatctgctctagcacttgcgtccacacatgactccctcgccaagtcccccatccactttatataaatctttatttttggcctaatctgaagcaagtgaaggttattgataaatgcagcatgccatatacattgcatgactcatttgcatctgaagttttgtcgtgacctatggtccgaccgtaccggtacaatttagcatcgtacgttgcccgaggaggggtacgatgcggcttcatacccttagaggtatgaaggcagaggacatatgcattgcattcatatgcattcattgaagtgatatttgcagatgatgtggttttatactctcagaggtatgaagatagagtacctacacattgcattcctatgcatacatcgaagtgataattgcaggtattgttgacgcggggaggtgttatagaacctattgtggttgttcgaggaaatgagatgatattggttatattgggactactaagttctatatctacaagtatttctgatcttgattgtgattcttttaaaatgttgattaattcaatttgtggtttaaatatctcatcagaacaattagcttgctgagatgtttcatctcactcttgcattactcaatgcaggtgcttgttgctcatcaaggggagtgggaagtagcagcacatccaccttcactctcataataatgctgcccagacacagtcatgatttaattagaaacttcttgtcaaaggatgtttgtttttaactagtcgtgcgcactgattaattcagttcatgttgttatggttgtcttcccattgctagcagattattaatgtctttt

SEQ ID NO: 2091 - DNA, 622 bp, Zea mays
  Clone ID: MRT4577_101909C.1
agatagagtacctacacattgcattcctatgcatacattgaagtgatatttgcaggtattgtcgacccagggaagtgttatagaacctattgtggttgttcgaggaaatgagatggtattggttatagtgggactactgagttctatatctacaagcatttctgatttttaattgtgactcttttaaaatgttgatgaattcaatttgtggtttaaatatctcgtcagaacaattagcttgctgagatgtttcatctcactcttgcattactcaatgcaggtgcttgttgctcatcaaggggagtgggaagtagcagcacatccaccttcattctcataataatgctgcccagacgcagccatgatttaattagaaacttcttgtcaaaggatgtttgtttttaactagtcgtgcgcactgattaattcagttcatgttgttatggttgtcttcccattgctagcagattattaatgtcttatatgttttcttaacaagaaatctatttatactttgttgcttcaaaaaaataaaaaaaataaaataaaaaaaaaaacacataataaaatcaaaaaatttaacaaaatataatataaaaaaaaaaaaaggggcgcccctttt

SEQ ID NO: 2092 - DNA, 677 bp, Zea mays
  Clone ID: MRT4577_10190C.1
aggacatacgaaatggccacttccttctattctaattctaagcagcagacgtccgtcgcccctattgctgaagaagcagatgctcatcgcctccgcaccagagaacagttcgcccgcggtgctgctcggagtcggaggatggacgaaatcccagctggtccaccggtcagtggtgcctccgagagggcgttgccggcacaagaaaggagcaagcaagaggcggcaggacaggaacatcacatccctgtcttctccaaccccgatcttggccagcaagaacaggaggagcagccatcgtcatggccaacgcctgctgctcctccagctagagcgcccatggatgaccacagtaagacgcaggcagtcaaggataggctgaaggacaagacggcgaaggtggcggcgaaggcggtccgcgttttgtttggaaattaaggaaaggtaaagtgactagctacaacccgtcggcaatggttgtggaggccaggctcagcgcgcaggacaatggctgttatatgatataatctcaacgaacggttcttgcatctctgtgttcttattatacaactaggtgagtgcccgtgcgttgcaacggcaacatgtaatatcacgatggattatgtacaaatgtgtgtttcattgttatactaccatgttcgtgcaacccgtcggcaatg

SEQ ID NO: 2093 - DNA, 383 bp, Zea mays
  Clone ID: MRT4577_101910C.1
cggacgcgtgggcaagatcaagcgcctcccgccttcagcactcttaactcaggggacacgatacgccatggccgccacatcgaccgccgccagcaggctgagcaccacgctcgtggccgggctccgcctggggccgtctcccggtcgggcgcgcgtgtagttccatgcggcgccagcgccggagcggatgtcccagaagaagcgcacagagctcagctcagagctggtgatcatcctgagcacctgcgtgtaccatatttatgtgccggttcaaattcttcacgtatcatctggagaacgtgactaaacatgggtcttggcgcaacagcaagacacacttatacgtcctctacgagcgcgcctaagaattcgcggccctgctc

SEQ ID NO: 2094 - DNA, 867 bp, Zea mays
  unsure (1)..(867): unsure at all n locations
  Clone ID: MRT4577_101911C.1
gggtacctcgaggccggccggggcattatttccaaacccctcagccatcttggcgccctgcggatggagggcggcagcggcgctgcgcacaggccgtgggatacggcgtcgcagctgcagtacagcttcaggacgtccgtgagcagcctcagcgaggtggaggaggtggaggaggaggcgtgcccgccaccggtggcggtggaggacagggtcttcgtggccgtccccgaggacaccaagaacggcaagagcaccctgctgtgggcgctggagaacccagccaaggactgcgccggggttgtcgtcgcccacgtccactgccccgcgcagatgatccccatgatgggggcaaaagttcatcacagcacggtgaatccacaacgggtcaacgaatacaggaagaaggtgcgagcggaggtggaggagaaactagatgaatacgtccttgtgtgcagaagacaaaaggtcagctgccagaaagttgtaatcgaaatggatgatgctgtacgagggcttgagcagctcatcactctccatggcgtcgctaagcttgttatgggagcagcagcagacaaacactactccaagaaaatgaaatcactgaaatccaagacggcgctcagactgacggaggtggcggccccatcgtgtaagatatggtttacctgtaaagggcgtctcatatgcaccagggaagcgaacacaactgttcccgccatgccaccaccatcacctgcactcacgagcgcatcaagatcatcagtaagcagcgttgctagccagctgagatncatgttactcagtcgctcagagagtgacgggtcaagctcgaacggaagtccaaggcatgacctgaccaggtcgcga

SEQ ID NO: 2095 - DNA, 834 bp, Zea mays
  Clone ID: MRT4577_101912C.1
tcaggatttgagaccagtgacgactgtgcagcaggtgcctgactccatggacgaccaggacctgagttgatgaggatgacatcgtcgattccgatccagaccgccacacatggagagagtagaggatagatcctgaatttgcttgctagagcgcatctatcacaataattgattagaaggcaccaggtgaaacaaccacaagcagggacggaaggtcgcagatggagaagaaaccccaagcaaattgggaggccctgatgccaagtaacaaaaggtgccagtcctgcacccttggccgtccctgacgagcccactattactaatggtggatggcgtgcctctcaatggacggttgcttctcatggggtggattcgtctcctcccccctcctagcggctgcgacgacgatgacagttacactgaggcactaatgcggggctttaaaggaataaaaaggaaagagctgatgacaggcttagaaagaagaagagaccaagatgaaggagtctgagctaatgcgaggcaacccgctgatcaatatgaataacttctgctccttcgacgtggaagtaacaatgctgcctactatattatattggtcatggagagaccaagacaccgaaacggttcatcaactacaccgtcataagtgatttccaccgcaagtttctgcataggtactatgcctcctgcctagtgagctgcaggtcttcttcccccatcacctgcaggcattgacgaccaccatggcctgctggagctcctgctcaggtgatgacgcacccgtgctccctccgacatgttactgccgacgccatgtagcggcaacttgca

SEQ ID NO: 2096 - DNA, 595 bp, Zea mays
  unsure (1)..(595): unsure at all n locations
  Clone ID: MRT4577_101913C.1
gccatcgtccgccgcgcctccattgacctgccggagacgggccacatgccgaccgactacagactccgcgcgccggcctcagtctcgcagcagcgcttcaggctgtctctaccgacatccccgccgccgctggcgttttgcccgggtggaggggccgatccagacgagagaggggggatcggggatgagcgtttgcgaacaggacgaccttctaagagcttcacgcgcaggggaggccagtgcataggcccttcaagaaatacaagatctggaagtcgatccaggatatataaggcttggacctaactgctgtactagaaagatataggttctgaaacagtngatagcgtgaagaagactatttttcggatgaagggtggttcttgcatatagatcagttcctctgttatttgtatatatcctttggattactttcttcaagttataggtntctgtccttatgactggttatactctgcgaaatgctcacaacaggctttatttttaaagcaatctggaactgccttaagaaggtgtggaatgcctaaaaagtggtgtcacttgaagataattatgataacatgaatctgggaag

SEQ ID NO: 2097 - DNA, 427 bp, Zea mays
  Clone ID: MRT4577_101914C.1
cgcatttcttgctgctgactgagacctcgctccagaaaggcgatgctttcgtgtgattggtgtttactcgtgtcactggccttccagagctcgaggtattgacggatggtatagggacgttcataaagcagcttgtgatcgcccaggacccatggatggacttgtgtagcaaatggaagattgcgaaaactgcgcttgacaatactgccggagtattgatgtagctatgaccgtgacgaacattatgggcatcttcaagccaaacaaatttatcagaacattgaggtggattcctctggccttgttttgcatgtccctgtaaaggatattccaaccaactcctgaatagaacggttgtggtagatagattccctgctataaaaatgccccttcaaaaggcctctcatgggatttgaatgctcaccca

SEQ ID NO: 2098 - DNA, 262 bp, Zea mays
  Clone ID: MRT4577_101915C.1
ccaggatcaaggcaacctccacacagtgggaatatcctcccttcgtttggttttggaagccatgatcaaaaaagtcgttagccaaaattagcgtcttgttgtcacaggaccagggttttgaattccaccgaaaacttgggattacataccgagggctaatatcattttttttaagggaagattacggtcccagaaaaacactccgacacatgcttggacagggcacacaccattccccagatttatatactttccgaagatc

SEQ ID NO: 2099 - DNA, 628 bp, Zea mays
  Clone ID: MRT4577_101916C.1
tttatttaatatgaataactttttcagatacatataaatactttattgacaatatatacacactatatttacgtgtaataattattattataaagagcctcctttataagtcttgtcctgggcctctctaatgtcaggaccggcactgcgcctacgggaaggggaagccaacaacgaagaggaaaacggcggaagaagaacagagctacggtacgagggatagaaggcggcggaagaattcccccagccgtttctgtttattcctcgatggctccaagctcgatcttgttgccgtccccctccgggatggccaccagcaccggccgccagctccgtcgcatgagcaggctccgcagcccgccggagccgaacctccggcccactcgccacgcgccgacgccggcgccgggatccgcgctggcaccgcccgcccttccgtcctcgtcgtcgtcttcgtcttcgccgcagtcgcagcggcacccgctgtggcggcgcccggcttccggggacgcgacgaacagatctcgcagcgtgcggcccccgccgcccggtcggccgccgaaaagcggcttcctgtcgtcctcctgccgcgtggccgctagcgtctctgccccggcctcgcggccgc

SEQ ID NO: 2100 - DNA, 337 bp, Zea mays
  Clone ID: MRT4577_101917C.1
gcagtggtaacaacgcagagtactttttttttttttttttttttttttttggtttttttttttttttttttttttttttttttttttttttttttttttttttgggaggttgaagggccccaatggtgccaaatggcaagacaagcagcaaaccggaacttcattggaaccaggtggaagtccctaaataggatcgaccctcataacctctcctgaaactacctcggggaccggccggtccaaattcctccctcctccccagaggccacgggcccacctcccccttgaggggaagctcctttcccggcgggaaagcttggcaagcctggcctggcgc

SEQ ID NO: 2101 - DNA, 305 bp, Zea mays
  unsure (1)..(305): unsure at all n locations
  Clone ID: MRT4577_101918C.1
cggccgcgtgggctatactactccttaacaagctaaggagggcgtccacaactccgtgcccccgcccccgtctctcgctcgcgacctcccgcacgacgcgccagggcaatctggactttgctacatactggtttttacatgcacaataaagctagctggtatcacatttactggtgatcctgctaagaataagaaagatctatttggtgctnaaaaaaaaaaaaaaaaaaaaaaaaaaaaaaaaaaaaaaaaaaaaaaaaaaaaaaaaaaaaaaaaaaaaaaaaaaaaaaagggggggccggttt

SEQ ID NO: 2102 - DNA, 282 bp, Zea mays
  Clone ID: MRT4577_101919C.1
ttgacgagtgttggctattctatagtgttacccaagtggagaaaactgatcgtcgtttttctttggacaccataatctggctttatagtcgaacagttttatgtgagctggatagtttttctgctcctaattaccgttatttctggcgtccatatgtgaaacggtgctcggagtcctttttcagggtgtttaagtatttgtgtctattggataagtggctcttttacgtgcccttggcttcatattattgaacgagcgcgcgtttggtgaacattaggtcga

SEQ ID NO: 2103 - DNA, 454 bp, Zea mays
  Clone ID: MRT4577_10191C.1
ggggaaaaaaggcccccttaaaccatggtcgggtctaggccaacccatatgaaggggggggggttcaatccatagaaaaaaaaaaactttttcaaaccaaaaaaaacccctccaaacatcccaacaagccttaaaaaatttaccctacaaagctccctaccccttgggggccttcctataaacccgctctcctggggggggggggaaatatttacggaaaaccaaaactaagcagcagcttcctttgtttttgccacggaaaactggttttggatgggctgggggacaacctaaaacttggggagctgcatcggggaggaccctccccccttgggcatgccccggggggggctgacctattggaacattttaacaaggggcacaaaaaaaaaacccccttggggccaccaggcttatcccccaagctggggacccgtccctttttaaaggtcaa

SEQ ID NO: 2104 - DNA, 941 bp, Zea mays
  unsure (1)..(941): unsure at all n locations
  Clone ID: MRT4577_101920C.1
gactcctatagggcgattggattggttacgtcggggcggggagacaattcccacagcaccaccaaaccaatccaataggcaattagctcgagcaaggaggcagcaaacacaatccaataggcaacacccgcggcgacgcaagagggagaagcgagcgtgcagcggtcctcctctcgatccacatggccatggcggcagcggacggcaagagccggaggttcgcgctggcctgcggggtgctgagccagtacgtcaaggccgagcagcagcagatggcggccccgcgcgccccggccaccacgacccctgagcctgatgcccggcgcggacgtcggcgccgacgagcagcaggagccggccgccgcgagggccgaggagatgcccgggcccgcccccgcccccgccgcggcgccgccgctcaccatcttctacggcggcagggtggtggtgttcgaggacttcccggcggagaaggcggccgaggtcatgcgcctcgcggccggcgccgacctgcccatcgcccggaaggcgtcgctgcagcggtttctggccaagcgcaaggaccgcctcgtcgagcgcgcgccctacgcccgcccgtcgtcccccgcggaggcggtcaagccggcctcctggctcgggctcggccagcacggaagccgaccgcctcaccatcgcgctgtgatttactggatcgacctcgaccagtggcgatttaattggctaatgatgggttcatgatcatgcctgcctttggcgaatggcggggctgtatggagatcggagacagagacaggattgtagagatgttttttttttcatttcttacgagagtttcgctgctgtcgtgagatctgattcgacaatagaaaaaaagatgaagatggaacaatttgtgccaaaaaaaaaaaaaaaaaaaaaaaaaaaaaaaaacaaaaactanc

SEQ ID NO: 2105 - DNA, 216 bp, Zea mays
  Clone ID: MRT4577_101921C.1
gactgattgttgttcctttttctccctttctaaaatctaggttggataggagctccgaacgggagccatagacggagagttgatgccaccgcgcaatggatgggtggatgctcacgacctccgcgtgcaacaacaggggtaagaactcgtccccttcctctccggcggcgaggttacgatcttcctctgccgaccttgaactttaaaaatgagaac

SEQ ID NO: 2106 - DNA, 868 bp, Zea mays
  Clone ID: MRT4577_101922C.1
ttgggtacctcgaggccggccgggaggtctaattcccgggacccacaccaccaaaccaaaccaataagcaattagctcgagcaaagaggcagcgaacacccgcggcgacgcaagagggagaagcgagcgtgcagcggtcctcctctcgatccacatggccatggcggcagcggacggcaagagccggaggttcgcgctggcctgcggggtgctgagccagtacgtcaaggccgagcagcagcagatggcggccccgcgcgccccggccaccacgaccacgaccctgagcctgatgcccggcgcggacgtcggcgccgacgaccagcaggagccggccgccgcgagggccgaggagatgcccgggcccgcccccgcccccgccgcggcgccgccgctcaccatcttctacgggggcagggtggtggtgttcgaggacttcccggcggagaaggcggccgaggtcatgcgcctcgcggccggcgacgacctgcccatcgcccggaaggcgtcgctgcagcggttcctggccaagcgcaaagatcgcctcgtcgagcgcgcgccctacgcccgcccgtcgtcccccgcggaggcggtcaagccggcctcgggctcggcctcggcctcctggctcgggctccgcagcacggaagccgaccgcctcaccatcgcgctgtgatttactggatcgacctcgaccagtggcgatttgattggctaatgatgggttcatgatcatgcctgcctttggggctggatggagatgggagacagaggattgtagagatgttttttttttcatttcttacgagagtttcgctgctgtcgtgagatctgattcgacaatagaaaaaaaaagatgaagatggaa

SEQ ID NO: 2107 - DNA, 287 bp, Zea mays
  unsure (1)..(287): unsure at all n locations
  Clone ID: MRT4577_101923C.1
aacaagacaaaacaaggaaacngaccggggangaagcactgggaaccggngagaggaaggttaaatttttttccaaaactattgaggttattgttacaggttattttttttttttgnngntgntgnttaatggaggtgatagagtgagctattntgagattgtgacacatttaaatttctcatatgatgatgttgttttattgctgcattctttattttgtgcaaaatacaagattgttagtagtgtgcctagtggtagatgtatttgttgaaatgatgtttttggg

SEQ ID NO: 2108 - DNA, 435 bp, Zea mays
  Clone ID: MRT4577_101924C.1
atggcatgccggaccaggctaaccaaccactgtactccataagctcgacggccagttccaactgccctctatcatctctgaaggtgtacgggcccgctacactatgcccacctgtcctactttatgaaaggagatttgccacaaggaactacatgacccagagcctttggggcccttcaacgtctgttagtggtggcctcaatgtcctagtgatgcagaccctgctctgtgctaatgctcctgctgagaaaggaggcacgaacttcatgactgatttcatgatgggccggctgttttcagctgctgtttcaaagactgctgctgcttccatcgagcgtgtgaagttgtttattcagaaccaagatgagatgattaagtctggtaggctatccagagccgtacaaggtgtattgacgactgcttcaaacgtaccat

SEQ ID NO: 2109 - DNA, 476 bp, Zea mays
  Clone ID: MRT4577_101925C.1
tcgtctccctctctgcctggccagctgggatcaggggaggccgcactggtgatggcgtcgtcgagcgggctgcggagctgcagcgccgtgggcgtgcccagcctgctggcgccgtcgtcccggtccggccgcctggcgccgttctgcgcctacgccaccacctctggccgcgtctccggggggggggggtgggtgcccggcctgccccgccctgccctcctgggcggctcctctcccggggacttcggcttctgtccggtgggcctcgtcgccgtgccggtgaacttcgcgcggttcaaggggtcagaggtgtcccactgccggtgggccgtgcttgccgtgcccggggtcctggtgcccgtagctctgggcctgggcacctgggtgttggcgcttgtgtgggcggtcgtccccggtgggctggccccgttcctgggctccccggtgcgcgggggctcgctgctcgccctcctggt

SEQ ID NO: 2110 - DNA, 330 bp, Zea mays
  Clone ID: MRT4577_101926C.1
ctatcgtgcatactgctttcatccgctctgccgccgctccatcgtcgtgcttccccgacgcagtcgcgagcgggacgtgaggcgacggtgccctccaccaccgccaccgtctcggatttgtcgctctccgccgccatctctgccctcggttcactgtgctccaccgtcgtctttcgcggcacgatgtacattacaatgttgtctccaagacacaggacatggtcttctccaagatccagtacaagggcgtcttctccaagatccaaaccccaatgctagtgagcgcatgaaacccacctggagaagagaaatgaaatggcattccacatg

SEQ ID NO: 2111 - DNA, 539 bp, Zea mays
  Clone ID: MRT4577_101927C.1
ccaacaaggagaaggggccaaacattgaatttttttggtttaagaaaaaagtcccctcggggccatgtgggccctaaaaaacaggtttggaaatgtttgttcggggagatacaaacagaagctgggtttttaagttaactcctggtaataatccggtgaatccccggccccacctttaaggggcaaatgcttttccctcctttgaaagtgggtcaggcctttgccactcccagggacccccaccttacctttggggtcgcccgggaacttaaaaatgctttcctttttgcaaccggaaaaaaaccccaccttttgggctttccctttggttaaaaactgctgccatgcattttgccttttgttttgggcaaattcaagctgctaaaagcgggattttgatttaaaagcatgtttttttttaccctttgcagttttaacatcctaagggtcacttggttcaatacaaattttggccggaaagctacccccctaaaaatcaaatgtggctgctgtgaaaatttccctttttattgccattt

SEQ ID NO: 2112 - DNA, 1040 bp, Zea mays
  unsure (1)..(1040): unsure at all n locations
  Clone ID: MRT4577_101928C.1
cctcgaggccggccttctcatttccctggaaagggataagagcctggtttgttattagtaaaaaaaaaaaaaaaaaaaaaaaaaaaaaaaaaaaagaagggttcgatcntgggttagcctctcacgatgccgccagcccccaagtccggcgacgccctcttcgccagcgtggatcgcgtcaatgcggagctgttcacgctcacgtacggcgccatagtgcggcagctgctcacggatctggaggaggtcgaggaggtcaacaagcagctcgatcaaatgggttacgacattggaacacgattggttgatgagttcttagcgaagtcaaatgtatcaaggtgtgttgacttcaaggagactgccgatgttattgcgaagcttggcttcaaaatgttcttgggtgtgactgcaactgtgaccaattgggatgttgagggtacaagttgcagcattgtcctcgaagacaaccctcttgttgattttgttgagctccctgacacttgccaaggccttcagtattgcaatttgttaagtggagttattaggggggcattggaaatggtgtctatgaagacggaggtgacatggctacgtgacatgcttcgcggggatgatgcctatgagatgcgggtgaaacttatcaagcaagtcccggaggaatacccctacaaggatgatgactagttctatctcattggaagatacaggacgcctgtttgcttgtttggattttttcacattgttgtcgttgacggattctagttctgctataacctgatgccatacgaggaaggtgtggattatattttatactccccgtgtgtattaaaaaaaaaaagccccccccccccccacacatgattttcccatgagttgaggctttgaattatagtctgctgaattcagagcattagctacgcaaactgtgtttcctagaaatgaagtattttctattgagggtcaaaaaaaaaaaaaaatttttaccccccaccccccccccagggcgttcgtntagaggctccagaataacgtacgcgtgc

SEQ ID NO: 2113 - DNA, 1779 bp, Zea mays
  unsure (1)..(1779): unsure at all n locations
  Clone ID: MRT4577_101929C.1
cattgggtacctcgaggccggccgggatctggctctcctccgtccgtttactcacacggtcacaccgcctcaactcgcgctgcccgtcgcccccaagcctcggttccgccggcgcgcgaggggattcgagctgggtcttgggtagcctctcaccgtctcacgatgccgccagcacccaagtccggcgacgccctcttcgccagcgtggatcgcgtcaatgcggagctgttcacgctcacgtacggcgccatcgtgcggcagttgctcacggatctggaggaggtcgaggaggtcaacaagcagctcgatcagatgggttacaacattggaacacgattggttgatgagttcttagcaaagtcaaatgtatcaaggtgtgttgacttcaaggagactgccgatgttattgcgaagcttggcttcaaaatgttcttgggcgtgactgcaaccgtgaccaattgggatgctgagggtacaagttgcagccttgtcctggaagacaaccctcttgttgatttcgttgagctccctgacacttgccaaggccttcagtattgcaatttgttaagtggagctattaggggggcattggaaatggtgtctatgaaggcggaggtgacatgggtgcgtgacatgcttcgcggggacgatgcctatgagatgcgggtgaagcttatctagcaagtcccggaggaatacccctacaaggatgatgactagttctattttagtgcaagattgcttgtttggattttgacatcgttttcgtcgatggtccgtagttctgctataacctgatatcataggaggaaagctgcgtctgttttgcttgtgtattgtagaaatcatacataatctttcctgagttgcggctttgaattagcctgctgaattcagggcattcgctatgcaaattggtgttatctagaattaaagtattttcgatctaaaaaaaaaaaaaaaaaaaaaaaaaaaaaaaaaaaaaaaaagtccgcctgcccgggcggccaaggcgtaggtgataaggggagttaatatggttggaggggaagttgcctatgggatgtgggtgaggcttgcggagcaagagtcgcaagaagacccccacaaggatgatgactagatcaagtttagtacgagattgcctgtttggagattgacatcgttttcgtcgatggtccgtagttctgctataacctgatatcatacgaggaaagctgtgtctgttttgcttgtgtattgtagaaatcattcataatctttcctgagtttcggctttgaattagtctgctggattctacgtcgttcttctatgcaaatgtggttttatctagagatttaaatctaagtcagtgtatttgaaaaataaagttataaaaaaaatcaaacatgatcttccaagaattgaggctttgaattatagtcagctgaattcagagcattagctacgcaaaccgtgtttcctagaaatgaagtattttcctgggttgggtgttgtcctgtcccttctcccggtgtgctttcggcccgttggggacccggccttcttccttcttgtcacagcaacagttgttgccgttctacctgcacgctatgcctancgctgaaaaaaaaaacaactgccccccccgctgccattcaaccaacttgctttgacaaacccagcagtgttctaccaacaacccatcattggtggtgccctcttttagattgcttatgagttatagttcaataatgaagttttttggatgatgtttgtggcttcccagaaataagaaa

SEQ ID NO: 2114 - DNA, 342 bp, Zea mays
  Clone ID: MRT4577_10192C.1
ggcggtgaacgacccaaaggcctactctggtgggaaacggctaagtaactacctgaggactgtcaccattcacaatggtgacaaagcactgcgcatggtgaggagtatctgccggtgggcatcgggaggaacctaaccagactagcagtcgtcaggtcatgcttctaccccacttcccatataaggcctgttatggatggtagcagctcctatggatcggggctgagaaagaacggacaaggattttgaccatgcagggatataaacacatccatattgactatatctaaagggcgtgagggctaacctgccacgcactaagctggcatggaatgtaaggag

SEQ ID NO: 2115 - DNA, 266 bp, Zea mays
  Clone ID: MRT4577_101930C.1
cacggcgtgcgcttctcgtccttcagtacgatcgtgctggcgctgaatgctacatcacgcgggtactgaggacaccagcgttttgtcctagagtaccaccgattataccctaccttctgcccactaggcatcatctgccgatacatgatcgacgacaccttatacctattactgcttctactcctactacttcacaacgaacgattctggagaccgagcgcggccgtcaactaaaaagccattctctttggtagcctgggtgggcg

SEQ ID NO: 2116 - DNA, 986 bp, Zea mays
  Clone ID: MRT4577_101931C.1
gggtccctcacgcgtccgccggggactggcactgtgcccccgactgctctcactcagtctcagagacgttctcctccgtccgtccgcccccgtgacgcgagcgtcgccagggagccgaaagtaagcctcagttccgccggcgtgcgaggggttcgatctgggttagcctctcacgatgccgccagcccccaagtccggcgacgccctcttcgccagcgtggatcgcgtcaatgcggagctgttcacgctcacgtacggcgccatagtgcggcagctgctcacggatctggaggaggtcgaggaggtcaacaagcagctcgatcaaatgggttacaacattggaacacgattggtcgatgagttcttagcaaagtcaaatgtatcaaggtgtgttgacttcaaggagactgccgatgttattgcgaagcttggcttcaaaatgttcttgggtgtgactgcaactgtgaccaattgggatgttgagggtacaagttgcagcattgtcctcgaagacaaccctcttgttgattttgttgagctccctgacacttgccaaggccttcagtattgcaatttgttaagtggagttattaggggggcattggaaatggtgtctatgaagacggaggtgacatgggtacgtgacatgcttcgcggggatgatgcctatgagatgcgggtgaaacttatcaagcaagtcccggaggaatacccctacaaggatgacgactagttctatctcattggaagatacaggacgcctgtttgcttgtttggattttttcacattgttgtcgttgacggattctagttctgctataacctgatgccatacgaggaagctgtggattatattttatactcgccgtgtgtattgcttatgtattgtagaaatcatacatgatcttccatgaattgaggctttgaattatagtcagctgaattcagagcattagctaaaaagcaaataaaaaaaaaaaaaaaaa

SEQ ID NO: 2117 - DNA, 1008 bp, Zea mays
  unsure (1)..(1008): unsure at all n locations
  Clone ID: MRT4577_101932C.1
gtngaagttgtcttggtcttttgccctctgagggaaataaaccacttttggtttatgagtacatggagagtggaagccttgataaagcattgtttggaaatggaagattgaacttgaattggtcaacacgatataaaatatgcttggggaattcaagaggcttagcttatctccacgaagagtctagcatccgcattgtgcatagggacataaaggccagcaatgtattacttgatgccactttgaaccctaagattttggatttcgggctcgccaaactttatgacgataaaaagacacacgttagcacaaaagttgctggtacatttggctatctttcacctgagtacgccatgagaggtcacatgactgagaaagttgatatttttgcttttggtgtggtcatgttggagattattgctggaaggccgaactatgatggtaaggttgatcaagacatggcttatcttttagaatgggtctggcaactttacgaggaagaccatctgctcgacattgcggatcccaagctcacagaattcgatagtgtcgagttgctccgtgccatccgcatcgccctcctctgcatccagagctcacctcatcaaaggccatccatgtcgagagtggtgtcaatgctcacaggagacatgtcgttgtggacgatggccggtgatgatggccatcgctaagatcagcttatgtcaagcactcaagccacagatttgaaaaggtccccattatttaggttgaatgtggatgacagatttatttgttgactggatgagatgtcctagggtttcctcacgttgtagaatacaactctcacaagtataagagtctaggaacatattccttcgatgtaacatacctcttttgtttaatctgttttgtaagagaaaccagaagaaacacttgtatttcggntgacattttgaaacccacagccaattgaacgctgggtgtgtaggcatatatatgaccaataggttgattgtaagctttact

SEQ ID NO: 2118 - DNA, 450 bp, Zea mays
  Clone ID: MRT4577_101933C.1
ccctctcttccgcccacgcgtccgtaaccagcaggttgatgacggttctaatgctcctgtcacatatgtgctgaaaggatcgcaggcagagcaaatgttgtgtcctcaatggcagccacaaacaatggaaaatactcctgtcactactaattcaacactcgaaaagcaaatacaagaagatttttgtcaaagagcaatgtcgcaagatggaacacaacaaccattttcatcagattggcgtctttctaattgcactgcaacttctattgatcctgcattgccgaagcctgcagctggagggtttgaacaggtcactggaaatatacattacctccgtcagataaagtggttgctgctactgtttcatgcaaaaacatgcacataccctgttggaagttgtaagttccatggttgtgttcagaactggggcttttttgtgttcgcaaaatg

SEQ ID NO: 2119 - DNA, 444 bp, Zea mays
  Clone ID: MRT4577_101934C.1
tttgtgggggggggttttatttttttttttttttttttttttttttttttttttttttttttttttttttttttttttttttttttttttttttttttttttaaaaaaagcccaaaaaaaaaattttacccccccaaattaaaaagggggggggggaaaaaaccccattgttgaaacacttgtcgaatttaatcaggggggccttaaaaagaaaaatccccagtttccccttaatgataaaacccaaaataaaaccttcgggtagggagctccatttaaaagggggttgcaaaacattttccaacagggtgtaggtactctttttcctggagtttaattttaaaggggtttgcaaaacattttcaagaagggtgtagttactttgtttcctcaagtttgggggggttgggttggcccccgggagggaaacggattttggaaaat

SEQ ID NO: 2120 - DNA, 1372 bp, Zea mays
  Clone ID: MRT4577_101935C.1
tgttacacttatggtgaactaaggaccgctactgaaaattttagttctgctaatcttcttggtgaagggggatatggatcagtttataagaaaaattcaccttctggcagggtaaattagttgatggcagtgtggtggcaattaaacaactatctgaaacatctcgccaagggaagaaggaattcgtagctgaaatagaaactatttcccgagtgcagcaccgtaatcttgtgaagttgtttggtttttgccttgagggaaataaaccacttttggtttatgagtacatggagagtggaagccttgataaagcattgtttggaaatggaagattgaacttgaattggtcaacacgatataaaatatgcttggggaattcaagaggcttagcttatctccacgaagagtctagcatccgcattgtgcatagggacataaaggccagcaatgtattacttgatgccactttgaaccctaagattttggatttcgggctcgccaaactttatgacgataaaaagacacacgttagcacaaaagttgctggtacatttggctatctttcacctgagtacgccatgagaggtcacatgactgagaaagttgatatttttgcttttggtgtggtcatgttggagattattgctggaaggccgaactatgatggtaaggttgaccaagacatggcttatcttttagaatgggtctggcaactttacgaggaagaccatccgctggacattgcggatcccaagctcacagaattcgatagtgtcgagttgctccgtgccatccgcatcgccctcctctgcatccagagctcacctcgtcaaaggccatccatgtcgagagtggtgtcaatgctcacaggagacagcgaggcgcctgaggcagtgtccaagcctagctatgttgccgaatggcagagcaacactgaagggacgtcaagctcagtgtccacagcagaggctgtgtccgtggctccattcctaaaccccgttgtggacgatggccggtgatgatggccatcgctaagatcatcttatgtcaagcactcaagccacagattgttttcttggagatccacctttaaaggccccattatttaggttgaatgtggatgacagatttatgttgttgactggatgagatgtcctagggtttcctcacgttgtagaatacaactctcacaagtataagaatctaggaacatattccttcgatgtaacatacctcttttgtttaatctgttttgtaagagaaaccagaagaacaccttgtatttcggttgatattttgaaacccacagccaattgaatgctgggtgtgtaggcatatatatgaccaataggttgattgtaagctttactac

SEQ ID NO: 2121 - DNA, 368 bp, Zea mays
  Clone ID: MRT4577_101936C.1
aattcggcacgaggaatcagtgcgaccgcagcttcataactcctacacattatacgtcgtgagtctttcacgacatgctgacaaggacgaagacggtttggacgtgcacaaaaaccagtgtattgaaaactcgcacgccggctagagaaaacgatgatgacaattttggctagaggggccgaactcatacccgatgccggaaacttaggcactggatctgaccataatgatgtacaacggcatgagcagcgagctccatatctgggactacaacggggccaggccgttcaggatggaccaggctgcggactgcaggagtgcatgatacgagctaatcgtcgcctgaggcttttaggagcgggagagtg

SEQ ID NO: 2122 - DNA, 155 bp, Zea mays
  Clone ID: MRT4577_101937C.1
gttcgtctgtctgtctttgacaccacagcgcccgcatccgtttgcacagttgcctgcagccctccttcctgctcctgctcggatcgctacggctacgggcacaggcatcgacagtgacatccccgctcgcgccgtcctcggtcctccctttcttc

SEQ ID NO: 2123 - DNA, 440 bp, Zea mays
  Clone ID: MRT4577_101938C.1
cctgcaggtaccggtccggaattaattcccgggtcgacgagctcactagtcggcggccgccctttcttttttttttttttttttttttttttttttttttttgatcactttttttttcattctttttttttttttttttttttttttttttttttttgggaaaaaaaaaaccccctttggatgaaaagggggggcctccactcccccccagggttttcccctccggggttaaaacctctctttaggaccgggcccgatttaaccgaggggggatggcccctttttggtgaaaaatatgggttttttttaaaaacggtgggaactaaacaaaaacccccgggggggggcccccatccccaaagagggggtgttggttcgcccccaacttttttttagcaacccgggaaagtttgctgaccacagggggcttttctcttaaa

SEQ ID NO: 2124 - DNA, 144 bp, Zea mays
  Clone ID: MRT4577_101939C.1
cctacaccttcacttacctttaaatgcttacgcttaacgtgaaaagctaaagggggggaaatattagttgtggtggctacacaatgcactcgcacacaaaatgcacgcctctgtctatcgctagaaggcttcacatatcttaca

SEQ ID NO: 2125 - DNA, 170 bp, Zea mays
  Clone ID: MRT4577_10193C.1
actagccgaagacggagctgctggtcgaggcgagcgacaaccttagcggcgagttctgcgaggcgccctaccgtgacagcccttcccatgagctgtgtcaccattgaagacacccatccatccatttatatccacgtgtctttggaccacagcgtggcagatggcttaca

SEQ ID NO: 2126 - DNA, 209 bp, Zea mays
  Clone ID: MRT4577_101940C.1
ggcactcctagccctaggtcatcgtcaacagcttgatcatggacgacttctaggggggttaaggcacttgccatagtggcttaccaactcaatatgtcacaacatactgctctgtacacatagctgcctacaaccattccacagtgccaggtactaatgttacttctagacccattcacctagattattcaaagatctcaattgcaata

SEQ ID NO: 2127 - DNA, 363 bp, Zea mays
  unsure (1)..(363): unsure at all n locations
  Clone ID: MRT4577_101941C.1
gcctcttcctgcactttgcgccgtcagcctggtgcactggggcgtctagggggatctgtgtgacctcctcnactccataaggcctttccctctctactccttctttgccatgtactacctgctccgtctctcatccttcatctataccttatgaacacatctactgctttttatctacctttcttttcatatttttttcttattttttacatgttcttttattatttttttatttttttttattttattaatattattatttatttatatattttaatttttttttttttttttttttaattatccttttattttctttattgtttttttttatttttatttaattttttattatattatttt

SEQ ID NO: 2128 - DNA, 616 bp, Zea mays
  Clone ID: MRT4577_101942C.1
cgggccgggctcttccattcctccttccgtaggttccaccccaattccctcaagggatcgagatgaacaactccacctcgccggcggtggactggggtgacgactccgcgggggagatggactctgaggacgcagcatgatggaggtcgacgccgacgaccgccaacccagtccgcctcccgacgccgacttcttcaacgccttccccgacgacttcgacgaccaagacctcgactgattgccgccgccgcttctttgctcgcccggaccccttccgccagttgggagtcgtatacgaacctacctacttccaaggaagcaccagtcatccatcaccttgtacatgtttttatgttgcagcactagtggtgtttaattgtcagctgcgatcatgtgagaacctgacctggtacattatgtatataagaagaataagaacctgttaacttatatggtatagtatgtaagttcatggcagaatgttcttgttggttggattcgtgcgcagttgagcagtgctggtgttgtaatgtgatggtcgcgactgcgttgttcgcatttgtgatggttttgcttttcattggtgaatggtgaatggtgaagacaaagctgaatc

SEQ ID NO: 2129 - DNA, 800 bp, Zea mays
  Clone ID: MRT4577_101943C.1
ccaaaattcggaaaatcttaagcagctcttgtatctcggagtcgccaggaaaaagccctggccctatgttggttttttttttttttttttttttagtagattcagctttgtcttcaccattcaccattcaccaatgaaaagcaaaaccatcacaaatgcgaacaacgcagtcgcgaccatcacattacaacaccagcactgctcaactgcgcacgaatccaaccaacaagaacattctgccatgaacttacatactataccatataagttaacaggttcttattcttcttatatacataatgtaccaggtcaggttctcacatgatcgcagctgacaattaaacaccactagtgctgcaacataaaaacatgtacaaggtgatggatgactggtgcttccttggaagtaggtaggttcgtatacgactcccaactggcggaaggggtccgggcgagcaaagaagcggcggcggcaatcagtcgaggtcttggtcgtcgaagtcgtcggggaaggcgttgaagaagtcggcgtcgggaggcggactgggttggcggtcgtcggcgtcgacctccatcatgctgccaatggcgatgctgatgcccatggaggaggaaggcgctgcgtcctcagagtccatctcccccgcggagtcgtcaccccagtccaccgccggcgaggtggagttgttcatctcgatcccttgaggggaattggggtggaacctactggaaggaggaagtggaagaggactagtctagactctacaggtgtgtccggcccggtacccccgacggatgca

SEQ ID NO: 2130 - DNA, 309 bp, Zea mays
  unsure (1)..(309): unsure at all n locations
  Clone ID: MRT4577_101944C.1
ctacctcccccctccatccctacccgccgccgtcttgccgaagggcgagcgtggcatgtgctacgcgacgcccagctctgctcggctccggggctgacggcggacgcgtcccggcanctaggtatgtctacttcccgatctgcagaagaaacctcccaggtggcgattacttttttggacagtgatgatgatgaaggcaaggccccattatccttcgagagggcaaataagactgccagcactgtgaaagacataccttccattgtgaatcctgatattttcggcaacattggagactacgttccatta

SEQ ID NO: 2131 - DNA, 725 bp, Zea mays
  unsure (1)..(725): unsure at all n locations
  Clone ID: MRT4577_101945C.1
tgggccgggcccgcctcttagtacgctaggtgggattccccccgggcctgcaggactttcggcaccgaggtacttcacttggcgttcgtcactcatgacgctccctgggcaggtcgcgtcatcatcttccgcccgcgccctgcgccctttccaacccacacccacttctttcccctccccgtgccctttcaccaaccaaggttcctccactccttccgcggtggctgaccaattccaccattcggcttccacgtttattttctaaataactgctactccggattccatacttcgaattgatcccgtcctcacgcggcagcacctatcccccgcgggtcgcatcgagtccaccaccgctggcgtcggttccttccgcgcaattccaccggcaaaagcagagtatactaccgactagagaagagttttggagtttggacccgctgcacccccgaagtcccgaaccctacgctggngggaagctcttcacgtcgcgcccgcccatggaccgcctcgccgacggccttgccgcggcatccctttccgacccagcggaccagagcgccgccaccgctngtttgcctagcgccgattacctcctcagcgtcatgcgcgccgtagagggcgccgacgccaccatccgcacccagtttggaagagattagccgtctcaaggaagaattgatgaggaaaacacaacagctacagaggatgaagggaagatgcta

SEQ ID NO: 2132 - DNA, 331 bp, Zea mays
  unsure (1)..(331): unsure at all n locations
  Clone ID: MRT4577_101946C.1
natgnaccaaacacttccatatactaattggggttcttttaaatgcacttgggtgaattatactnccatatttcattggacctgtgatccctcatccatccctaaagttgtatagaattcatcgcttggatcaataagtgttttctaacangcagaaatggctgcttaggatcttaccactgtttagttaaaatttagatatataaagagcactgaagattgttagttaattaggaccgacccttttaatcattataccaaggaatattaatgcgcggattcaaatgttctacaccttttaattaaccttcatatttattaatatgcttca

SEQ ID NO: 2133 - DNA, 635 bp, Zea mays
  unsure (1)..(635): unsure at all n locations
  Clone ID: MRT4577_101947C.1
agggccgcaaggaggcgcctttccggcgttgcccttgtttttttccctctccagctcgaggggttttcgatccggggggcggttcccggcgagatttttgacccggcccggtgcttggttccttccattcatctccgtctgctactacttcctcctgcttggttgccttgccttcccggtccctgatcggagcctgtcgccggcgggcgggcgggcgggcgggctgagtttactgcccgttaccgggggacaaagagcagaaggaacagagagtaaaaaatcttgggccttgatcggatccgaggacggggcaatgcggtaataaggagcggccatcactgccggagtttgatccatccaaggagaagagggaggggaggccgctttcctttctttctgaagcggaggcagctcccgaggcgcccgccatgctgcgcaacagatcgagaagggcggttgggtggtggtgccaaccaagcccaagaacgagcgggcggcctcatggncgagctccccgcggncgccgctgtccagtcgccgaggcatccttcgtngtgctcctcctcctcctctcccgctggtggtcccgtggtcccttccccgaggccgtttcgtggcgatggcggcgctgtctc

SEQ ID NO: 2134 - DNA, 392 bp, Zea mays
  Clone ID: MRT4577_101948C.1
ttttaggggttggaaaatccctatcatcaaagtgagagaagcagataattgacgttcgcctatctaccgaacaacgcatgccacatctgatacatgcacgcgaattacaggcatggagcagtcaggcaagggacaccgaggtacgatctgcatggagtttttttgtccggggggcacaacgcgacaagaagggtgccgtcactctttctgctcccagtcctgatgaggatggggactgctactggctgagcggaccacactcgagcgcgatctgacctaccgactcgaattgtggagcctgagggagaactacaggttgacctttccactcgcaacaaatatgacgctggccttggggagcacaccgatgctgatgtcgctggctgaccatg

SEQ ID NO: 2135 - DNA, 342 bp, Zea mays
  Clone ID: MRT4577_101949C.1
gggggtctgggggtggggggggtttcatttaagaaaacgtggccccttgcatgggccatatcattattatttgaacaggtttaactcagggggtttcggggcaaggcgggccccttttacaaaatttaccacgctgttaatgctagctccttttgggacaccaaactaaaatcaattttctcaagaaagccaaacccaaggcgtgttagccggaacttaatacactccatgtggaaacacggggaaatgaacggattcacggtttaagggccaaagtcttcacgtgaatttcgcacaacatacaatttggcgtggtaatttcctggggaaaacattaaaatt

SEQ ID NO: 2136 - DNA, 793 bp, Zea mays
  Clone ID: MRT4577_10194C.1
ggtaccctcgggctcggccgggggggaaagcagctcccgttcctcctccccgcgatgacctccggtcaactccgacttcttcttcggctccagcgacgaagacgtcttcgaccccgatgccggccacccgctccggccggagtttccggagctgaaggcggccatcgacgccgccatcgccgagctaggcggcgccgcgctccccaagcgcaactggagcgcgcccaaggatgccacattcatgtctgccgatggcacaactcagtgcagtgcacgtgcttcgccgaggttgccttgctgctccgctatttcgactgtgtggctcactgaccttgcctacgcgaggcaatcatgcgaggattttgtgcgcccggcgggtgctcgacggaatgtccaaaaactggatctaacactgccttgtatgcagcatttacaaatgcagtgtctgccaagataccaactggatcacctggtgtcacagaacttgatacatttgtcgagtcaaattgtacaattgagttgctgcacgaagttctcatggttccgtcatagcatactgtgacatctcggagcattgccatcatgttcttaaaaagattgccaggttcagccagtcctttagatgatgagcgctctatcttttcccttactgatattgagtggagtaattcctcgtatggatttaaaccaattgtaaaagtgaactcgtaacaaaatcatgtccttttgaaggatcataacaataggtgcttccgttgcacctttcccgaaaaaaaaaaaaaaaaaagcggcc

SEQ ID NO: 2137 - DNA, 311 bp, Zea mays
  Clone ID: MRT4577_101950C.1
ccctactgctgctacacaagaccctgagactgacctgcaggacgaaaccatgaagagcctgatccttcttgccatcctggccgccttagcggtagtaactgtgtgttatgaatcacatgaaagcatggaatcttatgaacttaatcccttcattaccaggagagatgcaaataccttcatatcccctcagcagtgatggagagctagagtccacgagaggatccgagagcgctctaagcctgtccacgagctcattagggcagcctgtgatgactacagactttgcgaacgctacgccatggtttatggat

SEQ ID NO: 2138 - DNA, 808 bp, Zea mays
  unsure (1)..(808): unsure at all n locations
  Clone ID: MRT4577_101951C.1
cgaggccggccgggtcgggactatcccgcttcaagaacctctcgccagctattttttagccgagagaaccagaagcgcttccctctcatcttaccaacccgcttgattattcttttttttctttctcaaacgtcgtcgttgccgcttgctccattagttcgacagtctcagggatccattagagtctcacgggttcagatatctacatacctcagacggaggaggagaaatgtcgatcgaactacacacgctctatttccccgatcggttccagatcgtcttggggccggaaggctcctttgcctcaaaacttatctccctgaaggactttcctgcgggagaggagctagcaagactgggcaaagagtgtcaaatgacgcaacacaaggcctacacgtctgtgcaatttgaggaagagactgcgggcccagaggggaggggcggacacttcgagctgaacagcgagctggtctatatcaaccacagttgcgagcccaatgtggccttcgagctacctgggcgatggtccgggcttgccgagggaaaatggcgactgagatcactctgcgacatcaagaagggcgacgccctcgctttcgcttactttagcacagaatgggatatggcccagcctttccagtgtcagtgtggctcaacacctggcgtggggnatgatccgtggggccaaatacatgtccaagggaaccttgaataaatattttattaatgcccatattctaaaatgaaaaatgatgggcaatattaagcagcctctttttcacaanaaaaaaaaaaaaaggcccctagg

SEQ ID NO: 2139 - DNA, 657 bp, Zea mays
  Clone ID: MRT4577_101952C.1
catgcaccatattacgagattggaaaacagcaagtcaaataattgaacatttggattcctctctctcatcgatttcttttggcacactcaccatattttaaattttcttggaaaatgtggcaggacagagagcatgatgaagctgttctataagatggtgacttcatgctctactgtgggcctttctacttatacgattctgctgagaaatctcttaattgtggggaaatggagaaagtatgttgaggttttgcagtggatggaagatgctggagtctgcccaacactctatatgtatcaaagcgtgcttccatatatctggagagacaacagtatggactatgttactctcatgcaagaaaaaataaatgcattgagagagaaggtaacatgagcttcagatatgcatttgctcgcttggtatgaagtactagaagtccataaccgaatactgaaggtagctttagaatgacactagcaggattcaggtaggacataattgtgagtctgccctagtcgggattgaagcaacgaatccctcttcagaaaaaaaaatggatatggtaagagttttctaatataaagttcacaaatattccctgtttttcttgctataagctgttgccttaccaatgtgcttcttaggcacttcaagaa

SEQ ID NO: 2140 - DNA, 603 bp, Zea mays
  Clone ID: MRT4577_101953C.1
caaacccgcgccggccgccgcctccaccgattgatcgatcgccgggaaactgacctctgccgctgctgagttcggagccttcgtcgacgatgtctggagccggtgaggaggacaagaagcccgcggaggcgggcggcgcccacatcaatctcaaggtcaagggacaggatggcaatgaggttttcttccgcattaagaggtccacccagctgaagaagctgatgaacgcctactgtgaccgccagtctgtggatatgaatgccattgcattcctgtttgatggccgcaggcttcgcggcgagcagaccccggatgagctggagatggaagacggcgatgagattgacgccatgcttcaccagactggaggcagcgttcctggcgcctagatgcagccgttgcagagcctcttttgctgcgccatgctccgccttccctagcagtaaactaaagaagtctttttaaggaacttgtgatgctctggcaccctgtgccattgctgagggacatcattagccttgtttagtatggtttggtacctttgtctgtcatatgactcgtttatctatcccctaatatatcccgccatgtttgtactccccc

SEQ ID NO: 2141 - DNA, 455 bp, Zea mays
  Clone ID: MRT4577_101954C.1
aaacccaaaaagccaaaatttttattccttagccaaaaacaaacaaacaacagggaagaccaggggttttataacaacccaaaaaaaaaccaaaaagccctagggtaaaaaacacaattttattaggggaaaaggcgaaaaaaaaatgccccacaaaacattttattaaaaaaaaaaaccaccggccgaaaaaaggctaaaaattgggctggaattttaaaggggcccgggattcttccgggagttggcaaaaaggggggggtaaaaaggggaggggggggtccctggcaaagggaaagggccccaaattggggggggcccctttaaggaatttttaaaaggggatttccgcctttgaactttcaaagggggcaacgggaacaaaatttggaaaaaaaaccagggtagcatgcattctcctgaaaaaagttttaaaagggggggagttttgttcc

SEQ ID NO: 2142 - DNA, 247 bp, Zea mays
  Clone ID: MRT4577_101956C.1
ctccaaagcgggaaaaaaaagggagagcttttttgcccgggtgctgctaaaccctcgagagctcggtgggtggtgtggtggggtgctcttccctcttgcctcccatccgaagcatcgatccgaactccttgggtactcagggcagcggaggtggacagatgcgccccaacattattcacagcagggtgggatttcaactaggttgaatcaggggaggagcagcaattccactcgttacttccggcgt

SEQ ID NO: 2143 - DNA, 3516 bp, Zea mays
  Clone ID: MRT4577_101957C.1
tttcctggctcgagccccaagcctccaatccactgaactaaaccctaggacatggcgggtagagactactgccggttgccggtgcgcccgcgcgacttctgaggccccgcccccgtcccggcgtcgccggaactggctccactgtcgcccccatcactgggactgggagagtgggagttcagagccgcagacgctggggcgccgggtcaccggaaggccgggaaggaaggtgtggccgcaagacgcaggcaggaggcatcgactcgactcaccatgtctcagtcaccgggaggacgggaaggcatatattacagcaggcagaggaaacctgagcgcaatggcagtgtatttacacctatagctgcaatgtattccagtggtcatgcactccctgttgcaaataggagccacggtttggtatttggcagtctgagcaaggactgggacgacattcgccagcgcaaggatcagttggtcaacttccttgctagtcttgaacgagcctctggagattctgcggcagctggcaaaatcgaagatagcaaattggccagtccttctgtggagccaactgaacaaaaagagaaggctgccataatcgttcttgattcagacgatgaggacggaaatggttcaggaaacagtaagttggcatctgagactaacaaagaactcggaacatctggattgattaataatatcgcagaaaggatggcgtttaatgggagccaagcatttggaactgtgcatacttatggagataagaacacacagattgttccgtatggtcaatgttctgctttagtgaatcagtttcctttgcaaaccagttggcaaccatctattcagtttgagagagtcgtgctgcagaaaaggcctgaggagcagcgaatgcaagatcttgtggctgctagcatagccgagaagagagcagaaacacaagtgttcctttcacttcccacagagaaaaagcgaaggagatcagaccccagtctgcatgccagtgacgatactgctactgtccctaaacaaagaaaaagtaaaggtgccacagttgtagcagcagctaatttgtcattggtttcacaacaaactgctacatcaccagaacctgacatggttatagaggaagaggagaaacataaaaatgaaagtgatggtcttgacgattattggaaagattttgcattggctgttgaaagcacaaagcttgacgaagttgatgaggcggcaattgaaaaggaagataatggaaagatggaggacatcgattgcaatcatgacatccggattcatgaagatttgggtcatgtatgccgtgtgtgtggtatgattgtgagaagagctgattcaataattgattatcagtggaaaaaggcttcaaggagaagaacgaatggctatggaggacattcaaaagatgctgatgagatagattgtggtactgttaaactgtctgaagatttcatagtcgcagatattgctattcatcctagacatgctcggataatgaaaccacatcagttggaaggtttcaactttttggttaagaatttgattggagacaagcctggaggttgcattctagctcatgccccaggtacagggaaaacatttatgcttataagcttcattcagagcttcatggcaaggtatccatctgcaaggcctcttgttgtgctgcccaaagggattctaggtatatggaagacagaaattaaacgatggcaagtgcaggatataccagtgtacgatttttactctgtcaaggctgaaaaaagagtagaacagttgcaaatcctcaaatcttgggaagacaagatgagtatactatttcttggatacaagcagttctccacaatcgtcactgatgatgggggcagcaatgtcacagctgcatgtcgagacaggctgcttaaggttcccaaccttctgatacttgacgaaggacatacacctagaaatcgggagactaatgtactcgaatcactaaatagagtggaaacaccacgcaaagtggttctttcgggtacacttttccagaatcatgttgaagaagtgtttaatatcttgaatctcgttcgcccaaagtttctcaggatggaatcatcccgtcctactgccagacgtataatgagtcaagttgaaatagttggtagaagttcgaaagggcttgctgatggcgcattcactaaggcagttgaagaaaccttattgaatgatgagaacttcaagagaaaagctcatgttattagaggtcttagagaactaacaaaggatgttcttcactattataagggtgatatcttagatgaactacctggcttagtagacttcagtgtgtttttgaagctcacacccaaacagaaagacattatttataagttggaagcacatgatcggttcaaaagaaatgcagtagggagtgcactgtacattcatccatgtctttcagaactttcagaggttaatgctgagcatagggctaacacctttagagatgatttagttgatagtctggtagattctatcactgtgagagatggcgtgaaggccaattttttcatgaatatcctgtcacttgctaattctgcaggagagaaagtgctagctttcagtcaatatatatctcccatgattttctttgaaaggctgctggtgaagaagaaaggctggcatgtggggaaagagatctttatgatctctggtgatactagccaagaagacagagaattggcaacggaccattttaacaactctgctgacgcaaaaattatgtttggttctatcaaggcatgtggggagggtatctccctcgttggtgcgtcgagagttgtcattctggacgtacacctgaacccatctgtcacccgtcaagcgattgggcgtgcattcaggcccggacagcagaagaaggtgtttgtgtacaggcttgtagctgccgattctgacgaggtaaaggtccatgagacagcattcaagaaagaagtcataccgaagctgtggttcgaatggagcgagcactgtactacggaagacttcaaacttggtcaaattgatatcgatgactctggggacgaactgttggatactaaagcaatccgcaaggatatcaaagcgctgtatagaaggtaggtaacaagctttgtggccactggacaccatgtacatattgcagtgctgaccgtcgagctgatccttaaactgaagaaagaggtggcgggtgttgcggtggctacattgcgcggtaacaaaagaagtcattcccagctatatccgtggaatggcggcttcttttgttcctagtatgtgccaacttggggcagcagtcagctgatccccagacacatttctagactcttttttaggctcaagtttctgagaattaacctgctatggcgtttagccttaagtaaatatttcgttcgcaacaataataacccagtaaacctaatttgtttttgtgcgtttgtgggggtggttcttgaaatttaccgggcccctttttcttgggct

SEQ ID NO: 2144 - DNA, 279 bp, Zea mays
  unsure (1)..(279): unsure at all n locations
  Clone ID: MRT4577_101958C.1
gcgtccgntgatccactactntactcaatgtctagatttagcattntgctttgctcacggcgcaaaaagaagtttttggaggggaccacgcatctcccccacctcctgcatcgactatgccaagacgccgcttcataggccaaggtcgcgcctccgacaccatgcaacaatgccaacccatttcagaacagatccgccgccactaattgcggccgtatcaccataagcaactacctgtgatacagaccggaccattataaataccttagcctctatatt

SEQ ID NO: 2145 - DNA, 283 bp, Zea mays
  Clone ID: MRT4577_101959C.1
cacgtcgcgtcgtgagctcgggcttgggctcgaggccacaccgcatcgagcgccgccgccactcgcgctcccctgcgatctctcgccggccgccgcgtgccgctcaccggccaccgcagcgtgttatatttcagcgcctcttgatcggcgagcctaaacccgcaggagagaggctaatgaacgatcgggtggcatgcggcagagctagctcgtcatgcactggaaggtcctgcgtggtgacaacgtgatgcttgtgagatgcggagaccatggggagtccggg

SEQ ID NO: 2146 - DNA, 368 bp, Zea mays
  Clone ID: MRT4577_10195C.1
ccggccaggacactcaccaacaaacaaacaatcacaatcacaacatacacacaaaccacctcaccaaacactcaatccatgccctacctctcatctggaaacaactacctcttctccccatacatctcacaaaaccacgccacaatggcaccctcagtatacatcctcctccagcgcgacacagagtccacagtcataatctcctcagtctatctcgacctccaagacgccaacgccgcgcttctccacctcgcacaagaagcaggcatcgaccctgcaactgccaagcctactgccgatgccggttccgaacagccctcgcttgtcaaggagcctctgcgatgggaggccgccgatggaactgccgc

SEQ ID NO: 2147 - DNA, 273 bp, Zea mays
  Clone ID: MRT4577_101960C.1
ttttgtacaggtttggattatttataaattttttattgattattgtacatataaatatgaaaattatttatctgtataatgatgaaaaaacatgtaaaactagattacattgtcaattatataatagatgaataatcagataagtggaatcaatagaccataaaattttactgttatcagagaataaaaatcaccctggttattaagaaaataaaaattatgcttattctaaaacaaaaatgatatgagaaagtatatttaatttttggagct

SEQ ID NO: 2148 - DNA, 276 bp, Zea mays
  Clone ID: MRT4577_101961C.1
tacagcggccgggcgggggggccatttgttcatttaccccaccactctctcctgtggacgcttcctctgtcattgcgccctcctaactgattcatgatcttgtgggaaatctcctcctaccatctctctctatctatatatttggttgtgcggcatccccactctcttgggggggtggggtttgtcctctgctctctgcgtgcccactatcggctggtgggtttgctgggccgccatcccctccggccggccctctcctggggcgcgttttgctcc

SEQ ID NO: 2149 - DNA, 820 bp, Zea mays
  Clone ID: MRT4577_101962C.1
aagaaccttaagctcatcgatgttgatgtcccagttgttggtggccatgctggaatcacaattctgccactgttatcgaagaccaggccatctgtcaccttcacagatgaggaaactgaggagctgacaaagaggatacagaatgccgggacagaggtggtggatgccaaggctggtgctgggtctgctaccctgtccatggcctatgccgctgccagattcgttgagtcttctctccgtgcgctggctggcgatccggatgtttatgagtgcacatttgttcagtctgagataactgacctgccattcttcgcatcaagagtcaagttgggcaagaatggtgttgagtccgtcatttctgccgacctccagggaatgactgagtatgaggccaaggcacttgaggcgctgaaggccgagttgaaggcaagcattgagaagggtattgctttcgtgaacaaacagcgggaagctgctgcatctgtttgaggcgaagcaagtgaaacagaaggaacaatcgtcttgaatggcttttaagttttgcagcctagagttttttgttgtcggcatgtaggaagatgttccagatggttgctgtttgtttctaattgctacatgggggctgaacatccatcccccaagttatcgccggtttctgaaccaggccttatttacacataaattttgccccttctgtatcgtggttctgtttgtagcttgttggagtctacaaactacaaagaggctaataaaccacttttattggaagtgaacattgtcatgtttgcattgtcgtgaaaaaaaaaaaaaaaaagcggcc

SEQ ID NO: 2150 - DNA, 277 bp, Zea mays
  Clone ID: MRT4577_101963C.1
gaacaagttatagacgtggaagttggctggggttacatgaggaaatgagactcgacatgcaaagaatttggagaagaaatttagggagagatgatagatgtattgctgataatgggaaggagatttccattcttggatgaggatgttataaggcttttgctcaatattccattgtgggaggtagccaacctcgatcaacctagtggcattggtgataaaaggattttaagagaggttgctgaattgcttggtttatatgaagcagcagttctgccaa

SEQ ID NO: 2151 - DNA, 148 bp, Zea mays
  Clone ID: MRT4577_101964C.1
actactataggaaagtggaccctgaggaccggccggattccggtcgacacgcgtcggaaccggccaacactttacgctaggcgctagctctagaatggctgctcaccatggcgatctctcacggcgaatggccggacccccatcaagg

SEQ ID NO: 2152 - DNA, 339 bp, Zea mays
  Clone ID: MRT4577_101965C.1
actttcattacttggtaaaaaaacagacctatgtgaatggagggatccaaacctccgaattaaaagctacataacctaagacacatacaattccattaagagctcaatgcactgtactgctacaaagaaataccaccatgaagcctacggactacaaaaaaacatattcttgatacattccggatgacttaccaatctctctatgacaaccctaaattacctgcctatccataaagaccatggactaccggaaaagggacgcttctacacacaacaagactgataaacatggagcatgccgcaaaacataccttgaatctaaaaaatcacataacctca

SEQ ID NO: 2153 - DNA, 1394 bp, Zea mays
  Clone ID: MRT4577_101966C.1
ccgtccgggaccaaccgcccgctccgatcggcggacgcacccactgtggaagaaccgttgagctgagccgagcagggagaaggacgcgagagcagcatggagacggcggagaggggcaccaccgtgtgcgtgaccggcgcggggggctttgtggcatcgtggctcgtcaagctcctcctctccaccggccgctacaccgtccggggtaccgtgcgtcatctcggtgatggcaagaatgcccatcttaagacactggaagatgccggggagaggctgcagttggtcaaggctgacatgctggactatggcagcgttgcgtccgcggtcgccggctgtcagggtgtcttccatgtcgcgagccctgtcccctctggcaaatcctccaaccctgaggaagatgtcattgctcctgctgtaactggcacactgaatgtgttgaaagcttgctatgaggccaaagcgaagagagttgttgtggtatcttcagtggcggctgtgttcaataatcctgactggcctaagggcgaggcctttactgaggatagctggtcagatggggaatattgcagaaaaaatgaggaatggtatttcctttctaaaacattggcagaacatgaggcttttgcttatgcagccaaaactgggctagacattgtaactatttgcccatcattggtaattggacctttgttgcaacctgcagtaaatacaagtgttaaagtcttcctcagttatatcaaaggagatcaggagatagttaaagatggacccaaaaatcttgtggatgttcgtgatgtcgctggtgcccttctgttggcttacgaaaatctgcaggcatcaggacgatacctctgcagttcaccagcaataagagtctctgatattgtaaacatactgaagaccgaatatccaacatacacttaccctcaaaaattcgttgaagcggaaggtagcaacacatacaacacggagaagcttcggaagctagggtggacctctaggcccatggaggacaccctccgagacagcatcgaatgctacagagctatgggcatcctgaactgagcttcccttcagctttgggctttggctgctgctgctgctactacttttcagtttctttcttcttcatgtaaacagtgaatcagaaattcagaatacgctggtataggaactagagaagtggatcatggaagatgctgatgctaaaaatgaatttggatactatccatcatttgtgcctgccggattgagggcaaattaattaagtacttatatttgtaaatctggggccgtcgaactgaaccaacaatgaagaggtgaagaacaaatcgaagtggtagatgagtgcattgctgtgaatagcttatagcgggaagctctgtttcttggcc

SEQ ID NO: 2154 - DNA, 254 bp, Zea mays
  Clone ID: MRT4577_101967C.1
ccggaaacccccacaaacccaccattattcctactttccgatggccccttttttaacactaaccaaaaccaattttttaacccttcccaaaaaaacaaaccatgacaccaattatttatgaaaaaactccaatcccaaaaaaacctgggccccacaacaaaaaatgtctttttccccccgctttagccttaaaatttaaaaaccccatttgcttaatctggggaaaaaacctttaccaagggcgaaacatgggt

SEQ ID NO: 2155 - DNA, 432 bp, Zea mays
  unsure (1)..(432): unsure at all n locations
  Clone ID: MRT4577_101968C.1
gttattatttcgaattaatttgtaaagagctccactttgattcgatttgatcgtttcttcaactagtggcatattggtgtgcttcctacgtgattcaactagcggcatattggctcgatatgaatatcgccatttacagtttttctagcgtttgctaacgaacgcttctaaaggtcaatcaataacagttcaatgctctatccaaatgaatgtttaccagtgtacgtctctaatgcttcaatattctaattcaccggctaaactaaaaaacagtactgctaatggacttggaggtaatcactggaattctaaaaaaataagcttcttagacatgccattatcctaataccaaattggatttacgatgaaagcaacaatgacanaacgtacttaagtaaatgcagaataaatcgcattttacaaggctatgca

SEQ ID NO: 2156 - DNA, 1774 bp, Zea mays
  Clone ID: MRT4577_101969C.1
cctacccacgcgtctgactagttctagatcgcgatctagaactagtcccacgcgtccgcggacgcgtgggtttggatatgtctaatctgtggccatgttggctgtggaaggtacaagggtggacatgctattgaacactggaaggaaactcaacattgttattcacttgagttagagacacaaaaagtgtgggactatgctggggacaactatgtacatcggcttattcagtcaaaaacagatggaaagctagttgagtacaatttccatggtgatcacacagcagagagcacgtgttcactatgcagtggtgatgccgcaatggatgaagctctactgaacagtaaatttgaagctattgttgaagagtacaatgatctcgtcacatttcaacttgaaaagcaaagaaattactatgagtcacttctactagaagtcaaggaggaaactgagaaagaaatttctgctgctactgagaaagccatgagcacaaaactccaaaagttggaagtaaagtttgacaagtgtatggaagagaaaaaatttcttgatgaagtaaatggcaatcttgtcaagaatcaggagatgtggattgaaactatacgaaaagcacaagcaagggagcaagctgcgctcagattaaaagatgagaagatcgaaaaacttcaggaagagctaagaggtttgatagcccatttcgactgccaaagtgacactgcacaagcttcaaatgcgatctcgagcgatataccagggggcatgattcttccggtagcatcagaatcgtcctcgagcggcggcgttgttggtggcactggaaacggggagcaaaattgagtaaactgcgccctgtataaagcacgtttggatcttagggacctaggtatattcttgcttccaaacccccaccgttgtatgttcagttagggtaatacacacttgttagctgtcacctcactgcccctcgattctactgtcactagccgctagtagtgtggtactagggatgaaaacgatttcatttttttttggtttttcgaaattcgtttccgatttttcgaccgtatttaatggttacggtatttttcgaaaacataattggttatcggaattttatatcgaaattggattaatgttttattgatcgttttcttcgtttatcaaatttaaatcttggaattttaaaaaaattaaataaacttggaaatttttttgtctcaagttaaattatattatatgctaaacgatatcccaataaaaattaatattaattatgaacttttttgattaagacgagattgttaaatttattgtaaaaaagtcaaatgaattataaattggaacagagagtatttgtgaactttgaatctgtgaacttgtgatctttataaatttgttatattgtgaacttatattatgaacatgtgatctttatgaacttgttatattatgaattgtaaatgtgatctttgttgtattgtgaacttttatattaagatatttttatattgatatgtttactgatcgtatattagatttcgatcgttactggtatatttttcgtatcgaactttcatttccgatattttcaaaataccgatatcgttttgtttccatgattaccatttcaatttcatttaaaaatatgaaaatggaaatggttttagtgtttactggctgttttcatcccagtgtcgctatagcgttttggataggttactgctaagatattgtatattttgtcgctattgttgctatgattgttttttcgggt

SEQ ID NO: 2157 - DNA, 140 bp, Zea mays
  unsure (1)..(140): unsure at all n locations
  Clone ID: MRT4577_10196C.1
gcggatccgtnggtgcgcgaggatcctccgccgaggaggttgagggatgcggtcgtactcctcnacgaggactcttgaaagctcgctatctggttcgatgacgccttcaactgaatcatatctggctcgctgttctgtat

SEQ ID NO: 2158 - DNA, 340 bp, Zea mays
  Clone ID: MRT4577_101970C.1
ccaaagcggtctgggggcccatgaccgaaaaaaaacacgggaacgaaggccgttacaacccccaccagggttggcatcgactcaatatggccaaactacctggctgtagatcccaggaacatgccttggagggtccaggaatccaatggattcagttcgccaaaatttcacaggcccggcgctcctgtacaggctaacctcgctggtttccgctgggggcctccccggtgcattggagggcctaaccaccctggggggtgtccgggccaatcaggggaaggccccggggcaggtgtttctcatgctcccacccacagtgattgtcggaatgatcaacggg

SEQ ID NO: 2159 - DNA, 251 bp, Zea mays
  Clone ID: MRT4577_101971C.1
gcacgaggagttctttttttcttgcatgaaggtgtgcttttggtcttgggattttagtaccggtaggtttggaacccaggttcccgttcttaaaccagaaaccaagggaacttgccttaaccaattcctttccaattttccctttttttggaaaaaggctttggcccttaacctttaagggcttttttctgggcctttaacccaatttccaccttttgggcaaagccctttgggaaccaaaatttaaccca

SEQ ID NO: 2160 - DNA, 252 bp, Zea mays
  Clone ID: MRT4577_101972C.1
gagctcaggaaatcccctctggtctgcccgtccgccattccagcctccgtcgacaaactggcttgattgtgaagccccagaagcgttctcgcgaagcagaggattgcacttgctattcgcaattgtataaggaactgtttcgtcgacgaaggaggctgtcgtcgccactggttccaccgatgacaagcggctctagagcacgttgactttacccccagctgattgatcctgtccttgttttaaggttcccct

SEQ ID NO: 2161 - DNA, 681 bp, Zea mays
  Clone ID: MRT4577_101973C.1
cattgggtacctcgaggccggccgggtctctttgttctcatctcggcctcaaatccctcaggacatcactcaccaccccgaactccctgcacataagactacgaatgggtgtactctctacgctgcgataacccggcgctcctgaacccgttctgctcccacggccaggtcgtccacaggttcggggcgctcacggcctacaccgtctcccccgaggactccgaggccctcgtcgacatcgacgccgacgactatcggatatggaatcgccgatcactcgaagaagatactccacaggatgcttcaacagattactctgctgtgacagcatatctgtttcgtgcagatccttatgcaactgagaatgttaacaattcctttcctgagaggagaaagacacctactccggaatgaagatctgcagagacataacactatgcttattgtcgctctaaaggagacatgacagttgctctgctgctggagctgcaggatattgctgtgaagcacatgtaggtgagtatgtggcacaagatcatgatacacctcttgctgagctgatggacccctctgatgaaaccgatgagcatatcccccacgaacggggagcaattatctatacctcgcagctgatattgacctgagaccgcaacgaagctattctcctcctgagagcaagag

SEQ ID NO: 2162 - DNA, 686 bp, Zea mays
  Clone ID: MRT4577_101974C.1
cactcctatagggcgattgggatcatcgaggccggccgggaggcttatatgcttatcacgtcgccgccgtcgccgcttcgtcgtactccgcctcagcgatgacgcggcacaagaccttccggatcacacaagaagctgccgaagaaaatgagccagaaccgccccatcccctactggatctgcatgcgcacggacaacagcatcatgaacaatgcccagagcaggtactggtatcgcaacaaggtcgccttctgagcgcgcgaatcggccgtgtcctgcgtcggaattctacggtcgctacctttcctttgggtgtatcgatgtgacttgtgcttctggaacttatactacagctacagaaagattttgataacatcttgatgacgctaaaaggatctgatgctagtatgctgcacatcaggattccatgctgcattgcaatgctaaattaaagaacctctgttaccttacgctgcgggcgctggggtcgccggcgcgccaggtgtgttcgccgatggaaaaagtgcggctagaagcaattgaaaagaggcaagcgatttcctctccctctccctttccgatacattctccagggcgaggaagtaaacatgtctgaccgggaaaagatgtcgtggtaggcgtacgtggacgagcacctgatgtgcgagatcgagggccaccacctc

SEQ ID NO: 2163 - DNA, 258 bp, Zea mays
  Clone ID: MRT4577_101975C.1
actgattggtgatatacctcatgctaaactgaccttagggaagcaagcgccgctggaaccatgaccccaaccactgaaggcaccatagaaggcaagaaccaaaataaccgtgcgcgggcggccgcacactcgggtctggcctgactacaagggtgctgcgccccccagtgcgggcacggggtccggctttctatgaccagagtcgccctcgagcatgaacacctcatgggaggggcgcttgtttaaacacaaacgaac

SEQ ID NO: 2164 - DNA, 386 bp, Zea mays
  Clone ID: MRT4577_101976C.1
cggacgcgtgggtgagtcttgtaatctcacttgttgacattttgttttcttattatggagtaaatgttagtttttatagaatgtggttccggtgcacatatttcttcttgagattgtgtaatgattttcaagattttatgtgtgcatatatagatatttccacactgcttgagtcatctccgttataactggacatggactccaatgagatggtgtatattgcatagttgctcaaaggattttttgcttttgaaatcattgactatcattcatgcttgttgatcttttgttagcacaaaaaatagttttgctagaatattagttctggtgcacatagttcttcttgaaattgtataatgattttcaagattttatgtgtgcatata

SEQ ID NO: 2165 - DNA, 567 bp, Zea mays
  Clone ID: MRT4577_101977C.1
ccaaccgcctgtggagaccagacagcggtttgactttttcgaccccccaagaggcggccaaatacggggagagccacaacagagcccacgaagccaccgcccgccccaacgacgactccaaggacggagaagacgacgccgacgcgaacaagccagcgcccccaccaccagcagcaccaaacggaggcggagaggataccgaagacgaggaagacgaggcacaccgggacggaggagacgacgacgacgagcacgaaaaggactacagcgaaggccacgcccccagacaacaggaccctgcgcacgcgggaaaagaccgcagacgaagaacacaggacaaggccactcaagacgccgaaaagaacccaccacacacgagcaaggaacacgaacagaacccacccgcggcacaaaggaaggacgacacgccaaacagccacaggaacaaaggaaaccgcgggaaacaaccagaaccccaaacacgacgaagaagggacaccacacacccgaggacgaaaccaaaaagcagacaacacgaaaaaacacccagagcaaacccccaagcaa

SEQ ID NO: 2166 - DNA, 402 bp, Zea mays
  Clone ID: MRT4577_101978C.1
ccggcccaaccctctcgttcgccaaggcttaacatgacatggccccttgctttaaaatctcatttctcaaaatgactctggggcctctttttcaaaaacttttccctccttcttcctactgtcaccgttccgcaacaagcacaaagtgattgttctgtgagcacaaggtaattaatttgggaagagaagaatattatggcgcaacacaattcatacttttgggttttcccttttagaatatatttacacacacttttccttaattccttccttcctattttagatgaccttgcctttaaccacccattttaaagcttttttttgcccaatgattggtggttggccctttgggtttggaccctaactatttggggtgatatatattgggaaactttttggtcc

SEQ ID NO: 2167 - DNA, 458 bp, Zea mays
  unsure (1)..(458): unsure at all n locations
  Clone ID: MRT4577_101979C.1
ctttatataaccatgctcagatctctcagccgcgctgcccgccccgctgccatcgccttggcccgcagctcccctgtggttcgcgccaacgttggtgccttctctgccatccgcaactacgccaccgccaagcccgccacctctgaggtcacctccatccttgaggaccgcatcagtggccttaactcgtccgttgacattcaggagactggtcgtgtcttgtccattggagacggtattgcccgtgtgtatggcttgaagaactgccaggccgaggagatggttgagttctccagcggagtcaagggtatggccatgaacttggaggccgataacgtcggtattgtcgtcttcggtaacgatcgtctcattcgtgagggtgataccgtcaagcgtaccggtaacattgtcgatctcnccgtcggcgaggctcttttgggccgtgtcatcgatgccct

SEQ ID NO: 2168 - DNA, 132 bp, Zea mays
  Clone ID: MRT4577_10197C.1
ggggggcgtttaatgggacctaccctggtccgacataaatataattatgaacattcttagaaaccatttcacacaccggggatctaggagcaccggctgattcggagcgaactggcgcaggacaggacacag

SEQ ID NO: 2169 - DNA, 521 bp, Zea mays
  Clone ID: MRT4577_101980C.1
ggcagccatggtacggagccattaaaaggtctgtaccatctgacctcattcactgcctcttctctcttctcttctcttctcccctgtttcccgactacagagttgctgccatcttcattcgtcactggctgcaacgactaccactaattatattctaatttataagatgaatgaatgggaaccataattgacaggctcatctcctagaaatagatttcacatcgattgatggtgctcgagttagtacctgctaatgttcttttcacgctctagggtggaaaaaaaaacgcgccagagtactatcttttttattgtgttttctattcacatggtttgcagctttgtatttctgcggcaaaaatatcagtaatgatatctgcacttgttggcaacatacagacgccaacttaacactttatatgtccatgactaatgaagtaggctttcctcaatgaactaggctaagcaagaattattttgtgcgcatgatttcaaataaaccaacaattgaaggggccttc

SEQ ID NO: 2170 - DNA, 567 bp, Zea mays
  Clone ID: MRT4577_101981C.1
gggtgggggggggtgggttttttttttttttttggggggttttttttttttttttttttttttttttttcacagcaaaaaccaacatagtaaacctttgggcccccgacaggccattcccatgttcatacaaaaaacaacaattcctcatagaggtagttgggggggccctttccctgtaccgagataacccttacaaagaccccaaaacactgaattttctaaagcaggggggggagcaaaagccttgacgggggaaaaaagcttggacctcctttgggccaagctttcgctccggggggccctttgttccttaagcctttgggcaaaaagcttttggtactaaaaagcctaaaactttttttaagaaatccccttttttttggaagggattctagcacccttcctttgggggggaaagggggtaacaagccgtgggatcttaggggccttgctgacctttttgccgtttttggaagaaaatgccctgcggtatgggttcacgtacttgcgaacataaaaatccttggaaagggtaaacagttttttgcggacccgtgggtcaacc

SEQ ID NO: 2171 - DNA, 816 bp, Zea mays
  unsure (1)..(816): unsure at all n locations
  Clone ID: MRT4577_101982C.1
taccctatcgtcatcctactccacatccatccaactacgtcgccccccacctcttctcccactagagttagctcgtaaactccttctgacatcatgacaatcattctgtcccccgaggcctactctgcctcgttgtgctacagacttgtcttccgtactactgtaccactgacctgtgctcactataccctatcctactattcgtagtgttcatactggatatctattgaccaatgaatatcatggtcttgtgcatgctatatactaattgatttgccttgtcgtatctaaaagtatcactttgaataggcccctacctgccccgaattccaattcttgatacccttacatgatttgactatgttatgagtgtcacaaatcacgccacatatgatgttttcagaatacaccccctatccacatcataaattcgctcctctaccagctcgaactttaagattgtacaatcggagggaatcttgagggcttctcatgccattacactgcgacagatcgccggctttttataagcctagaacattatattcttgattaccttgataaatcctctgatactgacccgatattcaccagtgcgaatacttgcgcctcctccatctagctcggacaacatatgatatagtctatcgtctcactccttgtgccacatatatccatcattatgactttcaagtgctgttctacgcacacttcgttcttccaagaagatggagttnggaaagattctagtgagatggtagacacctacttatctgatgcctctaagcaatgcgcagccacaaatgaatgcatatc

SEQ ID NO: 2172 - DNA, 525 bp, Zea mays
  Clone ID: MRT4577_101983C.1
gtgggtgtaacaacatggctgtactgtgcgcttaccgtacctcgtggcagaacatccgcgagcacgactaacagggtcgatgatatgattgaggtacatgatcaaggtacagaatgctgaagctccaaagagcatgctgagaaagatctcgaccttcagcataacatgtatcacgcaacgtgcttgctagtctcctctggctctcttcggcgcatgcactctcctgcattggccctacagctgcggtgggcggcatggacgtccctgcaacactcatcatggactatccgcggcgatgatcgcacatagctgcacctcaccaacatttgggatgccactcctgaagcttctactagtcataacatgttcctttttgcaccacatactaaccaatgattttatttgaccatgaagagcactgctacaaaccccttgctgatgtaaaacttacattgagaaattagtctcttttatgaaccccatgaaattcttacagagctgaccattacatcgcttcatctgatc

SEQ ID NO: 2173 - DNA, 881 bp, Zea mays
  Clone ID: MRT4577_101984C.1
ggaatggagaaaaatgtatttggaaatcattatgtgacaatagctaaagctgatactcagacacctctgcttttgcatcagatcctctcaaaactttatccaatcgtgatgatagagaatttaatagtgcaaatgcagctaaagatgctgctttgccatcaacattacattctgggatgtactcttctgctgtaggatctgagacaactattcatgttgatccagaaattgttgaaatagagggttctagtcctgtatcgacccaattttcagtgcaggactccaacttcatcaggagtccaagcccacatggggtacatttcgtcacaaatttctaaggatgctgctgccgttctggtccagtgcactgccaacgctaccagtcacagcaccatcaaaaaaagagagtgatgctctagaggggagtcgatcacgccatcagagatcatcaagaatggatcccactaagatcttacttgcaatggctatcatggcatgtatagcaactatgggaatactctattaccggttgtcacagcgaggtctttctgaaaccttcctagaggacgagactcagtaatcttgccttcctgtattgcgttgttgctgattcaaaggattttaccctctgtatttttttcgtttaccctttgtgggcctttttggtggtttgaaggtggggtagtggttagtagactctttctatattccgattcatgctcatgtttatgtgactactataatggtatatacaatattgtattatctacagctgagatcatagaaaatttaacccatggacagtttaaacctggttagctcatctaatgtagtatttcctagtttctgtttaaaaaaaaaaaggaaagagctaacaagtt

SEQ ID NO: 2174 - DNA, 1488 bp, Zea mays
  Clone ID: MRT4577_101985C.1
cccccggcgatggtcgtgtgcaaatgccgaaagccggcaggacacgggctgattcgggatctgggggtgcaaggtgagtgggtcggcggcggcacgaaaagctccagtttggggcctgtatgtgttcaccgcgggcgtcgaggtttgctggctcgaggcatttcgtcgaccccccgccaccgtgttattgcgacgagggtttactgcttcgtccatcaggtccccgtctgtggcgtgtgcatatgcttcccggaacatcagctatgtgtggtgaagaactatgctgaatgggttgttaattctgagtatgactggccacaacactgttcgtcttgcaattctgttctcgaaggtggaactgaagaaacaacacgattgggttgcttgcatgtggtacacaccaaatgcttgatatcacatatccaaagttttcctacccaaacagcaccagatggatacgtctgcccctcctgttctgcacccatatggccaccttctagcattaaagatacaggttcgcgccttcacactgaactgaaagaagcgatagtccagactggaatggagaaaaatgtatttggaaatcattatgtgacaatagctaaagctgatactcagacacctcctgcttttgcatcagatcctctcaaaactttatccaatcgtgatgatagagaatttaatagtgcaaatgcagctaaagatgctgctttgccatcaacattacattctgggatgtactcttctgctgtaggatctgagacaactattcatgttgatccagaaattgttgaaatagagggttctagtcctgtatcgacccaattttcagtgcaggactccaacttcatcaggagtccaagcccacatgggcctggtgctatgacaagaaaaggcgctaatactgttgatagacaaaattctgagatttcttattatgctgatgatgaagatggaaataggaaaaagtatactaaaaggggtacatttcgtcacaaatttctaaggatgctgctgccgttctggtccagtgcactgccaacgctaccagtcacagcaccatcaaaaaaaagagagtgatgctctagaggggagtcgatcacgccatcagagatcatcaagaatggatcccactaagatcttacttgcaatggctatcatggcatgtatagcaactatgggaatactctattaccggttgtcacagcgaggtctttctgaaaccttcctagaggacgagactcagtaatcttgccttcctgtattgcgttgttgctgattcaaaggattttaccctctgtattttttttttcgtttaccctttgtgggcctttttggtggtttgaaggtggggtagtggttagtagactctttctatattccgattcatgctcatgtttatgtgactactataatggtatatacaatattgtattatctccagctgagatcatagaaaatttaacccatggacagtttaaaccaaaa

SEQ ID NO: 2175 - DNA, 302 bp, Zea mays
  Clone ID: MRT4577_101986C.1
ctagcgaggagtacttcataagaaacattataactctaaacgaaaacgcgaacgggttctgggagaagctgaatggcagtaacgggatcgcatgctcaagcagaccgatctcgtccatgttcgtaatggtgtaactctacctgtactgtctgcaagggatcactgacgacatgtactcctgataccggcttcacaaggaagactcagtggttgctataactatgtgtgtcgatatatgcgaagactggctcccgatcaccttgaacatcgatccatcctctctctaagacgttctggacagt

SEQ ID NO: 2176 - DNA, 363 bp, Zea mays
  unsure (1)..(363): unsure at all n locations
  Clone ID: MRT4577_101987C.1
gaaaagagcctaagagaaagctgctcnagaggctggagagcaggctgttttggaagctgaacnactggcccgagaagccgaggaaaaagcagctgagatcgcaaaggaagaggaagaaattgctcagttgattgagaaacagtcctctttccgaggcctatcaagcagaggagaacagcggctgagtgagctacaagcccgagccgcccaacgggccgaagaaaaggcagcccatgaagctgaggcagaggctgctttggaagctgaacgactggctaaagaagccgaggaaaaggcagctgctatcgccaaggaagaggaagacattgctcagctactcgcaaagaagataaccaagggttt

SEQ ID NO: 2177 - DNA, 293 bp, Zea mays
  Clone ID: MRT4577_101988C.1
cgcctcgccaacgtgtatcagagctaggggttcgtgcaccaatgccacttcccgtcttccgcccgacattgacgaagacagcacgtatcagatcctggtgcgactcgtcgacgggagcaccacatgtcctcactactcaacgcatacagtttccggcgcagtgctcctcgaagcttccgcgtctatatctcgcgtccccgccgccgcgctccgcatcgtcaccggcagcttcgacgtctcgccctccaacgtcctcagctcatcagctgatggccagttcccctccgcctccg

SEQ ID NO: 2178 - DNA, 1972 bp, Zea mays
  Clone ID: MRT4577_101989C.1
aataagcagggtggcgcctgtcacttctaccctgtccttgctccccctcgatcccgcatcagtgcgtcacattcaccgggaatggcaacgctcaaggtcccagccactgaatcctaccgtcaaccaatgactgcgaccagctgcgcaaagcattccaagggtggggggggaaggaggcgctcatcatctacatcctcaaacaccataacaccaaacaataccgagccatacaacgcgctaacgccgaagactacggaaaggagctactgcgctgcataacggacgagatctccaggcacttagagaggaccatgagcgtggggaccctcgaggccggccggggtttatcgtctggtcgccctcgcccggccgggatctccgcgcattttatatgcaggcttgcgcctgtcacttctcccctgtccttgctccccctcgatcccgcatcagtgcgtcacattcaccgggaatggcaacgctcaaggtcccagccactgttcctcccgtcgccgatgactgcgaccagctgcgcaaagcattccaagggtggggcacgaacgaggcgctcatcatctccatcctcggccaccgcgacgccgcgcagcgccgcgccatccgccgcgcttacgccgaggcctacggcgaggagctcctccgctccatcacggacgagatctccggcgacttcgagagggccgtgatcctgtggacgctcgacccagcggagcgcgacgcggtgctggccaacgaggcggcgcggaagtggaagcccgggaaccgtgtgctcgtcgagatcgcctgcacgcgcacctccgcgcagatcttcgcgaccaggcaggcttatcacgagcggttcaagcgctcgcttgaggaagacatcgctgcgcacgtcactggggacttccgcaagctattggtgccacttgtaagtacttaccgctatgatggaccagaggtcaacacaaggttggcacactcagaagccaaactacttcatgagaagatccatcacaaggcttacagtgatgatgagatcatcagaatcctcaccactaggagcaaacctcagctgattgctacattcaatcattacaatgatgcatttggccaccgaatcaacaaggatctgaaggctgacccccaggacgagtacctcagaacgctgcgggcgatcatccggtgcttcagttgccctgacaggtactttgagaaggtggctaggcaggccatagcggggctaggcacagatgagaactccctgaccagggtcatcaccacccgcgctgaggtggacctcaaactgattaaggaggcgtaccagaagaggaacagcgtgccgctggagcgggccgtcgcgggggacacctccggcgactacgagagcatgctcctcgcgctcctggggcaggagtgatgagccgtactggtgcgctggtgcctttctgaccggcgccgtggtgtttgttcgtgatcgtaataaacctgattgcctagctgtacgtgaggctgtttcttcggtcctggtactgtcgctgcagcatgcatagcagtggaccagtggtgataaataagttactgtgctttcgacgaatgaaccctttttttgtgtctaagttgtggaacctcgagaaagtttttgtgtctaaggctgtctttagtagattgcataagtttaaaataagagagaaaaaaaaaaaaaaaaagcggcctcctcgcgctcctggggcaggagtgatgacccgtactggtgggctggtgcctttctgttcggccccgtggtgtcgttcgtgatcgtaataaacctgattgcctagctgtacgtaaggctgtttcttcggtcctggtactgtcgctgcagcatgcatagcagtggaccagtggtgataaataagttactgtgctttcgacgaatgaacccaaattttttgtgtttaagttgtggaaccccgagaaagtttttgtgtctcaggct

SEQ ID NO: 2179 - DNA, 381 bp, Zea mays
  Clone ID: MRT4577_10198C.1
tcggtttatcttttgctacctctgtatcaaacaagtatctctgtcaaacctttctccctactctcagcaacaacaatttctttcattcaaccaactgtctacactgaaccctgccttgcagaaacccatcgataaaggtgacatcttttagattacataagagacgtactcgacaatggagccctcataccggccagtgtattcctacaaactagccccctatcgattagatatacagctcatttactactaccattgtaggcagaaaacctgcggtaaaccgagcttacttcttgacacaacaacactttttgcctttctaccagaaaattgaagataaccccgcggacctccttccactacaaaatttggtgccctttg

SEQ ID NO: 2180 - DNA, 159 bp, Zea mays
  Clone ID: MRT4577_101990C.1
agaaaatgcatcgcatatccaggctttctgctttcctcaaatcatcctcagctcactatttgtcttcctgttgacctttaatatttagagcatatatgttaacaagaaatgtttagagcaatagagcatataataccaaacctatagctttgggtgttc

SEQ ID NO: 2181 - DNA, 290 bp, Zea mays
  Clone ID: MRT4577_101991C.1
aattgccgggacgaacgactcgtccgacacctcatcaaccgcgacccaataatcgtgcgcctggacacacgcatgatctaaaggcggctcataacgtgccaccagtgaaacttgatgttctaccagatctgacagtgcacgatgctactcgccttgaagatcggcctattccactgctaactccttggctctccatgaaggctaaatctctaaatcggaaacactcatcctacacggacaggcatgcgcgctcgatacatccagcatcgtcgccatatacagggactgaa

SEQ ID NO: 2182 - DNA, 262 bp, Zea mays
  Clone ID: MRT4577_101992C.1
agcttacaagagtataagagtttccttcaaagctttgttcgtcttgctatgttgcgtccagtttgtcaactttggtttcaaaaggcttcatgtcttagctttaaagtctgtagttaaggaaaccactcaaacaaaaagttagtggcagcagttctttgctcagtaaagagaaggaaagagaccgtgttgtcatgttccacgacttcattacttatccatagacatgcagttgtttcttgaagctaaaaatacctatgttata

SEQ ID NO: 2183 - DNA, 336 bp, Zea mays
  Clone ID: MRT4577_101993C.1
ccggccggggcacactccgccttgcttcacactcgtcacccttttcccgtttcgaggacccggagcgctgcgcttttgtgccctcggttgggatttctgctcgcagggagtcggaaggaggaggagcttctgtcggtggacggagtaggttctgcagggccgagatggtggtgcatctggtgctggcttgagttgctgcctcgtgaggttcgatcgggttttgctggtgtctgctagtaagtataggagcttaatcggaaggaagcaatactggaggagacgatgagcttcggtgccgtggacatggaggaggagagcggcgccgcggcggcggcc

SEQ ID NO: 2184 - DNA, 369 bp, Zea mays
  Clone ID: MRT4577_101994C.1
gcgaagaatgggctcatcttcctcggctccatttcggcctcagcgtcgccgacggtggcggcggcagcaactagatgatcgatcgtgtacgtgatcgagacggcgacgatcgtgcgtgcatctggattcgatcatgcacacacagatagatcgatcgagctctttgccttacatatagtgctgtgctacgtgcctgtgtttaatttgcattgtaagcttgttaagttttgcatttgataacctgtgttttcagacttgtgcgtactttgcatgtatcctgtgttcagtgtagcatgctagcttcacaaggggattatatgatatgcatggtgtataatatttctaaataaatgaatatatttgttcagg

SEQ ID NO: 2185 - DNA, 400 bp, Zea mays
  Clone ID: MRT4577_101995C.1
attcaatatcatcaggattcatattattaaggacctcatcaaaggacacattaataaggaggagccccggggcgggggatatataacagaggagccctagcatgaaccccaagaccaattgaggactattaaaacatcaccggataccggcaccgggcagccaacaaatagacccagatagaggagaacaattgccaaaggagacaaggtgccctaccttaagagaaagggaaaactcggggccccccccaccgacgccgagggggcatggccaccatcaggcgtcctcaacaacaaggggagcggcaggaggcaactttatgggacgcccccctacaactaccccccgtccgggcaaaaggggcatgcagcttcccattgccaaaacacacacgctccc

SEQ ID NO: 2186 - DNA, 309 bp, Zea mays
  Clone ID: MRT4577_101996C.1
gattctattagtcggcggccgcacacgcacgggctggggactaggtacacacaccactcccagtcgaacccatacgggcgcgcaccggttgcacgtggcacaggggcctgtggttacaccaccttttacagtggtggcaactcatgccgcaccatggacagcgcctgcgggtactgcatcctctacagtcagtggttcggtacctacacacacgggctggacacggctgtgttcaacaactgactcagctgcggaccctgcttcgaggtgcgctgcgaccatctggggggcgggagccactcgtgcctg

SEQ ID NO: 2187 - DNA, 459 bp, Zea mays
  Clone ID: MRT4577_101997C.1
cttcgcgaccagggttgaaggctgggcccgccaggctccaggaaaggcgctggagtggctcggaagtataggaggtagtggaaccacaggctataatccaggcctgaaatcccggctcagcatcaccaaggacgactccaagagccaagtgtctctgtcagtgagcagcatgacaacggacgactcggccagatactattgtaccgttgtccaccaagaaaccagacgtgattgtcctgatggattcgtggcttgttggcagtgtggtaggattaatgatggttgtaggcgttatggttgttgttgtcggggcgaatgtcatgaacgagatacgtacgctgcatttggcttcacttatgcctacgactttcacgtcgatgcctggggccagggactcctggtcaccgtctcctcggagagtgaaaccagccccagcatcttcccgctgagccttgggaa

SEQ ID NO: 2188 - DNA, 366 bp, Zea mays
  unsure (1)..(366): unsure at all n locations
  Clone ID: MRT4577_101998C.1
cgggnatttggaatcgcacccggcaatcatcaatggcggaacacgcgagcgaggcccccccggtgtttgtttgcagttgtgctacactgaagggtagttagtttctgggtgctggaaatctgtagggagggagaaggcacggagcggaggccttgtccgctgagagagcatggggtctgtttggttcagcttttttctgaccagcttttccgagaatctagctgtgtagagaatctgagtatcattagaattacgtgcggagaaagataaagttgtccatggggctcaggatctataaagtgacggattactactattgcgacgactcaactgattatatgtttatgttgattttgaatgtttttt

SEQ ID NO: 2189 - DNA, 685 bp, Zea mays
  unsure (1)..(685): unsure at all n locations
  Clone ID: MRT4577_101999C.1
tccgctttttttttnnttttttttttttttttttttttttgggaaaaaaagcaatattattacatttcattcacgggaatttgggtggtgttcacaaagttctgtcacatgnagcctcccaaaacaagaaccaaagcttaggcattgaaatcccgacaaggcaaaaacagtttatcataagcacctcgaacattgtcgttgtagttctggaaagttgggattaccccagccgcaaagtttttccacactttaaaatatgccaaaaaaacattgaaacaagcacccaaattaaaaaaaatgtggaacactcccacccaactctcagaaagagttattcacaagggattcgacaagaaaagtccagaaatagcagaagcacttcgcctttagctgcgtgcctgcgtggctcctcccaagacacagaagcaccccgccacaggggtgaggtgaccacgctcacttgtcagggattcaatgaaacctctaacaacanttcagaaacntaatgttattgaaaacccaataccatnggtccgaaactataattatctcaacaaacttctgcttaaaagtctaagccacagttgaaaacaacaacgttcttcaacatggtaccagctcttacagctgattcttattctcaactgtntgcaagggtttccagaatagcaggggcacacaccat

SEQ ID NO: 2190 - DNA, 409 bp, Zea mays
  Clone ID: MRT4577_10199C.1
gccgcttgttgataaagttgctgataaacttccaggatggaaagctaatcttctcagccgggctggtcgtcttgtcatggttaagacagtgttgtcttctgtccctatctatcttatgcttgctttagaactccctaaatgggtttttaaggcaatcgataagaggagacgaggctttctttggaaggggcaaggtgatgcaaatggaggtaactgtctcgtgtcctgggaagctgtccagcggcctctcaagtatggtggtctgggtattctcaacctggagatgtttggatgggccctacgtgccaggtggctttggttacaaaagactgacgcgtcaaggccatgggctggtctccctatccgagtgcaccgtaatgcaaaagccctcgttgatgtggctattacc

SEQ ID NO: 2191 - DNA, 1320 bp, Zea mays
  Clone ID: MRT4577_1019C.1
cggtacggccagcccggtgacgggcggccagacggcgctgctgcggatcatcaacgccgcgctcaaccgcaagctgttcgtcaccatcgcgcagcacaagatgacggtcgtcgccaccgacgcgtcctacaccaagcccttcaccacctcggtgctcatgctcgcgccgggccagaccaccgacgtcctcgtcaccatggaccagccgcccacccgctactacgtcgccgcgcgcgcctacgtctccggccagaacgtggccttcgacaacaccaccaccacggccgtcctcgagtacgactgcggctgcgcctccgacttcggccccaagatacagccggcgttcccggcggcgctaccggccttcaacgacacgtccgccgccaccgccttcgccgccgggatcaggagccccgaccgggtcaaggtccacgagaacgtcgacgagtacctcttcttcaccgtcggcctcggcctcttcaactgcaagccgggccagctctgcgccgggcccaacaacaacacccgcttcgcggccagcatgaacaacgtctccttcgtcttcccgcagaccgactccctcctccacgcgcactactacaagatccccggcgtcttcaccaccgacttcccggcatacccgcccgtgcagttcgactacacggggcagaacgtcagccaggccctgtggcagccggtccccgccaccaagctgtacccgctcaggttcggctccgtggtgcagctcgtcctgcaggacaccagcatcgtcacgcccgagaaccaccccatccacatccacggctacgatttcttcatcctcgccgagggcttcggcaacttcgaccccaagaaggacgtcgagaagttcaactacgtcgacccgccccagaggaacaccgtggcggtgcctgtcaacggttgggcggtcatccagttcgtcgccgacaacccaggtgtgtggctcatgcattgccatctggacgtgcacatcacctggggcctggcaatggctttcctagtggaggacggctatggcgaactgcagtcgctggagccgcccccagttgatcttcccatgtgctagtggaggacggatatttgtgttgaggaagaaagcctggtcacgttgtatgttaattgttactcttttttggtggaggggggcgtgttcgtgatcttaaattcttaggggacttaattttccagcttgttggtttgaagtttcttctgtaaatctatgtaattttcaatgacattcagcatattatttgagaataaattatttctttgtacaaacaaaaaaaaaaaaaagcggcc

SEQ ID NO: 2192 - DNA, 282 bp, Zea mays
  Clone ID: MRT4577_101C.1
tcgggaggttcttttggatagttgcctgttagacactgagcaactatattgctccaagcaatgctttttaagtactgtcatctggcaatttggttctgttatagctagacatgaacttatgtaatatgttattggctagacatgaacttatgagtggtgactgatgtgtgcggtgtgcctatgtgtttggtctgtactctgttataactatgcttacaagcttattatcctttgatctttactggttggaagtacgaagtaatatgtaatttaattatgttc

SEQ ID NO: 2193 - DNA, 303 bp, Zea mays
  unsure (1)..(303): unsure at all n locations
  Clone ID: MRT4577_102000C.1
ccagagggnnataaaagaccncgccctncaagacangngaaccancaggcggagaaaaangacacngaaganggcacagcgaccaggncnccagacaggcaacngaagagaaagcanganncngcnggaaccganganancaggnangcaaagagggcancgaccagcccagnncaaccgaaaaanncaccncaancnggaagcacnggcgangagaccagagggaacaaccaaaaaaaaagggcnccnagcgaagcaaggggnggcaagccggcnaaaccacaggcaaggaagagaagccca

SEQ ID NO: 2194 - DNA, 1324 bp, Zea mays
  unsure (1)..(1324): unsure at all n locations
  Clone ID: MRT4577_102001C.1
ttcttcgaccaaaccaaaggcctgaacaatccatccccagttannnnnnnnnnnnnnnnnnnnnnnnnnnnnnnnctcatccttccaaccaaataatatgaggaatcattccattcccaacttaggagccattctattctgccctcatttgtccagcaaccaaacgtatcctaatataataaatagagatagagatgtttgtccgaccggcaattaccaaggtacacagacgaggacataaatacttcaactaagggatgctgttgacaaatcacaatcgatatagaacaaatgatgggcgacaataacttttgcattcatgcatgcaggaagcgatcgaaccattcgcttgctgccttcaccatntcgattgtgattttatggccgactccaggctctgcaatgaacatgaacttctccgcgcaaccagattcttcgtaagctttagcagcttttgaaatagcttctcctaaaccacttattgggcaacgaggatcttcagcgccatttagaagtagcaacggccgtggtgcaagcaaaggaagtgaatagggggcatcaaattgcgagtccaggctgggtgctaccttttcccaaacccctttcaacaacttctgtatctaattcgctctttcctaagtcaattcttgcttcttcaaataaagcccttatgctattcaccctagccagccacatgttgttgtcaatggcccacctgaatccctgaacaccgatgataggaacgacgacactgtaccgtgtgtccacaaaagcagcaaaccacgcgtgcatccctcccagcgattcgccggtgatcccaaccctacagggatccacgtcctccctctcgccgaggtagtctccaagctttaccaagtcccacaccgtgtcaaaaacgaaaggcattgtatccccattccgccaagccgatttcagtgcatctatgtaagtggtttcattgctggccctttcgccgtgatagcgcgagtcaatagccacacagacgtagcccttggaagcatatgcctcaagcagtgggcgcagccactctttgcacttgtaagagctgtgcaggaacacgatagctggttttcttctagggacggggtcgtcaagcttcagcagaagtacaggtactcgtccttgttcacctagctaggagatcgcggcggcggctgagcaggacctgcaggaactccgatctgagcccggcgccggcgtcggcgtcggtggcgctggcggccatttgtctcaccgggaaggcagaaacgcagcgccgaggctctgtggcggtgtcacgctcccgccgcctcgaggtcccaat

SEQ ID NO: 2195 - DNA, 1584 bp, Zea mays
  Clone ID: MRT4577_102002C.1
aaaagaaccctcaaaattttaacataaatcactaattgaaataattatgaaaaagtttgttacggcttaagataaagaagcaaaaaacgtgtgcccgaacccgtaggaaaatctttgttttaaagcctggcacccctctttttttttttaattttttttttttttttttttttttttttttttttttttttttttttttaacgtatcctaatataataaatagagatagagatgtttgtccgaccggcaattaccaaggtacacagacgaggacataaatacttcaactaagggatgctgttgacaaatcacaatcgatatagaacaaatgatgggcgacaataacttttgcattcatgcatgcaggaagcgatcgaaccattcgcttgctgccttcaccatgtcgattgtgattttatggccgactccaggctctgcaatgaacatgaacttctccgcgcaaccagattcttcgtaagctttagcagtttttgaaatagcttctcctaaaccacttattgggcaatgaggatcttcagcgccatttagaagtagcagcggccgtggtgcaagcaaaggaagtgaatagggggcatcaaattgcgagtccagacctggtgctatcttttcccaaaccttttcaacaacttctgtatctaattcgctctttcctaagtcaattcctgcttcttcaaataaaggccttatgctattcaccctagccagccacttgttgttgtcaatggcccacctgaatccctgaacaccgatgataggaacgacgacactgtaccgtgtgtccacaaaagcagcaaaccacgcgtgcatccctcccagcgattcgcctgtgatcccaaccctacagggatccacgtcctccctctcgccgaggtagtctccaagctttaccaagtcccacaccgtgtcaaaaatgaaaggcattgtatccccattccgccaagccgatttcagtgcctctatgtaagtggtttcattgctggccctttcgccgtgatagcgcgagtcaatagccacacagacgtagcccttggaagcatatgcctcaagcagtgggcgcagccactctttgcacttgtaagagctgtgcaggaacacgatagctggttttcttctaggaacggggtcgtcaagcttcagcagaagtacaggtactcgtccttgttcacctagctcagtgattaggtagaaattttcttcaaccagcttctccctcaagttctccacatctttactggggcacgactccatcggatttgcctccatggtggacggaggattctggtacatcgggtccttcaccggactcccttgctccaccgagagaggcacttggagatcgcggcggcggctgagcaggacctgcaggaactccgatctgagcccggcgccggcgtcggcgtcggtggcgctggcggccatttgtctcaccgggaaggcagaaacgcagcgccgaggctgctgtggcgcggtcacggctgctccggccggcctcgaggcagtctgggctttgtagttggagcgggacaagtaaccgccgccctacttcctccccgaggcggagca

SEQ ID NO: 2196 - DNA, 748 bp, Zea mays
  Clone ID: MRT4577_102003C.1
ggtaccgcctgcaggtatcggtccggaattcccgggtcgacccacgcgtccggctagctgtagctggcaggcggttgtacgtgctccagagtcgtcggtacccgctactgcagtcgctttcgtgtggcttccgctgagctcttccgagctgctcgctctccacacgcgccgccgccgtaatccgccaccatggtgaagctcgcaaaggctggcaaaacccacggtgaggccaagaaaatggctcctcctccaaaggaggtggaagaggatagtgaagatgaagaaatgtcagaagatgaagatgacagcagtggagaagaggaggttgtcatccctcagaaaaaaggcaaaaaggctaccacaaccccagcaaagaagggtggttgtttcacaaacaaaaaaggctgcagttcccacaccagctaagaaagcagctgtgaccccaggcaaaaaggcagtagccacaccagctaagaaaaacattacaccagccaaagtcattccaacaccgggtaagaagggagctgcacaagcaaaagcgttggtaccaactcctggtaaaaagggagctgccactccagctaagggggctaagaacggtaagaatgccaagaaggaagaacagtgatgagatgaagatgaagaagatgaagatgatagcgatgaagatgaagatgatgagaagaggatgagttttgacccccaatagtaaaggagtgaagccagcaaagcagctcctgctgctctg

SEQ ID NO: 2197 - DNA, 369 bp, Zea mays
  Clone ID: MRT4577_102004C.1
ccgcgggcgggagccgggccggaagatagtgcttggtcgacgagtatttctcggcgggggccggcccaactgattggggatttatttgagcaagatcacggggacatcagagaacagagggtggcaagagatgctaggacagatgttacggcaagcgcacgcgcggaaactgggatcacttatatggcagagatatcctcacggccagtgagaacctgctgagacgctgaagggaataagacccgggagggagcagctgctaatgaacggtggtggtaaggtgcgaggatattaaaagctattggtgcttagcgcgctgaatacctgcttctgtaggaggagcggacacgatagcatgaaatggactct

SEQ ID NO: 2198 - DNA, 480 bp, Zea mays
  Clone ID: MRT4577_102005C.1
agcgaggcggcacggtctgtgagggccttcgtggcgtgccctactgctgctaccctgcagaggacgcagcctagagcctactgttccacggacgatgtcatgaagtgggaggaccccaggtggatcggcaacgccgaggagctgctccagggtgtacgcaccgtcgaggatgacctctacaccacgctcaacaacaaggtgagccgggtgtacgccacgcctacggactgagaggaagaagcgcgtctacatgaacgcgccgttcaagatcaccagcatcgatcattatagcgggctcgacttcaagctggtgaggatggggctagaggacatgtacctgtagcaacctggaggtatgtaccacaagttcggcaaggactactatctgcgcacggtgatggcgtacatgaacgtgctcgacggaacaaacccttgtgaggagtggaatgcggcgcatgtaatcgagcatgacaacttgaa

SEQ ID NO: 2199 - DNA, 339 bp, Zea mays
  Clone ID: MRT4577_102006C.1
gggccaaaacccacccggccctttttcaaatggcaaaagaaaaagggggggggggaggtccttttctttccccagccccccgaaagggaagaggcccatggggaagctaccctatccccctgaaaagcgggggggccggccccggggcctcgggggcaactttgggcagcttcggccggggaaggggggtaagccccccaccagtcccccccttggaggtttttccccaacaaccggggggggcccctattcgcccctggccccggggggggcaaaaaccaggggtgttttggggggggctaacaccgaaaaaaaacccggcctgttgttttgcggccc

SEQ ID NO: 2200 - DNA, 717 bp, Zea mays
  Clone ID: MRT4577_102007C.1
cgcgtctcggttcatcaagtgcgtcaccgtgggggacggtgccgtcggaaagacctgcatgctcatctcctacacatccaacactttccccactgacaagaagattacaatagactgcgtccgttgagctatcgtggtgctgatgtttttctgctcgccttttctcttatcagcaaagcaagctatgagaatgtctctaagaagtgggttcctgaattaaggcactatgctcctggcgtgcccataatccttgttgggacaaaacttgatctgcgtgatgataagcagttttttgttgatcaccctggtgctgttccaatttccactgcccagggcgaagagctgaggaagctaattggtgctgccgcctacatcgaatgcagttcaaaaacccagcagaacataaaagcagtgtttgacgcagcaattaaggtggttctccagccaccaaagcaaaagaagaggaagaagaaggtgcagaagggatgcaccattttgtaactacaaacggtagagggcaacagtctggctgcggcgctgctgccaatgataaccatcgcctccttgctgtataatatatcgcctgatcatgccaccagcatgcacaagggagatggtggttttaggatccttgtcctactgtgttgtgtagaccaccgggtgtagttgattgtatctggttgtttgtatgtatgtacaagacaaaactagcactgc

SEQ ID NO: 2201 - DNA, 640 bp, Zea mays
  Clone ID: MRT4577_102008C.1
cattgggtacctcgaggccggccggggttcatcgagctgtattgtccccctattgagctcttctttccaaaaatgtgcgcggtgtctactgggcgaccgccacatgtgtgtacctccctcgcgctcgtcggcgagacaacggacctctaccttcgacactgtccctcaaaggcgctgcaccatgcgcaatacttctgggaagcccaactgagtgtcacacaatcaggacctgcgagggcaccgaacgagtcctgcacctgccgcctctgtccggacagaccacaacgtaccatgagcgcgaagatccccggcaaatacagttggaacaccgagtgaatgtccgactaaacgaagactatcacatagaaccgctagatggaggcgatcaactgctgctgagctatgcctgcgccgatcccccgagtgttcccggagatactcgcccgcaacgtggtcaagttcagctcaagacgtgaggttcaaagccggctcccagatcttagacgaggaagggctcgactacctcggcaacccaagcctgatccacacgaatgaaatcctgatcatctgaatgtgccaggcggcgctcatgatcgtcgtcgaggcgtatcgaatcggcggtgacccgctcggggaggtg

SEQ ID NO: 2202 - DNA, 1279 bp, Zea mays
  unsure (1)..(1279): unsure at all n locations
  Clone ID: MRT4577_102009C.1
cgtgggtgggagactgggaaagacgagacagcgagacaccactgagacgagagtcagccggcaggtgagacatcgcaggggaaccagctctcaagacggccgacggccggcttgcctacctgctcccatccttcccgagggaccgagaaagataagaaaggcggtggtcaacttgtgtcctgaggtgcccgtagaagcccaaggacaagaaacaaggagaagagtagatctacatctactccaccgatgagcgcgtctcggttcatcaagtgcgtcaccgtgggggacggtgccgtcggaaagacctgcatgctcatctcctacacatccaacactttccccactgactatgttccaactgtgttcgacaacttcagtgccaatgttgtggttgacgggagcactgtcaacttgggtctgtgggatacagcaggacaagaagattacaatagactgcgtccgttgagctatcgtggtgctgatgtttttctgctcgccttttctcttatcagcaaagcaagctatgagaatgtctctaagaagtgggttcctgaattaaggcactatgctcctggcgtgcccataatccttgttgggacaaaacttgatctgcgtgatgataagcagttttttgttgatcaccctggtgctgttccaatttccactgcccagggcgaagagctgaggaagctaattggtgctgccgcctacatcgaatgcagttcaaaaacccagcagaacataaaagcagtgtttgacgcagcaattaaggtggttctccagccaccaaagcaaaagaagaggaagaagaaggtgcagaagggatgcaccattttgtaactacaaacggtagagggcaacagtctggctgcggcgctgctgccaatgataaccatcgcctccttgctgtataatatatcgcctgatcatgccaccagcatgcacaagggagatggtggttttaggatccttgtcctactgtgttgtgtagaccaccgggtgtagttgactgtatctggttgtttgtatgtatggacaagacaaaactagcactgcagatggtatggtaaggcgtaagcaaatacaatatgacattggtccagttccaggaatgaatggaatatgacattggtccgagatttgcaatacaaaacaatatcacaaaaaaagcggcctaataataattttttttatttatttaatttgtttgggggggtgtgtttttgnattttaattattanaatttttttgttttttttttttttaattataatttttt

SEQ ID NO: 2203 - DNA, 173 bp, Zea mays
  Clone ID: MRT4577_10200C.1
agagattcctgccaaaaattctatcaagcagaaatagaagaacacgactttatcagcgccgtagagaagtccagaaaacacataaacacctgggtagctgaaaagacagacggtagaattgcggagttgctctctccgggctcagtggatccattgacaaagctggttctggt

SEQ ID NO: 2204 - DNA, 574 bp, Zea mays
  unsure (1)..(574): unsure at all n locations
  Clone ID: MRT4577_102010C.1
aattcggcacgaggcttttcttccattgaagagtatttctataagaagcaacatgccacctgcatggaccatgcacatcaaattattagaagtttgagaaatgacaccaatagaagagaatcaatttctgattcaaatgctttgctaaatgtttacctctccaatgacgacattgccaagctcctagtcccactgctgaaacttcggcaggcatgttgccacccacaagtggggagttctggtctctgctccctgcagcataaccctttgtcaatggatgaaattttacaggttcttattggtaaagcaaaaattgaaggagaggaagagctcaggaaaattgtagttgccctgaatggtcttgctggattagctgttattgaacaaaggaaccaagaagccatttctttatacaaagaagcactagcattggctcatgaaaatattaatgatttccgtgttgaccctctgttgaatcttcatatncaactacatcttgcagaactgcttagattagttctgagtatttacaagaatgcccattanaaaatccggcttttgaaagtgcaatcag

SEQ ID NO: 2205 - DNA, 251 bp, Zea mays
  Clone ID: MRT4577_102011C.1
gggaaaaataacctcttatttcttgggggccccattcattagcccaaaaacttcttttttgaatgccccctactttgcattcttaaaaagggccccccccattatcttttgttggtaaaaagctgctgggtttgtcaaaacaagtttgaccaagggcaccaacttgttcattttgtaaagggttgcggggtttgccccaaactgcttgttgaaccgaagcatttttttttttttcataaaagaaccggggc

SEQ ID NO: 2206 - DNA, 180 bp, Zea mays
  Clone ID: MRT4577_102012C.1
cgtaagctcggaattcggctcgaggacttggttaaccgcccttttttttacaccccaaagtggaacagacacgggggggtgttttttaggaatgcgcgcagacctagcccagcacacaactggcgagccagcattacacgacccaacacctgaagtcgcgacactagtgggacacgaagt

SEQ ID NO: 2207 - DNA, 393 bp, Zea mays
  Clone ID: MRT4577_102013C.1
aaaaaaaacaaaccgtagttttgcctcttcgtgaagccattgatgctgttatgatttctattcaatttgaaaacgtgattgaggacattttgcaggcatgtgaaaacaaaaacccacagataaaatcagaagtagtgcagtttattagtcggtatatttcgaattctcaactaaatttcttaagtaataagaaaaatttgaaattgctgaccaatgctctgattaaaactttaaatgacaacgacggcagtgtgcgtgaattttcagccgaatctttaggaatattaatgaaagctgttggcgaaaaggcgatgacacctcttcttgctgaagttgattcaataaaaatttccaaaattaaagaatatcatgataaagctgtgattaaatata

SEQ ID NO: 2208 - DNA, 414 bp, Zea mays
  Clone ID: MRT4577_102014C.1
ggctgctgaaccctgcaggcgacgccaggttcgcgctggagtcctacgtggcgctgaagatgttcgcgggcttccaccgcaaggacctcggcctcagctccctgtccctccacgggcggggctccggctccggctcccacgaccggcgccgcttcttcgaggagttcgcggaggcgaatgccgcgggtgcagcggagttccaggtccagcgcgcgagcgacgacccgcggtggggagcggcgctccgcgagttcctgcgggagaggtacgtgtccgtggtgcacgagcggatggaggcggccttcttcgggcgcgggggcggggacgcccccccgcgcgccgcgtggtacggcgagttcgcggagatggcgcggcgcgtgtggctgctgcacttgctgttcttggcgttcggcg

SEQ ID NO: 2209 - DNA, 409 bp, Zea mays
  unsure (1)..(409): unsure at all n locations
  Clone ID: MRT4577_102015C.1
ggnacgcgcgccgttcgccgtggcgctgacggcggaggaggtggaggacgacgtgtacgctctgaccggcgcccggccgcggcggcgtccccggaagcgtcctcgcgtcgtgcagcggcagctcgatgcgctgttccctgggctgtggctgaccgagatcaccgccgacgcctacaaggtgccggacgagtagcaagccgccgaagccccgccgctgtctgctccagcgtccggccggccagctagtcgttcgccgttctaccattgatgggtcgccagaaacattaagcataatcttgtcgtctgtaagtaggcttagtcgtctcgatttgatggtaggtgcttgtgcccgctcgccatgtcccatcgcttgtaacacttttcgctcccccttaaagatcttaagctt

SEQ ID NO: 2210 - DNA, 205 bp, Zea mays
  Clone ID: MRT4577_102016C.1
acgacgccacagcgtaccggcacagttcttatgtatcgagaaggcggtcatttcgagtcctatgtgaaatatggatacgtctgttgacgatagaaatcacctacgtgccttacgattctatttagcgatctaggaatacggtgtaatcagtacctgcttgttgacatatcgtatgcctatcgcttatgttgggtacccatgatgc

SEQ ID NO: 2211 - DNA, 1222 bp, Zea mays
  Clone ID: MRT4577_102017C.1
gcacgcggcccgggtgaggggcagggcaggacgaggggggacaccgtcaggtcaggtgagctcgttatacctaaccgactgtgctgctctctctggcttcacggattgtgcgtccgcgtcatttgtaccatgcgtcttgtttttttttctttctcctgtcttgtttctgttttcctccttcacggatcctctgttaaaacgtacgtgtatactgttgagaccgaggtattctctgtttctgtaactccaatactcacccccaaacccctcacccactcaactagtgttttaatttataccggcttttactgtttttttagtgttttttgtctatatagatggtagctacagcagaacaaacagtttttttttctaatcttactattccgtaccgatggtaaccaatggtgtgaatgtgtgacaatgacacggtaagatccgtgttctgtagcaacacattccctgtgtgatgttttcttgcagttgtcttcaaatggaaagaccgtggagggcgtctgaattctggtcactaaggccatgtttggttcggtcgggatccgaggagattaaggtcttgttggaccaagaattattccagctgatcaaaacttatataaattagagaaacaaatcggttaggaattattccgtgcctccgttccggataaaatgaacggcccttaaagccttgttcgtttccgtcggattgcatccggaatcgttccagctaatcaaagtttatataaattagagaagcaatccggtcaggaatcgttccgacccaccaactggcagaaacgaacaaggcctaagtcgttttcgtttgtgtcggattgcacccggaatcgttccagctaatcaaagtttgtataaattagagaagcaatccggttaggaatcgttcagacccaccaatccggcacaaacgaacaaggccttacacggccacgataaccgtatcgacacgtgcagtgcagcacggttttagactcgtcatgtataactactgtaccagccgtgccgtgcaatacgagcgcatggtttgtttatcggcccaaacaggcaaattaacactatcaaatccctttagaaagtgaacgacgacgacttagcgatagcacaaattaaaccaagttccaaacacactcacacacaccatatatatatggcataaaaaagtttaaacctagctacctgctaatgtttatcttgctagctagct

SEQ ID NO: 2212 - DNA, 354 bp, Zea mays
  Clone ID: MRT4577_102018C.1
gccacgggggaggcaaaatccaaacttgcttcatgacaaaatgttagggccaggggaaacctggtagccgagacaactctaaaagtgcaggtgatatgcaacctcatggccagactcgcctagatacagaagtagacaacaaactactgggtagaagcaacctacagcccagcctgatcttgctgggcggggctgtcaagctgcacaccaacatactctatgtggccggcatggaccttcatgagttaaccaagatcgaacttgggggccttgagtatgttcacctcgcggatgaagacgcaaagaaaagggaagatgctggaagtagacttatcaatattggtaccaataact

SEQ ID NO: 2213 - DNA, 693 bp, Zea mays
  unsure (1)..(693): unsure at all n locations
  Clone ID: MRT4577_102019C.1
gcttgattgtagggcacaactgtcagctacaggtggccgtgtggcacggccgggatccagctcgtcgtctcaccctcttctcctcttccaccgacggcgaccgcccccaattttctcctacccctccgccttcactgaggtccccgagatccgagtttccttgcccccgctcaaccataatatcatcacgcctcgtgcccaaatcggacgcacgcactcccggtcgaattccctcgagcggagcagatttggatccggctcggccagatggatcccnaggacaccaccccaccggcgccgagccaaggtgatgcggagacaactccgccnccggtgttggaagtggcggcgggggaggacagcctagctagcgggggcgaggcggccgagcgggcccncgaggaggaggagctcgcgcgggaggtcatggagctcggcctccagaacgagtaccttaggtcccagattgctggcgtccgcccggcgggtgacgcggacgaggtccccgggcttgtgaggggctggaaggagcaggtggagaggatgagcagggaggtgcaggaacagcggctgacgcgggaggccacggagaaggccctggagcacgtcaacgtggcctatgctgaggctgacggcaaggtgcaggagcttacggccaagctggcacaagctgaacaaaaaaaaaaaaaaaaa

SEQ ID NO: 2214 - DNA, 172 bp, Zea mays
  unsure (1)..(172): unsure at all n locations
  Clone ID: MRT4577_10201C.1
ccttaattcccggagggacgcactcttcctctatcttctacccttcacacttattcttatcttattctntactgcttttttccttaatagaagtacatttggagaaacgagggttaacatttcccttctatcaaatacttcactttttattatgactatccacactttcaat

SEQ ID NO: 2215 - DNA, 2136 bp, Zea mays
  Clone ID: MRT4577_102020C.1
atgtctcagcaaccgaggaacgacaccgacactggcggtgacgctgtcgtgcagccggtaattcatgaggtcagcggcgggactagcttccccacgctcaccaagacaaattactctgactgggccgcgctgatgaaagtgaagctcaaggctaggagctcaggacattttcgacttggcgacatcgcgcgaggacgagaacgtcgaggactactccctaaggctgagcagcatggtggcgcagctggcgacgctcggcgtgacattggacgagcccacggtgtgggaaaattccttcgcagcgtgtcgacgcggttcaagcagatcgtggtggcgatccagacgttgctcgacgtctctactctcacgttggctgaggtgacagggcggttgaaggctgccgaggaggagctagaggcgccactgtcgtcagtgcaccacaatagcaagctctaccttaccgaggaggcttgggaggcgcgcaggaaacagcgcgagacggagaggtcgtcgaagggcgacgcgaaccgagtatccggaagacgtggaggaagaggcggccgcggcagaggacgtgggagcgacatggggtcgtcttcctcctctggaccgggaggcagcatcggcaaggcccaagaaggagacagcgtatgtggcccaggaggaagaggccctgatgttgttgcgtgctactccaccgaaggagaatttctctctgccctcaccgaggtcaactgttgcggccaaggcaacaccgagcatcgcatcctgggcgcgaccaggcactgccgccgctgccacgaccgatccagccacacccggtgcggcaatggcaggcactcgggctcgcacggtcttcgtggactggagatggagcaaagccgccggtgggttctggcgaactggtgcatctacgctaggagagggtctttcgtccagctctgcgcgaaggaggagcggaatcctaggtcctggatctatgcccttggggccacgaaccacatgacggggtcctgggcggtgtttgcggagctggacacggcgatgcgcgggtctgtgcggttcggcgacgactctgtggcggagatcgaaggatgcgggatggttttgttcccagtgcaagaacggcgaacatcattccttcgccgacgtctactacatcccgggctcacggcgaacatagtgagccttggccagttggaggaggccgactacgacatccacctccggagcagcggcatggagattcgagagcccgaggggcgtttgttggtgaggatcccgcgcgtaggcaaccggttgtacgtgctcaacatcgacgtggcacgaccggtgtgcctggcggcgcgcggcgaagaaagtgactggcggtggcatgccaggctcgaccacatcaatatgccgacgctgagaaagatggcgcgggaggagctcgttcgcggactgtcggccatcgagaaggaccgagcagcagctgccatcaaggagttccaggcgcgtgcagaggcagaatccggctgcaagctattggggctgcggacggatcgtggcggcgagttcacatccaaagagttcatggagtattgcgcagtggacggcatgcaccgacagttgacggcgccatactccccacaacagaacggcggcgtcgagcgccaaaatgccatggtggtcggcacaacgagcagtctgcttaaggaaaaagggctaccggcctggttctggggagaggcggtgatcactgccgtatacctcttgaaccgggtaccgacaaaggcagtggaagggaggactccgtttgaggtatggtacgggaagaagccagtggttcatcacttgaagacatttgggtgcatcgtgtacgtcaaaaacatgaagccacacctaaagaagatggaggatcgaggccgcaagatgatcttcgtcgggtatgagtgcagatccaaggcatatcgagcctacgatccggccacgaagcgcgtgcacgtgacacgcgatgtggtctttgacgagtccacacagtgggactggtcgaagggagccaaaaccagcactagcgcagatcatggcggcaacgacacgttcaccatccaatatagggtggtggcgggacaaggagtcgaagtcgcaaagtag

SEQ ID NO: 2216 - DNA, 968 bp, Zea mays
  Clone ID: MRT4577_102021C.1
cataacggcataaccctagtccctaccccatataaaacgcggcagcggcgaggcccgggccgggattccacccatcgccgccgaaatcccgttgcgtctctcgcgcgttaccaagctctcaagttttctcgcgccgacggcaatggatgaggtcaccgaggccgtgaacaacctcaacatctcgggcgtaggggccgcgggcgttgccggggcggaagggcacaagaagaatcgcatccaggtctccaacactaagaagcccctcttcttctatgtcaacctcgccaagaggtacatgcagctgcacaacgaagtagagctgtcggccctcggcatggccattgcgacggtggtgacagtagcagaaattctgaaaaataacgggcttgctgtcgcgaagagtatcatgacatctactgttgatatcaaggacgagactaggacccggcctatccagaaggccaagattgaaatattgcttggcaagacggagaagtttgatgagctgatggcagcggctgccgaggagagggaggctaatggggccgaggaacaaagctgagtacctgcaaggaaggaccttgttgtagcttatttactgttttctgctgctagatttgtcttcttcatagtttgtcgagtgggctagagacgattacttgtatgatcaattaaaggcgcggcttatttagtgtgcttttacttgattcatttatgttggaatgatacaagttgtgttcaatatgatatgctctagattcatcactatcttcaatttagaagatagtgcgttgcttctgatgttcgtggatattctgtttggtggcgttgcaatttttcccaacgtctactatatactacaggtgcctgaaacagggattaatttccaaaaaaaaaaaaaaaaaaaaaaaaaaaaaaaaaaaaaaaaaaaaaaaaaaaaaaagaaaaaaaaaaaaaaaaaagcggcc

SEQ ID NO: 2217 - DNA, 463 bp, Zea mays
  unsure (1)..(463): unsure at all n locations
  Clone ID: MRT4577_102022C.1
cngtacacaaaactgctccctctgcaatgctgtactcgcactgctcagatgcgcgcctcgcaatttctccactgttccaagacgctactcgcttcgtatcccgaacgccatctgctctttcactaacgatatgtagccatgtcggcagagaggtaaggcgatcggatcaggtgccgacaacaacgccacgttcagcagctccaaggctggcctcgagttccccgtgggaaggatcgccaggctcctcaaggccggtaagtatgccgagagagtcggagccggcgcccctgtctacctcggtgccgagttcgaatatcctgcagctgaagctgttgagctgatcgtcctcgccgaatgggagagaaagaagatcctgaacgtaccatgcctgatccccacggcgccagggagaggaagactccccgcacgggctgcttatgcgagacatcagtagccctggagg

SEQ ID NO: 2218 - DNA, 322 bp, Zea mays
  Clone ID: MRT4577_102023C.1
gtgaaatggagcatgatttgagctataatggtatgcaaggtgatagatcaaacatgacgcgcagtctccatggtatcaatcaaaaaaaagtttaaacacaagagcaaccatcccgagttctcttctccgaaaaatgatgaggcatagtaactcaaaagggcaggcacagagatgggactatcatttcctgatcttccgagcatatagccgaatctggcaggagaacgctcccatgatcactccgttccaaccacaccatattgatgcttaagcccggagcattcgacgcttgtgctttctgacaaagctcattctgagcttg

SEQ ID NO: 2219 - DNA, 1665 bp, Zea mays
  Clone ID: MRT4577_102024C.1
ggcatggaaaaagaagactcaaatattaatccctgaaaaatccgaaaattagcagagcaatacgtcagtaccaattccaaacaagcaactggtctgccaactaaaatgagcatattcattacaaaatgtacaagctgatgcaaccaagaaaggccaatctcacactgaacaacactccacagttggtacagcatgattcctcagcctttcatatttcatataaatcatttcatgtgcaccagagctactcaaagcaaaagcgagaccactgttgttgcatacttcactgccgtcccacaaaaaacagatcagttgtttcttcatgtaccaaaatggtgccgagagtgcactagggcagcgtcagtcgtcagtaatcttttcagctgcccatgtcataaagctatcctgtgaaaattcaatttggctgagtcgaaactcatcagtgttgtcaagctcaaggtttgtgttatctgtgggctccaaccgctggcactcctctaaatccttcttgaagtcctctgctgacagatgggcataagcagccaggcagggtttggtctctctaggttcatctccacctccacaagaggtctgagactgactcaggaggaactcgtcacagagagcgagtccttctgccagctgctgagagtctaacaattcaaactgggaatcgccttcccacaacttctgatcttgtgattggagattatctccgtcctttgttgtttttacagagggtgggaggacaacagtctcttcaatgcttatttcacagtttctattaagctggtaaagattatgctcaggattatgaacaacttcttggactgtaccaacatgtttgtcagtgggcaatgtagtaaaatctgggagatttgattcagcagccattgattccagatcatcggatgtagttagctcttgagcattcttgtccccaggtttaaactgttgctgaaaaaatagtttggagacaacatattcaccatctctctcatcctctccagtgcctaggtggtactggtggatcacccaattggtcttctcagcctttccacccttcaacgggcttatataaagcaccattattttcttacaaccaaggtgttttccatcaactagtactggctttgtcttgcctgtcttgtgccaacggacatcagcatcgtcagtgtttatccttcgacgcttcctagtcccagtgttgtaagccttaaatgttctgtggaagaaatgtgatacacttccattttgtttaacacctggaagtttctgtggatgagtgtaacagatgccttcatcttcctcaactgttggaatgaattcatcaatgaacggatgaggttttattccagattttccatgttttgccattaagcgccagattaattcctggtcagaaggatcaaattttacacctttaggcaaaccgggccactggtgaacaacctacagcaagaaaacagtcatgagctgatcacactttaacggaattgtcaggcctgcagctgaccacactttaatatctgaagacccagagatattttttacaaaagccccaaatctttggctgtcaattatccaagttgtccctgtcatggctgcggcagcgcttcctaccacggccgcagggtcctagggttccggcgagcacgcggcgac

SEQ ID NO: 2220 - DNA, 413 bp, Zea mays
  Clone ID: MRT4577_102025C.1
gggtcgagcccgcgtccgacggtaaaagcacctgtgacaccggcggaagctagtggacaatctgggctgaaaacacatgtctgctagttcatcaagcctaagaccgagactaacgcacgctatggtctagaagaattctcaataacgctgctttcttgccgtgaatacgacactgcattggaacgacgctgatgatgagtccccgatagctagaccaggtccactgccacactgcatcaaaggatcttgctgcttctgtggccgaatcaacggacaagccctcgacattggaacccgagacgatggtatcaccactagatactccagcatagtagatggcaagctctgaggagaccacgacgcagccagctaatgccgtgaaatctgccaagtgtaagaccaacgatgaaagg

SEQ ID NO: 2221 - DNA, 717 bp, Zea mays
  Clone ID: MRT4577_102026C.1
catcctctccagtgcctaggtggtactggtggatcacccaattggtcttctcagcctttccacccttcaacgggcttatataaagcaccattattttcttacaaccaaggtgttttccatcaactagtactggctttgtgttgcctgtcttgtgccaacggacatcagcatcgtcagtgtttatccttcgacgcttcctagtcccagtgttgtaagccttaaatgttctgtggaagaaatgtgatacacttccattttgtttaacacctggaagtttctgtggatgagtgtaacagatgccttcatcttcctcaactgttggaatgaattcatcaatgaacggatgtggttttattccagattttccatgttttgccattaagtgccagattaattcctggtcagaaggatcaaattttacacctttaggcaaaccgggccactggtgaacaacatcactgttatcaatcacatgactgcactttgggcactctttacttgggttgccgatccatttctgtttacttggatctgaagacccagaagcattttttattttggtggcaaatctttggctgtcaattatccaagttgtccctgtcatggctgcggcagcgcttcctaccacggccgcagggtcctagggttccggcgagcacgcggcgacggagtgagaacggggtggagcagggagaactttggtttgaacgagggcta

SEQ ID NO: 2222 - DNA, 640 bp, Zea mays
  unsure (1)..(640): unsure at all n locations
  Clone ID: MRT4577_102027C.1
ggccgcttttttttttttttttttatacagacgaaggacacgattacttccttggcggtagcacaattgacaacctaatgagacaaaccgaaaacactcgtacgcataacatacctccatacacactaagggcgaccgggggatgcctctctcattcagctgagaacaaacgagacgccgcacgaccaagcgatgcatccgaaggctcatagagagcggaatgaaaggatccaaaaccaccccttgcccgggacgaggacctggacgaagcaatggaacatttaaaacaaccctaggaacgcgttcaagatcgtgttgagcatcagctcggtcaaggcnttgggcccacgttggtgagcgcccccttgccgaaggtggcggcctgcacgagcaagccgacgaacgcgaccatggggagcccggcgagcttgatctccgtcagcgtgcagccggtccttcttctgagggtcggcacgacaggccgagcgtntcgaagtaggagacgccggggtacaccctgttctccaggtcgagctcggtgttgagctggaactcgatgtagaccaacacgagcacctcgatccagatcgacgtcgcagatggagaacgtgcagcgaactggcccaggtagggaggaccc

SEQ ID NO: 2223 - DNA, 296 bp, Zea mays
  Clone ID: MRT4577_102028C.1
ttttgcagccgtttccttttttgaagattgggctttttattagtgtttgtctttttttttttttttttgaataaatcaacatgtcttatgtcctaggcaccaggtgatgtcattctcatttactgtaatcgttgcaattccaacataataaccaaagtacagaagactaaaccagtcccttgctacagtgtaggtgtggaaataatagtgcatgatctcaaatggaataatacaaaacacatgatgaaattgataagcgaattacacgattcggtgaggaaacggacgcgacggaa

SEQ ID NO: 2224 - DNA, 146 bp, Zea mays
  unsure (1)..(146): unsure at all n locations
  Clone ID: MRT4577_102029C.1
aanccccgcgcgcgtcctcggtgcggatgaaaaagggctctancttagttcgctcccccctggcnngtttggcagcaaaaaggcaaaatccgtccccccggaattaccgcgcaacccgggctgggcccaaacggcaaaacctccct

SEQ ID NO: 2225 - DNA, 289 bp, Zea mays
  Clone ID: MRT4577_10202C.1
tcgtggtgagtcagaacgtgtgtctcgccacccgacggtgcgagtactcaggatgcctgccgccgtcaggatctacatcgagatgcttgcgcacagcagggacagcgccatgcagctgtacatggacaagaagaagaaccgcaggtacgagaagcacatccggtacgagtcgaggaagctgctggcggacatgaagaatcgggtgaaagggcggttcgtcaagtccaccgaagcactcatcgccgccatgtacggcggatgacgcagccatatatatatgcatgggctg

SEQ ID NO: 2226 - DNA, 182 bp, Zea mays
  Clone ID: MRT4577_102030C.1
ccaggcgcatatatacatagtcgtcgattgtctgcactacctagctacctggcaacataaacacgcacgtgtgtacagtgtgtgtgctagtgctagctaggctcctgctagcagtgtcgtcagagtgcagctagcgcagagagagacgggtacgtagcgtaggttcctcgacgacgactggt

SEQ ID NO: 2227 - DNA, 428 bp, Zea mays
  Clone ID: MRT4577_102031C.1
ctttgggctgatttatgtgcttgtaagcaatttatttgttctttttctcccccctgtttttcttcttacttacggcgtgaagaaagcgcaagtacttaagtatcccgctggaggagagggaaagagaggactaactaactaacctgcttcaaacccaatttcttcaaaaattatccacaccatcatccccacccacacaaacttgcttttactttaattacttgttagtttatttgttttgttcgacttgctttagtgaccgtcacgagcccaggcgaccccattatagactccttctcccccccgagcacgcaaacaaagcccgaggcttaggtctgctacgcaaacctgggagtgagcgaaactgggcatgcaggaaccaggagtagagggataagaaggttcggtcgtccggtaatagtaataag

SEQ ID NO: 2228 - DNA, 401 bp, Zea mays
  Clone ID: MRT4577_102032C.1
aaaccgggattaaggagtttccaaggaatggtaatgcatcaattgtttatcacacaactcctatcacctaatgcatcagataaagtgaaaaagcatttaaaacacaaggaaggggcgaatgcactggggcttgcctagataacactacgctagtgttgttagacgtcgatcacttgacgatcatccttgtcctagcacttgatcaggtaggttcatccatcagcatcaccatgcggagtagcccgcgcttgaagtcgacttggctctggtccttcacatcacgattaattaacgtaccacgatcgaatcgatttgataaccgcgagggagacaacggttctcaatttagacatccaatcgagctcctggcaattgttgcacagacttctctcatagtttca

SEQ ID NO: 2229 - DNA, 225 bp, Zea mays
  Clone ID: MRT4577_102033C.1
taatggactggtacattaatatagttaccctttcatacacacacatgatcactcacatatcaattttgctggaccaaactcttctacttaaatttttataacatcactacacttcatcaatcatcatatagcctaatattatcatgcacatactcgatcagaattctccaactatttattaatcaatgttgattggcgaatttacacatacagatccgtaattac

SEQ ID NO: 2230 - DNA, 353 bp, Zea mays
  Clone ID: MRT4577_102034C.1
cacgcacctccggcatcgaactatgacattggcggcgacattggatatggcggccaatactagaggacgtgcgcgactttggatctcgatgcaccgaattcgctgctgcacgctgaagtgcagatgcaagcccgacaggcacctcatgctcattggcccacctggctcttgaaagggttctcagactacccttatgaaggatgaatattgactgtgcctttgacgcactggtgatatgttgagggctgctgcggcagccaagacatctctgggtatcaaagctagacacgctatgagtacgggagagatcgtgtcagataactgggctgtgcggattattgatgaagctatga

SEQ ID NO: 2231 - DNA, 336 bp, Zea mays
  Clone ID: MRT4577_102035C.1
tggggagctaggtgtggcagcgacattggtgcggcgacagagccggtgagcgtaggaagggagctaggtgtggcagcaacattggggcaacacaaaagggggatggcgacaaagttaagacgagtacaacaaggggatgacgacgacggagtcgagcgcttctaccttgtgtcgatcggatacaacaataacagaacataagcggaattgggctgttttagagagttgtggagttcgattgttggcatgatggtggatgtgtgctgtatttttgccttcatgtacttactattttttttccaaatcacatcatattcaacatatatataagaagac

SEQ ID NO: 2232 - DNA, 223 bp, Zea mays
  Clone ID: MRT4577_102036C.1
ttttgactctcacggcatctacaaactgcctgactggtcctaacaaaagttctcagattgccctattcccatgacacggctatgaggtcctgctgctgtgcaaccacacgcggtggtcggctactgttattctgtcttgatgataatgcgacaacgggagccagacgcctgcgtgagagctactgcttttgtgacagcgaaatgaatacgctctctctaaagt

SEQ ID NO: 2233 - DNA, 429 bp, Zea mays
  Clone ID: MRT4577_102037C.1
atggctaccgcctgggggatcgatccctttttaaaggcggctctccccactcgtgtcctcaggcgtcgtgggccaagtcttcatcggcgcgctccagggtcctccccatacgacactggggctgggtcccacacgtcatgcaagctggcccagaacagaagaagccaaaccgctgcgcgtggagcatgtaaccgccccgcggttacaagcactcctcatcctcgacaaaaccagtgggtgaaagggcggaccgccatgcaggtggcgtgcaactgcaccacggggacgcaccccttcgacttcgacgcatccagcatggaggccctggcccacacgtcatgtaaccggtgcgccggttactacgtgcgagaaactgcaccgccacttacgccaatgccgcgccttctcccgcggctgaccgacccgtga

SEQ ID NO: 2234 - DNA, 275 bp, Zea mays
  Clone ID: MRT4577_102038C.1
gcaaaaaaaacataatggccaaattaaaaaccccagttgcaggggggggaaaaaaagttttaccaactaggggtgaaacccacacagcgccatttaaaaaagaccccggaaaaacaaaacaggatggggcccccctaggggaaaataacgggaaggggagggcaccagggcccgacaaccccgggccggaaaggggcaaaggcctggcccccttgggggccggcattcccctgggaaaaataacgccggccctcgccaagtcctttctcggggcc

SEQ ID NO: 2235 - DNA, 596 bp, Zea mays
  unsure (1)..(596): unsure at all n locations
  Clone ID: MRT4577_102039C.1
ngacaattttttttttttacaaacanagcttatattgatttctattccataaataattaaaagagggtgngaaaaatctgcccttcacttaaaaattgaatgtttcactatgtatttaaaaagcgattcaggattaggaggatggataaccataccagctgtagctgatgttctcaaatattcttgcattgtttgctggtcttctagggaaaagaataatgtggaacaggaccttaaggagaaagaagatactattaaacagaggacaagcgaggttcaggatctgcaagatgaagttcaaagggagaatactaatctgcaaaaactacaggcccagaaacagcaagtacaggaactccttgatggactggatgaacagaagtcccagctggaggagcaactgaaggaagttagaaagaaatgtgctgaggaggcccagctgatctcatccctgaaagctgaattaactagtcaagaatcacagatctctacttatgaggaagagctggccaaagctagggaagagctgagtcgcctacagcaagaaacagcagnaattggaggagaagtgtggagtcaggcaaggctcagctggg

SEQ ID NO: 2236 - DNA, 355 bp, Zea mays
  Clone ID: MRT4577_10203C.1
ttgggttcaagagggttgtctatagattaactaataaacatgagagggcactaatgtgaagcctaacttaaagtgcctgaacatgatcaatgaaatggtacctccatatttacactaccaactatgagtcaatatccagcacatcggaggcctctacaggtagctacatgctccatgcaatgcatggtggggactaacagggctcgtgtgcatcaacttggctttgtatactcttacacgatcgatgatattcagagagatcattatgtgcacacattgggaatttactatgatggacaagatgagcctgctggtctcttaactgatcatatcgaacgacgcatttgctgaacat

SEQ ID NO: 2237 - DNA, 180 bp, Zea mays
  Clone ID: MRT4577_102040C.1
ttcggtcacgcgtggcgcagctgtgggtgtgggggcgagcatgcaacaacaacgggccgtacctgctcttgagggaaaatctgtataattcatgcaagtatgatgagtatggacgacaattggcgccttacagctacaacgtcctcgctcttacattagtaatgaggtggatagaaaaac

SEQ ID NO: 2238 - DNA, 1120 bp, Zea mays
  Clone ID: MRT4577_102041C.1
gcacgaggttgcagctgcagcggcaccgactccgggggagagtccccgtgcgccggagccgccaccggcgccggcgccggcagcctccaagaagaacagcagtgctagtgttggagcaaaacgaaaaggtggtcctggagggttaaacaaagtctgtggtgtgtctccagagctgcaagctatcgttggtgaaccagccatggctagaactgagattgttaagcagctttgggcatacattcgcaggaacaatttgcaggatcctaacaataagagaaagattatatgcaatgatgagctccgattagtttttgagactgatagcacggacatgttccagatgaataagcttctgtccaagcatatacgtcctctggagagtaaaaatgattcgaaaccagaagcaaagaaattgaagccacagggtgatgaaccaatttcttcagttgaaactgatgttaaccaacttccccttatggtttctgatgcgcttgctaccttttttggtaccggagaaagagaaatggtccattctgaggctgttaagcgtgtctgggatcacattaaaagcaatgatttagaggatccagagaatcctacggtgatactgtgtgactcgaagcttaaacaactctttggacgtgaaagtcttaccgctcatggtgtctcggagttgctttcagaccacctttacacgcaatctaccaatatctgactggcgatacgattttctggactcggctgggctaacatcctgggtagtaggcgctgatgaaaggacaagggatctgctcaaattaagtgttgtatttgtatcctccatattggtgaagactgatttacagtagtaagggaaaaggaaatggcagttgtgttgcatactatctagtcagacatagtagtctacgtgacttggaatgatgcggcgttaaactaaaaaggacagcgagagctgatgtaaattcggcagccgtataccgtaggcgcgtgcgttttctggtaagactctcttgcattgctagtgccctaagttgactcgagacatctgtacctcgaaatgttgctgtgttaggtgatacctaaccttaatacagtttagatcgttatccttgattctctc

SEQ ID NO: 2239 - DNA, 325 bp, Zea mays
  Clone ID: MRT4577_102042C.1
aaaccagcggcgagccacgcgtccggtgagcttctcctttttttacccctttttttcggagaaaggaaatctgaattagggacgggattcaacggggatgcagcggcacacaaagatgaaagaaaagccaacatatcaccacaatgctttttgttacactgaattgatcatacaccaccataaatgtagaacattaacagaacacctcacactcgttataaaaaggatgactctcatgaatatagtcaaaatacactttgaaatacaaacacatacatatctctagactatacatatttctaatacccctgccgcattcacatct

SEQ ID NO: 2240 - DNA, 262 bp, Zea mays
  Clone ID: MRT4577_102043C.1
caccttttctagcataatgtggaggataagtggatccaacatatgtatgaatttcacaaatataagtactatctgttccaaagtaaagttcaaataaatgtaccatcaagacatatttcatgataactgaatgggactgatttgatgctgtagatgttggcacattttttctaacttggtcaaagttaaagaagcttgactaagaacatagataaagtgagctataatttgtaatgaagggagtaggtcaagcttagtgcat

SEQ ID NO: 2241 - DNA, 2145 bp, Zea mays
  unsure (1)..(2145): unsure at all n locations
  Clone ID: MRT4577_102044C.1
ggtcaatcctccccctacccacaccaacgcgcacacggaccgggagccgcagcggaaaccacaaaaccagcgtgaaggcgcccgaaccaccgcgagccccgcccaccactccacgaaacccaaacgcacctccgcagcgagggatatcccccatcaccccctaccagtttcaattttcaaaagggcgtggaggcgccgcaccaccgccgccgccaccactgacgagggaggaaacgccacctccccgagccagtccgatgttgtccgaccaggagctggcccagtacgtggagtccctcgtccagcacaccgctgcgcagggtggcaccgggatatcggcggatgccgtggtgcgccagctcggggcgcagctcggcgttgacctctcccccaaggcgcagctcatccgcagcgtcctcgtcgcgctcctcggccccgcggccgcgccggcgccggaccccacgggttcgcgtaaggatcccttcgaccccgcaaccgctgccgccgccggcgggccccgcgccgagactcctccacagcagatgcacttctctaccgccgccgcgtcgtcggcccccgccccttctccagccgttccccacttcttcccgcagcagcaccagcaccagatgcagtacttcctgtccgccccgcagcagtatcagcaccagcagcagcagcaacgcgccggcgcgtccccttcgccgtttgacatccccgcgtcgtaccgctacgggcaccagcccttgccgcaggccgaccaggcgcagctgcagaggctcgtccagctacagcaccagcagcagcaactggccgccgcggcgagagttgcagctgcagcggcaccgactccgggggagagtccccgtgcgccggagccgccaccggcgccggcgccggcagcctccaagaagaacagcagtgctagtgttggagcaaaacgaaaaggtggtcctggagggttaaacaaagtctgtggtgtgtctccagagctgcaagctatcgttggtgaaccagccatggctagaactgagattgttaagcagctttgggcatacattcgcaggaacaatttgcaggatcctaacaataagagaaagattatatgcaatgatgagctccgattagtttttgagactgatagcacggacatgttccagatgaataagcttctgtccaagcatatacgtcctctggagagtaaaaatgattcgaaaccagaagcaaagaaattgaagccacagggtgatgaaccaatttcttcagttgaaactgatgttaaccaacttccccttatggtttctgatgcgcttgctaccttttttggtaccggagaaagagaaatggtccattctgaggctgttaagcgtgtctgggatcacattaaaagcaatgatttagaggatccagagaatcctacggtgatactgtgtgactcgaagcttaaacaactctttggacgtgaaagtcttaccgctcatggtgtctcggagttgctttcagaccacctttacacgcaatctaccaatatctgactgatgcgacttttggcttgttggctgcaggcgatacgattttctggactcggctgggctaacatcctgggtagtaggcgctgatgaaaggacaagggatctgctcaaattaagtgttgtatttgtatcctccatattggtgaagactgatttacagtagtaagggaaaaggaaatggcagttgtgttgcatactatctagtcagacatagtagtctacgtgacttggaatgatgcggcgttaaactaaaaaggacagcgagagctgatgtaaattcggcagccgtataccgtaggcgcgtgcgttttctggtaagactctcttgcattgctagtgccctaagttgactcgagacatctgtacctcgaaatgttgctgtgttaggtgatacctaaccttaatacagtttagatcgttatccttactggaaatggcagttgtgttgcatactatctagtcagacatagtagtctacgtgacttggaatgatgcggcgttaaactaaaaaggacagcgagagctgatgtaaattcggcagccgtataccgtaggcgcgtgcgttttntggtaagactgtcttgcattgctagtgccctaagttgantcgaga

SEQ ID NO: 2242 - DNA, 395 bp, Zea mays
  Clone ID: MRT4577_102045C.1
aaaacgggagaattcagttttgaaggcattttaaaaaatttaaaaacaaaaaaggggaaacacgaataaagccggggcccccggggggtcaaaaatcccaaccaaaacccgtaaaaaaaaaggggggggaaccctgaaaaaataaaacccccccttaaaacacccccctttttttcaaacccaaaagaaccgcccccgggggggcccccaaaaaacgggggagggggggccaacaaacccaatcaaagagatctaggaaaggttgccccaaaaaaccacctttacccccttgggagggggaacccttggggggccccccctttttaaggggcttgaaaaaatcaatgccccaagggtccccccaacccttccaggaaccccggggtcaaccccgg

SEQ ID NO: 2243 - DNA, 499 bp, Zea mays
  unsure (1)..(499): unsure at all n locations
  Clone ID: MRT4577_102046C.1
gcgacggtngacgcacgnacttatactcttcacgatgcgcccgccggctcagtcatcaccggtcggctccgagcgttgacgattgcacaaacacttgctatccaagcggtcagcagacaccggacgtcctactcgtgggctggtgattccagcctctctgcttgtgcacacgccataatgctaatcactcacataatatcccgagctgatgcaagcgcccaaggttgagaaccgaagacagcaactacttccacctaaatgcaggagaggacgtgcgccgctgggttctagttggtgtgtcataagccaatgatccggatatggcgaccaatcataaagctaaatgcttgcaactaatacccattcttaataagaactgcatctgatgacgcttgagaacatgataactgtacccgatctgaaagcctggcaaaatatatagagcttaagactctacggaccaacatatggaaactgcactatgtttaacggcataatc

SEQ ID NO: 2244 - DNA, 277 bp, Zea mays
  Clone ID: MRT4577_102047C.1
cgctacactacatcttcaaactggcaggcagatgtggtcacctgggtttgcttttactatattgaaaaggttcatgccagaagagaaacttgcagatgtaaagggtgcaaccctcacggctgatggaacgggggttgtatttgatgttcctgcagcagatgttgaagattacattcaaggtataatggaccttctcttgttcgtgaaataattaagcatgaaaatattttactgatgtgctcttagaatcctctctcttgttatgcaattcaaataa

SEQ ID NO: 2245 - DNA, 318 bp, Zea mays
  Clone ID: MRT4577_102048C.1
aagaaagattttttttttttttaaaaaaaaattccccacattttttaaaaaactcacgcacgccactcaacaaaaaacaaacaaaaacatccaccaccaccaaaacaaaaaacgccgttaaaccaaatataaaaatcccccccccccgcataccaaagcacaacccccttaaagccccacctaaaatcaatccactgacccacctattacaaattcaccacccgaaaaaccacaacgccaccccaagaaaaacccttgcataacccaacccattccccagttgaaacaataccaattaaacccccacccatctccctt

SEQ ID NO: 2246 - DNA, 105 bp, Zea mays
  Clone ID: MRT4577_102049C.1
cttggatgtgctgctggatctgatcttcataagtaggctgccgccgtgagattccagccatcttcagagtcaagtggtgatctagatggtactggccagagggtg

SEQ ID NO: 2247 - DNA, 673 bp, Zea mays
  Clone ID: MRT4577_10204C.1
aaactcacacctttaccctccgcacgttatagcaattgcgaattgcgattgcggcgcaccacacgaccacaacaacccctcttcctcctccctctctcttcgcactaaccaatccgagtacaactcgccgtactcgcacgcacacataggcagatccaatccgactgtacaaaagcgccgccgtccgccgctcacgtggaagagggagagggagcagcggagaggagaagggcttccacgactatatgcaacctcctggaacagtctagttcctaaatccttcttccattctggcagatatcaagagatcattcaggtctcgcacctctgagtgggtgtggatttgcaacaattctgcgatcaacttatcgctgcctcttggagtaatcccatcatacatctggagattacggcgagcactggagggactttttgttgattacggttaattgaggaaagcagctgagatgtaacaatttttttgagctgagctctcttccaagacaggcctgtgatttagcaatgtgattggatcaactctgtttttggatctggtgttagctcagttgacactagagttgacttatggttaggtttttctgtttttcatcctctactacacaacagaaaccgaaggaggcctttctgctagcagataagaccatgcttactg

SEQ ID NO: 2248 - DNA, 653 bp, Zea mays
  Clone ID: MRT4577_102050C.1
ccggccgggttggtggagcctaaaatgatttaacctgagataagattgaaagttaatttatccttgcgaggaaggactggttcattttggaattagtgactagcacctttcatccgacagctgtgttacctatagcacacggcagcatgcatgacactacactgtactctgctccaacgtacacttgtcaggccccatacatgcagctgcattgaaatgttatatgtataattgtatatacaaagcgctcatcagtcctccttctacgtacaatgattttttttaaaataaaataaataaacaaaggtgttcatccctacagaaatgggttgttcgccatacatgattgaaatttaagagagcgtttgctgcacctctcatctgcatcactgtggtctcattaagcacaccaagattggccatccgcgcgcccattaataagaagcggctttgcttgctgtatgtggttgtctattatgcaacctcttcagcatccgtttcaactaccactactactacgaattaacatatgaaaaataaaatagaataaaactcgaggtccataccagctagttcagtggctccgatgctccagcgaattacccgttttgtttagacacagcgcactgactgctcaaggcatagggaatgag

SEQ ID NO: 2249 - DNA, 1469 bp, Zea mays
  Clone ID: MRT4577_102051C.1
ttttgcgtccggccgggagagaagagaacacgcgcgtcaggagcgcacaccgcacggcgcacacacacacgcctcccgcggcaagcagcgcaggacaccgacgacgaagcgaggagaggggaggaggcggagccgagcgcccgagcccaaccccgcaaccacgacccacttccccgtcgcgattcgcattgcccttccctcgggttctacccccagcctcgcgccgccgccgccgccgccgcccttgccagagagatcaccccccattcccacaatcccgtccctccctccgtccctcgaggagccgagccctccgcgcggccgtgggatggggcagtgaccggtgagtggcgtggggagccggtgggcggtggcgagggcatatcatggtgcagtgcctggacggggtgaggcagctgctcgcggtcctgctcaattgctgcgacgtcgagctcaagcagccgcgggggctccaagacccccaggtcctcgcgagggagaccgtcttcagcgtgagtgaggtcgaggcgctgtacgagctgtttaagaggatcagcagcgccgtcattgatgatgggctgattaacaaggaggaatttcagttggcgctatttaagaccaacaagaaggagagcctgttcgcggatcgcgtatttgatttatttgacacaaagcacagtggaattttgggatttgaagaatttgctcgtgctctctcagtatttcatcctaatgctccccttgatgagaaaattgatttttcattccggctgtatgatctcaagcagcaaggctatattgagagacaagaggttaagcagatggttgttgcaacacttgccgagtcaggaatgaatctttcggatgaaattgtagagagtataattgacaagacatttgaggaggcagacacaaagcatgatggaagaattgacaaggaagagtggcgcaatctagtcattcggcatccttctttgctgaagaacatgactcttcagtacctcaaggacatcaccactacatttccaagctttgtctttcactctcaggttgatgataactgaaattgatggggttactttgaaaagaaacattagaagatattctcatgggttctgatatggttttcatttttcaaaattgggttgttggattgaaagattgtagtgttgtgaagtacgtgcatgttggattcgaggactcgattttttttgtcaaccttgtttctttcatttgcatgtctggatgcgcatgaataagatatgaagtttatgtctaaagtttcttttttttccttgttttctttggctggccggcaatcggatccagtttttagaagcttgtctttctgtacaggatagaaacagcgttttaaggatttatattgtccttgtactttttttctgctgtagctagagcagaatattttttggttgaaggtgcgtgcttccattttttaatatatttgt

SEQ ID NO: 2250 - DNA, 951 bp, Zea mays
  Clone ID: MRT4577_102052C.1
ccggccgggctgaagtccggcggcggcggcagcggcgagggcgaggcctctgcgacttccagatctccccgacgaggaggaagtctctacagcggaggggagggagatgtcgtacatgcggggtgacctgctgacgaggatgcgtaagctggtgaagggcctcgccaggcccgagccccggtggctcaaggccttggaacggtcggtgctcgctacgccaacctctctttcctcgttcctagttgtgcccttgcacttgcatttctcgatccatccgtggctccgttaggtcaggataattgaccatttatccatccgtggctccgttaggtcaggataattgaccatttatccatccgtgacgccgttaggtcaggataatggaccattttattagggttgtttggattctgtgaacaccgcaccgctctacgagcaatcgcataagttttcctccagttgattgctcatccatggacaacggctccataatttctagtcatgtggtaataaacgaaaatgatttcgtgctgaaaaaaaaaaaaaaaaaatttgcggccaagtatgtcatggaccgtttgttaacccgaagtaatcgagattgcgaacaagatgaaggaggagcgagacaggatgttgagggatagagcagcaggtcagcggtagtcgtagcagcaggtaatgtttggactggccgactgggtgttgttgttcacgacatgggccaactggcgtcataaataatggttgttggagattgatatggcaaatatgaaactcttgtttttgttattcgtatttctgggatttagatggcctctggaatgcaatgttaattgggatgtgtttttgccagcaagctggtaaaaaaaaaaaaaaaaaaaaaaaaaaaaaaaaaaaaaaaaaaaaaaaaaaaaaaaaaaaaaaaaaaaaagggcgcgccgttttaaa

SEQ ID NO: 2251 - DNA, 368 bp, Zea mays
  unsure (1)..(368): unsure at all n locations
  Clone ID: MRT4577_102053C.1
tggggtccgtttcggcctgggacgggtagcggggggcccctgttgtgccgctgtcgctcttgttgctccctcagttgccttgctggcctcgtcgtgcggcctcgtccgccgccgttgttgcgggcctcactgctcttctttgggggaggttgtcctggtgccctggcgttccctcggtgcgtcagtgggtctcttgctgaggcggtgctgctgctgctgcnccgccgtccttgctgcctgctgctgtggctcctgctgcggtggtgtcctcctcctactgctccctgctgctgctgcgtgctgctgccgggtctcggcctctctgcggcgtgttgctgtctgccgctcgccctccgtttgcttgtttg

SEQ ID NO: 2252 - DNA, 376 bp, Zea mays
  unsure (1)..(376): unsure at all n locations
  Clone ID: MRT4577_102054C.1
ccctcnnttnaaaaaaaaacaagaancaccagcggacaatttaggaagagcccgccggnaacaaacncnaacacaagnaagcnagcacaaaaagcanaaaccagaccgnangagaaaagagcaaaaacaggncggggccccaaaccaaaaganaacagngacaaccgaancgngcggcccaaaanngancagaaaaccncagcncaggggggacagacgaccacaaggggaaccacggcgcgcgacaaaaacagaggagcccaaggggcaggggcaccgaacgacccacgggcccgggctgcgcccaaaggccacagggcnacggaagccaacagaggggcaccgacaccccnggcggaacccnccaccaccaggg

SEQ ID NO: 2253 - DNA, 1028 bp, Zea mays
  Clone ID: MRT4577_102055C.1
ctcgagccgggccggcggcccatttacctgcacacgtccatacccagtaagtgagacttgtcgtccattctgaagtccggcggcggcggcagcggcgagggcgaggcctctgcgacttccagatctccccgacgaggaggaagtctctacagcggaggggagggagatgtcgtacatgcggggtgacctgctgacgaggatgcggaagctggtgaagggcctcgccaggcccgagccccggtggctcaaggccttggaacgggctccgccagtgacatttcctcgcccagaggggaagatcaagactctggtgcttcctgaggatgtgtatgtcacgaagttcaacagaatacatccagattcgctttaccatgatgcaatcaagataagtggatttgatccaccgccagctcgagtgtttgcttggcgtgtcctggagttgaaagagcaaggagtcgatgaagatgttgcaatggctgtagcagataacgagtaccggacagagaagaaggcaaagaagaaagcgtacaaggagctgaaagaaatcgcccgcagcgaagggaggaagccacctccgaatccatacccgagtgccataaaggaaatacaagcggaggaaaagaagtatgtcatggaccgtttgcataacccgaaggtaatcgagattgcgaacaagatgaaggaggagcgagacaggatgttgagggatagagcagcaggtcagcggtagtcgtagcagcaggtaatgtttggactggccgactgggtgttgtcgtttacgacatgggccaactggcgtcataaataatggttgttggagattgatatggcaaatatgaaactcgtgtttttgttattcgtatttctgggatttagatggcctctggaatgcaatgttaattgggatgtgtttttgccagcaagctggtaaattgagacgtgttttgcttgctccagaaagttctgcttatagctgatacaaggctagaccgaatcagcagttgcattgtgataaaaaaaaaaaaaaa

SEQ ID NO: 2254 - DNA, 291 bp, Zea mays
  Clone ID: MRT4577_102056C.1
aaacaaactgtccggaagccaaataccagcaatagagagcattgcgcttcgactgagggagacatacataacacatgggaggtagtagatatgacaccaatggccacagaccaaggtgtgcaacggatggttcgaaggcaacttaattaccaccaacgcgactgtctgcacatctgtcgccttaagcttactggccgagatcctatccaatcgacctcgccggcgtgacaagcttgtgactgggctggactttcctaggcacactatctttaaccgtgcctacaagaaaac

SEQ ID NO: 2255 - DNA, 661 bp, Zea mays
  Clone ID: MRT4577_102057C.1
ttttttttttttttttttttttttttttttttttttttttttttttttttttttttttttttttttttttttttttttcaaaatttttggaaaaaaatacccgggtcaaaacggacgggccccggggggggcccaaaaaaaaaccccatggcttggcctgaaaaaaaacccccttttttttttccggccccaaggtaacccaaagccaccaaaggctggggggcccaaccccggggccccccaaaggagggttttttggggtttaaaaccccggcccgggaaaccggccccaaagccccgggggggggggggggactttaaaaaaaagggccctttttaaaccaggggaagggcgggggtttagaaggggggccttttttgcccggggcctcccccgggtggggggaaaacaatttctttttttttggcccagagtttggttaaaacttttttgggggcgggggccccccctgaagcaaggggggggccccagccggcctttacaagggttttaattcaaaaagaattgtttttgataatttaaccccaggggggggcccctcccccggtgggttgggggggcaaaattttttttggaataacaaccctgggggggggtttctttccgggggggggccaatagggggcggggcttcctggt

SEQ ID NO: 2256 - DNA, 370 bp, Zea mays
  Clone ID: MRT4577_102058C.1
ataagcgctcgagcgctctcgctgcggacctgctccgccttacggtgacgcctcgtgtgccagcacccgatgctgggtgctacatagaaggggctacacggtgcctgttcagaagtgctggcatacgggtccaaggccaggcgctacgggctaccttgtgtatgtgtgactgctacaagactagccagggtggagatgggctgaccagatcgtgtcagctgttgggatgctcaccaggagcattctgacggcaatgcacatgggcatgagggatgatgatggacgtctgcacattaagctgcttactgagtgctgacgatgcttggcatagggcaacaggtcatgcttgagctgatccattctatcacag

SEQ ID NO: 2257 - DNA, 1698 bp, Zea mays
  unsure (1)..(1698): unsure at all n locations
  Clone ID: MRT4577_102059C.1
tacctgcaggaaacggcaggggcattaccacctgtctttttccttcctcttcacgtctcgaacaagcaggagcaggtagaccgaacaactccaggtcgcgggagcggccatttctctggggcgggaccgcgggagagctctagctcttgcagcagtagaactctactgcagccagagttaagagaaatggataaggatggcagctccgagagaagtcgcccagatcatggtgatgtgaagatgctcaagttcagaccaaaggtgcctcgacagaagcaaaagccaaagcaacaagaccctaagccaattgatgaagatgtgatgaagatattgaggactcgccaagtggctgcaaaaagtgcaccaaacacagaagatgagtgctcaccacagaagaccctctcgacgccaccttctgcagatgttgtttgcttgtcaccagcgcaactcggagtgcaaaaacaaaatcaattagtgagtgcccctagaagccactccaaattcctagatccttccctgttcctgttaattcaggattggtttatgaagaagagagtagtgatgacgacgacgataatgatagtgacaatgttgggttgctggagactcaaccagattcaattgaaagtgaagctttaacatgtccggctgaggagcttgatttgcttcaaagaaggtagcaaagaaagaatgttcttcttccagttcccaaactctcttcctttacccaaaaggtcgtccagtgccggcaaggaggtgatggaaggatccaacctgcagcagctgcctcagggttatttgggcaaaatgctagtatacaagagcggcaagatcaaaatgaagttaggagacatcatctttgatgtgaacccaggagtagaaagtaggatgctgcagcgtgcagtagctctcaacactcgagacaaacactgttgcttgcttggagagattgagaatcgtcatgttattgtgactcccaatgttgattctttgttgaacgacaagtagggaccaactgtagcagctttgtcacagattgtgtgtagacctgtagatatgcagggttagtgacatctgtagaaattatatcagctctgtcaaatgatgtataggattttagttgtgtagtgttgtgaacgttttattgtgattgcagtgctatgttagttttagaactgcatgcagctccctgtggatgaatgtttgtaaggatcggtatttgaccttgattgtattggaaggcaaatataataaaaatcacgtcgttcttgtgggcaaaaaaaaaaaaaaaaaaaaaaaaaaaaaaaaaaaaaaaaaaaaaaaaaaaaaaaaaaaaaaaaaaaaaaaaaaaaagaaaacaaacaaaaaaacccatacatgcaaaagtcttacctttttctatattgccccctccctttcattccactggccgagagttttacaactttggaactgggaaaaccttggcgttccccaccttactcgccttgccttccttcccctttttcccagttggctgtctcgccttgaggcccgctccgttcgccctttccaaccgttgcgctgcctgaatggggcgtggtacgcacccttgtttggctcttttttcgcggcgcgtgtggtggtttcccccccccctgcccgtctccctttgcctgccgcccggntggcccgcctctttttcgctgttttttccct

SEQ ID NO: 2258 - DNA, 252 bp, Zea mays
  unsure (1)..(252): unsure at all n locations
  Clone ID: MRT4577_10205C.1
cgnatgangtttgcnaaggnnccaaanccagattcattgaaggtggagaagttgatgacacattagggagatactcccatgttatgcanatcatctcaanggttagtggacatttgtatgatcatctccagntttgggatcccgtngaaagcgccttgcccgnnnaaacantcagnggtgcnccaanggtgaaaggccanggattggnttgaananttngaangtacgaggngaggaccntnnngggnggcc

SEQ ID NO: 2259 - DNA, 174 bp, Zea mays
  Clone ID: MRT4577_102060C.1
aaaggattcagcacgccccccgttgggaagggagcttagaggcgggccccccaggggcggtggcccggccggcttaagcaatggcaacggcccttggggccccaaccccctaaccttggtccgggccggccgacaaccaaagcccccgttggttactttgaatcttacttaaaa

SEQ ID NO: 2260 - DNA, 284 bp, Zea mays
  Clone ID: MRT4577_102062C.1
gcggatcctaatcaatctggaaaaaagcagctagcacgcctattctattccgtacctgcatgcatccagagcaaattaaaaagtttcccacagctcgttgtcatcatctgttgttaaatcaaaatgatgtatgcttactcccaagtagtagctgatctctgctaattgtttcttgttctcccattaatgcaacgtacgtacgtggtgcaggaacgcgaggccaaggatgaccatcaccatcttcctcaagataatggggctcgccatgctcgataccggtgctg

SEQ ID NO: 2261 - DNA, 232 bp, Zea mays
  Clone ID: MRT4577_102063C.1
cgttgctgtcgggcgtgcctttcaccagcggactcatcaactgatgatagatgatggataatcgcaagtcattgaaaagtctatctatcctaattaattagtggatactgtatgttatattgttgtattcgttgcaataggtagataattaactaacagaacaataacacaataccatgcatgatccatagtcatgcttgccgtaaaaaaaaaaaaaaaaaaaaaaaaaaaa

SEQ ID NO: 2262 - DNA, 432 bp, Zea mays
  Clone ID: MRT4577_102064C.1
ccgagggataatgaactgaccccagctaccccgagagtagtacaaactccgccctttatttgcaaatctgtggtcacgacttatagcgccaagaggtgtgtgaaggatctaatcgcagggggggtattcacacatcccctgtgcgggggccatcttcttcctccagccaccggccaaacctggttacgccacctagcctccccccctgtggaggagcccggcgagatccatgtactgatgaaccaaccccccacccaatagcgctgcaaaaaaccgcgtacctaccaaagggaactagggacttaccataagcaagtattgcgaccaaacagtggttcatgacaaccattgaacccccatgctccttgaaggccacctacccatctctccttagtcttggctgtaccgggcgcccaaacccctatgggagag

SEQ ID NO: 2263 - DNA, 771 bp, Zea mays
  Clone ID: MRT4577_102065C.1
taaaaggaatacagtgggggtcatcacaccaggcgataggcggctttttttttttttttttttttactagatgcacatatatatattcagaaaacttcaaaaatcaaataatgttctccaaaccttgatacttcctccttaaagctattatcaagcatcctgcacacagagatgttcatcatatatataaagctaaagtacaacagacctttcttgtggaggcctttcaagtttaaatacaacaaattctttacattaacatgaaaatgctttgaaggcaagccagcaaaaccttgtcagccaagatactcttgctgtacaattgaagattatcaatctcgaagaccaagctcaacctcaatgtcgtcatcctcttcaaatagctttagcagacgtgcatgctgttcctgccttttcttcttctgccaatacttgaaaataacaaatgacaacagaatgacagcccccactcctaggaggacgaacaaaactgttttgccggtatggcccctttggctgagcttcagccttcttatcatcgttggatgtttggggatcaccagctagcactgcggtgaactgggcgcagatcccggacgcagcgaggagaaacaggacgaccggggccggtctggatccgcccctcatctccggccggaacgcgccgatccttcctctccctcggttcgctttttttcgtgggggtgatggtgggctggtggcctcgtggttggttgggtggtgctccggccggcctcgaggtacccaatg

SEQ ID NO: 2264 - DNA, 366 bp, Zea mays
  Clone ID: MRT4577_102066C.1
gcggcttggactgcaaatatatcccccatgagtggggacaaacgtatgttttgtttgacggaacacaacatccgaagagaccctatgcggggcagcctgagagggctatcaacaaacacttgtaaccaacaaccacttttggccagtgggtgtgatgatgcaactatcatgctttagttaatcgcccatggatcgccttcttgacgcgcttttgtgagcatatgcaaccacaagtattatgtcatgtttacccatgactgctgatactgatccagcgggccctatagatcactgatgacacatacgggctgtgatagactgcaagataccgatgacgtccatagtgaatggagccttgttcttaat

SEQ ID NO: 2265 - DNA, 136 bp, Zea mays
  Clone ID: MRT4577_102067C.1
gggcccgtttttttttttttttttttaaagtgctagacaattgtcagacgtagttatttatgaaggacggaccgacccgttcattccagcgaggtcagagatatggaaacacctcccggcagatcctatgaaagaa

SEQ ID NO: 2266 - DNA, 238 bp, Zea mays
  Clone ID: MRT4577_102068C.1
cccacgcgtccggaggcctgacataaagtcacagtacagttccctcctttatcaacttcttctggatcccagggacagggtctgctttgaggccataaattgtgtgttgggaaaagtcgacaacacagaaagcacggaggacagagctggtggatggattcagttaactagagaaattctcaaattgccagaggccccttctgtagcatcaaagggtgttctggcaaaatctagtgaa

SEQ ID NO: 2267 - DNA, 304 bp, Zea mays
  Clone ID: MRT4577_102069C.1
ccgcgaaccataacgtttctagaggatggccacatctttctgactgattttgactctgtcgccagcggctaactcaaaaccttttgttacaatgcaccctacatagtggccattaacaacaacggagtctgtgccatcgagttttgactcaacctctgccactccatcacattctttggcctgaactgcagagtccagatgtacagatggcatcactaggaacaccacatacatactggcaccgatcgtaggacccttggaatcccctggtatgaaaagaatgttggacgctcaactttctgcg

SEQ ID NO: 2268 - DNA, 311 bp, Zea mays
  Clone ID: MRT4577_10206C.1
accacgcgtccgatcaatcatcattcatcttagtgttatattcaccaaatcaaatctgcaacatcaattatctaactccaaaaaccatgaagctggtgcttgtggttcttgctttcattgctttagtatcaagtgtttgttgtacacagacaggcggttgcagttgtggtcaacaacaaagccatgagcagcaacattatgcacaacaacattattcacaaaaacaacagcatcaaccaccatcacaacatgacctgttgccgctacaccaacagcaactcgtacacatgcaaccactattacatcagtta

SEQ ID NO: 2269 - DNA, 339 bp, Zea mays
  Clone ID: MRT4577_102070C.1
aaaacaaaactaaaatttgtttaaaatacttgggtttaacaaatactttcattcattcattcaaaatttagagcaaaatatgtctctaatatagggttttaagtatagaggaccctgctagagagaatgaagtgatttttttagaaaaaactgtaaaaaaaaggtttttgagggtgttgttgaagacaaactaatggattggatggttttgggcaatcccacgccttggcgggagtttcctttagatgaacagcccccaaaatgggggtgccatcttggcccgcaggtaaaaaaaaaaggtcaaggttgggtgggtcaaaacattaaaaaccgcatttt

SEQ ID NO: 2270 - DNA, 373 bp, Zea mays
  Clone ID: MRT4577_102071C.1
gctcggaattcggctcgagccaacttcctcggcctgcctttttttctggtgcggcccggcactgctgcaggtccgggaggaggacatccgattgggtgactgcgcctccgggggatcggaggacccaatcccgggggcttgaatttaacggggactcactaaatttcccgcatggtttggcgggccgtgaactaactcggctccggctgtctccagggaagggcccttgacggagcgccgcccgatgccccttctatgctgcggaggacagtgccttcttacgggatgcacaggctgttgccaggtgaccttcataggttcaacactgtagcagccaaaaaggagcccatgaccgccggagatcatgagaact

SEQ ID NO: 2271 - DNA, 294 bp, Zea mays
  Clone ID: MRT4577_102072C.1
atggccgacaatgggcttacattatcaagccctgcagcgctaacaccgaccccatctttgggagcaacaagctcaccggcaccgacaaatggtaccctgaaggcctatggtttgacccgctcggctgttgcaacggctctcccgagaagatcaaagagctgcgcaccaatgagatcaagaacggacgcctctccatgctcgtcgtcatgggcgcctggttgcaggccgagtacaccggaaccggccccatatacaacctattatatcacctcgccgaccctgggcacgccacca

SEQ ID NO: 2272 - DNA, 404 bp, Zea mays
  unsure (1)..(404): unsure at all n locations
  Clone ID: MRT4577_102073C.1
actagacacatccacatggttttttttcaatcatctcctcaatagccacactatttattttatttcaattaaaaatttcttcccaaacctttcctgcacctccctcacccaaaactatagccacagaaaaaacgaataacccttgagaatcaaaatgaacgaaaatctatttgcctctttcattacccccacaataataggtctaccaattgttgtgaccattattatgttcccatcaattctattcccatcatcagaacgcctaatcagcaaccgactacactcatttcaacactgactaatcaaacttatcatcatacaaataatgttaatccacacaccagaaggacgaactgagccctaatattgtatcctattattanggtcancancttctaggttct

SEQ ID NO: 2273 - DNA, 220 bp, Zea mays
  Clone ID: MRT4577_102074C.1
cggctcgagcggctcgagcggctcgaggtcgcgacgccggttgctcaagccgttaccacctgagggcccccacattgccaagccgatgccgatcacggaggcaacggcacaggatagtatcgggagcgcgtcaatgcctaaacaggatgacgtggcagacggtatcgttggcaacggcgagccgcggccgaagctcaagccgctgcactgggacaaggtg

SEQ ID NO: 2274 - DNA, 1304 bp, Zea mays
  Clone ID: MRT4577_102075C.1
cagcggccccgccagcctctgccagcttttctccaccaccaagaggaaggggaacgcgcagcgcaggcggcggcgtcttcctccgcggatccctcctcctcctcttgctatcctcgcggacgacgcgattccacaccgcaaaccctccctccctccctggattgatcgagctgctcgtccacctccgctccgcccctcgcctcgccatttcgtagcttgtttcttttttccttctccctccctttcggtttctgctcgattcatcaaattagtttattggaggggagggagacgttaggtgggctgggcgcctcagcgcctgcgtgctccgcctcgggagaagccgagaaggtcaaaaggaatccccaccaccaacgcaggcgactcccgcaatccaccatagcttcctattctccccgtcgccagacgcccagagccccccgcccctagctcggagcaagcaataaaaggcaaaggtgccgacttttctgaaccgcttgccctccgtccacgccatattggtcgattgctcgattcctcggtcgggggagggaccccgggcccggagaagtcagcaagcgatgtgcccgctgcgggtcatcctcatcttcctctccgccaccgtcgcgggcttcttcctcgtcagggggctcaacgccgagccggaccagttcgacgccgacgccgacgccgacgagtcgggatcccccagggcgcccctgcccctgcattccaaggttggatcggctgtgaaagcagggttctggacgatggtggacatggcaagcgggcgttacctctggcgcacccttgttgcacagcccgcgaattcggaatccgagaaggcccggtgacgaatgctcggttgttcgtaaattgtctcgtcctgcggatggagtgccacatagatagacataggtgaaggctggtgcaatcctgttgtatcttcttgttacatacggagtattggtatgatggtgttggtgtgtaatatagatgttacacgggggtcaatatattgaagtaaatttgcaacattgttcatgtgttgagttgaaccttgtgtcgtgtaaaactggaagtgggtgtattctggccatgtgatctgggtccaagtttgcaggttttgtcgttcggctaaatcccttaaatgtgagacttgaaatatagaataaaagcgaagctgagtacatggaaatttgtgattgctggattgcaatatgctcagttgttattattaatagatgttagtatttaaatgatttaatatattatttataactattttattatattaaatatta

SEQ ID NO: 2275 - DNA, 659 bp, Zea mays
  Clone ID: MRT4577_102076C.1
cagaaagacatctcccgtcaactgcctgtaacaaattaataggcagcagcaattaatgttgtgtattatacaattatacacacacagtctagcttatgtttaccaattgccaatatatgtggcttgacgtgtgtgttttctctataaatgtttggagcatcatcaggatatgttttgatatacactctgtttcttttgtatggaaaaaaggccgtttaattttacaaaatttgtctaacagttaaatcaaattatatgaaggcttagtgtacgaaaattgtatcagtattcatatctcacaaagcttttgaaacaacattgaattttctgggtttgatttaatgtataagagaaattcatggtcaaagtataatgttaggctatccgcagtagattgtgtaaaataggggatttgcattgtattgtagattacattgtttgctgaatgaagtttgaaataggaggtaagataggggatgagataggatagctgttagatacagccttaaaaacttgttcaaatgcaaatgcacctttaaaaggaagcaggggaagtagtttaactgtgatatccctgttttgttttagttttattgttggccgtagataatttccacgtgttcaacttatctcgtatgaagcattttgatgtctaatgt

SEQ ID NO: 2276 - DNA, 608 bp, Zea mays
  unsure (1)..(608): unsure at all n locations
  Clone ID: MRT4577_102077C.1
gggccggccgggtcgangaaaagaaaaaaaaaaaaaaaaaaaaaaaaaaaaaaaaaaaaaaaaaaaaaaaaaaaaaaaaaaaaaaaaaaagaagataaataaaaaatgagacaaaaacccaaataaaataaaaaaaaaaaaaaaaaataaaaaccgaaccccccctcccttttgttttctttccccccggcacccactcgcccttcctgttcccgccaccccgcaatttccttccgggggtccccaccccttttggtgggggggtgaaaaaagggggggggtaggggtgtatgggccccaaaaaccgaaataaattttcaccccccccgaccttttgggttccgcgccttgggaagagcacactgggtcggagttttctgccaaccaccaggtgaaaccgggcccccccccccccaaggttttttttaacagtttcagaggggccttggaggatggggcccaaaaccaagggcgcattaacccctttcaccccctactttgttacccaggcgccgttttgacaagggcttttttggccccccgggcaaggggggaaaaaaaagtgggggccttcaggggcctttctgggcccggtggaaaacaaaggg

SEQ ID NO: 2277 - DNA, 466 bp, Zea mays
  Clone ID: MRT4577_102078C.1
ggcccaaacaggggtcattttaggggacaaccccaacccaaaatctcgacttgcctatgcaaggcaacgggaaacaaaaaaacacatgcctttcgcagcataaaaaaatccacggccgtccacaaacaggggtcattttaggggacaacgccaacccataatttcgacttgcctatgcaaggcaacgggaaaaaaaaaacacacatgcctttcgcagaataaaaaaatccacggacgtaccccctttccgatccaaaaaacaaagaagttgcaaaacaaaacccgtgagcttaattgccggggacaaaattgggggcgtaggcccatcccttgttgttgaccgggtcaacaatggggccaacgaggtttttgagcgggcccttgccggggacaaaggcccggaccaaaaaccccaacatggaaaacagggggggggggcggtcttgagccccttcaccctgggccc

SEQ ID NO: 2278 - DNA, 536 bp, Zea mays
  Clone ID: MRT4577_102079C.1
aaatggctgcgaatctggccgaattgcctcactgtacaacgaggggcgcactattcggctcctggaagggcttatcctactactatgaggtagttgcaaattatcagcagtacgacgggctacgccagcctccgtcagagaaagccacgatttgtccaactagctcttttacatcctgctcggacgcctatcaggttggtttgagtcattatataaggactttgattgcgtcctgcatatgaggaacatcaggaatcatccttacgaaagatgacattggcaatgctagattattaggagtagcactctatcatcggtatgcgcagacgagattgtcttctgaggtttcaccttgagcgcctataaggtcttgatgatttccactgtgcaagacctgttatattattgatactcttacctgaagcttgtcgaatctacgactatcgtacctgtcttggatcacaatttaagatctttgcaatagtttacctattgatgaatgccagctaagactgatacatcgttgctacattgcc

SEQ ID NO: 2279 - DNA, 358 bp, Zea mays
  Clone ID: MRT4577_10207C.1
aatactatctttctttgggggagggctaaaatatctttttgttttcatatttttttaaaaatcaaacatcaatccactcaacccctccaatcgctttacaaaccaaacaagcacaacaactatacctacccatactaatcaacacaccccccccatgagcattggccaaaaaccctaaaactcatcccctccccttacataaaaaaccagacccatataccccaaacaaaaaatattatccttccaaaacacataccatgccccaaactatcaacaccctatcaaaaattcatactattaaacacctcacaactaccccaatcttcaacaaataattatacaacccccgcataacaaa

SEQ ID NO: 2280 - DNA, 336 bp, Zea mays
  Clone ID: MRT4577_102080C.1
tgtgggctcctctatgaaggcccaccttcactaaaggctgggtccaatgcaccgacaggtgattgtagcagcgcaggcggtcgatatagattggttggtactagtgtattgtgcacgtcttgcgcgcaaaccgtatttttaaacgtgtgtgacgatatttaagtagataaaaattatagagtgaaaatgttatatgaaggatatttgttatggagcatataactatatagacatagtcacacagaaaaaaaaaaatatgacaaaggcaccatgccactaccctacttaaccgtcccgggcttagactcatgcccagacacaccggggctcccgcca

SEQ ID NO: 2281 - DNA, 450 bp, Zea mays
  Clone ID: MRT4577_102081C.1
ggcgattgggtccctcgaggccggcaggggctaattgtccggcgcaccgctttggacgtcgacgcgctctactccgaagacagcggcagcccttactacttccagggcggtttcaacgtcgcctcgatggttgcaatggcggccggagttgcgcctatcgtgccgggatttctgcacaaggttggagttctgccgagtgtgcccagtgcgtttgtcacgtcttacaacaatgcctggttcgtcagctttttcgtcgccggagccgtctactgtctgctctgcaacaggagggggaagcaagagagagaacattacagttgatactatactaggcatataagcatgtgtgtggagattgttactattcttgtactgtagaaaagattgctactattgaccgcatcctaatcttctataagttggttatatccaaaaaaaaaatttgcggcc

SEQ ID NO: 2282 - DNA, 352 bp, Zea mays
  Clone ID: MRT4577_102082C.1
tcccgactcgacgcacgcgtccgccgactcgtccgcccacgcatacgcgcttctttcagtgcccgtggcgactactgtcgagtgggatccaccgcccttgtgaagcacctcgtacacggctactgcctactgacccgttcatcttgattaggcaatatggttatcccttcaccagctatggctcctgcaatcaccaagttcctcaatccgtatattttgaatatgcatttcacaaacaatttcatgagcgctcatgtcatccacacacctacagccactgtcgcatgctcttcaagctctcatgataaactccttatgccaagcatggagtctactcttatttttcttcttc

SEQ ID NO: 2283 - DNA, 267 bp, Zea mays
  Clone ID: MRT4577_102083C.1
gcctttcccagcagctattgtggtcgtgcgtcagccgcgtggcaccgtatcgcattctacgattcgaagctctctgtgctcgcagccatggcgaagaattacccaaccgtgagcgcccagtacagcgaggccgtagagaaggccaggcgcaagctccgtgccctcattgacgaaaagagctgtgcgcccctcatgcttcgacttgagtggcactccgcggggacgttcgacgtgtcgtcgaggatcggcggtcccttcggtcctatg

SEQ ID NO: 2284 - DNA, 588 bp, Zea mays
  Clone ID: MRT4577_102084C.1
caggctcgccgctgcgcgagttcctccacgtcgatgacctcgcggacggcgtcatcttcttgatggaacactactccggcctggagcatgtcaatgtggggagtgggagtgaggtcaccatcaaagagctcgccgagctagtcaaggaggtggtcggcttccaggggaaccttgtgtgggactccagcaagccggacggcacacccaggaagctcatggatagctccaagatacaggggatggggtggaagcccaagatcgccctcaaggaaggcctcatcgaaacctacaaatggtacgtcgagaatgtcatctcgaacaagaagtagagccatgacatgccagtggtgctggcttgttctccattgctatttccacaagttggtatcgtgatctgtagtgtttctatggtggttgaatatctgatcatacggttgtcagttataagttaacccacatagaagaggcttgttatgtgttgtgttgcctgaataatctgtgggtcgagtactcgagttagtatactgctacaagcataattgttctggaacactttttattcaatagagaaagtttattgaccaaaaa

SEQ ID NO: 2285 - DNA, 1669 bp, Zea mays
  Clone ID: MRT4577_102086C.1
gtggactctcgactctcgagcagttcgatgtacgtaacccggcccacgaacccatctttaataacggccctccaaaatcccaattccccgtccagcgaggcagcggcgactgcaattctcatccgaacccgatcatctccggccgccgctccctccggaccctccgtcgacatgggcaccgtcactgccgcagatccgcacccgtccttcctcgccgacaaggacgccaaggtcttcgtcgccggccaccggggcctcgtcggctccgccatcgtgcgccgcctcctctcgctaggcttcacctccgtcgtcgtccgcacccacgccgagctcgacctgactcgccaggcggacgtcgaggccttcttcgccgccgaacgcccgcgctacgtggtcctcgccgccgccaaggtcggcggaatccacgccaactccaccttccccgccgacttcatcgccgccaacctccagatccagaccaacgtcgtcgacgccgcgctgcgctgcggctccgtccgcaagctcctcttcctcggctcctcctgcatctaccccaagttcgcgccgcagcccatcacggagggcgcgctcctctccggcccgctcgagcccaccaacgagtggtacgccgtcgccaagatcgccggcatcaagatgtgccaggcctaccgcatccagcacggcctcgacgccgtctctgccatgcccaccaacctgtatggcccgcacgacaacttccacccggagaactcgcacgtcctgcccgcgctcatccgtcgcttccacgaggccaaggctactaacgcccccgaggtcgtcgtctggggatcaggctcgcctctgcgcgagttcctgcacgtcgatgatctcgccgacgccgtcatcttcctgatggatcactactccggcatggagcatgtcaatgtggggagtgggagtgaggtcaccatcaaggagctcgccgaactagtcaaggaggtggtcggcttccaggggaacctggtgtgggactccagcaagccggacggcacacccaggaagctcatggatagctccaagatacaggggatggggtggaagcccaagatcgccctcaaggaaggcctcgtggaaacctacaaatggtacgtcgagaatgtcatctcgaacaagaagtagggccgtgacatgccagtggtgctgtcttgctctccgttgctgcttccacaaggtggttggatatctgatcatacggttatcagttttaagttaacccacatagaagaggcttgttatgttatgtgttgcctcacctgaataatctgtgggtcaagttagtctgttagtatactgctacaagcataattgatctggaacactttttgttgaatagagaaagtttaatgaccaagatgatgatggattgatgttcttggtctagaaacaactgcttgctgaccaagctctgtttgatttctgagataccacaatgtgttcagaaacatccattgcttcatttcctttagtttgtactctactgatcacattgagaggaacatctgatcaaagaagatgttgctttcaaaaaaaaaaaaaaaaaaaaaaaaaaaaaaaaaaaaaaaaaaaaaaaaaaaaaaaaaaaactgattgtaatcctatgatttggatccaagagttcaaaaggtcaatc

SEQ ID NO: 2286 - DNA, 302 bp, Zea mays
  Clone ID: MRT4577_102087C.1
cacaggacacctggcccagcacaggcagctagaagggccggtgggcaccggggccgggaagccaccacctcaccacctgagggcccctgggaggctcctctggcctggctgggctgggtctggggccgccacaggcccctcacggggcggcagaggcaacttcagtgtccctgttagagcaacacgggtccctccgtggggggctgggtgcggccccctgccgtgtatttcctccccagggagtggggcctccccgggagctgacgccaccaccctgcttagccctcacagggccccaaggt

SEQ ID NO: 2287 - DNA, 499 bp, Zea mays
  Clone ID: MRT4577_102088C.1
actaatttttcatccacccactcccccttgttgggaaataaggggtttggcaacacaaaaaactattaaatacagggataatttgtttcaatgatcaatttttaatgaaaaatattcgacatatgattacaccatgtgctattgatgtttcatatccaaagattaattttatttgaaattttcagagattcctttatttttgctattcaagactttcgaatgaatgcaatgtgaatttattgacgcttaaaaaccatcatcatcatcttcggccatttctttagcaagctcaagatcttgttgttcacgttcacgtctttcttcagcactttccaaatctttaccatatgattttggtggataacgcatagctttaacactttgattgtgaagatccaaacaaaatgaaatacgctgatggaaagctaaatgtggatcacgtgtactataaacatccatactttctttggtacgcataaaaccttgttctggatcaatt

SEQ ID NO: 2288 - DNA, 313 bp, Zea mays
  unsure (1)..(313): unsure at all n locations
  Clone ID: MRT4577_102089C.1
gcacatggtttccttttttcaatttgtcaaaatacttttttttagacacgaataaccttgggcccggtgggttgacccaggaaaaatnccgaccggtcccatgacggggtccacacgtttccctaaaaagaggcttgtaacacctgggcccaatcatgggcacagccgcttcctaagagaaaaatgaagcccctgccaaatccacccaacatacaaaccggaagcttaaaatggaaaacccggggtgcctaaagagggaacttacccacaataaatgcgtggcgctcactggccctttttcaaaagggaaacc

SEQ ID NO: 2289 - DNA, 301 bp, Zea mays
  Clone ID: MRT4577_10208C.1
tacacgtggggcttgtccgagactcctcgagagacgctggcgcaagcagatatgatgcagtgctctatgtgtaaggacaggatagatggcgatcatatggtgcttaactctatatactagataccgatagatgacgtaggcgagacactatattaagaattgcattgccacacatgctcatttgcatgccattcatggaaattggatgcagatacagatttgcacttttggtaagccgcatttggaagtgacaacatgtgcaggtgaccataatgtgatgactaaaccttaactgcatgct

SEQ ID NO: 2290 - DNA, 374 bp, Zea mays
  Clone ID: MRT4577_102090C.1
gtattccatattttttaaatcattgggaaattacatgttcaaccagctcaataataacgctcgacctgattaacaaatttctccaaaaatcttaaacaaaaaatgtctttaggttatgtaaaaatataaacccaacacaactaggcttcatatggacatgcagtataacttatttcttgggtggctcggtggcataaaatacccaacgaaaaaatttcgtcctgactgcatggtgcgcccacacgagcatgttttgaaacatagttcatatttataaactgattagatgctgagtgtcgacttataagaggtgccaaacctgaaatcggcggggatgacgttttccgcgattcggttgccaccacacttgacag

SEQ ID NO: 2291 - DNA, 455 bp, Zea mays
  unsure (1)..(455): unsure at all n locations
  Clone ID: MRT4577_102091C.1
aggggcgccccccccccccnttggatgccacaaacccagcacaaaaacnnnagacggtttatagggatacgcactccacacaccgtgcaaacaacgaggggtgttgattgaaggctgcctgcttgggcaaggatgacggacggaggaccatggaaggagccatcggatgtgccgctgaggattaggctaatggatcttgcagaccgagattaacggggaggaagtcgaggaacctgtacttggtggcgcccttgtccggggacactgggactcacttcttgcaggaggcgccgcactagttgaggaggtcggcggaggtgcacacacacaaccagctggtgcactcgccgcaccagaactgattctttggcgttggccctggagggcctttagccacggacgcagagaccacaagggcctggagaactaggatcgccaacagagtgctgctcttc

SEQ ID NO: 2292 - DNA, 1991 bp, Zea mays
  unsure (1)..(1991): unsure at all n locations
  Clone ID: MRT4577_102092C.1
cccggngcaaatcccccgatcccaccacgtacgttttttaagagcaccacttacgatctccttcgccaaccgcgccgctctctctctctctctcgcacgagccgcgccggcgccgccaccacgcgcgcgggagacagagaccacagccgcagccaccggcgggcggaataggaatggtggcgccggggggaggagcaggaggaggtccgtcgcggtggccggcggcggaggagcttgacactgtacggaagaaggtggtggagattagtggaagggatgaacaagaggttatggttgctgcttgcccctacagaatttgccctttgggggctcatattgatcatcagggtggagtagtcacagctatgaccataaattatggagtactccttggtttcgttccctctaatggttctgaggttttacttcattctggtcagtttgaaggtgctataagattcagagttgatgacttgcaaaagcctattgataaacctgagaacataaactggggaagttatgcaaaaggtgctgttagtgcactgcagaatagtggatatgatctaaggaagggtatcataggatatatttctggtgtgaaaggtcttgatagttcagggctcagttcttctgcggcggttggcatcgcctacttgctggctttagaacatgtaaatgatctggttatatcaccagtagataacattcagttagacaagtacattgaaaataaatacttgggtctcgaaaatggcattctagatccatctgccattttgctttcacgactgcttcaccttcctacgtctgcttctcggagctgaataaaagccaacagcctcagggacagctaccattcaagattttgttggcattttcaggactccaacataatctgccaaagaagcgtggatataatacacgagtttctgagtgcaaagaggctgcccgtgctcttttgcagtgagttccctgttaataacctgtatagctgtatttaatcatgcggacaaatatactcttatgtttcccatctttatatgggtccacatttgtagttcttctacagtatttgttattcatttgtcatatccaatatgtagtctgatactctgattcattgattatgtttttgtttgaacccttagtgcttcaggctgtgaagatacaccaaatatactttgcaatggtacatgttctatgtaatatttcttgtcgtgactcaatgtaaaagtataatttgtctgacattttctttgttattatagttgacccagttgtatatgagacccagaaggtaattatcacatttaggtccatttttttatcgttttcatgtcattctaacacaatttattcctgcagtgtgtattggaagaaaatctttccaggagagctgaacactacttttttgaaatgaagcgggttacaaagggcagggatgcatgggctcatgggaacctacaagaacttggacagctgatctctgaatctggtcgcagctccatactcaactacgaatgtgggagcaaagagatgatccagctgtacgagatcctgctgaaggcccccggcgccctcggcgcccggttcagcggcgccggcttcaggggctgctgcctggccatcgtggagagcgaccgcgcggaggatgcggctgcatacgtccgtgccgagtacgaaaaggcccagcccgagctggtctccaggatccccgcggatcgccgtgttctggtctgcgagcccggggactccgcgcgcgtcatattgcctgatcctcacctgagctcctgatgccatttcgtggcccggacagacggaatgatgactctactagtccattcgctgcgtttggattcgtttttagttaagccccttttgagcatcggatattttcctttcctttattgtttctaataaaaataaattaatttctgtaaactttatataaggttctagcttttttagataaaagtatataatatctatct

SEQ ID NO: 2293 - DNA, 304 bp, Zea mays
  Clone ID: MRT4577_102093C.1
gaggcgaatagcccttgcggcggccaaggccaccggaaaccggagccggataggggggaaggacgccaaacgcgtcatcatcaaagtgggcactgcgagaggcacgaggcatgaggggcgaggagccacaggcaatctaggggggccctgggaacaggggaaagagataaatgccctaggagaccaggcgaacattgcgtcctcaggggctggaggagaggggaagcacaggctcaaatacaggaagctaggcaatagcagcaaggctgaaatgcaaaagccacaaaccgagccggaaggaaag

SEQ ID NO: 2294 - DNA, 1628 bp, Zea mays
  unsure (1)..(1628): unsure at all n locations
  Clone ID: MRT4577_102094C.1
gtgcttcaggctgtgaagatacaccaaatatactttgcaatggtacatgttctatgtaatatttcttgtcgtgactcaatgtaaaagtataatttgtctgacattttctttgttattatagttgacccagttgtatatgagacccagaagtgtgtattggaagaaaatctttccaggagagctgaacactacttttttgaaatgaagcgggttacaaagggcagggatgcatgggctcatgggaacctacaagaacttggacagctgatctctgaatctggtcgcagctccatactcaactacgaatgtgggagcaaagagatgatccagctgtacgagatcctgctgaaggcccccggcgccctcggcgcccggttcagcggcgccggcttcaggggctgctgcctggccatcgtggagagcgaccgcgcggaggatgcggctgcatacgtccgtgccgagtacgaaaaggcccagcccgagctggtctccaggatccccgcggatcgccgtgttctggtctgcgagcccggggactccgcgcgcgtcatattgcctgatcctcacctgagctcctgatgccatttcgtggcccggacagacggaatgatgactctactagtccattcgctgcgtttggattcgtttttagttaagccccttttgagcatcggatattttcctttcctttattgtttctaataaaaataaattaatttctgtggtgcccgtcgggctggtcaatatcacgcggctgtccgagtaccgccgggacgcgcacacgcagacctacaagaagcagtgggtggaaccgacggccgagcagcgcgccgaccncaggagctacgccgactgcacgcactggtgcctccccggcgtgccggacacgtggaatgagctgctctactggaagttcttcttccccagcaacgatcaggtcttctgatggtgcctgcatacatacgcctggaaaccaactgctaggggctagcccaaagaaaattgtgtctagatgaagaacaaagccatggtgttcaaatgttttgttttgatttcggatatggacgctgtcgatgctcttgttctggctggaattcttcttaccaactgtgcctcccatatatacatcactactgatactagaatatttgcttttcacattgtggggagacggatgctaaccaaggtgagtgtgagcgcctaccgtgtattcattatcacattctgcctcatgtaaataaagatgtggatgggtagccgcgagcatctgtccggtgggtatttactccagtagtatatgtatgtgggcttaatattgtaccagcgggtctgttattgggcaaaaatcttcacccaatgggtaaacgggtattagaacgttccgccttcacccatacccgttaacccgtgggtataaaatacccaatataaacttatcccaagcatgaactttgactttagtcatccatcttttttactatttaataatcttttaggccattatgtcatagaaggcttaccgtcaatttaatgaccatgtaatggaccatgtaattcacccaatgtgtggtgaatggatggttaaatgacgctagaatgtttgtaatggtgtccggataaagatcgcg

SEQ ID NO: 2295 - DNA, 1836 bp, Zea mays
  Clone ID: MRT4577_102095C.1
ccggccgggaaccgcgccgctctctctctctttctctctcgcacgagccgcgccggcgccgccaccacgcgcgcgggagacagagaccacagccgcagccaccgacgggcggaataggaatggtggcgccggggggaggagcaggaggaggtccgttgcggtggccggcggcggaggagcttgacactgtacggaagaaggtggtggagattagtggaagggatgaacaagaggttatggttgctgcttgcccctacagaatttgccctttgggggctcatattgatcatcagggtggagtagtcacagctatgaccataaattatggagtactccttggtttcgttccctctaatggttctgaggttttacttcattctggtcagtttgaaggtgctataagattcagagttgatgacttgcaaaagcctattgataaacctgagaacataaactggggaagttatgcaaaaggtgctgttagtgcactgcagaatagtggatatgatctaaggaagggtatcataggatatatttctggtgtgaaaggtcttgatagttcagggctcagttcttctgcggcggttggcatcgcctacttgctggctttagaacatgtaaatgatctggttatatcaccagtagataacattcagttagacaagtacattgaaaataaatacttgggtctcgaaaatggcattctagatccatctgccattttgctttcacggtatggctatctcaccttcatggactgcaagactgcttcaccttcctacgtctgcttctcggagctgaataaaagccaacagcctcagggacagctaccattcaagattttgttggcattttcaggactccaacataatctgccaaagaagcgtggatataatacacgagtttctgagtgcaaagaggctgcccgtgctcttttgcatgcttcaggctgtgaagatacaccaaatatactttgcaatgttgacccagttgtatatgagacccagaagtgtgtattggaagaaaatctttccaggagagctgaacactacttttttgaaatgaagcgggttacaaagggcagggatgcatgggctcatgggaacctacaagaacttggacagctgatctctgaatctggtcgcagctccatactcaactacgaatgtgggagcaaagagatgatccagctgtacgagatcctgctgaaggcccccggcgccctcggcgcccggttcagcggcgccggcttcaggggctgctgcctggccatcgtggagagcgaccgcgcggaggatgcggctgcatacgtccgtgccgagtacgaaaaggcccagcccgagctggtctccaggatccccgcggatcgccgtgttctggtctgcgagcccggggactccgcgcgcgtcatattgcctgatcctcacctgagctcctgatgccatttcgtggcccggacagacggaatgatgactctactagagatggcaatgggtacccgcgacccgatacccgatgggtatttactccattagggtatgtatgtgggctaaatattctacccatgggtctgttattgggcaaaaatcttcacccaatgagtaaacgggtattagaacgttctgccttcacccatacccatacccgttaacccgtgggtataaaatacccaatataaacttatccgaagcatgcacttggactttagtcatccaacttttttactattgaacaacaatttaatgaccatataatggaacatgtaatgtgctatgtagtactatcatagtgttactactttaaaaaaaaaaaaaaaaaaaaaaaaaaaaaaaaaaa

SEQ ID NO: 2296 - DNA, 244 bp, Zea mays
  Clone ID: MRT4577_102096C.1
cccacgcgtacggccataaccaaccgatttttacagtccagtatggtggtggcgcggggtttattccgggtctacggtagcaccatgccgaggccgtgcttcttcctgggcgaccgcgtggacccaccggcgtccgacaccgacccgatgctagagtgggcgcgcaaatcacactggtccatgggcgataatatagagaagtgccttcgtttgcaggtccatatcaagggtttcgttaacaagt

SEQ ID NO: 2297 - DNA, 382 bp, Zea mays
  Clone ID: MRT4577_102097C.1
cacagtgaaaatgcttacatgagttggatttgcttttgtcttggggggccaaaaaaatccattatacatgatagcccaaactgcaacctttgacaatcatccccatagaaacaacttaactatcaagtcgacacagacaggacctacatcttcacgacaccaggtctttctttatccactggcaaataacaagatccttctaaagcccgcgcacaagaacccatacgggcccggatcctactacccaccactatggaactgctttgagttttgacccccacagccatcccaataaaccttgttttcttaccggaactagcactcggcctgaaagccctctgggaaccactttcattgggctcagtcttggtacatcatgaag

SEQ ID NO: 2298 - DNA, 1777 bp, Zea mays
  Clone ID: MRT4577_102098C.1
cccacgcgtccgcccactcgcccaccccgccgctctctctttctctctcgcacgagccgcgccggcgccgccaccacgcgcgcgggagacagagaccacagccgcagccaccgacgggcggaataggaatggtggcgccggggggaggagcaggaggaggtccgttgcggtggccggcggcggaggaggaaggatgcgtgcatattagtttccgatgaccccacctgatcatgtacctagctgaacaaatgggactggaactgatcttgtcaaagttgcatgatctcaaatgggaaaccccatcttgacactgtacggaagaaggtggtggagattagtggaagggatgaacaagaggttatggttgctgcttgcccctacagaatttgccctttgggggctcatattgatcatcagggtggagtagtcacagctatgaccataaattatggagtactccttggtttcgttccctctaatggttctgaggttttacttcattctggtcagtttgaaggtgctataagattcagagttgatgacttgcaaaagcctattgataaacctgagaacataaactggggaagttatgcaaaaggtgctgttagtgcactgcagaatagtggatatgatctaaggaagggtatcataggatatatttctggtgtgaaaggtcttgatagttcagggctcagttcttctgcggcggttggcatcgcctacttgctggctttagaacatgtaaatgatctggttatatcaccagtagataacattcagttagacaagtacattgaaaataaatacttgggtctcgaaaatggcattctagatccatctgccattttgctttcacggtatggctatctcaccttcatggactgcaagactgcttcaccttcctacgtctgcttctcggagctgaataaaagccaacagcctcagggacagctaccattcaagattttgttggcattttcaggactccaacataatctgccaaagaagcgtggatataatacacgagtttctgagtgcaaagaggctgcccgtgctcttttgcatgcttcaggctgtgaagatacaccaaatatactttgcaatgttgacccagttgtatatgagacccagaagtgtgtattggaagaaaatctttccaggagagctgaacactacttttttgaaatgaagcgggttacaaagggcagggatgcatgggctcatgggaacctacaagaacttggacagctgatctctgaatctggtcgcagctccatactcaactacgaatgtgggagcaaagagatgatccagctgtacgagatcctgctgaaggcccccggcgccctcggcgcccggttcagcggcgccggcttcaggggctgctgcctggccatcgtggagagcgaccgcgcggaggatgcggctgcatacgtccgtgccgagtacgaaaaggcccagcccgagctggtctccaggatccccgcggatcgccgtgttctggtctgcgagcccggggactccgcgcgcgtcatattgcctgatcctcacctgagctcctgatgccatttcgtggcccggacagacggaatgatgactctactagtccattcgctgcgtttggattcgtttttagttaagccccttttgagcatcggatattttcctttcctttattgtttctaataaaaataaattaatttctgtaaactttatataaggttctagcttttttagataaaagtatataatatctatctacttctctactatactt

SEQ ID NO: 2299 - DNA, 747 bp, Zea mays
  unsure (1)..(747): unsure at all n locations
  Clone ID: MRT4577_102099C.1
cgggcatttggcactttcccatccataatatacgcggccgttgcgctctcccctcgctctcccccatttcaaactcgaaccccctctccccgcctcgagcatcgaccagagggggaaggcaaggcgccgatacgttatcggaatccgaggcgaagcggggtggggatcggatggtggaggctagtgcgagcttcatggataaggtcgaggcggcggcaggcgacgccgtcgtcgacggggcgagcgtcggcgtcggggacgcaaggaaggaagatgaggagatggcgcccgtggaacccctgccggagcctcccgacgaaggcgggcccgttgcgtggcccatgccggagttctgccctctcacggtcgatggcgcgctgaaggagtcattcctggagactctgtggaaggacgctgcgccggagatggagcggcctgcgcgagaggcggacgaagcgctcagcccggaatcacggccgtcgagcagcaagcgccatcgctccggcaccgcctcgccgtcgtccaggagcagcccctaccgcaacatcctgcaggtgttccagcagtgcaggcaggacgtcgtcggngagactcccaccaagaactactgaagcctacgagcgcgacagagcagggtcaggccgcgccgcgatatcacggcttttcgtcgcttgcttgctcgagaatataactcttgccattttgcccattcttctttatgtgactgaaaaggatagggagtttttt

SEQ ID NO: 2300 - DNA, 502 bp, Zea mays
  Clone ID: MRT4577_10209C.1
ccggcccgggtgatcacgtttccttctttcgtcgtaaggccgtgctctcccgtatgttctatacgttcctttccactgatgacgcatgcattattattaggtactaggaatactgaaatataataatgatggcgctccaatacgaaagaggtaacatgcctggaattcctctgatcagagtatcctcgagagacaatatacatagtaccttctccatacgtcccgataatcgcacgctaccggtgtgaccacatatgaacacatctgcattgacatatgagcgtagaagagaatggatccatctatgtggtgagaatattcattacacgcattgagactactcgatgttgccattgcccgcactgctcactatcatgccagtcctgtaagtgcgtccttcgctccatgcataggtgcaagccgcctgtactgaaaactaactctaggatagaatgttgaaaagatacaatgtgatattatctcgtatgaattggaaaattct

SEQ ID NO: 2301 - DNA, 433 bp, Zea mays
  unsure (1)..(433): unsure at all n locations
  Clone ID: MRT4577_1020C.1
acacagaataccctttttttngtaaacaaacattgcattctatatttttcaanaaaagaaaaaagnactaggaccaagagaaatctannncaacgaccattacaatggcacttcacataatataaaataaactaaaaacttccaaacaaataatttaacccaaagtcacaaaatacttcataacatgaaatttgggacgaatgcataataatgaacagtcaaacatagaataaagcaataatcagacttgttcaattcaaaaaaagaaagaaagaaaaagagagaaaagatatgagaatagtttcctcactttgccatcataactttgacaaactcttcataattgatctgaccatctccatcaaacatcagcttctttgatcatctcatcaacttcttcatcagttaacttcttaccaagatttggcattac

SEQ ID NO: 2302 - DNA, 242 bp, Zea mays
  Clone ID: MRT4577_102100C.1
gtctacatttaatcctgattccaagcatttttcaaggctctttggcatttctaagtggtttgtatccttaagcccctcgaaaacaagccccgtcgcaagtcgtccagagtggataaacctcccatgattggaacatattgctcggccctgtttcactacagtcaaagctataaaccgacctctaaaagcttaccgccctgcacaaaaatggacccaagctttactggaaccaaaaataaatg

SEQ ID NO: 2303 - DNA, 1378 bp, Zea mays
  unsure (1)..(1378): unsure at all n locations
  Clone ID: MRT4577_102101C.1
ccttccttaacctcgaatttcggttcggggtccatggaaataaatcctggggtctcgaaaatggctttctaaatccatctgccattttgctttcagggtttggctatctaaccttcatggactgcaaaactgcttcaccttcctacgtctgcttctcggacctgaataaaagccaacggacgcgtgggcagctaccattcaagattttgttggcattttcaggactccaacataatctgccaaagaagcgtggatataatacacgagtttttgagtgcaaagaggctgcccgtgctcttttgcatgcttcaggctgtgaagatacaccaaatatactttgcaatgttgacccagttgtatatgaggcccagaagtgtgtattggaagaaaatctttccaggagagctgagcactacttttttgaaatgaagcggcttacaaaggggatgcatgggctcatgggaacctacaagaacttggacagctgatctctgaatctggtcgcagctccatactcaactacgaatgtgggagcaaagagatgatccagctgtacgagatcctactgaaggcccccggcgccctcggcgcccggttcagcggtgccggcttcaggggctgctgcctggccatcgtggagagcgaccgcgcggaggatgcggctgcatatgtccgtgccgagtacgaaaaggcccagcccgagctggtctccaggattcccgcggatcgccgtgttctggtctgcgagcccggggactccgcgcgcgtcatattgcctgatcctcacctgagctcctgatgccatttcgtggcccggacagatggaatgatgactctacgtttggattcgtttttagttaagcccctttggagcatcggatattttcctttcctttattgtttctaataaaaataaattaatttctcggggacggatgcgactaaaaaagcactaaaaaaccggatcccttccgaactccgaaaataagcgtgcttgggcgagagtagtactaggatgggtgacctcctgggaagtcctcgtgttgcattcctcggaggaggcctaccggctggtgctgcaccaggtggtccggtggctggagcgcaacgtggaccccggcaagtcacgggtgttcttcgtcaccgcttcgccgacgcacacggacggcagagcgtggggcgacgacgacgcggagggcagcagcaactgctacaaccagacgtcgccgatcagcgccgcctcgtcctaccgtggcggcacgagccgggagatgctgcgcgcaacggaggaggtgctggccacgtcgcgggtgcccgncgggctggtcaacatcacgcggctgtncgagtaccgccgggacgcgcacacgcagaccta

SEQ ID NO: 2304 - DNA, 401 bp, Zea mays
  Clone ID: MRT4577_102102C.1
aggaggcgtccggcgaactgaaactgaaaactagcggcggccggagaaagaagctgcgttgcgccgctggtctgagtggtctccatccatcgatttgttttgttggcttcttcgcatgtgattccgccagtaggagtgttgcttatctacccctcctcctccacaacgtccagatcatcagagccagaggttcgtcgaccttgcgcagcagatcgagaggctgcagggagagggatccatggagctgggaaagcccctttcggcgcacagatgtagctacaccgctacctacacccactgttgcataggcttctcccctcgggtcgtccgtaccagctggatccgcgcggcggctgagggcggcgacggcggtgcataccttcgacggaacaggtgccagc

SEQ ID NO: 2305 - DNA, 1921 bp, Zea mays
  Clone ID: MRT4577_102103C.1
aaaaaaaaaaaaaaaaaaaaaaaaaaaaaaaaaaaaaaaaagggccgggaggcggaggagggaaactgaaactgaaaactagcggcggccggagaaagagagctgcgttgcgccgctggtctccatccatcgatttgttttgttggcttcttcgcatgtgattccgccagtaggagtgttgcttatctacccctcctcctcggctcctccacaacgtccagatcatcagagccagagggtaaaacggaatagtctattcccagtagtgataaacaaaacaaagaatcttctctgtcttcgtgcggtgtgcctgccatttccaggcccagctgttcattctcgaggctccttctcttgtagttcgtcgtccttgcgcagcagatcgagaggctgaggggagagggatccatggagctgggaaagcccctttcggcgcacagatgtagctacaccgctacctacacccactgttccataggcttctcccctcgggtcgtccgtaccagctggatccgcgcggcggctgagggcggcgacggcggggcagaccggcgacggagaggtgccagcttcgccgccgatgggcccagggtcgtcgaggtcgccgctgccccggtggctactagcggaggcgccgccggagcagccgggagcgcggggttcggagcacgggacgcggagctcgccatgtgggacaagctcggggcggtcgtcaggctcagctatggcattgggatctacggggccatggcactcgccgggagattcatatgccaaatggccgggatagactgcacggggggcttccatccgtctctcacggcactcgtcgagggtcttggctatgcagctccaccaatcatggctctgctcttcatcctcgatgatgaagttgtcaagtattcgcctcacgcgcgtgccatccgtgatgtggaggatgaggagcttcgcagcttcttctgtggcatgtcaccatggcagttcatcctcatcgtggctgctagctcaattggcgaggagctgttctaccgcgccgccattcagggagcattggccgatattttcctgagaagcacggagctaatgaaggatgctcgagggattgcatcactgagtggtatcgttcctcctctggttccattcgctcagacgttcgcggcagtcatcactgcagccctcacaggaaccctctactacgtcgccacaactccgaaagaccctacgtatgtggtgacaccagcgatgcgttcgcgcacagggcgtgagaacctcaagaaactatttgcagcttggtacgagaggaggcaaatgaggaagatatactcgccgcttctggaaggaatcttggctttctaccttggcttcgaatggatccagaccgacaatatcctggcacctatgatcacccacggcatatactccactgttgttcttggccatgggctctggaagatccacgaccaccggagaaggctacggcagcggattcagaaggtcaggagtgaagggagtagctctgcagacgacacattgtaactgcagcatgtagatcggcgtggtctactgctggatagctagctgctgattgcacgcgcgtactgggtgatcgatcgatctaccgatcagtcagaagaccagaggcgtacgtctcacaagttttgatctacttaattaatatcaacaagataggtataagattgggcaaaaaatatatgtaatgcatgtagtcatgtaacgtagatacaatgtgtacatatatggataaatatatgcaggctgtaatcaatataggaagtatataccgcgtgattggtagactgcaaaaaaaaaaaaaaaagcaggtcgacaaaaaaaaaaaaaaaaaaagcggccaccatccaagtatgttataaattaccctcctagtttcaagtaccccccc

SEQ ID NO: 2306 - DNA, 373 bp, Zea mays
  unsure (1)..(373): unsure at all n locations
  Clone ID: MRT4577_102104C.1
agcctctagagtaattcctattactctccctcgatgcctttgccggcgatgagcgcccattcgcccatcaaactgattagatggaactctctctgtctcaactgagctgtaaggacattancgagctcattgctgctggcaaggataattttgcatcagtctcatgtagcggtggcggtgtggctgttccagcagctgtccctgctgctggcagcgctcctgcagctgaggcgaagattgaagataatgtggacgacaaggaataaagtgatgacgacatgggctgtcagcctcttcgactaagcctgtgcaatattcaggagtattgtttttgagtcacggaagcaaatcgactacaagtcctagtcatgtt

SEQ ID NO: 2307 - DNA, 309 bp, Zea mays
  Clone ID: MRT4577_102105C.1
ttcctcgcaacgccgacgctgcaacttccgctccctccccgactcgcgctcggcacgcaggcacgcgactgcggtggcgctcaggctcgggctctcagcaacggcggggcagtcccagactcagcgtctccctctcgccaatcgccttgcgccctcgctccgttcctctgctcaccggccgattctgcgtgcgcgcctcccgctcccctatcgcctccggtcgaacgtcgacggcgcccggccccggcggctgcattgcgctgcttgcggccggcgggtagcgggagccagcaagctctgctcccccaa

SEQ ID NO: 2308 - DNA, 538 bp, Zea mays
  Clone ID: MRT4577_102106C.1
tccgttctatctccttgcccacgaagggatggcgaatgcccccgcgatggcctcatcaccaccggcgtccgctgacgacggcggtccatcctcgccttccgtagccgtccctcgtgtacttccctccagattgctcctagacaccccgcctccttccagcggtagggcgcggggcccgcggggcggcagtgcggctgcggcgtcgaggcgcggcgggctatgcggaggcacgaggagggagtccactttgccggctgcggcttcaaacggtacaggagggaggaggccggagcgggactggctcgccgaggcggctatgatgatcggggggccagtcgaggacgcgggattggcatccgccgacattcttcagctggcgatggcgaaggggcctatgttcgagtggctgagctactggccggaggaggggtacctcaaggaagatcatccctactgacgcacggtgcttttcctctgctcgggtacggcaaaatcgttgatggcttcttggggtattgcaaaggcagcagcttttatc

SEQ ID NO: 2309 - DNA, 389 bp, Zea mays
  Clone ID: MRT4577_102107C.1
cgcggttttactcctccgtccccctcccctgatcgcatccaccatgaaaccctagcggcctagcccccggccatggcgcgggggttgaccgctctactacgccgactcctcgccccatcgacttacccctcccactccccctccactcccctcgccggggccgtgtcccgccggaccgtcacctacatgcctcgcccgggggacggggccccgcgcggcgtcactctcatgcaggacgacggcctggggcccctcgtcacgggcgccgcgcggcaggcgatggctctgatgcacgcgcccatcgtctgcgagacatacgagggccgcggcgacatgcccacgagccccggcgaggtcatcgagtacttcggccgcaacaaggtctgact

SEQ ID NO: 2310 - DNA, 298 bp, Zea mays
  Clone ID: MRT4577_102108C.1
gcgccgtgctccggcggctgcatacggcggcggcgcacccctcgcctgacgaaattcgctgctgcgccgcccaaattcgtgagtcgccgcttcccagacgaccagcgccgcctcctcctccacatccgtagatcctgcctacctgaggtcttacctgattcatgcggctctctactgctcgcgtggtggatactggctggtgtttagtgtgatctaatctattgtaccgtcctggcgtcctcggctgaagggccaaattcacacatcacacggggccactgtgttctgcggtctgact

SEQ ID NO: 2311 - DNA, 2506 bp, Zea mays
  Clone ID: MRT4577_102109C.1
cagcgtccgcccacgcgtccggcgcggctttccctctcgtcgctgacatgccgaagcggcaccgcgacagtgagggccggcagcggtcgtcgtcgtcgcggcggcggcgcagcccgtccccgtccgactcggacgctgcctcctccgattccagcggctccccccgacggagccgtggacgccaccgccataggagccgccgccggagggatactccgtccacctccagcgacgcgagcggcagcgggagcgaggattcgaggtcggactccggacgccgagggaggagcggcggccggaggcgccgggatgtcaccgaggagcagatcattgagtacatggcgaagaaggcgcagaagaaggcagagaaggtggcgaagaagctgaaagcgaattcggtttcaggctactccaacgattcaaacccctttggtgatcccaacctgacagagaagtttgtgtggcgaaagaagatagagcatgatgtatctcagggacagaaggtggacttttctgtcaaatccgagaagaagaaacagctagaaagaatggctgaaatagagaaggttaagaaaagaagggaagaaagagctattgaaaaggcacagcacgaagaggaaatggcgttaatagctagagaaagagcacgtgcagagtttcaagactgggagaagaaggaggaagagtttcattttgaccaaagcaaggtcaggtctgagatcaggttgcgggaggggcgtacaaagcctattgatgttctccttaagaatcttagtttctcagacgaatttgacattgagttaaatgagccttatctggtgttcaagggattaacagtgaaagaaatggaagagctatgtgatgacattaagatgcatcttgatctggacagggaaagccaaacaaatgttaagtactgggaggcactcatggtggtatgtgaatgggagctaggtgaggctcggaaaagagatgccctagatcgggctagggtccgtggtgaggaaccaccacctgaggttcttgcagaagagagaggtttgcatgcaagtattgagggggatgtaaaaagtctcctggatggtaaaacttccacagagcttgaagatatgcaaagtcaaattgagtcccaaatgcgctctggaactgcgaaagttgttgaatactgggaggctattctgaaacggcttcatatttacaaagcaaaggcttgcctgagggagatacatgcttctatcctaaggaagcatttacatcgattggagcatcctggtgctgctgaacaggatgtggattctgagaaagaagttgataataaactggaggatgaaatgcatgaggacgaagatgataaacgatattcacctgagcctatgcctcagcagacagataacgaatttgaagaggcagatggatccttttctccacagctaatgcatggcaatgaagatgaagatgcaattgatcctgaagaggacaaagctgagctggaccgaaaacgtgaagctgtagttttggagcatcaaagaaaagttcaggaagccatgaaaacaaaggcaagagtacctgatgagatggagatgaaggccataaaaacaatgggagctatggaggaaggagatgcagtatttggtgccggtgctgaagtgaaccttgattcacaggtgtactggtggcacgacaagtatcgaccaagaaagcccaagtacttcaatcgggtgcacactggatatgaatggaataaatacaaccagactcattatgaccatgataacccaccaccgaaaattgtccaaggctacaagttcaatatattttaccctgatcttgtggacaaatcgaaagcaccaacatacagtatagagaaagatggaagcgccggagagacttgcttcataagatttcacgctggacctccatacgaggatattgctttccgtattgtgaacaaggagtgggaatactcacacaagaaggggttcaagtgtacttttgagcgtgggattctccatctctatttcaacttcaagcgttaccgttacaggcgctgaaatggctcaagagggggaaaactggatcgattggactggtgcgtcatgattctgctgtatgctgtggcatggataccagtcgagtatgtatcttcagtataattatatactatgctaaatgggaacgcactttttggttttactgactgattcccccctcttggaggttgtacaataatacagcatagcaagctgatagtttttcaaaaaccccctaatgcatgtgcatctaagatgaagatgctattgttcttcaataagacacagctgagctggtagagttctatgtttctgttttctaatgatattagtttactgacatgtttggaagttcagaactgtaatagttattcgttcaagtgcagttacctgagtagtttaattgtcaagtacagattgttagtaagtggactccaaattacacaacaaaaggcccgctcttctccaaaaaagat

SEQ ID NO: 2312 - DNA, 612 bp, Zea mays
  Clone ID: MRT4577_10210C.1
caaaacctcgccggcggcgggcggccatgtcgcactggaaggagaaggagaatgctccacctctcccgctctatccgagcggcgcctctaacccctctcatctcctcccctgcaagcgcccgctgcaatccccatccccatgcccaccgctgcgccggccgctcgtcgatatcactggcaacgcatcggaacagcggggcgggtatgggtatacaactcccctcccgaacgcttccaggccttgcgggtttcttctgcacgacgacgaagacgacatgaacgaggcattcttgcgggaggtggacgccatctgcgaggagcgtgcgcggtccacggccaggaaggaggaaaaggagaaggagaaggagaagaagccagcagaggagcataaggggacgggcggagtggcgctcatggcggcagcgggcacgattgacgccgctggaacagagatagcaacgcttgacgatgctttctgggaggaggtgagcgccatctgtgaggagtgtgatgcccagtctgctgccaagagccaggagaggacgaaggaggaggggagcttggtgctgtcctgcgatgatgcttcactcccccctgctatttccatcaccg

SEQ ID NO: 2313 - DNA, 235 bp, Zea mays
  Clone ID: MRT4577_102110C.1
aacaggccgaaaaaaacaggggcaatttttaagttttcaatacatcggacagttttcaagtttacaattcatttagcccctcgcttgcctgcactttaaaattacaatttgtactgttcaggataaatttcgatgcccaacaaaaattcaagatcaggttttttaatcgagactgaacctttgggcttaacttgcaatttgaataaaagtcacttattgggcgattttttttttt

SEQ ID NO: 2314 - DNA, 311 bp, Zea mays
  Clone ID: MRT4577_102111C.1
ctcacacagcaaataccccacaaggccactccaaagagctagtagtggaaccgaagatgttcgggaacatcggaaagatccccattatcggggaactggccggcaagaaacaaaaatgcgaacctaaagggcaacgtggtgctcgtgcgcaagaccgggctcggtttgaacgtaaccagaatggcgggttctccttgacggggttggggagtttcttggccgcggcgtcacctgccagcttatcagattcaccgtcgttgaccctaacaacagcaaccgctggaagttgggcgcggaggcgagcctggagc

SEQ ID NO: 2315 - DNA, 248 bp, Zea mays
  Clone ID: MRT4577_102112C.1
actgcatcaggagagaaacaaggccatatgtaatggtattgacataggacgtgctcaaatatttatcaaagggaaaggaaaatttgtcaaaaattggtgtaactaaatggttgcgcttattggcggggcgaggtgtccacagcatgctatcactctgttattttcttcagagagtttttcgccaataactgggaagaacttttttctcatttacaacaacgcttatctaggcccttgttaagcatgta

SEQ ID NO: 2316 - DNA, 481 bp, Zea mays
  unsure (1)..(481): unsure at all n locations
  Clone ID: MRT4577_102113C.1
tgtctgtttggtgtgntcttgtgtgtgtgtgnnctgcgttngtgtctgtttgttgtgttcttgtgtgtgtgcgcccgccttcttggtgggggggggggttttgctttgtggcggtctgtccctctgttgtttgtgtcttggtcngatgaactctcttattgtgccctctctctcgcttgcgttggatcctttttctttctttctttcttccccctgggcggccggtcttgtgggtccctgctttcctccccttccttgcgtcgtcctttgctcttttcttttgtctcctttgttcctttccttggcctttggttttcccttcccttactgggccaaccctggggtttcccttcttcttccccttgctgttcttccccctttcggcggcttggcggtctcgtcggggggcccgcgcctgtcttccttccttccttttggcccgcctgtttgttttttgggtcgcgccctgtttcgcgctttt

SEQ ID NO: 2317 - DNA, 379 bp, Zea mays
  Clone ID: MRT4577_102114C.1
ctcatgcacgtggcgggcgcgggacgtgagcggcgacatctacaacagggggggcctcaacgcggccccagacccgtggctcacgaaggcactctccctgggcgacgactccgacatcatgctcgcctactgggccagcaagatcgccgaggcgccgcagacggacctcaatggctggaaggctctcactcccgatgcgaccgcgcacaccatcgggcacgtccagtgcactgtaatcctgggcaaagtggccgctccgttcacgcacatcattaacagcgggtagccggcattcaaagcgctcgtctccaggtcatacctccgcgagcacttgcagatgccggtctagtattccgtacaacccatcatatacagatgc

SEQ ID NO: 2318 - DNA, 524 bp, Zea mays
  Clone ID: MRT4577_102115C.1
ggccgcttttttttttttttttttgttttttttttttttttttttttttttttatgtttaaggtggttaccttttataaacaaagactaaagctgctccaaacacacaccggaactacacgcctataacaataggacaaacatacaacaggccgaagcctacaggttcctgcactacatgtcgcgggagtggggattacctccctcaagtttcatgctttctactacccaatcacaatgtgtactaggaacttacagctcagtgtataggtaaataccaaccactctacattgaacacacaactgcttacatgtgcacagctgaatagcgcatgttctaccctgggaatccactcatggcactaaacgaaaaacatcctggcactggattgacatcctacatggcccaaaaatacatgcctcaaaccccataaatacaagcgagaattctttcttaaactaaggagtaacagtttccagatccaccctccacatttggctaatagaccctacgttatgggtgat

SEQ ID NO: 2319 - DNA, 342 bp, Zea mays
  Clone ID: MRT4577_102116C.1
attcggctcgaggtcagaccctgctgttttcggcgccccgataggactccaacctccagcgagaggaacggttgattaacacaatcggcgatcgcactaggctgaaaagccagtggcacctagctaccaggggcggcattatgactgtacgactctaagccagaatccaagatagcaaccggcttctgtggttcgcggccgccccgacccacgttagggcgttggcccgccaagggcccacgccattggctgagcccaaccggtcgacccgaccctgctggcccactggaaagtacattcccaacgggcggggcgctcaattctttgcaaacaacttaaaac

SEQ ID NO: 2320 - DNA, 485 bp, Zea mays
  Clone ID: MRT4577_102117C.1
aattcggcacgaggaccaaacgatgggcgaacagtgcttcctgggtctcaccatgcctggaggtaccgcgtccatcactggggacaccactgagctactaagggttctgggtctacgcctacagcccaacggtgcatgatcattacactccttgtacatgaccactcgactgcaacacctgacatgatcgagactaatccaccacaccacttcacaacgcggaggaccctccttggcacctccgaggagtgcagacccccaaccaacaagacctctggttgttctacgactgccagggagtgatgagcataacgctagaccggacaccagccaagtcgaccttttacgacacggacagcacgagactcgacaggaacacacggatgtaccggcaggctgcaaggccacacctacaaggctccggctacgctgactaggactgaactaccagcgacgtcatcgagcagaggtggacatctgagatc

SEQ ID NO: 2321 - DNA, 327 bp, Zea mays
  Clone ID: MRT4577_102118C.1
gtctctctctctccttcagctctcacggcgctcctcctctgactcccatggcgcgcgcctgcttccctcatggcactcgaccaacatctcccatggccgcctcgccctggtctaagctccctgctcttctctatttagagctccctccaacagcgctgtcgtacctgcgtccacgaatccaaagccatctttaactctgccgctctacgctacaacatcttcatgaccctgcgcgccgctccttggacgacctcacgctctctcctatttgccggccgtgcaagtgctccctgtgcgtagagcatccgttgagagctcaccaaaccg

SEQ ID NO: 2322 - DNA, 2013 bp, Zea mays
  Clone ID: MRT4577_102119C.1
cgccttctggagcaatccccaagacgggttagcagcaggagcgacgagcccaaaccttcctacccctcgtcgtcctcggctaatccgccgcgcctccgatactcccaaggcagcgcccgccagctgcaacaacagcatcagcaagcgaggagtagccaccagcccaccacgatctcatcagactcctctcaaatcctcccgcccactctccctttccctcccctcccccgccaccctgcaatggccggtctcctccacctccagtccacgcttctcccatcggcgtccgcgctccgccgccgtgcaggcgcgccggtgccctcctcgtcccgccgccgatgccgggttgaggccaagatccgggaaatcttcatgccagcgctcagctccaccatgaccgagggcaagatcgtctcctggaccgccgccgagggcgaccgcctcgccaagggcgaccccgtcgtcgtcgtcgagtccgacaaggccgacatggacgtcgagaccttccacgacggcttcctcgccgccgtcctcgtgcccgctggcgactcagcgcccgtcggctccgccatcgcgctgcttgccgagtcagaggaggacatcccagtcgcccagtcacaggctgcctccttctcctccacctcccccttaccgccgcctccgcaagaaactgctcaagaagcatccccttccccgccgccacctcctccctcagcgccggtggcagtctctgctcccacgccaccttcgccagcaacacaaggcgggggacgtgttggttgcttcaccctacgccaagaagctcgccaagagacctcggcgttgatcttttctctgtcacggggtcaggccccggtgggcgaattgtagccaaggatgtcgaggctgcccttgctgcgcccaagaaggccgcaccagtgactgctgcactggccggatgtgccatgtggggtcgacagtaccattcacgacaatgcaggcgtgctgtcagcaagaacatggtggagagtcttgctgtcccgaccttcagggttgggtacaccatcacgactgatgccctcgatcagctctacaaaaaaattaagtcgaagggggttacaatgacagcactgttggctaaggcgacagcaatggcgctggttcagcatcctgtggtgaactccagctgcagggatgggaagagcttcacatacagcaaaagtatcaacattgctgtggcagtggccatagatggtgggttgattacaccggttcttcaagatgctgataagcttgacatttattcattgtcaaggaaatggaaggagttggttgataaggcgcgagcaaagcagttgcagccccatgagtacaactctggcacgtttactctttcgaatcttggtatgtttggagttgataggtttgatgcaatactgccacctggaactggcagcaatcatggccgtcggtgcatcagaacccacagttgttggtacaaaagacggtagaatcgggatcaagagtcaaatgcaggtaaatgttaccgctgatcatcgggttatttatggagctgaccttgctgcttttctgcaaacacttgccaagataattgaggatcccaaggatcttacattttaaaagtccctgagtgattgtttttaaaagtcctgagtgattgtttttccttgagccaatcacaattgggtgcttctcacccatagtagatttgtagtttgtcttattgtgaattagttgatttaagctatcatcaatgtcagcatcaggtaactttacctgctgttggttaccttattatcatcggtttgtgtttcaataaaattctttctttttgtcttgcttaactaaaataggtgtatcctcctcgtgcccgggacgtttcatggatagtggattttgttgagctcctcaatgtaccgtatccttgtgggatacaaagaatgaaatgtaccttgtacccccctgtggttgatttctcatgcttgtcaacaggaaatatggttaaaaataaaa

SEQ ID NO: 2323 - DNA, 751 bp, Zea mays
  Clone ID: MRT4577_10211C.1
gccggccggttcgggagagtggaacaggttgccgccgcatcacctctgggaacagagccgagcagctgcactgtcgcgtcgagaaataatcggagcataagaaaactgcttcagccatggaggtcacggcgacgccaagaatccaagaagccaagaccgtgcccggcactgcgaaggcaaccgtggacgacgaggtgacgctccgtcggttcgagctgaccgacgtggacgccatgatggagtgggcgtcggaccctcaggtggcggccttctgccggtgggagccgtacgcgtcggcggagccgctgctggagttcctgcgcgacgccgtgctcccgcacccgtggtaccgcgccatctgcgtctccggcgcggtggtgggcgcggtgtccctggcgcccacgccggagcgctgccgctgggagctcggctacgtgctggcccgcgcgcactgggggaaaggcttggcgacggcggccgtgcggcgcgcgctgcgggacgcgttcgcggacctggagcccgagggcctgcggcgcgtggaggcgatggtggacgtgggcaacccggcgtcgcagcgcgtggcggagaaggccgggttccgccgcgagggcgtgctgcggcgccactactggcacaaggggcgcgccagggacatggtcatgtacagcttcctctcctccgaccccctccccgactgagaacgatccccatggcgggtggattccccatgcagttaacgttcgtttacctg

SEQ ID NO: 2324 - DNA, 755 bp, Zea mays
  Clone ID: MRT4577_102120C.1
atagatgtgggttgattacaccagtctttcaagatgctgataagcttgacatttattcattgtcaaggaaatggaaagagttagttgataaggcgcgagcaaagcagttgcagccccatgagtacaactctggcacgtttactctctcgaatcttggtatgtttggagttgataggtttgatgcaatactgccacctggaactggagcaatcatggccgtcggggcatcagaacccaccattgttggtacaaaagatggtagaattgggatcaagaatcaaatgcaggtaaatgttaccgccgatcatcgggttatttatggagctgaccttgctgcttttctgcaaacacttgccaagataattgaggatcccaaggatcttacattctgaatgtcacccaactgattgtttttccctgaggcaatcaaaaccgggtgcttcttacctatcagtagatgtgtagtttgtcttctgtttatgtgattaggtgttttaagctgtcaccaatgtcagcatcaggtaaattttccctgttggttaccttattatcatcggtttgtgtttcaataaaattcttttttttgtcttgcttaactaaaataggtgtatctaccatttttactggacgtttcatggatagtggattttgttgagctcctcaatgtaccgtatccttgtgggatacaaagaatgaaatgtaccttgtaccaccctgtggttgaaaaaaaaaaaaaaaaaaaggcccctagggcc

SEQ ID NO: 2325 - DNA, 1969 bp, Zea mays
  Clone ID: MRT4577_102121C.1
aagcagcaagcagcgatcttagcccaaaccttttcacccctcgtcgtcctcggctaatccgccgcgcctccgatactcccaaggcagcgctctcctcgtgctgcgaaagcagcagcagcaagcgagtagtcaccaccatctcaaatcttcccctccacgctccctttcccttcctctacctcccctaccccgccgccccgcaatggccggcctcctccacctccagtccacgcttctaccctcggcatccgctctccgccgccgcgcgggcgcgccggtgccctgttcgtcccgccgccgatgccgggtcgaggccaagatccgggagatcttcatgccggcgctcagctccaccatgaccgagggcaagattgtctcctggacggccgccgagggcgaccgcctctccaagggcgaccccgtcgtcgtcgtcgagtccgacaaggctgacatggacgtcgagaccttccacgacggcttcctcgccgccgtcctcgtgcccgcgggcgagtcagcgcccgtcggctccgccatcgcgctgctcgccgagtccgaggaggagatcccggtcgcgcagtcacaggcggcctccttctcctccagctccccctcgcctccgcctccgcaagaaactgctcaagaagcatccccttcgccgccgaggtgaggaggtggcagtctctgctcccgcgctaccttcgccagcaacacaaggcgggggacgtgttgttgcttcaccctacgccaagaagctcgccaaggacctcggcgttgatcttttctctgtcacggggtcaggccccggcgggcgaattgtagccaaggatgtcgaggctgcccttgctgcgcccaagaaggccgcaccagtgactgctgcacggtcggatgtgccattggggtcgacagtaccattcacgacaatgcagggtgaccccagcaaccacccggtggagagtcttgctgtcccgaccttcagggttgggtacaccatcacgactgatgccctcgatcagctctacaaaaaaattaagtcaaagggggttacaatgacagcactgttggctaaggcgacggcaatggctctggttcagcatcctgtggtgaactgcagctgcagggatggaaagagcttcacatacaacaaaagtataaacattgctgtggcagtggccatagatggtgggttgattacaccggttcttcaagatgctgataagcttgacatttattcattgtcaaggaaatggaaggagttggttgataaggcgcgagcaaagcagctgcagccccatgagtacaactctggcacctttactctttcgaatcttggtatgtttggagttgataggttcgatgcaatactgccacctggaactggcgcaatcatggccgtcggtgcatcagaaccgacagttgttggtacaaaagacggtagaatcgggatcaagagccaaatgcaggtaaatgttaccgctgatcatcgggttatttatggagctgaccttgccgcttttctgcaaacacttgctaagataattgaggatcccaaggatcttacattttaaaagttcctgagtgattgtttttccttgaaccaatcacaattgggtgcttctcacccatagtagatttgtagtatgtcttaatgtgaattagttgatttaagctatcatcaatgtcagcatcaggtaactttacctgctggttggttatcttaccatcattggtttgtttttcaataaattcttttcttttatctttcttcttcattcagataggtgggtaaggatgtgtgtattcatcattttacctgagttttcatggacatttgattttgtttagcttaacaatgtaccatgaccttgggtacaaggaatgaaatgcaccttgtacttgtaccaccctgtggttgatttcacatgcctgtcaaacagaaatacggttgatgcccttgcaagtgtgtcaaaaa

SEQ ID NO: 2326 - DNA, 361 bp, Zea mays
  Clone ID: MRT4577_102122C.1
tcgagcctcggatcttgcttccttcaggtacagacaacccttgtttttataggagttgtcagagaattgttttcgtgattaaacatgtgtgtttgtttagtggctggtattgttatcatatacccttgtttttagttctatacatattccttaagcatgagcaaattgggggcatttttagtgaagcaattactggtatgtacatgcaattactggtatgtacatggttaatcaaataatttgcatcatggatgttgttttagtgattaatcactcagaaccgatttcctgatgaactggatacactgtttagtgccagctattatttaagcacaagaagtagtcatatacccttgttttt

SEQ ID NO: 2327 - DNA, 794 bp, Zea mays
  Clone ID: MRT4577_102123C.1
gggtacctcgaggccggccgggaccggcctttccaggccgaaacccagcccgagaaaggaggaagaaaaactagaaaccctagcgatgctgcagatccgcctgagcaagattggctcgtcggactccggcggtgccgccgctagcacggcagctggcgccggcgcccccgccgcggttggggcggctgcggcgctcggtggcagcatcctggaatcggtcaccgtggcatgccccgaccacctcgtgatcgcggacctccccgtcgcgaagagcctcggcgccgtcacgacctccgctgccgccgccacgcgcgccatcggccgtcgctcccgtcgcccgctcggggagcgcgtccacatctgctcccgctgcgagttccccatcgccatctacggccgcctcgtacggacttgctaagcccttttctcttatgcggctatcaaacctcgaacatgttccgctcgtgttgctgctaaggaaattagaggtttagttaaccgcgtgtgttgttgagccatttaccaccacaaaccctactattcctctgttgatagcataagtgaaaatggagcagcggatgtgcatcatttttgttttatgcgcctgtgtttagactgttggacaaaaataccgatacttattgtagtagctcagcgggaatggctattgcctcagtgttctagcgattccattgtaaggagtgccaatgttatctcgttctgtttctggcagacagtcaagggaagctaagatctactggttagcgattgaaaaaaaaaaaaaaaaagcggcc

SEQ ID NO: 2328 - DNA, 285 bp, Zea mays
  unsure (1)..(285): unsure at all n locations
  Clone ID: MRT4577_102124C.1
cttcggtcaaaaatatccttgtacctgcatctcgacctcaccggcgtccggcggtggtatcgccatggttgcattgctgggccgncncatcngggtggcttcnncatctgccgcgttcatcgacctcttggcgttcgcgatacccctcatcctcgaccaagtccttcgagaaatccaccgtctccgcccacgacgtcatcatcttctacaagtcatactgtccgaactgcaaaagagcaaatgccctgtttaaggaccttgagtttaagaaagatccatattttt

SEQ ID NO: 2329 - DNA, 307 bp, Zea mays
  unsure (1)..(307): unsure at all n locations
  Clone ID: MRT4577_102125C.1
tttttttttttttttttttttttttttttttttttgggngaacttcctgagaaggatgatttcattcaacttaccattggttccgattttcattagccgaaacttaaaaaaaaaaaaacagatcggaatttacaaaacttaagacacaagaacagggggcgaaacttaaaaccagagggtgttcttgaccagggaacccttgttgaaacttcacaacgggattttctggtcccccccggggggggggtttgttttgaccgggttggggcttaaaaaggttgtcaaggacttgtacccccccgggttg

SEQ ID NO: 2330 - DNA, 429 bp, Zea mays
  Clone ID: MRT4577_102126C.1
atggcgacttctgctgccatgtttgtcgttccctcatcgtcgacaccgcccccatcatcaggggtagccatcaccgctacccttgaccccaagagcgatgtacaggagagggtggttccttcgcgacagacgacggcagtcgtccacctgtcaaacacatgcactagtgtcgggttggagataaagtttcacactgtgtgtcaatgtagtagggctcgattgccacctagcaggagcgagaacgttgatggcataaacatgaagcttatcgaacgtttttcagaacaacaaatggtctattatagctttgattctgtagtggatgatcctaacaatttctaccccttagagttcttaaattcttcgatactaaatggcttgccaccccacatcctgaagcttatggttaattgtccaggatattgctga

SEQ ID NO: 2331 - DNA, 696 bp, Zea mays
  unsure (1)..(696): unsure at all n locations
  Clone ID: MRT4577_102127C.1
gtaccctccgggtctgccgggcagtccggcatgacccatcccgtaacaggggcagacccgtcccggggcaagtcatgagccctttgtcttgatagtcttcgctctgatccccgtaagccaccactaaagacaaaaggtactcccgtgcctagactctgtcacaaggggatggtcatcagtctctgcaattcctcaatgctccctcacaatgggtgggtgcacctttgcttggtgctgagggccttcgcgatgacctagcccccgattgtcctcggctggacatgtctctcgttgagggccccattcgaatcatgtatgtgtgattaagtttctttattgttaagattgattgaggtatggtttagtcctcgtcccaacactccccacatttgatgtggggtgtattgtgtggatggataaggaagtggataagcgtgtggatgagcatgtggataggtgggtttgtaagtggggtggggcacccacgatatatgtgggtgtgcttctaaataattatatatgtttaccttgctatttgntatgcttttgtttatttatttacaattattaatcacccaatggatgcgcgacacccaacgggtgcccagtgagtgcagggtgaagttgtaaaaatctacaattagttgttatagatgcgggtgtggcttgatgtaccaaatataacagggggggggg

SEQ ID NO: 2332 - DNA, 868 bp, Zea mays
  Clone ID: MRT4577_102128C.1
cattgggtacctcgaggccggccggggctctcctcctttcctccccaaaagacacaagagggggaagagagagagaggagcggcagagagaagagggggaggcagtccagtgtccacgcaggtacgctccacagaagagagatggcgatgcggatggcggcggcggcagtggcgctggtggcggtgatgggcgtgctggcgccccgagcggcggcgcagacgccgaactgcgcggagaagctgatcccgtgctcgccgtacatgaacacgacggggacgccgccggatacctgctgcggcccgctcaaggacgccgtccagaacgacctcaagtgcctctgcgacctctacgcctcgccggagatcttcaaggccttcaacatcagcctcgaccaggccctcggcctctccaagcgttgcggcctcagcgacaccaccgccgcctgcaagggcctttctcctacgcagtctcctccaggttcgccgccatcaggcggcagcagcaacgccgcccgtcgcgctctgccggccagtttcgcgggactggtgacgagcttgttcctagctctgtggtctgtattattggcgtaaattaaaagctccgcatgctgcaacgggcggcaatgcttgttgcttgtcttatcccacagtagatgatttcacttgcacatacgatacgatcaacatttgttttgctgtgctgtgtgtctgatgagatcagaatttctcattggttccttcgtggtgttcgtgttagactccgcacaattaaatggaaggtttctggctagttgctaccaaaaaaaaaaaaaaaaaacccgcggccatgtgtattgtgtatgtcagtatatgtgcatgcttcatggtt

SEQ ID NO: 2333 - DNA, 377 bp, Zea mays
  Clone ID: MRT4577_102129C.1
tgctccaagcgttgcggcctcagcgacaccaccgccgcctgcaagggcctttctcctacgcagtctcctccaggttcgccgccatcaggcggcagcagcaacgccgcccatcgcgctctgccggccagtttcgcgggactggtgacgagcttgttcctagctctgtggtctgtaatggcgtaaataaaagttccgcaatgcttgtcttaccccacagtagatggtttgcacatacgatacgatacaattcgacatttgttttgctgtgtattggtagagtgcggtgtgtctgagatcagaatttctcattggtttcttcgcggtgttcgtgttagactctgcacaattaaatggaaggtttctggctagttgctacc

SEQ ID NO: 2334 - DNA, 1441 bp, Zea mays
  Clone ID: MRT4577_10212C.1
tcaatatacactacagttgaggtgcaggaaggaatgaagatagacaagggatatatttctccatacttcatcacaaatcaagacaaatcaattgttgaattcgaaaatactagagtgcttttaactgatcagcgtgtgaatgatgttcaagagatacttcccttgctggagaagacaacacagttgagtgtccctttattaattattgccgaggatgtgtcgcatgaggtatattcaacactggttcttaacaaactgaatggattgctaaatgttgcggttgttaaatgtcctggtttgggagatgaaaagaaggccattctccaagacattgctattatgacaggtgcagatttctttgctagtgaccttggctggggtcttcatggcattacttctgatcagcttggtatggctcagaagatcacaataactagtgaatccacaactatcatagcacatccttcaatgagaccagagattgaggccagaatcatgcaaccctcgaaggcggtcttatattaaaatggatgtgggcttgatgtgtcatgtgtgcactgcatagattttcaagatagagaagtgatttattctcacggttggggcagccactgaagctgaactcgaggataggaaactgagagtagaggatgcaaagaacgcaacttttgcagccatcagtgaaggcataactcctggtggtggggtgacatatgttcatttatcaaagcatattcccagcatcatggaccttgtggacgacacagaggagaaaatgggtgtaaatatagttgggaaggcacttcttgtccctgctatgacgatagctcgcaatgccggggcagacggtccagctgtcgtggagaagcttctcgccagcgagtggcgggttggttacaatgcgatgactgacgagtttgaagaccttgtcgctgctggtgtggtggacccgtgcagggtcgcgagatgcgtgctccagaactctgcttctatcgcagggctgattcttatgactcaggctatgatgtttgacaagatcaagaagaagaagtctcccatccccgagattcctggtattccaccgcttcagataagccaaaaagctaaggcttgagctgttggatgctgccctggtgttgttggctggatgagttgtgttgacctaggaagcagcagaatgcccagtgagctgcccaaaccaggtagaacagtgagcacttggaatgcccatgttacactcgttatataatttggtggtcggtgcagtattacttgtcatgtctgcataaatttgcattggcgggtgagtcggcaaccaatttatgtctgacttgggaacgtaaacgaacgaatggttgatttgttgctacatagagggccccctttgggcatcaaaaaaaaaaaaaaaaaaataaaaaataaattaaaaaaaaagggcggc

SEQ ID NO: 2335 - DNA, 984 bp, Zea mays
  Clone ID: MRT4577_102130C.1
actcctatgggcgattgggaccctcgaggccggcacccacgcgtcgtgagactgttttacaaaaggcactaggcaccacctttcgtggcttcctctgctctcctccacaaaggcagggaagcagcaacactgtagcagggaggagagggtaggcagtctgtccactgtccacgctgcagaagagagagatgggggtgcgggcggcggcggcagcagtggcgctggtggcggtgatgggcatgctggcgccccgagcggcggcgcagacgccgaactgcgcggcgaagctggtcccgtgctcgtcgtacatgaacacgacggggacgccgccggacacctgctgcggcccgctcaaggacgccgtcaagaacgacctcaagtgcctctgcgatctctacgccacgccggagatcttcaaggccttcaacatcagcctcgacgaggccctcggcctctccaagcgttgcggcctcagcgacaccaccgccgcctgcaagggcctttcacctacccaatctcctccaggttcaccatcaggtggtggcagtggcagcaactccggtcatcacactctgtcggtcggtttctcaggattcatgagcttcttgtcgctagccttgtggtctgtattagcataaagtttaggatgctgcagtggacattgcctgtcttatcccacaagatgatttgcacctacgacacaatcaacatttgtcttgctgtgtattgatatggccagccagtagactgatgtctctgaaccatgtgcttgcattagactgcacaattggtccttcgcccaattgttccaaagagtgcttccatgaacttagaccgaagagtgtctccaaggtcagctgtgggaaggttcttaagtccttcgcccaattgttccaaacctctgcaagattattggtaatgtgatcacattttatctcctctgaaaaaaaaaaaaaagtccatttcaaaaaaaaaaaaaaaaaa

SEQ ID NO: 2336 - DNA, 116 bp, Zea mays
  unsure (1)..(116): unsure at all n locations
  Clone ID: MRT4577_102131C.1
tcctatacgtatnacactacatgagaggaagaggattctttcaggcggaatggacttattttcaccccaacattttccggacatccaatattcttgatgctgaccatgcaaaaacc

SEQ ID NO: 2337 - DNA, 231 bp, Zea mays
  Clone ID: MRT4577_102132C.1
ccaactcattaggtctaccattgacagctactgtgctctgcgctataggcactggagccaagatcctctacattattatgtgtcgacggaatcaagggctccttaacagagccgtgattctgacagggatgatgaccaagaagaatgggaagcctaaccttaggaaaacagtgatgcctgctgctcctacgaggtagcccaggccatggtgctgaacggatgacgtctaca

SEQ ID NO: 2338 - DNA, 139 bp, Zea mays
  Clone ID: MRT4577_102133C.1
ctcttcaatcacctatttaactgcattaattactactctcgcacctgatcacatctgctcagtcttacacacatatcctctccactttcattataccatttatactatagaaaaacaccatcatactaacctcctccat

SEQ ID NO: 2339 - DNA, 156 bp, Zea mays
  Clone ID: MRT4577_102134C.1
agaccatggaacacgcgtccgccttcctttcgcgcgcgctcaccactccgttcccggcacgcgaggtcctaccgcggcgccgcccggctcgcgtgttcttcgacgtctctgcgcctgagcacaagccgtcgggcgcggaggcgttcaccaccaact

SEQ ID NO: 2340 - DNA, 920 bp, Zea mays
  Clone ID: MRT4577_102135C.1
gcgaccgactctcggcaacggatatctcggctctcgcatcgatgaagaacgtagcaaaatgcgatacctggtgtgaattgcagaatcccgcgaaccatcgagtttttgaacgcaagttgcgcccgaagccttctggcggagggcacgtctgcctgggcgtcacgccatcccaaagagcacgcagcgcagcactgaagcaccacttcctgcactcactgtgctagctgctcaaaccgtagtagtaacagtccatcaccaccaatggctcccaaggttgcgctcttccttgccctgagcctcctgtttgctgccaccgcgcatggctgcgaacccaactgttctggcccagtcgtcccaacgccgccagtcgtgccgactccgtcgtcgcacagccacgggcgctgcccgatcgacgcgctcaagctcaaggtgtgcgccaacgtgctaggcctcgtcaaggtcggcctaccccagtacgagcaatgctgcccgttgctggagggtctggtggacctcgacgccgcattgtgcctctgcaccgccatcaaggccaacgtcctcggcatccacctcaacgtgccccttagcctcaacttcatcctcaacaactgcggcaggatttgcccagaggacttcacttgccccaactaagcttgggatcccttgtgtgctccatctcgcgattctatttacgagcatgtcggcctcttgcaatattagcgaataagtttgtcgtttcaaattctttcgctgtaccatcgacgattgtatttgtgtggagttatatttgaaattttaatgatcaataagaaatattcgtgttttttattttgagaaaaaaaggagatatgaatcattcagttttagtgaactcaaatgcattataaacaaaaaaaaaaaaaaaaaaggcccctagggcc

SEQ ID NO: 2341 - DNA, 492 bp, Zea mays
  Clone ID: MRT4577_102136C.1
ccgggccgggacattaaagtagaagcacatttgcatgttgttctttcctcaaatcatgacaactttgggacgtggctcgatggggaacatattccttatagtttctcttgtgtttgtcatggttattcaatcaacttcatttcccacaagagatgatgtgcgttgtgatgtgctacaacaaagatgtgcacctaacaattgcaatatccaactatgtcgagtgtggtatggagaaagacaattcaaatctgctttttgcaagaggactcctccttttcctgaccagtgttgctgccaaatgcgtggccaaccaccaaactcctatgtccaagtcccttgaagcttaggggttctacttgaataataatatttcaccattactttttttcttattttagtgatatcaataaataaagatgcatttggctaacttgctcttgtatgtgatgtgatccatttacatgaaggaaatgcaacaaagatgttctaacc

SEQ ID NO: 2342 - DNA, 376 bp, Zea mays
  Clone ID: MRT4577_102137C.1
gacagcgtccacggcacggcgcggacgtcacagacacggtccaacagatcgagcggctactgttcgtggacctcgtcccggacaccatccgcgagctcgccgacgccgaccggcccctgccccgccgcaagctggtgttctgatcacgcgcgcgggcattggcgggacttgcttgcagcagagcggagggaaaataataattattgtgttttaacttaaatgatttgcgtttcgtctcttgtactgcgtcgagcgtcgtcttcaattagcgagtgatgtaaaattgtgactgctaatctggactgttaattactggtgattgcagcagccatgtgtaacgtcgatgacgatataatcatggagcagttttacgcgc

SEQ ID NO: 2343 - DNA, 354 bp, Zea mays
  unsure (1)..(354): unsure at all n locations
  Clone ID: MRT4577_102138C.1
tatttacaagcgaagccannnctaanatttcttttgatttggtatcggatcttgcaaaggatgatatcgatggatgcagtatcgcgtcctagtgctgtggcctttacaggttcttctttctttcgggatgatacgaggagagagataatatgcagaagacagagtttttgaaggcattatcagatatgtggaaggattttgattcccgagttcttcgatataaagttcttcctcctctttgtgctgagttacgcaacatggttatgcagccaatgaattttgcctatggttctaacaatagcagaattctaagataaaggggattttgaacttgcaacactgcctgcgcttgtt

SEQ ID NO: 2344 - DNA, 292 bp, Zea mays
  Clone ID: MRT4577_102139C.1
ccaatacctaagcgctccatgataaactacgctcttgggcacgaaagagaggacaacaacgcctgatgtgactgcgacctcctcgacgagctgatagtgactgcctcttacattccaccggagtcggatccgaaattgtaacagggaagttgcccgggcgcacgatgtgacacagttcgtgggatcaaccgccgaggggctagaacacacgctgatactgtgccaaccaggcgccagagggacctgcaccataacgaggccagattaaaccagcccagacgctgggcctccc

SEQ ID NO: 2345 - DNA, 238 bp, Zea mays
  Clone ID: MRT4577_10213C.1
aaggggaggggcaacatttaaatgcctttttttttttttgggaaaccaaaaattaaaatgtggccccggtgccctggcaagggcaacagggaggggcttcgctacaatgcttatgtccaatggtttttggcccccctttttatgatcgaccccggggttttatgcttatgcatacccccttaactttccaaaaatcgccacatagttgcagttttagcagtacaaaattctgtttggg

SEQ ID NO: 2346 - DNA, 582 bp, Zea mays
  Clone ID: MRT4577_102140C.1
aaggaattaaaaaatatatttaatgataaaataaaataagtatttacagaagaattaaatattacggtcggtttaaagtgtgtaaaagtaaaaaaacatcatgtactttgggaccacattggtgagacaaaatggtagacaacacagggacactacccgcatcctcctgactccgtctgatgatacatgcgtacgtataggtacgtactcatgtggagtgaaggccagatcgccattcaattttccctgagccactgattcctgccgctcatcaactgcaaatattcctgctgtgcatgccccatccaatgcatcacccatcaatagtacactctgcatgcaatgcaatgcaagctagtggtacacacacaggcacagggatgtagggccgtgtagcgaattgatgaaaatgctcgataggagagttgtccatcgcatgcacggctcacagcaccactgcagttgaacccccagtcctgtaaggcccattaaacatttcaaaacttcacagcccatataaacatgtcaactattcacaaactctgaaagctacagccgagtttggacagaaatatacacaaa

SEQ ID NO: 2347 - DNA, 366 bp, Zea mays
  Clone ID: MRT4577_102141C.1
ggtcgcctctgttcttcgcgttcgggttgtcaatgtgtacatcctcaaacctttgtaagaggtttaccttttctcatgctcccgtgcttagggttttgaattgggcatcgaggccatcttcatactggtgacagaagaaatgttttgtgtatatttctgtccaaactcggctgtagctttcagagtttgtgaatagttgacatgtttatatgggctgtgaagttttgaaatgtttaatgggccttacaggtgtgtaccttttctcatgtactccgcgcaaaattgtacaacaatgtttaatgggccttataggtggacctttctcatgtactccacgctccaccaacaatgtttggccttatattt

SEQ ID NO: 2348 - DNA, 3726 bp, Zea mays
  Clone ID: MRT4577_102142C.1
aaatgggactacttgagattaaacatggactgctacaagttgcagagacgttagattttcttcataacaatgctcatcttgcccatcgagctatatcacctgagacggtctttataacttctaacggatcttggaagcttggtgggtttggttttgctctttcagttgatcaagccacaggtggtttgacttcatcacagctattccattattcggactatgatgtcgaggatacagctttacctcttcaaccgtcgttgaactatactgcaccagaattggttcgaagtggagattctaaagttggctctgcttgtgatatgtttagctttggatgtctagcttaccatctggttgctcgtagaccacttctggactgccataacaatgttaaaatgtacatgaatgccttgacatatttaacaagtgaagccttttctaatattccttctgatttggtatcggatttgcaaaggatgatatcgatggatgcagtatcgcgtcctagtgctgtggcctttacaggttcttctttcttccgggatgatacgaggttgcgcgctcttcgtttccttgaccatttgcttgtatgtttttgttattcccctttagtttattttcgttaataagtttaaaggctgctatctggtgtgcttctttgctgtctgaaaatcacctttgactagattgtttgagttatacctgtcaacatagcaggaaagaatcttgcctgcttgactagagaatgaaacggcacaatttggtacctaaaatggtcctgatttttaagataacattcctttcaggagagagataatatgcagaagacagagtttttgaaggcattatcagatatgtggaaggattttgattcccgagttcttcgatataaagtatgttcagtactgcaatccatccttgtcttcttccgaccaatgctacccccatgtgtccactctctgtgagcatcattttgttatgtaccacttcattgaagctcctgaaacctggatatgttaaattatacatctacccagatggccagattccataatgtttggttgctatcagcataccctgtatggagtattggaaataaataaaataatatataaacctcaatttctatatcttaaacttgtcacaatatgaatcaattctctagttgacacattccgacattgtgtttctgtttgtgcttttcaaactgttttgtccaggaaaaagaacagccttatatttatttgatccattggttatttcaaagctgactcacactttgcaaccaggttcttcctcctctttgtgctgagttacgcaacatggttatgcagccaatgattttgcctatggttctaacaatagcagaatctcaggataaaggggattttgaacttgcaacactgcctgcgcttgttccagtgtttacttcagcatcaggtgaaactctacttttgcttgtgaagcatgcagatctcatcattaacaaggccacacaggaacatttgatatcacatattcttccaatgctggttcgggcttatgatgacaatgatccccggttacaggaagaagttctgcgtcgaacagtatcactgtctcgtcaacttgacaccaagctagtcaaacaggctgtgcttcctcgtgtacatggattagctctaaagaccacagttgccgcggtgcgcgtgaatgcgttgcgatgtttaggagatcttgtgccatccctggacaaagaaggtatattgggtatcttggagaccgttcggcgttgcacagctgttgaccatactgcgccaactcttatgtgcacacttggtgttgctaatgcaatctataaacaatgtggtgtggagtttgctgcggaatatgtgattcctctcatcttcccattactcacagcacatcaattgaatgtacaacaatttgccaagtatatgctatttgtcaaggacattacaagcaagatcgaagagaagcgtggtgtgactgttacagataatgggaacacagaggtaaaagcatcaccttcattggcaaacgggatccattctgaacctatgccaggacaaataccagctgcaaagagcagccctgcatgggatgaagactggggtcctactaagaaaaccggtgttccatctctctcagttgattctagtgcacaaacaaagcaaccctcagtacacccttttgacttcagtactcaaacaaagcaatccacaccactcccctttgatttgagcacccaagtaaagcagccatcattagtttctcatgctacagcagctacgatcccacctgcgcaaccacaaccagtacaatctcttgtgcccagttcaggacctcaatcttctggctcatgtgcccctgttgacattgagtggcctcctcgaagaagctcgtcatccgacttcagtgcatccttgtctattagcaaggagaatgaatctggaaggctatctagcgatggacttgacgatattgatccttttgctgattggcccccaaaacctagcaatgttactagcattacagcaaccgagcatcgtccaagcataaatcaaaatatttctggatttagctcaggtaacatagggtttggtggcagcgggaattctatagggcaagcgaaaagcaaccaaatgagctggtcaaacacgtctaatctgatgggcatgaactcaactggcagctatttgaatcagggcagtgcagctctaggttttggaaatccaattggaggattgagcactggcctctccaatccaagcagttccagtacaggcctgagcatgatgcaaccaaaatctgattttggatcactgtccatgtcggccaataatgccgcaaatggcccacccagacttgcccctcctccatctacttcagttggaagagggcgtggtagaaatcaaggacaatcagcactctcccgagcatcaaggcctcctcattcgaactcgtcatcaggacaacaacctatcctggatttactctagtaagagatggtcgcctctgttcttcgcgttcggattgtcaatgtgtacatcctcaaacctttgtaaggtgagcatcatactgttcttttggacatgcatgtggcgaaagcagttctttttgttcattttgaagctgggtggccttggtttatagtctgaagggattctacttcggggatcttgcagaggtttaccttttctcatgctcccgtgcttagggttttgaattgggcatcgaggccatcttcatactggtgacagaagaaatgttttgtgtatatttctgtccaaactcggctgtagcttttagagttggtgaatagttgacatgtttatatgggctgtgaagttttgaaatgtttacattgcattgtacaacagtgtttaatgggccttacaggtgtgtaccttttctcatgtactccgcgcaaaattgtacaacaatgtttaatgggccttataggtggacctttctcatgtactccacgctcccccaacaatgtttggccttatatatatatttggtgacttcggtgttctagacaaaagccagatgatatactcgctatcattggttggattcttgtgtcccaaatatctgacgttgaccttgtacaggactgggggttcaactgcagtggtgctgtgagccgtacatgcgatggaccactctcctatcgagcattttcaacaattcgctacacggtcctacatccctgggcct

SEQ ID NO: 2349 - DNA, 369 bp, Zea mays
  Clone ID: MRT4577_102143C.1
cttctgttcttcaaaaggttatatttactttggtttgtatttctaacaatacacagtctaacgggggggccacagaaaggaacgggatattcattttgttgtaaaaccaagaaaccaccctacccccccaaagaatgcccaaaaaaaaacaccccctccaaacctcaaaccctttctgggccgggggctcccccaaaagggggggctccttaaccctcaccccgtgggcaaggggggcaccccccatttttttaaaaaatgggggtaattctcgcgctataaacctgggggaccacaaacccccttaatttgcccgggaaacaggggctggtcaacctttcggggccaaaaccattgttgggaaggggg

SEQ ID NO: 2350 - DNA, 2703 bp, Zea mays
  Clone ID: MRT4577_102144C.1
gtttgagtttgacttcatcacaactatttcattattcggactatgatgtcgaggatacagctttacctcttcaaccatcgttgaactatactgcaccagaattggtccaaagtagagattctaaagttggctctgcttgtgatatgtttagctttggatgtttggcttacaatctggttgctcgtagaccacttctggactgccataacaatgttaaaatgtacatgaatgccttgacatatttaacaagtgaagccttttctaatattccttctgatttggtattggatttgcaaaggatgctatcgatggatgcactatcacgtcctagtgctatggcctttacaggttcttctttcttccgggatgatacgaggttgcgcgctcttcgtttccttgaccatttgcttgagagagataatatgcagaagacagagtttttgaaggcattatcagatatgtggaaggattttgattcccgagttcttcgatataaagtgcttcctcctctttgtgctgagttacgcaacatggttatgcagccaatgattttgcctatggttctaactatagcagaatctcaggataaaggggattttgaactcgcaacactgcctgcgcttgttccagtgtttgcttcagcgtcaggtgaaactctacttttgcttgtgaagcatgcagatctcatcattaacaaggccactcaggaacatttgatatcacatgttcttccaatgctggtccgggcttatgatgacaatgatccccggttacaggaagaagttctgcgtcgaacagtaccactgtctcgtcaacttgacaccaagctagtcaataaagctgtgcttcctcgtgtacatggattagctctaaagacaacagttgctgcggtgcgtgtgaatgcgttgcgctgtttaggagatcttgtgccatccttggacaaagaaggaataatgggtatcttggagactgttcggcgttgcacagctgttgaccatactgcgccaactcttatgtgcacacttggtgttgctaatgcaatctataaacaatgcggtgttgagtttgctgcggaatatgtgattcctctcatcttcccattgctcacagcacatcaactgaatgtacaacaatttgccaagtatatgctatttgtcaaggacattacaagcaagattgaagagaagcgtggtgtgactgttacagataatgggaacacagaggtaaaatcatcaccttcattggcaaacgggatccattctgaacctatgtcaggacaaataccagttgcaaagagcagccctgcatgggatgaagactggggtcctactaagaaatccggtgttccatctctttcagttgattctagtgcacaaacaaagcaaccctcagtagacccttttgacttcggtactcaaacaaagcaatccacaacactcccctttgatttgagcacccaggcaaagcagccaccatcagtttctcatgttacagcagctacaatcccacctgcgcaaccacaaccatcactacaatctcttgcggctagttcaggacctaaaatttctggctcatgtgtccctgtcgacattgagtggcctcctcgaagaagctcgtcatccaacttcaatgcacccttgtctattagcaaggataatggttctggaaggctgtctagcgatggagttgatgatattgatccttttgctgattggcccccaatacctagcaatgttaatagcatttcagcaaccgagcattggccaagcataaatcaaaatatttcgggatttagctcaggcaacatagtttttggtggcagcgggaattctgtagggcaaacgaaaagcaaccaaatgagctggtcaaacacgtctaatctaatgggcacaaactcaactggcagctatttgaatcagggcagtgcagctctaggtttcggaaatccaaatggaggattgagcacaggtctctccaatccaagtagttccagtacaggcctgagcatgatgctaccaaaatctgattctggatcattgtcgacgtcggtcaacaatgccgcacatgggctactaagacttgcccctcctccatccacatcggttggaagagggcgcggtagaaatcaaggacagtccgcactctcccgagcatcaaggcctcatgccaactcggcatcaggacaacaacctatcctggatttactctagtaagagatggtcgcctctgttcttcgcgttcggattgtcaatgtgtacatcctcaaacctttgtaaggtgagcatcatactgttcttttggacatgcatgtggcgaaagcagttctttttgttcattttgaagctgggtggccttggtttatagtctgaagggattctacttcggggatcttgcagaggtttaccttttctcatgctcccgtgcttagggttttgaattgggcatcgaggccatcttcatactggtgacagaagaaatgttttgtgtatatttctgtccaaactcggctgtagctttcagagtttgtgaatagttgacatgtttatatgggctgtgaagttttgaaatgtttaatgggccttacaggtgtgtaccttttctcatgtactccgcgcaaaattgtacaacaatgtttaatgggccttataggtggacctttctcatgtactccacgctccaccaacaatgtttggccttatatat

SEQ ID NO: 2351 - DNA, 3331 bp, Zea mays
  Clone ID: MRT4577_102145C.1
gccggccggtacccgaagtcccgagagaagagaggaagcaaagcaacactgagcggaggcgagctgtgcgcctcgctcccctcccctgctctcgtcagatccaaaccccacgcgggaacacaaaccctagcacccgttcgcgccaccgcagaggctaagaggcgatgaggggcgttagggcggatggcggcggtggcgcgttctcttcttccaccgcagagaactcgtgcttcgatgcggcgcagtactctttctttggcaaggcgcccatggagggggcggaactcggtgggttgttggagggaggtgtcgacggcgatggtggtggattcggtggacatgatgacgctggttaccagttctcttctacaggcgaagagattgattgtatgagtaatttgtcggaaattgatgatcttgcaagcacttttgcaatgttgaaccgaaatattagcggaacaaggaaccctggcattattggtgatagacgatcaatttcgagagaaagttctttgactgctgattgggttcaagatgctgacttctccaattgggtagatcaggatatactagatggcgatgaatccctggacagcaaacaatggtgctcgcagttgcaatcttcgcctcactttggagagtctaaaccactgtctcgtacatcttcgtaccccaatcaaccactacagcaccgctcaagcgaacctattcttctacacagatctacctcgtttacatcctatcctccatcaggggaaagtcctggattgccttatcctgctcaaggtcttacacggcactcaagcattccatcaccaggtgctggtcacctcatgggttctccaagttcatcgctttctggttctccatatcatatgcctggtctatctcatggactaccttatggacgaaacatgtcttacaccactggagatctttcaacgaacaatgtcctacaaaatgagtggtcaaaccaagctggcccacttgtttttgatcatcttaaccgacggcccagttttttgcagccacacttatctctttcaagtagttcaatgtcttcattgcttttttctcagcagcaccagagattagcaccaggccagccgcctcttcagaattacataaacatgcagcctcacctgttccatcaccatcaacctcctgatgttccttcaccaagagacaaacgatcaaggtcaggaagaggaggaaagcacaacatacgcttttctcaacagccttctgatgctggtagccagcatagtgagagttcagggataaagttcagatccaagtacatgtcatctgaagagatcgaaagtatcttaaaaatgcagcactctgcaaatcacagcaatgatccttactttgatgactactaccaccaagcttgcaaagccaaaagatctgtaacttttcagaagtccaatttctgtcctatgtcaataaaggacttcccctcaaaatccaggtctggtgttgatcagcattcatatctacaggttgacgctaatggaggagtttcattctctgccatacgtagacctcgtcctcttcttgaagctgatttgcctggatctggtgatggtttttatgatcataagtcatccaagaggtcactggagaaagaaccaatgcttgcagccagaataaccgttgaagattctcttcgtcttcttctggttgttgatgatattgatcggtttttacagtctagccagccacaggacagcagtttccaactgaagcgaaggcgagaggtcctgcttgaaggcttagctacatcactccagcttgttgacccttttggccccaacaaacatggccattcgggtgggttggcccctaaggatgacctaatttttcttcgtattatttctctgcccaaaggacgtaagcttttggcacgctatcttcgacttcttttctctggaagtgagctgacccgaatagtctgcatggctgttttccgacaccttaggagcttgtttggtggcttaccgtcagactatagtgctgcagaaacaaccatcgttcttgccaaggctgtttcctcttgtgtgcgccatatggaactcagtgctctcagtgcctgtctcgcagctgttgtctgttcttcgcagcagccacctctccggccactcggtagtgcctctggtgatggggcctctctgataattaaatctgtgctggatagagcgaccgagctactggcggatccccattccgcagccaactacagcagatcagcacgttcgctttggcatgcgtcatttgatgctttctttggactgctgacgaagtactgtgacagcaagtatgaaagtatcgtgcagaggtttgccatgcagggatccaactccatgggaggacctgaaaccaccaaagcagtcagcagggagatgcccgttgagctgttacgtgcgagtcttcctcatactaatgagcagcatcgtcagacactgctagattttgctcggaaatctacgcatctgcctggtttcagccctactgctaaccgtggacttgtcaattctgaatcagttccaggttaacgccactgaagaggcctgatggtcgtctgttttgatttatatatggcacgtaaggtgtgagcttggagaagttccattggctcagcgaagctggcattcaggatatgactgtgtaggatgttatttatttatatatagaaaaccaactttatgtatgtatcctgctgtaactgtgtagtgctgaacagaacatctgttggatttggaggtaagctagttgacttatttcctcccaaagagaacaattgtgagtgcatagcaacagcttaaggcttaagcttgtttgggaacaatggaattggagaagattgagcgctggttcggaggaaatctcattctattcaattttaaataacaagagatttttttccctcgtggactccccttcaaatcccatgtcaccaaaccaactcataagggctaaaatcctcttgaatatcaaggggattttagacaattcaggagtcgttcggttgtctaggaacggtgacctgaacggacgcgtgggcggatcacttctttaatttatataagttttgatcaacgagaaaaaatctggagctattcccggagaaacgaacatggcctcaatcctcttcaatccatttgctcccaaacaagccaacgggtgtttggtgcaggagctatgtgctcgaacaatttaatcaacaggttcttctgctgcagttacggcattttctgtgctcattcatctatgctatctgttacacggacaagaaagacggcggcggtcccagcacgcacgttgaggg

SEQ ID NO: 2352 - DNA, 883 bp, Zea mays
  unsure (1)..(883): unsure at all n locations
  Clone ID: MRT4577_102146C.1
tgcagtcctggtgccggactcccgggtcgacccacgcgtccgcaaacttctggctcatgtgcccctgttgacattgagtggcctcctcgaagaagctcgtcatccgacttcaatgcatccttgtctattagcaaggagaatgaatctggaaggctatctagcgacggacttgacgatattgatccttttgctgattggcccccaaaacctagcaatgttactagcattacagcaaccgagcatcgtccaagcataaatcaaaatatttctggatttagctcaggtaacatagggtttggtggcaacgggaattctatagggcaagcgaaaagcaaccaaatgagctggtcaaacacgtctaatctgatgggcatgaactcaactggcagctatttgaatcagggcagtgcagctctaggttttggaaatccagttggaggattgagcacaggtctctccaatccaagtagttccagtacaggcctgagcatgatgcaaccaaaatctgattctggatcactgtcgactgtcggtcaacaatgctgcaaatgggctgctaagacttgcccctcctccatccacatcggttggaagagggcgcggtagaaatcaaggacagtccgcactctcccgagcatcaaggcctcatgccaactcggtatcaggacaacaacctatcctggatttactctagtaagagatggtcgcatctgttcttcgcgttcggattgtcaatgtgtacatcctcaaacctttgtaaggactgggggttcaactgcagtggtgctgtgagccgtgcatgcgatggacaactctcctatcgagcattttcatcaattcgctacacggccctacatcnctgtgcctgtgtgtgtaccactag

SEQ ID NO: 2353 - DNA, 451 bp, Zea mays
  unsure (1)..(451): unsure at all n locations
  Clone ID: MRT4577_102147C.1
gaccgggncggagaatcccgggtcggcccacagccttccgacatctccttgcgctacacatggtcaatggccacaggcgcgtgtaccttggagacaccataccgttatgagagcacacaccggcgcggacacgagaattcggctctgcagatttaaagggccccgggggcgcacaccacacaccgcgcgatgcggggctcttttgggcgctggagactatatctggctgtacccagatcagggggggggggcccctaaacacaaaagataaatcttttccagggccccgccggcgtgtccggacattctaaaaacgtcgtgtgtcgccacatctcggctctggaaaaattaacacgatttccttttgggtgacacgcgcgatcacgctatatgtcgcgggttccccgtcccttatgagcggcttatccatgtgcaagagccgctcacatag

SEQ ID NO: 2354 - DNA, 4396 bp, Zea mays
  Clone ID: MRT4577_102148C.1
cttaatccacaaatgattgttattgacatgtcatttatgtagtagttttttcgcatagtgctttgtgatcaggatatttctcttgtgcccacgcgtccgcccacgcgtccgagcccgcccttggcagtgccatggttgcaaaattctcctcgcggtctcgcatggcacgagctgcagaaaaccgattaaaaaaaccaaaaaacacacccgtaaagtaattaaaccaaacacgcgctgccaccgaccgatcaggcgaccccgctccgaggaaatccaccaccgcggccggggcctcccagatctcgctggaggcagcggcagcggcggcggtggggggcgatggcgctcaacatgaagaccctgacgcaggcgctggcgaaggcgtcggctgtcatcgagaagacggtgtccacgacggtgcaggaggtgacgggcccgcgcccgctgcaggactacgagctgctggaccaggccgggtccggcgggccgggactcgcgtggcggatctacacggcgcgaccgcgggacggcgccccctcggcgccctaccccgtcgtctccgtctgggtgctcgacaagcgcgccctcgccgaggcacgggcgcgggcggggctgtcgaaggcggccgaggacgccttcctcgacctcgtccgcgccgacgcggcgcggctcgtgcgcatgcgccacccgggcgtgctccacgttgtgcaggcgcttgacgagaccaaggccgccatggccatggccactgagcccgtcttcgcctccgtagctaacgcgctcgggtgccttgacaacgtcggcaaggtgcccaaggagctcaagggcatggaaatgggactacttgagattaaacatggactgctacaagttgcagagacgttagattttcttcataacaatgctcatcttgcccatcgagctatatcgcctgagacggtctttataacttctaacggatcttggaagcttggtgggtttggttttgctctttcagttgatcaagccacaggtggtttgacttcatcacagctattccattattcggactatgatgtcgaggatacagctttacctcttcaaccgtcgttgaactatactgcaccagaattggttcgaagtggagattctaaagttggctctgcttgtgacatgtttagctttggatgtctagcttaccatctggttgctcgtagaccacttctggactgccataacaatgttaaaatgtacatgaatgccttgacatatttaacaagtgaagccttttctaatattccttctgatttggtatcggatttgcaaaggatgatatcgatggatgcagtatcgcgtcctagtgctgtggcctttacaggttcttctttcttccgggatgatacgaggttgcgcgctcttcgtttccttgaccatttgcttgagagagataatatgcagaagacagagtttttgaaggcattatcagatatgtggaaggattttgattcccgagttcttcgatataaagttcttcctcctctttgtgctgagttacgcaacatggttatgcagccaatgattttgcctatggttctaacaatagcagaatctcaggataaaggggattttgaacttgcaacactgcctgcgcttgttccagtgtttacttcagcatcaggtgaaactctacttttgcttgtgaagcatgcagatctcatcattaacaaggccacacaggaacatttgatatcacatattcttccaatgctggttcgggcttatgatgacaatgatccccggttacaggaagaagttctgcgtcgaacagtatcactgtctcgtcaacttgacaccaagctagtcaaacaggctgtgcttcctcgtgtacatggattagctctaaagacaacagttgctgcggtgcgcgtgaatgcgttgcgctgtttaggagatcttgtgccatccttggacaaagaaggaataatgggtatcttggagactgttcggcgttgcacagctgttgaccatactgcgccaactcttatgtgcacacttggtgttgctaatgcaatctataaacaatgcggtgttgagtttgctgcggaatatgtgattcctctcatcttcccattactcacagcacatcaactgaatgtacaacaatttgccaagtatatgctatttgtcaaggacattacaagcaagatcgaagagaagcgtggtgtgactgttacagataatgggaacacagaggtaaaagcatcaccttcattggcaaacgggatccattctgaacctatgccaggacaaataccagctgcaaagagcagccctgcatgggatgaagactggggtcctactaagaaaaccggtgttccatctctctcagttgattctagtgcacaaacaaagcaaccctcagtacacccttttgacttcagtactcaaacaaagcaatccacaccactcccctttgatttgagcacccaagcaaagcagccatcattagtttctcatgctacagcagctacaatcccacctgcgcaaccacaaccagtacaatctcttgtgcccagttcaggacctcaaacttctggctcatgtgcccctgttgacattgagtggcctcctcgaagaagctcgtcatccgacttcaatgcatccttgtctattagcaaggagaatgaatctggaaggctatctagcgatggacttgacgatattgatccttttgctgattggcccccaaaacctagcaatgttactagcattacagcaaccgagcatcgtccaagcataaatcaaaatatttctggatttagctcaggtaacatagtttttggtggcagcgggaattctatagggcaagcgaaaagcaaccaaatgagctggtcaaacacgtctaatctaatgggcacgaactcaactggcagctatttgaatcagggcagtgcagctctaggttttggaaatccaaatggaggattgagcacaggtctctccaatccaagtagttccagtacaggcctgagcatgatgcaaccaaaatctgattttggatcactgtcgactgtcggccaataatgccgcaaatggcccacccagacttgcccctcctccatctacttcagttggaagagggcgtggtagaaatcaaggacaatcagcactctcccgagcatcaaggcctcctcattcgaactcgtcatcaggacaacaacctatcctggatttactttagtaagagatgcttgcctctattcttggcgatgacgattgtcaatgtgtacatcttcaaacctttgtaaggtgagcatcatactgttcttttggacatgcatgtggtgaaagcatatatatattttttgttcatttcgaagctggctggccttggtttatagtctgaaggagttctacttcggggaatctggatcttgcagaggttaccttctctcatgcttagggttttgatttgggcattgaggctatcttcatattggtgacagaagaaatgtcgttgtgtatgtttctgtctaaaatcggctgtagcttgtagagttgatgaatatagttgacatgcttatctgggctgtgaagttttgaatgtttacataatgtttcatgtgccttatatgtggaccctgcccattttctccccgctccccaacatcatgtaattcattagttaaggctcgtgttgtgtatacttagtctgtcgagtttaaggcctatcggcaattctgcttctatacagttaaaccgttgctggtaggatcaccactgttatgttatgataccccacaactgtgtaaagtcgatcttcatgtttggtcttttccctttaccaaaagcagcactttatgattgtgtgccaggtggcgagcatcatctccgccgaccgcgtccccgacatggagaaatggaagctgatgaacctcctcctcctcggagcatctcgttgcccaccttttatgtcgacccctacggcgacttcttcgtccatgccggctccgggaacggtacctacgctaaagacaacctggacaacgacatcacatccttgtgcctgtgtgtgtaccactagcttgcattgcattgcatgcagagtgtactattgatgggtgatgcattggatggggcatgcacagcaggaatatttgcagttgatgagcggcaggaatcagtggctcagggaaaattgaatggcgatctggccttcactccacatgagtacgtacctatacgtacgcatgtatcatcagacggagtcaggaggatgcgggtagtgtccctgtgttgtctaccattttgtctcaccaatgtggtcccaaagtacatgatgtttttttacttttacacactttaaaccgaccgtaatatttaattcttctgtaaatacttattttattttatcatt

SEQ ID NO: 2355 - DNA, 389 bp, Zea mays
  unsure (1)..(389): unsure at all n locations
  Clone ID: MRT4577_102149C.1
agggggggatttgtgtattgaggtntttagataagttgttggatagtgtanaaatagtttagataaattgttgtaggttttagtaggggtagttaagaaatttggggggttagttagagggcaaaataaataggtgtatgagaaaaagagaggaataagagagtggannttatgagattatgagttagttggtttaaagggtntggtaggggttattagggtaaaaatgtgggtatnatgggtnggtggagttgggggnttagtgaattttagagtttttttntgttaggtggtgtgggaagaataaaattgtgaaggtaggaggttggtgtaaaagggggggttgaaggggaaagaatgatagggggaggatgggaagtgaaattata

SEQ ID NO: 2356 - DNA, 169 bp, Zea mays
  Clone ID: MRT4577_10214C.1
tttttggccgccctgggtggtatctatattttataatgcctctcttcagaacaaggacgttgttcacaacatcgatccgggacaacgctcatgaaccgtctagcataaatgaaaacataagcatattcaccacctatttcatatgacaactccactcaaccattttttt

SEQ ID NO: 2357 - DNA, 701 bp, Zea mays
  Clone ID: MRT4577_102150C.1
tcgagccggccaggaatatggtcacgtaaaacactagtttactttatattgtagaatatagttttttttaagtcaagagtcaagtttaaaatagaggataacataagtaatagaataaaaaactgctatagacagtttagtggggttcttctttattaaaaagtcaaatatatttattttaaaaaaaaaaaaaaaaaaaaaaaaaaaaaaaaaaaaaaaaaaaaaaaaaaaaaaaaaaaaaaaaaaaataccccgaatcccaaatcattcatccaaagttcgaagccgaattccggtctcaaatcctctctcgccgttccaagggcccgcacaaagaaaacagaaaggaagtcaaccgggggaaaggccccccgaaagaagttggccacaaaggttgggcgaaagtcggccccggccaccggggggggaaaaaagccccaccgtttccgccccggaattgtcgggctccgggaaatccgcaagaaccaaaaaagcactgagttgctcatccgaaagttccccttccagggcctcgtccggaaaatcgcgaaaaacttcaaaactgatcgtgaggttccagttcctccggccgtcgcggggttgaagaaggccgccaaggcgaacctgggggggttcttcaaggacaccaacctttgcgccatccacgccaagggggtcattataatgcccaaggacatcca

SEQ ID NO: 2358 - DNA, 221 bp, Zea mays
  Clone ID: MRT4577_102151C.1
aaatactttttttgtgcagtttttttgcaacgagaatacttttctttaaagagacgtagtatttatgaccacctttagaaacagacggggaaaatatggaggctgttttggtttgccaagatgacaccctttacaatgaaaactagacataacatgtgtaggacctgaagatcctgactactgtggagtagacagagcggatccacgtgaggggccaagac

SEQ ID NO: 2359 - DNA, 996 bp, Zea mays
  Clone ID: MRT4577_102152C.1
atgaagcagtggcgggacgacatcgaccgactgctcgacatggagtgctctggctcgaccagatcgaggccacagtcatcccgacgccaacatgaggcgtcggcgtctgtgcgctcaccctcagtgaggggtgcacagaccaacaacctccgagcagagctcaacgcaagtgtgcgggggaggatgcccgggtctctctggatatggtgcaggagcgccgacaaaacttcgagggtcgcgatgacactcgagtctctctggagaaggcgcgtgtacatcaccgctatcacagtagcaggtggaaacaccgctatgatggcgacatattttcatgtcgccttgtctgggcattcccagacttggctcatgaatcttgccccaggatcaatctattcgtgggaagagctctgcgtgcggttcacaacgaacttcgctagcggttaccaacagcacggcgtggaggcccacctccacacagtgaggcaggaacccggggagactctccggacgtttatctcccgcttcatatggtgcgagggccgccaagggccgggcatggcactcggctccacacaccagggccgcccagacgggtggctcgggtgccgtccccgggacggtaaaaagaaaaagaagggccgcagccacgagaagccgcagtccaccgctctagtcgtcgcagccgcgactgggggccggggcgaccacaacaagcgcccacggccgcagaggggtaacagcgactcatgccctatgcaccccaacagtcgccacagcgtcgtggagtgtcgcgagatcatcgacctcgctaaacgcgtcagcgagcggcgcgagcagtcttccaaggacggctccccacctcatcgccgacctggcaaggaaagggtcgacgacggcgaggtggccacggctgaacgggacctcgggtatcaatcattcgagagggtcctgaaggatatcatcaccggagactcctactccggtggcgacagctag

SEQ ID NO: 2360 - DNA, 423 bp, Zea mays
  Clone ID: MRT4577_102153C.1
aatcttttttttttttttttttcttggggtgggtttttttttttggggggggggtcatatcctattggaacgaacgaacgcaaagaaagcgaatttttttatacgggggtgatcccacagcacccaacctgagggctcaccattttttcaaagggacacacttttacgggcgggactgaacgaccaatcactgggactgaagggttcggatctggtacaaataaaggagggccctgtctccatgatggggtgtttactgccttgacccagttcctattgggcccaaccacttgctgtgagggccttactactataggatgaaaaacatctccatcagacttggtgggagccttttgcaccgcagttttgggttccgtttgacaatcattaccggccgggggaaagtgaaccctttttttgagc

SEQ ID NO: 2361 - DNA, 635 bp, Zea mays
  unsure (1)..(635): unsure at all n locations
  Clone ID: MRT4577_102154C.1
gccccatctccctcctcgcccctggcccctctgctcggagctccctcgccatggccctggtcgacgctctgccgggccgtgtctgccttggctaccgcgcccatgccgaactctctctccctcgcgtcttccttccccgcgcgcagctcgccttagctcctgctccttcaggctggctgcgcgcccatccctctgctcgttcttcaggccgccgcccagccgagattctccctcatccccatggcgcgctcctcctggtaccgagctcgcccatggccacgggctgcagctcgccccatctccctagcccccacgcgcgcgcaggcttcctgctcgctcggcttccctcctctcccttcccatggccgagctcttcgctgttgtccgtgcgcgcacgcctgctcctctgtccgcccatggccgctgttccttccctggttgcgggcgtgcggccggcgtcgagtcgtcggactcatccttcccttgctagcccatgnaagcgtgccctgctccaactaggtccgaccgtggagctcttctctggtgccaanatgcagactgtctttctcaacttcgctctagccgtcgaagcagtagccatggctttctgtcctcggttttggccgtctcctctg

SEQ ID NO: 2362 - DNA, 222 bp, Zea mays
  Clone ID: MRT4577_102155C.1
cgcgcgtctccggtcccgtccgtaataacactgatccgatccacgccggccggcgatggagctcatcaagtccaggacgaccgtgtgcgcgcacctccaggcgctgctcctgctctcacgtaataaaaaagcatactgatttattcgttgactcaattcacgtattattactaatttctgttgcctcatggactcttccaccttccgctatccacgcacaga

SEQ ID NO: 2363 - DNA, 2239 bp, Zea mays
  Clone ID: MRT4577_102156C.1
aattcggcctgccttctctctcctgtgcaatcttctctctcggtatccctacccttcttcaatccccaaccaaacccctcctctccgctctcactctcgcccgcgtcgcaatcattctcgtgggggcggggggcgctttaatccctccccggatttctgtggcgtctgctccctccacccggattccgccaggattgagttaatcgcatcgcatcctctctcttcctccccccgattgttccatctgggtcgcgttgcttctttcttcccgatttgccgccgccatccacgtcttgcaggagtaggactccgccctgtccgtcctatccacctgtcctcgcttccgtccacgccatcgccgcgctctctctccctgctgctgctttcttgggccggtccggggcttcgtccctgccgggcgtaaatgcgcgtccgtgcagcggatcccagccttcgccgctccaagtcctgtcctcgtctgattccaactaggagcaggaggaggagaatcttctgcgcatgctaatcctagcagcggtggccagagatgacgaaatcgttctgacttcacctgcgctggcggctgctcagctccgagccccgagtactgagcccctccactgctatggacatcttcttgatccgcgcctgtctcctccggctgctgctggtgctcttcgccgccgccgccacctctccggcggcggcgcagtcgcagccgccgtcgcccgccaggatactcgacgcggcgctgcaggactacgcgtaccgggccttcgcgcgcccccgcaccggcattgtctacaacgccacgctcccgggcaacctcaccggcattgccgtctccgcggtccgcctgcgcagcggcagcctccgccggaagggcttcccgggctacttccagttcggcgtccccacgggcgtcgtcgtgcagccgtacgtcgagcgggtggtgctcgtgttccacgacctcggcaactggtccgaccactattacccgctccccgggtacacctacctggcgccggtgctcggcctgctggtctacgacgccgccaatctttccgccgcggggctgcaggagctcaacgtcatcgcgtcgggcggcccaatttcggtgcgcttcggcggtaatgtaagggcggttccggcaggcagtgcagcgccaaggtgcgtggtgttcgatttggatggggtgccgcagttccgggacctggaggcaaccgatatgtgctcgacgtatcgccaagggcatgtctcgatagtggtgaactccagtgggattgctcctgctccacctccacctggcgcgatagccccgtcgattccgaccactggaggaaataccaagggaagctcaaaggcgtggaagattgccgtcagtgtggttggtgctgccgtagcactgggtctcatggctgcgcttctgctgtgtttggtgaggcataaaagggataagaagcttcaggtgatggaacggaatgcggaggttggagagacattgcggatggcgcatgttgggcggacacaagcaccggtggcgttggggacacggacacagccggtgattgagaacgattacaccgcatagtggagttttggggtcttctgcatgattctactaacatgaagacatcaccatggtgatggctggagatgagattgtccattggttgcttgacgcggacagttttccatatcagcagagggcaactgcagctgctaattttcaggtccaaggttcagctccatgagggttcagcacattattttggtgggtttgttgtgatgctcaagttttctactgcaagccaatggctattgtttgttcatgttcacatgtgaggagttccttttcatttccaagcaagcaggcagtgttgtggaaatcttattcctatcagacttggagtcctcagttattcttttgggggtatctgtattcaatagaaaaacaggcttggcaatggagctgaggtaacattcattgcacattgcgatcacgcagcatgagtcaggcggattcatgctgtgctggagaaattcattcatccagcttcaataattcgattccatttcttttttttcttcttcttcttggtttcatgtttagacaactgctaagatgatgtagtgctgcacatgtttactgcttatctgttgttgtggtagttagtctgattgtgatcatctagatttctggacatttattttacatccgttgtgattgttctcttgg

SEQ ID NO: 2364 - DNA, 231 bp, Zea mays
  unsure (1)..(231): unsure at all n locations
  Clone ID: MRT4577_102157C.1
ccaccaccatccgcctggcgcgttttcacatctctctgcctccttccatggncgcgccaggagacgctctctcccgagcgtcgagcggccgtggccatacggcattggtgataggaggccgaggtttccgcgtgcgtcccggaatgcagcccgtggggcatggtttcgcggctggagatcccgggaccccggcccaggaagggcgcgcgtgtgggctcggcacctttcgac

SEQ ID NO: 2365 - DNA, 699 bp, Zea mays
  Clone ID: MRT4577_102158C.1
tcttttgtacaaaaattccaattaaccccctgtacccactccagggtcgtctcctcccgctgcaccccaccaaacccggccgcgatccccatctctctgtttcccacacagacctacgccgaagaagcaaccgcccttctccccccctccatcaggcagctcgccgtcgtcgccaactcagccaagcctcgagggaaggaacgacacacagatccggaccttgctgatgtggcttgtcattcgttcacctgagattaataaactccgttagtcaatcatggaacaacaacaagtcaagccatctcttcccccgtctgatgctcctatggataaccaggattcatctccacttcctgccgttactactgctgatcctgttccacgtgctctttcaaatgattctgcaacacaggctgccagtccaaatcctgttgccccttcatctccttctgctccaacttctgccaccacacaagatgctgcaggacgcgagtcaccatcatccatgttttctacatcaggcttatcttcctgggcgaaaaatctgaaaatccctcagccttcttcaggtcaagaatcaccaccaggtaaaaataccgtttcccgtctcgctagtggccttggattgcggctgtctccaaaatacccacagcaagatgagagtgctgaaggcagcacaaccccaactactgcacaagc

SEQ ID NO: 2366 - DNA, 614 bp, Zea mays
  Clone ID: MRT4577_102159C.1
gtgaagtgcttccacttgcagataactttcctggcaattctggtttgctcacggctgccaaagaggcaagatatgataaagaagctctaatcaagttcttccgcatgttgataaggagaaggtatttttcgaatgagcttcctgcccctagcccatggtcactcactcccagggaagataccattcttcccgtagaaactgtgaacgatgatgacatgttccaaagaaaaagctacggcggacagagctacaaatacaatggggttaccccactgcctgcacagcggaacctaactccgccccccacactctatccacagcagccaatgtcctcttcatcagaaaactacagataccacagattttcctcttcgtcaatacctgattcaagtggtggttcaaaaagccgagcgaaccttaatatatgatgggatatggcgccagagcattatgtttgtgggatcactagtgataattctttggttcttcccctgtatatctcctaattttgtgtatgaattcaatatagttatttaggaaaacacattacatggtcaaaaaaaaaaaaaagatggtctacactgtgcaacggcaatctgaatcatcttttttcc

SEQ ID NO: 2367 - DNA, 1333 bp, Zea mays
  Clone ID: MRT4577_10215C.1
gtgccgccgaggactccctcagcaggactgagatcaatgtagatgtgttgaaagaggctagaatgttccatttcaattcagaagtcctgctaaacccctcaatgcatgacacgctcttcagagccattgagctgtccaagaaatttggaagcaaagttttcttcgatctcaatttgccattgccattgtggacttccaaggataaaacaaaggaggtgataaacagggcgtggaaagaggctgaaatcatagaggtgtcaagggatgagctggaattcctcctagatcatgagtactatgaatacaagagaaacacccctcctcagtattatcttgaaggatttcattttacaagaaactggccacagtactaccactacagccctgaagagatcgctcctatttggcatgacggtataaagatcttgcttgtgacgtatgggacacttcggatccactattacacacctaagtttcatggctgtgtggttgggacagaggatgcactcataactccatacaccactgaccgaacaggttcaggggatgctattgtggctgctgctattaggaagctgacaacttgtcctgaaatgtatgaagaccaggatacattggagaggcaactgagatttgctgttgccgctggaatcatatcacaatggacaattggtgctgtgcgaggatttcccactgagagtgccacccagaacctgaaggaagaagtctatgtgccttctatgtggtgaaatgataaaccatttgtgatgggaatgaacaaatatatgatacaagcatacttgatgaatggtctaacagaactgaacaagggggttttccttttttttgcgacaatagagctacaagagcaacttacatgcactaattggtcaggtctatggttgctttagttaggcggcagacaggtaggagtttgtgcttcatattgtccgatgaacaaggaatctttctatcatctggttgttctgcgaagggttccgctgtacgtacgactcatttgtacaacgccttttcaatcaacggagaaccaggatacaaatggcggaaaatcactcaaatgtactggttcatttgccaagaacgcaagattcatctggttgtaccggagatgtactttaggtgaagtatttccctttctgtcaatgtgatctgtgagaaacacctgtccctacgatttagcctgtggtttgtaactatgctgtgttttctgtggttactgcattctaacatgaatttacagaatgatttcttttcacttaaaagttgaatttcaaattcataatttataagatgattatagatattatagctt

SEQ ID NO: 2368 - DNA, 740 bp, Zea mays
  Clone ID: MRT4577_102160C.1
cacgatctagcctacactacagcctacaatggtcgttgccttccatccgaccttaccggcctacccttcctcttccaatttgctactgatctcccctgttatcgtcggatttctcgtgacggtgagtccgtgacacgccggcgccatggcgagcaggtgcctagcggctgcatcggaggccgccgtcgtcttcctcatccggcccatcctcgccatcgttttcgtcttcaccctcatcctcctcggctggtacgtggcgtggacgacggtgctggtgcacgtgccgctggtgcaggagatcgccggcctgcgcccgaagaagccctctaaacccaagccagccaaccgcggccgcgtcgccaagttctaccggaaccaggccgaggccgcacaaaggaactgcaaatcagaaggggcaccttaagagaaaatctgctgcacactagtatgcaaattccctggtagttctaattagaatgcaatactactaatgatgacggttttctaggagagaatgtatatctgcatttgatgggagcttcctgcatgacgacttctctaggagagaatgtgtatcagcatttgacgggagcttcctgcatgacgacacatcaggcttatgatactagcgtatcaacttttagttgcatgaccttgtaaaatgaggaccttttaattgtagattgtacatatacttgtacatgacttttagttgcaacgacaacgatcatctattcaag

SEQ ID NO: 2369 - DNA, 1626 bp, Zea mays
  Clone ID: MRT4577_102161C.1
actactgcactacagcagcggaaggggctcgtaccgtcgcatgtatacggcagccgaccaaccaaccaaccggccggcagccgcaaatccttccgtcccaccgggaaacatccctctccctctgacgctgctgctactcaccctctcggatccctttccaccccacctcccagatgcggctggcgacgacagcgccggcgcctccgcctccggatccgttgatctagttgctgctgcttgattggggttaggaggaggtggaagaggagggaataggagatgttgttctggaaggacggcggcggtactggtggcggcaacggacgggaccttagcggcgggccgccctgcggccaggttcgtgtactcgtcgttggcgactcaggtgttggcaaatcttcattggtgcatctcttactgaaagattctgcagtggctcgaccagcccaaacaattgggtgtgcagttggtgttaaacatattacttacagtagcccagggagttcatctaatagcgtcaagggtgatgctgaaaggaacttctttgttgagctttgggatgtttctggacatgagcgctacaaagagtgccgttcacttttttattcacaaattaatggtgtcatatttgtttatgacctctcccagaggaaaacaaagacaaatttgaacaagtgggcagtggaggtttctgaatctgggaccttttcagctcctcttgggtctggtggtcccggtggccttccagttccttacctagttattgccaacaaagtggatattgctccaagagatggtagaagagtgagcagtggtaatcttgttgatgttgctcgtcaatgggttgaaaaacaaggtctgcttccatccagtgaagtgcttccacttgcagataactttcctggcaattctggtttgctcacggctgccaaagaggcaagatatgataaagaagctctaatcaagttcttccgcatgttgataaggagaaggtatttttcgaatgagcttcctgcccctagcccatggtcactcactcccagggaagataccattcttcccgtagaaactgtgaacgatgatgacatgttccaaagaaaaagctacggcggacagagctacaaatacaatggggttaccccactgcctgcacagcggaacctaactccgccccccacactctatccacagcagccaatgtcctcttcatcagaaaactacagataccacagattttcctcttcgtcaatacctgattcaagtggtggttcaaaaagccgagcgaaccttaatatatgatgggatatgtaagtccttatccattatcacctggagtgtgggaaaaaaacatgacacctgggttttttggttctcaggtttttgatctttttgagttgttcatctgtctttgatttgattgtaatatgtgcatgttgacagggcgccagagcattatgtttgtgggatcactagtgataattctttggttcttctctgtatatctcctaattttgtgtatgaattcaatatagttatttaggaaaacacattacatggtcagatggtctacactgtgcaacggcaatctgactcgagcccggggcctgagtcccttcaagtcacctg

SEQ ID NO: 2370 - DNA, 648 bp, Zea mays
  Clone ID: MRT4577_102162C.1
tttttttttttttttaaactttgatttatttattatttggcttgaaaaggcattaaaccattaaactgtaaataaaaaaaaagggcatattttttgttctcttttttgcccaccgagccatctcctttttgacctctttttttcctgcctgcttccttgctgggaatgaacccccccccctgagccatttttttttgtcgtctgaacactttgcttagttctaccattctgtttggattttttgccgtttgacccccctaaacaaagagggattgggggcaaaaaggataaacagagagaaaacaacgggcaggaggtcggggccgagcttcgaccggtggcgggcagtcggggccaaactgtgaccggtgatgggcggggaagaggagcgtggggtggaccttcggtcgaggttggactcagtttcccgtgcacgactgctgctacttgagaaaagattattggaatcgacggctgctccggaccacaacgacgacaaggaagaaggctgacggacggtagttgtgcggctgctccaggccatcgacgtgcacggtgagggtacaggcgagcctttacatgcctgcacgatagagatgtgcccacttgcgtcgaagttggagatgcagcaaaccgaagtcagagttc

SEQ ID NO: 2371 - DNA, 329 bp, Zea mays
  Clone ID: MRT4577_102163C.1
actagtagtagtagcgggcatgcattattgtactgggaaaatagctaatgcttgctttaacaacctacctcgccacatatatacacaaaacacaccagctagctggtgcaatgcaaacctgccctgcccccacaggcatgactcatgagccgtagatgagatcacaacctgagcgttcactggtgggtgggactcccagaggcgggcgacacgatgacttggatagcagtatcattagcccccggaaatggcctggcgtccaagaccattccggtgccggagttgaagatggcgcccacgttgccgaacacccagggcttgcagactat

SEQ ID NO: 2372 - DNA, 586 bp, Zea mays
  Clone ID: MRT4577_102164C.1
ctttatcaacgtcaaaactccaaccgaccgattcagaatgccgatcgacttttactatactcccggcagcccgccatgcagatctgtgtttgctgaccgccaaggctttgggtttggaattgaatttgaaaactttagatctccaccacggtgaacacatgaaaccagaattcatcaaaataaatcctcaacactgtgtaccaacattggtggacggtgacttagctttatgggagagccgtgcaatcatcgtgtacttggctcaagcttacggaaaagacgattcactgttccccaaagacccgaagaagcaagcgctggtcaatcaaagactgcaatttgatgtcagtactctgtatccggcgttcgccgatcaatactacccatggattttcgctggagtgccgaagagcgacgacaaagagaagaaaatccatgatgcgcttgcgtttttggaaatctttttgggatcttccgcttgggctgccggtgattcagtgactgtagctgatattgctttggtcgcttccatttcgactattgaggctgtcggtgttgacttgtcgaagtacgcaaacatctctaa

SEQ ID NO: 2373 - DNA, 159 bp, Zea mays
  Clone ID: MRT4577_102165C.1
atgagagggatgcagactttgattatggtgggacaaagtatgacacatatttgtctgttatgggatggattatggctatggttagaatgaggatcacaaaggttatgatggatatggttacaggtaatatgtaggtggacatgaactgacactcaagcg

SEQ ID NO: 2374 - DNA, 263 bp, Zea mays
  Clone ID: MRT4577_102166C.1
ctgactggtaccttcccgtgagaggatacaaatgcacccggatcgatgaaaccaatctattccattccacacgaggctaagcacatgcgtaccaaacccatggtgtccgacggctgtcggcgtagtgacggtgtacggcagcaactacgctaagcttctggagctgtctctgcagcccaagtcggcgactttcaccgtctatgtggtgcttgctcttatgctccggttctaggtcttcatggacgttgtgatcccggaactgg

SEQ ID NO: 2375 - DNA, 560 bp, Zea mays
  unsure (1)..(560): unsure at all n locations
  Clone ID: MRT4577_102167C.1
aattcggcacgaggcagcagcaacaaaagagacgagccttttcgcttcgccgctaccaccacctcgttgtctcgcctccgcctcggcctcagcacgcgcgcgggatctcgcgctcgctcgcgcaccgaggagcgcgcatccacccgcagggttcggggtggggtgatccagcggcgatggcgagccgggtcaaggaggacgagaggcacgagaagatcatccgcggcctgctgaagctgcccgccaacaagcgctgcatcaactgcaacaatttggtgagtatgttgttgaatgtggacaggtttgttggtcacggagctagagggcaggtaggagctgtttttagcttggttggcttcatccgccacaatgctctgctgccacgaatgacgcacacatgtcatattgngaggtagctgcagaactaggtgtttgacgggagagtggtgttgtattgcgtgggtttagactntaaggtcaattgcagtccagtggaatggaatgtagccttgatgcaagcagttgggaatcactctgtcattatgggagtcacccattat

SEQ ID NO: 2376 - DNA, 377 bp, Zea mays
  unsure (1)..(377): unsure at all n locations
  Clone ID: MRT4577_102168C.1
ggccgcttttttttttttttttttcaggacaggtacctttccttattccatcatgaaattgaaacctgaagatagccatcaggcagggagatagagagagaggggaagggaaaaagaagacagcagctaactttatgccaaggtcaaaccagtatctctggtcacacaacaaagatagcagatccttgcccggagcaacccctagggccaccgatatcttccaaaggctaagcccatgaagctgggaccgtgtggaccccaattaagattattcaatatgtggaggcacacggtatgagggaccacccagcttctttttttttttgggggggggggggggggttntgnntntggagcatccggtccatgacgaggtc

SEQ ID NO: 2377 - DNA, 363 bp, Zea mays
  Clone ID: MRT4577_102169C.1
aagacgaggtagaggagggggcgagcgacataggcagtggaggggcacggtgaggaagccggcggcgcgcgcgcgcttgcggggccggcggcctggcgaagggggaggtggacgagctgcgccagctcagaggccaaggccaggagctctgggaccacaacggaggcaacggaaacccacgacaaaggcggagatgacctgaccgcgaacatggaacaaacaaggctgattatagggagggaaggctaagatacaactcggaaatacaggaagaacaagggaaacgaaccaatcacccccgtggaagctgacccctgagagaacgaaaaccgggaaaagggacccaactgaaacaaaattgaa

SEQ ID NO: 2378 - DNA, 502 bp, Zea mays
  Clone ID: MRT4577_10216C.1
gggccaggaccaactggtagtccaaatttattcaagaggggtttccgaagatttttccccacaggagcaagcaacaacggtgtcgacaaacaatagatacaacagctccaggggtttttaaatttccccggcccaaagctcccccaagggtttgtacggcccgtttggggacaaaaaaaactttggacgggatggtttcctttggggaaaccccaagaacttttccttgggatggacgcttaactcccaaaaaaaaaggtccatgttttggttaaacccctccttggtaaaagtcctcgccaaaaaaaaaaccccttggtgggggaggccccctaaacctccccggggaaagggtttggcttttcggggggggaagttctccaaggggcccttttccatggggggggtgggtccccaacccggggccattgcccccaaaggggaaaaagggggggaaccaacaccccctttttgggggaaggctccctgaactttttttggc

SEQ ID NO: 2379 - DNA, 392 bp, Zea mays
  Clone ID: MRT4577_102170C.1
ggggggaacgtatactggaccagtccaattttgggcatgtttattttcaaaatcgaatgtaaaattaaaaaaaaacacacggtaaggggggggaaaaaatttattttcaagaattaaaaaaaaatacatttggataaaagcacccaaacattattacatagagagagtaaaaagacagaagcgcaaaaattggttaatgcctaagtactttggttgggggaaaatgcattcaaaataaaccgttaagaaatgtgtaaaccatttttaaaaaccataataaatgactagagacagggacaccttgatataatttaaaataccagtagcattattttattatttttcggaagggccaagcatggatttcttgcccgggacgcgcaaaggaagcc

SEQ ID NO: 2380 - DNA, 1780 bp, Zea mays
  Clone ID: MRT4577_102171C.1
cattgggtcggtcgagacgcctaacgttaatccgccaacaccgagtgagccacgccaccacacgccagacgcagcgagcggcgaaggcaagcgccagaaaacgccgctacagccaccaccaccaaccccttcctcccttcccttttccctctccgtagcccgcctctcctacaagaaccccgacccgaccgccgatagctacctagctcccaccccgcacccctgactccaccttctccattcttgatcccttcgccgcgcggagatccaagaacaggggcagcctgacaggggaacgggcggctatgggaggaagcagcgcgatgctcgccgtgttggcggtggtggttcttgcggcggtcggcggcgctgacgccgcggcggaatcgagtgaggcgtcggccaaggggaggtaccacgcgctcttcaatttcggggactcgctagccgacgctggcaacctcatccagaacggcaccccggacatcctggccaccgcgcgcctgccctacggccagacctacttcggcagggccaccggccgctgctccgacggacgcctcgtcatcgaccacctcgcacaagagtttggcctgccgctgctgccgccgtccaaggccacgaacgccagcttcgcgtacggcgccaatttcgccatcaccggcgccaccgcgctcgacacgccctacttcgaggccaaggggctcggtgccgtcatctggaactccggagcgctcatgacccaaatccagtggttccgtgatctcaagcctttcttctgcaacacaacgcaggcatgcaagaaattctttgccaaggcgctgtttgtggtcggtgagtttggcggcaatgactacaatgcacccctctttgcgggcatgggcatcccagaggtttacaaattcatgccggatgtcatccagggcatctctgacggtattgaggcactgattgctgagggggctgtggagatgattgtgcctggtgttatgcccactggctgcttcccagtgtacttgaacatgcttgatgagcccaaagagggatatggctcccgcagtgggtgtgtccgccggtacaacacattctcctgggtgcacaatgcacatctcaaggccatgcttaagaagctccgggctaagcatcccaatgtgaggatcatatatggcgattactacactccagttgtccagttcatgcttcagcctgagaagtttggttttgccaaacaactgcctagggcatgttgtggggctccatcgactcctgagaaagcagcttacaacttcaatgtcacggccaaatgcggtgagcctggtgcgactgcctgtgctgatccgacaacccattggagctgggatggcattcacctgacggaggctgcgtaccgccatatcgctaaaggctggttatacgggccttttgcggaccaaccaatcatccaatcctcatgatcacgccactcctgctgtagagtttcatcaaagtagcgcactggaaaaaaaatggagcgggggaaagtagttcttccatacagtttcaatgtttgcatacatgtacatctccattttgattgtattcatttaacttgggtggtacaaaggtgggatagggaggctgcacaaaggcctgatttcttgatttgtcagggggtataaatatgaaaaatataacgtacatataatcatgtatattgtgtcctggaaatgtgatacagactgtctgcttgagcagcttctgattctctgattaaagatgtgccagttctgcgattctcaac

SEQ ID NO: 2381 - DNA, 210 bp, Zea mays
  Clone ID: MRT4577_102172C.1
gccgtcgcttgccccagctgcggagacgcgttcccgtccgaggtcgccgtctccgagcacctcgacggctgcctcgcgtcggcagggggcgcccgcgcgtgtgcctccgcgtacctcgccgccgacccgcccccgcccgcggcctccgtggaggtggtcaaacgcctgctgggcaacctgctgcgggaggcccgagaaacgacaaagttc

SEQ ID NO: 2382 - DNA, 1794 bp, Zea mays
  Clone ID: MRT4577_102173C.1
attcccacgcgtccgaaaggccaggaaaaggtgtataacaaccatctccatccctaccgtccggccggcgccaaacaccgagtgaaccacgccaccacacgcagcaagcgagcgcccaaagaaacgccgtagcagccaccaccaccaccaaccccttcctccctttccctctccgccgcccgcctctctacaagaaccctcacccgaccgccgataactacctagctcccacctcgctcctcgactccgtcttctctattcttccattcagcggagatcctagaacctaggggcagccagccagggggaacgggccgcgatgggaggaaggggcgcgatgctcgctgtggtgttggtggttcttgcggcggttggcgccgcggcggaatcgatggaggcggcagccaaggggaggtaccacgcgctcttcaactttggggactcgctagccgacgctggcaacctcatccagaacggcaccccggagatcctggccaccgcgcgcctgccctacggccagacctacttcggaaagcccaccggccgctgctccgatggacgcctcgtcatcgaccacctcgcgcaagagttcggcctgccgctgctgccgccgtccaaggccaagaacgccagcttcgcgcacggcgccaacttcgccatcaccggcgccaccgcgctcgacacgccctacttcgaggccaaggggctcggtgccgtcatctggaactccggagcgctcatgacccaaatccagtggttccgtgatctcaagcctttcttctgcaacaccacggaggcatgcaagaaattctttgcgaaggcgctgtttgtggtgggtgagtttggaggcaacgactacaatgctcccctctttgcgggcatgggcatccctgaggcctacaaattcatgcccgatgtcatacagggcatctctgacggtattgaggcactgattgctgagggggctgttgagatgattgtgcctggtgtcatgcccacgggctgcttcccagtttacttgaacatgcttgatgagcccaaagaaggatacggcccccacagtggttgtgtccgccggtacaacacattctcctgggtgcacaatgcacatcttaaggccatgcttgagaagctccgggctaagcaccccaatgtgaggatcatatatggcgattactacactccagtcgtccagttcatgcttcagcctgagaagtttggttttgccagacaactgcccagggcatgttgtggggcgccatcgactcctgagagagcagcttacaacttcaatgtcacggccaaatgcggtgagcctggtgcaactgcctgtgctgatccgacaacccattggagctgggacggcattcacctgacggaggctgcctaccgccatatcgccaaaggctggctatacgggcctttcgcggaccaaccgatcatccaatcctcatgatcatgccgttcctgcggtagagtttatcaaagtagcattgagagtgagagaaaaaaaatggagcggggaaagtaggtcttccatacagttccaatgcttgcatacttgtacatctccatttgattgtattcatttgccatgggggtacaaaggtgggatagtaggtcgcacaaaggcctgatttcttgatttgtcaggttggggggtataaatatgaaagttgttacgcacagataatcatgtatattgtgtcccggaaatgtgttacagattctgctcgagcagcttctgattctctgattaaagatgtgccatttttcgcgattcttaaaaaaaaa

SEQ ID NO: 2383 - DNA, 195 bp, Zea mays
  unsure (1)..(195): unsure at all n locations
  Clone ID: MRT4577_102174C.1
accgactcgtggagatcaattcttcttcccctttcctccatcccctttttccacgcgtcaggtcctttcctgagagatcaggtccttancccaccccatccccatggctgcttcttcttccctctccctcccagcaacgccagccgcgctccagcacgggtctttccacggacgaccagctctaccgacgaggtc

SEQ ID NO: 2384 - DNA, 240 bp, Zea mays
  Clone ID: MRT4577_102175C.1
gccaccagatcaatcacaataagtttaatggtaacccggccacacgaaaagagatcccagtccaaatacaggcccaattaatgggcttaccctgcctgaaccacaccacaatacatgataacaggcttcaaaaacagtaacatggcaacctagtcaggccgaaaacactgcggcataccaataaggcaactagggaaccggtaccacccttacaccttgagctgcaatccccctttaggg

SEQ ID NO: 2385 - DNA, 874 bp, Zea mays
  Clone ID: MRT4577_102176C.1
ctgtgcggcgctcgagccggccgggtcgggagaaccttcaatcattcagtcacctcgcttcccagccagctctccccaggctcaggctcactcttctccccagttgcgttttctttggaagcttccatacacaactcgcatcgttcatcttccactcatgctatataaggagagagagagagagagagagagagagagagagagaggatctgatgatgcatgctgtaacagctcatgaactgcacaagttgtagattggctgctggataagttcatccatccatcaacgctacaaatcaaggtctccgcagaaactccacgtggctcgaggacccaccgcggtgtgtgtggatggtctcagcctccgtgcgtgcgatgtcaccgccagccaggtccccggcctgtgggcccatccggcgtggcccacatgtggccgcccatttcgttccaggttgcttgcgcctagagtgttcgaatctgctactgtattgtaccaaccaactttgaggctctgctcggacattgcgtaatccaagagaccgtcaaggcaaggcaaagcaaagccaacaccagacgagtcgagaacaccgcagcagagcgcggcgtccaatggacatggacggcaactccccgcggccaccccgccggccggagcgggaggggagctacggctacgacatcgagagcatggacggctccggggccgggggcccgccgccgtggagcgcgcaccacaacggctcctccgaggccctgctccgctacgacgactgcggcgccgaccgcgggagcacgcaacagccgctgctgcggaacgcaccgtgaacacgcctcgcagatcgctatcgcggtgcaagtctgcccacgagacttg

SEQ ID NO: 2386 - DNA, 290 bp, Zea mays
  Clone ID: MRT4577_102177C.1
atatacaaatgctctatcatttttgtggggcgccacacacctcccataaaacacttttttgtcgatctatctctcatacgaaatataaaagagggcaccaccaacgatgggttgcaggtaaaacactgctgtgggcgtcaacacaaggggtttgtatggcacccattgttgcatttagaagagggtgccagcgtgaggcgcaacgcgctggtaaaacggtcacaactgtgggtgtcataagagagactcaggtctcacaccatctatcacgctaaatgggagtctttgga

SEQ ID NO: 2387 - DNA, 334 bp, Zea mays
  Clone ID: MRT4577_102178C.1
ctggcctcagccgtgcggcgtgatcacgcctgcgggggaaggtgtgagctggagcgttgcccgtcgacgtgtacataactggaacaggcgcggcggagggactgtatagctctcacctatgctacgcgtgcgagtgctactgcttatcctgcgtcatgagagggacctataatgattcgactgccagtccgaccacaactacctgactgacgaaaaccatggcctcacccaacttaatcacctggcaccacatcccccttttgccagctggcttaatacgaaaagcccgaaagatagcccttcataacaatgcccaccctgaatgtctataggt

SEQ ID NO: 2388 - DNA, 632 bp, Zea mays
  Clone ID: MRT4577_102179C.1
tataaggctgtgcttcttctggcccggctatcatggaagctgttgcagagtttcaactggcgaactggacccctgtggattatgcgtccatcgacatacctggtggtgcctgcggcctccaagcatatgactatgatgtgcagctgcagcaccacctcgctgagtactattctgcagcctcacaacacaacagtaatattgttgccaaagcagcaaagatctcctcgaacgacgatagtgacgatgctagcactagcaggagcgaggtgagaaaagtagtagaccggtttaaggctgatatggagatgatgaaagagaagatgcatagatacccagcatgccttggtgctgtcgataaatcttataccgtgccgaggattgtggccatcggcccctaccactgtggcatggagcacctcaagaaggcggaggaagtgaagcaggttgctgcctggcagtgtaccgggacaggcaagttactgaaggagatgtatgaagagctgatccccgtcgcagacgccgcctatgacttgtacgacaaggatgcgatacaaggcgttgccgaagatgacttccggcatatgatgttcttcgacgcttgcttcttggtgcagttcatgctttcacgggct

SEQ ID NO: 2389 - DNA, 463 bp, Zea mays
  Clone ID: MRT4577_10217C.1
cacaacacaatgctccgtgttattccagagcaccaccaatactactccataaaactccgttggcggactaaagcacatgtacaaacttatggcagccacccaacccgatggcaaggataagctaacgctaatgggcactactacgcccgcccagatcattgatacaaccatcacatatcatgaaagggtgccacagaaaccaacaaaaagctgcgaaaacattctacaatgcgtcttgacaaacaaaccgtacaaccgctaaaaaccattaaataatatggatgggcaatgccaccccatcaccacctagcatgagattgcaggaatggcaggcttataaaaacaacaaagcacctgactgaccttaaaagcttcctattgaatggaaaggcaccctgttgccctcaacagccctagagagggcttccagccaaaggctaaagatcacgctaaatcattgcgc

SEQ ID NO: 2390 - DNA, 354 bp, Zea mays
  unsure (1)..(354): unsure at all n locations
  Clone ID: MRT4577_102180C.1
cgggntcgacccacgccgtccgccattcttctccgctcnatccgctatgctctcgagtgctccatgctcttatgctagccttatgcctcgtcccaaggggatcgaaggggggccatccatnngatgcgtggnntgatcctnggnacgnnngctccacnggtnnngcgcggctttttcgtggcnnggaccgagngnncggcctnntcgcgccgccatgcctggatcgnnngcggttcgcccgcgcctgggagcgcgcaacggcngatcggcnngtgcnttgtcccntngcgccgatgctttccggcgcngcgccctcgagtcnnccttccgcnctnncctcgatcggggcggcgg

SEQ ID NO: 2391 - DNA, 460 bp, Zea mays
  Clone ID: MRT4577_102181C.1
attgctgttcttttattctttcgtttaaatgctcaagattatgtacgcacgtacgctgggggacaaactatgtttacacaataaaaagaagaatagagtattgctgtgagccacacatcatcaggtcagagtttcagccgcaggaaacaaatatgccggggggcagactaaggcctagatatacagaagaaccggtcgatatgggcctgtttatttccgagagtgcagacgccatgcagagctccgtttagattagcgtgtaggtatggcatacatgcgtcagcagatgtgcgttacatacacggaacggggcaaagatagctctgcattacctgcagagcagatacatgcatctgtgaggggttattgacggagaccattactgattgctagtgagtacatgagtatctaattaagataataatgatctcacggtggatgagcgctagcgagcattatt

SEQ ID NO: 2392 - DNA, 356 bp, Zea mays
  Clone ID: MRT4577_102182C.1
ctccgatcgacctgctccctccccaccaccgagcccatggcggaccagctcaccgacgaccagatcgccgagttcaaggaggccttcagcctcttcgacataggacggtgatggttgcattacgtccaagttgcaagctgctgatttgcatctctggggctcgtggttttattggatcccacattgctcgctcgttgaagaacgaggtccattacattattgcctctgactggaagaagaacgagtttattattctgtgacttgttcttacattagtctcaccttgttgttttttttaatatggtcatctttttttaatgtattgcattttgacggaccattttttacattttagt

SEQ ID NO: 2393 - DNA, 571 bp, Zea mays
  Clone ID: MRT4577_102183C.1
ggccgcgggttttttttttttggccgcgggttttttttttttttttttggagttcaggcagtagtgttcagtattctacctcatgttcctggaaaccaagcaacatgctttactcgggactgtcacagcatcattcgccgagacgtacgtatcggcatccaccaccttttttggtcgggctaatcgtatggtattttccatcgttcatttgcgcaggttctatcgtgtgtatgccgtaaccgagcaatgcgaatgctccaaattgacgcctcaatattcctttgccgggtgcttagacgacctcgcgcttgccctccttagcctccttcagggccttcatgttgccgtgaagagcatgtcgatggtttcgtcggaacttggggtcggtacccttaagagaagggtaacgggaagtcttgggcttcttgattccgttccggtgcgccttgcgcgactggttgtgctgggagctgttctttgacttcgccattgctgctgattgattccctgtgtcgacggagacggatcacgaagttgccggccggaaggtaaaatgtgcgctcccggccgg

SEQ ID NO: 2394 - DNA, 306 bp, Zea mays
  Clone ID: MRT4577_102184C.1
gcttctagtgtgctgcacgatatatttttatttactcattgggatccacataattcttattttcttctcttttctaaattctacaattccttttggattttaaattccacttttgactttaatatttttcttgccacatttattattttattttgtcaccatgtgcacacaaaagaaaatcccagcatgatgcaaaattttaatggcatatattctttttattaattatttgcttttgaatatggggttcacatgggatgatgcattaagatcaaactcacataaatagaaattgtttctctattg

SEQ ID NO: 2395 - DNA, 293 bp, Zea mays
  Clone ID: MRT4577_102185C.1
ggacctttgggctgatttatgtgcttgactcccgcccagccgctcccgccatcgagacgaatctgaagtaagagactaacttaaaatgctaagcacccgtccatacttagatagaataagcccgacacagcactgaaggatataaatagataaagaaattatatagaataaaatcgttaagacaacgacattatataagagaaaaaatagtgaggctgggctcgaaattgtacgtacttacacatacattaggatttacgccggtctccacaccccagaaccaaataaatcca

SEQ ID NO: 2396 - DNA, 186 bp, Zea mays
  Clone ID: MRT4577_102186C.1
gtaagctaggatcctctatagcgggcgccctctcttcttccgtttttatttttatttatttttttgtttatatgtttttctatcttcattcaccaaggcgcagtttaatgatcattatttgttccaaagacttgtccattccagaaataaatatcctgacaaaattttttcgagaatctttccggt

SEQ ID NO: 2397 - DNA, 399 bp, Zea mays
  Clone ID: MRT4577_102187C.1
gcaccggcggcagcgacgtagacgggtgcatcctggctcggcagtactacgcaggaaggaagagagagaaccatttgaagcttcgaggtcgtcacgcacagatttaagtgagcccaaacccgcggagtctcatccgttcatcccaccggttcgttcgtcttcctgcatcagccctgagcgtttaattgcgccgccgcctccttgtccttcgcccaagtctcgccgagcaatgcggcctctcgcgctgctcgttctcgcccacctcgccgccctcgcggcggcggcggaggccaagggcggcgtggcgggggcggggctgggcgacgacgtgctggggctgatcgtgttcaaggccgacgtgtcggaccccgacggccgcctcgcgacgtggagcgagga

SEQ ID NO: 2398 - DNA, 955 bp, Zea mays
  unsure (1)..(955): unsure at all n locations
  Clone ID: MRT4577_102188C.1
gtggnaatgcgccaggtggagaggacggtgcaccacctcctccgccgcggcatgagcatgacggagccctcctgcccctaccacgcgtccatctacggcgccttccaggagcgcgccaccttcgtctcccacgcccgcaccgccaggcgcgccgcgctccacggcgacgcctgcctcgccaagctctgcggggtcatcgccggcgacgagaagcgccacgaggtcgcctacaccagggtcgtcgccaggtccttcgaggccgaccccgacggagtggtgcgggcgctcgcggccgtcatgcgagccaaggtcaccatgcccggcgagcgcatgacggacggccgcgacgacagcctcttcgaccacttctcggcggtggcgcagcgcgccggggtgtacacggcggcggactacggcgacatggtggagcacttcgtgcgcacgtggagggtggcggggctccaggggctgtctggcgaggggcgccgcgcgcaagactacgtgtgcgggctgccgcgcaagatccgcaggatggaggagctggcccacgaccgtgccgcccaaaaagaggcccaatctgtcagcatcagctgggtgttcgacaggcccgtccgtctgcactgaaggaaagttgaaggacatacaccaatcctcaactgaagccccaatcactactactactactggaggcgttggaaatgcaccttactagttaaatgctcctatattctaagttttctatatatatcatataaatatcatataagtaagctttattttaataaaacctaaaatatatgtgttattgttggttagatagatgctaatgctaagccaacgatcaaagttcaaacccccactttatacacaataaattgtgggttatatagtagagatattgtaaccgagcttggctgatatgcagtgtacaactataaatgtgaacttctccctc

SEQ ID NO: 2399 - DNA, 454 bp, Zea mays
  Clone ID: MRT4577_102189C.1
aaaaacacaaaccaacagccaagctccttaaagcaaggaagcccatgtcccgggggggtttaggggggggtccagcccccaaaaccccaaaaaagctttagcaaaagagaccgcccccttaaaaattcccccacacacttttgccacaacccggttgacgggaagctgggttttatcccccccccccaaaggaatcccccgccctgggagaacccccaagcaagcctcccttactagctttacaaaaattcaggaccccccccccccccaaggggggccaaaaaaaaaaaaacctaaccccgggaaccggaaaagttccactttttgctcttcgggaaaaaccgactgaacccccggttctgtttggctggcaactgggggggggggaagggggaaaaccaaggggatctcaatcgatgcttcgggcccttggaggggtttggagaagggaaag

SEQ ID NO: 2400 - DNA, 112 bp, Zea mays
  unsure (1)..(112): unsure at all n locations
  Clone ID: MRT4577_10218C.1
tgcagagagtaatgcgtnttcagacttgttccggcattcatttccagtgccttgcatgtgcctctattcctcatttctcaatccccaatcccaatgtcttccacacaacata

SEQ ID NO: 2401 - DNA, 1241 bp, Zea mays
  unsure (1)..(1241): unsure at all n locations
  Clone ID: MRT4577_102190C.1
ccggccgggattcctctccgccccctcccaccccaccccaccccacccgcaagcgaggcagcctaggacgcagcagcgcacccccgatcctcgcctgtcgcctccatctccattcgcaggcctgagaccctcgcccgcaccgcgctgccgccagccatgggaatggggcctctcgagaacgccgcgtcggccgctgagtccgcggccttgccggaggccggcgccgcctcggcagcgggctcgtacgcggtgctgcagtgcggcgaggactcggagtacgtgcggcagaagtacggcggctacttcgccgtcttccgcgcgctgctggaggaggacggcgagagctggcgcgtgtaccgcgccgtcggcggggagctccccaccgacgccgaggcggccggcttcgacgggttcgtcatctccgggagctgctccgacgcgcacggcgacgagccctggatcctggacctcgtcggcctcatccgccgcctccacgccgccggcaagcgcatcctcggcgtctgcttcggccaccaggactgtttactgcacgcagatcctgtgccgggcgctgggcgggcgcaccgggcggtcgaccaagggctgggacatcggggtgggctgcatccacccgacggcggcggcggcgcggctgttcgcgccgctgaagctgccggtgcacatgccggtgatcgagttccaccacgacgaggtgtgggagctgcccgccggcgccgaggtgctggcgcggtcggaccagacccgcgtcgagatgttccgcctgggggaccgcgccatgggcgtccagggccacccggagtacagcaaggacatcctcatgagcatcgccgaccgcctcttccggcataaccacatcctggtgagtagtcagtcagtctcagtcatatataacctcggtccagcgggtcttggaatttaaagtgtcttcttgttttggtgtcggcaggactgccaggtggacgtggccaaggcgagcttcgacgtgcggcagccggaacaaggagctgtggaagaaggtgtgcaggggcttcctcaaggggaggctgcagtcgcacagccaattccactaaaccgctgcagaggaggaaattggggatgtcttaggttaaatttttaaattcacccttgttttgattgtgctttcagagctcaagagttgtnacataaactactattggtnccgaaagcattantaaagaganaaggggggcaaanggttc

SEQ ID NO: 2402 - DNA, 171 bp, Zea mays
  Clone ID: MRT4577_102191C.1
ggggggccccttttttggtggcaggccccccacgccacgtagttggactttttcgaggacgcgtcgtttttttttttttactggacccgaggggagatacttagtaagattagcatgcagacgtaaacttacaacggacgcactagctgcacattcaaggggatactgtct

SEQ ID NO: 2403 - DNA, 1189 bp, Zea mays
  Clone ID: MRT4577_102192C.1
gtgcattgcgcgcctcgaggccggccgggattcctctccgccccctcccaccccaccccaccccacccgcaagcgaggcagcctaggacgcagcagcgcacccccgatcctcgcctgtcgcctccatctccattcgcaggcctgagaccctcgcccgcaccgcgctgccgccagccatgggaatggggcctctcgagaacgccgcgtcggccgccgctgagtccgcggccttgccggaggccggcgccgcctcggcagcgggctcgtacgcggtgctgcagtgcggcgaggactcggagtacgtgcggcagaagtacggcggctacttcgccgtcttccgcgcgctgctggaggaggacggcgagagctggcgcgtgtacggcgccgtccgcggggagctccccaccgacgccgaggcggccggcttcgacgggttcgtcatctccgggagctgctccgacgcgcacggcgacgagccctggatcctggacctcgtcggcctcatccgccgcctccacgccgccggcaagcgcatcctcggcgtctgcttcggccaccagatcctgtgccgggcgctgggcgggcgcaccgggcggtcgaccaagggctgggacatcggggtgagctgcatccacccgacggcggcggcggcgcggctgatcgcgccgctgaagctgacggtgcacatgccggtgatcgagttccaccaggacgaggtgtgggagctgccccccggcgccgaggcgctggcgcggtcggacaagacccgcgtcgagatgttccgcctcggcgcccgcgccatgggcgtccagggccacccggagtacagcaaggacgtcctcatgagcatcgccgaccgcctcctccgccacaaccacatactggactgccaggtggaagtggccaagacgagcttcgacgtgcggcagccggacaaggagctgtggagcaaggtgtgcaggggcttcctcaaggggaggctgcagtcgcagcagcaattccactaaccgctgcagaggaggaaattgggatgtcttaggttaatttttaattcacccttgttttgattgtgcttcagagctcaagagttgtacataaactactattgtccgaagcattaataaagagagagggggcaaatggttcgttggttttaatcaacaaaaaaaaaaaaaaaaaaggggcggcc

SEQ ID NO: 2404 - DNA, 351 bp, Zea mays
  unsure (1)..(351): unsure at all n locations
  Clone ID: MRT4577_102193C.1
gccagagcatagacagcaggagcttcagacgcgctgatagccgacgcgggcccataggtgtctaacatccggtgtggccagtcactcaccctgacctagctggtggatgctaccgccacttttgctcccgtgcacaatcccgcgggatggccgatacggcatcgtctaatgttgctgtgctccctgcgactaccaggacgagctgaagaacctcctccactacatggaactatgctagcggtacctcaaactgctaggcgacgacatagacaccttnacggtacaaaagtcacctgccgttactgagctactagtgccagggcgaccaaatgataattgagtacgagaacg

SEQ ID NO: 2405 - DNA, 124 bp, Zea mays
  Clone ID: MRT4577_102194C.1
cctggtgctcgtgcgcgggtagctctgactgcgctgactgtgagctgaatacttcagagaccacgaagctcaagatgtactgctatagatcgataacatctttcgcttcacccaggctggttca

SEQ ID NO: 2406 - DNA, 763 bp, Zea mays
  unsure (1)..(763): unsure at all n locations
  Clone ID: MRT4577_102195C.1
aatcattgattatttttcgaatttctccattttctaaaaactcaaatgggagttctttccaactatctctggggttcaaaaacccctgaatatactcacactgaggcttatctcctcaccagcaaaacactcacattctttagactctttagcttatttgcttctgttggtatttatttctggtgtatgggtctccaccttcccactattcaattcctcacaatctggggtgtcactcttgttcccatttatttcgtctgcgtttgtgcttgctatttcatttacaaggaaagcaaaatcaaatcagagacatcttatgctttatggaagctgacgatcattctttgtgaggtggctttctctcttcaagtcctgatccctccttattattggtactttttgcaccctgaaggacttggacctgaaaagggagcagaattctggaatactttttgctctcattttgtcgttgcagcacttaatctgggtggaggttctcttgaacaaaatcagattttatcctaaacatattgtcatcattttgtctgttggaattacttatgctgtggtgaactgtgcctacaccaaaattcaaggtgctccagtctattttaacttgacttgngacagtattgcaagtctatatttaatcatgggatcctttacggtggtttgcttaggattcttgggaggttgtggcttctcaaatgtcaaattcagagctaaacaattatgtaaagctgttgatggggctgctgataag

SEQ ID NO: 2407 - DNA, 203 bp, Zea mays
  Clone ID: MRT4577_102196C.1
taaaaaagaaaaaaaaaaaaaaaaaaaaagaaaaaaaaaaaaaaaaagaaagataaaaaaaaagaagggatgaggaagaaaatggggcgggatagagaaacgcgataaagggaagatgagtcgcgggggggtaggtcagctcagatgggagggagggtggtcggagttgcagattcgaggagcaagagagtgtcgtaggagat

SEQ ID NO: 2408 - DNA, 512 bp, Zea mays
  Clone ID: MRT4577_102197C.1
accctactacgccaccccacacggatcgaaaacgaattaccctcggtgccctccctctctctgccagaagctcaagtgcccttcatctccggtgcggcaaatgacagggatgcaggatatgcacatgctaccctcaaggcccccatggtgatgaaggagatcttcattggactgaccctggatctgatcgctggaggcatgtggaagacgcaccactgtaacgagcagaagaaaactagatccttctacaacatgctcgacaaggaccagatcagcggctccgtacaggagtatctcccacgcgcctactcagaaatcttttttttccaagagtgtatataacctcactctggacagcactactaaccgacatggtgtacaaaaataacatgaaggttgccgtcaccatttgggatgtacatccaggcaaagaaaggcccctacttgcctcggactgatgctaataataacgcttactgagaagctgactcccgactatgatgactcttgat

SEQ ID NO: 2409 - DNA, 374 bp, Zea mays
  Clone ID: MRT4577_102198C.1
cttcaccagttttgcttgttaaaaagaaggaccaaacttggaggttttgtattgattacaggtatcttaatgccttaactgtgaaaagcaagtatcctgtgcctgtctttgatcaactcatagatgagctcagcaattctaaatggttcagtaagcttgatgtcaaagccggctatcatcagattttgttgagaccgggtgaggaatacaaaacggctttccaaacacatgtgggacattttgacttccgagttatggcatttggattgactggtgcgcctaatactttcctgagtgctatgaatgacaccctccagcctgtccttcgaaaaagtgctatagttttctttgatgatattttggtgtacagtctg

SEQ ID NO: 2410 - DNA, 511 bp, Zea mays
  Clone ID: MRT4577_102199C.1
gggtgagcatgatgacgattacaaaaggtgtttgcacgccatgcgctacatgaacagggagctacaaagatgcgatccatggaatcactgcgatgctggtcccttgaaaacttgcttcttctataccacacgcagagagaggaacttttccttgacttaccgacggggattgatccaccggcattatatcgcatgttgtgaacattacatcaattttaaccagatgtatgccactcattcatgtcaagactctatgcctaccaggtatgtcgaggcttcacctattttcacacagtacctggagtttgccacaaggactgtggaaccccaaaatacttttggatgatccactgactcaccaagtcaagatatctgattatgggacctgccaaaaagtcggtcagaagagtgaagcaaacatatcatatatatgtgtcaccgtattaccgtgctacctagctaatatactggggcaactaggatacacaacatcaatcgatattttggcaac

SEQ ID NO: 2411 - DNA, 498 bp, Zea mays
  unsure (1)..(498): unsure at all n locations
  Clone ID: MRT4577_10219C.1
gggtgtggtgttttttttttttttttttttttggtgttttttttttttttttttttttttttttttttttttttttttttaaacaagaacatactggagccttaaaaacatagatttacttgtttcagttgcatacagcatcaaatttttgggggggggggtaagggtcccaattcaagcctcgacgaagtaccaatgggccaacaacagcctaaggggtcaacatcgccaaatttattacgagaaaaacaatacgacaatctggttggtcacattggctccagatgcaaaaaacgcatgattcccttcagggcggagaatggatcactccaagatagggtttatttaagcatcaacaaaccccaattcggaaagcttgagggggggctttttgtagtcatcaaaaaaagccttctcatgcccaggatatttttcgacaagaggggcggaaaacaggggnccctaaaaaggggcttttgtcacttggggagctgaaaa

SEQ ID NO: 2412 - DNA, 627 bp, Zea mays
  Clone ID: MRT4577_1021C.1
tcaagacccccggcgtcttcaccgccgacttcccggcgcacccgccggtgcagttcgactacacggcgcagaacgtcagccaggccctgtggcagccggtccccgcgaccaagctgtacccgctcaggttcggctccgtggtgcagctcgtcctgcaggacaccagcatcgtcacgcccgagaaccaccccccaccacatccatggctacgatttcttcatcctcgctgagggctttggcaacttcgaacccgagaaggacgtcgacaagttcaactacgtcgacccgccgcagcggaacaccgtcgcggtgcccgtcaacgggtgggcggtcatccagttcgtcgccgacaacccaggtgtgtggctcatgcactgccatctggacgtgcacatcacctggggcctggcaatggctttcctagtggaggacgggtatggagagctgcagtccctggagccgcccccagttgatcttcccatgtgctaatgctgagcagaagcaactgtgttgaggaatcgaaagcatgttcacgcttccagcttgttttcaagttttcccctgtaaatctatgtaatttccaatgacattcagcatattattagagaataaattatttctttttgt

SEQ ID NO: 2413 - DNA, 291 bp, Zea mays
  Clone ID: MRT4577_102200C.1
gggacccgtgggcagggttctattatggctacaacagcgccgctcggactactactccccctcgtgctgctgctgctgcaagaggaaggctcatccccaaaggaccacaaggaagagaccaaggtgatccccttgtgcgaccccatcgcgggttcgcggaacaacaacggggtgcacacgctgaggaaggccaaccatccggcctactgtaggaacatgttgaaccaagaagcaaccgcacgctactccaactgactcatacaaacagaccccattgcccagcaagtgggc

SEQ ID NO: 2414 - DNA, 800 bp, Zea mays
  Clone ID: MRT4577_102201C.1
cctcgagccggccgggagatccactcgtagagagaaggaaaaatatccccaaaccctagctcccgatctcgatggcgaaccctcgcgtcttcttcgacatgaccgtcggcggcgccccggcgggccggatcgtgatggagctgtacgccaacgaggtgcccaagaccgcggagaacttccgcgcgctgtgcacgggcgagaagggcgtgggcaagtccgggaagccgctccactacaagggctccaccttccaccgcgtcatccccgagttcatgtgccagggcggcgacttcacccgcggcaacggcaccggcggcgagtccatctacggcgagaagttccccgacgagaagttcgtgcgcaagcacaccgcccccggtgtgctctccatggccaacgccgggcccaacaccaacggctcccagttcttcatctgcaccgtcgcgaccccttggctcgacggcaagcacgtcgtcttcggccaggtcgtcgagggcatggacgtcgtcaaggccatcgagaaggtgggcacccgcaacggctccacctccaaggtggtcaaggtcgctgactgcggacagctctcctagatctctctgatctggtcttagtttatcatgtatcgctcgcagtttaatttagcggtttaggtgtggatctgtgaaccccatggcgcctctgcttgattcgtgtttcacctgttatgttctgagattcatggtaatgctatgagaaactgaattcccgtttcatgcgaaaaaaaaaaaaaaaagcggcctcgagctcagctttggtccctt

SEQ ID NO: 2415 - DNA, 208 bp, Zea mays
  Clone ID: MRT4577_102202C.1
ttactgtcttcttattcatatcacgacccaggttattttaaatattccaaatctccatcacagatcagaacccatttctacaataattacctaccaattgccttttagaaaccatttaaaaacaatcctcaccctctaacacataaattcactaaaaaacataaatctttaactcaataaatcctataaaaaattccctccccttaca

SEQ ID NO: 2416 - DNA, 692 bp, Zea mays
  unsure (1)..(692): unsure at all n locations
  Clone ID: MRT4577_102203C.1
ccgccggggccctggggccggcaattttatcgcacccgttctcccctctctaacgcagatcagatcatcctcgtagatataatgatatatatccccaaaccctagctcccgatctcgatggcgataccctcgcgtcttcttcgaaatgaccgtcggcggcgccccggcgggccggctcgtgatggaagctgtacgcaaacgatgtgcccaagatcgcggagatacttccgcgcgctgtgcaaccgggcgatgaatggcgtgggcaagtccgggaaatccgctccaacttaacaaagggctccaaccttccaccgcgtcatccccgagttcatgtgccagggcggcgaacttcacccgcggcaacggcaccggcggcgagtccatctacggcgagaagttccccgacgaagaaagttcgtgcgcaagcacaaccgcccncggtgtgctctccaatggccaacgccgggcccaacaccaacggctcccagttcttcatctgcaccgtcgcgaccccttggctcgacggaagcacgtcgtcttcggccaggtcgtcaggcatgggacgtcgtcaaggcatcgagaaggtggcacccgactgcggacagctctcctagatctctctgatctgggtctgttcggccgccctccctccgtcatcgtcgactccccctgcgtccgttcttttggatctg

SEQ ID NO: 2417 - DNA, 626 bp, Zea mays
  Clone ID: MRT4577_102204C.1
agacagatcacactcgtagagagaaggaaaaatatccccgaaccctagctcccgatctcgatggcgaaccctcgcgtcttcttcgacatgaccgtcggcggcgccccggcgggccggatcgtgatggagctgtacgccaacgaggtgcccaagaccgcggagaacttccgcgcgctgtgcacgggcgagaagggcgtgggcaagtccgggaagccgctccactacaagggctccaccttccaccgcgtcatccccgagttcatgtgccagggcggcgacttcacccgcggcaacggcaccggcggcgagtccatctacggcgagaagttccccgacgagaagttcgtgcgcaagcacaccgcccccggtgtgctctccatggccaacgccgggcccaacaccaacagctctccgtcatcgtcgactccccctgcgtccgttcctttggatctgaataagatggtggtgatctgagtggtggtcttagtttatcatgtatcgctcgcagtttaatttagcggtttaggtgtggatctgtgaaccccatggcgcctctgcttgattcgtgtttcacctgttatgttctgagattcatgataatgctatgagaactgaaattcccgtct

SEQ ID NO: 2418 - DNA, 203 bp, Zea mays
  Clone ID: MRT4577_102205C.1
agtactacgtaaattattataattttgaggttaatatctaacattacacaatttttaccaatagatcgcttagggtttattctcagagcatattttcagctctgctaaaactttagtcactatattttttcatattttcttctattaattgtaccaaactctaattattatctatattatttgatggttattatttttttatt

SEQ ID NO: 2419 - DNA, 704 bp, Zea mays
  unsure (1)..(704): unsure at all n locations
  Clone ID: MRT4577_102206C.1
atttttactgcacccgttctcccctctctaccgcagatcagatcacactcgtagagagaaggaaaaatatccccaaaccctagctcccgatctcgatggcgaaccctcgcgtcttcttcgacatgaccgtcggcggcgccccggcgggccggatcgtgatggagctgtacaccaacgaggtgcccaagaccgcggagaacttccgcgcgctgtgcacgggcgagaagggcgtgggcaagtccgggaagccgctccactacaagggctccaccttccaccgcgtcatccccgagttcatgtgccagggcggcgacttcacccgcggcaacggcaccggcggcgagtccatctacggcgagaagttccccgacgagaagttcgtgcgcaagcacaccaacggctcccagttcttcatctgcaccgtcgcgaccccttggctcgacggcaagcacgtcgtcttcggccaggtcgtcaggggcatggacgtcgtcaaggccatcgagaaggtgggcacccgcaacggctccacctccaaggtggtcaaggccgctgactgcggacagctctcctagatctctctgnatctgggtctgttcggccgccctccctccgtcatcgtcgactccccctgcgntcgntcctttggatctgataagatggtgtgatcctgagtggtggtcttagtttatcatgtatcgctcgca

SEQ ID NO: 2420 - DNA, 643 bp, Zea mays
  unsure (1)..(643): unsure at all n locations
  Clone ID: MRT4577_102207C.1
attccattcctttctctatcaaatgatctgctgcaaaacagtaaacgcaagggggtactactatgtggatgagttctggagggttctacctagatccctgaagcatgtttatgaaaatgcgggacaggaagggaggaaccacgtgccgacattgatattagtataggatcaacgataagttcttgccactgcccttggaagcgtgaaacttcgcactctgggtcacaaccctggtctattggataacattgtgcatagttcaaatcctacatatagcccgacttcaaattgcacaggttggcgatgggcttctaggacaggcccgaaataacttactgctactggtactgccaccaaagattgtgtttcctaccaatcaccggttggtcagacattccgatgaagacacaaggtctaaacacaggcctagactgctcgagagacgttttgcgagaggaatatggtataagacatattacgtacgctagcatgcntcgtgttatcaggcatcatcatcattgatctctgaccttcattagcaggaaatgacctcttaactgtgcttcgaacagctcgaaagtgcacgcacggggagtatctccctgatcaatcaattgaaagaagctctcaccgaacaggagtc

SEQ ID NO: 2421 - DNA, 232 bp, Zea mays
  Clone ID: MRT4577_102208C.1
gtctctatattgagagagaaaggctgtttcatttttcagtggggcccggcctcttagttgaccttcagtatgaggcaaaaccccacctattaacatgtctaacacctaatcctagttgagaattacaaaaccgtgtccttttttttctggcatcaaggcccaacgaacactttacattaccgtcggccactgtcgacactcttcactaataataacctcttttaatcctccc

SEQ ID NO: 2422 - DNA, 889 bp, Zea mays
  Clone ID: MRT4577_102209C.1
acagaacgcagcagccgaaggaaaaatttccccccaaccaaaaaccctcgctcccaaaccctagctaccttcggatcccgatggcgaacccgcgcgtcttcttcgacatgacggtcggcggcgcggcggcggggcggatcgtgatggagctgtacgcgaacgaggtgcccaagacggccgagaacttccgcgcgctgtgcacgggcgagaagggcgtggggaagtccgggaagccgctccactacaagggctccaccttccaccgcgtcatcccgcagttcatgtgccagggcggcgacttcacccggggcaacgggaccggaggcgagtccatctacggcgacaagttccccgacgagaagttcgtgcgcaaccacacggcccccggggtgctctccatggccaacgccgggcccaacaccaacggctcccagttcttcatctgcaccgtcgataccccctggctcgacggcaagcacgtcgtctttggccaggtcgtcgagggcatggacgtcgtcaaggccatcgagaaggtcggatcccgcagcggatccacctccaaggaggtcaagatcgctgactgcggccagctcagctagatcgttggtctggtctggtctggtctgcccgtccgccctccctccctcccgtcatcgtccactccgcctgcgtcccgtcccgtttccggtttgcttcgatctgaataagatgatggtgatctgagtggtggtctgagttgagtcgtttgtttgtcatgcgtctgtctgtgtcgctcgcggtttaattctggcggtgtaggtgtggatctccgaatcccatggcgcctctgcttacttcgtgtttcatcaccagttatgttatatgagatccaggataatgcattaatgct

SEQ ID NO: 2423 - DNA, 1807 bp, Zea mays
  Clone ID: MRT4577_10220C.1
ctcggttctggtgcgcggcccctggaactgccttgcctagtgcctactgcctagggaaggaccgaaggagaggtgcgcggctggtggcgtgcgagtggcagcggcgccgcgggactcttctcctcgccgctcgcctgctgggtgcgccatccctcgacggtgacaccgtgatattgctgtgaagttttgtggcacttcctgcatcccttatatggtattaacaaaaattttaattgtctgggtgatccatttgagcaaatggaaggcaacgatgtaccccttggaaacatgttgcaaggggttccctatgaaagtttagacttacgtggcagctctatgcaaaattatgctccaaactcaggaaaacatatcttcagcagctcccagatgccaggtactttcacaatgtctatgaccagggctacagagcctgatgactttcctgggtttcagttcaaagaacagggaaagagtgatgaccaccaccaccaacaccatagtcatcactcaaagaactgcaagagtgatggtgaggaacatgttgtggctgaagatgctactgataccccaagtggcaaaggcaagaagggctctgcatggcatcggatgaagtggacagattcaatggtaaaacttttgataacagcagtgtcttacactggagatgatcatggtgctgattccggcggtggcaggaggaacttcacaataatgcagaagaagggcaaatggaaggcgatatcgaaagttatgggagagagaggctgccatgtgtcaccgcaacagtgcgaggacaagttcaatgaccttaacaagagatacaaaaggctgacagacatccttggtaggggcactgcatgcaatgttgtggctaatccagcacttcttgatagcatgactcatctttcagataagatgaaagacgatgcaaaaaagatacttagctcaaagcacctattttatgaggagatgtgttcctaccacaacaacaaccgtgtaaatttgcctgaagatcatgcacttcagcattcactactgcttgcccttagatgtaaagaggagcatgatcctcagagggatccaagtggagatgctgatgaatacgatcaaagtgctgattctgattatgaggagaatgacgacgatcaacatcctgtgcatataaacatgagggagccctcaatgcacaaaaggaagcgccacagtgatgtggctttggtcacatcaagttctcatgaaggcagtgagaggtctgatccccatgctgtcacagtggacatcaacaaggctttcacagatgcaaccaacatggttttgttgcaacaagacttggcttcacaagccatagagattcagaaacgtcgcttgcagattgaagcaaaggaactggaactcacaaagcaacgtcttaagtgggagcggttcaggaagaagaaggacagagagatagaaaggattgcattggagaatgaacatatgatgattgagaacaaacgcttggagcttgagctgagacataaggagttagagctagagctgaagctgaaagacaaggggaaccatccgtaacttttgcttgaccaacactacagtatgtaagatggtaaacaagttgcggttgagcttctggaagagagctggtagattagagtagactctgacaaccattcctgtgcgtatgactttgttctgtcttgtcagatgtacttgctgggcctcctgcttgtagcaccgcctctgcagcagatctataagactgtgatttccaacttgccatttttttttattcagcatgtatgtcatggtg

SEQ ID NO: 2424 - DNA, 558 bp, Zea mays
  Clone ID: MRT4577_102210C.1
atcgcttcagctcggcgtcttccaatcgccggcgcatactctctaccgagcccgacaagatcttcaattccccattccgcccaccgatcgaccttcacgccggtctcggtctcttccgaaagggtctcgcgcgggtgtttgagaggagacgcacgaaaatgagtgcagtgcctctccgtccacattcgccaggccggcatccaagacggtaactcgtgctgggaactttactgcctccagcacggtatcctacctgatgaccaagtgcctgcacataataccgctcgacatcacgatgatgccttcagcaccttacttcagccagactggtgctgagaacacgatccccgtgcaatcttcgtatgatctacaacccactgtgatcgatgatgtgcgcactcggacgtaccgccagctcttccaccctgatcagctcatcagtggcaaacatgatgcagctaacaatttcccccgtgaccattactccattggctaggagattgatgatctgtgccatgaccgtatccgcaagattgctgacaactgcaccgtgctcca

SEQ ID NO: 2425 - DNA, 837 bp, Zea mays
  Clone ID: MRT4577_102211C.1
cttttttttttttttttttttttttttttttttttttttttttttttttttttttttttgaaacgggaatttcagttctcatagcattatcatgaatctcagaacataacaggtgaaacacgaatcaagcagaggcgccatggggttcacagatccacacctaaaccgctaaattaaactgcgagcgatacatgataaactaagaccaccactcagatcaccaccatcttattcagatccaaaggaacggacgcagggggagtcgacgatgacggagggagggcggccgaacagaccagatcagagagatctaggagagctgtccgcagtcagcgaccttgaccaccttggaggtggagccgttgcgggtgcccacctcgtcgagggcatggacgtcgtcaaggccatcgagaaggtgggcccccgcaagggctccccctccaaggtggtcaaggtcgctgactgcgggcagctcccctagatccctctgatctggtctgttcggccgccccccccccgtcatggtcgaccccccctggggccgttcctttggatctgaataaaatggtggtgatctgagggggggtcttagtttatcatggatcgctcgcagtttaatttagcggtttaggtgtggatctgtgaaccccatggcgcctctgcttgattcgtgtttcacctgttatgttctgagattcatgataatgctatgagaactgaaattcccgtttcatgcttcttaaaaaaaaaaaaaaaaaaaaaaaaaaaaaaaaaaaaaaaaaaaaaaaaaaaaaaaaaaaaaaaaaaaaaaaaaaaaaaggggcggcccgttttaaa

SEQ ID NO: 2426 - DNA, 432 bp, Zea mays
  unsure (1)..(432): unsure at all n locations
  Clone ID: MRT4577_102212C.1
actcccatctggccttttgaggcaagccagcatggggctaacatggctgcgtgctgcttactcgccctggtgcgttgcccggtaggcgaacggttacccacggagtcaccccgggggtgccaagctcccatttggcttggctgactagcctcccaccgcgccgatctaagactatgtagccgacgacccgccgcctggcagtgttctccatccacgagccttcgggtccacccatcccgccccgtatagggactaccaataaactgaccgacacacggagacgtgcccctacganactcaacatccaaaagactacgccataaaagttcaaaacatgaactaactgactgagcaaacacatacatacttactaccatcaaatccgaccatacactgaggacttcgatgaacgaacaaacactgcttgatatg

SEQ ID NO: 2427 - DNA, 418 bp, Zea mays
  Clone ID: MRT4577_102213C.1
aaatcattacaataaattgcttacttatcacttatcagtataatgccaagccttacacagacacaacctatacgaactttctttttttatgcactaccaaagcacggaagaaaattcagtttacataggaacgaccaaacttcaacaagcgccacttttacggcactaacaaccaaacaaaaaagtccaaaactccaaaaattgtgatcacgcacacttcagatcaagaagcgctcatggcacgacacctgctgccatagttggagcagcagcagcagcagcagccttgctggtttcctgcagcgagatgacggtctcaaacgcgccaacgagtgccttcaccttgctctttctcgcctcagcgacgagccggctcgccgtctcctcaatcacgttgttgaacagccctggctcctgc

SEQ ID NO: 2428 - DNA, 947 bp, Zea mays
  Clone ID: MRT4577_102214C.1
gcaaacgtaccccggtgctcccttgcggccggctattttaccgcaccagctctccccacaaatcagatcagatcacaccacagccgcggatagagaaggaaaaatttccccaaaccctagcttcggatctcgatggcgaacccccgcgtcttcttcgacatgaccgtcggcggtgccccagccggccggatcgtgatggagctgtacgccaacgaggtgcccaagaccgcggagaacttccgcgcgctgtgcacgggcgagaagggcgtgggcaagtccgggaagccgctccactacaagggctctaccttccaccgcgtcatcccccagttcatgtgccagggcggcgacttcacccgcggcaacggcaccggcggcgagtccatctacggcgagaagttccccgacgagaagttcgtccgcaagcacaccggccccggggtgctctccatggccaacgccggccccaacaccaacggctctcaattcttcatctgcaccgtggagaccccctggctggatggcaagcacgtcgtcttcggccaggtcgtcgagggcatggaggtcgtcaaggccatcgagaaggtgggctcccgcagcggcgccacctccaaggaggtgaaggtcgctgactgtggccagctctagatctctggtctgtccggctgccctccctccgtcatcgtcgactccgcctgcgtccgtcccttttcatttccttcgatctgaataagatgatggcgatctgagtggtggtcttagttgagtcttcaagtcgtttgtgtctgtgtccctcgcggttttaatttagcggtttaggtgtggatctgtgaatcccgtggcgcctctgcttaatccttgtttcagctgttatgttatgggatccatgataatgctataaaactgaaattccgtttcgtgacaaaaaaaaaaaaaaaaaagcggcc

SEQ ID NO: 2429 - DNA, 394 bp, Zea mays
  Clone ID: MRT4577_102215C.1
aggaaaaaagaagcccaaatttagccgggtatagaaacatatatatgggggggcccaaccgggggcccttaaaaggggcggtccatcccaggggtttaaaaaatgggcccccccccaggggggcacccccaaaagaagggcccccccttgggccccaagaaagcgggatgcgcccagtttattgaggggaaaacacccccgaccaggaaaaaaatacatatggttaagggcggcggactttaaggcgacccccccccccccgtttctgaaccaaatagggggggcgggtaaaagaacccaccccatcaatgggcctgttcctaagggaccatgtggggaaggggggggaaaaactcggacatttggatgagggacccggggggggccccctggg

SEQ ID NO: 2430 - DNA, 1097 bp, Zea mays
  Clone ID: MRT4577_102216C.1
gggcggacgctggggaagcatatgctctgctcagctaaaagacaagtactacatatatatatatacgctgtgtgtcaattaatgggttctaggctgctgctgatgcggctgctgcttactagttcttgaggtgggctaccgcagatcagatcacactcgtagagagaaggaaaaatatccccaaaccctagctcccgatctcgatggcgaaccctcgcgtcttcttcgacatgaccgtcggcggcgccccggcgggccggatcgtgatggagctgtacgccaacgaggtgcccaagaccgcggagaacttccgcgcgctgtgcacgggcgagaagggcgtgggcaagtccgggaagccgctccactacaagggctccaccttccaccgcgtcatccccgagttcatgtgccagggcggcgacttcacccgcggcaacggcaccggcggcgagtccatctacggcgagaagttccccgacgagaagttcgtgcgcaagcacaccgctcccggtgtgctctccatggccaacgccgggcccaacaccaacggctcccagttcttcatctgcaccgtcgcgaccccttggctcgacggcaagcacgtcgtcttcggccaggtcgtcgagggcatggacgtcgtcaaggccatcgagaaggtgggcacccgcaacggctccacctccaaggtggtcaaggtcgctgactgcggacagctctcctagatctctctgatctggtctgttcggccgccctccctccgtcatcgtcgactccccctgcgtccgttcctttggatctgaataagatggtggtgatctgagtggtggtcttagtttatcatgtatcgctcgcagtttaatttagcggtttaggtgtggatctgtgaaccccatggcgcctctgcttgattcgtgtttcacctgttatgttctgagattcatgataatgctatgagaactgaaattcccgtttcatgcttcttaaatctttgacctctgcggttgtgccatacgtttttattttccattccgagatctaggccacaaaatgattctggttgttagtgttatcaaaaaaaaaaaaaaaaaaggccccta

SEQ ID NO: 2431 - DNA, 295 bp, Zea mays
  Clone ID: MRT4577_102217C.1
ggggggaaaacaattttacagaaaaaccctggtcccccatttgggataagggtttgggtgggtccccccatagccccttttagggggggccatttttttatgggccaaactttttggagttttggaaggcccaaaaagggggcctacgggcatattaacaagcccctacgtttttccaagccaggggtgactttgggctttggcatttgggaatccccgcccatttcttttcggttggcgggaaccgttttattacatgggggagggtctccctttataggtgccttcaaagggg

SEQ ID NO: 2432 - DNA, 1592 bp, Zea mays
  Clone ID: MRT4577_102218C.1
ccggccgggccggggtgttacgtgtatagtaggccccttttgacgaacggcgcgggccggggccaccaccagcatctgcggcagggagaatcgcgttggttcgacgcaaacgctacccggcgcccccttgcccttggggccggctattttaccgcacccgttctcccctctctaccgcagatcagatcacactcgtagagagaaggaaaaatatccccaaaccctagctcccgatctcgatggcgaaccctcgcgtcttcttcgacatgaccgtcggcggcgccccggcgggccggatcgtgatggagctgtacgccaacgaggtgcccaagaccgcggagaacttccgcgcgctgtgcacgggcgagaagggcgtgggcaagtccgggaagccgctccactacaagggctccaccttccaccgcgtcatccccgagttcatgtgccagggcggcgacttcacccgcggcaacggcaccggcggcgagtccatctacggcgagaagttccccgacgagaagttcgtgcgcaagcacaccgccccgcggtgtgctctccatggccaacgccgggcccaacaccaacggctcccagttcttcatctgcaccgtcgcgaccccttggctcgacggcaagcacgtcgtcttcggccaggtcgtcgagggcatggacgtcgtcaaggccatcgagaaggtgggcacccgcaacggctccacctccaaggtggtcaaggtcgctgactgcggacagctctcctagatctctctgatctggtctgttcggccgccctccctccgtcatcgtcgactccccctgcgtccgttcctttggatctgaataagatggtggtgatctgagtggtggtcttagtttatcatgtatcgctcgcagtttaatttagcggtttaggtgtggatctgtgaaccccatggcgcctctgcttgattcgtgtttcacctgttatgttctgagattcatgataatgctatgagaactgaaattcccgtttaaaaaaaaaaaaaaaaaaaaaaaaaaaaaaaaaaaaaaaaaagatcgatcgcccggaaactgacctctaccgatgtctggagccggcgaggaggataagaagcccgcggagggcggcgcccacatcaaccttaaggtcaagggacaggatggcaatgaggtgttctttcgcataaagaggtccacccagctgaagaagctgatgaacgcctattgcgaccgccagtctgtggacatgaatgccattgcattcctgtttgatggccgcaggcttcgcggcgagcagacccctgatgagctggagatggaggacggcgacgagatcgacgccatgcttcaccagaccggaggcagcgttcctagcaccacctaaaagcagcagctgcggagcctcgttttgctctccgccctgcgtagtactaaacaaaagggaaaaagtctttttaaggaacttgtgatgctctggctccttgtgccattgctgagggacatccttagcctttatttagggggatggtttggtactttgttctgtcatcactcgtttatctatccctaatacatgcccgcatgtttgtacttct

SEQ ID NO: 2433 - DNA, 604 bp, Zea mays
  Clone ID: MRT4577_102219C.1
acccagcgtgcatacacacagcagtcctttgtcttgtacccgtgagcgctctctttctctattgactggcgactactgcaccaccgacgtcggtctacgctagacgcccatttattgcccaacgtcgagcatccggggtagagaggatgatattgcaatcgaaacaatggctgtagagttcggcgctcgcatgacagtcaagcttaaccaaggtggaccatctgcgccctgtaacccatggacacaaccatattctcaaggttgttgactgcaagatgggcggccaaataggccgcgagggaggagggccccatggaatacagatgaggattgccgagtgcttgattgctgatggaaccggcatcatgtggcttcactgcaagatacgatcaactggcatcgtattatgcctgcaacaactgttgaactgatgaacgcatagatcgacatgttcaaggcctcgatgcggcttgcagaggacaagtgggtgaatagccaaagctgctgaaagctcatctgattggacaggcaaggaggacaacaacctgcccttaattgtaccatgagctggtgactgatgacggattgaaaaccgccattgctt

SEQ ID NO: 2434 - DNA, 808 bp, Zea mays
  unsure (1)..(808): unsure at all n locations
  Clone ID: MRT4577_10221C.1
ccggccgggcctattgcttcacctatatcttttatcctgatagccacccgccctcctatccttatccctgtcattcttaatccaccataaatccttataaatcccatggccgcaactacaaaccccctccatgggaccccgcgctcttcccagcgccccgtttcctctcatactttcaccattgcgggcatcctcgtcgacgtccatggcctcgatgaaatacctgcttcagcctcttcggccgcctgcctatggctcttgaacccgcgcttgcagacgaaagaaaccatggagccaattgccaaccgtgtcatcacagaatggaacaagcgcatacaggagggccgcgcaggcaagaaccccaaaggcctcatagccgctgcgttcgaccagcgcaatcatggctcccgcaaagtcgatgaacttcacaaccaagcctggagggaaggaaacgagcgacatgcccaagatatgtttggctgctaccacggcaccgctaccgacacctcgcagctcatcaaccacctcgagtcctacatattcacagccccggatgccccaaagatcacacaccactatgctctcggtatctcactcggcggccacgcaacctggcactgtctgttaggcgacccacgcatcactgccggcgtcgtaggcataggttgtccagactacacccgcctcatgaccgaccgcgcacgtctatccaagcgagagtcatacanaagaaccacaccgnccggcgctgcctttntcggatcccctgattttccacaggccctgcaggatgccattgctcagtatg

SEQ ID NO: 2435 - DNA, 146 bp, Zea mays
  Clone ID: MRT4577_102220C.1
ccttactttactttttacctaaatatgtacacttttatcaagtaaatcatcaaaatcgagaaaaatacttaggcccaattgaactgataaccaacattcggaccataggttttatattatctgtgggccgactgccaacggaaaaa

SEQ ID NO: 2436 - DNA, 462 bp, Zea mays
  Clone ID: MRT4577_102221C.1
aaaggaaaccttttatacaagccagaaggacgtcccaatgaatccaaaggacccatgggatctggaaatggacttcgatgacagcctgaccccagaggttccaattgtcctggtgccagatgtggacgccatggaaacggaaagcgttggcgcggcgcctagcgctgtggctcctgttaaggacaagcagattgaatctacctcatcgacatcaggcgcagttgctgatgatgaggaagctaataccgattacgaattgcttacggtgctactcaggaacccggagcttgtctttgcattaacctctaacaatggggagaacatgcctaacgagcagaccattgcgcttctggatacactgaagcagacccgccttagcctatcagagctggttaaccgtctggggaacggcgctgggctcccaaaagagccagagccggagccagaacctattcccgcttc

SEQ ID NO: 2437 - DNA, 107 bp, Zea mays
  unsure (1)..(107): unsure at all n locations
  Clone ID: MRT4577_102222C.1
gacatttcaccacctgtagcccacctcgctgtcgagtctcaacccagcgacggaatggcctcatttntatcttaccccaaggacgcccaagaaggcctacttcttct

SEQ ID NO: 2438 - DNA, 158 bp, Zea mays
  Clone ID: MRT4577_102223C.1
gtgttgtatttgttgtttacctgcttattattaccggtacgggcccccagggaacctagcgcaagcccggcaaacacgggacacacagacaacatgccagacagcttgtgtaccgactaacaggcctccaaacgaagccattccacgcaccagcccaa

SEQ ID NO: 2439 - DNA, 157 bp, Zea mays
  Clone ID: MRT4577_102224C.1
cgtaattcggctcgagtgtgcctcgacctcccctctatccctccgagtccagcccggcgccacccggtcagccttggatccgaggcgcagattctatccggacaaggcatacacttcaataattattaatcaataaaacatactttaaatttacatt

SEQ ID NO: 2440 - DNA, 219 bp, Zea mays
  Clone ID: MRT4577_102225C.1
atggtcatgaacgctaacagctatggcaaagcattcatagcagacaagaaatatggtagtgaggttccatacacttcggacaaggagcatgagccaccactgttgattgctgacaagaaggatggtgttacagaggcttcatctgcaacctacaatgatgtttatcaacctcgtagggccagctctgctcaaactgcaagcaagtgtgtcatattgtaa

SEQ ID NO: 2441 - DNA, 211 bp, Zea mays
  unsure (1)..(211): unsure at all n locations
  Clone ID: MRT4577_102226C.1
actcncccgatctggagctgaagtgcttgagccttccgcatccacttccacacaacataaaaaaccaaanannnnatngnnnagcggcnatanngnnanncannagaaaactnnnaaggcgaatgcgatagatagacacagagaaaccgatacatcacnanaaaacgagcgaaaaaatcggtccaaaccccagaccggacgcgcgttagag

SEQ ID NO: 2442 - DNA, 215 bp, Zea mays
  unsure (1)..(215): unsure at all n locations
  Clone ID: MRT4577_102227C.1
acgcgaggcgtacgganagttactgcatccgcggtgttgtgctgtggggaagggagaaggatttgtacactccggagcgaggttctgcttacccgaagccgctgctgtgcggatacccccgggtgaagccaccgtcatcatgtctgaccaggatgcaaaaccttcaactgaggacttgggggataagaaggaaagtgaatatagtaaactcaaag

SEQ ID NO: 2443 - DNA, 120 bp, Zea mays
  Clone ID: MRT4577_102228C.1
atcaaacagggggttggcaatagcgttaataataaaacactactacacaatatcactgcaataaatgtttcacttcatctaaatagaataaactaaagtgtgggttataaaacaattaaa

SEQ ID NO: 2444 - DNA, 580 bp, Zea mays
  unsure (1)..(580): unsure at all n locations
  Clone ID: MRT4577_102229C.1
cctcttctctggcctccgcgccctagcccctctgctcgctcggcgcccatctcctacggcgcctggccgaagctccctgctcagttcctcctgcgccgcgcccagctccctcctctcaagctctgtgtgcgcgcgcccatatcccctgctcctgcgcgtcgcaacttcccttccgtcgagccctgcatctccatggcacggacgtctgcgtcctccatctcctccttccccagcaggtgcccatcgtccccgacctcgcgtggttgggccgctccagcgccggtcgtcgcttaccgagccatggagtttgtacttgtgctcgaccaccacttcgccccagccgctgtggggtttggtcatcagcagggtgctgctgtgggcacatgcctccctcctcgagcaccaatcggagttcgggtcgtcagccgctgtgctgctcagcttcctgctgcacatgttcggcccatcaatgtctacttattcggtggtcgcatctcgcgctagtacttgcccaagtcaccgccgtcgcccagcttggcctctgctctgtccctgcggcgctncagctcgtcggcgcttg

SEQ ID NO: 2445 - DNA, 310 bp, Zea mays
  Clone ID: MRT4577_10222C.1
aatacacctcaagaatttagttcttctatatgtcactccattatcgggcgggttctacacattgtcacgcaatgattacatcaattatccccatcaataccacactgtcaacctcaaaatttcacctatcctcaacaactacaaatctactaacacactttaaaattaatgttctccagcaataaacatagtttgtcaggcacaacaagtccgatcgaagctttcacttacatgagatccatactgcaactcatagtctcccacacattgaactgacagatagctaattgatacaaatgttaatacttat

SEQ ID NO: 2446 - DNA, 177 bp, Zea mays
  Clone ID: MRT4577_102230C.1
ctcacagcgtgtagcatgcttttgactttcgtattttgaagctagagacgttagaactatgagacacggggtttcctcgcctgagtcagtcaattattcattacgaaacaattaccagcagatttgactcctgcaatggaccccattgtgaacccgaaagcatccccggtggcttat

SEQ ID NO: 2447 - DNA, 748 bp, Zea mays
  Clone ID: MRT4577_102231C.1
gccggccgggccgggccatcgtcttgatactccacgcccacaacccgctcactcacgccgctccgtccacactcccgtctttttcgactcccacttccaaaaacaacccccaccaaaaaactcattcaaaatgactggcggaaagtccggaggcaaggccagcggctccaagtccagcgcccaatctcgttcatccaaggccggtctcgctttccccgtcggtcgtgtccaccgtctcctccgcaagggcaactacgcccagcgtgtcggtgctggtgctcccgtctacctcgctgccgtccttgagtacctcgctgctgagattctcgagttggccggtaatgctgcccgcgacaacaagaagacccgtatcatcccccgccatctccagctcgccatcaggaacgatgaggagttgaacaagcttctcggacacgttaccatcgcacagggtggtgtcctccccaacattcaccaaaaccttctgcccaagaagactgccaagcctggcaagggtccttcgcaggagctctaagcgcattttgctttcgagtttcttcttcacggcgtggttacttcatgggtctttttcgtctgcaatgataatgggagtcggtctgggttttgggttctcggcttttcacgggatttataccagagctgtatattagctggtcgctttgatgaccacaggctcatgagctgaatcgagcatatcactagaaaaaaaaaaaaaaaaaagccccta

SEQ ID NO: 2448 - DNA, 328 bp, Zea mays
  Clone ID: MRT4577_102232C.1
aacaaaaaataaaaaaaagaaagaaaaagagagaaatgtcagagacacatgagaatgcacgacccgtaggcggaggcgcgactagcgcgctttacggacgcgccgcggtcatgtcgcacaaccacggaggcacaaaacgcgctccaccaatcgtcggagctaactgacatggacgagatcgataggctcatccatgcggcgccatctcgggccacggagctacacgcgcggccaccgaatggaacacttgtctacatacaaggatagttatctgcgggacagacgctcgtaccgacaaagctgactttgcctggcgattacataccaa

SEQ ID NO: 2449 - DNA, 792 bp, Zea mays
  Clone ID: MRT4577_102233C.1
ccggccgggatcgtcttgatactccacgcccacaacccgctcactcacgccgctccgtccacactcccgtctttttcgactcccacttccaaaaacaacccccaccaaaaaactcattcaaaatgactggcggaaagtccggaggcaaggccagcggctccaagtccagcgcccaatcgtaagtagccactgattgcatgctttgcagctttttgcctttacctgggctgcgcgcctcgtgctctctggtgttgcaacttgtttgcttttgacgcgtcttttgtctcaattgacgcgtcttttttcgcatctcttcaatattacatcatttgctaacagcaattccagtcgttcatccaaggccggtctcgctttccccgtcggtcgtgtccaccgtctcctccgcaagggcaactacgcccagcgtgtcggtgctggtgctcccgtctacctcgctgccgtccttgagtacctcgctgctgagattctcgagttggccggtaatgctgcccgcgacaacaagaagacccgtatcatcccccgccatctccagctcgccatcaggaacgatgaggagttgaacaagcttctcggacacgttaccatcgcacagggtggtgtcctccccaacattcaccaaaaccttctgcccaagaagactgccaagcctggcaagggtccttcgcaggagctctaagcgcattttgctttcgagtttcttcttcacggcgtggttacttcatgggtctttttcgtctgcaatgataatgggagtcggtctgggttttgggt

SEQ ID NO: 2450 - DNA, 772 bp, Zea mays
  unsure (1)..(772): unsure at all n locations
  Clone ID: MRT4577_102234C.1
tacctcgaggccggccgggatcttctccccctctgcccctctcgatttcttcttcccatctcccgatccatcgcaacccaaaccctactccaggcagatctccgtctgtgatggcgttccgccgcatcctatccaccgcggtgcgccgccgctcggccgtggccgccgcggcggccgggaacgcgcgcgaggcctccacggccgtcgctgcggcgccaggtgtgctcgcccccgatgcgaccgcggtgcgcgctcccgtgatgccgtatgaccgcatcgccgaggccgtcaacgccaggctccggcggctcgagcacccagacccgcgcttcctccgctacgccagccccgtgccgtcccacgcggaccacatggccattcttgcggcgccagagacccgggtcaccacactgcccaacggcctgcgcatcgccacggagtcttccctcgccgcgcgcacggctacggtcggcgtgtggatcgatgcgggcagtaggtacgagaacgaggaggcggtcggcgtcgcgcattttgtcgagcacatgctgttcaagggcacggggaagcgcagcgccgcgcagctggagctggagatcgaggacatgggtggccacctcaatgcgtacacgtcgcgggagcagacgacctactacgccaaggtgcttgacaaggacgtgccccgtgcgatggaggtcctctcggacatcctccagaactctaatctcgaccaggcccgcattgnacgtgagcgcgaagtgatcctaccagagat

SEQ ID NO: 2451 - DNA, 369 bp, Zea mays
  Clone ID: MRT4577_102235C.1
tccgatttcagattcaatagggacatgggcggttaatcggacgcggtgcgttcaaagtcaaagtcatcaaatggaaatactggggacggagtcaagactactgaatggctgtgaccatggtttcctttccctgtgagtgtatgagaagaaatttggatatgcactgagattaaatgtgatggaatgctgtattactaatagcgtcttgttctaatggcaggcggattgggcggctgaatcatttttgtgtttgaataatatgtttaggggtattcatacgtggtgtagtaaagaggaggctgaagtggtttgggagaagatatgttgaatgtctagtacagctgaagccattggcaattgtgtatgaag

SEQ ID NO: 2452 - DNA, 2593 bp, Zea mays
  unsure (1)..(2593): unsure at all n locations
  Clone ID: MRT4577_102236C.1
cataccgtccatcttttgttggaagattttatttntggcaaataattttgtggcacgttatatgtaaagatggtacagttttagcttcaaaaaaaaaaaaaaaaaaaaaaaaaaaaaaaaaaaaaaaaaaaaaaaaaaaaaaaaaaaaaaagccatctcttggcagactcttgggttctgcagagaatatcaagtcaatcaccaaagaggaccttgagaactacattgcaactcattatacagctcctagaatggttatcacagctgcaggcaacttatgcattcagaggacgatcggggtaagatactctacgcgcacggcgcacccagcgcttctccttccgtccttggcaaccaggcccaggcatcgtttcaccgctattcctcctgccccatctcctcccgatccatccgagcccaaaccctagtccagccagatctccaccgccgccggcgagagcacggcatcagatccgccgcgatggcgttccgccgcatcttatccacagcggtgcgccgccgctcggccatcgccgcggcagcgtccgggaacgcgcgcgaggcctccacggccgtcgccgcggcgcccggcgtgctagcccccgacgcgaccccggtgcgcgctcccgtgatgccgtacgatcgcatcgccgaagccgttaacgccaggctccggcggcttgagcacccagacccgcgcttcctccgctatgcaagccccgttccgtcccacgccgaccacacggccatccttgcggcgccggagacccgggtcaccacgctgcccaacggcctgcgcgtggccacggagtcgtccctcgccgcgcgcacggctacggtgggtgtgtggatcgatgcgggcagcaggtacgagaacgaggaggcggccggcgtcgcgcattttgtcgagcacatgctgttcaagggcacagggaagcgtagcgccgcgcagctggagcaggagattgaggacatgggtggccacctcaacgcttacacgtcgcgggagcagacgacctactacgccaaggtgcttgacaaggacgtgccccgtgcgatggaggtcctcgcggacatcctgcagaactccaatctcgaccaggcccgcattgaacgtgagcgcgaagtgatcctacgagagatggaggaggttgagggacagtctgaagaagttatatttgatcatctccatgcaactgcattccaatatacatcccttggcagaccaatcttgggttctgcagataacgtcaagtcaatcaccaaagaggacctcgagaactacattgcaactcattatacagcttctagaatggttatcacagctgcaggcaatgttaaacatgaagacattgttgagcaggcaaagaagttgttcagcaagctatcaactgaccctacaacaacaaacatgttggtctctaagcagccagcctctttcactggttctgaggttcgaatcattgatgatgacatgcccctcgctcaatttgctgttgctttcaatggagcatcatgggtggatcctgattctgttgcactgatggttatgcaaacaatgcttggttcatggaacaagagtgctggtggaggaaagcacatgggttcagagcttgtgcagagggcagcaatcaatgacatcgctgagagtgtaatgggattcaatacgaattacaaggacactggtctttttggtgtctatgctgttgctaaggctgattgcttggatgatttggcttttgcaattatgcatgagatgagcaaattgtcataccgggttacggaagaagatgttatccgtgcacgtaatcagctgaagtcctctatccaactccaccttgatggttcaactgctgttgttgaggacattggccgtcagctgctgacctatggacgaagaattcctacccccgagctttttgcaagaatagatgctgttgatgcaagcactgtgaagcgtgttgcaaaccgcttcatctttgatcaggatgttgctattgctgcgatggggccgatccaaggacttccagactacaactggttcagacgccggacctacatgctccgttactagattaatcagccggtgtacccatgtttaccgtctgcaaaagacaagataaaatttgcctcttttagcgtcagtatattaaggcctcagcactgcacattacgtgctgcgatggaggaattttttgagaatttgttttatttcttgtcgtgtccaaaatccacaaatctgtcaataatgataggcaggttcgactgacgtggctgacttggttggccaccggatgttttcttacaacgagtcatgaaccataccgtcccatcttttgttggaagattttactttggcaaataattttgtggcacgttatatgtaaagatggtacagttttagcttcattgtccactttgcgttaaaaaaaaaaaaaaaacaacgagtcatgacccttaccgttccatcttttgttggaaggtttttactttggcaaataatttgatgtggctcgttatatgtaaaaaaaaaaaaaaaaaaaaaaaaaaaaaaaaaaaaaaaaaaaaaaactcgagaaggggcgccggtacc

SEQ ID NO: 2453 - DNA, 1007 bp, Zea mays
  Clone ID: MRT4577_102237C.1
cgaggctcggccgggacacgactctcggcaacggatatctcggctctcgcatcgatgaagaacgtagcaaaatgcgatacctggtgtgaattgcagaatcccgcgaaccatcgagtttttgaacgcaagttgcgcccgaagccttctggcggagggcacgtctgcctgggctttccccatgacacgtgccccttcccccctcttaagctaagggacccttgggcagcccggcatcttctccaccctctgcccctctcgatttcttcttcccatctcccgatccatcgcaacccaaaccctactccaggcagatctccgtctccgccgccgctgccggcgtgagcacagcatcagatccgctgtgatggcgttccgccgcatcctatccaccgcggtgcgccgccgctcggccgtggccgccgcggcggccgggaacgcgcgcgaggcctccacggccgtcgctgcggcgccaggtgtgctcgcccccgatgcgaccgcggtgcgcgctcccgtgatgccgtatgaccgcatcgccgaggccgtcaacgccaggctccggcggctcgagcacccagacccgcgcttcctccgctacgccagccccgtgccgtcccacgcggaccacatggccatccttgcggcgccagagacccgggtcaccacactgcccaacggcctgcgcatcgccacggagtcttccctcgccgcgcgcacggctacggtcggcgtgtggatcgatgcgggcagcaggtacgagaacgaggaggcggtcggcgtcgcgcattttgtcgagcacatgctgttcaagggcacggggaagcgcagcgccgcgcagctggagctggagatcgaggacatgggtggccaccttaatgcgtacacgtcgcgggagcagacgacctactacgccaaggtgcttgacaaggacgtgccccgtgcgatggaggccctctcggacatcctccagaactctaatctcgaccaggcccgcattgaacgtgagcgcg

SEQ ID NO: 2454 - DNA, 803 bp, Zea mays
  Clone ID: MRT4577_102238C.1
cgtccaaccttaaggttcatgagatactgggggaagcgccgtggggtgtactcaaacgttatgggattcttgggtggcataaattgggcaattcttgttgctcgtatatgtcaattgtacccaaatgcatcacccagcatgttgatatctcgttttttcagagtctacagccagtggaagtggcccaaccctgttacactttgccatattgaggagggtcctcttggcctccctgtttgggatccaagaagaaactttagagacaggggccatcagatgcctataattacacccgcctatccttgtatgaattctagttataacgtatctactagtactaggtatgtgatggtccaagaattcacacgaggatacgagatctgccaggcaatagatgaaaatagagcaacctgggatgatttattcgagccatatccattttttgaattatataaaaattatttggaggttggtatcacagcaagaaatgaagatgacctcaggaattggaaaggttgggtagagtctcgccttcggacgcttgtattaaagtttgaacgatatactcatgagatgctccttgcacatccgcatcccagagatttctcagatggatctaggccgttgcatagtttttacttcatgggtctttggagaaaacaaaccgcccaacctcaagaagctgagcaatttgacatcagaggaatcgtaaatgagtttaagagcgcagttcttgcttatgcacatcggagagaaggaatggatattgaagtgtcccatgtaaaaagaaaagatatcccctt

SEQ ID NO: 2455 - DNA, 341 bp, Zea mays
  Clone ID: MRT4577_102239C.1
ggggggggtttttttttttttttttttttttttttttttttttttttagaaacaaacattgggggcgcctggattactttaatttccagccaataacgaaggaggctgatgctgcacccaacggacattttcccaaccgagttccacttatacgcctcagggggggacatgtcccagttttttgccaaaagacaaaaagggggtatatcatagggcggaataaacccctgcgggcatagcagatttcataccacaatcattatttgtgggggcagcggccaactgggcaaaattgatgggatcccacaactcccgcgggcctaaaaaaagggcgcccaccc

SEQ ID NO: 2456 - DNA, 251 bp, Zea mays
  Clone ID: MRT4577_10223C.1
attcggctcgagttaatacgcaccgggcgatcattaactgtacgtctgcgtcagctatctgtgttcctagacgctcgaagtagcttgtggcgccaggaacagactacagcgtaggaagacacctgatatactaacgcgtaattacggacaggacgcgctcaagacacatgcgtaatatctagatcttactgcataaacgggcatgaattgaaccacaatagtggccgcaaccaaccgtggcaacatacgga

SEQ ID NO: 2457 - DNA, 410 bp, Zea mays
  Clone ID: MRT4577_102240C.1
actggtttaacgctaggaggccgacaaacctgggagacttcactgcacctgttgagctgctccagatattccccctgcagtccagcgtgagaggaaatgatgtaggcccccaaatgggaccatataactcaaaattttctccaggaatgcacgcattaatagacctgctgtctgctgttgaagattctgtatcatatgcaccaaacattttaggcctaagcacccgtgctttgtcaagattgattctggcagatgattctctccgaacggccgcgaatgaactgcgagcttctaagggcaccggggctgtactacgtgctcctgacgttgcaagacagagcgcacacggtcttctacgccagcctctagggcgatgcagttcgcgcatacaacagccatcttggagggtt

SEQ ID NO: 2458 - DNA, 598 bp, Zea mays
  Clone ID: MRT4577_102241C.1
gattgaacacccaaagcactcaaaattgagcttaacttaacattcagacaaaaatttaaggttctgacagaaacttaactagaacaaaaaagaaacgaaacaataaaaggatgcgaagtatcataagttaacaacataagaagagacttttcttctacagacgcttctactcgtcaccgaaggtagtcttcttaccttggggagtaaaactaggtcttccacgaccacgatcacttcccctgccaccaccactaccaaaacgaccacgacctccatctcttcctctgccaccaccactaccaaaacgaccacgacctccatctcttcctctgccaccaccactaccgaaacgaccattgccccttccaaatccaccaccaccactgctatctcctctcggtctaggctcatcgactacaagatagaatcctcctcccatatcacttccatttagttccaacgccttctctttgccttctgaaaactcaaggtaagcaattcctttggagttaccagtgtcacggtcaattggaacagatacatttttgatctcctcacatgaactgaaatgttccctcaaagggttcttgatatcatc

SEQ ID NO: 2459 - DNA, 629 bp, Zea mays
  Clone ID: MRT4577_102242C.1
attggtacctcgagccggcgggatatttccaaccccagaaaacgacttctcactattctaccttggcgccatctagccgtcctccttctcacaaatcaaagctccgatggcccgtacaaacgaaacaggacaccattaaacagtggataacgagccccatcaagcaactgcggaataaaggggggaaaaagtctgtgccagctaccctggcttgaaaaaagccccaccgctgccgccccagaagccccgcgactacaccatagccgcgagtacaagaagattacaacacctgtttcctccgaaactgcccttgcaaagccctcgccccgagatggctcaggagttctagaaccatctcccctctaagacctccgaactggcacctatcgacgagtcctccacactcaacatctcagtcagctctaagaggacactaacctctgactcatccacgccaacacgtacacaccttgatgaccaaagacatgaacttcgccttgatcatatcaggaaacatggccatcactgcactgacctctatcacttcatcgtcttcaactgttgcttcggaccaacttgcacgactcgtgcttctctcctcctacattcccggggtagtgactacttga

SEQ ID NO: 2460 - DNA, 1763 bp, Zea mays
  Clone ID: MRT4577_102243C.1
gggtgtgcgacaaggttaacgagcagcatgggaggcacctgccaataatgaatggaatcaaagaggatataaaaacactgctgacgttggaattggggagccccctattccatgaagttctggtcaacctcttggttcgcctcaaagcgttgcagcaaataacctaccatgagaatgatgagggggaccattcaccatgttaccaaagaaggaaatcgattccttccgttttcaagtggaaaagtttgtctctcttcgtgctgggtgatggatttgtctcgtttggacttccggccgggggatttaaggtcctctcgcttgctgaccgggttttccgcttcacagtttcttccaaggatgttgggttccacatttacaactctagatgcattgttcgtccggaattcaaagctttcttcaacttgtggaactctggtggaccaaattggaattatgaattcagattattccttcaagaggagaaggccaactggtggggtcgtctcacctcttggacttcgggtcctggttccgcccttccccccgggtccctgacgggtgggacccctcccacctttgcctgcttcggtgaattcgccagggcggtcttattaaaaatatacgaacaggcgcccgaaacgtccttggagctctcgctgggtgtcacttcaccaaaaccccaaaccgctcctttgctcttggctctccggcgaccctctgagaatctgtcaatggcgtaccagcgcgtagacccggagccgttcctcccaccaggcttcagcgcctcggtggtccagcatcgtgggatcatggtcaggtcagtctcgcagcgtttaccgccaatgcatgaggactgggcggttatcaatattcatcctttgcctgagcacgaggtcttgttccctgcggtcagagatgtggtcagggagtatcttgttgagcatcgtagggtcggtgttcgagccattcagcgctcgcacttggggcaggtgatagtgcagtttcgtagtgttctggaacgggataatttggttctgcttggcccccagcaatatttggatgctactttcaccgcggctgagggctttgctggtgactcctggactgttcaatgtgaaattattcagcaactcatgcttggcgggcaagctcaagatgaggaccccatccccccggcccccgaggatggccatcagctccccctggtcttcttcgggctgggtcagcccttgcctccggcagggcttgacctaaatttccctccggagcctgcgggtggagagctgccggctcagcaggatgactttggccagggagattgggaccagtggattgtgaatgaccagcccaatcagcaggtcccgcagcccatcttgccagaggagcaacccattcagcaggaagaactacaactcggtaaccagcactctggcttgtcgtctgatagctccattggtgctggtcagcttgtgccccttccgaatggtcattttgtggagaatggacatgtgctgcttggggatggatttgatatcaatgctgtcccattcattgggcctcaggaggttgatggaccggtgcctcaggtggaccatgtccatgatatggaggacttgcctcatcaggcccatgttggtgagcctaacaataatcatcttcagaatttagagatgaacttcatgctctctcaggaatggcagcctgaccccgttttccagatgtttgaggagagaaaaagatctgcccagttctctaggctctga

SEQ ID NO: 2461 - DNA, 286 bp, Zea mays
  Clone ID: MRT4577_102244C.1
gcaatctctaccaccaaatcctgttccgatccaaaccccttgcccctttgtacctgtccggttggcccgaccaaaccaaccggcaagaaattcaattgccggaaagcccccaaggaaccacttgcccacaaagcgcggccccaatgttgcccgggacaccggcagattaaaaaacccaccgttttcgccccggcaccgtctcgctccgggagatacgcaagtaccagaagagcacggagctgctgatccgcaagctgccgttccagcgcctggtgcgtgagatcgc

SEQ ID NO: 2462 - DNA, 1015 bp, Zea mays
  unsure (1)..(1015): unsure at all n locations
  Clone ID: MRT4577_102245C.1
ttaggtgacaaatccaagcccggccgaggaggagactcccccctccacttgggagttgggatccaccaaccttcacccactcgcagcaggcagcaggcggcagcagcagcacgcgctgccgcagcaccagtcatggaggtcgccggcgcccgcgagcccggtagcggaggaggaggaggtggcggcggtggcggaccagccccgttcctgctgaagacgtacgagatggtggacgacccgtcgagcgacgcggtggtgtcatggagcgacgcatccgacgggagcttcgtcgtctggaaccagcccgagttcgccgcgcggatgctgcctacctacttcaagcacaacaacttctccagcttcatccgccagctcaacacatacggttttcgcaaaatagacccagagcgctgggaatttgctaatgagtactttgtcaagggacagaagcacctgctgaagaatatccacaggaggaaacccatccacagccatagccatcagccaggtgccctgcctgacaatgagcgtgcgttatttgaggatgagattgacaggctttcacgagagaaagctgccctccaggctgacctctggaaattcaatcagcagcagtcaggtgctgtgaaccagttagaagatcttgagcggcgagtgcttgacatggagcagcgacagacgaagatgctcagcttcttgcagcaggctaggaagaatcctcagtttgtcaggaagctcgttaagatggcagaggaatccccaatctttgcggacgcgtttcacaagaagcgaaggctacctgggcttgaatgcatcacggatgctaccggaactgccactagctttttcgatgaccatagcagtagttccaggcaagaaatgggtaaccttctgaatcagcacttctctgacaagctgaagcttggactctgtcctgcaantggcggaaacaacctcatcaccctgagcacccaaagctcacatgaagataacgggagccctcttgggaagcatc

SEQ ID NO: 2463 - DNA, 122 bp, Zea mays
  Clone ID: MRT4577_102246C.1
gtgtttggtggctggctgaatccctcgagtgatcgctagctttgctccctatccgcttgcctctgcccctttacgcccatcacacaacgcatcgaccgttccgaggcggatctcccgcgtcc

SEQ ID NO: 2464 - DNA, 267 bp, Zea mays
  Clone ID: MRT4577_102247C.1
atggcgcttcgctcccccagcagcgttctcctctctctaatctccagccgccgcgcaatctctctcttccccgcgtcgttctctcttccggtgctctgttggccgcgcgcctccccatggcatgcctgctccttgattttcttgctcgtctccatggccgtcttcctcccagccgcgcccagccgccacctgcaacgagttccggaccttgccgtcgacaagatcgtcagcaacggtgtcggcctcgtcaaccccaagtgcgcgtag

SEQ ID NO: 2465 - DNA, 627 bp, Zea mays
  Clone ID: MRT4577_102248C.1
ggcgattggtatcctcgaggccggccgggacgaatgcgagttaagcctatcactctctatctacgatccatcagcagtctcgcgagatagtcccttactttcctctgatgaacgacctgaaatagtactccggtcgtcgctcttcctgctagcgctgtttttacactgtgcccctctcgcccctccaggcagacaaaaccagagccaccgccgccgccccgaggagaagagatcgatggactacttctgctcctactggatgaacctgaggatgaacatggactggaaggggtgctacgagagcagcaagatctcgctcctctccatgctggagctgtacgaaacgcctgcatcgcaaggaaaacggcccgcgacgaaaagtgatcagccttccgccacatgagagggggccatcaggagcgcgacaaggactacccgccgcgggcagatgcatcgaactcagggatgcctcaccagcctgccccgaagagaagcaccctactgctcacatgagaagtgaagagacgcgtgcacaatatcctctttgctgaactgatatgatattcgctgcactcttcacttatgcatgctcgcctgacactgaataaccgtatgtctgactgacat

SEQ ID NO: 2466 - DNA, 242 bp, Zea mays
  Clone ID: MRT4577_102249C.1
gttttaacaagcaaatgcaagctaagaaaactcgagatttttctggtggttggcgtatgaagattgcttttgctagaacactctttatgaatacaacaatacttttggttgatgagcctaccaatcatcttgaactttttttctgggggctggtgggaaaaaacccttaagaaattttgccgcgtactggtttggatatcgcactcccaggacttttttcatggggggtgcactaacatcat

SEQ ID NO: 2467 - DNA, 170 bp, Zea mays
  Clone ID: MRT4577_10224C.1
gtacgtacaccacactgtcccggattcataccagctgcagcagcatcgcgcgcgagctagcttcggtcgctctataaatcgatcgatgggtccggcatcacgcaacgggaggagcacgcgctagtgtcgactgagatcgtgcaccgggcctggatgcgttgccccggacc

SEQ ID NO: 2468 - DNA, 517 bp, Zea mays
  Clone ID: MRT4577_102250C.1
cgtcctttttttttttttttttttttttttttttttttttttttttttttttttttttttggagggcaaattttttttcaaaaaaaaaacccccccacaaactttcaaaataaataaaataccgattcaatggctgccctgagctctaaaaccccatttttgggggaagcccaaaattaaaaggccacgctttccaaaaaaattccaaaggggaaacacccccatttaccataatggcatcctcgagaaatattccttttaaagcccaacccttgaaaaaagcccccccaccccaatacgggcccccaaaaaaaacaaaatttttttttgaacccaaatacccatttacccccccctttgttatttatccaccaataaacattgtcataaagctaaaaaaaagcactgcccctgaaactttcccccagaaattgtgtccacccaaacaaaaaaaggggcccccgaaaaattgacccaagcttcccccaaaaggggcaccttaaaaagacttttttga

SEQ ID NO: 2469 - DNA, 217 bp, Zea mays
  Clone ID: MRT4577_102251C.1
attcggctcgagctctgctgggccacagatttgatttgcgtgaccgtgtaactattgatgtcctggacgacctcaagcttggagccatattgccacacacaaacggtttggactctacccacgaccggtctactgttctttacagactgcagcgacaagtatatggcgtacgaccggctatttcttcttacacccacttgggtactggtggtcaagt

SEQ ID NO: 2470 - DNA, 660 bp, Zea mays
  Clone ID: MRT4577_102252C.1
ggtacccccggattcggccgggttttgatgtgtgatgttatcttaaacaagtgtcaggtttggatgtgttttgttatctgaagcaaatgttcagaagctgaaaaaaaaaaaaaaaaaaaaaaaaaaaaaaaaaaaaaaaaaaaaaaaaaaaaaaaaaaaaaaaaaaaaaaaaaaaaaaaaaaaaaagggttttttaagcaaaaggaaaaaaaaggaaaggggggaaaaaaaaaaaaaaaaaaaggggccctaaacccaaagttttagtccctttaaagaagggaaaatgcccccctgggagaaaaaaaggggaaaaggtgacccggggaaaaaatggtaaacggaaaaaaatccaaaaaaaaaaaaagccggaaacaaaaaagggaaaacccggggggcccaaaaagggagcaaaaccaaaaaaaatgggttgggctaaagggccctttttaaagtggaaaaaccggtggggccaaatgaataaaaaaagggcaaaaccccggggaaaaggggttttaaaaatgggaaacttttccgttacacggctaagaaaatccatggccaagggatttgacttggggagagggttttaatcaaattaaaggggggaaaaagggaataaaaaaaaaaaggggaaaacaaaaaaaaaaaattggaaaa

SEQ ID NO: 2471 - DNA, 195 bp, Zea mays
  Clone ID: MRT4577_102253C.1
ttactccatattactctgagattgccctctacaacttggcttgacttcaaaagaaaaacgaagacggtctaacttcactgttttatctccagaagatttacccatatgaatggaagaacttttcttacttgtattaacaaggattaaaatgccaaatacctttttcttttttggctcccaaatgacactacttta

SEQ ID NO: 2472 - DNA, 660 bp, Zea mays
  unsure (1)..(660): unsure at all n locations
  Clone ID: MRT4577_102254C.1
attcagtggaagctctcacgctctgcttctgcctccccacgacgccccgccccgcccgtcccgtcccggcaacgaagccggagctccactcccgagacgatgtcggccgccgccggcggcagctcctcctcctccacatcagcgccgcggttggaagggaaggttgcgctggttaccggcggcgcctccggtatcggcgaagccatcgtccgcctcttcagacagcacggcgccaaggtttgcatagcagatgtccaggatgaagccggtcagcagctccgcgactccctcggaggcgaccccgatgtcctgttcgtccaccgcgacgtcacagtcgaggaagacataagccgggccgtcgatgcaacagccgagaagtttggcaccctcgacatcatggtcaacaatgccggcattacgggcgacaaggtcaccgatatccggaacctcgactttgctgatgtcaagaaggtgttcgacatcaacgtgcacggcatgctgctgggcatgaagcacgcggcgcgcgtcatgatcccgagcaagaaggggtctattgtctcgttggcgagcgttgccagtgtcatcggagggatgnggcctcacgcatacaccgcgtcgaagcacgcagtggtgggtctcaccaagagtgtggcattggag

SEQ ID NO: 2473 - DNA, 333 bp, Zea mays
  unsure (1)..(333): unsure at all n locations
  Clone ID: MRT4577_102255C.1
gggggggggggcaggctttttttttttttttttttttttcgttaaaaccataaactttattatgaccatgcatatatcattggccataccacacatgatagtgtgtgacgttttacgtgaattattacttttcttttttctatatatatttgtgggttagaangggggaatatctctcaaatcatcattatgtcgtctgggggggggggacgcctcacgcgttgggggggtatcttttcacctggtacctgcccgggcggccgctcttatgggtgatttctgcccatnttcatggcactggcgggcgctctggcgtgcgtctcggggggcccc

SEQ ID NO: 2474 - DNA, 567 bp, Zea mays
  Clone ID: MRT4577_102256C.1
aggcaaaccataaaacatgcccaaagcaaaacctataaatttttccttcccttttccgaacaaaacggagggcaaggccccccagggcaactttacaatggggggggggggaaaacctaccccctttttttaacccccaaaaactcccggttggccccccccaaacaggggggaaacaggttttacaaagggcccaaaggggggtgataataatggaaaacaacaggttccccttacacaaaacgggaactgttacatggggggggggggggccttcaaaccccccaaaaagaatttaagctttttttggggtaaaaaaccccagggaaaccacccccccccagcttttttttgggtgctccacgggtcccttttggaaaaaaaatgcttggggaaaagttaaacccccgtattaaaaaacgggcagggacaaaaaaacacttttccttggggttacttttaaaaacaatccaacaaggatgggcccagggtcattgtttgtggcaggggctttaaaaggcaactggggctggactgctgcccaagggggggccacctgagtccttg

SEQ ID NO: 2475 - DNA, 294 bp, Zea mays
  Clone ID: MRT4577_102257C.1
acggctctcggctggactgcaggcctccgacctgcctgccagcgccacctgccagccaaggctgacctcctgctcagcacacagccaggccgtgaggagggctcccctcttaagctggaacgcctgaaactggagcctcacgaagggctgctgctccgcttcccctacgcggcctgacttcagcctgacatggacccactacccttctcctttccttcccaggccctttggcttctgatttttctcttttttaaaaacaaacaaacaaactgttgcagattatgagtgaacccc

SEQ ID NO: 2476 - DNA, 137 bp, Zea mays
  Clone ID: MRT4577_102258C.1
aggaccttctccgtcggctcctgggacgacaccaactccatcatgttctcgtctgcccggcatggacgactacctgcagctgcagcaggactccgtcgcctcgagagtgcgtgcgaggcgtggctgcgcgactcacc

SEQ ID NO: 2477 - DNA, 232 bp, Zea mays
  Clone ID: MRT4577_102259C.1
cgctcgggttgcccatcccatccgcctctccttgataaactccgtggtccgcagccaccgagccgagcccggcacagacgctactggcacgcacgcaccagcaccacaccacatgcatggtggagcctagcacgggcagctagctcccggccggcgacgtgacgaccaccaccaccacatgttgcatgagcagcaggcaccgccaccgccatccatcaaccccgacgacgac

SEQ ID NO: 2478 - DNA, 483 bp, Zea mays
  Clone ID: MRT4577_10225C.1
cattgggtacctcgaggccggccgggagtaacatggacgcatcttcatcaatcaaccataggcacacagagacagatgaagggagggaacaagcgaactgcatgctacatcctcatcgccatcatcctccctcctctcgatgccttcctcatctacctctgcaactgcctgctctgtctctgactactgctcaccttcctcgcctatctccccgatattatctacgcgatctacgttatcaccaagcactacccagataacggcgtaaaccgatgcaaggagacaaagccatctgatcagccatgggagataatgctaatgaacgcactgctgaaatcactttaaattgccctgttgctcaatgtctctggatggagactgaatctcacctgtgatcttattatatactaccgattgactctgctacttgccgcttttcctgcgtcgccccgtgcagtcgaccgtctctaggtcgtcgcggac

SEQ ID NO: 2479 - DNA, 431 bp, Zea mays
  unsure (1)..(431): unsure at all n locations
  Clone ID: MRT4577_102260C.1
atcccccatgckkagcgamccttgggggtacacgtatttttaacgacctacgagaaatcttggcgatarrgasssggratcggaattcgacaaacrrtcccgmccktycgaacartgacgcttgckagstttgrcagatatatbtacmcgcaatcaattcgcsatggactccaccttktcaatacccaaaagktacttgctgyccgaaagttcaacgsgaatgccaagcgaccccaccagacccattcatcattggtkcccmataacctcgaccakaatgtgcgtcagcgsscatagagctgggtcgayktrsgccaacctsntataatgggtgtagmagtttgsnatccagscagcccacgtttsccgacmrsccccaatktaaacaccthtcttggcgtagcgcctgttctgtgccnttggaatcgccc

SEQ ID NO: 2480 - DNA, 253 bp, Zea mays
  Clone ID: MRT4577_102261C.1
cccacgcgtccgcaagaagaccatcgccgactactgctctcccgaggagttcctctggcacgtcgactacctgctcggcaggcacgcctactgcggcaagaccgactccgagggcaggttcgagaccggcgccgtggccaccgccaacgtcctggagagctccacccccgtgatcgacggcaagcagtactacgccatgtacgagctcaccaggactgctgactgctactagtgcagcaagcaccagctcatc

SEQ ID NO: 2481 - DNA, 397 bp, Zea mays
  unsure (1)..(397): unsure at all n locations
  Clone ID: MRT4577_102262C.1
tccctggtgcgacgccacgcgtgcgctcactcactgactgactactgtagataccatagatcgaacaacttgggcctgcatctcaagaagagagttttgtgcatttgggggccgggggcgacagagagagagagagagccatggggggggaccancatccgcgtgcgtgcgaggaggagatgaacgacgccggttcatctgccggcgacaccatgccactaccctactcaaccgccccgggctcaggcttatccccagccacacccatgcccgtgccaacaggcggatccaagcccgtgccatctgcagggaacctgcggcgttggcagcaccccgggcctgggccattgcgtctagtttctgaggcgtaagtgcagcccgacggggacgccctact

SEQ ID NO: 2482 - DNA, 751 bp, Zea mays
  Clone ID: MRT4577_102263C.1
gccggattgggcgcgtcgagtgcgatccggtcactctacctgactacccaccaccaattcgtccaaattccccaacgtcacctcccgcgccatgccgccgcgcgcggtgctccgccgccttctccccaccaaccctcaccactccgctgctcgccacgctccgcgtcaggcgcctcctccgccttcagcgatcgacgagggaccccttcccgacccgtatgcgctcctcgttcacgaccccatcgacctgctctcatccctgtggcgccgcgcgttcgcgcacccgctcccctcccccttccccaacctctccggctatgcctcccgcctcgatctttggctcctctcctaccagcgtgcctgcgcccatgccacgggcaccttcccgccacgccacgccgtcccgctccccactcttcattcgctcctccgccttcgcgcctccgcgctccgccgccaccccgccttcccctggggcgcatccacgcacctcctcctccgttcccccgccgacaagccctccaccgtccccatctcccgccgcaagctcgaagcccggttcgcggacgcgccgccgccgttccaggaccgcgtcgtccaggagctcctcctcttctccttgaaccagtcctcgagccgcgcttctcccctaaatctcatgccttccgccccggccgcgggccccacagcgccatccgctctgttcggtctcgctttgccgcctacctctggttcgtctccgccgacctca

SEQ ID NO: 2483 - DNA, 389 bp, Zea mays
  Clone ID: MRT4577_102264C.1
gggattcccgggttcgacccacgccgtcccgtccacatcgtccttttcttggaatggcagttcattaacagagcaaactaaaacacaacatgctcaaggcgaggggactgtggaatagcataaaagtggtttacgttgagaactatgatggcgctgattcttcccatgtattcgaacgataggccgaacattttctatctgattgcagggcctacatattatgacgttgtatcttccctgacaaaatgactggcggctagccaactaggaattggatacctttctagaagaggcagactacttaatacactgatggacgactgaactctgctatatgatagagcgccgacgtcgacgggcgcaccatagggaccactaaagactaaaaa

SEQ ID NO: 2484 - DNA, 415 bp, Zea mays
  Clone ID: MRT4577_102265C.1
tctccacggcgtgcgggcagcttataaggttaggggcgtcgaaaatggctccaacgaccgccaccaaggactacagtggctacggcgacgagcgccggggcgtgctacaagcgttcaacgacacgaatctgtgggtgaaaggtatggtggactacggcgtcaagttcataccgttcatcttccaccacccgtcggatgccctgagcgacataatttctccggcgcctgtggcgccgtctccacccttcggcgacggcatgcatgtggtggacctatcggtgactcggagcgaggacctagtcgagcacgtgaggcacgctgacggtacggtgggctgtttcctgcttgtgaaccacagattgtccgacgagcttatggacggcatgcttcgcggggtgcgcctgtttaactaggg

SEQ ID NO: 2485 - DNA, 1078 bp, Zea mays
  Clone ID: MRT4577_102266C.1
accgccgtggcagccgtaggtgaggccgaagtataataaacgcgagccctcgtggccggccgggagtcacccaccccatccaaggccctcccaaagtcccaaaggccgccgccgcccgccagcccaccatggccgcgcagtccttcctcctcgccgccactgccgccgccaggtcccccgcggtcttcgccgctccctattcctccgcacgccctttccactcggtccacttcgtcgccggcccgtggggcgccgccgccgccagggcgctcgtcgtcgcggacgccactaagaaggccgtagccgtcctcaagggcgcgtctgaggtcgagggcgtggtcacgctcacgcaggacgacgatggacctacaactgtgaatgtccgtatcactggacttacccctggacttcatggcttccacctccacgagtttggtgatactaccaatgggtgcatatcgacaggaccacattttaatccaaacaatctgacgcacggtgcaccagaagacgaagtccgtcatgcgggtgacctgggaaacattgttgcaaatgctgagggcatagccgaggcaaccattgttgatacccagattcctttgactggcccaaattcagttgttgggagagcatttgtggttcatgagcttgaagatgatttggggaaagggggccatgagctcagcctctctactggaaatgctggtggaagactggcatgtggtgttgttggcctgactccattgtaggttgctcgccgggtgcccgggttgcagttgcagctacgctgttacatccttgccttggtggacttttgtcttcaatcgtgttattgggacagtgaccttttttgtattacttggattcattccatgcatgtggtatggtgcgtaatagcctttgcaggtcgactgtataaaaagcaatatttagttgaggaaataagtgttgccacatatccaaatcgatctatgaagcactatgaacatcaaatgttattttgattttgttttaaaaaaaaaaaaaaaaaaaaacttttaaagctatttctaaaaaaaaaaaaaaaactcgagggggg

SEQ ID NO: 2486 - DNA, 266 bp, Zea mays
  Clone ID: MRT4577_102267C.1
cgacaacgccagcatcgggaagacgctgaacgagggggagcactcgagcgtgcagtgcttcagccatacgagtgaacctgatcgtcagcgaggccattagtagccagcggatcgtgcagagcctgtcgagcctcgcccggaagatctgcgagcgggtgcaccggtcgcccaaggcgaaggagaaactggccaagctgcagagggagtacgcgctgcctcagcatcacctgcatccaggacgtcccgtccaagtagagcacttcctt

SEQ ID NO: 2487 - DNA, 2070 bp, Zea mays
  Clone ID: MRT4577_102268C.1
aggtccggatcgcgtacacttcggtctgatccatgctccctccccaggacaatagcaataatcaatgctttaattacagaggagtatgcaaagagagatcattatcgaaacatgatttcaaacccctcttcatcgcatgcattttcgcttaatggattggtgtctatgatcgctaccagatatatgaaagaccacacaaaagagaatattgacaaactcattaaagtgcgcgatcaattacttgagttccaaggcactggaatgcaatttcaagacccatcagaactcatggaaattggagctcttaacacagttatccatcaaggaatggatgcgactgcagcttgtattggtttacaaggacgatggaatgcatcactcatacagcgtgatcttctgattgcaggcggagtctttattggaggcattttgatgatgtggagtctgtttactaaatggagcagtacagaagtatcacatcaaggaaagaacaagcgcagtagacaaaaactccgattcaaagaggcacgagataacaaatatgcatacgatgtcacaggttcagaggaatgtcttggagaaaattttggaacagcttacacgaagaaggaagggaaagggacgaaagtcggacttggtgttaaacagcacaagttccatatgatgtatggttttgatcctcaggagtacaatctaattcgattcgttgatccgctcacaggagctacccttgatgaacaaattcatgctgatatacgcttaatccaggaacactttgacgtaattcgtgaggaagcagtggcgaatgacacaattgaaagacaacatatctatggcaatcctggtctacaagcatttttcatacaaaatggatcggcgaatgctttgagagtagatttaacgccacattcacctttgcgagctgttactaacaataacatagcaggatttccagaatacgaaggtacacttcgtcaaactggaacagcaataacaatacctgttggccaggttccaattgcaaatgaagcaggagttgcacatgagtcgaaatctatgatgaatggattgggtgactacacgccaatatcacaacaattgtgcttagtacaaaatgattccgatggagttaaacgaaatgtattctcgattggttacggttcatatcttatttcaccagcacatttatttaaatataataatggtgagataacgattcgatcttcaagaggattgtataaaattcgcaattctgtagaacttaaattacatccaattgcacatagagatatggtgataatccaacttccgaaggacttcccaccattcccaatgcgcttgaaatttacacaaccatcacgagagatgcgtgtttgtttagtaggagtcaatttccagcaaaactatagcacctgcatcgtttcagagagtagcgtgacagcaccaaagggaaatggagacttttggaaacactggatatcaacagttgatggtcaatgtggactacctttggtagatgtcaaaagcaaacacatcgttggaattcatagtctcgcatcaacgagcggaaacaccaacttctttgttgctatgcctgagaattttaatgagtatattagtggactcgtgcaggcaaacaaatgggaaaagggatggcactacagagcatttgtggttcatgagcttgaagatgatttggggaaagggggccatgagctcagcctctctactggaaatgctggtggaagactggcatgtggtgttgttggcctgactccattgtaggttgctcgccgggtgcccgggttgcagttgcagctacgctgttacatccttgccttggtggacttttgtcttcaatcgtgttattgggacagtgacctttttgtattacttggattcattccatgcatgtggtatggtgcgtaatagcctttgcaggtcgactgtataaaaagcaatatttagttgaggaaataagtgttgccacatatccaaatcgatctatgaagcactatgaacatcaaatgttattttgattttgttttaaccttttttaaagctatttct

SEQ ID NO: 2488 - DNA, 565 bp, Zea mays
  unsure (1)..(565): unsure at all n locations
  Clone ID: MRT4577_102269C.1
ccaaaggggtgccactccttttttttcccccggaggactcttttccttaaaaaattttgaggtccccaaccattcaaattggggggggggggggggggggnnntttttttttctttctttttttccccccctttctaatttaatcttccaccttttctttccaatcttctttacctccaaattcctgtcttccctctcaaaggaacccccttttaaaattcggcttgaaaccccttttttaacccctttaagggatcttttcctcaatgccttcttcaattgataatcctttttcttttccaattttgccaacctcttaaacccttttcaaaaaattgaccattccattgccctcttttcccttcacctccaatgcctcattcatttggcttcccccctccaccgaaaaaaaaattttcagcgccgttcccccccccttaccttggcctttccccccccgtggctcccccctctcccccccccccgtcccccccttccccccccttttcccccccccccgtggatcttcctccctccccccttcctccccccccccccccctccc

SEQ ID NO: 2489 - DNA, 458 bp, Zea mays
  Clone ID: MRT4577_10226C.1
attcggctcgagcgatatgtgattgaccaggtttttgagggaactcctaagatccgaccagatgggatgccactagatggtgctcgcggaagaagaaggcgggacgtggaggataaacctgtaagcatatgccatgctacgcggtcaacatgatagaggtagaggcagtggtggcccctgcaggctgggagtaggtgccaaaggtgtgaacaaaggtggcggccacacccatggatgaagctggtccacacatggcacaatggagctgttagtggcctgtacgcgccaccgcatatagggtcttaagacaccaggattgaaccaggtcgggtgattcatatgggggcacagaccaaaatggactacgagagatagacaccgaggatgcagctgatgcatgacttggcgctggtccacatacatgtatgatggatatcatgcatatgatccaatctgtt

SEQ ID NO: 2490 - DNA, 383 bp, Zea mays
  unsure (1)..(383): unsure at all n locations
  Clone ID: MRT4577_102270C.1
acccacagnccacacgggacgacctttaaaaaatggggggccgcctccacacacncttnctccctcatgccatccatcctatccgatccgatcctatccgatccaagcgtccatcatgtgggtgacttttattccgcatgtgtgggacaaaaagatcgcgcccattcgctccccggttaccccgtctccatccgctgccatgctgttctctctgacagtgtggctgtcccgtaccgtgcatcctcatcctccctctccccatgtgtgcagcacctctatataccctcccttgacagctcccagtctcatgctccactactgactacacctcttctactgctatatctctcttccccattaccaatctaatttctatttctttt

SEQ ID NO: 2491 - DNA, 311 bp, Zea mays
  Clone ID: MRT4577_102271C.1
aaccaggtacattaactgtattgaaatgacttgactagtattgtagtattgttgtatggtatgccgtatacgggacacaaaaatacattgtttagaaaagaaagaatgtgggaactcacttttgtagctgcatcaaatatcgcatcgaccctaaatacactcaccgactcataatttacccgattactttccttttgatcaggccgacgacccggacatggtcctttccttaccggaagctgcggtagagtacggtgtacatgcagctctcaccgtacttgacgagatccccagggcgtggcatgcggctg

SEQ ID NO: 2492 - DNA, 526 bp, Zea mays
  unsure (1)..(526): unsure at all n locations
  Clone ID: MRT4577_102272C.1
cctcgaggccggccgggnaacacattcaaaacagaggatgacgatctctgcctctccttcctctccgctacatcctcttctctctcatatgatgctctccatcctttgctcattatatgcaaccacgaacctaccgctgctctgatggttccatcgcctatccttccggcgccgctgatacgcctatcgcctatctctcaccaggcatacggaggggatgcagaactctagccttaacctctgaggctgaccgtcgtcacattctcagacacaactaacaagttcacagctctgggctgtaacgaggcgctcatgctttaaaatgccaacaaccggtatagcgacggatgcgccttcacttgtgctctagcgaaaataccatcatcgacggctcatgctactgacgaggattgctgccaaccgacgcgtcccaaagggctagacaagctggactcagagttcagaaacattagatataaccaacagctctcatcgttactgaccatgtggatcaggacttcatcgt

SEQ ID NO: 2493 - DNA, 290 bp, Zea mays
  Clone ID: MRT4577_102273C.1
aaaccggtgggttctggtagaaccccgcccggaatttgatcgcatggtcattttacaaaggtaatatctccagattatgcgagcctagaaaggaagggtgggatcccagacatgccccatttcggttaacaagcgaggacaggggagtctagatgccagggagccccaatgtcaagcttccaggagagagccatttcttaaactctggacgactatccctgggcacggatgctactttggggcacgacaatgggcgtgcaacaggccctgaatactgtacattgatataa

SEQ ID NO: 2494 - DNA, 257 bp, Zea mays
  Clone ID: MRT4577_102274C.1
gcgcccacgcgtccgaccacgcgataccattcttatacttcataacatcttcaggatttcaacagaccaggttgaacactaatggtgatctgcgtgaacatgctcatacactgacagagataaaatatttcaaaaaagtgatgaccttcattgagccacatctagtacccactactctacaattgattaccaactacatactctcatgacgaccctataactaaatacttattaaagcatatcatgattggcacaat

SEQ ID NO: 2495 - DNA, 828 bp, Zea mays
  Clone ID: MRT4577_102275C.1
cggccgggagttgtgtaccttgcagactatcaaatagttaagttagtgatggcttacgttcagcatggccatggccacgaccatgaggatggggtggtgctgcaggccaagtctcctccagcggtggtggcactagtgctctccgccctgctcgtctgtcctctcctcgtcctcctggtggtgcgccggcgccgctttggaaccaaagaagtgctgctgagcaagctgccttcgcctccaagcaggctccccatcatcggccacctgcacctcgtgggccctctcccgcacgtctccctccgcgacctctcctccaagcacgggcgcgacggcctcatgctcctccacctgggtgccgtccctacgctcatcgtctcctcgccgagcgccgcgcaggccgtgctccgcacgcaggaccacgtcttcgcgtccagggcctactccccggtgaccgacatcctcttctacggctccacggacatcgccttctcgccgtacggcgagcactggcgacaggtcaagaagatcgccaccacacacctcctgaccaacaggaaggtccgctgctaccgccatgcacgcgagaatgaggtgaggctggtgatgtctaagatccgcgaggcggccaccgcaggcgccgccttcgacctgagcgagcagctcaactccttcgccaacgacatcgtttgccacgctgtgtccggcaagttcttcagggaggaagggcggaacaagctcttccgggagctggtggaggccaactcgtcgctcatagggggtttcaacctagaggactactttcccggtgctggtgaagctggacatggt

SEQ ID NO: 2496 - DNA, 369 bp, Zea mays
  Clone ID: MRT4577_102276C.1
caagcacccctacgtaagctcggaaggcggctcgagagatgatgcacaggtagctattagcattccaaacaactgcgctgatactgacgcgtttctcatgtaatgtggaagcataactcagagacatgatgggctgaggattgatgaacaaaatgagaaggtgcgcccaccttttatagaagatgccagtcgtcaaacggggagggggtcaacagttactgacctgacaagttctgggatttttagaggttcatcagaggttgcggtgggtgaaaatcagaccaataccggtaggacaggggattaaacaataaaagctggactcgtgaagaggggttgtagggacctttcttttttaaataaggcctt

SEQ ID NO: 2497 - DNA, 657 bp, Zea mays
  Clone ID: MRT4577_102277C.1
cagtgaaggtaaggtttccacatcccaactgtccgcaaaaccaaagaagaaggtggctgcagacaatgctctacagttgaaagcattttcctcagcagtcgcacaatttgtttggccgagtactgaaaagaagcttatggaagttccaagagatagatgtggttggtgccttgcttgcagaagttcagcaagtggaaacaaaaaggcttgttttcttaacatgaccacatcaaacgctgctaaaagttctgctcgagttcttagcacaatgcgcgtaataaagatttctgacagccatttccccagtattgctgcttatttagccaacatggaggaaagtttgcgtggcctgttggttggttcactacaagacatgcagcagagagaacggtggcgtgaacaacttgaagaagcttccaactgcagaactgtaatacccctcttgcttgagttggaaagcaacatccgtggagtagcattttctgcaagctggttcaagccgatagacgattggcctgcggaatctccttgtccatcaacaggggcatctcgtcctgcacaacaccaaaaacgtggggctggcggaaggcgtggcagaagacgtttgttggtgtctgaacccggtactgttactgatgatgacaacagctggacttg

SEQ ID NO: 2498 - DNA, 282 bp, Zea mays
  Clone ID: MRT4577_102278C.1
aaacaagatgtgctttgcatacacatctctagttatccatattagattgaatgcggaccatgtgtgctgaaaaatctagcttgcacggagcggtgatcataaacgatatcgtgcatccctacctcgacatcgtccttgtcatggaactagacattggcatgctgacacatatcaatatgcactgcacacatgactgtgttgatcctgattgggaccaaaaacatgtgcccgttcaaccaggaagtatctattatgcaggcactgcaagtgacccatccaacc

SEQ ID NO: 2499 - DNA, 325 bp, Zea mays
  Clone ID: MRT4577_102279C.1
cgacgcacgggtcactcgacgcgtgagctagctgtataagtcgagtatagcttgatctacacaagagacaaagcagggcacggacaatgtccctcgcctcctcgtcctccgtcgctgctcctgctcctggccgccgacttcgctatcatgagcgccaacacgaccaccttcaccatcaccaacaactgctggttcaccgcgtggtccgcggccaccccgttgggcgccggcactcagctgaacccgggcgcaacgtgtaccgagaacacgccctacgtcaccagctactgccccgtgtagtgccgcaccggcatgctccttaaca

SEQ ID NO: 2500 - DNA, 248 bp, Zea mays
  Clone ID: MRT4577_10227C.1
cgtggtcatagttgcctctgttgctgtggtctccctgagtagctcgcttgcgatgctccttcctgcacgcttgatggagacaggtcgactactgttacagtgctagcatctcatgaagacgtgtttcgtgagctgtgctctggatatgagcccggtggcactacagcttatatggctcgagtgggacaactgatgcaatatcactgtgatgttgaaaaggctgcacgaatggtgaagcctaatgtaga

SEQ ID NO: 2501 - DNA, 581 bp, Zea mays
  Clone ID: MRT4577_102280C.1
gccggcccggtcgaaaatacagtggaacctccctctccttttcaaggtagatacaccgctgcagtgtctatagccctctctgtcactctggatcccactagtcacgatgcctgccctcgtcaagtccgcctcccgtaccgccaagtccgacgcgagtccgaatacgaagtctgtcgccgcctagtcgaaggcgagcaccgctggtgcctcccacccgccttacttctacatggtctgggaggttatctcgatgctaatggagaggaccgcctcctgatcataagcgatcgccgaggatgtgatggacattgatgctacgattctgccgcccgacttcaacaagatgctttccatccatatccgagggtccgtatgctagggcaagctcgagaaagtcaaagcttcgtacaagctctcggacaccgccaatatcgcatccccctagaacaagggtaattcggcaaaggacgacgctgccaagaccaccgccacctagccggacaatgccgtcgacgtcaagtcaaagaatgcagcgactggcaagacaatgaatgacggtgctgctgagaccaatcgcaaag

SEQ ID NO: 2502 - DNA, 324 bp, Zea mays
  unsure (1)..(324): unsure at all n locations
  Clone ID: MRT4577_102281C.1
gcagtaccgtccgntatcccggtcgaccacgcgtccgaaaaaaaaaaaaaaaaaaaaaaaaaagggtgaacgatataaaaagtaaaatgtttaaatataaaaaaaaagaaaaataaaaagggcgaaaatttagtgggggggcgtttttttgagagcaagtttacttactggggcgtgcgtggaaataagtttttttttgtgttagctaaacttattttattggtgtggggtttttaaagtccgtggtgggaaaaaaatgggggggcccagattaattaccttttggaaaatacccttttttccaaatggggcagttactaaaag

SEQ ID NO: 2503 - DNA, 545 bp, Zea mays
  Clone ID: MRT4577_102282C.1
tttttttttttttttttttttttttttttttttttttttttttttttttttttttttttttttttatccttgcaggagaatggaggggctacagggcggccgaaaaaaaggacaagaaaaggcgggaaaaaagagcacggccaggggaaaagaaaaaaaaaaaaggagcggaaaaaaaaaaaaaaaaaaccacagccacaaaaaaaaaaaaggaaagcagagaaagaggaagggggggccgaaaagaaaaaaagaaggaaaaagccccggggggggcacccggaaagaaaaccaagagccaggggggaggacgcactggccaaataaagcaagggaaggcggctgggaaaggggtaaacggaaacgcccaccgggaaggggggggtaggtccagggaaaagggccaaaacgggcttcaccctagcgccggggaacgggggaaacaagactgcccccccgccgtgggggaagataaaaaagaaaaggaccgccgggggggactaaaccacaacaaaaaaaatgatcccggggggcctctacggaag

SEQ ID NO: 2504 - DNA, 554 bp, Zea mays
  Clone ID: MRT4577_102283C.1
gcagcgaaaatctttttaccaaattttacaagttacatcaagttttatattatatttatcggagtggttacagaagtggttcaaagaaataactttaaactgttataaattatttatagttttgaaatatatgctagctcaagtgaccatcctcaataagaagtatagaagggttgcttagacttataagaaggccgagcccactggcacttaacaccatcatcagcagcacaaaactatgacctgagtaacactaggttagtgttgttaggtgacgtccacttgacgatcagcctttattccgatactcgctccattgtccatcttcaggtttattcatcagcatcatcctgcggattagctcgcgcttggggtcgacttggatcatcttccgcatcacgcgattgattaacgtaccgtttccacagttgacacgagtccgcgagatcggtagtgattttccgatttaggcaatttgtcgagcgcttagggaatatcgcgctgctagctttgtcttcacccgattcttgagatttcttgctgacgcgcggaac

SEQ ID NO: 2505 - DNA, 758 bp, Zea mays
  Clone ID: MRT4577_102284C.1
attgggaccctcgaggccggccgggaaattggagctagcaactagcaatagcccgttccataagcaccggcgttcgcaatggagacgctcgtgcctggggtcctcgcagacctcgtctgtcgagccatatccttcaccgtggataggtgctgccaccagcggcgcaagcgctgtgcagaggacaccacacaacggctgcaccacgtgcttctacgagtccagaccgtcgtcgaggaggccgatcggcggtgcgtcaccaaccgtgcgatgctccggcagcttcagctgatgagggaaggcgtgtacagaggctactacctgctcagcgccttcaagcgccaagacgttgtgaaggacacggcgcaagatcgcgacctcggccgtcatggccactcgtcgctcgccctgtcccagctcaatccggcgaagcgcttgtgtactatctccgcctggacgacgacgaggacgaacatggcgttgcaagacacggcacgcgagggggaggcggagctgcaagaggtgctcactgtcctagagcgcatggccagcgacatgaaggagctcgtcgtgttcctgagctgctaccctcccacgcgccgcgaacctcacagcgggcacctgcggttgaagaaccgcatgttcggccgtgagtcagagcaggaaaggatcataggcttcttgctggaaccagagcctgcacgcgcggaatatttgggcgtgctcccagtgatagggcgagcaagaatcggcaagagcac

SEQ ID NO: 2506 - DNA, 748 bp, Zea mays
  Clone ID: MRT4577_102285C.1
ctgcacctcggcggcaacttcttctccggggagataccgccggagtacggccggggcctaggctgcagtaccttgcggctccgggaacgagctctccggcaagataccgcccgagctggggaacctcaccagcctcagggagctctacattggctactacaacagttacaccggtggccttccgccggagctggggaacctgaccgagctcgtccgcctcgacgccgccaactgtgggctctccggcgaaatcccgccggagctcgggaggctgcagaatctggacacgctcttcttgcaggtgaatggcctcaccggcagcataccgtcggagctgggctacctcaggagcctcagttctttggacctgtcgaacaatgcgctcaccggtgagataccggcgagtttctccgagctcaagaacctgacgctgcttaacctgttccggaacaagttgcgcggcgacatccccggcttcgtcggcgacctgcccagcctcgaagtgctgcagctgtgggagaataacttcaccggcggtgtgccacgccgcctcggccgcaacggccgcctccagctgctcgacctctcgtcgaacaagctcaccggcacgcttccgccggagctctgtgcggggggcaagctgcagacgctaatcgccctcggcaacttcttgttcggtgccatcccagactcactcggccagtgcaagtccttgagccgtgtccgtctcggggagaactacctgtat

SEQ ID NO: 2507 - DNA, 693 bp, Zea mays
  Clone ID: MRT4577_102286C.1
ttgaattcggcacgaggctccatcttccgttccgccgcaccgccgccggagatatgtcgaggctcgctgctgccgccctccgctgcgtcgtcactgcatcgagagatacctcctcatctcgcttcgccgtgtctgcgccggtgtctgctcggctcttctccgcggatgcatccggtgaagccgccgccacggctcttttttcgcaggatgactctttcttcaaggcatcccgcgaaggtagctcggtcatcctcgtgcttctatattttcctttacatgtgcctgttcgtgttcctcctatagcttgtcagtttgttctggctctgggtgggtttagggtttaatactttgatgttctcttcccgtttgagaagaccgagtaggaacttaaaagggatagagtggccgacaataaaatataggttgggtgagctatctaagtatctatagatttgatcataaatgtaggttgggtgtcctatccgtgaatttgatggagggatttgatctctaaggactaaggtcatgacatagtaccacgtttggtagggtgaattataggtttcgaagcatgagatatagctctagtttatctgtggaacgctgtgaagtaacactactgccagtataaggtcgtcattgttattgcctctttggaagtttcatcacatgtaagctgaaaaaaacaattta

SEQ ID NO: 2508 - DNA, 254 bp, Zea mays
  Clone ID: MRT4577_102287C.1
ggagctgcagtcagccctggaggaggccgaggcctccctggagcacgaggagggcaagatcctccgggcccagctggagttcaaccagatcaaggcagagatcgagcggaagctggagagaaggacgaggagatggaacaggccaagcgcaaccatctgcgggtggtggactcgctgcagacctccccgtccgcagagacacgcagtcgcaacgaggccctgagggtgaagaagaagatggaaggagacctcaa

SEQ ID NO: 2509 - DNA, 1064 bp, Zea mays
  unsure (1)..(1064): unsure at all n locations
  Clone ID: MRT4577_102288C.1
gggtacctcgaggccggccgggggtagcgttccagacgagccgtttaaataggtgtcaagtggaagtgcagtgatgtatgcagctgaggcatcctaacgaacgaacgatttgaaatttcctgcggtggcggcggcttgtgtgtccaaagtccaaactcctctacggcacggcgtctcacagccgcaccgcaccccaactcgtcgccttcctcgtcattccctccgtcgcggagaggaggtcacgcggctggttcccgccgcttgcgatcggttccgtctcccagcttccccttgagtacacctcattttgtgacgccgactagctgagccctgctgattgctcgcctagcacgctgttgcgctgattcgttgtcttgtgagctgttctagggttcgtagggagcaggatcagctgacgcgatgttccccaggatctcccggctcggggcacggctcctgcgcgagtctagagccgagacaagagctggaaacttgctaagcagtcaacgcattttctatcaagatcatgttaaccggcattcgatcccagtgatgactcctcctgtattatcgatgcggaatgcccttttgtcaactgcaacaagtggtgatcaggatgaaagtagtcaggcaaaagataagtaagtgcatttgtctcttgttttcttatagtcttatatatcataaaatttgaactccctggttgtctttttagcttggaaccaggtaccaccttacccagatccttctaacatgggaatctttttgttattggtgcctctccatttaaggagctgctccttccacatctagaggaatagatggcacttaatgcattagttttactgaattgttagtgttgagctttcaataattatttagggtagaagcagtcctctgatgattgttgaggttatttttctccatactgtgaacagaatctcggtaacatttgtcaacaaggatggctcagaaaagacaatatgtgttccagttggaatgtccatgttagaagctgctcatganaacgacatagagcttgaaggtacagatattaaggaaat

SEQ ID NO: 2510 - DNA, 3027 bp, Zea mays
  Clone ID: MRT4577_102289C.1
gtccagtagcatcgagcaccttatgctctcgatgaacaacttcaccggggagataccggaggggctctcgcggtgccgagcgctgacacagctcggcctggcgaacaacagcctctccggcgttatccccgccgcgctcggcgagctcggcaacctgacggatttggtccttaacaacaacagcctctccggcgagctgccgccagagctcttcaacctcactgagctccagacactggcattgtatcacaacaagctctccggtcgcctgccggacgccatcggccgtcttgtgaacctggaggagctgtacctgtacgagaaccagttcaccggcgagataccggagtccatcggggactgcgcgagcttgcagatgatcgatttcttcgggaaccggttcaacgggagcataccggcgtccatggggaacctgtcgcaactgatcttcctcgacttcaggcagaacgagctgtccggcgtgatcgcgccggagctcggtgagtgccagcaactcaaaatccttgatttggccgacaatgctctgtccgggtcgattcccgagacgtttgggaagctccgttcgctggagcagttcatgctgtacaacaactcgctctccggcgccatcccggacggcatgttcgagtgccggaacatcacgagggtcaacatcgcgcacaaccggctcagcggcagcctcctgccgctctgcggcacggcgaggctgttgtcgttcgacgccaccaacaactccttcgacggcgcgatcccagcgcagttcggccggtcgtcggggctccagcgcgtgcgcctggggagcaacatgctctccggaccgatcccgccgtcgctcggcggcatcaccgcgctgacgctgctggacgtgtcaagcaacgcgctcactggcggcttcccagcgacgctcgcgcagtgcacgaatctcagcctcgtcgtcctcagccacaaccgcctgtcaggggcgattccggactggctgggctcgctgccgcagctcggcgagctgacactctccaacaacgagttcaccggagcaatcccggtgcagctcagcaactgctccaatctcctgaagctgtcgctcgacaacaaccagatcaatggaacagtgccgcctgaactcggcagcttggcgtccctcaacgtgctcaatctcgcacacaaccagctctcaggtcagattccaacgacggttgcaaaactgagcagtctctatgagctgaatctgtcacagaattatctgtccggtccaatccctccggatatcagcaagctgcaagagctgcagagcctgttggacttgagcagcaacaatttcagtggccacatccctgcatcactcggctcactctccaagctggaagacctgaacctgtcccacaacgctctggtcggcgcggtgccgtcgcagctcgctggaatgagtagcttggtgcagctggacctgtccagcaaccagcttgaagggaggctgggcattgagttcggccggtggccccaggccgcgttcgccaacaatgcagggctctgcggtagccctctgagaggttgcagcagcaggaacagccggtcggcgttccacgcggcgtccgtcgcgttggtgactgcggtggtcacgctgttgatcgtgctcgtgatcatcgtgcttgcgctgatggcggtgcgccgccaggccccggggtcagaggagatgaactgctcggcgttctcgtcgtcgagctcgggcagcgcaaaccggcagctcgtcatcaagggctcggcgcggcgggagttccggtgggaggcgatcatggaggccacggcgaacctgagcgaccagttcgccatcggatccggcgggtcgggcacggtgtacagggcggagctgtccactggcgagacggtggccgtgaagaggatcgcggacatggacagcggcatgctgctgcacgacaagagcttcacgcgggaggtcaagaccctgggccgcgtccggcaccggcacctggtcaagctgctcggcttcgtcacgtcccgcgagtgcggcggcggcggcggcatgctcgtgtacgagtacatggagaacggcagcctctacgactggctgcacggcggcagcgatggccggaagaagcagacgctcagctgggacgcgcggctcaaggtcgccgccgggctcgcgcagggcgtggagtacctccaccacgactgtgtgccgcggatcgtgcaccgggacatcaagtccagcaacgtgctcctcgacggcgacatggaggcgcacctcggcgacttcggcctcgccaaggccgttcgggagaaccggcaggccgccttcggcaaagactgcaccgagtcaggttcctgcttcgccggatcatacgggtacatcgctccagagtgtgcttactccctgaaggcgacggagaggagcgacgtgtacagcatgggcatcgtgctgatggagctcgtcaccgggctcttaccgaccgacaagacctttggcggagacatggacatggtgaggtgggtgcagtcaaggatggacgcgccattgccggcccgggagcaggtgttcgatcctgctctgaagccgctggcgccgcgtgaggagtcgtcaatgacggaggtgctggaggtggcgctccggtgcacgagggcggcaccgggggagaggccgaccgcgcggcaggtctccgatctgctgctccacgtttcactcgattactaccgcgcctgcgaaaaacgttaggatttcgaaactgggggatgaagttgtcctagtagctgcttttctaagtcgtccttttaagctagcttaatcttttcattcatgaaactagggaaaaagagacttatttttagggtttgaagttgaatcgagtcaagaatgcccttcaaaattgtatttcttaagttcaaattttgggatcgcttgtaaaaagcacttggaaatgcgcagcacccaggaatgccgaagcatcaatgattgagacaaaaaaaaaaaaaaaaaaaaaaaaaaaacacccc

SEQ ID NO: 2511 - DNA, 426 bp, Zea mays
  Clone ID: MRT4577_10228C.1
aaaagagttgtcagcgtcatgcgcacgcgcgcgtacgctggtaccctctagagcgcgcgcccttttttatatttcttttttttttggcttatgaaagggggcctttgttccactcggtggggaccatacaagtacacggtcaactttgcctcagaacccaccaaacagagagtagaaaaacaggcacaaaaccgggggctaaaccatgaaaactactaacctatccacatgacggagtacaacagaacggcggccacagacctgtttattggaaacaaattgtcatcgacgacgcccttcttaaaaactaaaaagggaaaaaaaaggggctcacttgacgctgtccagctgggtggggttgaactaagaggtctagaccatgttggtcagggcgggcttgacctccaaggacttgcggttcttgag

SEQ ID NO: 2512 - DNA, 457 bp, Zea mays
  Clone ID: MRT4577_102290C.1
gggggaaaccaacgaaaacccgacgaaaggcacggggaaacagggaaaacaagcccgggggttccaatacgatcagttcccccaatggaacggaaaaaaaaaactcccttaataaaaaaacaactcctcaaaataggggaccggggaccggggatgagggaaaaaaccaatgatgtagggggaggggcgtgctttgtccatctgggtggttggccctgctggtaaaccaacgcgaagctgttttccccgccgggggggttggggatcccccccaggtagtcccgggagggggcccccccctccccgaaaaagtcgctgccgggcattttctttaactttgccgggctcagggggggcttttcccccggcccgggggcctcgtggtcgcccttgaagaattgcccgcgagggcggggaacttcttgggggggatcttttttgggggctttaccccgct

SEQ ID NO: 2513 - DNA, 295 bp, Zea mays
  Clone ID: MRT4577_102291C.1
cagagcggcaccatggcggtcgggaagaacaagcgcctgacgagaggtggcaagaagggagccaagaagaaagtggttgatccattttctaagaaagactggtatgatgtgaaagctccagcaatgttcaatattaggaacatcgggaattcactagttacaaggactcaaggaaccaaaattgcatcagatggcctcaagggtcgtgtgttcgaagtgagtcttgcagatctacagaacgatgaagttgcatttagaaagtgtcaagctaattactgaggatgttcagggcaaa

SEQ ID NO: 2514 - DNA, 205 bp, Zea mays
  Clone ID: MRT4577_102292C.1
aaaagcgcggtgttaatatctcccctcgcttccctcttctggtctccgccgcgctccgtgcctccgatccacaattccgccatcggatctcgcagtcagcgcaacggacgtgtgaacgaagggggacgcagaggaagatagggctcacgttcgggaagcacttcagcgggcgcgtcgtcccatatggagatgcaggatcctcatg

SEQ ID NO: 2515 - DNA, 436 bp, Zea mays
  Clone ID: MRT4577_102293C.1
gggggggccgggggtttatttaaaaaccaaaaaaaaccttgggggaaactgggcctacaaaaaaaagggggggacagggttttttccaaaaaaggcctttatttaaaaagtcacaaaggggtggtttgccaaggggcctgtttaaaaaacacaggggcagttttgggccaaaataatgcaggcaggcgggggcccaaaaaccggccgttacccaggggaaaaaagaaaaaatactttaatcaagccccctaaagtttaaaactgggaggtggaagcaacatttacagtttaaaatgcccaagggcatgcacaaatgcccaaattgggggttggggaaaaccccaaagggggaaaaaacgggccccccctttgtatatgctggacaccaaaaaaaacccgaaactagttgggggggcagtaaaccatggcaaccctt

SEQ ID NO: 2516 - DNA, 583 bp, Zea mays
  Clone ID: MRT4577_102294C.1
gcgaggcatctttttatctcgacactgtcatactactaggacggtttcagctcccaaatttattcaagctgagctatatgacacacttttatctggaggataacctgctgttcggaggatcgccgcgcgttatcaggacccgagcactctatctaacagccatctcatctgtgcaacagccagcttacggggggactgcctgaggtcatcaaaaactgcttatggaccaaaaagcagttaccggaccagtatgcttttacatgggcaggatcgacgaatatcgtaaggctgacttaagtggctaaagcttacttgagcgttttcacgcttaaatgcggaaggccctcttgattaggtaactgcacattactcacttaactctatctgaggagatacaacctgtcctgtgagatacccgaatacttatctcccttgccctgactcataaacaccaacctgtatagttaccttcaaccaggacagatacccacaaccataggggcgaggcatagtcttacaacatgtctgtttgtgctacaacaacctactcggcctcgtacctactacagtgccatatacttac

SEQ ID NO: 2517 - DNA, 846 bp, Zea mays
  Clone ID: MRT4577_102295C.1
ccggccgggaacgaccgtctgttcaactattttgatcatgcgtttcacctcactcgccccactcgccgccctcttgggcacggcgaccaccgccaccgcgctcgtcctcccttggaacaacgagaacgccaacgccgccgatgagatccccaccttgtcgatctctgattggcaaaaggtccgatcgatgggattcgaccaggtcaggacagccggcaagttggccgacgactttgtcaagacgatcgtcaacgacctcgaggacgtctcttccgagtggcgaggagagactagggaccaggatgatcagttgaccatctggcagctcctgaaccaggacaaggacaggtactccaagctcttgaaggccatcgagattgaaggtggcaacgccaagaagatcctcgacgaccgggacgctagcattaccttctttgctcctgaaaactccggaattcccgaccctcaccacaaggatcacgacgatcactttgcctcgttcgaccgggcgattgagaatctgcaatccagccctactctcgacaacctcttgagggtgcacgacttgcattcgcagagattgttcgagcgggacgaggatcaccaccaccgaggtcctcacaagggacacgagggtgatgatgacgagaagaagaagaggatcttcaagttcatctttgggagagatcttgaagtaccacggtttaccccaggctttgagtgctaccgagttggctaacaacaagaccgttgccaccgcccctctacccgaagtttggcgccaacgacggtcaacccctgcgaatccacctcgagaagaaggccctttctcctcgctcgagctca

SEQ ID NO: 2518 - DNA, 139 bp, Zea mays
  Clone ID: MRT4577_102296C.1
ccggccgggatgctatcaccattcaccgatcggcagtggctctcctctctcatgacgcaacaacatctcctcatgctttgctccctcagctactaacgaaatacttccgtcttctgcagcaacgggtacctgtaacaca

SEQ ID NO: 2519 - DNA, 232 bp, Zea mays
  Clone ID: MRT4577_102297C.1
cacccatgcgtaccgctcggttcccgcggcccaccaggcgcggctgtctcttgaggcatgcaccgccgccggcacctaccggcgtgcgttatcccggctctgattcaggcgccatcccgctccatctttttcaccgcgtctcttctccaaaccctcgacccctcagtgccgtcggctcccgccgcgggagcagcgcggctcttggagctgctgctgctgctgcatgcggacg

SEQ ID NO: 2520 - DNA, 368 bp, Zea mays
  Clone ID: MRT4577_102298C.1
gactcatacttcgaggtcggcgaggactagcggaatattccatccatccaaccttataacaagctgcatgtttctactgtcaatggtgctacttaacgaaaaaacacccaccgaccgacttgaaatggcgtacattacctcggagggatgcacagacatgccctcgcagagcaggggacattgcaaaacccatctgtttctaacttggtccctttctctctctgcatccgatccgggcaaaactaggcgtttgaggctccagagcgccaccatatacttccatgcttacgcaaccacagacgctcacaccatggatgctcacagctcgttcttgacggactcggcggcggctgccttctaggattccg

SEQ ID NO: 2521 - DNA, 473 bp, Zea mays
  Clone ID: MRT4577_102299C.1
ggggtttttaatgaaacaacctattgacaaatgcctcccaagcccaaatgctctcatctttacttccggtataaataccaaaagtaaggcatgcatcacacaacacatgaccaacacatgctgcatacccaccttcccccgcttgagggggtaatatgcaaaaaataaacatccccctttcttctatggtcctaaagcttaacacaagagctatcgcttattccgtcgacccagcactctctttctcaatggactaaatatccacaaccagctctatcctgatctcattaaaaaagacgcaaccccatcactaaccacccgttgtaccccttgcccactagctccattatcttatggagcagctgcactatatatatatgcacctacgacaacggacgttaaccatagagcgactaccgcacctcctgcacacaggacaactgtaggccttgacttaacgacgtcccacttta

SEQ ID NO: 2522 - DNA, 542 bp, Zea mays
  Clone ID: MRT4577_10229C.1
cgctcacggcacgatccatgacgtgggcggacaccgggactgatattctgagtccgatatacgcaagctcggcaaaggaacaaccggtacaacagatacaagctcaaccggggcacagctgggcgtaaactaccccatatctccgcctttacgcggcccctcactcccgacatctgccaatgagagcacaaaccgaaaacggggaagccagacaagaaccaggcacgggcagtggcgaagaaccccgagatccagcgcaccaagggcaagctcctctatgatatacctcctaatctgcatcgcatgcgtcgcttcagaaggtgaaaggtgctacaatacaagaaacccaaccgtagcgatcatgttgccgctttacctgacataatacaataaatcccagatggtagttatatctgacacacaaaaaaaatgggaaatagggaggctcatgatcatgacactaggaggagccataaagcacgactctactgctggtggaaactgtgctgatgagatctttacagagacagtagaatctaatc

SEQ ID NO: 2523 - DNA, 194 bp, Zea mays
  Clone ID: MRT4577_1022C.1
aaactacattatctttttttttattatttttgggggggttttatggaggattggggggctaccacccaagagcaggcaaaggcgaccagcagcaggtaatccaacctgcaacaagaggggagaaccaacgaccgaaccggcccatgggaagggacgccacctcaaggacaaagacactgcagagtaatgaaaaa

SEQ ID NO: 2524 - DNA, 1901 bp, Zea mays
  Clone ID: MRT4577_102300C.1
tacctcgaggccggccgggattttcctttttcctctattatcttatttgaaaaccgcggaatagaaaatatctcctgtaaagaatcttgcgtgcaagaaaagatcaaagatggagaagaaacgccccccaatctgcgcgagtttctttccctcgtgggtaatctgcagcatgagtatgctggaagtgattctgtactactggatgggcctgaggtagggcaggagctgatttcgctgctcagatatctgaagcaatgcatgtatttctcgaggaagccatacaacgtgtttttggagtatggtggttatggccagaatgatgttcttataaagaaatctaaggcgaggatcttgaagcctgccttcacaattgtctgtgacagaagtagccaatgctttctcctcttcattaggggggctatcagtgttaaggagcggttgacagcagcaactggcgcagaggttccatttcatcacgttgtggtccaggaaggtcaagtctccaacctagtgttgggttacgctcactgtggaatggttgtagcagctcgatggattgcaaaacaagccattccttgcctgagtaaagcaatcgagcaattcccagaatatgaggttaagatcattggacattcaatgggagctgggattgcaacaatactaacatacatccttcgcgagaatgagaagctggcatcatccacttgtattgcatttgggccagctgcttgcatgacatgggacttggctgagtcgggtaaagactttgttacctccatcgttaacagaaatgacctagtgccatcacttggcctagtttctgctgccaagcttcgggcagaggttatgtcatcgtcttgggcacatgaccttcgcaaacaaattcagcagactagattcttaggttttgtgaaccgttctgtgagtttcataaggtctcatgtgccctttgtctctgatccaagatcgaaggttgtggatgttgatatgatgcaatctcagagtcctgaggctgggagtaagccttcagcagatacccatgctgtggtgaagaaacgccctgcactggcttgctggtcatgtgtggctgcacccaaacagagtatggaatcgtcaatacaaattgagggcacgaaagttcaaaccgacactggtgtccaaactgagaaaactaccgaagcggcaactgctgcgctagtctcaatccatcttggtgaactaaaccttcaagaaccagataacagagaggaaaagggatcagcattgacagaaacagatgaagacgccatggagcttctggagtccttgaccgacgagaagcagttgccatcatcgtcaagctctggtcaagagccacaccagctgtaccccccagggaaaatactccacatggttggattgccagcagcggaagaggcaaccacgagtcagcaaggagcccaggaggaggtcatcgccctatatgagacaccccgacatttgtacagtaagattcgcctggcgaggtccatgataggagaacattacatgcccaagtacatcaagacaatggagcagttgatagacaagcttgcagaggacatcgacgaccagctggactccttgtagcatcaaaagtgtgtacaggataattattgtacagatcatgaaaaggaaagtcattctttcagattgcttgtgcgtaattgtagttggtttaagttttgtgatggcgatctagaagatgtacaacactgccagttgggctctggtctgtttattcttggtcattccactttggcaggcacctcaagaaaagctcaaagagctgcgcctggtgatgatctctgtaatttcaacagcactagttttctttagctgtgaatatttaatatattaaccatttatttgtgggcccaccc

SEQ ID NO: 2525 - DNA, 763 bp, Zea mays
  unsure (1)..(763): unsure at all n locations
  Clone ID: MRT4577_102301C.1
aattcggcacgagggcagcatgagtatgctggaagtgattctgtactactggatgggcctgaggtaaggcaggagctgatttcgctgctcagatatctgaagcaatgcatgtatttctcgaagaagccatacaacgtgtttttggagtatggtggttatggccagaatgatgttcttataaagaaatctaaggcgagggtgcgtaagtatcagttaactctctgttgtcaattatgtgttgagactgaacataccaaactactgacaataaatcaggagtaactggacgatatcctgttctgtcatacagatcctgaagcctgccttcacaattgtctgtgacagaagtagccaatgctttctccttttcattaggggggctatcagtgttaaggagcggttgacagcagcaactggcgcagaggttccatttcatcacgttgtggtccaggaaggtcgtgtctccaacctagtgttgggttacgctcactgtggaatggttgtagcagctcgatggattgcaaaacaagccattccttgcctgagtaaagcagtcgaacaattcccagaatatgaggttaaggtaatttctttaagctcttgccgagtatctccaggtgatctttggatgttattgtcaaaaactcatggtattatatattgatgactnttctatgctctattcttttagattntgtgcttctgtattgaactacagttctgtaactatattgatgtttacctgtctgcctattaaattgca

SEQ ID NO: 2526 - DNA, 428 bp, Zea mays
  Clone ID: MRT4577_102302C.1
gccggccgggctgcgagattcctccaatcgaggcagcattctcccacccaccggcttgggtgccagctctgtatagctgtcgtaacatgcgaagagagatcgcgggcggaccaatagaaccgcggcttcactagagactctcagatgggcgacctacgagaagtacctcgacgacgccgtcggcatgtacggcgaggtcgtggagtccaacatcatccgtggatcggcagacgcagaggtcccgcggctacggcttcgtcgccttatccacggaggacgcgatgcgcagcgccatcgagggcatgaacggcaaggagctcgacggccgtaacatcaccgttaacgaggcccagtaccgcgccgctcgcctaggcggcgtgggcccataccgtggggcgcgccgggatgtatgcgactacggagcaggc

SEQ ID NO: 2527 - DNA, 156 bp, Zea mays
  Clone ID: MRT4577_102303C.1
ccggccgaaagaagctggctccgccgcctacgtcacgcgtcaccgtccaatctctaacctgcctccgtcgcctcgttggttgaacacactcgcttactatgcatgtcgttgcgctccgatacgaaaatcgtcatgatgcattatgtacttattggt

SEQ ID NO: 2528 - DNA, 732 bp, Zea mays
  unsure (1)..(732): unsure at all n locations
  Clone ID: MRT4577_102304C.1
tttgtaaagatgttctttgcaggtattctccctgtttttttggcttcgcctgcaggttgcagcactatgttttgctctgtaagagcaatgaatatttacaacatgaaatcgtatgacattttttattgttcatggttcgttggaagtatattagccatattagttaatgcaaacattcatgaaattttatagaaatgatactcgtacctgaattccagaaatagggatgaaaatgataatctgaactgttagaataaatttaatattttaaaatagatatgtataaaatttgatggtgatcttgtgttatgttctcaagcacattattataaataagaataaaatattacataaattattttatgtattatttgctccctacaacaaaaaaagttaaaaattttaccgaatttattttcgaatccataccgaattttatatctatcatttaagaaaatatacgatgtatttgaggattaacttttatgaatctttacaagctcaatgttataaacaagaatacatgtatagtgcattatatatcctatntattcgcantcaaagaaaaacgaccaanaaactgattaccgaataaataacgtttccgaccgttttcatccctatccagaaactacagntgtaaccttagcttcttgtatccaccatttgacaggaaaaataaatnggtgtggttaagntatttagaacanattatgctgcagcctatgattt

SEQ ID NO: 2529 - DNA, 309 bp, Zea mays
  unsure (1)..(309): unsure at all n locations
  Clone ID: MRT4577_102305C.1
gccgggcattccctctgcctcggccggcacctacctcccccacttcgccgccggcgggtggagtcgggccggagcagccgctagctcgcctctgttaccccccccccccnctgaatcaaaccgctccaaaggatcactaggttcctgtgtagggtcgctccgcagagagaggatggagaggttgaagaccaacagaagcgattctaaccccaccttaagtgacatatgatgtgcaaggacccattactagtacggccatcgcgagtaccgatacaacgtctacaaggacccccaacctgcctgacagcg

SEQ ID NO: 2530 - DNA, 403 bp, Zea mays
  Clone ID: MRT4577_102306C.1
cggctcgagcctgctcctaccgcatctatatgctcagggctagcggtggcaacggtggccttcagcaagcttgggatccttctaaggcacgatgctctagtcagcggggtcaacgattgctcgtctactgcaaggtataatcgcttgcggatcatgtctactgtacctgtccattgttgatactgactatgccgttttccaccgtcacacaagagaagcatcttcttttgccttggagtaactgtgtcatgtcggtccagaccaacggtgcctgtgaggctgaggttgagacacgttcagctcgaactgcatgtgagatgtggtatccgatgcactggtctgatggaggtccttgggatgcatgatctattaaacaatgatgcttgcgatgtttacattgctg

SEQ ID NO: 2531 - DNA, 1599 bp, Zea mays
  Clone ID: MRT4577_102307C.1
ccgacgggccctacccagcgtcctgcgggactccgtttttgctcattgcgctaaagccaagccgtttcatatggttccccgcctaagggtgaagctcgcgcggagccagctattttgtcttctttttctccaatcaccggggggaaaaacaactacaatcagttgtgttgttcctgaatcacaccaattacaggaggtgatgcattcatttatggtcactctgttcgaagcactgtgggaatgtcaaacatccgtaggatgatcggagtctgcccacagtttgatatcctgtgggatgcattaacagctaaagagcacatggaattgtttgccagcatcaagggattgcatccagcagcaatcacattagtagcagaagagtcattagccaaagtaaagctcagccaagtaactaatgctcgagcaggcagctacagcggaggaatgaagcgccggctaagtgttgcgatcgcactgattggtgacccaaaattggtttttctcgatgaacctactactggcatggatccaataacaaggaggcatgtctgggacatcatagaggaggccaagaaaggaagagctattgtcttgaccacccattccatggaggaggctgatattcttggtgaccggatagctataatggcaaaggggaaactgcggtgcatcgggacatcaataaggctgaagtcgaaatttggaacaggatacattgctaatgttaatttctctggaaatggccacatgcagagccccaacatcaacagcaacactgaggctccggttaatccgaacatagaagctgtcaaatggttcttcaaggaacggcttgatgttaatccaaaagaggagagcaggacattcttgacatttgtcatccctcatcacaaagaaccacttctgacgagattctttggagagttgcaagacagggaaggggagtttggaatatcagacattcaactcggtctgacaacacttgaagaggtgttcctgaacattgcaaagcaggcagagctggagacctctactgctgaaggtaccctggtgactctcaacctgtcatcaggaacaacaattcagattcccaagggggctcgtttcgttggtattcctggaactgagacagaggagcatccaagaggcatcatggttgaggtgtactgggatcaggatgaaaatggatcgctctgcatttctgggcactctgacgagatgcccgtgccagttcatgctgagctgaggaggcctccgtcactttctcgtagggcctcaatggaccgtggacgtccagttgggtatatgattgacctgaaccaggtcccatgaaaaaaaagatgagtccaggtgcaacgtttagattggttttgatgcagattatctggtacatatagtatataggaatcttgtattcgtgtctttgtattagaagtcgtaaccttgtattgcagtagtaattggtaaagacatgctttgtaaaatatcctatagtgtaacacaatattttctgttgtgtggcaaacaaaggctcgaaaaatgacgcaatagaattacatggtaactaaaaaaaagaaaaaaaaaaaaaaaaaagcggcc

SEQ ID NO: 2532 - DNA, 276 bp, Zea mays
  Clone ID: MRT4577_102308C.1
acttccgttggctggcagatagaacattggtatattagctgtgctcagaatggatcatgcgctttcatgtggctgcgggggggaaaccccaggtgggcgggttttaatatacactaatttttttatgtccgataaaatgcagatcaatttgccaccgtcgggaaacagggggtgggtagttccaaaactcatatagtcacaggctttttacgttaaccccacgaaaggcttggccggggggaaaaacttattcaaattgaagggccgggaataaaa

SEQ ID NO: 2533 - DNA, 387 bp, Zea mays
  Clone ID: MRT4577_102309C.1
agaagagtcattagccaaagtaaagctcaggcaaggaactaatgcttgtgcgggcggctacagcggaggaatgaagcgccggctaagtgttgcgatcgcactgattggtgacccaaaattggtttttctcgatgaacctgtgaggaaatagaaaaattttcattgttttgttccttagactcccttgtggccctgtcacatgtcaatctaactaaatgtatatgctttgtagactactggcatggatccaataacaaggaggcatgtctgggacatcatagaggaggccaagaaaggaagagctattgtcttgaccacccattccatggaggaggctgatattcttggtgaccggatagctataatggcaaaggggaaactgcggtg

SEQ ID NO: 2534 - DNA, 286 bp, Zea mays
  Clone ID: MRT4577_10230C.1
cacccgatctgaccaaatttacatttaactgaaattccccaattctattgcatctgcataattggaaatgacactaccactacctatacatattcccttccctcatcatcatccttaacctaaactaaccaaccaaccaattacaccaaaacatcacactacatgatctccacatactctatcacactaataaactacatccctcccaatacatctacaatacacacaatacctaccagattctccaatacaccattcacataaactctcaactcaaataacccaa

SEQ ID NO: 2535 - DNA, 358 bp, Zea mays
  Clone ID: MRT4577_102310C.1
cggacgcgtggcgagacgcgtgggtgccgagtggcataagctgcaggaggtggaggtccatctgggaagatgcacagatgcaaggaaaattggggattggaagagcgctctgagggaggctgatgccgccattgctgctggcgccgactcctctcagttgcttcttgccttgaggtcagaagcacttctccgccttcacaagctggaggaggccgagtcgactcttgcaagcttgctgaaactggacagtgcattgccctcatcattgacagcagcaaaactctcggggatgcttgctgagtcatacatacatattgttcaagcgcaggttgacatggcatttgggaggtttgatact

SEQ ID NO: 2536 - DNA, 276 bp, Zea mays
  Clone ID: MRT4577_102311C.1
cctcgaggccggccgggattgctctcttcagcagcttctgcttgctctggcgtgaaggacagagagaagcgagatcatctagcacagaggctagctatgaggtcctcatcctaagatgttggcgattgttctgcggacatgtgtcggaggtgccagctcatctgatgagggctggcagacgaacaccgtcgcccaagacgactgcgtcttagttgggtgtgggacgcctttttcccttggggcccccccgttccccctttccaccaagccccgggc

SEQ ID NO: 2537 - DNA, 1950 bp, Zea mays
  Clone ID: MRT4577_102312C.1
ttctctctcttctcttcgattctctttctctctctccttcccccgccccctcgcctcccctctcccacccccaccaagcaccgccggtcactatccctccttggtcttctccctcctcagagcagggaggggaagcggaagagggaggcgagagcacgggaaacctgatctgatttgcttttggtcgccacaagagaagggagttggtgcagtttgtaggcgtgcctctgtgtctccgtgtgtgtggagatggaccccaagttccccacacccctagcgctaaacaaaacggagcccaccaccgcgacgaccaccaccacctcgaccgcgcagcatcatcagctggatcctaaggactaccagcagcagacggcgcagcaccaggagcagcagcagcaccaccatcacccccacctgcaaatccaaatccaccagccgccgccgccgccgcaggacgggggcggcggagtgaaggagcagcagcagctgctgcaggtggtggcgcagcccggggatcggaggcagcaggcgctcgcccccaagcggagctccaacaaggaccgccacaccaaggtcgacggcaggggccgccggatccggatgccggcgctctgcgccgcgcggatcttccagctcacgcgggagctcggccacaagtccgacggcgagactgtgcagtggctgctgcagcaggccgagccggccatcgtcgccgccaccggcacgggcaccataccggcgtccgcgctcgcctccgtcgcgccctcgctcccgtcgcctacctccgggctcgccaggccgcaccaccaccacccgcaccacatgtgggcgccgtccgccggcttctcctcgccctccttcctgaattccgcgggcgcgggcgacggcaccggtatcggcggcatcatgcagcggatgggggtccccgcgggcctggagctgccgggagcctccgccgccggagccaccctcggcgccggcggccacatcggctttgcgcccatgttcgctggacacgccgccgccatgccggggctcgagctcgggctatcgcaggacggccacatcggcgtgctcgccgcgcagtcgatcagccagttctaccaccaggtgggtgctgccgccggcggcggcggccagatgcatcacgcgcacgggcaccatcatcaccatcaccagcagcaggaggacggggaggacgaccgcgaggacggcgagtccgatgacgagtctgggcagtagtagtgtaaccgttcaaccttttgcgttgctgaatcttccctcaagtggaggaggagagaaaagtgtatgcgtgcagccacggaatgcttctgctactcctggattcttgttggtcgagttctgatggatttttatgttttttttttctctcgtgtggtatccaaactcggcggaggcctctcttgctgtgaagacttgcgggctcaagatcatcctcacttcttcctacaatctcatggggtggatgatcgccacagccttctctccgacttccaggtgtataatagctgaaaacttgatggattggaccaatcacccttgagtgagtgccttatttgttatattgcaaagtgtgtagatattcaggtaattttgcagttagagaggtgttctttttattggagtaaacatccacgttttaaaacaatcaaggtattctcctccacaggctgtctatgcaatgcaagtatagtacaattctagttcatgaccacgcataccacttttctccttctctgatatgtctgtgatctgtttctgactagatattcaggtaattttgcagttagagaggtgttctttttattggagtaaacatccacgttttaaaacaatcaaggtattcgccggcaattcgaccatcctccacaggctgtctatgcatcataaacatgatacgtatacaactcgagggggggcccggtaaaa

SEQ ID NO: 2538 - DNA, 387 bp, Zea mays
  unsure (1)..(387): unsure at all n locations
  Clone ID: MRT4577_102313C.1
tttnttttttgatatagaattgtaaggctctgaaataaaaggcggactgaatagcactgaatgatgctggggaccactgtcacatccacagaaggagatcatcgaagaactgcaaatcaaaacgtatatcaaatacagactgtaggaaatatgcctaccctccatgaagggttaatatgttctattatctaagcacacaacttcaacagacacttatcgcacaggaccgagaacacacactgctgtcgttcaaactgataatacaacattaaacagaccacgaaaccgtacttgttttccccaaacagcatgccgtacgaaccatagtctataaagcacaccaccaccaccggtcacccacacaaatttacaaacgaacaccactcc

SEQ ID NO: 2539 - DNA, 313 bp, Zea mays
  Clone ID: MRT4577_102314C.1
cttgcgctgatccacctctaccggcagtacgtgttccggcactctccaagcatggagtcccctttggagtttcagttcggtgttgtgctcaacttcaaacatggagtgaagcttcagtccatcaagaggcacaaatgttagatcggcgcggtggtgttgattattctgatccttgatctatctttgtgcaaataaaggtgcaacgtatacggtcatacatgcacattttgcaaaaggaaacaatatgggggtgattggtctcaacttaacctgtattatgcaacataactcatcaaggcaagccaacacaaat

SEQ ID NO: 2540 - DNA, 177 bp, Zea mays
  Clone ID: MRT4577_102315C.1
gcacatagatagcaatataatactttatctcagaggcagttacctgcataattaagcatgcggacaaccctgccccactgagatatacgctgtataataatataacatggaaggggcgaagagcacaaaaagatttgtatctaacactatataccgttctgttgcctttgtaggagg

SEQ ID NO: 2541 - DNA, 259 bp, Zea mays
  Clone ID: MRT4577_102316C.1
ttatcggatgttgtgtggcgtgtccgtgtcgtcacgtcgtccgtgcccggtgccgccgcgtcgccgcgtggctcggctggccgtctcgtcgtcgccggcttcgtcgccgcggccgtcgtcgctggcttcgccgcgtgatccggcgctagcttcggtaggaatcgcagcggattttgtgttgtttgtttcatcggtggcggtggtggtggtggtgcatttgtgattcgttcagtgaccgagagagagccgtctcttattc

SEQ ID NO: 2542 - DNA, 444 bp, Zea mays
  Clone ID: MRT4577_102317C.1
cccacgcgtccgtgggcaatctctaacccaaaatattgcatcagatattattgaaatgggatgcatggggaaagaaaatagcacgtaccaaatcctttcttgaaccttcaacaacaaatccactcctctgcattcaatctattgctaatctttcagtcatcacactggttggacagtgtgttggtgtgtgtgcatcatgttccttctcacgaaggtcctgtttagtggtagtgcctgcatgttccactggatgattttcttgttttatcgagcatgacgcacttgatccttgcttgcatttctcatcaggtgctgggtgaatagatccctgtcgttctctatagacacgcgttctttcctatgtgcagtttatgtgcacatattatggctagcgcaagtgaagcctattatcaaattgccaaagtggttgcagagcggttacat

SEQ ID NO: 2543 - DNA, 1745 bp, Zea mays
  unsure (1)..(1745): unsure at all n locations
  Clone ID: MRT4577_102319C.1
attgggtacctcgaggccggccggggctatccttccccgcgtcggtgccaacgccatctccagtgagccgaggtcgcagacgatcacggtggccacagcgacacgccgcacgcctctccgccccgctccgctccagattgcgcgcacccacccatgccaccacgccggttcccatccaggtgcgttctgccggtctctctcgctcgctgtctcgctctccggcgactggtgggccgccgccgccgccgccccgccaggtgcggaggctttcgttggtccttcgccagcnacgagcacccaccaggcttgttgtatatgtgctacaatggcgtctcttgggcgaagagccgggagcnacatctgctcggagctgtgtggcacaactctgaaccagagacgctactccacttcgagggtggattggaagcagctgcgaccaatgatccttaagaggattaagaacaggacaaaggaatacccaatcaagagcatgatcccagtcgcggaggaggtggtcacggcggaatacccaatcaatgggatgatccccagactgcacgagggtttcacatctagggagattgtcaatgaggggtcctccagagagctcaaggtttggtttcaagcgtatgatcaaggttggaatgaatgaaacattacaaccaaacttgatcaacttaaaacatgctattcaggcaatccactgaaaaaatacagaccacatgaatgggaaccgggcaacttgaatgacatccttgttcctgttcaggctttccaccagaaaaatatgtttgagcatgagataaaacatgaccagcggttcgacttcactcgcgtcccagctgtacttgagctgtgccatcacgcaggtgcagacatacctgatgagattctatacagaagtggacaaatgtctactacactcaaaaccaacaatcagcaatctgctccaatcttgccagatgaactcagatatatcggtcagaaaacactggatgcatgggaaaacctgagattaggtgccacaaaacttctcttggtgtacccatccaaagtttgtaagcattgctctgaagtgcatatcgggcaatcagggcacaaggccagaatgtgtggagtattcaagtttgagggctggaaagggatgcacaagtggaacaaggctggagtggatgacctagttcctcagaacattgtgtggcatcggcggcctcatgatccacccgtccttgtggacggtgggagggattattatggccatgcgcctgctgtcgttgagctctgcatgcaagtgggtgcaatagtacccccgaaataccattgcatgatgaagacacacggcttagcaccacctgttggatgagaccacataccataagtcgactgcctgtatagatcagagaccaaaataatttgcttaaggatccaaaagactcttctggaagaagccatctattaactgtaatggctagctaaggagatacgctgttttgaagattattagtgttattagaatccagaaggtgagattgaaaagaaaagattttctgaagactagtagcggttgaaggccctcagacagtaggggaaattttgcattgtaaaagattataacagctttacttcattggcattcatttattcaacgttgtccttacattttcccccgcacttggattttaaccgtacgggcagttttgtttagctgccaaaagtcgagcattctttcttaaagctgtaataag

SEQ ID NO: 2544 - DNA, 264 bp, Zea mays
  Clone ID: MRT4577_10231C.1
aacaaaacataaatgggccttgggaattatgccagagaaaacatacagttaaataaactacaaacaaacgacacattaatgatatatagaacagtggtctgaccgggaatgcatattgatagctatggtgttctttagatcatatagaaccatatgtatacacctggctagcagtcactaagctacaacggctgtgcagctattaagctttgcaaacaccaccagcacagaaagagctcgggccactggttcacttgattgata

SEQ ID NO: 2545 - DNA, 404 bp, Zea mays
  unsure (1)..(404): unsure at all n locations
  Clone ID: MRT4577_102320C.1
gctcggtgatcttttaccggcacgccgaggggggttttttgaggatcgacgctgcctggataaagaatgggggaaattctttanggtactagatggcgaaaagaaggtggttctagaggttggttgttgggctgggaacacaaaatatggggggggggggtcttacccagatatttttgttctcccctgcggtttttgtgctcgagctgtccattgggtggggatgcgcgtgggctgggggggtcgctgggggtgtgcgttgggggggggtgtggggtgggggcgggctggctgggggtgtggggtgtttttgttgtgntgtggtgggggtggtgtgtgtggggtgtggggggggggggggtggngggtgtgtggggtgggggggggggggggggtgtgggggg

SEQ ID NO: 2546 - DNA, 365 bp, Zea mays
  Clone ID: MRT4577_102321C.1
ctggcctgtgtttcccttttgcgcgcttgttcttgacctcttacttttttttcccaattttttgcacctgcttcttcaagtgtcctccattttccttttttgaacattttttatcttttgcgtattcattacttttgccttttctcttttgaatatttttcatcgcattactatttcactcacatttttgttcccatacttaatattataattttttctagccttccgactggcactaataatatttttgtgctttcatacctattgccttttttacaggctgattccttttatacccgattcatttattaacttgatatgtttttaaaaaaattctttttcattttaaataaccgtgggttttt

SEQ ID NO: 2547 - DNA, 899 bp, Zea mays
  Clone ID: MRT4577_102322C.1
gctcattgtcgctgcttccttcatttcatctcttcttctccgctgctaggctcgtcctggccctgtcctagccggctagcccatgcctggaagatgatcggcgacggcaacaagcgcgatgcaaggcagttccggcgggggcgaactgagaacacatgagaataatgagatgatattgctcgcctcgcggtcgcccccgcagggccttccttgctgctgttccgcagggtggcggtctgggtggccgcccgtcgtccaggggagtatcgagacacgtacgcacgaattcaccaccacgcgatccagcatgttttgctgctgcagtgctcttcgtcacggttatatatatatatatatgtgatcgaactgccatgcatggtaagaaatcactgcgcgcttgctattaaaaaatatatctgtgtgttagcgataactttattaagctgtactcctctcaattccatattgcaagctattttagcttttcttacgcacatgcatagtttttgttagacgtctagatttgtatacattgtgtctatgggtattttttggttctcgatctactttcctactacaacttacttaaggttagtcagccaaattaaagaactaatcttattgtacagaaaaatagataaattatgtcaagttatcaaacaaagcttaaatacatgcatagttaaaaaaatatatgcatctataaaaatagtgttaactttttttatatatatacatgtatgtagttatgtattatgtctaaatatatgtatctaaaagaactaggataataggttacagtttaaaaatagagataataagcatgtttggttcggcttttttctgaagggttttttctaagaatctagcttcctagataatctatggtcacaagaatc

SEQ ID NO: 2548 - DNA, 342 bp, Zea mays
  unsure (1)..(342): unsure at all n locations
  Clone ID: MRT4577_102323C.1
accgaataatgagttgacatgccatcgcgtgtgactcattattaacaataaaacaagtttcctcttattatctttttaaaaaaaaaaaaaaaaaaaaaaaaaaaaaaaaaaaaaaaattttttttttttttttnnaaaatttttggggggggggaaaaaaaaaaaaaaaaaaaaaaaaaagttgtgccttgggccggtcccaccttaagggggatttttgcgaatttccttccccctggggggcgtttgaccttccttttggggggcccatttggcctttaggggggtggctttacaatttattggccggggtttaacaagttcgggctgggaaaaaccttg

SEQ ID NO: 2549 - DNA, 622 bp, Zea mays
  unsure (1)..(622): unsure at all n locations
  Clone ID: MRT4577_102324C.1
aatctgtgttgaaggccacgagcaccgctacgattttcaattccgccattacgtcgagcacgtggtgagcaccagcggacttcactgtcctctccatccacaacacttggaatccttccttgactgaataatctggacgaaccgaactcgagtcgcggaggatgttcacttggcttggacatttcagacgagcagcgcatgaggcacgactacaatagcgggtagacaacaacgccgcgagggaggacgaccacgggttgccgaggctgcacgctgcaggtccgagggtttcagcaacaaactcatggtggcaggtggccaagtcttagacatgagcttgaaaccaggatngaatggcgatcggaacgacagggtgagatgtatggccagctcgcaaagatgagcacgtgcggcacggaagcgaaagcagaactcgagggcgccggcttgcagaaggacaaggcgccagaccaggacgtagcgacagcttcagacgaacgctggcagccaaggacacgacaacaggaaatcttccggtggccatggaggcgagctttgtgcaagtaaggctatagagttggcttcctgtgttattctggctagactgctttcctagttggct

SEQ ID NO: 2550 - DNA, 481 bp, Zea mays
  Clone ID: MRT4577_102325C.1
gtttgtttggtagcatagactagacaaaaagctgatgctgcatgctccagagtccacacctgtgacagcttagcttgctgcacactttctagaatagtttgcatccagctcataagcaagacatcagatatggtaatcttaaagtaaggcgtgtatctcatgaattcgttacgcctttgaagatattattttcatcttgggttgggataatcaataagtctttgctataggatgcctacttccacaaggatatctgggccaaaagaatgcttagtttgctagtgtaagggctgtgtgagacttcatctatgagctagacaagctggtagattatatatatacataattggcatgagcctcctctataaggtctataagggggcttatcgtaatcgcacactgaaactatctgttgcaggagcgttgttatgaaaaggttatgccacggtcctcatattgcacttgcttcttcattagcatc

SEQ ID NO: 2551 - DNA, 527 bp, Zea mays
  Clone ID: MRT4577_102326C.1
ataaatagaaatatggcccaatcctaatttgatttgatccttaaagtttgtagcgtaaaatttagagcccackactacctctactagtcatccttgactgtacrtgtacatgtatacgagacckataattaatctattattttttcatgcaattcaattgctttcataatatcctaagtctaggtttctkctctkggggtaccbtcgcgcacbcactakggtcgtgctcakgcbctcttcgtacgcgcctscattgtktgcccgcktcgttcttttttttttcagtagggagattactcktgacagatttacaaascggcstcgggctccaacagatttgcagcacttcgagctacaccacggaaagggaggkagcgtaasgggctagcagcgcaggkkctggagaaaggtcgaacccgcttccaggtggtgaaaacagcgagaagacasggccgaggacgacgacgacgctgttkggsttgcctgcyccsatctgatccaaggatggcgagacggcgacgctgtgt

SEQ ID NO: 2552 - DNA, 277 bp, Zea mays
  Clone ID: MRT4577_102327C.1
catcgcgcccactttccctatctgcgcacgctgcgactgcgcacatctgagaatggctgtccgttgcaccatgatggaagcctctccattgacgtaatacgatgaggcacgatctatgacagacgtgcaacgcaccattgaacatgcacgtgccgtaagtgcgccccgcgactacacccctaacgcccagcgaagaatcgtaggcagtcgcctatccactgcccgttatcatgaccatggaggaagcactggatacctaactgctcgctttgcgctg

SEQ ID NO: 2553 - DNA, 297 bp, Zea mays
  Clone ID: MRT4577_102328C.1
ctcatgcgtccgctcacgcgcgggagaggaccgcgctctttgaccggttctgggctgagaaagaggacgacgcacgagagaatgagcacaatcaactctagcctacattgcgctacgccagctggaaggtcggacctcagtcatattctaatcttcaaactaaaacgcgcacgctaaaccgggcccgagaatggtgccgtaacacatgagtcaggggatacccctagatactggcatccatgaaccgcaaaactgtgattaccggtagtatgggggctactagacgcaattaagcag

SEQ ID NO: 2554 - DNA, 201 bp, Zea mays
  Clone ID: MRT4577_102329C.1
atggcgcactcctggttaatggcgctggttccggagggcatgggctgcgtcctcctcctcctccatattggtgcaaagcccaagagctggaccatcctggggtgtctcctatccattctcagatgctccctccggcccaagcccaggttctggagccttcccctcatttctgcgctcccgtggatacttaacgtaggttag

SEQ ID NO: 2555 - DNA, 651 bp, Zea mays
  Clone ID: MRT4577_10232C.1
agtctcaagatcctagtcgtctgatacttctctcgccgacgccaatccgctgctggtctccgtgacaggcgatgccatcgaggaattggccaatctgatgaaaacaataagagatggcttgtctcaggagatgggccgctgacctgtcgagtcaaacgacaactcttgagatctggtgcggaacaaggaccgtagctagataatcaccaacgaccaacgtaactgcaccacacccacttacatgtactactgcaactccaagcggctcatcagactatgcagtcaacaacccatgatgcatgaacctcactctagactacactatgtagtagccacgcgccacctggcgaagaggtgaagaagatgcctctgtgctgattgcatattaatgctgtgaagcacattcatcctgattctgtgtcgggtgacacatccatagaaagttatgcattactatgctgacgataaacatctgagcaatctaacagatctcgctcgcatggctgacatccaaacgcgtgacatcgctggatcttagctcgcctgcctcatccataatgatgatggcgcggtgactgactagttccaatgctctgacatgtcatgctgctgatgatgctgcggtgtactgctagcctcaatgaggtgtat

SEQ ID NO: 2556 - DNA, 445 bp, Zea mays
  Clone ID: MRT4577_102330C.1
gggctcaccaaatgttcggttaaattttaaaaaacactttggttttaacaaaaataacagttttaaattgaccaggcaaacgttgggagcattttttaaacaatggcgtgaacaaaacgaaattttttttgtttccactagggttccctcaagcaaacccaaaacccgccagacacttttttttttttttggggcaaccttggtcaccttggctccagttgggtcctttttttccacccttttgatgactccgacagcccccgtttgcctttttttccggcccgcaaagcgccccaaaggggggttttcaaaaaagggctccactaccatgggcttagggggaaccatttttaccataccagcattaccatttttgaaaaatttgggctttttttaaaacttctttgcaaaccgcctataaattttgggaaagagccccccaaac

SEQ ID NO: 2557 - DNA, 406 bp, Zea mays
  Clone ID: MRT4577_102331C.1
acactcactccttccccggccccctgtccgtggggccccttcccccgccctggtccccccccctagcgggcccttccccgggacccggcgtgcccccccaatggggccccccttttccccaacctgggccctttcccaaaatggtttcctcccccaatgaaccgcgaatcccaaccaaaagccccccgggtccaacccggggggccaaatgggaaaacctggggccccctaaagggggggtttccccccccaattcccaaccgcccaaccccggttttcaaccgggcaaccccctgggccccccaccctggaaaacccgcccccttcctggggccggctcccttccctttttcgcccggttactcttttggggccatcggtttttgggaacccaaaccccggaata

SEQ ID NO: 2558 - DNA, 251 bp, Zea mays
  Clone ID: MRT4577_102332C.1
ctgagcggtggttttttcttatcttttttttttttcaaaaaggcccggtcatttgataaggcaacaccctcccattgttaataaaaacattgctttcacattgggtatctaccccaaggggtcgggggaaaagggaaaaaaaaggcggtgtccctcattaatcaaaaccccttcgggaaacccaaaactttgtcttgtcggaaaatttgattgcttcatcaataatgagggctaccccggccttatggagg

SEQ ID NO: 2559 - DNA, 455 bp, Zea mays
  Clone ID: MRT4577_102333C.1
cctatgctttcgagtcacgatactgcggaactgtgattggtcattggcaagcgcatactcagcgtatgaggagtgaaggctggaagcaccaaggtctttcccatcctcaaaggcaatccacacagcaagatgttggctataggtctgtgttgcacgggaaagtgaggtcataacactctgtgatatgccgatctaacaactggcataactctattactgtgtacctcttaccatgtgatgtacagcacgctatgtagtggtaatgaacggatgtccacctgtcttggctgtaatgtggcatacattttatccatagaccgcttctgacgaccacttttacaatgtataatgtgccaatcactattataagaaattcaggtttaattcgcaagacgatgtgcagaccgacccgtgcgtgtttgatttgtctacctactgattacaacgattttaca

SEQ ID NO: 2560 - DNA, 179 bp, Zea mays
  Clone ID: MRT4577_102334C.1
ccaccctaagaagaccttcatttgacaaaatgttcggtttccactttcccccagcttttgaccaaaagaagggggaaaaaccttcggaccacccaccattgtagggcaaaacctacaaccggccaaagattataaacacaaaatggtcgttctctctctaaacagtagtacctttccca

SEQ ID NO: 2561 - DNA, 169 bp, Zea mays
  Clone ID: MRT4577_102335C.1
agaccaatctcatatctgagcatggggttttagttataacaaaaaccacaagggggagaaagcaactccggcataaaaaggactggcctaccgaggtcactcgaattggcgggactacaggctgaacatacgtggggaagaaaagcttcactcgctgagttgggtgtaa

SEQ ID NO: 2562 - DNA, 460 bp, Zea mays
  Clone ID: MRT4577_102336C.1
tttttttttctaatttatttttatttttttattttttttttttcattttctattgccgaggcagaggaaaatctccttttttcccaaactaattaggggtggccagcacttccaaaattggaaaaaaaacaacgtgccgggggattatggttgcttaacgggaaccccaaaaacaacacttgttgattcctggaggatccctaaattctttaaggtaccaaacaaaaagcctgtctggtgggaataatccgccccaaccttaagatgtccgcctacgccccttctggggggggctccccggggggaaggtctttaaacccaacttttttggtgtaaacataatcggggaaaaaaaccttaggctttggaaaatttgaatggaaaaaaaaattcaggtttctgttaatacggagggcatcaaccaacaattactttggggggttagcgggacaacctcgcc

SEQ ID NO: 2563 - DNA, 753 bp, Zea mays
  Clone ID: MRT4577_102337C.1
cgcacctcgcgtgcacacagacacaggcaggcacacagcgcaatcaccgtctcgcctcgcagtcgtactcacggtcttgcacacacccgtccccatcctcttccggtgtcgccatcccctccgtcgaccgccgcgtccggccgcggcaacccgacctgtgtcaatcgccatgttccttggcactgcgctgaccaaacacagtgtttcttatcatttctttggacatgttcttgtcgcatcatgtggaatggttttttaatgattctgaacagactacctcaaggcgtcttgctgataggaagatatcacgatttgagaagaatatcacaaagaggggctctgttcctgagacagccaagaaggcaaacgattatcctgttgggcctattcttcttgggttctttgtcttcgtggttgttggatcatctctctttcagatcatcaagacagcatcaaacgctggtctattctgaggtgaatcggttgacacatgcagtttgtcactagaaactatacaagtgtagggcgtggcttaatgtcgcctttttaatgttgtaccgtggagagttttaagttatatatgtaatggaagtgctaatttaagtcacctgtctgacaggaaagatgttggagtagtccataatacatatcgagtatagttatagttcgtgttaaatatttctatgctcaaattggtcgcatcattgggctattgtactcttcgatttatcgagtaatttggtaatctttcgc

SEQ ID NO: 2564 - DNA, 216 bp, Zea mays
  Clone ID: MRT4577_102338C.1
gggatactctgccgtgaggccaaacagtactcgtggcacgactgacaaccctcctcttccttgtgatctccgaatagccatttcagattccaagggtcgagaacgtgtaatccccgggtctccccacccaccatatatctagaataccgagtctcaaataccctcgcgaaaagccccgcacggaaagcagatgttgtcttgccgtgaatttgagcc

SEQ ID NO: 2565 - DNA, 1302 bp, Zea mays
  Clone ID: MRT4577_102339C.1
ctgtctgccaattgccatcctaccaaatcatcccggaaccatctgttccaaatcatggtttactctagatatattgactgacaaccataggcattagctgttccactctgacaacgacttatacaatagagaataaaaaaaaattgtggggcatgggttttatgtcaccatagttatgtacttgctcactctgatatgatgactttgattcagagaattatcggtttcatgtagcctgatcattttcttgcccttttagaagcatatttatggagcatttggatttccggccgggagaaggcaggcccacaggatgacaggaagccacgagagcgttctttcctccggctcgggtcaacaaacgattggggccctcgaggccggccgggagacccgggcgggccccggcaattcacgcacctcgcgcgcacacagacacaggacacaggcacacagcgcaatcaccgtctcgcctcgcagtcgtactcgcagtctcgcacacacccgtcccgccgtccgcatcctcttccggtgtcgccatcccctccgtcgaccgccgcgtccggccgcggcaacccgacctgtgtcaatcgccatgactacctcaaggcgtcttgctgataggaagatatcacgatttgagaagaatatcacaaagaggggctctgttcctgagacagccaagaaggcaaacgattatcctgttgggcctattcttcttgggttctttgtcttcgtggttgttggatcatctctctttcagatcatcaagacagcatcaaacgctggtctattctgaggagaatcggttgacacatgcagtttgtcactagaaactatacaagtgtagggcgtggcttaatgtcgcctttttaatgttgtaccgtggagagttttaagttatatatgtaatggaagtgctaatttaagtcacctgtctgacaggaaagatgttggagtagtccataatacatatcgagtatagttatagttcgtgttaaatatttctatgctcaaattggtcgcatcattgggctattgtactcttcgatttatcgagtaatttggtaatctttcgcaaaaaaaaaaaaaaaaaaaagcggccccgagctccgctctgtggttgatggtcttcctggacactctttcgcgtttaacagttgagtgcatctgctgtctgccatcctacccaattcaactcggaaccatctgttctgatatttaatcatcatcaatcctaagttcctaacacagtttcttgtcagttgtaatttggattaccgtaacatgcttattattctg

SEQ ID NO: 2566 - DNA, 268 bp, Zea mays
  Clone ID: MRT4577_10233C.1
ccctggggggaaaaggggtagcggtttgcacttggttttgttttgctggttccaacttacaacccgctgccttgcaaatgcggttcgggagccccccccagaaaggggcagaaaacaggctcctatggattctggactaaggggtcgaacaaaaagagacgaaagggcttttgtggttttagggccccgccaacctatcgtgcctggtttttgggttcttgaacaaaacccccccgcttaaaactgttcttctctctggggcggggga

SEQ ID NO: 2567 - DNA, 478 bp, Zea mays
  Clone ID: MRT4577_102340C.1
ccaaaaaccgacagaaaaaaatccgggaaaacggtttcgttcccccaatttaatggggggcatttacccccccggggaatgggaccgaaggtataccctggggggttttcccccgcccgggggaaaaccatttcgccgcaaaaaaaaaatttaaaacccccgactggcaaaacctcgacaggacgccccgccccccagggggggggggcagtctgggccccccagggggcgggttttgaaaaaggaaatttaaccaaaggtccctgcccccccaagagccggggggtacccccccattccccaaaaaaagccaccgccggggacttccgatccggggcccaagcaggcaaggcggggggcacccttgccttctattgggggggaggggggtccactggaggaccccgggggcccaggcgtgggcgaaaatgtggggggccttgaccccggaaaagccggcccccttggggagcccggg

SEQ ID NO: 2568 - DNA, 298 bp, Zea mays
  Clone ID: MRT4577_102341C.1
gcagcaccatgaatcactatttttttccttaggatttaacttaggataaagctctgacggtgttttacatcactcatcgatccgcagtccatgctggttgatgcatgggtctgctggagccgtggatgaacacagcactaacaactgacacagagcgacctttaatcaaaaacacagatgggcaacaacaaacacgtgacgaacgtagataaacactttggactagggtaaacaacacggttgcgaacaggattacttgtccgctcgggccccaccgattattttcttcagttcccgt

SEQ ID NO: 2569 - DNA, 393 bp, Zea mays
  Clone ID: MRT4577_102342C.1
cattgggtacctcgaggccggccgggaaaccgacttaatacagctgtctgcgactcaactgcattagtgggcgaactgtggtgctcaggtgcgcctcgtctcttttcacgagcggcggctccgtcctccgcaggcctggtaatcagcacgtgtgatgcaccctgatctgctcctcatcatttaacgcttgcctaggcctgaaaaagcggctgacccacgtccaggtacagcggccgccgtttgccgagtgcgcccgggttgatccagaccggctgatatgtctacccggatgacctgctacttctgggttccatagaagtcttacatgggacttcagatttgatccctgtgaatctggactatcgaccactagagcatgtgggtgtaactggc

SEQ ID NO: 2570 - DNA, 433 bp, Zea mays
  Clone ID: MRT4577_102343C.1
ccaaattctaccaaatacatgtgctttattcaagttagttaaattgtgattggattgcaaataagttattcaaacttgctattggatgatcatgatgtatataaagtataatatttgttgatcaaattcatttgaatgcatatgagttgattgaattggatatatatgcatatgttgcttgctataagatgattgaatgtacaatttgctaaataatcaagtttggattgatctatgttgaataaattcaagagacttcatttagtaagtggtttaaatggatatttgtcttttgaaagtagttcatttcaaatttgattcaacttgaagaagaataactcaatatactgaaatctggtcaatattgaaaatctaacaaggctgtgctcatagccatgtttgagtgatcaaatctatttggattggcttgaaa

SEQ ID NO: 2571 - DNA, 631 bp, Zea mays
  Clone ID: MRT4577_102344C.1
ggtaccctctgtgccggccgggcccccatgcccatatactaggaccggccgtgcgacgacggcgggcagcggcggcgtcgcgcgcgcgaagtggtcagtgaaatgccggcgcgtgggctctcggatacggcgccacgcttctcatgctcaccgcgcgcggcctttgtcggctcgcagcggtggtctgcttcgcacgccgctccgcgtcggctgtggcggcgctccccggtgccggcgccgcgcggttccacgactacgacgccgccatcacggagtgtgtcgggaggcgggcgctcctcgaggggcggcaggtgcacgcgcgcatggtgaccgcggggtaccgcccggcgctgtacctggcgacgcggctggtgatcatgtacgctaggtgcggtgcgctggaggacgcacacaacgtgctcgatggaatgcccgagcggaacgtggtctcgtggacggcaatgatctccggatattctcagaatgaacggcctgccgaggcctgggatctgttcatcatgatgctcagagctggatgcgagcctaacgaattcactttggcatccgtccttacctcctgtactggctctcaaggcatacaccaacaccagattaagcaagtccatgctta

SEQ ID NO: 2572 - DNA, 299 bp, Zea mays
  Clone ID: MRT4577_102345C.1
gtgggggggggtgttttttttttttttttgaaacaggcatttcttcttccattttaaatagcaaagggcaacttgcagcagggcacatacacacacaagcacattcgacccatttacagccttcgcatcaccgcttactggtttcaaggtgctggtgggcaggagatcactccagacaggcagtctatgccttatagggggaataggcggcctttttgggcgactttgcctccttgctccccacactggtagccttcttcgccgtcttcttgggccgcaaaacacggtcgatattgggg

SEQ ID NO: 2573 - DNA, 464 bp, Zea mays
  unsure (1)..(464): unsure at all n locations
  Clone ID: MRT4577_102346C.1
ccgggncgagccagcgcgtggcggcctggtggacgccttgactgctcgagcgggccctgcgtgtccagtgcctcaagggcaccatttacggcctgtttaccttcgacggtgagggaaaccncccnntcttaaccgttangctctcaagaagcctcttcctctcttcatccactacatcaccctacgcttgcagcccattcatcacatctctatcaatgaatacggtaaactatcattcacctgtttctgcccaacaccaacttttatgattcctgacccatatttatcaaaaaggttctttttaataattttgtccattttggcnnnccnncnntttaactttatttttagtgttttattcnacgggctttttaattattatcttaaaaaattcttatatcactaaattaattttatattttcattataccattaaaaaattaattgtattattccattttttt

SEQ ID NO: 2574 - DNA, 370 bp, Zea mays
  Clone ID: MRT4577_102347C.1
gcgcccttttttttttttttttttaaaacgtgggcgatggagaaacaagtagtaacaaatttggagatggataaggagcagagagcaatgtcatgcattaggagtgaggccacaaaatataaatatccaaaatataaatttaagaacattgacctgctcaaagggatgataagaccaaacatagcatcattatatgaaaaaacactcatggaataaataaaatggagccaaaggggatcccaggaggttagaagcactaaggaagaacaatgcaaggtcctgactagtcatactgagcctgtgagatccaaatcaggaggaaggggctcatgaaggcaaggatggaacctcctatagagagactgaatta

SEQ ID NO: 2575 - DNA, 672 bp, Zea mays
  Clone ID: MRT4577_102348C.1
ggccgcttttttttttttttttttctgaactattgcatatatagatatgatgtgttcctgagcatctcacggagaggcctatttatatgttcttagacttttgagcgtcattataaagatatatgagtgaacaacatattttgtactgataatggggtaccagacacaaaagcatacatgtaccaagaacaccggtgcttagcctgaacagggggtcaatttatatgtatcatgatgtaggtgtacacgagatttgtgcggatcacttatttaaccagtgaatatattcagcacgaaattctgttttacacacgatatctttcagctcggataagaagcgctcgtaaaatatgaggaactgcaatgtgacgaacttcgcctctatgaacttaaccatctgaacggatgaggtgaacctcaaaaacctcagctagaacagataactgacctttcattacaaatttgtcatgtttcaatttgatcttgtaattttggtcgcgcacgttgaaaccgagatgggccacatgcatcctctatttttgacatgatctcctgcgctgggcattgagacgggaaagagtgtttccctgtttaccattcccatcatctccttctgaaacaaatttacaaggttgataccctgcgacctcgaaataagagcaaacgcgttca

SEQ ID NO: 2576 - DNA, 1992 bp, Zea mays
  Clone ID: MRT4577_102349C.1
ccggccgccgacccacaccccacccgccatgggcggcgtccaacgaaatgcgcttgttaattcgcctcacttctcgctgtggtcaccacgcttcacatctcgcgcggtagcgtccgacaggcatggccgcctcctccctgctccggtcgttcacccgccgcagctgcgcgggcccgagcgctttcgcttaccgccaccaccaacgacaacaaccttggtctcccttctccaccaccgccgctgcggtcacgcaggacaaagcggcgaagaggttccctggactagggccgacggcgaagggggagaaggccagggtggtggtgttggggacagggtgggcggggtctcggctaatgaaggacctcgatacgcaaggctacgacgtggtctgcgtcgccccgcgcaaccacatggtgttcacgccgctgctcgcctccacctgcgtcggcacgctcgagttccgatccgtcgctgagccggtcgcgcgcatccagcccgccgtgtccaagtcgccgggctcctacttcctcctcgcccgttgcaccggcgtcgaccccgacggccacacgattgattgcgaaacagttacagatggtgagaaagattccttggagccatggaaattcaaggttgcttatgacaagttggtttttgcctgtggagctgaggcatcaacttttgggatacgtggtgttaccgaccatgcaatctttcttcgcgaagttcatcatgctcaagagattcggagacggctcctccttaatctgatgttgtctgatctccctggaatttcagaagaagaaaagtgcagattattgcactgtgtttgttgttggaggtggtccaacaggggtgggatttagtggtgaacttagtgattttattatacgagatgtcaaacagcgttattcacatgtgaaggattatattcatgtgaccctgattgaggcaaatgagatattgtcatcattcgatgttcggcttaggcaatatgctacaaagcaactaattaagtcaggtgttaggcttgtgcaaggaattgttaaggatgtgcagcccaacaaaataattcttgacaatggagaagaagttccttatggtttactggtatggtccaccggagttggtgcttcaccattcgttaagtcattgccatttcctaagtcacctggtggaaggatcggtgtcaatgagtggttacgcgtcccttctgttcatgatgtttatgccattggtgactgcagtggatttctcgagagcaccggcaaggaagttctccctgctttagctcaggttgctgaacgacaaggcaagtacctggcaagcctgctcaaccatgtcatgaaagctggaggagggcatgcaaactctgagactgaagcagatctgggtcgtccaccctttgtgtacaagcatctaggcagcatggcaactgttggaagatacaaagctctagtcgatctgaggcaaagcaaggagtcaagagggatatctcttgcaggatttgtgagctggttcatctggcgctcggcatatttaactcgtgttgttagctggaggaataggttctatgtggctatcaattggctgaccactctcttatttggccgggacataagcagaatctagagtgtctttgtatacgtacgaacaagcatataagtcgatgtagagttacacgccacggtcacttgcttgccacacacccctccgggggtccactcctaccactgtccctattagctgtgaatgtaattcacaggtgaattatgaataaatctgaggatactgcagttacttacatgtggtgtgaatgtataatactctgtcacttgtaccactgtccctaatagctgtgaatgtaattcacaggtaaatcatgaacaaatctgaggataacacagttgcttacaagtgctgtgaatgtataatactcttaaaaaagtctaaacaacttggaaccgaggtaaaaaaaaaaaaaaaaaagcggcc

SEQ ID NO: 2577 - DNA, 576 bp, Zea mays
  Clone ID: MRT4577_10234C.1
gtacacattgtgccgtccgacccaccacatccttcataggggccaggctggtccacccccgtggccgtcctcactctctcacgattccaggtcgcacacgaggctcagagctctgagctcatccgagaacgcgccccagtcttcgccgcccccgagcaccgacgggtaccggcgacggcggcgaggtgagcgagcacacgagagagatcgagcgagagaaagggaggggatccacccgccgccagcgatgaaaggggaggagagagagggcagagaagaggacgagaacaagaataaagtgagcagctgcctctgccttccgaaaataaaggacgggccagtgaaggagaagtcgtccagagatacccccacctggtcactccttcagaagcagaacgcctcccaagctccacgtcctcgctccaggggttcctccaagggaatggaccccagcgacgagcgctagaacagcgtcctccggaatttccagagcgaggtctatgccaacaagacggagctgatcgagcatctcaaggccggccagacccgcaggtacatggcagaatggcctgctcc

SEQ ID NO: 2578 - DNA, 516 bp, Zea mays
  Clone ID: MRT4577_102350C.1
ggatgctcgctgaatctcccataatatttagagcatgtgacaacactccatgcgatgcgcactagcatcgatctaacaacgatgggtaccaagatattagccctccttgcgctacttgcccttgaagtgagcgccacatatgccctcattattagccagtgctcacttgctcctagtgccattatagcacagatgctcccaccaggtacttgaatgggctacagacatcgagaggagccatgctataggctacaactaacgcttgctggcgagcgccttacaacaaccaattggccaattgctcaagcaatccttggcacatctaaccctacaaaccatcgcagcgcaacgacaacaacattttctgacatcactgaaccacctagtaggggtgaaccctggtggctactcagaacaggagttgcttgcatccaaagccacttgctctgaagaacgtaggctggattacccagcctctacaacagctgcaacaagttgatgccagcagctcagaga

SEQ ID NO: 2579 - DNA, 293 bp, Zea mays
  Clone ID: MRT4577_102351C.1
gctgccccgcctgcagccgccccgccggaaataaccgggggacgacgctgtcactcggcggccgcccccctctcttgtggggggattttttggaaaacagggtggggctgaacctaccccaaaaaaaaacaaacacatatgaaaagacaacatgggaaccccagccctcgaacacctaggtcactgacacatgcccggacatgaaccgagctgacagctcaaaaacttatgccgaccagccaacaacatgaagagaaacggcaaacacacaaaggcccaaaaccaacatggac

SEQ ID NO: 2580 - DNA, 1102 bp, Zea mays
  Clone ID: MRT4577_102352C.1
catcgatccaccgaggtttcttgtgcgtgccgccatggccatggcagtagctcaccttcttcctcagctctccgccgaaggcaatggagctagcaggaacagaatggccattctcttgattcttcagctttttctcttgacggttctttgttccataactgattcagcgctaggcgtggatggagcggcgtcgttcatcttcaccaacgcctgcaagcacgcggtgtgggtgggcgcgctccacggcgccagctcgccgccgctcgcgcggtcgggcttctacctggcgccgtccgccacgtccagcatggacgcgccgtcgtcggggacatggtccggcacgttgtgggcgcgcacgggctgcgtggccgaccccgccaccgggcgcttctcctgcgccacggccgactgcggcacgggcgacgtcgcgtgccagggccgcgggccggcgcctccggtctcgctcgtcgaggtcacgctcgccgcgccgggcagcggcaggccggacttctacgacgtcagcctcgtcgacggcttcaacgtgccggtgcgcgtggcgccctcgggcggcggcggcgactgccgccccgcggcttgcgcgggcgacgtaaacgccgtgtgccccggggacctccgcgtcgtcgcatcgtccggcggcggcgtcgtagcgtgcaagagcgcgtgcatcgcctacggcagcgcgcgctactgctgcaccgggcagtacggcacgccggcgatgtgcggcccgaccaactactcgcaggtgttcaagagcgcatgcccgtcggcctacagctacgcctacgacgacgccaccagcaccttcacctgctccggaccttccagctatagcgtcaccttctgccctgcgaactaatgaacgccctgatatcatatagtagctagggaattacgatattacatctagactaggtatttcttcaaaaaaaattatagagagatcaagtagaagcaatatgttgatgttgtcatccacgacacaacccccaaatgcatgaaattaatttatattattattccacacatatgctaatcccaattcccccatggaaactggaaaaaagggtggttcccctct

SEQ ID NO: 2581 - DNA, 2853 bp, Zea mays
  Clone ID: MRT4577_102353C.1
cacgaacaaggaccccccggcaaacagcaccgttcgacacgtcgttttccggccgatccaacggccggcttggccaccgcccacccggggacgggggaaacagtaaacgccagtgccatcagcatcgccatataccaaatggaaattcaaaatcggcccagtagtcctcttcctcctcctccccccctgcttcgattctgctcgccagctcaccgccagtgctctgcgctgcctgcccatcactcactcactcccccacccggcgcacactgccgctgcctgccaccaccctacataaacccccggcaccccctccgttgttgccacgccacttccctcccgcaccctgctccctcgcttcaaatcgattcggcgctaccgactaccgagcaccaaacgccaaggcggctgcttaccagagtcatgcggacccaaagaagcctccttcccctgctcctgctttccgccgccgcgctactcgccgacgcgcaggaccgcaagaactacgtggttcatctcgagccgagggacggcggcagcaccgcttccttggaggagtggcaccggtccttcttgccggaggcgacgctggactcggcggcggacgacgggccgaggatcatccactcgtacagccacgtgctgacgggcttcgctgcccgcctcaccgacgcggaggcggagacgctgcggcgcaaggaggggtgtctgcggctgtacccagaggagttcctgccgctggcgaccacccactcgccgggcttcctcggcctccacatgggcaaggacggcttctggagccgctccggcttcggccgcggcgtggtgattggcctcctcgacaccggcatcctgcccagccacccgtccttcggcgacgccgggctgccgccgccgcccaagaagtggaagggcgcctgccagttccggtcgatcgccggcggcgggtgcagcaacaaggtcatcggcgcgcgcgcgttcgggagcgcggccatcaacgacacggcgccgcccgtggacgacgcgggccacggcacgcacacggccagcacggcggcgggcaacttcgtgcagaacgccgacgtgcggggcaacgcgcacggcacggcgtccgggatggcgccgcacgcgcacctggccatctacaaggtgtgcacgcggagccggtgctccatcatggacatcgttgccggcctggacgccgccgtcaaggacggcgtcgacgtgctctccttctccatcagcgccacggacggcgcgcagttcaactacgacctcatcgccatcgccacgttcaaggccatggagcacgggatcttcgtcagcgccgcggcgggcaacgacggccccgccgcgggctccatcaccaacggcgcgccatggatgctcacggtcgcggcgggcaccatggaccgcgcgatacgcaccaccgcaacggcgacccggaggcccgcgactgcagcacgctggtggaggccgaggtgaggggcaaggtggtgctgtgcgagagccgcaccatcacggagcacgtcgagcaggggcagatggtgtccgcgtacggcggcgccggcatgatcctcatgaacaaggcggcggaggggttcaccaccttcgccgacgcgcacgtcctgccggcgtcgcacgtgagctacgccgcggggtccaagatcgcggcgtacatcaagtcgacgcccaggcccacggcgaccatcacgttccggggcacggtgatgggctcgtccccggcgccgtccgtggccttcttctcgtcgcgcgggccgaacaaggcgagcccgggcatcctgaagcccgacatcaccgggcccggaatgaacatcctggcggcgtgggcgcccagcgagatgcacccggagttcgcggacgacgtgagcctgcccttcttcatggagtccgggacgtccatgtcgacgccgcacctgagcggcatcgcggccatcatcaagagcctgcacccgagctggtcccccgcggcgatcaagtcggcgatcatgacgtcgtcgggcacggcggaccacgcgggcgtgccgatcaaggacgagcagtacaggcgggcgagcttctacagcatgggcgccggctacgtgaacccgtcccgcgccgtcgacccggggctggtgtacgacctcggcgccggcgagtacatcgcctacctctgcgggctgggcatcggggacgacggcgtgaaggagataactgggcgccgcgtcgcctgcgccaagctgaaggccatcaccgaggcggagctcaactacccgtcgctggtggtgaagctgctgtcccatccgatcaccgtccgtcgcaccgtgaccaacgtcgggaaggccaactcggtgtacaaggccgtggtggacatgcccagggccgtgtccgtggtggtgcggcccccggtgctgcggttcgccagggcgaacgagaagcagagcttcaccgtgacggtgcggtggaacgggccgccggccgtcgccggcgccgaggggaacctgaagtgggtgtcgagcgagcacgtcgtccggagcccgatcgtgataccgccggccaaggccgtcgcgtaggcgtagctcccaatccaatctctgcttgacggtcggcaggaccgttctctgctcgtgtcgtgtctccgaggatgaaggtcatcagtattcagtagctttaggtaatcgtgagtgtgcccggtgtacgtatggcgaaggaagtaggcaggcgactgttgtataggctggaggcagggtacccgatcatctgcgacgcagcaagctcagctgcaatggcaatggcgcccgttcgttccgtatgtaaaaaaatggcggaaataattaatcgcatcgcaacccc

SEQ ID NO: 2582 - DNA, 368 bp, Zea mays
  Clone ID: MRT4577_102354C.1
gcgaactaccaactcgatcagaaaaagaaacaggaccaagtgaggtggcactatcattgtcctgtcggtggcgactcctgttgcttggcggaaactatcgaccaccatgctgggcacgcgcaccgacaccgtcgaccactacgtgagacccgactcccagcacaagctgagaggacgagagcgagggaggcgacagcttcatcggaagccggacctacatgaacaacatgcggaggatggccgtgcgcatccaagatgcgcgccttgcagccccatacggatgaccaccatcttgaggaactgcaccacagagattgcgacacagaacgacctggatgagggggagaacgctttacatgataaaagct

SEQ ID NO: 2583 - DNA, 285 bp, Zea mays
  unsure (1)..(285): unsure at all n locations
  Clone ID: MRT4577_102355C.1
gaaaaagaagaccccaaaggaattccagaatatacgctcactgttttttcanatgttgacttgctcagtgatatggttcaggaacacaatgaacctattctgaagcacttgaaagatattaaagtgaagttctcagatgctggccagcctatgagttttgtcttagaatttcactttgaacccaatgaatattttacaaatgaagtgctgacaaagacatacaggatgaggtcagaaccagatgattctgatcccttttcttttgatggaccagaaattatgggt

SEQ ID NO: 2584 - DNA, 1562 bp, Zea mays
  Clone ID: MRT4577_102356C.1
cattgggtacctcgaggccggccgggaaccaaatcgaaattcaaaatcggcccagtcctcttcctccgcttcgattctgctcgccagctcaccgccagtgctctgcgctgcctgcccatcactcactcactccactccccccacccggcgcacactgccgctgcctgccaccaccctacataaacccccggcaccccctccgttgttgccacgccacttccctccccgcaccctgctccctcgcttcaaatcgattcggcgctaccgagcaccaaacgccaaggcggctgcttaccagagtcatgcggacccaaagaagcctccttcccctgctcctgctttccgccgccgcgctgctcgccgacgcgcaggaccgcaagaactacgtggttcatctcgagccgagggacggcggcagcaccgcttcgttggaggagtggcaccggtccttcttgccggaggcgacgctggactcggcggcggacgacgggccgaggatcatccactcgtacagccacgtgctgacgggcttcgctgcccgcctcaccgacgcggaggcggagacgctgcggcgcaaggaggggtgtctgcggctgtacccagaggagttcctgccgctggcgaccacccactcgccgggcttcctcggcctccacatgggcaaggacggcttctggagccgctccggcttcggccgcggcgtggtgattgggctcctcgacaccggcatcctgcccagccacccgtccttcggcgacgccgggctgccgccgccgcccaagaagtggaagggcgcctgccagttccggtcgatcgccggcggcgggtgcagcaacaaggtcatcggcgcgcgcgcgttcgggagcgcggccatcaacgactcggcgccgcccgtggacgacgcgggccacggcacgcacacggccagcacggcggcgggcaacttcgtgcagaacgccgacgtgcggggcaacgcgcacggcacggcgtccgggatggcgccgcacgcgcacctggccatctacaaggtgtgcacgcggagccggtgctccatcatggacatcgttgccggcctggacgccgccgtcaaggacggcgtcgacgtgctctccttctcctctccgtggccttcttctcgtcgcgcgggccgcgagcgatgaggacagggccggaatgaacatcctggggggggggcgcccagcgagatgcacccggagttcgcggacgacgtgagcctgcccttcttcatggagtccgggacgtccatgtcgacgccgcacctgagcggcatcgcggccatcatcaagagcctgcacccgagctggtcccccgcggcgatcgggggggggatcatgacgtcgtcgggcacgggggaccacgcgggcgtgccgatcaaggacgagcagtacaggcgggcgagcttctacagcatgggcgccgggtacgtgaacccgtcccgcgccgtcgacccggggctggtgtacgacctcggggccggggaggacatcgcctacctctgggggctgggcatcggggacgacggggtaaggggataactgggc

SEQ ID NO: 2585 - DNA, 372 bp, Zea mays
  Clone ID: MRT4577_102357C.1
gacaaataattcggtcatacatagttataaacaaagtactaacaaagagggaaaggactgccagttgcagcagagacttggtatgactactaatgaaccaacgaaacaggacgaggcctaagcggctacaaaattgcccaaaacatggcataaagaaaaatgagatatcgcccgtgaccacgactttaacatagaaacccaatcgaccgtatcactgataccccacaatattttggcaaaaccaagccttaccagatcacccacagcaagatccttatagtactgagattcttcaaaatgatcacagaaagctatcgacagttgcaggcagctgctaaatcaacaccttgtataacttgtggatggagaaca

SEQ ID NO: 2586 - DNA, 190 bp, Zea mays
  Clone ID: MRT4577_102358C.1
ttatattttttttttgttttattcaattggggcaggttctattgtttatagcaagggcgacatctcacggttaccaaaatccatgcgacaaacgtacgtttataaacaagagaaagaagaagtcaaatacgtgaaacccacccacgcaagcagcatgcagtcaacgcaggcttaaatgaccgcggtgcag

SEQ ID NO: 2587 - DNA, 303 bp, Zea mays
  Clone ID: MRT4577_102359C.1
gattgctcgatagagaggttactgctcgggctcctccaactgacaaaacacacgacgaaaggaaccgggaacccggagccgaccaaagacgaaatagaaaccgccagccagcccgagcagcaacggtgaccgaatcagggagagctacaaacccacaccggaggggggtacacacagaaccgagaaaccgcggcagacgaacaacaaaaagagccgggcgggcgaaccaaaacgaaggggggggcaccaaacagaccgaaaagaacagcatctgaaaagcaagggggaaaacccccccaaagc

SEQ ID NO: 2588 - DNA, 347 bp, Zea mays
  Clone ID: MRT4577_10235C.1
aaaaaaaacttttttagaccttaaaaaattggggggggaaacttaaaacacaaagaaacgtttgtttcggggccaaaacttaaaagtcccaaaccccagacaaaaccgttttctcccaaccccaaaactggaagcttaaaaaccccttttgggggggttggccccccccctgaaaaaaaacccgcccccaaaaaaggtttttagctccgggcccccctcaatggccttgatcaaaacaaaatccacaacctttggggcatcctttttaaaaacaagcaaggacttggaaccccccttttttggcaaaaaaagctcgccccggggctttttaaccctttggttttttc

SEQ ID NO: 2589 - DNA, 204 bp, Zea mays
  Clone ID: MRT4577_102360C.1
acgcgggcgacacgactctcgggaacgggtatgtcgggtgtcgcatcgatgaagaacggagcggaatgcgatacgtggtgtgaattgcagagtgccgcgaaccatggagttgtggaacttaatatgcgtgggcttttgagctgttagattgggggtgtattggtgatgtttgaggaccagaggagtaagctgtggacggggggg

SEQ ID NO: 2590 - DNA, 666 bp, Zea mays
  Clone ID: MRT4577_102361C.1
gggtaccggcgcccttccctcggttttttttttttttttttttttttttttttttttttttttttttttttttttttttttttttttttttttttttttttttttttttaaaaaaaaaaaaatggggccccttccgaatttccaaccctttacattaaggggggtaccaaacaaaaacggcccctccaaggaacccagggccccaaaaaaaaagaaaaaaagcggcccggggacccaattttttcccaaagggaagctttttttaaaccccggggaaacaaatttggaaaacttttttttcccaggggccccgacccatcccgccctcaaaattcaaagggctttaagggggggcctggggaaccttttccctttgggccataaaaccccaaagtggggggggggtttggggccccccccgggcagggggggggtgcccaaccccccttttttggggcccattttgcccaaaagggtgggggccttgcacccgccccccttgaacccccccccccccggggggcggggttcaagaaaaccttttttaaaccccaagaggggtttccccggggggttggccccccccggggggaaaaaaaaaaaaaacacggggggcccccggaactttttgcccgggttcccccccggggggggcccgtaaaaccc

SEQ ID NO: 2591 - DNA, 127 bp, Zea mays
  Clone ID: MRT4577_102362C.1
atacaatagtctgctctgtgaataaactctaatagactctacagtgcatgggctagctgcaaggtgggatcattctcagacgtggaccggacgatactgttgtaagatgacgacaacctagttaatg

SEQ ID NO: 2592 - DNA, 370 bp, Zea mays
  unsure (1)..(370): unsure at all n locations
  Clone ID: MRT4577_102363C.1
ttctttttttttttttttttttttctgtgttgtttttgggggccnggttcgcgcttgtaaccccagcccggaacctgggggcggaccctgtttgcctatcaggagtccctttagagggtggggttaaaatggggatagctgattgctgtgggaaattgctgtgcggaaacaatttcccacaacatttgcgcccgaaatataaagcggtaagcctggggggccaaacgggggggcctactgagagtaattgcgttgagttaactggccggtttccaggggggaaatccgggggggcaacctgatttatgaattggcctaaacactgggagaagccgcttggggatggggcccccgggttggtcttcttttt

SEQ ID NO: 2593 - DNA, 1171 bp, Zea mays
  Clone ID: MRT4577_102364C.1
gcacgaggaacacagcgcccgcccggacgcaaggggcacgagggagaagcgaggaacggcggcggcggcatcatggcggcgcggaacatccttcgcggtgcggcatgcggccaccgcttcctcgtgcccgtcccctcaggcgctcttgctggttctggaagccggagcatcggcgccgtcgctcagggccttcgtcattacgcagcagacgaagcagtgggaaacttggaactgcatgcacccaaggcaaaacgtcggtcatatatcccaacgaaaaatggaacagccatgatgcttccgctccatattcattacgaagatgtactacgtcaggatctgttgctcaaacagaatcatgccaatatcatgcaagttccagggttgtttgaggtcaaattagcaccaaaagccggctctgatctcaagatcccaattgggaaaatggccatggaggttttgagtggtcagagattcaaagaggcaaaaattgaccctttcgccaaagcaagaaagtcttctcgaaccaatccatttattggggctgacaaggacggtagcactgcctttgcgcaaccaaccgttcttcgagggcatgcaatgtacaactttttggtgaggatgctgacagtgatgtccatgttaaattctcgggccgacattcgggagaacactgtgaagttcttcatggaaacggagttctgtgagttctctccagaattggaagaccatttcgagatatttgagcacatccgaggtttcaatgtgactatcgttacttcagccaatacaaaagatgagacctcactactgtggagtggcttcatgcttaatgacgagggagagaccaagtaaggtagaactgttgatctttgtttctgcttaatctccctgatattgtagttgctgcccaactgaaccttcagttggctgttgatgtcaaaaatgattttggaaatttggtgcttcgtgctctaggagtgcgcaatgtcgcagccttctgttttgtagactgaatgagatgacgtgattgtttttcatcttgacgcgtggagctcatgtttgataactacgtctagtaccatgtatgaacataataatcttggtctaataagcattgttttgcttaatcctgtggttcctgctatagtaacatggaatgctcgtttctgtt

SEQ ID NO: 2594 - DNA, 310 bp, Zea mays
  Clone ID: MRT4577_102365C.1
atgaaggtaaacctgaaattttttggttagggggcagcatgttcaaaatattcttcgaatcgaacatttcatgcccccccggacaatcgaatttttaggataagcacccccccccgggttggctaaagagaccccacccccctttaccagggaccccgggtgaaaaaatatcccggggaaagccaaagaatgctggcatgagaaaattgggtgggaattgcagcaccccgattggagactcattcaactcccccatggtcctcctttacagcatttcctgagacccggggacccattggctaaccttttt

SEQ ID NO: 2595 - DNA, 1152 bp, Zea mays
  Clone ID: MRT4577_102366C.1
aggccggccggggcgccatttcgcaccccagtccgctccgcccgtgtaaaactccaaccgcgcatcgtcgtcgtcgtcggctgcggcggcggccgggcaacgagcctctcttacaaggagagtttcatcgtgcgctgctacgaggtgggtatcaacaagacggccaccgtcgagaccatcgccaatctcctccaggaggtaggatgtaaccatgcacaaagtgttgggttctctactgatggcttcgccacaactactacaatgagaaaacttggacttatttgggtgacgaaccgaatgcacattgagatctacaagtacccagcttggggtgatgttgttgagatcgaaacatggtgccaagaagatggaaaaattggtactcgtcgtgattggatcctcaaggacctgtgtactggtgaagttactggcagagctaccagcaagtgggtcatgatgaaccaaaatacacggagacttcaacgagtcagtgatgacgtgagggatgaggtgtttatacattgtccaaagactccaagattagcatttccagaggaaaataatggcagtttgaagaagattccgaatctttcagatcctgcacaatattcaagactaggactagtgccaagaagagctgatctggacatgaaccaacatgtcaataatgttacttacattggttgggtccttgaaagtatacctcaagatataattgatacacacgagttacaaacaatcactctcgactatagaagagaatgtcaacccgatgtcctagttgattctcttacttacgtagaggaaggagaggagagaagcatgaacggctctgcttcctcagtgccgcacacagaacagcggcggcagttcttgcattgcttgagatttgcagccaatggggatgagatcaaccgtggccgtaccgcgtggaggaagctagctagataaaaagtagtttttggtcatcaatattctgctccattttgcttctcgcggttggcggcccttgtaccacaattctgccatgcgtcgatggcgatttctgtcatttcttgcagttgtaaccgtctgtccgttttgtaccagtggacagtgtctgtgcgacatgcaataacctgcgtttaaaccctacgccaacacaggcaagtc

SEQ ID NO: 2596 - DNA, 1308 bp, Zea mays
  Clone ID: MRT4577_102367C.1
cggcgactggcccacgagccttctcgaaccgacgcatccgccacccatgctgcgctgccacacgccaccgcaatgcgcccgcgcgccgctccgccaccacggaaggtgggagtcgcctccggcggcggcgcccgcggtggtagtgcggtgcgcgcggggtgcgccgcaggtgtccgggatcgaggcggcttcgccgggccacgcggctgtcacagcggctgcggttggggaacctcctggaggacgggctatcgtacaaggagagtttcatcgtgcgctgctacgaggtggggatcaacaagacggccaccgttgagaccatcgccaatctcctccaggaggtaggatgtaaccatgcacaaagtgttgggttctccactgatggcttcgccacgaccactacaatgagaaaacttggactaatttgggtgacgaaccgaatgcacattgagatctacaagtacccagcttggggtgatgttgttgagatcgaaacatggtgccaagaagatggaagaattggtacccgtcgcgattggatcctcaaggacctagctaatggtgaagttattggcagagctaccagcaagtgggtcatgatgaaccaaaatacacggagacttcagcgggtcagtgatgacgtgagggatgaggtgtttatgcactgtccaaaggctccaagattagcattcccagaggaaaataatggcagtttgaagaagattccgaatctttcagaccctgcagaatattcaagacttggactagtgccaagaagagctgacctggacatgaaccaacatgtcaataatgttacttacataggttgggtcctcgaaagtatacctcaagatataattgatacacacgagttacaaacaatcactctcgactacagaagggagtgtcaacaggatgatatagttgattctcttacttgcatagaggaaggagaggagaaaagcatgaacggctctgcttctgcagcagcgcctcacaaagaagagcggcagcagttcctgcattgcttgagatttgcagccaacgggcacgagatcaaccgtggccgtaccgtgtggaggaagctagctagataaaagtgttgtttcgtcataaatgatctcctccatttctctgctcacggctggcggcccttgtaccacaattttgtgatgtattgttgccctttggaatgtactcagccatgtatcggtgccgatttgtgacatttcttggagctgtagctgtctgtccgttttgtaccagtggacaatgtttgtgacatgcaataaactgcgtttctccggc

SEQ ID NO: 2597 - DNA, 1709 bp, Zea mays
  Clone ID: MRT4577_102368C.1
ggcagtttgaaacactcgcaccgcacaccggatcccgcacgcgaaatccagtcgggacgacgacaacgacgagctgatctggatgtggaccaacatgtcaataatgacagggtccagggttggccttttgccttccttcctcaagatataattgatacacacgagttaccctcaatcatatcgccctatagaagagaatgtcaacacgatgacatacttgattctcttacttacgtagctgaaggagggccgagagcccgccgcgccaaccccaccccgctccgcccgtgtaaaccaaaccccgcttcggcggcggcggcgactggcccacgagccttctcgaaccgacgcatccgccacccatgctgcgctgccacacgccaccgcaatgcgcccgcgcgccgctccgccaccacggaaggtgggagtcgcctccggcggcggcgcccgcggtggtagtgcggtgcgcgcggggtgcgccgcaggtgtccgggatcgaggcggcttcgccgggccacgcggctgtcacggcggcgttagctaaggcggaagggggtgacgcgcggcccagcctggccgagcggctgcggttggggaacctcctggaggacgggctatcgtacaaggagagtttcatcgtgcgctgctacgaggtggggatcaacaagacggccaccgttgagaccatcgccaatctcctccaggaggtaggatgtaaccatgcacaaagtgttgggttctccactgatggcttcgccacgaccactacaatgagaaaacttggacttatttgggtgacgaacagaatgcacattgagatctacaagtacccagcttggggtgatgttgttgagatcgaaacatggtgccaagaagatggaagaattggtacccgtcgtgattggatcctcaaggacctagctaatggtgaagttattggcagagctaccagcaagtgggtcatgatgaaccaaaatacacggagacttcagcgggtcagtgatgacgtgagggatgaggtgtttatgcactgtccaaaggctccaagattagcattcccagaggaaaataatggcagtttgaagaagattccgaatctttcagaccctgcagaatattcaagacttggactagtgccaagaagagctgacctggacatgaaccaacatgtcaataatgttacttacataggttgggtcctcgaaagtatacctcaagatataattgatacacacgagttacaaacaatcactctcgactacagaagggagtgtcaacaggatgatatagttgattctcttacttgcatagaggaaggagaggagaaaagcatgaacggctctgcttctgcagcagcgcctcacaaagaagagcggcagcagttcctgcattgcttgagatttgcagccaacggacacgagatcaaccgtggccgtaccgtgtggaggaagctagctagataaaagtgttctttcgtcataaatgatctcctccatttctctgctcacggctggcggcccttgtaccacaattttgtgatgtattgttgccctttggaatgtactcagccatgtatcggtgccgatttgtgacatttcttggagctgtagctgtctgtccgttttgtaccagtggacaatgtttgtgacatgcaataaactgcgtttctccggcaactctaaaaaaaaaaaaagcccctaaaaaaaaaa

SEQ ID NO: 2598 - DNA, 751 bp, Zea mays
  Clone ID: MRT4577_102369C.1
tgaattcggcacgaggcgcccgtgtaaaactccaaccgcgcatcgtcgtcgtcgtcggctgcggcggcggccgggcaacgagcctcctcgaaacgacgcgcccgctctcccacatgctgcgctgtcacgcgccaccgcaatgcggccgcgcgccgctccgccaccacggaaggtgggagtcgtctcccgcacccggggtggtggtgcggtgcacgcggggtgcgccgcaggtatccgggatcgaggcggcgtcgccggaccacgcagctgccacggcggtggcggctaaggcggaagggggtgacgcgcggcccagcctggccgagcggctgcgactggggagcctcctggaggacgggctctcttacaaggagagtttcatcgtgcgctgctacgaggtgggtatcaacaagacggccaccgtcgagaccatcgccaatctcctccaggaggtaggatgtaaccatgcacaaagtgttgggttctctactgatggcttcgccacaactactacaatgagaaaacttggacttatttgggtgacgaaccgaatgcacattgagatctacaagtacccagcttggggtgatgttgttgagatcgaaacatggtgccaagaagatggaaaaattggtactcgtcgtgattggatcctcaaggacctgtgtactggtgaaggtactggcagagctaccagcaagtgggtcatgatgaaccaaaatacacggagacttcaacgagtcagtgatga

SEQ ID NO: 2599 - DNA, 813 bp, Zea mays
  Clone ID: MRT4577_10236C.1
atgggtagaagcttcggattcccaacattagaagatgggctttcagtactgtcgaaggatgaattggtcgacagtttggcatataatagtataaagggcttgattcttagcaatgccctcagggcacagaaaaatatcgaagatgaagggtgcacaatggctctgaacaaccttcgctcagaggtgattgaactgaggaacgaaggccttgaaaaggataaaatattaatttcattggtaaacaagataaaagaagacgaagccagttccaaagttcaagctgaggcccaaaagaatgaaattgaagaccttcggaaacaattagctgaggccaaattaaaatgcgctgttgccgaggcttatcgagatgccactgagtactggaaaaattattttgaaaaaacaattgcagagcttcgcgcatcaaaagaaagatgttttgaaaaatctgtggaatgcgtagaaaagataaagactagcttcgccaatgtaggcgcctactcaaacgaagacaacttcatacggggcgaccctgagggcgtcatcgagtggatcagtagtgaagccaaagcttttgaggagattttgagtgaccgcggggacgtctgtgcattctctggtgctaggggagttgcagccgttttggagaaggcagctgaactatctcctcccccagagccattcgacccactggccgacccagagacaaagaaagcaatagaaattattaatatggccgaagctattgtagatgaagttgttaccaaactgctaaccgaagctgcagaaaaagttctgaaggaagaagagtag

SEQ ID NO: 2600 - DNA, 399 bp, Zea mays
  Clone ID: MRT4577_102370C.1
ggaaaaaagaaaaatcgttttttttttttggggctgcaagcaacagcttttttggggcaatttacaaaaataagtggagggaattacaatccaaaacgacctttttggagccacccaaaccccaacggggggagctttttagggagggacgggcccatcccgcacgttacccccattatgcccgggatgaaccccccactgagctgccccgcccgggaacaaaaaaaccgactggcccccgcccgttcccgaaccccccaccccccaattaacccccctatcaaagaattggtgggcctcaccccgggaaacccaccccctggaggggaggggcaagggccccccggggggggtagggccccctttgcccggggggggggaccccccgggcgggctccg

SEQ ID NO: 2601 - DNA, 166 bp, Zea mays
  unsure (1)..(166): unsure at all n locations
  Clone ID: MRT4577_102371C.1
ccgactcgagccagccgaagcgcgatccgcgagctgagcaaggcggaagcggcggaaccgacgttgcagcagatgcagcggatctctggcgcctccggcatgncgcagccgtcgacggactcgccagtgctcgactcttcctagcacgtctacatctcctctctcg

SEQ ID NO: 2602 - DNA, 543 bp, Zea mays
  Clone ID: MRT4577_102372C.1
gacatgaaccaacatgtcaataatgttacttacattggttgggtccttgaaagtatacctcaagatataattgatacacacgagttacaaacaatcactctcgactatagaagagaatgtcaacatgatgacatagttgattctcttacttacgtagaggaaggagaggagagaagcatgaacggctctgcttcctcagtgccgcacacagaacagcggcggcagttcttgcattgcttgagatttgcagccaatggggatgagatcaaccgtggccgtaccgtgtggaggaagctagctagataaaaagtggtttttggtcatcaatattctgctccattttgcttctcgcggttggcggcccttgtaccacaattttgtgatttggggtgcattctgccatgcatcgatggcgatttctgacatttcttgcagttgtaaccgtctgtccgttttgtaccggtggacagtgtctgtgcgatatgtaataacctgcgtttatccggcagctcccaactttgcgtcgacatgagatgcgaacct

SEQ ID NO: 2603 - DNA, 489 bp, Zea mays
  Clone ID: MRT4577_102373C.1
aaaaaaagagagaaacaaatcatgaggacaatggttgatttaggaaagcaaagagatcatagctatgaccacatgcaaatcataaccactcctacctccgtggattgttctcgcgaattccgtcaccgacgaacacttcgttcactcatcgaatgcatgattccatactgttgcacttaccaacaacaaccataccaaaacgacaccctttcagtctcttccacttcatcctcgtcttcatcctcagaccactcttcctcctcccagagtagcagtaccgtaagtggaactttcttcggacaccgtcgtggccgagtcagcttctgccttcaagacgccgccgtgggatcttcaccgctgctcctcctcgagctagctgttcctacggcagctttagccaaagaaatggacgaggaaggtgttctacgcatagccctcgagtgtgaccgtcgtagaagcagcaatagtccgtcgtcttcgatctttgat

SEQ ID NO: 2604 - DNA, 422 bp, Zea mays
  Clone ID: MRT4577_102374C.1
cctgcgggccccggcccggaatataatccccggggcgacgcgcactcaagtcggggggcgcccttttttttttttttttttttgggaaattaatccgctttatccacccaacacacagaccatctttgtaacaagggtaacccatgacggaccccccgtctccctatcttgaacccaccactgttgtcatacatctctaacatggccaacgagtcaacgatctgtacaatgcaaaggcatacacagtatgtggcatgtaaaaaaaatgaaaaccggacaccggactttaaggtccttggctttgctctccagacacatgcaggtatcaatactaaatacaatatggccaaaatctgcggccagtagaccgagatccaccttgtgaagatcctcacacaaacaattgagctgggcccaagaag

SEQ ID NO: 2605 - DNA, 306 bp, Zea mays
  unsure (1)..(306): unsure at all n locations
  Clone ID: MRT4577_102375C.1
ggccgcgnaacggcgcgctttttgttccctccttgccttgtctcatttgttcctggtccctttttttcctctcacaccggtcggctgggcttgcctccttttttcttttggtggtgggtggcgtggcgtctcccaccttcgccgcggggctgtgcttccgtttccctctcaccccccgggggtccgtccgttggcggggtgctctttttggcttatcgcttcgctcttttttctggcgccgtttggtggggctccggttcttcgttgtttcttcttctagttgggtttacggggggtggggtggtg

SEQ ID NO: 2606 - DNA, 421 bp, Zea mays
  unsure (1)..(421): unsure at all n locations
  Clone ID: MRT4577_102376C.1
cattgggaccctcgaggccggccgggctttccttcatctcctctgcgtgggcgcggtgatgccaacgatgcatatcctctagcattcctcctctctcctgtcctgacattctctgatcccggccggttgtctcctcctcctccctccctcgtttccatcctctgtctcttgcgccgcctacacatctccagagtcgagacgnaaatcttccagtccgccgcaatcgcgactgacggcgacggacgaaggaatgctatgattgcgaacgacggaggtgagtgttgatatccggcaccctgtgctgagtacaggaatctagcgaagactgccaaacactgttggtggctcgaacgagacgagggatctattcctcgcgcgttacaaggcacacgtctcgtccgcagatcgcattgcaactctg

SEQ ID NO: 2607 - DNA, 293 bp, Zea mays
  unsure (1)..(293): unsure at all n locations
  Clone ID: MRT4577_102377C.1
gggggtgtgggggggttttttttttaattttttttgtgtttttttttttacatgaacaatcatcattaatataccatgttcgcaatcacgtcccaaacctcacaaccccttctcgagggggtttctttacctacagtacaatacaaaacagggggtaccgctagggggtattttctcccaantnacccaaccnctactcagggaaaaaaacctaactgactgataaaagagcaaatggtcttccctctttgcctgtcaccctcgcgtcctgctgtccccaccggctctcactt

SEQ ID NO: 2608 - DNA, 449 bp, Zea mays
  unsure (1)..(449): unsure at all n locations
  Clone ID: MRT4577_102378C.1
tttccgtgacccattcggttgccactctgttaagcggggggtggtcattgtgtcatccgttctcttctttagaactctaatttcacctataaatgccttaggaaccggtgttgctctcgctggagtgttcctgtactcgcagttcaaaaagtcaaaaccaaaggctacggctgcatgaagacaactccctgatgagcttcttttgatgtgaaaagcttgtacgtaagtttcctcgacaaggtgtggtggaacacgtgaacaacgcagatatagcattcttagatttcaagagaatacaaattttggaatatacttccatgtcattgaaactgacagaatgctctcactattatatatattctttacgttaaaaaaaaaaaaaaaaaaaaaaaaaaaaaaaaaaaaaaaaaaaaaaaaaaaaaaaaanaaaaaaaaaaaaanaaaaaggg

SEQ ID NO: 2609 - DNA, 1539 bp, Zea mays
  Clone ID: MRT4577_102379C.1
ccacgcgtccggtcgaagcaccctagtcgtcgtagcggcctacgggctcttgggcagagagagaagctgcatagcctgcatatgctccagctgctgcgcgcaatgatggcactgacggagcggcagccgcagctggagaagaagccgacgcgcgggagggcgccgctgtccgggaaggccgtcgcggcgctgtgcgtgacgagcttcgttgtggggctgctgcttagcggcaacgtgtcgctcatgtcggcctcggcgtcaccgtcgtcctcgagcacggacagcgagaagagcattcgtgtttccggttgcgacaatgagcgtaaactcggagagaaccaccccaaggatctcctgaacgaggtgtcgagaactcatcaagcaatccagtcgctggacaaggcggtgtccaccctggagatggagatggccgtggaacgcgctaggggcggtggcggcggcggcggcgccgcgtccatggcgtccagcaggactcctcagaaggccttcgtcgtggtcggcatcaacacggccttcaccagcaagaagcggcgcgactcgctccgcgacacctgggtccccagaggggataagctgaggaagctggagcgggagaaggggatcgtggtccggttcgtgatcgggcacagcggcacgccgggcggcggcgcgctggaccgcgccctggacgcggaggaggccgagaccagggacttcatgcggctggaccacgccgagggctaccacgagctgtcgtccaagaccaggacctacttcaccaccgccgtcgccacctgggacgccgacttctacgtcaaggtcgacgacgacatccacctcaacctcgggatgctggcgagcaggctggcgaaacacaggacgcgcccgagggtgtacgtcggctgcatgaagtccgggcctgtcctgtcacagaaaggagtcaagtaccacgagccagagtactggaagttcggcgacgagggcaacaagtacttccgccacgccaccggccaaatctacgccatctccaaggacctcgccgcctacatctccatcaaccagccgatcctgcacaggttcgcgaacgaggacgtctcgctgggggcgtggctgatcgggctcgaggtcgagcacgtcgacgaccggagcatgtgctgcgcgacgcctccagactgcgagtggaagaagcgagccgggaacgtgtgcgtggcgtccttcgactggtcgtgcagcggcgtctgtaagtcggtggaccggatgcgccacatccacaaggcgtgcggcgaaggcgaaggcgccgtctggaacgccgccacatgagatgagattgccattctcgtcgtcgtcggaacacttgttgtatgcggagcttcacttgatgaaaacgcgaagccgagagggaagcgcttgagcattccgcatggcaagcgtggttgtttcacttgagacggcatgctgtgatccacgtaaaagcgcatggattattattggtgtgtcaacgtgatcctttttggatcgaaaagaaatattgaacggtgg

SEQ ID NO: 2610 - DNA, 526 bp, Zea mays
  unsure (1)..(526): unsure at all n locations
  Clone ID: MRT4577_10237C.1
ccggccggaagctcatctcatcaacttcagcggtcatagagacagccttcctcatcatgacacttcgaaacgctttgttcaaggccttactggcttcagtcaccgtctctcatggtctggcccttcctgctccccagatgggaaactatggagagaacaaaggcccagtaggaggagttgatcccccgactccgactgtcacctcaacgagcggttctctgtatggcgactccagcctgctgggcggcaatgctcctccacctgacccagacaagtcagactccgccgtggtcaaagatccaaagctcgtcaaaggccagaaggcagatgccaagcttggagtatacctagactttgacgacgttgacgtcccccagccaatgcgtgggggactaggtgccactgatcctggtcctcggacatatgagtacgagaagctcaaccccgatctatatgcgcctccgggcacagatactggagatggcccgaacgctatgtgaccgctgggnctttcccacaaccgtct

SEQ ID NO: 2611 - DNA, 3220 bp, Zea mays
  Clone ID: MRT4577_102380C.1
ttagacaagtatattagtacacaaaaccaatgtactaagacttagagacatacctttgctcttgttttgcactttgtccatccataagcatgaattcacatttaagcacttgtgttggcactcaatcaccaaaatacttagaaatggcccaagggcacatttccctttcaatgcttcgggggcagcagtgtcagtttcttcaaccaaagttggctctgccatttttgtttcttcggcttccaagggttttaccttggtgggctctgaaggcccagcttcagtttcagattgttgctttgaagcttcggcaacaaaggcttcggtatgcacttcagaagtttcaacagttttcttcggagttgtgcttgaagacttaattgtctccaaaacatccagcacattaaccatcctttttcttttcggggtcactgctggacccttttggctttttaccgcctcaatttttgctgaaggacttaaaacttctgatgtttttgtttcttcagtcctcggttcttctatcttttctgttgctggcacttcggccagctcttcgatttttggcagcggagttggttctttagcttcggtggccgaagaggtctcaccgacaaactcaggcactatggccggttcaatataacgtggccggtgtgtgagaacctttacccttttcctcttcggcgccggctcgctaggagcggctgaagcagtttccttcgcagaagatgtattctttcttttttgacaccgcgctggataacggtagtcggggtagacaaacccaattgcatcaaaaactctgtttagtctcttctttttccggttcccgaaggccgcagataatgcagtatcttcggccttcgtcagtttctttaatggtctccttcggcatttcccacttttccacaagtggccatactctgaacgcaatatgttcttggaccaaatcccttgtcccaataaaagagcaaaccacgccgaatgctctctggcattcttcggctgctttattcatttccaccttcggcctccggaggccgaagcgctgccagatggggcgcataatgatacctttaatatcttcccgtgatttcaagtcattcttcacataaaaccattctgtcatccagtcgtcgggccacctctttcgaaaggttggcacgggacagcttgacccggaccgagcgccgaagctgtagcagccaaaattgttgtgatactgctctttaccccagggttttgtctcatacaatagctcatgtatgttgcagaaactttttgcatttggttctaaaccttggctccttacggcccagacgaagatgcccattcttatgattgattcaggagtaagttgatgaaggtagacttcaaatgtcttcaaaacttcaattaaaaatctgttcagtgggaaccgaagacctgctttcatgaagctcctgtacacaaccactatatcagcttcaggcacaggggcactactatctcctctagccctcacgatagaaatatcgcagaagtatcttcctttcattacatcaatctgactcttgtcattgtctttcgttttatcagggaaatccatgcatgtatttatgagggcttggtaaaagttactctcttgatgcatgacgtcgatgttgtgcatcaaaatcaatgacttagcataaggaagctcccgcaagccacatatgtgagtccagttatgctcctcaccaaaaccttgatactttttcccactctcgtctaggataagtttcctatgttcttctgtaatttctatcccactacgtcgcttgggcagtcccttcgtgatgatggtgcccttcctaaactcctttctctgccttctaaaggggtgattgaagggtagaaaacatctatggcaatcaaagtaacatatctttccaccagcactaagacaaaaacaatatgtatctttagcacaataaggacacgtcaatctaccatgcacgctccatccagagaaaataccatacgccataaaatcatgaactgagaacagatacacaacacaaagattgaatttctgcttcttgaagcagtcataggcttccactccttgccatagcttctttaactcttcaatcagtggttgaagcatcacattgaggcatacgccaggatgctcaggcctaggtataacaagacataggaacataaactcatatttcatgcaaagagcaggtggaaggttgtacggtatggcaatgacaggccaacatgaatacgacgcagcggtcatattgaaaggcgtgaaaccatcagttgccacgccgatacgaacgtttcttgcatcgctggcaaactctggatcaaagttgtcaagagccttccatgcatcaccacctgatgggtgcaccattaacccatcttgtctgtccgtacaatctttatgccacctcatgtgcatagcggtcttccttgagagaaacaaatgtttcactctaggagtgagaggcatgtaccgaagctgtttatgtggaacctttgtcaccaccttctccccttcttcatttacaagctccacgtacctcgacttcccacattttaagcatttctgctctctgtcatgttcatcaatcttctcatactccataccaagaccttcaagcaatttcttggactggtacatgtctttgggcatcttgtgccccgtaggaagaacctcgctaatcaaatccacaagctccttataacaattaattgagaatgcaaacttggacttaattgacatcagctgggtcacgaattcgaggacggtcacgtcagtgtgcccgtgaagaggctcttgtgacgctttgaggaggtcgaagaacttctgaacctccggtgttagtgaatcatgatgatctggggccagttcaggctgcagatcctcatgcatctggtccatcttatccacatcttcaccgtcatcaacttctacttctgctgctcgttcaaggcgtgactccccgtggagataccagaccttatagcctggcacaaaaccatgcgagcacaggtgtagtgtgacctgcctcttggtgtggctcgtcatatttctacatttattgcatggacacctaatattatctatttgtgacaaagcagctgcatggtccagaaacatctgcgtcttggcaaaccattcacttgtgtgacacccacccttcttgaaaccttcatacatcaaatcacatctatcactcat

SEQ ID NO: 2612 - DNA, 808 bp, Zea mays
  Clone ID: MRT4577_102381C.1
gcgacacagcctaacctataccatcttaagcaattgatcaattgtcagcgaagggacacgctatatgacgcaatccaagcactggatattgtcttgagtcaccttctctcaattatgtaactcttttttggtccttctccaagaagttttggtgatgaggacattgcggtgggctagagtgctggagaggatattacccgagcttccgtccaactcaaatgggcctctcattgaacattggtttcgtacagtttattggctagagtatctcccgtgacccattcggttgccaactctcttaaacgtgtggtggtcattgtgtcatccgttctcttctttagaactctaatttcacctataaatgccttaggaaccggtgttgctctcgctggagtgttcctgtactcgcagttcaaaaagtcaaaaccaaaggctacggctgcatgaagacaactccctgatgaggtaacagactatagaatgatggagaatttggaactatcagtcgacgtggtgaagcagactggccttcacggtagcaaacacatgtagtttccccatgttgcgtcttaaaataaatgtgttctcttgtcagcttcttttgatgtgaaaagcttgtacgtaagtttcctcgacaaggtgtggtggaacacgtgaacaacgcagatatagcattattagatttcaagagaatacaaattttggaatatacttcaatgtcattgaaactgacagaatgctctcacttacatatattctttacgtctaaaaaaaaaaaaaaaatagcgttcaatgttttcttactaag

SEQ ID NO: 2613 - DNA, 192 bp, Zea mays
  Clone ID: MRT4577_102382C.1
actctgtccttcggctcttcctgttttaccctggccggttatcctgccttttgggctgtttcctctcacccgctcgttgacgcgcctcgtggtgccgctgggcccggccggtcggggctctcccctcccggcgtccttttccagagacttgggcccggtccgtgctgcgaccttctccgactacgttcgggc

SEQ ID NO: 2614 - DNA, 1481 bp, Zea mays
  Clone ID: MRT4577_102383C.1
atgacggtgtttttgcgtgcgtgtacgcacgcctttggtgcgcaggcactggcggagcggcagccgcagctggagaagaagccgccgcgcggggggagggcgccgctgtcggggaaggccgtcgcggcgctgtgcgtgacgagcttcgttgtggggctgctgctcagcggcaacgtgtcgctgatgtcggcctcggcggcggcggcggcgtcgtcgtcgtactcgagcagggacagtgtttccggctgcgacaacaagcgttgcgcgtactcgttggcacgcacatccagcctcgcatctaatccaactatgaataatctctggtcagaaactaggagagaaccagcaccccaaggatatcctgaacgaggtgtcgaggactcatcaagcaatacaatcgctggacaaggcggtgtccaccctggagatggagatggccgtggagcgcgcgaggagcgcggcggcgtggcatccggcaggagtcctccccagaaggccttcgtcgtggtcggcatcaacacggccttcaccagcaggaagcggcgcgactcgctccgggacacctgggtccccagagggcataagctgaggaagctggagcgggagaagggggtcgtgatccggttcgtgatcgggcacagcggcacgccgggcggcggcgcgctggaccgcgccctggacgcggaggaggccgagagcagggacttcctgcggctcgaccacgccgagggctaccacgagctgtcgtccaagaccaggagctacttcaccaccgccgtcgccacctgggacgccgacttctacgtcaaggtcgacgacgacatccacctcaacctcggcgcgcagaccggctcgtgtgtcattgtcaagtcgaacgtcgttacagggtgggtgtactactacacgccgttcgcgaacgaggacgtctcgctgggcgcgtggctgatcgtgctcgaggtcgagcacgtcgacgaccgaagcatgtgctgcgcgacgcctccagactgcgagtggaagaagcgagccggcaacgtgtgcgtagcgtccttcgacgggtcgtgcagcggcgtctgcaagtcggcggacaggatgatgcggcacatccactgcggcgaaggcgacggggccgtctggaacgccgccacgtgagattgcccatctcacatcgggaaccccaaccgttgctgtatgtggaggtggagcttcactcggcatccgattttctgaaaacgccaaggcgagagggaagcgaggtcgttgatccactgtttggcatattgagcattccgcatatgcatgacaagtatatggccgtttcacttgagacgtcatgctgtgactgtgatccacgtaaaagcgcatggattggtgtgtgtgaatgtgaatgtacaaacagagccagggaggggcttggattaatggtacttggtcgaccaactgaagtaatgctgttcaccaaaaaaaaaaaaaaaaaagcggcc

SEQ ID NO: 2615 - DNA, 4893 bp, Zea mays
  Clone ID: MRT4577_102384C.1
ctaccatcgaaaccataccctgaggtcaagggagtgtgagcatgattcgcccgagacaccactcgatggccactcaaaaccccgcctcgttcgaggcttctctcggacgagggacgtactcagggaaatcctcatctctctcgaggtcccctctccatggaaccgtcgtttttgcctcgcctcgtctgagcccgtctcgaatgagcaagacaatcccgagccaggcttcagccgaaggccgcatgggacatgaccattcaatgcgcataccattgctccaaccactacgacttggacaactttcccatcagactggctcgagtacgtgaccgagccctcggctctggtctcggctctcctatcaccaggtgcaggtatatgtgtcggaggggtgttgaactgttgagtccccaatcccagagctggtgtggatgtaaattggctccattgtggtggcggtggaatatttggtgtcatgccctgttgctgcattaattgatatattgcttggttatgtgcattgcaagcctccataaattctcgttgttgtctcatctcctcatgcatcctcataatctccaactcctgctcgtttggtcgacgagagcacgaactacgggaagacgaacccgtcctctgagatctcaccgacgacgagtcaatgaatccgtcgaagagtgtgtatcgtccatgtgcttttccaccaccacttgcgtacaccaccgagggatccaccggttcatgtcgccagtcgaagtcagggccatggcgacgaaccatctcctccccatatgccgccaagcgatccgtggttgtctggctgcagagctggtcagggttgttcgggtctggtcctttgtggccctcctggtagacctcaatgtcactaggcttttggccactcgtagcttccattcttttagcttttcgtatcatgtcgtcaccgccaaacttgtggttaggattggttcctcgacattgtctgtgatgcgctgacgctttctggaagccttcggaagcccaatatcgacaccaagcatagtacgcatcaggcacgggcgccatccatggaaccatcacctcacgatattgatcctcagtcaaatatatctttgacgacccttcctttttagtcaaggggcctgcttcttccggatgcttttgaaaatacaggtttgtatcctggattctcgcatagtatatggcatccttcaccagcttctttgcattgttttggaagacacgttcagcgtgccccatgtaatcctctccgtcaggcaaccgatatcgaagccaaaagtcattacgcacaagtccctgtctgtcggtgtggtttcgttcctttttaaacttgtactcgtcccaggtactgacgagcaccgcatcctcggtatcaccgtttgacaccttcactataccagggtagtgaaggcggcaaagagaacccaacgtaaggttaacctgagtgtggtgtcccttgccgtcaaaggacaggtcctcccaattccgatctccatgtggcatgattaaagtcctatcagcctctcgctctatcgcgtgacgaggctttactgagtggctttttcttgagcgacgtgtgcgtgtcgctgaagagcctcccgagccatcatccatcgggttgtcagccggttcgccctgttggccccactggtcccacgcctgttgctgctctctctggtggtcccactggtcccatggctggtgatgctgtgcggcctggtcccatgtcacgtgctccacctcctcattgtgctccacctcctcattgtgctgctcagcctcattgtgctgctcctcctcaatgtgctgctcctcagtgtgctgctcatcctcatctccatgtaccgcgctcaacagctctcgacgtctgctgctgctcgaagaactgccctgaaaaaggcccaggcccttgaacagcccctttactgacttctttgattttggcggcatccatttacactcaaagaaaactagcgctaaaggcttatttccagcaaatgtaatctcgattatatttttgattttcccgtaatagcaggcttcgtgtccttccatgtcggttgccctagtaacgactccactattttgagtggcggccataggatgacttgattcgaaaatgcttgaacgaaagcgatatccattgacgtcgtaacgtccatagcttttggcagttacgcttccaatagataactgacgtaagtcatcattcaaattcatttcctccccaaaacagtcccgaagccacataatgaaattaggtcgcccatgcataccatcgcgtcgcaatttatctatgtctctcgctgttggcctaccaagacacctcatgttttgttcatcaaactcgacaaagtattcctccacctcaggcatattcgtgaacatgtacagtaaagcagacttccgttcttccatactgaggtgatatgccttgggtggaccaacggctttgccgtttgtctgaaaaatcgaaagatcactacacggaggcatctctcgttcatcatcatggtaccttttctttcgagcaaatacattatgttcttctgcaaagtaacaacttgtgaagtgtgctacctcctttagtttaaattgttccgcaatacatccttcaactcttgccttattgcccaccattgctctaagcttctttaatgctctttctatatgaaacatccacctatactgaacaggaccaccgaccttagcctcatatggaagatgtataaagagatgctgcataggattgaagaaacccggtggaaatattttttccaatttgcacaaaagcaccggtgcctctttctccagctgttccatcacatctcttctgatttctttaccacacaactgtctgtagaaatagctaacttcagctaacgttttccacacagcttcggaaatgtacccacgaaacattacaggcatgagcctctccataattatgtggaagtcatggctcttcagtccattcatcttcattgtcttcaagttcacagatcttctaaaaccagcggcataaccatcggggaatttaatatccttcatccacttcatcacttctctccgttgcttagatttcagacaatagtcagcttttggtttgcctccgttttctctaagcacttgggttggacgatcacatatcactgctaagtccatgcgtgccttgtcattgtctttcgttttatcagggaaatccatgcatgtatttatgagggcttggcaaaagttactctcttgatgcatgacatcgatgttgtgcatcaaaatcaatgacttagcataaggaagctcccacaagccacatatgtgagtccagttatgctcctcaccaaaaccttgataccttttaccactctcgtctaggacaagtttcatatgctcttctgtaatttctatcccactacgtcgcttgggcggtcccttcgtgacaatggtgcccttcctaaattcctttctctgccttctgaaggggtgattgaagggtagaaaacatctatggcaatcaaagtaacatatcttgccaccagcactaagacgaaaacaatctgtatctttagcacaataaggacacgtcaatctaccatgcacgctccatccagggaaaataccatacgccataaaatcatgaaccgagaacagatatgcaacacgaagattgaatttctgcttcttgaagcagtcataggcttccacaccttgccatagcttctttaactcttcaatcagtggttgaagcatcacattgaggcgtacgccaggatgctcaggcccaggtataacaagacataggaacataaactcatatttcatgcaaagagcaggtggaaggttgtacggtatggcaatgacaggccaacatgaatacgacgcagcggtcatattgaacggcgtgaaaccatcagttgccaagccgatacgaacgtttcttgcatcgctggcaaaatctggatcaaatttgtcaagagccttccatgcatcaccatctgacgggtgcaccattaacccatcttgtctgtccatacaatctttatgccacctcatgtgcatagcggtcttcctcgagagaaacaaacgtttcactctaggagtgagaggcatgtaccgaagctgtttatgtgcaacctttgtcaccaccttctccccatcttcatttacaagctccacgtaccttgacttcccacattttaagcatttttgttctctgccatgttccttccaaaaaagcatacagttgtcttggcaaacatcaatcttctcatactccataccaagaccttcaagcaattttttggactggtacatgtctttgggcatcttgtgacccataggaagaacctcgctaatcaaatccacaagctccttgtaacaattaattgaaaatgcaaattttgacttgattgacatcagtcgggtcacgaattcgaggacggtcacgtcagtttgcccgtgaagaggctcttctgacgctttgagtaggtcgaagaacttctgaacctccggtgtaggtgaatcatgatgatctggtgccagttcaggctgcagatcatcaagcatctggtccatcctatcaacatcatcttcaccgtcatcaacttctacttctgttgctcgttcagcatcttcaccgtggagataccaaaccttatagcctggcacgaaaccatgcgagcacaggtgtagtgtgacctgcctcttggtgtggctcgtcatatttctacatttattgcatggacacctaatattatctatttgtgacaaagcagctgcatggtccagaaatatttgcgtcttggcaaaccattcactagtgtgacacccacccttcttgaaaccttcatacatccaatcacgtctatcacccat

SEQ ID NO: 2616 - DNA, 1197 bp, Zea mays
  Clone ID: MRT4577_102385C.1
ccccgcgtcccaagctggttctgaaagccatacctttcccttacaccatcaccaccttccatttcgcatccggaaccttcttcatcacactcatgtggctgctcaatctgcatcccaaaccgaggctctccctcaaacagtatgcaaagctcctgcctttggccttgatccacatgcttggaaatgttttcaccaatatgagtttgggtaaggtgtctgtctccttcacccacaccatcaaggccatggagcccttcttctcggtcctcctctctatcctattcctaggagagacaccttctctaccagtgttgggttcacttgtccctattgttggcggagttgtattggcgtcgatgactgaagtttcattcaactggattggattctggagtgccatgacttcgaatcttatgaatcaatcgcggaacgtttacagcaagaaaattctcgctgataaagaggacagtttggatgacataaatctcttctcaataataactgtcatggcattcttgttatctgctccactgatgctatgtgtagaaggaatcaagtttagcccatcatatctacagaatgctggagttaatgtaaaagaattatttataagagcggcacttgctgggacatctttctatttttaccaacaggtttcgtacagtttattggctagagtatctcccgtgacccattcggttgccaactctcttaaacgtgtggtggtcattgtgtcatccgttctcttctttagaactttaatttcacctataaatgccttaggaaccggtgttgctcttgctggagtgttcctgtactcgcagttcaaaaagtcaaaaccaaaggctacggctgcatgaagagactatagaatgatggaggatttggaactatcagtcgacgtggtgaagcagactggccttcacggtagcaaacacatatagtttccccatgttgcatcttaaaaaaaatgtgttctcttgtcaggttctttggatgtgagaagcttgtacgtaagtttcatccacaaggtgtggtggaacacgtgaacaacggagatatagcattcttagatttcaagagaatacaaattttggaatatacttccatgtcattgaaactgacagaatgctctcactattatatatattctttacgtcaaaaaaatatggttcaatgttttcttcctcttatatt

SEQ ID NO: 2617 - DNA, 199 bp, Zea mays
  Clone ID: MRT4577_102386C.1
ccttcgcaaaatgtgcgctttctaaatgggaaatgtgacgcgccatgtaccttaatataaagcgcaacgcgcgtggagagtacgctcacctataccgctacactttgcattttcttatcaccagttacattggctatatttcattgctttttacccactttccctggattagctcgagaaagtgtaaaacgctggcttg

SEQ ID NO: 2618 - DNA, 4668 bp, Zea mays
  Clone ID: MRT4577_102387C.1
ttagaggtaaccaccacttgggtggttagagctttgaccgctgccgccttcaccaccaggaggagggaacgcgaagagcgagtcaacaaatccagtccctgctgctggatcagacccactgccacccgcttcaggcgtaaccctatctccatgtgcaggtatatgtgtcggaggggtggtgaactgtggtggtggaactggtgtgtttgcaaattggctccattgtggtggcggtggaaaatttgatgtcatgccctgttgctgcattaattgatacatcgcttgattatgagcattgcaagcctccataaattcgcgttgttgtctcatctcttcacgcatcctcataatctccaactcctgctcgttcggtcgacgagagcatgagctacgggaagatgaacccgtcctctgagatctcactgacgacgagtcaatgaatccgtcgaagagtgcgtatcgtccatgcgctttgccaccaccacttgcgtacaccaccgaggggtccaccggttcatggcgccagtcgtagtcagggccatggcgacgaaccatctcctccccatatgccgccaagcgatccgtggctgtctggctgcagagctggtcagggttgttcgggtctggtcctttgtggccctcctggtacacctcaatgtcactaggcttttggccactcgtagcttccattcttttagcttttcgtatcatgtcgtcaccgccaaacttgtggttaggattggttcctcgacattgtctgtgatgcgctgacgctttctggaagccttcggaagcccaatatcgacaccaagcatagtacgcatcaggcacgggcgccatccatggaaccatcacctcacgatattgatcctcagtcaaatatatctttgaggacccttcctttttattcaaggggcccgcttcttccggatgcttttgaaaatacaggtttgtagcctgaattctcgcatagtatatggcatccttcaccagcttctttgcattgttttgcaagacacgttcagcgtgccccatgtaatcctctccgtcaggcaaccgatatcgaagccaaaagtcattacgcacaagtccctgtctgtcggtgtggtttcgttcctttttaaacttgtactcatcccaggtactgacgagcacctcatcctcggtatcaccgtttgacaccttcactataccagggtagtgaaggcggcaaagagaacccaacgtaaggttaacctgagtgtggtgtcccttgccgtcaaaggacaggtcctcccaattccgatctccatggggcatgattaaagtcctatcagcctctcgctctatcgcgtgacgaggctttactgagtggctttttcttgagcgacgtgtgcgtgtccctgaagagcctcccgagccatcatccatcgggttgtcagccggttcgccctgttggccccactggtcccacgcttgttgctgctctctctggtggtcccactggtcccatggctggtgatgttgtgcggcctggtcccatgtcacgtggtccacctcctcattgtgctccacctcctcattgtgctgctcagcctcattgtgctcctcctcctcaatgtgctgctcctcagtgtgctgctcatcctcatctccatgtaccgcgctcaacagctctcgacgtctgctactgctcgaagaactgccctgaaaaaggcccaggcccttgaacaaccccttcactgacttctttgattttggcggcatccatttacactcaaagaaaactagcgctaaaggcttatttccagcaaatgtaatctcgattatatttttgattttcccgtaatagcaggcttcgtgtccttccatgtcggttgccctagtaacgactccactattttgagtggcggccataggatgacttgattcgaaaatgcttgaacgaaagcgatatccattgacgtcgtaacgtccatagcttttggcagttacgcttccaatagataactgacgtaagtcatcattcaaattcatttcctccccaaaacggtcccgaagccacataatgaaattaggtcgcccatgcataccatcgcgtcgcaatttgtctatgtctctcgctgttggcctaccgagacacctcatgttttgttcatcaaactcgacaaagtatttctccacctcaggcatattcgtgaacatgtacagtaaagcagacttccgttcttccatactgaggtgatatgccttgggtggaccaacggctttgccgtttgtctgaaaaatcgaaagatcactacacggaggcatctctcgttcatcatcatggtaccttttctttcgagcaaatacattatgttcttctgcaaagtaacaacttgtgaagtgtgctacctcctttagtttaaattgttccgcaatacatccttcaactcttgccttattgcccaccattgctctaagcttctttaatgctctttctatatgaaacatccacctatactgaacaggaccaccgaccttagcctcatatggaagatgtataaagagatgctgcataggattgaagaaacccggtggaaatattttttccaatttgcacaaaagcaccggtgcctctttctccagctgttccatcacatctcttctgatttctttagcacacaactgtctgtagaaatagctaacttcagctaacgttttccacacagcttcggaaatgtacccacgaaacattacaggcatgagcctctccataattatgtggaagtcatggctcttcagtccattcatcttcattgtcttcaagttcacagatcttctaaaaccagcggcataaccatcggggaatttaatatccttcatccacttcatcacttctttccgttgcttagatttcagacaatagtcagcttttggtttgcctccgttttctctaagcactagggttggacaatcacatatcactgctaagtccatgcgtgccttgtcattgtctttcgttttatcagggaaatccatgcatgtatttatgagggcttggcaaaagttactctcttgatgcatgacgtcgatgttgtgcatcaaaatcattgagttagcataaggaagctcccacaagccacatatgtgagtccagttatgctcctcaccaaaaccttgataccttttcccactctcgtctaggacaagtttcatatgctcttctgtaatttctatcccactacgtcgcttgggcggtcccttcgtgacgatggtgcccttcctaaattcctttctctgccttctgaaggggtgattgaagggtagaaaacatctatggcaatcaaagtaacatatcttgccaccagcactaagacgaaaacaatctgtatctttagcacaataaggacacgtcaatctaccatgcacgctccatccagagaaaataccatacgccataaaatcatgaaccgagaacagatatgcaacacgaagattgaatttctgcttcttgaagcaatcataggcttccacaccttgccatagcttctttaactcttcaatcagtggttgaagcatcacattgaggcgtacgccaggatgctcaggaccaggtataacaagacataggaacataaactcatatttcatgcaaagagcaggtggaaggttgtacggtatggcaatgacaggccaacatgaatacgacgcagcggtcatattgaacggcgtgaaaccatcagttgccaagccgatacgaacgtttcttgcatcgctggcaaaatctggatcaaatttgtcaagagccttccatgcatcaccatctgacgggtgcaccattaacccatcttgtctgtccgtacaatctttatgccacctcatgtgcatagcggtcttcctcgagagaaacaaacgtttcactctaggagtgagaggcatgtaccgaagctgtttatgtgcaacctttgtcaccaccttctccccatcttcatttacaagctccacgtacctcgacttcccacattttaagcatttctgttctctgccatgttccttccaaaaaagcatacatttgtcttggcaaacatcaatcttctcatactccataccaagaccttcaagcaatttcttggactggtacatgtctttgggcatcttgtgacccgtaggaagaacctcgctaatcaaatccacaagctgcttgtaacaattaattgagaatgcaaacttggacttgattgacatcagccgggtcacgaattccagtacggtcacgtcagtgtgcccgtgaagaggctcttctgacgctttgagtaggtcgaagaacttctgaacctccggtgtaggtgaatcatgatgatctggtgccagttcaggttgcagatcctcaagcatctggtccatcctatcaacatcatcttcaccatcatcaacttctacttctgttgctcgttcaacatcttcaccgtggagataccagaccttatagcctggcacgaaaccatgtgagcacaggtgtagtgtgacctgcctcttggtgtggctcgtcatatttctacatttattgcatggacacctaatattatctatttgtgacaaagcagctgcatggtccagaaatatctgcgtcttggcaaaccattcacttgtgtgacacccacccttcttgaaaccttcatacatccaatcacgtctatcacccat

SEQ ID NO: 2619 - DNA, 421 bp, Zea mays
  Clone ID: MRT4577_102388C.1
cgattaaaatccgggtttcactttaaaaaatttctccacatacaaacagggggcatccaactgggaacatgtccgggaggggccgcttattatcctggaaacaacatcctacagccaagcagggccaacataaaagctttttttctctaaagtttggcccattatgcatgggactgtttatttcccttaaccggaaaacatgactccagctccaactttttcgggagggatgaaacccacctccaaaccatgtttaaaaaacacgttgcctgccctttgcgggggggggatcccaatcccatccttgggaaaaaaggccctggtctggggcggaaccttaaactcccccggggggtacttgaccaccggggaaaagggcccccccttgggcaccctaaacactttaaaagggaccttgggg

SEQ ID NO: 2620 - DNA, 398 bp, Zea mays
  unsure (1)..(398): unsure at all n locations
  Clone ID: MRT4577_102389C.1
gtccggattcccgggtcgacccacgcgtccgcttccattagcgactaatccagccttcgttaagggtgattagaatttgattaatttcaaggcctcagatcggagattgaatggagtgcggtggtgcgctgcagctgccgccggggttcaggttccacccgacggacgacgagctggtgatgtactacctgtgccgcaagtgcggcggcctccccctcgccgccccggtgatcgccgaggtggacctctacaagttcaacccatgggatctccccgagagggcgatgggaggggagaaggagtggnacttnttctcgncgngggaccgggagtacccgaacgggcagngggcgaacagggcggnggggacggggnactggaaggcnacgggggcggac

SEQ ID NO: 2621 - DNA, 172 bp, Zea mays
  Clone ID: MRT4577_10238C.1
ccccactaaccgtagcgacagcctcggctcgattgatccccggggggagctctagctccgccgagcgtgcgtaccggcgtccggatccgggaccgaacatgacggaggccctggtgtcggacaagcgggggatggccatgtctttggagatcccgcttttgcgggggggggg

SEQ ID NO: 2622 - DNA, 507 bp, Zea mays
  Clone ID: MRT4577_102390C.1
caagtctttgggtgctgtgtctgctggggctgctgccgcgcgcagatcccgatcccggcgaggatggacgggttcgtgtacggcgggaagccgccgccggcgtggggcgagacggtggtggtagaggcgttcttggaccccgtgtgccccgacagccgcgacgcgtggccggcgctgaagaaggtcgtcgaccactatagcaaccgtgtgtccgtcgtcgctcacctcttcccgctgccgtgagtgatgcaacttcattcatgtcgatcgtcgttgctgtcccatctcttttcctttcgtttcttgaaatttattcattcacgactatgtagtaggtattgtttgatgttttgtgtactgctaaattaattaacagagctactttaatttcagaaagtgcgcagagagttaggtcttgtttagttcatgaaatgaaaagttttcggctactgtagcacttttgtttgtttgtggtaaatattatccaatcatggactaattagggtt

SEQ ID NO: 2623 - DNA, 176 bp, Zea mays
  unsure (1)..(176): unsure at all n locations
  Clone ID: MRT4577_102391C.1
gtggtcntttttttatacataactaatttacggggggatttttaagtaaaggcgcggttaaacccccaaaaccacgggcgacaagggcccgggccaccagcgcacagaagacagaccacggcgcgccccgaaggcagccaaaaggggaaccagacccggggggggaggcaggcaca

SEQ ID NO: 2624 - DNA, 257 bp, Zea mays
  Clone ID: MRT4577_102392C.1
gccttgtttttttttttggtactgctgaacctgaacatgtatagatccgcttagtaaatagtctgaactttaattaataagctgacagcccaaatgcacgcgaagacgttcaaattaatgactgcctgtattgtacgtgcgtgtagctaccacttgtatagggcatgcatatttgaattgtatataccaacgcgtgcatattgagacccacctgtttcatgatgcatgatgcaacttgaattaataatactcctata

SEQ ID NO: 2625 - DNA, 188 bp, Zea mays
  Clone ID: MRT4577_102393C.1
attcggctcgaggacgggtctattcggctggttagatgtgcccttggatgctctggctaggcgcagagctaaagggggtaccgtttatggtactatagtggaccaaccgtccgatgatccatacacactggagctttttaaggtcatgatgcttgcagagcaagaggggtgaagctatagcaaatgcg

SEQ ID NO: 2626 - DNA, 398 bp, Zea mays
  Clone ID: MRT4577_102394C.1
cgcctacgccgctcagcgacctagctctcctggtctctcgccggcgcgttcgcaccgcgctggcgacaaacttcgccgccgccacagcgactgtatccgaccatccgagggcgcggcagccttgcattccacacccaccagtgcccagcccttcgcctcggcggtgaccacgctggagaagaagccttgagcctgcacttaatctgagactagaaaattgggctcaatcacgggtcgtgtcgtcccgacggacggaggaggaccgccgctagagctcgtgttgtcgcgccaggtgctcccataacttcgttttatttactacgaaagaaacccttaatggcacccagcctaagccccccttttgaattccccacaccggaattcaagcccttagctgg

SEQ ID NO: 2627 - DNA, 859 bp, Zea mays
  Clone ID: MRT4577_102395C.1
tcatctgtgatgtcccgtgcccatcacaaactgagttacaagtattttgggccatatccagtggaggcgcgtgtgggcaaagtggcttatcgcttgaaattaccagactccagtcgcatacaccccgtggttcatgtctctcagcttaaattagcagcaggattcaagggtgctgctcactctaccttaccagtttcgttgcctgaccacagtgtaccagtgcaggtgcttcaaacgcgtggaattaccaaaggtcatcgccaagttcagcaggtactggttgcctggtctggattgccacaggaactggccacctgggaagacagggaagctctgcaacagtgttttccggctgctcctgcttggggtcaagcagctactcaaggggaagggaatgtcagtactgagggcgtcgaggatgttgtggcgagtgttgcgcctactgatgggctgcgtccaacccgcgcgcgtcgcccgaacactcgtgtgtgtggaccgaactggaggaagtgacttcgtgggcgcctgcgtgcgcgtgagtagctgggccgtgtgaccagcttgtaagcaacactggagaaggattctgggaggcgcctgcgtgcgcgtggatagctgggctgtgtggccagctgtaaggaatacttagccgccgctctgcggaggctggaagaccatggaaaaacctaaacactaagaatctattctccgtcctccttcttccttctgctgtctccattcctctctgcttgctcctcctctgtatacccttctgctaacactgctcctcgagtatcgatgacgggtgtgtagagctgtacattttgttatttctatcctcaatattgattaagtgtag

SEQ ID NO: 2628 - DNA, 361 bp, Zea mays
  Clone ID: MRT4577_102396C.1
gtgctggaaataaaatgtcgtatacatacatgtgaaaccccaataaattgctggatcacctacatatatagccatacaaccatacagaggaagagttcgcgcacggggctcactgcaaccgtagttcttgtggttttatattcacagcaaagtttcagttcctgtataccccaatcttcatgttcttgttcgggctgaaaacacgttattcatgtccagcgaatcgagactggactcgccgatttggcgcctcttcatgccgccacgatggggtaggaggcgcaggttgcaacagcacacatgttcttgcccatttccatcttgaagtaaccattttcaccccagtcggcgccccacgagt

SEQ ID NO: 2629 - DNA, 450 bp, Zea mays
  Clone ID: MRT4577_102397C.1
gttgttggagagctgtcacttactgctcattaatgattgattttttaaaccatctagattgttttcatgagaacaggggattaactatacggaatttattattggtcattaagggatattaaaatggaaaacctttacaagatgtatcctgtcttgctgcattcgaatgcctgagactctcctgccaatgtggggagggaaacaagagatcactcttccagatctctggcaaggagatccagttgaggagaggtggagtgaagagagaaattaagaaaaaaaatctatttttgctgtaataaaacactgtttacattttataacagcaataatttaccccaaataatcacttcagctattgttcagcttgttttaggggctaactgaactgtggctaccaatctattcagtgcagattgctaataatgggctactttgaaaacttatagc

SEQ ID NO: 2630 - DNA, 558 bp, Zea mays
  Clone ID: MRT4577_102398C.1
gccggccgggtcggaacacaccagaatccgcgaatccatacgcgtctatctcagcttgctgcgctgcactaccctgccctgccatcatatcgtacgtgagcccggccgagcgagagcgagggagaggcatggctgctccgaagctcgcgacgctggcgccaacgggagcggcacctacatcagccgcgccgccgcgctgcccagcaagtgcggcgtcgccctgccgtacaagatcagcaccaacgttaactgcaacacgattaattaaatgaggcgtcctgtgcgcgtccgggcgaggaatgcatgcatggcggagagtaataaagtaatgctactggtattttaagctagatcgaggtgtgcctgtctctagtcatttatggtgtttagcaatcgtctacacagttcgtaaacggtgtatcgtggatgcatgttgccgcgagcagagtacgtaggcatgaaccgatgtgtgcgcttctgtctgtgtactctctctatgtagtaatgtgtggccagtgggtgctttgatccgaaaaaaaaaaaaaaaaaaggccccta

SEQ ID NO: 2631 - DNA, 635 bp, Zea mays
  Clone ID: MRT4577_102399C.1
gcgaatcgacgcgcctatctcagcttgctgcactgcactgcactgccctgccatcatatcgtacgtgagcccggccgagagcgagggagaggcatggctgctccgaagctcgcgacgctggcgctggccgtgctcctggcggcgaccgcggtggctcccccggccgcggtgcgcgcggcgatgtcgtgctccaccgtgtacagcacgctgatgccgtgcctgccgttcgtccagatgggcggggccatgccgccccagccgtgctgcggcggcatccgcagcctgctgcagcaggccaacaacacccccgaccgccgcgccgccgcgctgcccagcaccaacgttaactgcaacacgattaattaaatgaggcgtcctgtgcgcgtccgggcgaggaatgcatgcatggcggagagtaataaagtaatgctactggtattttaagctagatcgaggtgtgcctgtctctagtcatttatggtgtttagcaatcgtctacacagttcgtaaacggtgtatcgtggatgcatgttgccgcgagcagagtacgtaggcatgaaccgatgtgtgcgcttctgtctgtgtactctctctatgtagtaatgtgtggccagtgggtgctttgatccagatgt

SEQ ID NO: 2632 - DNA, 432 bp, Zea mays
  Clone ID: MRT4577_10239C.1
aaacaaaaaaggggttttcaaaaaaaaagggggggaaaaccccccccctgggagaaaaaccccgttcatttttgaacccctttttggcccccttggccttttttttttcaggggatttttccgtcgcaaagggggccgtttcttttgcccggtgcccctcccctgggtttttattccccccttctacttgaaccccccctcccgggaccttttttccggagacccgaatttggcaaggcaaccccccccaagccctggtaaaattggcagcatcgtccgctgcgggagccccccccccccatttttcttccggccgtttccccccccccccccccgaacgcgttttatttctgatttctgagcatgggtttttgggaaaccccccccccccccaggttattcccttaattgggcccaagcccagggggggcc

SEQ ID NO: 2633 - DNA, 388 bp, Zea mays
  Clone ID: MRT4577_1023C.1
taagctcggaattcggctcgtggcacctccgactcccggtacttcctgcatgggaagggagggcactcaggtgccaaattggagggagaactcgcctgcgacccacatccggcggcaggggtggtgagcccgggcagctcgcaggtgaaagatgtgctccaggtcatctccaaaagagcaagtgacaaaggatgggttgaactcacaccgaaagacgagctggttggtacggggagggccgatgcaggagatgaatggcaggctacaagccagaagggcaagggcgaccccacaggtggaggatttacagaaggagaccctggaggggaagacaccggccatcacctggaaggaggtgaaggagccgtccttcaagactagattccca

SEQ ID NO: 2634 - DNA, 516 bp, Zea mays
  Clone ID: MRT4577_102400C.1
catcttctggcgacgactgggcgactgccgacggctgctgctgccgccctagaccaggtggccagctcttgttcgggaccgttgctggcgacgagaatccaatagcttaacccctatgcaccaagggaagtcggatcctcattgctggtacaatgagcaggccgaatacccgcaacaagaacaagaggcctcgcgctgatgaatccaatagcccatctgtggctgttttcaagaagatacattccactggtgatatctcaaaaagcgatatctgtcagctttacatggtgtggaaaccgctttgctacggttgccatggtgctcatcatgtggaaaggattcagcagcatcttcaaaatctgaagacttctatgaactcgagctgaatattaaaggtttcaataatttggaagaaagtctagacgactactttagtgaagaaggactagtcggggagaatcaatacttttgtgaatcatgtcagaaaagggtagacgccactcgctgcataaaact

SEQ ID NO: 2635 - DNA, 692 bp, Zea mays
  Clone ID: MRT4577_102401C.1
ttccggacacacaccagaatccgcgaatcacagacgcgtctatctcagcttgctgcgctgcactaccctgccctgccatcatatcgtacgtgagcccggccgagcgagagcgagggagaggcatggctgctccgaagctcgcgatgtcgtgttccaccgtgtacagcacgctgatgccgtgcctgccgttcgtccagatgggcggggccatgccgccccagccgtgctgcggcggcatccgcagcctgctgcagcaggccaacaacacccccgaccgccgcaccatctgcggctgcctcaagaacgtcgccaacggcgccaacgggagcggcacctacatcagctgcgccgccgcgctgcccagcaagtgcggcgtcgccctgccgtacaagatcagcaccaacgttaactgcaacacgattaattaaatgaggcgtcctgtgcgcgtccgggcgaggaatgcatgcatggcggagagtaataaagtaatgctactggtattttaagctagatcgaggtgtgcctgtctctagtcatttatggtgtttagcaatcgtctacacagttcgtaaacggtgtatcgtggatgcatgttgccgcgagcagagtacgtaggcatgaaccgatgtgtgcgcttctgtctgtgtactctctctatgtagtaatgtgtggccagtgggtgctttgatcca

SEQ ID NO: 2636 - DNA, 1253 bp, Zea mays
  Clone ID: MRT4577_102402C.1
ggtaccctcggagccttccgggtcccgttcaccacgcctgctctctcccttgtcatcttctggcgacgactgggcgactgccgacggccgctgctgccgccggccgctgctgccgccctagaccaggtggccagctcttgtccgagaccgttgctggcgacgagaatccaatagcttaacccctatgcaccaagggaagtcggatcctcattgctggtacaatgagcaggccgaatacccgcaacaagaacaagaggcctcgcgctgatgaatccaatagcccatctgtggctgttttcaagaagatacattccactggtgatatctcaaaaagcgatatctgtcagctttacatggtgtggaaaccgctttgccacggttgccatggtaactccaaggactcaccaaattgtttctgcgggttgattcccattggcaatggggttcgtaaatctggcctctggcagaaaactcaggaaattatccgtggtcttggtcctaatccatctagcgatcttcgtgattctagcgagacacctgctgggttgactaacctgggagcaacttgttatgcgaatagtattctacagtgcctttacatgaacacatccttccgatctggtattttctcattggatctggatgttttgaagaagcatccagttttagatcagctggttcggttgtttgcacaactacagtctagcaaaatggctttcattgattcaacgccttttattaaggcattggaattagacaatggtgtccagcaggatagccatgaatttctcaccttgtttctgtctctccttgagcaatcactaagtcactccaaggtccctggaactagagaaatagtgcaacatctgtttcgtggcagtgtatctcatgtaacaaggtgctcatcatgtggaaaggattcagcagcatcttcaaaatctgaagacttctggaagcctgcataaacccgaaggattggatctgattagccgtcattcttgagatttttgttagagttttcccttctgtagggctaagaccacgtgcagtttcattatatattttgcatctgtagaatcgtgaataaatatgatgtagtgatgttgtagctgtttgtatctatctgctgtttttcccccatgtgaatgagtgaaccattggcttctgtatttacgaaggattcaggtttctgaacactatcatttgctactactatgggaaatactccccgatgcaggcccataggtctgtct

SEQ ID NO: 2637 - DNA, 585 bp, Zea mays
  Clone ID: MRT4577_102403C.1
gttttaaggaaataatttctattgcataatatttactaaaagatggtttaacctaacctttttagagaatctttgaatatattatccaaaagaatgattcttatataagatctttccatttaatcttttattatgaactatatttatttttaggagatgtgacttaaaaaagtgagaaaattcttattaaaagatattttggttcaagtcctttggagaaacttttatgaatcctaaaataggattttggtgtgtcacagaaggctaaaacattcaagagaaggcctttatttaggaatcagatagttatacgatgtatgtaagtcttgttctattttctttgaacacacatgagagctgcatatcttctttataataagaagcaaagtacaaaggtccaaagtagaccgacacaaacaaaacaagctagctcactgtggccaaaagcgaagattaaaaaaaaaagatggattcattagtaaaactagacaaacgaccgacctaattagtagaaggggctgaaaggtagaacaatcttttagctccagccatcattcacacattcctttcttcaccaaagcgaca

SEQ ID NO: 2638 - DNA, 789 bp, Zea mays
  Clone ID: MRT4577_102404C.1
ctcggccgagacacaccagaatccgcgaatcgacgcgcctatctcagcttgctgcactgcactgcactgccctgccatcatatcgtacgtgagcccggccgagagcgagggagaggcatggctgctccgaagctcgcgacgctggcgctggccgtgctcctggcggcgaccgcggtggctcccccggccgcggtgcgcgcggcgatgtcgtgctccaccgtgtacagcacgctgatgccgtgcctgccgttcgtccagatgggcggggccatgccgccccagccgtgctgcggcggcatccgcagcctgctgcagcaggccaacaacacccccgaccgccgcaccatctgcggctgcctcaagaacgtcgccaacggcgccaacgggagcggcacctacatcagccgcgccgccgcgctgcccagcaagtgcggcgtcgccctgccgtacaagatcagcaccaacgttaactgcaacacgattaattaaatgaggcgtcctgtgcgcgtccgggcgaggaatgcatgcatggcggagagtaataaattcgtaaacggtgtatcgtggatgcatgttgccgcgagcagagtacgtaggcatgaaccgatgtgtgcgcttctgtctgtgtactctctctatgtagtaatgtgtggccagtgggtgctttgatccagatgtattcgctcgtgagtggtgagtcatggaagttgatcgtttcagtatcattaccgtgtattctctcttttacatgcgattctgaaaagggacctgcacgaagttccagtatac

SEQ ID NO: 2639 - DNA, 554 bp, Zea mays
  unsure (1)..(554): unsure at all n locations
  Clone ID: MRT4577_102405C.1
gccggccggtccgggagttgaataatcaatttccattgggtggtggtttattcttttgttttgtttataaaaatgtcaagcaatagcagcaatactgatttaatcaatcaattattatctttacctgttgatttcactatggatccacttgttattcctacaaccacaaatgtagttcgtccaaagaaatcaagagttacacttgaagataaagatcaaaagacaaaagaaagaattttaagaaacagagcagcagctcaagagtctcgagataaaaagcgtcgttatgtttccgatttggaatcgtcaaataagagacttgaagaagaaaatggtcaaatgaagaaaaagatgaagcacttggaagaagaaaatatgtcgttggcttgtcaactggaatctatcagtaaacaatttgctgctctacaggctcaaatcaagtttaatacaaattctacttttctctttaatgacttttgcggntcagcacggatcgtanagaaggaaataatttgtggctaaagaaagaaaaaaaaaaaaaaaaaagggcccta

SEQ ID NO: 2640 - DNA, 646 bp, Zea mays
  Clone ID: MRT4577_102406C.1
ggacaacaccacaatccgcgaatcgacgcgcctatctcagcttgctgcactgcactgcactgccctgccatcatatcatgggcggggccatgccgccccagccgtgctgcggcggcatccgcagcctgctgcagcaggccaacaacacccccggccgccgcaccatctgcggctgcctcaagaacgtcgccaacggcgccaacgggagcggcacctacatcagccgcgccgccgcgctgcccagcaagtgcggcgtcgccctgccgtacaagatcagcaccaacgttaactgcaacacgattaattaaatgaggcgtcctgtgcgcgtccgggcgaggaatgcatgcatggcggagagtaataaagtaatgctactggtattttaagctagatcgaggtgtgcctgtctctagtcatttatggtgtttagcaatcgtctacacagttcgtaaacggtgtatcgtggatgcatgttgccgcgagcagagtacgtaggcatgaaccgatgtgtgcgcttctgcctgtgtactctctctatgtagtaatgtgtggccagtgggtgctttgatccagatgtattcgctcgtgagtggtgagtcgtggaagttgatcgtttcagtataaaaaaaaaaaaaaaaaagcggtc

SEQ ID NO: 2641 - DNA, 427 bp, Zea mays
  Clone ID: MRT4577_102407C.1
gtaccggcctgaatactcggccagacctacgcgtccgtccacgcgtccgctgacatttacagatctttatttatttatagtgtcccttcatacacagtaatgctcatacttattatcgggtattccaatccctcctctacatagatacaacaaatctaatttgttccttcctaatatcgtatattggcatgttcactcattgtttgggagcatcacaattcacaaactcctttgcacatgttgcaacttttactggatcaggtatgatatcccagaaaaaaatgtaccttgctttgttatattacttgctaatgcacccaactattctaccttttgcatatatatattacttgcactgcgtataaaatacttggttagaaagatataatattccttatcggttatatttacaagatggtttaatgcg

SEQ ID NO: 2642 - DNA, 1120 bp, Zea mays
  Clone ID: MRT4577_102408C.1
aattcggcacgaggcacagacgcgcctatctcagcttgctgcactgccctgccatcatatcaatatcatatcgtacgtgagcccggccgagagcgagggagaggcatggctgctccgaagctcgcgacgctggcgctggccgtgctcctggcggcgaccgtggtggctcccccggccgcggtgcgcgcggcgatgtcgtgctccaccgtgtacagcacgctgatgccgtgcctgccgttcgtccagatgggcggggccatgccgccccagccgtgctgcggcggcatccgcagcctgctgcagcaggccaacaacacccccgaccgccgcaccatctgcggctgcctcaagaacgtcgccaacggcgccaacgggagcggcacctacatcagccgcgccgccgcgctgcccagcaagtgcggcgtcgccctgccgtacaagatcagcaccaacgttaactgcaacacgtacggctgactacacacacgctcctgcatgccgtgttctgtcgttccaatactgctctgcagctagattattaccattgcgcttgcgccggccgttctgtgtttctggactacaccgacgtgcctgtaaccttgtttctctctctgtgtttgtctttgcaggattaattaagtgaggcgtcctgtgcgcgtcccgggcgaggaatgcatgcatggcgctggcggagagtaataaaataatgctactggtattttaagctatatcgaggtgtgcctgtctctagtcatttatggtgtttaggaatcgtctacacagttcgtaacggtgtatcgtggtcggatgcatgttgccgcgagcagagtacgtaggcatgaaccgacgtgtgcgcttctgtctgtgtactctctctatgttgtaatgtgtgggtgctttgatccagatgtattcgctcgtgagtcgtggaagtagatcgtttcagtaaaaaaaaaaaaaaaaaaaaaaaaaaaaaaaaaaaaaaaaaaaaaaaaaaaaaaaaaaaaaaaaaaaaaaaaaaaaaaaaaaaaaaaaaaaaaaaaaaaaagggggggcccgtttaaaaagaaccaaatttaactacccgggcctggaaaggtataattttttttttggggcc

SEQ ID NO: 2643 - DNA, 1151 bp, Zea mays
  unsure (1)..(1151): unsure at all n locations
  Clone ID: MRT4577_102409C.1
cacggcgccaacggagcggcacctacatcagccgcgccgccgcgctgcccagcaagtgcggcgtcgccctgccgtacaagatcagcaccaacgttaactgcaacacgtacgactgactacacacacgctcctgcatatatgccgtgttctctcgttccaatactgctctgcagctagattattaccattgcgcttgcgccggccgttctgtgtttctggactacaccgacgtgctgtaaccttgtttctctctctctgtttctctttgcaggattaattaagtgatgaggcgtcctgtgcgcgtccgggcgaggaatgcatgcatggcgctggcggagagtaataaaataatgctactggtattttaagctatatcgaggtgtgcctgtctctagtcatttattatggtgtttaggaatggtctacacagttcgtaacggtgtatcgtggatgcatgttgccgcgagcagagtacgtaggcatgaaccgatgtgtgcgcttctgtctgtttactctctctatgtagtaatgtgtgggtgctttgatccagatgtattcgctcgtgagtcgtggaagtagatcgtttcagtatcaaaaaaaaaaaaaaaaaaaaaaaaaaaaaaaaaaaaaaaaaaaaaaaaaaaaaaaaaaaaaaaaaaaaaaaaaaaaaaaaaaaaaggtaccccgcatcccacataattaatccacagttggaaggcggattcctgtctcgaatcctttttcgccgttccgagggcccgcacgaagcaaacagcagggaagtcgaccgggggaaaggccccccggaagcagttggccactaaggttgcgcgcaggtcggccccggccaccgggggggtgaaaaagccccaccgtttccgccccggaactgtcgcgctccgggagatccgcaagtaccaaaaaagcactgagctgttaatccgaaagctccccttccagggcctggtccgggaaatcgcgcaagacttaaagactgatctgaggttccagtcctccgccgtcgcggggctgaaggaggccgccgaggcgtacctgggggggctcttcgaggacaccaacctttgcgccatccacgccaagcgcgtaactatcatgcccaaggacatccagttcgcgcggngcataagggg

SEQ ID NO: 2644 - DNA, 305 bp, Zea mays
  Clone ID: MRT4577_10240C.1
cttgtcatgtctaattacctcctgacccccaaaagtgtatacatccaattggtctctggacagtccagtgcacattttggttgagaatgcaagcaaaaagagaacacccggatcaaatgctaacaaaattaccaggcaccgggcatacagctgaagaaactcttgatgtgtttcagtttgaaagcagcagagtttcgtcgattgattctcaggtaaagtgatttcatccataaatatcctctgctgggaacagtccttgcgcttcctccgggagatcaggttggtactggagctgctcgtagttc

SEQ ID NO: 2645 - DNA, 297 bp, Zea mays
  Clone ID: MRT4577_102410C.1
ctcgagcttttgattgcaagaggattacaggtgctggggtgaggttcgtttccccgcgctttgagtagtctcactatctccggggaaggtgtttaggggcctgtcactgacagcatgttttgtgaacactgtataccgcaatatttgagcataccatatttatttatattaaaggacgcttatgagcatatattaatactctatattttaaattatgggtttgtcattaccaccgttttctttggattaagaaaactttggtttggacgcaggtgcagtattttttatcttctacac

SEQ ID NO: 2646 - DNA, 802 bp, Zea mays
  Clone ID: MRT4577_102411C.1
ctcgaggccggccggcacaacaccagaatccgcgaatcacagacgcgcctatctcagcttgctgcactgccctgccatcatatcgtacgtgagcccggccgagagcgagggagaggcatggctgctccgaagctcgcgacgctggcgctggctgtgctcctggcggcgaccgtggtggctcccccggccgcggtgcgcgcggcgatgtcgtgctccaccgtgtacagcacgctgatgccgtgcctgccgttcgtccagatgggcggggccatgccgccccagccgtgctgcggcggcatccgcagcctgctgcagcaggccaacaacacccccgaccgccgcaccatctgcggctgcctcaagaacgtcgccaacggcgccaacgggagcggcacctacatcagccgcgccgccgcgctgcccagcaagtgcggcgtcgccctgccgtacaagatcagcaccaacgttaactgcaacacgattaattaagtgaggcgtcctgtgcgcgtcccgggcgaggaatgcatgcatggcgctggcggagagtaataaaataatgctactggtattttaagctagatcgaggtgtgcctgtctctagtcatttattatggtgtttaggaatcgtcgtctacacagttcgtaacggtgtatcgtggatgcatgttgccgcgagcagagtacgtaggcatgaaccgatgtgtgcgcttctgtctgtgtactctctctatgtagtaatgtgtgggtgctttgatccaaatgtattcgctcgtgagtcgtggaagtagatcgtttcagtacc

SEQ ID NO: 2647 - DNA, 910 bp, Zea mays
  Clone ID: MRT4577_102412C.1
ctgtgcggcgctcgaggcggccgggttcagaaacagcggaatccgcgaatcacagacgcgtctatctcagcttgctgcgctgcactaccctgccctgccatcatatcgtacgtgagcccggccgagcgagagcgagggagaggcatggctgctccgaagctcgcgacgctggcgctggccgtgctcctggcggcgaccgtggtggctcccccggccgcggtgcgcgcggcgatgtcgtgttccaccgtgtacagcacgctgatgccgtgcctgccgttcgtccagatgggcggggccatgccgccccagccgtgctgcggcggcatccgcagcctgctgcagcaggccaacaacacccccgaccgccgcaccatctgcggctgcctcaagaacgtcgccaacggcgccaacgggagcggcacctacatcagccgcgccgccgcgctgcccagcaagtgcggcgtcgccctgccgtacaagatcagcaccaacgttaactgcaacacgattaattaaatgaggcgtcctgtgcgcgtccgggcgaggaatgcatgcatggcggagagtaataaagtaatgctactggtattttaagctagatcgaggtgtgcctgtctctagtcatttatggtgtttagcaatcgtctacacagttcgtaaacggtgtatcgtggatgcatgttgccgcgagcagagtacgtaggcatgaaccgatgtgtgcgcttctgtctgtgtactctctctatgtagtaatgtgtggccagtgggtgctttgatccagatgtattcgctcgtgagtggtgagtcgtggaagttgatcgtttcagtataaaaaaaaaaaaaaaaaaaaaaaaaaaaagtactctgcgttgttaccactgcttaagggaaaattccagcacactggcgg

SEQ ID NO: 2648 - DNA, 585 bp, Zea mays
  unsure (1)..(585): unsure at all n locations
  Clone ID: MRT4577_102413C.1
ggtcgcnnggccgnagggtacaagnccnttttttttttcttttattttttttattttttactttttatttttttttttttttttttttttttttttttttttttttttttttttttttttttttttttttttttttaccgggccgggggggcgggggaagggggggattccaacccacgggggggcgggtctaggggggcccgccgggggcccaagctggggggaaacaggggcaaaggtgttcccggggggaaaatggtatccccccaccaagccccccaaaaaaggggccgggggcaaaaaggggaaagcccggggggcccaaggggggggcccccccaaattaatgggggggggcccactgcccggtttccaagggggaaaccgggggggccccctgctttaaagaatgggcccacccccgggggggggggggttgggtttggggggcttttccccttccccggtaaatgaccccgtgggcccgggcgttcgggtggggggagggggtttagctcccccaagggggggaatgcgggtttccacaaaatcagggggaaaccccggaaaaaacctgggaccaaa

SEQ ID NO: 2649 - DNA, 346 bp, Zea mays
  Clone ID: MRT4577_102414C.1
cttggatcctctagacggccgcccttttatactaccgtaattatttttgcattccacttgttggggataggggacctattcctccttaaaccactatagccgtctcactttattaaaacatctaaagctaaaaccatcaatagggacaacaacaccgtgggacgtacatttaattatttaccaccccccggccctgcacctacaacacgggcgtgctcaaaaatggtataccttggcggtgggcatggtgacacaaatggcctcgtacttcttcttcccctagggggtgccgttcttggggcccaccatgtattctcctgccccgacaatggttgccactgccccc

SEQ ID NO: 2650 - DNA, 213 bp, Zea mays
  Clone ID: MRT4577_102415C.1
attcggctcgagccgggtcgaagttttaaatattcggcggtcggccatttgaggtggatgttttcaaataaactaggcttgtaatcagaaagggttgaacaagcgatggttcgactgaaaacgaaatatcgggtgatcgttactgacttgcaagagaaatacagggggagggacagatacctaaaataacaaccactgtaaggtcaggagtaa

SEQ ID NO: 2651 - DNA, 223 bp, Zea mays
  unsure (1)..(223): unsure at all n locations
  Clone ID: MRT4577_102416C.1
aaaacggcccagaggcagngccgngaccganncgagacgcaggagagggggggagacgaggcgngcggaacccgggggcagcagcgncncggccacgaagangncgcacgcaagaggcncaagcgaaaggnacggancncgccggccccacncgagaagcacaagggaccgaagncgcccaaggagngccgcccccagcgaggcggggggcgcggggaacaac

SEQ ID NO: 2652 - DNA, 279 bp, Zea mays
  Clone ID: MRT4577_102417C.1
cgacacaattgagcgccacatggtcgtccatcagttcgtgtggcttgtcgccctagaagcccgatagtccaccacctatccatctaacttgccatagaggttgtcatgcataccctagggtttttcctgtcctgtgatggcatattgcacgacacatttctgtccttctctatctacgacgacaaggacaacctttgaacaagctcaactattaactattgcgaccaatatcttcgtgggcagcattctctcattgaggcacctcctgtgctgggccct

SEQ ID NO: 2653 - DNA, 454 bp, Zea mays
  Clone ID: MRT4577_102418C.1
aaaacaaaaaaaaccttaaggggcacaaaccttacacatttcgcacgttttgtttagttgttttccccccaatccaattttttttttaaggctggggcaaaaccacacattttgatgtttatgctttggaaaaccatgaccccccggccccccttaaaggaaaaatcccaaaaatgataatgggaagggcacttggtgccgttacatttttaaataacacattcccgccttggtggtcggggtctacccacaactttaaaaagatacgttctttttacaagctaccccctccccggccggggaacccccttttggccgccctcggaatgtaaacaaaggtttcctcggccttgttttttgtccgggggaagcttttggccccaaggaggggccccaagtccttttcgttaatttgcgcgggaaccggaaaaaaactaacgcccttggttttttt

SEQ ID NO: 2654 - DNA, 307 bp, Zea mays
  unsure (1)..(307): unsure at all n locations
  Clone ID: MRT4577_102419C.1
aaaaaaaaaaaaatgttattatnttaanccaaaaaaaaatacaattggggcggtttaatctnaanccatgcaaaataaaaaccataatatttaaaccatggccgtcccgaattgttgttaacagcatataaaaaataatggtcaataaaaaaccacccaatcaaatacatacttacttacttacagggtgtttgataacaactannnncaattacctctaaattccaatttttaatgggggggcaagcgttaaccctaatctaagaatttgggcccggaaaaaaaacaaccttaacggttttatccc

SEQ ID NO: 2655 - DNA, 259 bp, Zea mays
  Clone ID: MRT4577_10241C.1
tgaaggtgaactggagggtgatggcgaggatgatctgcttatggaaagggagttgatatgactgttgggcgcgaagagtgatcaccttattgctagatctaggctggaggctaggttacgacggatggtaaccactggggtttatattgctactaagaggaagaccactaatgtagcagatgatagagtggcagcaagattcgcggccttgatgctattggatacagttgatgatcatagagctcattattattcagag

SEQ ID NO: 2656 - DNA, 188 bp, Zea mays
  unsure (1)..(188): unsure at all n locations
  Clone ID: MRT4577_102420C.1
cgggttttacccacgcgttttttaaccattgttgnnctccatccaattcacncaacctggaaacaccatgggnagtccatttgcgccaatgtgtgtctcagnaaacgactctaatgtcttgcaagnagcctaataacgtctgtgtctgtgctttgggtctcgtagctcttcggccctatagtcgctgt

SEQ ID NO: 2657 - DNA, 246 bp, Zea mays
  Clone ID: MRT4577_102421C.1
gcgcccacgcagtacgaagcattgaagccggagcctccgtctccggacgagacaggtagaagcggggcggcactggacgcccgagaccttgaggtgctcagcgagctctacaccaagaagacgcagtggtaccacttctcctccttcgaggtgtgttgcatggggctcttcatcgacccctacgacctatactgcatctccctggagactaaggtcctctaccagatctactacaccgtggagggg

SEQ ID NO: 2658 - DNA, 243 bp, Zea mays
  Clone ID: MRT4577_102422C.1
catcgatctgctcaacccgccggcagaacttttgaagctcaagcacaagaaaaagagactggtgcagtcgcacaactccgttctgtatggatgataaatgccaggggggcttcagcataaccactgttgttaagcactcccagactggttgtgggtgccctggctgacaaactgtcctctgtcaacccacaggaggaaaggcaggggtcatggggggctggtctttccgcaggaagggagact

SEQ ID NO: 2659 - DNA, 574 bp, Zea mays
  Clone ID: MRT4577_102423C.1
gttggggggacctccaaagtcccaaacccattcacagggacaccaaggggtggccagagaaaaaagcaaaaatggccgccccctgtattgtgctctctacgccctgaggaaaaacggcaagaaaaaccgctagatcccggggacccaaaaaaaaggggtccgcgaaaatctccaacccggtcaaaacggcaacgttggggtccccggcgacaccgaacgggtaacccccgagggaaaaagggacgtcctggccccggttttccaaacaccaccggttccagacgttggggggaccttatccaccttcatgacacactctagggtgtcccgcctttggaacaccccttttagaaaaaccaggccctcatgccccagagacaggcggaccccaaggatccgggcccggccaggctgcctagttttcaagcggaaccgttggtacaaacccatggccacctcggagtccctgggaccctccatggacctgtgggggaggccggcggaccgaatgaccatggactacccccccactataaacattttggaatgaacatagagcataaacctgctaccc

SEQ ID NO: 2660 - DNA, 493 bp, Zea mays
  Clone ID: MRT4577_102424C.1
cttgtggttgtggtgggtgtttttttttttttttttttttttttttttttttttttttttttttttttttttttttttttttttttttttttttttttttttttttttttttttttttttttttttggggaagggttaactttaaaattttggggggggggggggaaaaaaaaaaaggttgggggatttaacttggtaaaaaaaaggaaaaaaagtgaaggggaattgccaaaggacttttgggaaaatacaaaaacggggaaaaacttattttaaaaaaaaaaacccggaggggggggggggaccgaaaccgggcccgccatggtggaccggttttaaggaaaggggaaaataaaaaagggggggggcggaaatttaagggttgaaccaaacctgggtgaaaaggttgccgggggaaaacccaaaagggttccaaaaattttaggggaaataaataatttacggagaagggttttgaaggggtttgggtttt

SEQ ID NO: 2661 - DNA, 409 bp, Zea mays
  Clone ID: MRT4577_102425C.1
caggcgaaaaaaaatcttaaacacagggctccatcagccatatcaggttgtacaagcaaaaatgaggagtctgtctaagcaaaaaaaaaccagaggccgggaaggggaaaagaaaacacaaactgggcttggcttatagccaaaatttaaaaactggaaaggggcaacgtttaaaaacttttatcacacgttatccggcataaaaaacaaggggaaccacctttttaaaacctgctctcaggggatgcatttaagggctaaaagattgaacccttggaattaaacctaatcctcaaaaaccttagttcccaaacctttgaaaccctccggggggatctcacctcctgggaccaaaaagaactgcccctccttgggggtttcctcgaggttccttttgggggcaaacctg

SEQ ID NO: 2662 - DNA, 174 bp, Zea mays
  Clone ID: MRT4577_102426C.1
cgtcaccacagaatcaacgcatagctttaccccgatcctctcgccgacaccagcgatgggatcccgctacgatgaggaggtcaccgtcggctccgaccgggacctcaacgaacgtcaactggcgcaacggcgacctacagcactacgccgtggtgtggatcgaatacggcagca

SEQ ID NO: 2663 - DNA, 350 bp, Zea mays
  Clone ID: MRT4577_102427C.1
tcttcctacccgatccaaccgagtcccggcggcgatggcggcggcgaccaacgccgatgtggaggtggtcgatcttaacctcgatgactacgacctcatggactaggacgccgggcctgatccagctaccgacccccgtctttcgtcttcgttccaccatcgcggtcgactacgcgccgcgtatgaccaatggtcgtggttttcgcgtggtccctaactcctctgcgacctgtgattctctctttgttgttgtgttactctcctactctttactttgtttgccttctcttgtacccatccagtaatattgtttgatttatcgtttttatctattttaactttcttttatt

SEQ ID NO: 2664 - DNA, 424 bp, Zea mays
  Clone ID: MRT4577_102428C.1
ttctcgtcctcctgccgctgcactgccgctgctggtaggcgtaggcgtaggcgagcgcccgctcccggcgtgcggcggcgtcgtgccggcgcgcgccctccgccctggcgtcctccagggtgcggctactgctgtcccaggccccggaagggctcctcgcgccgccgttatcgtcgcctcttccaaacctgcctctgctcctgcttctctgctggagcaacagatcggccacctcgccgtcgtcaccgacgtcgtggtcgccctgcaatgccagctcgacgcatagtggacgccccgctcccaacagcagggtgggactgctggctggaggtgtcggcggcgggaggaggaggagcgggtgttgggtgaggcggcgcgcgcggacgcgggcctgggctcggacgagggcctgcatgcagcgcat

SEQ ID NO: 2665 - DNA, 337 bp, Zea mays
  Clone ID: MRT4577_102429C.1
acatggtgacctactgtaaattgttttatggaaatgtgatcaacgagaacaatgtatttgtgtttaaaaaaacccttttataaaggctaaaaaaaaaaaattgctggaaaaaaaaaaaaaggggttgaaaaccttaaaataactgcaaacaaaaaaaaaattatggaaaggtgtccaaaaaaaaacctttaataaaaacagtttaaaaaaaaaccaaactttttccattggaaatttgccaaaaaaattgaacctaatcgtttttgggaaacaccaaaaatttttccaccccccccaaggtttttggggtgttgcccaagaacaaaggggcccaaat

SEQ ID NO: 2666 - DNA, 406 bp, Zea mays
  Clone ID: MRT4577_10242C.1
gtaaagattatcttgtttctttgcttttgtaggaagggggaaaccccttcaggaacgaaaacttttcatgacacagaccctgttaaataagacttgggcgcctgccttaaaggaacctaaacccccgggttaaaaatccgggggaaaaccccataagcgagatatacaggggagacccgaatagggaaggggacccacggttggaacaccaaaaacaccttcggggggggaggacatgaattttcccggggggaaagcccggaggacccccttgcccctgatgggggtcccgcgctgggttcccccaacaaaaggggggggcttgacccccaaggggtacaaaaaagctgccaagaggacctgcaccaattcccctaagggcgggttgcggttttgggggcccaag

SEQ ID NO: 2667 - DNA, 411 bp, Zea mays
  Clone ID: MRT4577_102430C.1
acaagcaaagtaagtgcaaaacttttttttaaagccaggggtttatacatgctataaaatagtcccgggcaatacccccattgactgatgggaatgtctgaccaccaaaaagggaaaatttctacttttacctaaaaaataaaaaagcggggctggcaacattgaccccaattgtctaaacccagttccatttaattatcttgggggctacttcggcataaccaaatttttatcggacaatcaagcgacacagtcccatttttttgtccttctccattaatatccaaactagtaaccttggactcatggcccaccaaatttttgatgggttggaaaccacgacctgaccaaagggctgttttggtgtattagaaaaaagcccctaataaaacccctttttggggttaaaat

SEQ ID NO: 2668 - DNA, 479 bp, Zea mays
  Clone ID: MRT4577_102431C.1
gttggaactttgggctgatttatgtgcttgtttatgtgcttggcgacccgaaacaacccccaacaaacagcctgcgaactttcgtagtgggtacacacacaccttcgttaagacaaaggcaacggagctgctatgtaggccttagttggttgctacttcgtcctcttcgtctaccgcgcttattgacacggtataggtaagggaacgtgagaagcatagcgagtgacccgccggggtacgtacgactgtagataatcgtgttaacgcgcgttgtggcgagggtcctccggttggtaggcgtagtattccttgttgttgtcgtactcgtatcaggtagcgtcaaataagactgtctgactgtctgttacgtactgataattcacctccaacaatgcctaccactctgcctccacccacgatgaacgctacgcacgcctcggcgatcgctacgcacacctcgacgatcgctacgcactccg

SEQ ID NO: 2669 - DNA, 2199 bp, Zea mays
  Clone ID: MRT4577_102432C.1
cctcgaggccggccgggccgggcccgtaacacggcgcaaccctacgtccctacctaccttaccgttctgccctcgtctcgcccgtggagccgcccgcctcctcgcacggcaccgcctaaccctaacccagtccccgacgatcggccgctgcatcagcaggtggaagaggcgctcgacctctcctggtcccctgggccggccggggaaacccaacgggacggcgacatgtcctgctcctctgaattctgatccgtgcggtgcggccgtgcgggtgtccgtctcctccattgcgaagccgcgagctcctgcgtcaaccagatcacacgaaccaaaccagcgcctcctcccccgagcctcaccgccagcgcccatggcgacacgctactggatcgtgtctctgcccgtgcagtcacccggcgccaccgcaagctccctgtggtctcgcctccaggactccatctcccgccactccttcgacactccgctctaccgcttcaacgtcccggatctccgcgtcggcaccctcgactcgcttctcgcgctcagcgacgacctcgtcaagtccaatgttttcgtggagggcgtgtcacacaagatccggaggcagatcgaggacctcgagcgcgccggaggggtcgagagcgggaccctcaccgtcgatggcgttcccgtcgacacctacctcaccaggttcgtgtgggatgagggcaagtaccccacaatgtccccgctcaaggagatcgtcggcagcatccagtcacaggttgccaagatcgaggatgacatgaaggttcgagcagcggaatataataatgtaaggagccagcttagtgcaatcaacagaaagcaaagtgggagcttagcggttcgtgatctttccaatctggtaaaaccggaggatatgatcacctcggaacatcttgtgacacttcttgcaatcgttcccaagtactcccaaaaagactggctgtcaagctatgagacacttgacacatttgtggtacctaggtcatctaaaaagctctatgaagacaatgaatatgctctctacactgtaacactatttgctaaggttgttgacaactttaaggtccgtgctcgcgagaagggttttcagatccgtgatttcgagtacagtcctgaagcacaggaaagccggatgcaggagatggagaagctactgcgagaccaagaagctatgaggaccactcttcttcagtggtgttatgccagctacagcgaggtattcagttcctggatgcacttttgtgctgtgcgtgtctttgtggagagcattcttagatatggtctgccgccatcattcctgtctgctgttcttgcaccatctacaaagagcgagaagaaagtaaggagcatcttagacgagctctctggcgatgcccatagcctgtattggaaatccgaagacgatgtaggcgttgctggtctgggaggcgaaaccgaggcgcacccttacgtctccttcaccataaattttgtctgagacaaagtatggttcctagaccgtctgtggcctagggccctaggcaatataatacttggaagcagctattggaacgcaagcgcggaacgagcatgtatattactctgttgatttatcggttcatgtggtcctgtagttcatatcacagagagatcagccgacggatgctgtaatttctgaggaacctatggaattcctgtagttcacgtggtcctgtaatttctgaggactacctaccctatttcctgcagcactgcaccttgtaaaaagacttaacccgtgtctgtagcagctggctactggatttattacatctacaataaaagtcatttttaatggttgtttcataaaaaaacgaagagcaccaggacccggcatgttcctggccgtctgcggcccaggcaaatttcgagcagaactgccataaattctttgttgatttgtcggttcatgtgctcctgtaattcacatcacagagagaccagccgatcaataatgtagtttctgaggacatgtttccctgcagtattgcaccttgggagcgcattgtaaatggcctggaacagttgtctactggatttgtttatttatttacaataaaagccatgtgaaaataattactcataactaaaatttggattgtcagttgatgaaaaatggaatgtggagctagctaggctctgggtttgtggcgc

SEQ ID NO: 2670 - DNA, 570 bp, Zea mays
  Clone ID: MRT4577_102433C.1
gcacgaggtcataaggagcttgaggcgccgagggggaagggtgcaaagacttcaagaccaaacaacggaggaggatgtcatgcgcttcatcatagatagtagtccaacttctattgccaatgttgatgccccggttgggaatgtccgagatgcataggttgggatgagccctcgccctggacccatgagcccgcccgctttgacaagccctgcctgtggcagtggtagatgcaggaggaggggacccccttctaaagtctggatttactttgaggagatgaccatgatggagcaaggtaaggaggtaagtatctttgccatctaccatcactccaaggagaccttatcagctaaatctagttctgatactaggcatttgctccagccctttgatcattgtcgtgctaagaaagaaaaggagagatctgtcattgtttagttagttcttaagtacaacacaaatggtagtgttatgcgttgggagtactctgttgtatttccacgtacagaactttgtcatttaattgctagattagatctttcactttaaaaaaaaaaaaaaaaaaaaaa

SEQ ID NO: 2671 - DNA, 1609 bp, Zea mays
  Clone ID: MRT4577_102434C.1
tttggggaccctcgggccggccggaaccagatcacacgaaccaaaccaccgcttcctcccccgaccggagaggagcctcaccgccggcgcccatggcgacacgctacttgatcgtgtcgctgcccgtgcagtcgcccggcgccaccgccagctccctgtggtcgcgcctccaggactccatctcccgccactccttcgacaccccgctctaccgcgtaagcgatcccctccgacccgtctccttcacccgccgggatttaatctcgcgtagcctcaccgtccgcgcagttcaacgtcccggatctccgcgtcggcaccctcgactcgctcctcgcgctcagtgacgacctcgtcaagtccaatgtcttcgtggagggcgtgtcacacaagatccggaggcagatcgaggacctcgtgcgcgccggaggggtcgagaccgggaccctcaccgtcgacggcgtccccgtcgacacctacctcactaggttcgtgtgggatgagggcaagtaccccacaatgtcccctctcaaggagatcgtcggcagcatacagtcacaggttgccaagatcgaggatgacatgaaggttcgagcatcagaatataataatgtaaggagccagcttagtgcgatcaacaggaagcaaagtgggagcttagcggttcgtgatctttccaatctggtaaaaccggaggatatgatcacctcggaacatctcgtgacacttcttgcaattgttcccaagtactcccaaaaagactggttgtcaagctatgagaaaattgacacattcgtggtacctaggtcatctaaaaagctctatgaagacaatgaatatgctctctacactgtaacactgtttgctaaggttgttgacaattttaaggtccgtgctcgcgagaagggttttcaggtccgtgattttgagtacagtcctgaagcacaggaaagtcggaagcaggagatggagaagctactgcaagaccaagaagccatgaggaccactcttcttcaatggtgctatgccagctacagcgaggtattcagttcctggatgcacttctgtgctgtgcgtgtctttgtagagagcatccttagatatggtctccctccatcattcctgtctgctgttcttgcaccatctacaaagagcgagaagaaagtaaggagcatcttagaggagctctgcggcaatgcccatagtatttattggaaatccgaagacgacgtaggcgtcgccggtctgggaggtgaaacagaggcgcacccttacgtctccttcaccataaattttgtctgagaccggcatgttcctggccgtctgcggcccaggcaatatttcgagcagaactgccataaattctttgttgatttgtcggttcatgtgctcctgtaattcacatcacagagagaccagccgatcaataatgtagtttctgaggacatgtttccctgcagtattgtaccttgggagcgcattgtaaatggcctggaacagttgtctactggatttgtttatttatttacaataaaagccatgtgaaaataagtaaataagtaactaaaatttggattcgaaaaaaaaaaaaaaaaacccgcggccctcgagc

SEQ ID NO: 2672 - DNA, 576 bp, Zea mays
  Clone ID: MRT4577_102435C.1
aaattcggcacgaggttcctctccaaactcctctccctctcctgctccgcctctgcctccgccgccaactatgccctcctcctcctctcctcccacccggcgcccaccgccttcacctacaatgtcacaatccgcttattcgcctcatcgcgcccggacacctcccttcgcctcttcctcagcatgctccgcgccgaggtccgcgtccgacccgacgcatacaccctccctttcctcctcctcgccgcggcgcgctgcccggcaccggccctcgcccggtccgcccatgctctcctcgagaagatcggtctcggtgaccacgaccacaccgtccactccctcatcaccatgtactcctgccttgatgatcacctcgccgcgcgcagggtgttcgacggaatttcccaccgggatgtcgtctcttggaactcgatggtgaaggcatacgaacgggcagggatggtggccgaggttaagggatgttgcggtcgatggtcaccagggcgcagtggcaccaatggggtactcttgccggttgtgctcacagcttgcagggacgctgcaatttggtcttgg

SEQ ID NO: 2673 - DNA, 294 bp, Zea mays
  Clone ID: MRT4577_102436C.1
tcgaaaaaaaaaaaaacaaccaaaataaaattatttaaaaaacccgtaaaaaaaaaatataaatcaaaataaagaaaaaaaaaacatcccgtgtctaaaatacacttatccaaaattagctcccaccaataaaagactctctctcttatttagcgtaaacaaaaaacatttcaattgccttttttatactgcttcctttattagacaaccattactcttctcatcctacttatcttccattactcttttctgttctgcttaatgataaaagggccgtcctaacaatttttttta

SEQ ID NO: 2674 - DNA, 328 bp, Zea mays
  Clone ID: MRT4577_102437C.1
gccactcgtccgcccacgcgtgcgcccacgcgtccgctcggacgacgaactaataaagcgcgcgcgcgcactcggagaggctcggagagctgaatgagatggcacaggccatggcgtgcatgaccggcctatcgcagggcgttctgtccagcaggcgcgccgccaacagggccaggacggccgacgtcgatagggcgtacggcgaggcgcaggcgcaggcgcaggcgggccggcgagccatgctcggactggtggccactggcatcgtcggcggcgccttgtcgcatgcggtgcacgccgagaccgtcaagaccatcaagatcggagc

SEQ ID NO: 2675 - DNA, 770 bp, Zea mays
  unsure (1)..(770): unsure at all n locations
  Clone ID: MRT4577_102438C.1
ttgggatcctcgaggccggccggggctatcgcctacgacaacgctcccttctcccagactcctgtcaagtggaatcttcccaagctctggggtatgtccgttcttctcggtgttgtcctggctgtcggtacctggatcgctcttacgaccatgctggcgaacagtgaggacggcggaatcgttcagaacttcggtaagatcgatgaggttctcttcctcgagatctctcttactgagaactggctgatcttcatcacccgtgccaacggtcccttctggtcttccatcccctcttggcagctgtctggcgctatcctgatcgtcgatatccttgccaccctcttctgtatcttcggttggttcgttggtggccagactagcattgtcgctgttgtccgtatctggattttctctttcggtgtcttctgtgtcatgggtggtctctactacttcatgcagggcagcaccggcttcgataacctcatgcacggcaagtctcccaagcagaaccagaagcagcgatccctcgagggatttcgttgtctctcttcagcgtgtttcgacccagcacgagaagtctcagtaaacaaagatggtatatacccggagcaccatcgaccggacttttcactttcgctacgtccaaatttgcccttaatactcgcacccgagtactgaaactcatggagtggntgangaatgtttcatacccctagaacggctattagacacttataatacaagtaaaataaataatttgccccccttcc

SEQ ID NO: 2676 - DNA, 376 bp, Zea mays
  Clone ID: MRT4577_102439C.1
tttttttttttttttttttttttttttttttttggttggttttttttttttattttttttttttttttttttttttaacccgattcaaaaaaaaaattttaatacgggaggggggggaactcccgattacataggaaatttaacataaggggtggaaaaaaaaactcttcccccattaaaaaatttccaagttattaccaaaccccaaaaaatcttttaaagggtaaggggtcccccaaaaaatttgagttgcccccaaagtgaaaaacccccatccacaagggaaaccttttatactaagccaaaaaaaaagctttactaagggggaaaaaaaaactttttaactgggggcactaatttaggattttttttcacc

SEQ ID NO: 2677 - DNA, 392 bp, Zea mays
  Clone ID: MRT4577_10243C.1
ataacccacttctggttaccagccaataaactgcggcgccagctccaaaagagacttaggtctctctatccgatgcttttttttcgcacctaggcgaaccctaacctgtgcgttcactgccacaactcagacactgaaaacaactcgacttcataacctctcatcgctatgggagcgtgaatgtcttctacgcggtctattgtatgtacgcaacctacagctaactgaagaggcgggaacactcgcgcacctctgttggccgaccaaagaggggggatggcatctaaaagccggttacggggtacctggagcgggagaacctggaggcggatgtgcagcaccggtactagtaaacgagctataaacgaaaggaacggtggacccaccctggg

SEQ ID NO: 2678 - DNA, 216 bp, Zea mays
  Clone ID: MRT4577_102440C.1
gttatagaagggagccgttccctttacgggcttgcccatatacgggaggggcaaatcaaccaggttatgccgaaagcgctgtatacaataacgaaatctacaagcaaactatacagcgagggctgctatatataatcacaattttaccaccctccctaacaactgaatgctcgaggacgatgccatcggtccattcccctgtgctcatataaagct

SEQ ID NO: 2679 - DNA, 297 bp, Zea mays
  unsure (1)..(297): unsure at all n locations
  Clone ID: MRT4577_102441C.1
atagtacatggtaggtccacattttattccagggaagacgtacttccacgggattatgaggntaaaaccatctaaccaccaaatccagtccattgatggatgaatgataaaggccttacctaactttacttcacagaagatgatgacgacatatgacccagagatcaagatttcgccagccttgggctcataaatagtcacatagaaattgttaagcgacacatactcaacaggctcggattttaattgcacgattataccttcatcacttacctcaagacgttcgactattatcaa

SEQ ID NO: 2680 - DNA, 910 bp, Zea mays
  Clone ID: MRT4577_102442C.1
taattctctctgattatgcaaagaaaaacatgttaatacttctgcactgacacaatctgaaatgcgagatgtcatccttattgcttaattgctccaccatcacattagaggcaacaaattggtgaaattgagaaacaggactcttaatgccatcatgtcggcattctgttatcatcatctcggggtgcctttgacggagatgtggagtcaagagagattatgatccattatgattctaggttattaccaatttcagagataaactcaaacatatcatagaagcaggtcctacctactgttaaagtcaaaaggggaagaagagattgtacaattaagaaagcgtcttgctgattactctatgaaggaatcacaaatactcgatgataaatacaagttaaggattatttttgggctccaagctgcagctaccctctccatccccattctgattccaagaaaagcactggtggccacgaggaggaagggcattgccaactggcacgctaagaagctagctaagcagcacagggtggaccttgccaaggttactagcaccgggacatacgatcgaattacactgacagccgaagtctaagcccgctcctggtggtgttcatgggtattacagtcttgtagaagataagtatgatatacaatgtggctcaagattttaggttttagaattagttttcgagctgtccataccactattttgttggcaaaatgaagccttcaatgaaatagatggctgctcacttctattgttaccgctctcacaaatccaatttctacttgtgtgaatgatcaagcgatgatgctatcgcatatggtgtgacatgagcctacaatttcactgtagttatgaaaattgatcggtcaatgatgaatcatacaagccttttttattttt

SEQ ID NO: 2681 - DNA, 784 bp, Zea mays
  Clone ID: MRT4577_102443C.1
tcaatgatcgaatcacgaagcacattgtctctactcatagacgtcggaggccttatgaaactatgatagactagctacccatgtgaggtgaggtgtgcacagactcagaagtcgagatgcggattaaaaaccagttgacatcacagttgtcaagagagattatgatccattatgattctaggttattaccaatttcagagataaactcaaatatatcatagaagcaggtcctacataggacctactgttaaggtcaaaaggggaagaagagattgtacaattaagaaagcgtcttgctgattactctacaaaggaatcataaatactcgatgataaatacaagttaaggattatttttgggctccaagctgcagctaccctccccatccccattctgattccaagaaaagcaccggtggccacgaggaggaagggcattgccaactggcactaagaagctagctaagcagcacagggtggaccttgccaaggttactagcaccgggacgtatgatcgaattacgccgacaggtattgaggcggctgtcagaatccagccaaagtctaagcccgctcctgggtggtgttcatgggtattacggtcttgtaaaaaataagtatgatatacaatgtggctcaaaattttaggttttaaaattagttttcgagctgttcatacccctattttgttggcaaaataaagcctttaatgaaacggagggctgctcccttctattgtttaaaagaaaaaaaaaagaaaaaaaaggaaaaaagagaaaaagag

SEQ ID NO: 2682 - DNA, 643 bp, Zea mays
  unsure (1)..(643): unsure at all n locations
  Clone ID: MRT4577_102444C.1
atgtccaaaatttcctacgttttattggctgaattaaaagaaaaaccccagaaaaatgttatatcacctcacttggtaaacaaaagaatggcttggctttttctcacctctgcacaacctttccggtcaaaatccaaaacattgtaacttcatttcgaggctatcacaagcctcagtttcccatgactgtgaatgaaactacctttatattgtccctatgaaacagcaaatatcagagatgtgtgtgtgagtttgcatttcatcgaattagctcaatctttggagagtgtttcaagctacagactttggaccttcgctgtctctgataactctgctatagccaagcttgaacggttgagaatcataaggccggttaagcaaactgattggcattctncagtgtttgtttccctgtttctcctccctcttaacanaaatgctgaaagttttctcaccttcctcagatttccggtttccattctccgtttcactgcgtgcaactgcgttgttcacatggttaacagaatccataacttcatcggcgactgccacatcttgcgtgccttcttttggtttcttctaccacctgaagtgtcaatatccgttggcagaatcacagttggctctaacacagttgcagcta

SEQ ID NO: 2683 - DNA, 186 bp, Zea mays
  Clone ID: MRT4577_102445C.1
tccacgcactcgtcgcccgaccctttggatgaccttgaccttacccacgatgaaacttgggacgagaacaacgccgctgataaccagtgccgccgcttactacgccttttctcaaacgaaataaagtggtacaacctccttccttattgatctcaaaccatcttacaattatactgatatcaagaa

SEQ ID NO: 2684 - DNA, 169 bp, Zea mays
  Clone ID: MRT4577_102446C.1
gaatggaaactaacttatttctttggtggtcataacaatacaaaactgggcctggcaggcactcttcacaaaggagaagccattccttttttttggtacttatattaaccaaagaatgcgcaccagtggtaaacggagtgttcccttgtgtgtgcgcttctgtgaaaaa

SEQ ID NO: 2685 - DNA, 394 bp, Zea mays
  Clone ID: MRT4577_102447C.1
attcggctcgagcacacattgccctccttttgtttccaccccgtccattgacctttgagaggcggagttatgaatatcgaccgggccataacgaaccatactccatctattggcttcctgatgggggacacctgaccctcatagatcccgatgagttgggggcgcttctcccagacacaaggactgtcgggggcggaaccggaggggggttgcttatcaaaggctgacacctaaggcgtcgaaggattatgggcctcatttattaccatggctctctgccagctgatgtgccgtacatacatccgaatacctatgtaaatatgggaccgggacaaatgctcctttccacaggatgctgcctggagcctgacccacaagcaactggtacgcaatc

SEQ ID NO: 2686 - DNA, 466 bp, Zea mays
  unsure (1)..(466): unsure at all n locations
  Clone ID: MRT4577_102448C.1
aatantttagaacaacagaacatttataatagtggcatagaaactaccacataatagctatgctgcagagcgaacctacaaatgtaaacagaggactggttggtacagctgatcaaattacatagggatacggcagtggcatgcttagaagataggagctcatgaacgggcagattacagcgtgacagtgatgaccataactagcagccaaaacactctgcaccagactgtaaaagatgagcataaactagcagctctacaattcctctccagaggtaccaggccgaagaacaagatccatgacaacgtcacacaagaacattggattgaatctgccggatcttgtacaccagggacagatccttcagtgatcgaatagcgacacggagtgggcatcagaaactacagttgtacagtctttggccttcaggaatccggagaaagaacacatatgtgtacagaacta

SEQ ID NO: 2687 - DNA, 226 bp, Zea mays
  Clone ID: MRT4577_102449C.1
atcgcgcataatttctcgtaaaaaatcctgctccccagcatacctgctcccaatcttcccggacctatcgctgcattttctcccccttctactcttccttattcagccaatcctatctttgactcatacaatgtactaacactttaaattattattaatctactgaaatgcttcataaattttacatgccaacttctctttaatgtttattattataaaattcttt

SEQ ID NO: 2688 - DNA, 847 bp, Zea mays
  Clone ID: MRT4577_10244C.1
gccggccgggctgccagtttaccttctccagtcctctctgctggactctcggcagattccgctccagcgcccaccgtcgcccaccgtcgcctttcaaaaagctagagggttcctcgagagggagaagcgtacccggcagctccgctccgtcagtccgtccgcccccaagaatgtcagacgaggccaggcgcgggcccgcgggcgccgcgcaggtggtgcttcgggcctcctccgaggaccgcaagccggtgggctcggggtctccgccgccggcagcgaccgcgactgcggttgcgcacaagatccagctcaagagtgccgacatgaaggaggagatgcggcaggaggccttcgaaattgctcgcatcgcattcgagaagcacagtatggagaaggacatcgcggagtacataaagaaggagttcgacaagaaccacggcccaacctggcactgcatcgtcggccgcaacttcggtcgtgtcaggcatatgttaacaatttgagaccagcaaaattctgcctgctatgtcatgtcacatgtatttgtgttcttctataggcaatagatgagagctaagatccatagagcgacagccatggttcctacgtgacgcacgagacaaactactttgtatatttctacatcgactctaaagctgtcttgctattcaagtctgggtgattgtcgcagccaatagagtcaaccttgcatgcctacatcttctttctctcgtgtatgctccatcccctcccctttcccctcagagtcgtctgcagccaagcctggaagcccggtatcttatgagcctgcatgttgatgtatcagcaacggattattcttcgcatg

SEQ ID NO: 2689 - DNA, 288 bp, Zea mays
  Clone ID: MRT4577_102450C.1
gccttcccattcaaaagtttttatcttttgggcggaatcaaatggggtgggggcctcttcactcaagaaggggaatttttactatgaggaccaaacaatagggacaggtgaacgcatatctaatggcaaccaattaacgcatctataggaaattaaagtctcaatcgaaactctttctctaatgaaaccttataccatataggaaccctgctccaacaaccactataatatttttcacaggacgaatcttactaccgttatcacaccagcttatacacaaatactata

SEQ ID NO: 2690 - DNA, 260 bp, Zea mays
  Clone ID: MRT4577_102451C.1
cttaattcttctccagatgccagaccggacatcacacaggtgtggttccgtattaatgagttacttccattggagctgcaaaaggatttacctgatggatctccatctggatcagcatttgaatctcacactgccactgatgaagtatcaatgaggccacagcagatgagtggctcttcatcaagagagatacagatactcctatgatctcacatatgtcaaccctgaactaaggacatggtcatgggatttgcaccaca

SEQ ID NO: 2691 - DNA, 546 bp, Zea mays
  unsure (1)..(546): unsure at all n locations
  Clone ID: MRT4577_102452C.1
ccggccgggacacagacacaacacacacanntccgtgaaagaaacaagcacatagaaacaaatacatcgctagctcgccaccaacaatggcctcaagatcaaggagcatggcggcgacgattctcctttacactcaaggagggcccagctggcacttggacgctcgacaccaaggccccgctcaagtaccccctctgcatccgctttgctaccaagtctggcggctaccgtatcgccgatgatgtcatccccgccgatttcaaggctggcaccacctacaagaccactctcagcatctaatcagcctctgataagtgatgacgaataatatttcgaaagagctcatctagtccacgtgccaacgagccaatatttaaattttttctatggttattttgtggcacaacaccatctcttcctgtgccttgttgtgttggttgattttattacatgaattgaaatacactgcttatttaagattcttttgggcgaaatatattgttccggtctattttcgataaaaaaaaaaaaaaaaaatttgcggcc

SEQ ID NO: 2692 - DNA, 324 bp, Zea mays
  Clone ID: MRT4577_102453C.1
atcgacaaatccacgatcgaggggtgtttaatttcacagggaaagcttaccacagggacgcagcagcatcagagtgacaggctaaacaccagatgaagagcaacagtgatagcacaaccccacatgtgcgacaaccgcacacgtgccggtggatcagcgccactaatacacctcctctaggctcatgactgtctttcggcgcggcgtgctggcactgctggtactcagacacacagtcacatatgtcgatctatgactcattgaactccatctcgtgcatgccctacatggtgtaccattacaagaaggccgtgcgcctgaaca

SEQ ID NO: 2693 - DNA, 578 bp, Zea mays
  unsure (1)..(578): unsure at all n locations
  Clone ID: MRT4577_102454C.1
tgcaggntacggccccctcaggccaaggccaatcttagaacaccatcgtctctgaacaccgtgaggccggggcgcgtgcttcgactggcgatcgagtggaacttgtggagtgctggctacgcggctccaggagattctgctagctgcctcaagccagctgcaagcagcaaatactcctatatagcagcatatcatgtgttaatggtaagattactcgaacttgattgtacgttcaacgagcattggcttcctgtggctcgtcagaaagacgcgtacgtggtgtgaccatgggcccatgcatgaagatgccgttacatgttcaaagctgaagcaggagagcgagtcacctaagctgtctgaaactggctgcagaaagcaacggctggttgattcttgccataaagaagaaccttaagagatatgctagttatacgtaaagcacataagcaggttgggaccaggactggccgggccagttcatcaccgactcaaagtactgtgtgtgatgagtttggagctagcaggcggatcggatccacagccaggcggcatctggttcttcgtcaaactgaaaccaa

SEQ ID NO: 2694 - DNA, 800 bp, Zea mays
  Clone ID: MRT4577_102455C.1
cggattatcggcacgaccacgcgtgcgcccacgcgtccggaaacaagcacatagaaacaaatacatcgctagctcgccaccaacaatggcctcaaggtactctatcctgcttgccacaacggcactggctatgttgttcgcattcggttcgtgcaccaccccactcaccttccaggtcggcaagggctccaagcctggccacctggttctcacccctaacattgccaccatctctgacgtggagatcaaggagcatggcggcgacgatttctcctttacactcaaggagggcccagctggcacttggacgctcgacaccaaggccccgctcaagtaccccctctgcatccgctttgctaccaagtctggcggctaccgtatcgccgatgatgtcatccccgccgatttcaaggccggcaccacctacaagaccactctcagcatctgatgagcctgtgatgagtgatgacgaataatatttccagtccacgtgtcaacgagccaatatttaatttttttcctatgtttattttgtggcacaacaccatctcttcatgtgccttgttgtgttggattgattttattacatgaattgaaatacactgtttatttaagattcttttgggtgaaatatattgttccggtctattttcattattgagatggttgtacatttgattttccaacgttttgatacttataaaatgctttgtttttgttgtttctatgttcggatcaataaagttcgttttatcgattttaacatgtaatgaatcatgtaccactgtttatgctagttt

SEQ ID NO: 2695 - DNA, 165 bp, Zea mays
  Clone ID: MRT4577_102456C.1
gttgggggcatcaagatcctattattccattcaaaataggtaaaccccaaagcctgggataaaattagaagccagggggggggtgcccttatttttttttacacggagaattccttccttcaccatagaaacaggggccgacaaagccaaagggagagagataac

SEQ ID NO: 2696 - DNA, 787 bp, Zea mays
  Clone ID: MRT4577_102457C.1
ggcgattgggttcctcgaggccggccgggcccacacagacacaacacacacatccgtgaaagaaacaagcacatagaaacaaatacatcgctagctcgccaccaacaatggcctcaaggtactctatcctgcttgccacaacggcactggctatgttgttcgcattcggttcgtgcaccaccccactcaccttccaggtcggcaagggctccaagcctggccacctggttctcacccctaacattgccaccatctctgacgtggagatcaaggagcatggcggcgacgatttctcctttacactcaaggagggcccagctggcacttggacgctcgacaccaaggccccgctcaagtaccccctctgcatccgctttgctaccaagtctggcggctaccgtatcgccgatgatgtcatccccgccgatttcaaggctggcaccacctacaagaccactctcagcatctaatcagcctctgataagtgatgacgaataatatttcgaaagagctcatctggcgcacgtgttagcaagacaatttttttctttggttattttatggcaccaaaccacccaagaaataagttatgctacatgtccatatgatgccttgttgtgttgggttgatatttttacataaactaaatacattatttatttaagatctttggagaaatttgttgatctggtctagctttattattgagatggttgtacatttgattttccaatgttttaatacttatggaatgctttgtttgtgttgtttctaaaaaaaaaaaaaa

SEQ ID NO: 2697 - DNA, 795 bp, Zea mays
  Clone ID: MRT4577_102458C.1
gactcctaagggcgattgggttcctcgaggccggccgggctccccacacagacacaacacacacatccgtgaaagaaacaagcacatagaaacaaatacatcgctagctcgccaccaacaatggcctcaaggtactctatcctgcttgccacaacggcactggctatgttgttcgcattcggttcgtgcaccaccccactcaccttccaggtcggcaagggctccaagcctggccacctggttctcacccctaacattgccaccatctctgacgtggagatcaaggagcatggcggcgacgatttctcctttacactcaaggagggcccagctggcacttggacgctcgacaccaaggccccgctcaagtaccccctctgcatccgctttgctaccaagtctggcggctacccgtatcgccgatgatgtcatccccgccgatttcaaggctggcaccacctacaagaccactctcagcatctaatcagcctctgataagtgatgacgaataatatttcgaaagagctcatctagtccacgtgccaacgagccaatatttaaattttttctatggttattttgtggcacaacaccatctcttcctgtgccttgttgtgttggttgattttattacatgaattgaaatacactgcttatttaagattcttttgggtgaaatatattgttccggtctattttcgttattgagatggttgtacatttgattttccaacgttttgatacttataaaatgctttttttgttgttccaaaaaaaaaaaaaaaaaaagcggcc

SEQ ID NO: 2698 - DNA, 422 bp, Zea mays
  Clone ID: MRT4577_102459C.1
ttttctacaggtgcgacgccatttcgagaaccttgttattgattgggtggagaaacaccaatgcacccgtggggaacagcgaataatgctaataagactctactgcggtaccctggagcaacacacaatacatgatggaatgcgggctccaatgcaaagtcgagcctgagctactatgagtgctccaagggacaatcagggaagatggaagtgctgctacttggggtagcagaccatcttaccatccaggaacccgacaagctgggccatatgaagcgcccacacctggatcggggtgtgcaaatactgcaagaggtagtctcaatgacgctcctactaccagggataactatgcatatgcccgaagcccatacgtgccttccacacctgttggtgaaccaatgacgccaaactcaggctcg

SEQ ID NO: 2699 - DNA, 384 bp, Zea mays
  Clone ID: MRT4577_10245C.1
tgtcagggtaggtaacaacgcagagtacgcggtctaaagctgtcttgctattcaagtctgggtgattggcgcagccgaggcaatcaaccttgcatgcgtacgttccattgctcccatgtatgcaccgcacccttcccccagggtcgtctgcagccaagctggaagccgataatcttaatgagcctgcatgttgatgtatatcagcaacggattattcttcgtatgcccactagtgtgagatcagattgcatcttacttatgtctgatatatctagctaggttaggtgttgtgagtacattgtcttgttgcaatatgattgccggacaactggacgaactgcctctcgtctgtttgtgattatctcaatagaagcgtccttgctc

SEQ ID NO: 2700 - DNA, 567 bp, Zea mays
  Clone ID: MRT4577_102460C.1
gggccgggctactgcagcatttacgacaatgacctatcgcgccgtcaccaagatgcttcaagggccgcatacaggagccgcaacaagcttgcatccaagcaacgtcaattacatacaccgtgtaaactgcacgaagtgctccctcaaggacagggccatcaataagattacagataagaacatctcgaaacaggcgcccatattgcacgatcagtaagcatagcagataatgaagattacgatcgacataaactgcactccatggtgcaccactgaaaaaaaagcggcgatccacgctcacatagctccagttcgagccccctagaagcacagggaccggaagccttcggagcgctataggcacagggaggatctgcctgaaagtggacaaggatgacaatgccctaatcctgctgctgctgatacataatgcagtatacagcaccggtggctgatgagccatatgctttacactaactgccgtgtgatgactgctggctactcagtctcggaacctgtcccgccacgtgtgtgaatgaattatacaacactcagttagaggctaaa

SEQ ID NO: 2701 - DNA, 281 bp, Zea mays
  Clone ID: MRT4577_102461C.1
gagctgatggccgcgctaatgtatataaacgttgattagctggaacgagcgcgggtgcgaaacgacacaatcgaacaagtcgcgctcagacgaacaaggccgaagccttcgggttatctggggggggagggggaggccgtctcctcggcccttggagggggggaacactctggaagggctggcgctgccgggaatgacctgttctgcggaaagccttagctctgctgtggatggaacgctaccccgcgttaacggagaagaacaggctggagtaagccaac

SEQ ID NO: 2702 - DNA, 264 bp, Zea mays
  Clone ID: MRT4577_102462C.1
agtacagactagctagagtttcctgcatccgcctccgcccaccaccgactccacctccgccccccaccggcccggcccacagcaggaaggacggaagccccgggcacccccaacaccgccacgacggaatccgccagaaagcgagccccacgcaccccaccgcagaagcagcagcaaccccccgaggaaggagacgacaaggagaaaccaacacatgagagaatgagagagccgaacaccgcagcagggggcataaacggcaag

SEQ ID NO: 2703 - DNA, 331 bp, Zea mays
  unsure (1)..(331): unsure at all n locations
  Clone ID: MRT4577_102463C.1
tcctgcttctcccgttcacctcctctctctgtgcggggacgctgggggaccgactgggctaccgccgccgccgccgccgccatccgccagtcgtcaggtgcccaggtcttcacccccaggcaccagtatcccttgcacacgctccttgtattcgactcaaggcancacgctcttccagttggggggggggggaactttttctttttactaagaagacacattgaaatggatgagcacacttactgatcnaataccattctatagattccacatggggaaattggtggttttattattgatgaaccccgggcttcagagctgggtccaatca

SEQ ID NO: 2704 - DNA, 153 bp, Zea mays
  unsure (1)..(153): unsure at all n locations
  Clone ID: MRT4577_102464C.1
gtgcctccatnaaggcccctgtcccttgctagttcagagttgggtgcgaccatgggtaatgagtactcccacatcaacattgtggttattggtcatgttttctttgtcaagccttcctcctcatgacaccttttctacaatctagctggcttt

SEQ ID NO: 2705 - DNA, 334 bp, Zea mays
  Clone ID: MRT4577_102465C.1
tagcagtttgatgccataagatgtactgggaaatagtacaattctgaggacaaacagaacaactacttttaatctcaaaaagacgatggccgtggcacagaacagtcgtaatttccttgggatgaaaaatctggttactactatgattctgcatctggattttattatgacggaccaactggcctttactatgacagcaactctggagtatgtgattcgtacgatcaacaaactcaacaatgtacaccttgtactgaccagagcaatactaatgcatggcagacagacgttcagtgaaaacatgatctcatatagtatttgtgggaaaaaggtt

SEQ ID NO: 2706 - DNA, 1759 bp, Zea mays
  Clone ID: MRT4577_102466C.1
tttttttttttttttttttttttttaacttagcatataatacacgcaataatgttttgaagtcgtacaacttgctagtcattctagctaaccgatttgtacgattaatcatgattaatcaccattagtcggatgactttgacgattaatcatgattggtccaaatcgacttgaacgattaatcatgattatcacgattaataagacaatttgaaaacagtgacaatatcgagcagttagtttgacaaaccatgctatcatgtttcacttgcactcagcattggctacttactaattatctacttactcaaataatactacaaatgcatctagcacaaaaaatgctacatttaaatacatttccatttgttccaaacataggtgcagcacatgcaactgaaacccagcagcgtcaatgcatccttatcacgaggtggggttatagcgaaggtgttgctcatagtaatcaataagcaccaggggctccttagctttcaactgcttatcgtccacgaataccatttccccgtcagacctgagagccttgaatgttattgcaacttgctgcacaccatccataactgtggcaaaatagcgcactggcttaatgatcttaatgatcttaggcatatgaatttggttaccagagtcctcccctttgttcttatcaccaggatctccttctgtggaatcaacagtctcgttgcctggcttgtcacttgttcgatcacggatatctccttgctcctgtgttacttcatcctgcttgaaccttcttacacatccagacttgcgcttcttagcacctgtcacctgtccaccctgaggtgtgattgctcgtatttcattgtccatcttcaatgaaccattagcagggtgctgcacatcttgttgatcagtcaagctaacagataagggagcctcttgagatggaaacccagctgagaccacaccagaactaccctcctgtactattctttgcccaagcaagttcactgctgcgccaaggcccccaggtgaggtcttgttactattattatttgctctcctactacttgtcctgcagggcagtttcttcacttctgaggcatgtatgctatgcatgctccgggcctccgaccgaggtggtcgaccacgtttgccacgagaagcgttaggatcggatgttggagttgttggagtcttgcgctttcgctttccacaggatctgggcgaccttgaccgcttattgaaagcatcaacaatgtcagaacaggccttcaggttttcaaggggttcccatgtgttagcactctctggccacccacgccacttgacgaggtactggagctgacccttgcggaggcggcggcggcggatggcctcgatctcgaagtagccctcagccagcttcggcggctccacagcttcctgcgccggtgtctccgcttcaacttcgtcctcctcaccacatccctcctccgtctgttcctcctcttcctcgtcgccctcctcagtcagttcctccgcctcatcctcctcccctagagccgccgtcggatagccggaatccttcctgttccgccgcatggcgaatcttgtttcactcgacggcccaccacacgttagctcgtgttatccaaatcaagggcggatcttgtacagattttgctgatgagatctggtttttggagccgccttttctcggagggattcggaaggaacaaggctcgttcaccccaggggcgccccaggctagcagcaccgaattccgagttatt

SEQ ID NO: 2707 - DNA, 2261 bp, Zea mays
  Clone ID: MRT4577_102467C.1
acgggccggaagccgacgcagactgaccccaacagcgagagcaggctgacgctgaccgacggcgacgtctacgtgccgcgcgacgagcggttcggccacatcaagaactccgacttctacggctacaccatcaaggcgttcgtcgacggcctggtgcccatcctggaaggctacctcctcggcatcgagttcaactccttcaaggacatcctgcagctgtacgagggcgggatcaagctgcccgacatccccgccctcgaggagttccgcaagcagttcccgctacagatggtcaaggacctcatgcccgccggcggcgactacgtcctcaagctccccatgcccaaaatcatcaaagaggacaagaaagcttggatgagtgacgaggagttcgcaagggagaccctcgccggcgtgaaccccttgatcatcaggcgtctcacggagttccctccgaaaagcacccttgatccgagcaagtacggcgaccagacgagcaccatcacggaggcgcacatcgcggggagcctggagggcctcaccgtgcagcaggcgctggacagcaaccggctctacatcctggaccaccacgaccactacatgccgttcctgatcgaggtcaacagcctgaacgacaacttcatctacgccaccaggacgctcctgttcctgcgcggcgacggcacgctcgcgccggtggccatcgagatgagcctccccgagctccgggacggcatcacggccgcgaagagcacggtgtacacgccggtgccgccgacggccggcgcggaggcgtgggtgtggcgcctggccaaggcctacgtgaacgtgaacgactactgctggcaccagggcatcagccactggctcaacacgcacgcggtgatggagccgttcgtgatcgccaccaacaggcagctcagcgtgacgcaccccgtgcacaggctgctgctgccgcactaccgcgacaccatgaacatcaacgccctcgcgcgccagaagctcatcaacgccggcggcatcttcgagatgaccgtcttcccgcgcaagtacgccatcgagatctcctccaaagtctacggcagctggaacttcaccgagcaggccctccccgacgacctcatcaagcgaggcatggccgttccagatccgtcgagcccctacaaggtgcggctgctgatcgaggactacccgtacgcctcggacgggctggccgtgtggcacgccatcgagcagtgggtgacggagtacctggccatctactaccccaacgacggcgtgctgcaggccgacgtggagctgcaggcgtggtggaaggaggcgcgcgaggtcgggcacgccgacctcaaggacgagcactggtggcccaagatgcagacggtgccggagctcgtgaaggcctgcaccaccatcatctggatcgcgtcggcgctacacgccgccgtcaacttcgggcagtacccgtactgcgggtaccacccgaaccggccgtccgtgagccggcggcccatgccggtgccgggctccgacgcgtacaaggagctggagaagaacccggagaagttcttcgtgcgctccatcaccgcccagttccaggccgtcgtcggcatctcgctgctggagatcctgtccagccactcctccgacgaggtgtacctcggccagcgcgacaccaaggagtggacgtcggacgccaaggcgcaggaggcgttcaagcggttcggcgcgcggctgaccgagatcgagaaacgcgtggaggccatgaacaaggacccgcgcttcaagaaccgctacagcgcggcccagttcccctacaccctgctcttccccaacacctccgacaagggcgacaacaccggcgtcaccgccaagggcatccccaacagcatttccatctgattcgatcgagtcctggccagcgtttcacccaaaaaagcagagctagcggtgattcccgtatgtcatccgtttcattttttacatgaatgagaagcgtggtaataaaaggtttgtagttgcgtgcgcgccgtgtattccttggtgtactggtgctggcggtaagccggtaaccacttattaccagggatccttgtaatttttcctgttggtttcccaataatgatgtgaatatattggtcacatgcatggtgtttccaaggaattttttggctaattacttttttatgttttgaactagtcagttgccggtgttatattacagttgttatatattatataaatagatattgagatatttattc

SEQ ID NO: 2708 - DNA, 267 bp, Zea mays
  Clone ID: MRT4577_102468C.1
aaaggattctggccatcaacagaatgggaaggcaatatctaacccagacgaacacgcgcactcctgcgacgagaatgataatacccttgtggcacctaaatttataccactgaacatgaattcacaacttcgtgacagatgaatccctgccgttgccgagagtaatttcctctcttgacatacccattatgactatatgtacattcgtgaaaactatgcattgtaataactctatcctcagaaaataaagactatttgtcctatttt

SEQ ID NO: 2709 - DNA, 682 bp, Zea mays
  unsure (1)..(682): unsure at all n locations
  Clone ID: MRT4577_102469C.1
aactcccgagagcacacagagtagacccaatggccaatggcgatggcaatggaatcacgggagccccgcacatcgctgcactgccatgggacgcccgttgaaaaccccaaggagctggagctgatgaagtagccggcgatcccagcccgacctcgatcctgtgtttgaactttgaaccacaccactcgatcgtcgtcatcttcgctcgctcgtcggccaacaagcaacatgtcgtcgtcggtggtgtcgtcggaggagatggcggccgtgaagacgtcgtcgaacggggtgtggcagggcgacgacccgctgcacttcgcgttcccgctgctgatcctgcaggcgctgctgatcctggtgctgagccggatgctggcgttcctgctccgtccactgcgtcagcccaaggtgatcgcggagatcgtggcggggatcctgctgggcccctcggcgctgggccgcaacaaggcgtacctccgcgcgctgttcccgccgtggagcgcgccagtgctggagtccgtggccagcctcggcctcctcttcttcctgatcctggtggggctggagctggacctccggtccgtgcgccgcagcgggcggcgcgccttcgccatcgcggcggacggcatctcgctcccgatcncgtgcggcgagaacatgtgcttcgtgctccgcgccgccg

SEQ ID NO: 2710 - DNA, 961 bp, Zea mays
  unsure (1)..(961): unsure at all n locations
  Clone ID: MRT4577_10246C.1
tcgagccggccgggacggccatcccgaccaccacggcacgacgctgtttaccttctccagtcctctctgctggactctcggcagattccgctccagcgcccaccgtcgcccaccgtcgcctttcaaaaagctagagggttcctcgagagggagaagcgtacccggcagctccgctccgtcagtccgtccgcccccaagaatgtcagacgaggccaggcgcgggcccgcgggcgccgcgcaggtggtgcttcgggcctcctccgaggaccgcaagccggtgggctcggggtctccgccgccggcagcgaccgcgactgcggttgcgcacaagatccagctcaagagtgccgacatgaaggaggagatgcggcaggaggccttcgaaattgctcgcatcgcattcgagaagcacagtatggagaaggacatcgcggagtacataaagaaggagttcgacaagaaccacggcccaacctggcactgcatcgtcggccgcaacttcggttcttacgtgacgcacgagacaaactactttgtatatttctacatcgactctaaagctgtcttgctattcaagtctgggtgattgtcgcagccaatacagtcaaccttgcatgcctacatcttctttctctcatgtatgctccatcccctcccctttcccctcagagtcgtctgcagccaagcctggaagccggtaatcttatgagcctgcatgttgatgtatcagcaacggattattcttcgcatgccatagtgtgagatcaggttgcatcttatttatgtctgatatatcaaaaaaaaaaaaaaaaaagcggcccctaccgggcgngagagagccaggaagaggagggncgacgatgggccgtccggctggggcatcaacgggaacaagggccgctgctacgactttctggctggaagtcagcgagtgcatgagccgctgccgccagcccctcga

SEQ ID NO: 2711 - DNA, 253 bp, Zea mays
  Clone ID: MRT4577_102470C.1
tcgaaggattgcactgatgcttggtgcgccgcctcttccatggcaaccctcaaccctctggaactggcgggcgaacacatcctcgacgaccggcagctgccgattgcgacggtggcgggtgtcactgaatccgccgcgggcaactagcaccccgtagcccctgtttgctggtctggcacacacgcagggacgactcttgtgcgcacgtagcatgctccgcggttcatacggtcagattgcgaacggatgcagg

SEQ ID NO: 2712 - DNA, 2561 bp, Zea mays
  unsure (1)..(2561): unsure at all n locations
  Clone ID: MRT4577_102471C.1
caggcgctggcgagctccgacacggctgcatcttgggccaccagggcgcgtccttgtggtcgcggtgcccgacctngcgcacctccttccaccacgcctgcagctcctcgtcgccccgcagcgcgccgtcgtcggggtagtagatggccaggtactcgcccacccactgctcgatggcgtgccagatggccagcccgtcgctcgcgtacgggtagtcctcgatcagcagccgcaccttgtacgggctggacgggtccgccaccgccacgcccctcttgacgaggtcggcggggaggccctgctcggtgaagttccagctcttgtacaccacggaggacatgcccagcgcgtacttgcccgggaagacggtcatctcgaagatgccgccgccgttgatgagcgtctgccgcgccagcgcgttgatggtcatggtgtcgcggaagtgcgagctcaggagcttgtgcaccgggtgcgtcacgctcagctgccggttcgtcgcgatcacgaacggctccatcaccgcgtgggtgttcagccagtggctgacgagttggtgccagccagagtcgttgacggcgacataggccttggcgagctgccacacccaggcctcgacgccgctggacgcccggacgcgtgggcggacgcgtgggcggacgcgtgggcggacgcgtgggcggcgacggcacgctcgcgccggtggccatcgagatgagcctccccgagctccgggacggcatcacggccgcgaagagcacggtgtacacgccggtgccgccgacggccggcgcggaggcgtgggtgtggcgcctggccaaggcctacgtgaacgtgaacgactactgctggcaccagggcatcagccactggctcaacacgcatgcggtgatggagccgttcgtgatcgccaccaaccggcagctcagcgtgacgcaccccgtgcacaggctgctgctgccgcactaccgcgacaccatgaacatcaacgccctcgcgcgccagaagctcatcaacgccggcggcatcttcgagatgaccgtattcccgcgcaagtacgccatcgagatctcctccaaagtctacggcagctggaacttcaccgagcaggccctccccgacgacctcatcaagcgaggcatggccgttccagatccgtcgagcccctacaaggtgcggctgctgatcgaggactacccgtacgcctcggacgggctggccgtgtggcacgccatcgagcagtgggtgacggagtacctggccatctactaccccaacgacggcgtgctgcaggccgacgtggagctgcaggcgtggtggaaggaggcgcgcgaggtcgggcatgccgacctcaaggacgagcactggtggcccaagatgcagacggtgccggagctcgtgaaggcctgcaccaccatcatctggatcgcgtcggcgctacacgccgccgtcaacttcgggcagtacccgtactgcgggtaccacccgaaccggccgtccgtgagccggcggcccatgccggtgccgggctccgacgcgtacaaggagctggagaagaacccggagaagttcttcgtgcgctccatcaccgcccagttccaggccgtcgtcggcatctcgctgctggagatcctgtccagccactcctccgacgaggtgtacctcggccagcgcgacaccaaggagtggacgtcggacgccaaggcgcaggaggcgttcaagcggttcggcgcgcggctgaccgagatcgagaaacgcgtggaggccatgaacaaggacccgcgcttcaagaaccgctacagcgcggcccagttcccctacaccctgctcttccccaacacctccgacaagggcgacaacaccggcgtcaccgccaagggcatccccaacagcatttccatctgattcgatcgagtcctggccagcgtttcacccaaaaaagcagagctagcggtgattcccgtatgtcatccgtttcattttttacatgaatgagaagcgtggtaataaaaggtttgtagttacgtgcgcgccgtgtattccttggtgtactggtgctggcggtaaccacttattaccagggatccttgtaatttttcctgttggtttcccaataatgatgtgaatatattggtcacatgcatggtgtttccaaggattttttagctaaaaaaaaaaaaaaaaaaaaaaaaaaaaaaaaaaaaaaaaaaaaaaaaaaaaaaaaaaaaaaaaaaaaaaaaaaaaaaaaaaaaaaaaaaaaaaaaaaaaaaaaaaaaaaaaaaaaagggggggcgcgttttaaaaaaaccaaattttacttccccgggcttgcaaagtaaaattttttttatagggcccccaaaataaaattaatgggccgggttttaaaaacgggggaaggggaaaaaccttggggtacccaaattaaatcgctttgaaaaaaatccccttttcccaagtgggggaaaaacaaaaaaggccccccccaatcccctttccaaaaatttgcccaccctaaagggaaaagggaacccccctttaacgggcccttaaaccgggggggg

SEQ ID NO: 2713 - DNA, 442 bp, Zea mays
  unsure (1)..(442): unsure at all n locations
  Clone ID: MRT4577_102472C.1
ccggaaactcaggncagaaaaacatggtgacagcccttttcagtttcgaccctaaccaaaacacgggcatggtggtgcanaaatgtaggataggtgccacttctcatttacagcctgttcgtaaaaacttcccaacatatcttggcaggccctggaaggagtactcgaggactgtggtaatgcaatcaacaatcagtgacgtgattcaacctgctggttggcacgagtggagcgggagtttcgccctgaaaacactgttttatgccgagtaccagaacaccggggctggtgcctcaacttctgcgagagtgaaatggggagggtacaaggtgatcactagtgcaagtgaatctcatgcttttactcctggcaggttcattgctggaggaagttggttaagctctacaagctttcctttcgcttttgggttgtaataatttta

SEQ ID NO: 2714 - DNA, 333 bp, Zea mays
  Clone ID: MRT4577_102473C.1
actaggtctagatcgcaagggccttcctctttttcaccacatccttcttctgcaccgtgttccagcgaatttagaacacggcgctttattactacgaccgcataacaccaaactcgttattgacaaaactttcccacaccgccaaccatagcaccccatcaaccaggccctcatatacaacgacctcaacttcattaaaactaccaccctactcgcacttgcaactaacaatggtcttaccgtcatagataatacacgaacgctcgccctgggtaaccaggacaacccctgttaaaaagccgatgcccttaagaacttttttgccaggaccga

SEQ ID NO: 2715 - DNA, 415 bp, Zea mays
  Clone ID: MRT4577_102474C.1
ggaccaacaaaaatttatttttattcttgcaaaacacaacagtaccccccccccaagagtttatttttttggtccttaaacacgagcaatacaggcccaatttaaaagttcaaaagcccaggcattttaagtttttacaaactacccattggagtccccctggggatccatacaagcttattaaaactggcaaaactttgggcccccaaaatttgcattaacggtcactgaaatgtcaacagggggccccagctgagcccaaacttttatggccccgtggacagggtcaaacattaaattgctgataaggccttggttgaacggggcttttttgtcaacagacacaaacccctgtggggtcaaaatgaaatcaaaggggggggcccacttcctaaatcccaaacgagcagttggg

SEQ ID NO: 2716 - DNA, 386 bp, Zea mays
  Clone ID: MRT4577_102475C.1
gttgtatatcatgttgggaccaaagtcctcttaaccaaaatgaaccataaagtttaagaagatgtttaacagtcattacatactcttttgtgtgctttcattttctgttgaatcctctgaagtgtttggcaaatggtgtgatacaatctaaaatataaaatatagagctacttctatcatagtagttgattgatatctggtgttacaaactgcttaattatcttttcctttcgggaagccagttgtttgaccagtggttgatctagaaaatgggttggccaatgactaatctttgatatttggtgatacaagctgcctattttttttgttttgttttggggaaagccagtgtttgaaaggcaagtcagatgcagagctgtctcact

SEQ ID NO: 2717 - DNA, 1422 bp, Zea mays
  Clone ID: MRT4577_102476C.1
gacgtgtgtctgcagctttctctagacaagtgttcacaagagctccaaccaacttttcagcatcgatttgatggtgctgttaccataaacaggcatgctgtggcaggagcattagctgggacagcagtcagtgtttctttgcatccaattgatactgtgaaaacgataattcaggctaacagttatggacagagttcagtctaccatacactaaggcgcacccttattgagagagtaaaggtgttctggggttatacggaggacttgctagcaaacttgcttgttctgcaccaatttctgcaatttataccttaacttatgaaacagtaaagggggctcttctgcctgtttttccaaaggaataccattcaattgcgcattgtgctgctggtggctgctctagtattgcaacatcctttgtttttacacccagtgaatgcataaaacaacaaatgcaagaatgctttagtaggatgcctcaaaaagggtggcattgcttcattatatactggatggggtgctgtcctttgcagaaatatcccacattccatagtaaaggacattatcccttttctgaatttatagttctatgcttatgagagtctgaagcagtctctgttgaaatcagcacctgatagtgccaaactcaattctggccaaacgcttttatgtggaggttttgctgggtcaactgctgctctctgtacaacaccgtttgatgttatcaagacacgagtgcaattacaggcactcaaccctgtttgcaagtatgatggggtggttcatgcactaaaagaaatttttcggcatgaaggcttgtgtggtctttacaggggtttgactccaaggctggctatgtatatgtctcaaggtgctatattctttacgtcctatgagtttctcagtacattaatgtttcctgaacccgaacaagaggttcatgcgaggagcgtttgatcgtgaaatgagaagatggcacagcaaaatacagaactcggggatagtctgacatgtgatgtgaggggtttgaatccaattttgggtgttgtttacaaagttgtctgttaggaataggatagcattcatacatatttttcggtaatctcaggtctagctaggcgattgaaaattttgtagtatcagtagaggtgattggtaccccccttcggggaacctggttttgtattttagtttcgtatatatagagaaacattggccagttttggtatcctattgttctgtatccacatgtatctgcatacatggccaagtgaatctggattctggaattaaacagcatgggatgcaagcctttctatttaaaaaaagatcagttgcagagcgacttcaatgttgtcgtccggcagttctgatgattgtaaagaaaattattgtttactgaatcacatgattattcagact

SEQ ID NO: 2718 - DNA, 358 bp, Zea mays
  Clone ID: MRT4577_102477C.1
ggcgtacgagctcctgcctactatcaccaaaaacaactttttgcataggttcactagaagcaaactgcaccggggtgctgaggaagaacagagcatactacgaccgtttatccagatagacctaccaagagtccattggttgttaagacagccacaagcagctgcccacctacgagcagtctgctgctcttctctacaccttttggatactacgatcttttctgtaatgttgccttctgagacgcaccaaccgatgtgctgccgttgaacgccacatggtagttggcgccctctatcagattgctgattaatccccacaagttcatgaccggaaccggatgacttatctagatcccca

SEQ ID NO: 2719 - DNA, 1290 bp, Zea mays
  Clone ID: MRT4577_102478C.1
ccggccgggagaaaaaagtcaaacctcctccttaatagaagaaataattcatacatattacatacgacaagcgcgaggagacaaggtaagcatttgggtcctccactccgtctccgagatgggtatcgctctcctcgcgctgctgctggtgctgccggcgagccatgcgtgggtgtgcccgccgtgcgggtcgacggccgtgccgtacccgctcagcacaggcgacggctgcggcgacccggcgtacaaggtccggtgcgccgccgccaccaactcgtcgacgtcgtcgccgacgctcatgttcgatgcgctgaacggcacgtcgtaccggatcacgtccatctcggccgcgacgcagcggctggtggtcgcgccggcgccgttggtggcgcagggcagcaggtgcgtgtcggaggggcgcggcggcggggtgcagctgaacgcgtcgctgccgttcaacgtgagctcgtccaacaccatcatgctgctcaactgcaccagcgcgctgctgctgtcgccgctcaactgctcctccaactcgctctgccacgtctacgccaacgccacggggtccacggcggcggcttgcgcgccgctgccgctctgctgcaccttcgtggcgggggggctcgtccacgtcctacagcatccgggtgtccccgcagttctgcagcgcgtaccgcagcttcgtggggctcgacccggcggcgcagccgccggccacgtggggccgccgcctcgggctggagctgcagtgggccacgcccagggagccgctctgccgcacgcaggccgactgcgaggacggcgccaacgccacctgcgccgacgacccgctcacgcccgcggcccgccgctgcttctgcgtgcccgggctctcgtggagccccctcgccggcgcgtgccagctgagtacgtaatttctttccgctgcatctgcacgccgttgaatcgaagactcgaggacgaggatggacaggtcctgaattaaatggaactcctgtactacttgttcggtttggtgcagatccctctgattgccagatcgctgggggctgcggaggatccaaccatgcgcctctcattgcaggtaaccgcttgcttccgtgttcttgtcgttcagagtgttcgacaaatctcaaaacctcatattaaccgctaaaactttgacaacaattttcctcggcgtagtacaaatccctcatatgacgcgttgggtaaagaggaggtagtggtttggtcgactcaagcaacccttttgaccccgggaatccggcaccggagctgcag

SEQ ID NO: 2720 - DNA, 620 bp, Zea mays
  Clone ID: MRT4577_102479C.1
aattcggcacgaggcacggacgccacccctgccctgctggcccttgtgccttgtctgcctgccagtcctccgtcctctcttcgttgcccctgccgtattcactttccactcgctcgtccatccatccatccacgcccccccccagaaccagtccccccagcgcctcacggtcgcaatttattgcttgcgcaccgcctcgccgctttggcgtggggcgtttgcctgtgtggcgcttcgcaggtgccgtggcttgccgcttccttcgccgtgctcactagtcaccagagagggaggaggctctggcgctctgcttctgctgccgcttcttcttcttctcctgctgctgctcttacggagataagcagggggggccgggccggggcagggggagggggaggtgacagctgagctgactagctgagtgaggcatggggatggacgccggcggcggcaagctgccgtacagctacgccggccaacaggacggagggaagctggtgaagagcgtcagccgcgtggagccgcgcaggttcggcctgggcctcgtggcgggcttcctcctcgtcacctgcgcctacttctccaccggcaagttcgacgccatccagatcggcatgacc

SEQ ID NO: 2721 - DNA, 652 bp, Zea mays
  Clone ID: MRT4577_10247C.1
ccccatcggaaattaccggacacaaccaccgccgccgccgccaccgccgtctcgcgaccaaaccacccccatggcggccgccgcctcctccctgcttgccgccgctgcgtcctccagttcccgagcagccatctccgtccgccgcccccgcgcagcttctgccgcggccgcggccgccgcctccatcccctcgtcctctcgcacatccttcaccccgctccgcgcctctcccgcgagggccctccggagccgcgtcgtcgccagcgccgctcccgcgatggagccgccggcggtgtcaagagtctccactgtggtcgacgtcgacctcggcgaccggagctacccgatctacatcggccccggcctcctcgacgagcccgacctgctgcagaggcatgtgatcgggaagagggttctggtggtgaccaacaccaccgtcgcgccgctctacttggagaaggtggcctgggcgctcacgcaccaaaaccctaatgtgtcggtcgagagcgtgatcctgcccgacggtgagaagtacaaggacatggacacgctgatgaaggttctcgacaaggcggtggagtcccggctcgaccgtagatgcacattagttgcgctaggtggcggtgtcattgcggacatgtgtgggtttgcg

SEQ ID NO: 2722 - DNA, 526 bp, Zea mays
  Clone ID: MRT4577_102480C.1
acaagcttttttttttttttttttttttttttttttttttttttttttttttttttttttttttttttttttttttttttattttttttttttttttttttttttaaaaaaaaaaaaaaggaccccgggcgccccccccctaggggggaaatcccacacaaaggggggcggaaaaaagggaaccccgcccggccccaaaaatggggtaaacaggggcaaaaccgtttcccgggggaaaagggaatcccctgaaaataccccccaaaaaacaaggcgggagcaaaaaaagaaaaaccgggggggcccaaagggggggctaaccaaaaaaaaaaggggggggcccaccgccccctttaaaaggggaaaacccggggggccgccgttataaaaaaaagcgcccacccccggggaaagggggttagcgaattggggcctttttccctttcccgcaaaaggaatcccttcccccaaagggtggggttcggggagccgcttaaactccctaaaaggggggaaaaaacttttc

SEQ ID NO: 2723 - DNA, 1270 bp, Zea mays
  unsure (1)..(1270): unsure at all n locations
  Clone ID: MRT4577_102481C.1
gcgttcgncaaaacagttatcttatgttgtcatcagataactaggtgttgatagaatgcttgtccaaccttgtattgtgtgctttgttggtgaatacctttgcagggtcaggatagtgttgttttggaaatgaatataaatggtcggtgtctacatttggatacagtgagtttgagaatgtggtatgttttattttgttcttgttgcatacctgatttttttggttctttttatttctacatattagatattagcatgagaagtttgtatatctgtatagtaacttatgtcagatctaatgtactatgagtcattctttattagatattgagatattacctgcatgttagacatcagtgtgtgagacttttatgtggcttttcccctttccttgtacaaatcctatagtaggcttttatgtggcacaaacctgcagtaagatgcgccttattcccttttgctttgtaatctgcttgttattaatatgcctcgttgactacacagttcagcctaaatccccaaccattatagaagatgttctggacttctacgtctaaagttaactaacggtctaggatctgcttccatttacacttttttacttcaagagagtaagtagttgccagagcactttttccacatatttgtggataataagtagacatcaaactagatcacctggacaacagagaataaggtggcataactttagcaaaaaaatagctaaagttatgattctctttatgaattttcatagagattgtgatgtcaaatatctaagaagaaacgcatggaaaacttctatattgatagagtagtttcgttgcagaaaaaaatactatattgaaacgtgtttgaggcgagaggcatatctttgcttctgaagtcctgttttctaccataggttgggttgtactaatgttcagaagatgcatcctactgcaggttgggttgggttcttttggatgacatatagtgttgggttgtgcagttcaaacactctttcatttttcttaagtgctctttacttttgatctttgtgatgggcatcacgaggaatcatgatatactgatgtcaatattttttaatcattagtctatgccaactgccaacaaccattcctctatgtccacttggactattattccaactagatgattaacatatagcaaccaacttgaagttcctttactttagctttttattggaagaactaagaacacaaccttacatgttgcccaggatgaaaagatggtgttaatacatgtc

SEQ ID NO: 2724 - DNA, 401 bp, Zea mays
  Clone ID: MRT4577_102482C.1
gaaataaaatgacttgatacatcaccattttattcctcataaactcataattaataataatataaggaatgagttcattccatcaaatttatggaaatgaactcatgctacaccacctcatctgaaatggatcgattcttcaaaccaaacaccttttagggcttgttcggtttaaagtaaattgagggttgtatagaaggtgatttaatcctctctaatcccactcaatccacccctaactgaacaagcccttagtgcccttagtggtaggcaaagcgaaaaaaacagttagatagcagctccctttcgctattaaaaaagaaattaaaaaacagatagctccaaactatgctttatctctgattctaaaaaaaacagagcagaacacaatactcgaacca

SEQ ID NO: 2725 - DNA, 209 bp, Zea mays
  unsure (1)..(209): unsure at all n locations
  Clone ID: MRT4577_102483C.1
gcattcataaacacaccaagctattctttttcaacaacttcacaacaatggctggaaaataaaaagctggttgcacttattacactttatgngagcgcaacaaatacattcattattccacaatgcttactttctcctaaatccattataacacagttccttccaccaattactttaattactttcaaacacttatctcatcaaaccta

SEQ ID NO: 2726 - DNA, 577 bp, Zea mays
  Clone ID: MRT4577_102484C.1
ctggtacttctattccttgccttttctattgtggaaaacacgttaccagacacctttgaggattattctatttctcgttgtggagtgctgctggaatgtttacccttccactgcctattcatcactccttttgctatttgtgcacttgtgcattttgtttggtatatggttttcccctgctgaatacccctatatcatcagtaaaggggcaaaacggacataccaagaagttgcaaagctagacttccctgcaaaatagtgtaatctttgaaggtagcagtgaggatacaagtgtcaaaggcttctggaaattgtgaggtactttggtatgccaatactcttgggactagttggcccaaatttctcgagtagcatctagacatataccaaatatgtatgtccatgtgtaacttcttaacatagatgatagcgactctaactataagagtaactatggctgcggacttcccccaggatcttgttttatcatcctttagacatgtctcagcagtcagcagccaaaagagatccatgcctcaccttagaaaaaaaaaaaaaaaaaaaaagtcgacgcggc

SEQ ID NO: 2727 - DNA, 985 bp, Zea mays
  Clone ID: MRT4577_102485C.1
ggaatactcgaggccgtcccggcgacccgctccgcagcaactccctcccgagttctcaaccaaccttctccttcggtccttccacaccaccccggtccccgatttacccacggcccacgccttctccctctcatctccccgctcactcccgtccccatcccacgcgatggccttcctcctcgccgtcgccgtctccgtcgcagcgcctgcgtcgtggccttccccggtcgccaccgtcgccccgccccgcctcgccctccgccgaggcctcccgccgacgtggcgcgcagttcgagccctcccgcgttcccgtggcgccgtcgtggtgtgccaggcccagggcggccaggacactgcaatccaagttcctgatgtgagcaaatccacatggcaatcacttgtggtggagagcgagcttcccgtccttgttgagttctgggcttcatggtgcggaccgtgtaagatgatagaccccatcgttggcaagctctcaaaggagtacgaaggaaagctgaaatgttacaagctaaacactgacgagaaccctgacatcgcaacccaattcggcatccggagcatccccaccatgatgatattcaagaacggtgagaagaaggactcggtgattggagccgtgccagaaagcaccctcgtcacctgcattgataagtatgttggtgggaggtgaaatatcaatctgaggcaactagcatgggtgggtatgggtataccgttcttattgaactgctgttgagtagctgtatgtagataataatatgattttcactccaataaatgcgatttaaggatggcaagtcatccggatgaaaggttgcttctggtctagctttaggccccatgtttcattcatctgctaagtcgtatgttgctagtggtccttatctgaatctccatctgattttgatgagttcatggattaggagctgtggctaaaggtaatgtgtaatgttgtgttggtgatagt

SEQ ID NO: 2728 - DNA, 570 bp, Zea mays
  Clone ID: MRT4577_102486C.1
ggagaagattatctccaacaggttacccatctttatctaattatctttatattcaaacttcactctgtaaatagtacagtctacagtgcaaaaacagtattttaggtgactatataggtgaggaaaacagaccaagaaagaaagaccaaaaactcaagatttcccaggtaaaaagtggtagcagtactgctctaagcctggattcatcactgaaagcatcacttgaaaaaagcacctgatcattctgaaagcaatccccacgtgcaagattcgtcagctgaagcatctgaacttgtggctggaactccgccaattgatgcagaatgctgccattagctatccaggacattgatgaatctgacgaacacattgaggataccactgcgcctgctgacagtccatgcgaagttgaggaacggtcacctgtggatcctgtgcctgttcgaccagaaaatgagtgtgcaagttcagatatcaggactctgactgtaaaagcctctaagaagcacgagcaacccttgcttgggactaaatcagagggccacattgagtatgacgagagacaggtct

SEQ ID NO: 2729 - DNA, 1095 bp, Zea mays
  Clone ID: MRT4577_102487C.1
cggcacgagctcgtgccgtccccctccccaatccggccgggatctcccgccgcaactcgttcgaccagaaacagacctgcacggctccactccaactccctcccaagccccaagccggcaagcccccaaccaccttccttttccacatccacaccgccccgggtttcctcacgcctccgccctcccccctcccacccgctcactcccgtccctatccaccgcgatggcctcccgcctcgccgtcgccgtcgccgtcgccgcgcccgcgtcgtctccttccccggtcgccaccgtcgccccgccccgcgtcgccctccgccgaggcctcccgccgacgtggcacgctctccgcgccctccctcgatcccgtggcgcagccgtcgtgtgccaggcccagggcggccaggacaccgccatccaagttcctgatgtgagcaaatccacatggcaatcacttgtggtggagagcgagcttcccgtcctcgttcagttctgggcctcatggtgtggaccgtgtaagatgatagaccccatcgttggcaagctctcgaaggagtacgaaggaaagctgaagtgttacaagctaaacactgacgagaaccctgacatcgcgacccaattcggcatccggagcatccccaccatgatgatattcaagaatggtgagaagaaggacgcggtgattggagccgtgccagagagcaccctggtcacctgcatcgacaagtacgttggtgggaggtgaaatctcaatctgggccactagccttggacttccatatgtagacggatgggtatgtgtataccgttcatatcgaactgctgttgagtagttgtatgtagataataatgtgatgctcactccaataaatgtgattcaaggatgggcaagtcatctggatgaaaggttgcttttggtctagctttttaggttctatgtttcattcattgagttgtggtctgtatgtagatctgataagtcatatgcagctaattttcctcaaaaaaaaaaaaaaaaaaaaaaaaaaaaaaaaaaaaaaaaaaaaaaaaaaaaaaaaaaaaaaaaaaaggaaaaaaaaaaaaaaaaaagcggcc

SEQ ID NO: 2730 - DNA, 268 bp, Zea mays
  Clone ID: MRT4577_102488C.1
ttcgtcctactctgtcgcctctccctatccatccgcaaattattcccacctcccgctcatcctccgcctccgccgcccgccatggcctcccttacctcggtctccacctcactcctcttcccgcaggcctcctcatccaggagccgtgtccggctctcccacctccctgggctttctccgcgcagccagtgcggtcgcgcattcgggcggcggtaggagggcagccgcccgggagcctgctggtggtgcgcgcggttaggggaaagtt

SEQ ID NO: 2731 - DNA, 401 bp, Zea mays
  unsure (1)..(401): unsure at all n locations
  Clone ID: MRT4577_102489C.1
cccacacaaccgaggtattaagtctcacactcccaccatcccccgtgccctgtaaaaaataatttgttctacaaacaaaacaacngncatacaacaactaaagccaaaaaaccaacaatacactaccccacacccggaactcacacatatcaccagctccaacatcctctgagaactctacaacataaacccccagaccaacacctactacaacgataacccccaccaactcggccactacaacatccctccctaccccatacataaaaataataaacacaataaacagattaaacataaatacaaaagagagcacatcacaagcatacttcagattaccctatatagatccataccaacatcacaactatgaatacctggatcacataaaaccgcaaaac

SEQ ID NO: 2732 - DNA, 2214 bp, Zea mays
  Clone ID: MRT4577_10248C.1
cccaccatttcggcatttttgtcgtcggccaggcccctccccagacttccttatcccgacacacctcttaaaaacgcgtcggcttggaaaaaatgctgcagctataatttaatccagacgaggaatcgcctcgcccgggatctctccccccccctgcgaatccccaggcccgctcgccgacaggagcccgcgatcggctccagcgtgagcttgacttgcgttgcggcggggacgtcgccgacgctcggcacggggctcgtcggttcggcggtcgctttaggctcgggccccgtcgaggccagcggtgccggggcaatgcggtcagttcgtggagctgtttgaggcgcttggctgggatctgagggtgccagcgtgccaggtaggggaagcaagcgagctctctgtcggaggcggagctgctggtggttgtaacggcgcgcgtttggctgacgccgccccgccgtcagaatggagcacgtagtcgggggcaagttcaagctcgggaagaagatcgggagtggatcatttggggaactttacctcgccgtgaacgtgcagaatggcgaggaggtggctgtcaaactggaatcagtcacatcacgacatccacagcttcactatgaatcaaaactatacatgcgtgggcggacgcgtgggcggacgcgtgggcggacgcgtgggtgggattccacatcttaagtggttcggggtggaggggcagtacaatgtcatggtgattgatctgcttggtccaagtctggaggacttatttaactactgcagcagaaagttctcccttaaaacagtactaatgcttgctgatcagatgatcagtagagtagaatacatgcacacaagggggtttctacatcgcgacatcaagcctgataattttctcatgggtttaggacgtaaagcaaaccaggtatttgtcatcgactatggccttgcgaagaagtatcgagatctccaaactcataagcacataccatacagggaaaacaaaaatctcacaggaacagcacgatatgccagtgtaaatacccatcttggagttgagcaaagcagaagagatgatctggaatctcttggttatgtgctcatgtatttcttaagaggaagtctcccttggcaaggcctgaaagctggcacaaagaagcagaagtatgataggatcagtgaaaagaaaatgctgacgccagttgaggtcctctgtaaatcatatccatcagagtttactgcatactttcattactgtagatcactacgattcgaagataaaccagattactcctatttgaagagactcttccgtgacttatttatccgcgaggggtaccaactagattatgtatttgactggaccattatgaaatatcctcagtttagagataaaagcaaaattcagtctagcggcaagatgagtgggttggcaggcccttctgcagaaaggactgatagaactgcagctgaagctttgtttagaaggactggatctggttctggtcacaatcgagagcacaccaagcacagaagtcttctggagtcactgatgccatccaaggctgttgattcggataaagcaaggccacaatcatcgtcgcgcaacgggagcacatcaagaagagctgtcatttcatcaagcaaaccaagctcttctggggatctaagcgacccgaaccgcttggggggccgcctggcccctagtagcagcagccgcccaccgactgcccaaagggagatcagatcctcgtctttgtcaaaaatcggaaggtcttcacatgacgacgctatcaggaacctcgagctgctctcacttggtgctgacaagagaaaataagggaaccgacgaaatgggctagggtctggactctggatgatgacgatgcagggctgagcaggcagctccattatctgtatgttgaaaatattcttttcggaataaaagagattatataacttatgggattgtttcccggagctgtgctgctccaatccaataacccgcaagagttacgtagcaaagctaaataaaaaaaaaaaaaaaaaaaaaaaaaaaaaaaaaaaaaaaaaaaaaaaaaaagaaggggagttgaggggcgaaagaaaataaagtcgacgcggccgccattaattaatcccaagccgcaaccagctttcgtggtttcccccccaagaatgggttcatattccagcttgctggcagctttaacc

SEQ ID NO: 2733 - DNA, 358 bp, Zea mays
  Clone ID: MRT4577_102490C.1
gggccaatagattttttttattatggaaacaagagttccggctttagcatacaaatacgtacatccattacataacgattattgcaccatagagtagttgcttgaataattaaactaactcaaagaaaacaaaatgtcatgactatagaaaacactagccatcttcaatttttgcattcgagcgccatccatgcattgcaaaaacttacatcgccaccacctccaaagctcgacatgcatcgagaatttgttggtgcttttcctccttctgtagaagtctccagaatctgaacagtgagtaaccctaaaaataacctgcacaattgatagtattggtttatgatcggacgcgtgggcg

SEQ ID NO: 2734 - DNA, 696 bp, Zea mays
  Clone ID: MRT4577_102491C.1
ggcaggttcatacatggctagtgagtggcgcgctcagccattgtctattgctacaggtgctactttggattcaatttactctgatgaccagattacttcgccatcatttggtgcactttcggaccctcagacacctgggcgcaagcgtggtgccttaggggaggtagtggataaggtggttgaaagaaggcagaagaggatgataaagaatagggaatcagctgcgcgatcaagagcgagaaagcaggcttatactaatgaacttgaaaacaaggtattccgtctagaagaggagaataagaggctaaagaaacagcaggagttggatgagatactgagctctgctcctcccccagaacccaaatatcaactcaggagaacgggttcggctgccttttgagtttcggcgctgacaatgctcatagtgatttttgtacattatacaaggattctactttatatggtttccttccttttgtattagaaacatttgatagattgagggtatagctttttcccggcccggtaggtcagtgtatgtaggtcgctagcaagctgtagcatgtcctggcggatcatttccttggtgtctgtcagtgtgtacatcttctagacacatgtctaagtctgagagcttccttatacgagaaggtattcaggtatgtgttgcccaggtgtctcctgctgttctgtttc

SEQ ID NO: 2735 - DNA, 116 bp, Zea mays
  Clone ID: MRT4577_102492C.1
gagagggcgggatgatataggcccgtatttaatattggtgctagacttagctacatgcgtgtgtacacacaggacacgggcatacagttgttggacgggctgcgtgcggcacaggg

SEQ ID NO: 2736 - DNA, 425 bp, Zea mays
  Clone ID: MRT4577_102493C.1
agactgaagggagatagtggacctcggcgcaggaataccatatttaacgtattttactattcgggtcgaaggggcaccgcctcctttggtccaggccggctcgcggccgatcggcggagaattgcagggggagttggtgggcggacattgtaaagatacgaggtgtctagatgactaacagaacgaaattcggtggacaaaaggaaaagctcgttgatctgatttcagacgaatacaaccggaaagcgtggctatcgacctttagacttcggagttgagctagaggtgcagaaaagtaccaagggaaactggcttgggcagccaagcgtcatagcgacgttctttttgaccttcgatgcggctcttctatattgtgaagagattcacaagtgtggattgtcaccaccaataggacggagctgggt

SEQ ID NO: 2737 - DNA, 369 bp, Zea mays
  Clone ID: MRT4577_102494C.1
ttgggtacctcgaggccggccggctcggcttctcgctgatccttaaacttgacgatcaggttgcctgaggtagccgcgctgaggtttgagcgggagagggacgcagctagaggcggggggctctatattacaatgcagcagtgaaggtgcgcagcgcgagcgcacgccctcccccgtgcctctcggtttcctagatttggttgcctgccgacgtccgcctctacacagtttgctgcggcggcttgaaaaagaggagtttccctgcagaccatggagtgctcccgggggaggcagaggcagatgcagaggtggaggtggtgtggcagatccatgctaaagctggcgggcgtgtgcagcgggagtactgtg

SEQ ID NO: 2738 - DNA, 247 bp, Zea mays
  Clone ID: MRT4577_102495C.1
agtaaacatgcactaacaatctctgcttaaccttgacccgggaccacaagcctgggcgggaagaatgaaacgctaatcgaccacacatacagtacgacgctctccgatcggaaccgttgtataagtcctggacagcactcatgaaaaagtctcagtctcagagactacttctgcacaccttgatgtttagacccctatagtgtaaactccacaaaaccctgtcattgagatatacaagcctgccatg

SEQ ID NO: 2739 - DNA, 316 bp, Zea mays
  Clone ID: MRT4577_102496C.1
ccgagctggtgtggtgaatgccagcgcgaaaagagggaaaggcagagtcagtgcgttaaagcaaccaagatggcttttctcaggggttctggaggcgcaacgatttagtttgtacgtagggcatttatgtcagtttggcggcatactgaactttgttcatcattcgggatttagagaggtgaccattgtaatcaacagccagctttctgctagagcgctcattgatgtgatcgcaggtgtatgtaaatgtaaatcttatcaaatccagccgaaagaaatgtaataaagggttataatctggtagcttcagacctgc

SEQ ID NO: 2740 - DNA, 494 bp, Zea mays
  unsure (1)..(494): unsure at all n locations
  Clone ID: MRT4577_102497C.1
cggacgccgtgcgggaaggcatctgctgtcgcactagcatagagatgcctcttgatagacggcttatctttcaagcactgagctcttgtaacgctcgcgtaggtagaaatagcctgttcggcattggctatcgagaaaatgatcgactgactacacgatactgtcttcctgagagacattagaacccaaagctacgacagattacattcgagaggtaaactacaaaggtgtactgtgttgattacataggcaataactgaaatgactactgagtataacgtcgctgatgctgtgcgcaagatacgtgaagaacctgtcctcaggctcttcgtgttcatgaccagctacaagacctaagctgcacgccttgatacttattgagagggaaaatatggccgattggagagctggcatgatccaaaactcaaggcgagaagcaattaccatgtcgcgtataatgcctcacttgcagatntgagaaacctctttacact

SEQ ID NO: 2741 - DNA, 299 bp, Zea mays
  Clone ID: MRT4577_102498C.1
gtggtactgtcccaagtgccggggggagtacgagaagaccatggacaaagccctggagaaatccaaatttgagagggcttacaacatgcagtttgtggacaggcgcctagtgttaggaggacaaaataaaccgtgtatttattacattgcagcctttgttgaagtgcaaggagtgtaatatgtatatgtttaaagaatgttagaagaggaaccattcctttcatagggatggcagtgattctgattgccttttgtcttcattggtacacgtgtaacaagtacagggtctgtggatcagc

SEQ ID NO: 2742 - DNA, 372 bp, Zea mays
  Clone ID: MRT4577_102499C.1
gccggaaggaggcgggtataaaatttggcgggtttctcggttccgcccggcggaagcgtttacttcttcggcccgccgaaatctcgaaggaggggaggggagggaaacggggaaaaaaaagaaagggggcgccggcggcgccgcccaatggttttttgaaccctccgccccccggacggtcccttcccccggcaaaccgaaaccaaaaaactcctaaaaaggttggcaaaaagggcccccttggaaaaaaatgccccccccggattccccaccaaaaaaaaacccccggggcccaacccggggaaaaaaagggggccccccccccccacaaaaaaaaaaaaaatttttccccccaccaaagggccccccccc

SEQ ID NO: 2743 - DNA, 985 bp, Zea mays
  Clone ID: MRT4577_10249C.1
gggaccctcgaggccggccgaggcgatctggagcggtgacaatgaagtcttgtctgctagactgtcgacagattccgctccaacgcgcacctgcagtcccgcacgccctcgcccaccgtcgcctttcaaaaagctggaggattctcgagagggagaagcgcgcctggcagctccgttccatccgcccccacgaatgtccgacgaggccaggcgcgggcccgcgggcgccgcgcaggcgatgctccgggcctcctccgaggaccgcaagccggtgggcgctgggtccccgccgccggccgcggcggcggttgcgcacaagatccagctcaagagcgccgatatgaaggaggagatgcggcaggacgccttcgaaattgcccgcatcgcgttcgataagcacagcatggagaaggacatcgctgagtacataaagaaggagttcgacaagaaccacggcccaacctggcactgcatcgtcggccgcaacttcggttcatacgtgacgcacgagacaaactactttgtatatttctacatcgactctaaagctgtcttgctattcaagtctgggtgattgctcgcagccgacgcaatcaaccttgcacgcctacgttccattgctcccatgtatgcaccgcacccttccccccaggcccagggtcgtctgcagccaagctggaagccggtaatcttaatgagcctgcatgttgatgtatatcagcaacggattattcttcgtatgcccactagtgtgagatcagattgcatcttacttatgtctgatatatctaggttaggtgttgtgagtacattgtcttgttgcaatatgattgccggacaactggacgaactgcctctcgtctgtttgtgattatctcaatagaagcgtccttgctcatgcgtaataaagcataatgcatagacataattaaagagcaatggaaccctgctttgacaatctctaaagtaatgcataaatatctag

SEQ ID NO: 2744 - DNA, 603 bp, Zea mays
  Clone ID: MRT4577_1024C.1
tctccggggactcggaaacaaaggctggtcatgaccaggtggtgatggagaaaaggagcacatctaatcaggtcaatgatactagctacaatgagaagaaaagaaacctcaaatcatttgaagattcagagaagtcatcagctccaactggtggtggttctttcaagattggtgagtgtattcggcgagctgcaagccagctgacaggatcttcatctattatgaaggctcagaatgaaccaacagtctataataacgctgctgaaggagagaatggggaatttgatgtctctagtgatgatgctggtgatgaacttactgtggagaaacgagcaaaaaggaggcgtctgcacataaatcacgctgcagatcccagggaattactgtcacaactatgcttggttgcaacagagccaatgaatggatatagtttctcagcaatgataatcgggtacttcaacgattacagaaactatattgtttctactactactgaagcaaacattgttgataaaggtacatctagaagagggaggaagagaaaagaagttataccttctcctgaggtagagacaacggatcatatgcaggactcgtattggt

SEQ ID NO: 2745 - DNA, 845 bp, Zea mays
  unsure (1)..(845): unsure at all n locations
  Clone ID: MRT4577_102500C.1
gacggagaacagagtagttgagatagtacttggaaaggaagaagaactagagtctagagttctgttacagcataaaaaaccctacgcgccgccaaacccttatttaataatcggctggattactctgtgctgtttacccacgccggcccaaagacctttgggttgcgcttcctcagccttttggcccgacacggcccatctcctgctgttgcagccaaaccttctttgtcatttgccgcaccgatgactgcttcctccgcttcgctgacattccccctgctaaatccgctggttgtccccaaacagctgcatgcggaaactgctgttgcaagtcctgcgcaaactcccaagtagccaactccacgggcatgtgtgaccactggacaagaatttgttcactggactgccccccacgagccaccgtccgacgctgcaagatcttgacaggcacactgaactgaaattgctcattaggcagcactggagaacacaccaaacctgtacccaaggcacgcttgagctgggatacatgaaatacaggatgaatcccgtgacgaagatggtaactataattagtacgccacggctcccacacgtcgcagcacctgaaatggcccaaaaaacttaaatgccaatttntgatgagcccccccccccccacacgactgaacatatggttggagcttaagaaacacccaatccccactagcaaattcccgttcagaacggcctttgtcagcctgtcgtttcatgcgcaatttacgccctttccaagcgctgttttactaaatcacccccccccccccccgcagcaataataaacaggaagcaatgcagcagccggg

SEQ ID NO: 2746 - DNA, 247 bp, Zea mays
  Clone ID: MRT4577_102501C.1
gtgccagatggaccgcatgattgtccgagagatgtgcaaggaattcctggtgctgggggaggctcccagctagcaccttgctgtcctcccttccctgcagctccagtcagtgtgcaggggactcaggggcttggccctaagaatgttttgcactgacagtgggaggggataaggtggtagaaggaacctgagcaggacccccacctgaagtagaacttaagagaggggccaagtgtaggattgggga

SEQ ID NO: 2747 - DNA, 690 bp, Zea mays
  unsure (1)..(690): unsure at all n locations
  Clone ID: MRT4577_102502C.1
gaggtccggccgggatcgcaaatcccctcggcactccccctccgatcccccctgcggccctgcccactctcctctcctcctgcatccacaccgcgccatgtctcaggaaggagccaacctgccgcaagaagtggtggggagccatgatcaggccgccgccccccacggcagcatccctgcaccggctgattccaaccccagctctgccagcaacctggccagcgccgtcaacaacggcgggtcgtctgagtgtgccagcccggcggtgctctctgccggcgaggacaacatcgcggcgtcgtccaagaccgccagcccggcggtgctctctgccggcgaggacaacaacgcggcgtcgtccaagaccgccagcccggcggtgctccatgctgccgacgacaacaacgcggcgtccaagatcgccggcccggcggtgctccttgccggcgaggaaaacaaggccgagctcaagctcgcgagcccggcagcgctccttgccggcgaggagaagggcaacaacgctgatgagttcaagctcgctagcccaaggatgctccatgactgcgacgacaacaatgccgggtcccatgctggcgtgcgcaactgcaacgccgcccagtccaagctcgccagcccggcggntctccatgccggcgatgacaagaagggcggatccaagaatcgcggcgc

SEQ ID NO: 2748 - DNA, 176 bp, Zea mays
  Clone ID: MRT4577_102503C.1
gggggaaacaagaacgatggtcgagcgtagtaagagggcggccaaatcacaccttgcattaagcaagctacatgtgccaagagcaaagaccactaaagctgatagagaaagaagaaatgactggccagtgcacaagttagaagcttcccaatcttgtggagcgcacacaattatta

SEQ ID NO: 2749 - DNA, 391 bp, Zea mays
  Clone ID: MRT4577_102504C.1
ggcaggggaccatataatacccaggggacaagacaacagtacatcacatagctagataactgggaagccaaatacccgtctcagcgagaccaccataaatagagcttacacaacatagccaacatgcaaatcattttaaaactgaccagatgcagaggcaggaattttcgaggggggctacacaagtgggcaccgggcactggaatgcccaaaaacaagattggggcagcaaacatggaaaaaaaaggggcgggggggaaaggaacaattccccatgacaagttaccgggggttacaatttttctgatacccaaccggagggaaccccccctaaatattggcgagcttgtttgccttcaccaccggattaaccttgggaatgggggccctg

SEQ ID NO: 2750 - DNA, 592 bp, Zea mays
  Clone ID: MRT4577_102505C.1
ggaagggacgggaacggaacgcacaaaaaacaacacgaaggaaaggaacacgaccaggaggagaagaaaggagagacaaggggggaaaaagagaaggggggaaaaggggaaaggaaaggaaaagaaaggggaagggaggggaaaaaaggggaggggaagaaaaaggaggggaagggggggggaccggggaaaaaaaaaaggggggggggggccagcaaaacaaagggcaaaggaaaacccggcaggaaccggaaggaaacggggaccaaggcgggggccagggaaaggccagggggcgccttgggaatgagggggttaggcgagggaaagatcggtccggggggaccggaggcgaaacaacccggggagggcgccccttgggcgaggcggggataacgcgcgggacgtgggcggacctgggggaactagaggggggcgcaaacaagggaggggtggaagggcccgtgtaagggcgggaggcaaaggcggaacacgggcccgggggggtggggggaaggaaaaacggaggagaagggaggaaaaccgaaggacggggggaaaaggggaaaaaggggacgagaggggggggggg

SEQ ID NO: 2751 - DNA, 165 bp, Zea mays
  Clone ID: MRT4577_102506C.1
cccacgcggctttttttctttaaaaccctgggcttcccctggcttccagtgggcatgccccccgttcgggcgcactaccacagtcgcactccataaggggagggggacatccccaagacgaccagcgctccgctccggccgggcattccatccggcaatggcctc

SEQ ID NO: 2752 - DNA, 1422 bp, Zea mays
  Clone ID: MRT4577_102507C.1
atgttgaataatgatgttgctaatcttagtactcaacttaaaacatgtaagaatgattgtgagaaattaaaatttgctagggatgcctacaccattggtagacacccctctattaaggatggacttggtttccaaaagggagccaagaacttaacaagccaaaggacctccaatctcaacaaggagaaagggaaggctcctatgcctagtagctcttattcttcacatgaccaaaagaacctacctatctttatgctcatgttaagaatgtttttggtttatgcatctgggggcacaagctggatcattgacagcggatgcacaaaccatatgacgggggagaagagaatgttcacctcctacgtcaagaacaaggattcccatgacactattatctttggagatgggaaccaaggcaaggtcgagggtttaggcccgttgcttatcttagcatcagaggaagataaatatgaaacccaaggaactttaaagcgcttcctaaggagacctcaaaatgagtttgagctcaaggctcgacttgtggcaaaaggttatgcccaagtcataggtttggattttgaggagacttttgctcctgtagctaggctagaatcaattcgcatattattggcctatgctgctcaccactcgtttaagttgtttcaaatggacgtgaagagcgccttccttaatggaccaatcaaggaggaaatatatgtggaacaaccccctgacttcgaggatgacagatatcccgaccatgtctacaggctctctaaggcgctctatggacttaagcaagccccaagagcatggtatgaatgccttagagattttcttatttctaatgctttcaagaaatttgatatgtctatgatgggcgagttgaactacttccttggattccaagtgaagcaactcaaggaaggaaccttcatctcccaaatgaagtacacccaagacttactcaaaaggtttgggatgaaggatgcaaagcccgcaaagacaccgatgggaatggacgtgcacttggacctcaacaaaggagctctaagaaaaacatctgttgccctatccaccatggaggccaagtatgtttccgcaggacagtgttgcgcgcaactactttggatgaggcaaaccctcccggactttggctacaatttgagcaaagtcccactcctatgtgataatgagagtgcaattcgcttggcggataatcctgttgaacacagccgcactaagcacatagacatctggcatcactttttgagagaccaccagcaaatgggagatatcgatatttaccatattagcaccaagaaccagctagccgatatcttcaccaagcctttagatgagaaaatgttttgcaggctgcgtagtgagctaaatgtcttcgattcgcggagcttggattga

SEQ ID NO: 2753 - DNA, 846 bp, Zea mays
  Clone ID: MRT4577_102508C.1
cctcgagccggcgggctctcgtccgacagcagccgctgcctgtccatggttcccgccgtcgctcgcccagccactgcgatgctgcctgcccggcgctcgcgcagccgctgtggtgctgcctgctcgccgctcggcgctcacccagcccagtcgctcgcccagtcgccctacttgccgccccgccgctgcgtccaagttgtcaagccgtcgtctagccgccgccccgcccagccgctcgttgtcctgcgcgcggatctgcacaagcagccaagcagcgaccacacccctgtctaaggtgaaaatagtgcgcgagtccatgaaccggatgatcgaagcatggagggagattttttacttggatgaggaggtctgctccttcgacgtgccaccatcgtcccagtctacatcttctctcacagataccgctgattccttgggccccacctccaccccttcaattacaaggaggaactcatggccgactaacaggcagcccccaccggacgcatcgcataatgtcaccaacagaaaaggcagcactccttccatcataggcaagaaaattttgcctccttcacgccgcagcacagaccaagccaagaattgaaggcagggttgatgttaccgtcgcttcagatgcgacgccagccaaaatggtgaccgaggaaaagctcctgaatgagggcagcgttagagagaggcttgaagcgcggagggtgctgtttcagaaaactggtgagaagggttacaagaagctggctggtcccaagtcaggatccagagtttttccatacagtgggggatggtgacctttgagagaccgctgagactgaggatgcacctgaa

SEQ ID NO: 2754 - DNA, 1602 bp, Zea mays
  Clone ID: MRT4577_102509C.1
atgttgaataatgatgttgctaatcttagtactcaacttaaaacatgtaagaatgattgtgagaaattaaaatttgctagggatgcctacaccattggtagacacccctctattaaggatggacttggtttccaaaagggagccaagaacttaacaagccaaaggacctccaatctcaacaaggagaaagggaaggctcctatgcctagtagctcttattcttcacatgaccaaaagaacctacctatctttatgctcatgttaagaatgtttttggtttatgcatctgggggcacaagctggatcattgacagcggatgcacaaaccatatgacgggggagaagagaatgttcacctcctacgtcaagaacaaggattcccatgacactattatctttggagatgggaaccaaggcaaggtcgagggtttaggcccgttgcttatcttagcatcagaggaagataaatatgaaacccaaggaactttaaagcgcttcctaaggagacctcaaaatgagtttgagctcaaggtgatgtgcgaccacaggaacaacaagatcaagatcaaccatcttcctcaacattggtgcatccctcaactcaagatgaggaacatgtacctcaagatgaaggcatggatcaagggggagcacatggagaacatgataagaaggaagaagcacaacaagctcctccaactcaagaacaaggctcgacttgtggcaaaaggttatgcccaagtcataggtttggattttgaggagacttttgctcctgtagctaggctagaatcaattcgcatattattggcctatgctgctcaccactcgtttaagttgtttcaaatggacgtgaagagcgccttccttaatggaccaatcaaggaggaaatatatgtggaacaaccccctgacttcgaggatgacagatatcccgaccatgtctacaggctctctaaggcgctctatggacttaagcaagccccaagagcatggtatgaatgccttagagattttcttatttctaatgctttcaagaaatttgatatgtctatgatgggcgagttgaactacttccttggattccaagtgaagcaactcaaggaaggaaccttcatctcccaaatgaagtacacccaagacttactcaaaaggtttgggatgaaggatgcaaagcccgcaaagacaccgatgggaatggacgtgcacttggacctcaacaaaggagctctaagaaaaacatctgttgccctatccaccatggaggccaagtatgtttccgcaggacagtgttgcgcgcaactactttggatgaggcaaaccctcccggactttggctacaatttgagcaaagtcccactcctatgtgataatgagagtgcaattcgcttggcggataatcctgttgaacacagccgcactaagcacatagacatctggcatcactttttgagagaccaccagcaaatgggagatatcgatatttaccatattagcaccaagaaccagctagccgatatcttcaccaagcctttagatgagaaaatgttttgcaggctgcgtagtgagctaaatgtcttcgattcgcggagcttggattga

SEQ ID NO: 2755 - DNA, 188 bp, Zea mays
  Clone ID: MRT4577_10250C.1
cacaagtgtagctgcggctaccaatggatctacactagctacaagacctacttccgtgcggtgaatatgatgcttgtgcttcgaactgggctgcactctgaggaccacactcttgtttgcattgtcattgagtatacctgcaaggagttactggacatctgcatagtgtacgtctgttacaagatgag

SEQ ID NO: 2756 - DNA, 792 bp, Zea mays
  Clone ID: MRT4577_102510C.1
atgtaccttcaacttgaaggagatgaaagtacaagcgtgacgcaaaagcgaatgccaaatcagcgtgaacagtacggggattttagtgatagtaacaccaggggtgttacaaacaagaacaagatcaacattcttcctctacattggtgcatacaccaactcaagatgaggaacatgtacctcaagatgaaggcttggatcaagagggagcacatggagaacatgataaggaggaagaagcaccacaagctcttccaactcaagtccgggcgacaatacaaaggaatcatccagtggatcagattctgggtgatatcaggaagggagtatcccgaccacgtctacagtctctctaaggcgctttatggacttaagcaagccccaagagcatggtatgaatgccttagagatttccttatttctaacgctttcaaggttgggaaagctgatcctactctctttactaagacttgtaatggtgatctctttgtatgccaaatatatgttgatgacataatatttggttcgactaatcaaaagtcttgtgaggagcttaggagggtgatgatgcagaaaatcgagatgtctatgatgaacgagttgaactacttccatggattccatgtgaagcaactcaaggaaggaaccttcatctcccaaacgaagtacactcaagacctacctaagaggtttgggatgaaggatgcaaagcccgcaaagataccgatgggaacgaacgagcacttggacctcaacaaaggaggtaagtccgttgatcaaaaggcatactag

SEQ ID NO: 2757 - DNA, 396 bp, Zea mays
  Clone ID: MRT4577_102511C.1
cccacgcgtccgcgtattttggggatttatgtagttatagcgaaatctagggatccggaaattaaaatgttattataacttaatacatttttgttggaacaattgtacaatgttctggatatttcctcaaagattttgtaggcatgtttatgtggttacatcacttgtattttattcttatgtactgtaagtgagctagaaatctgtgaagatctcaattagatactcatttcccttcctcatgtagtcatgtttttttgtttagacgatgcagtttctattggctcttgatattacctcatcagagttttttttctgcgctattgcagtaactctatttcttgatcaacatcaacatgtcgcgggaggataatgtttacatggccaagctggctg

SEQ ID NO: 2758 - DNA, 441 bp, Zea mays
  Clone ID: MRT4577_102512C.1
gcaggcacgcctgcaggagccgggccggaattaataggcgggatgacgagcttattagtcggctgacgcccttagtttttgttagggaagaagttgacgtgctaatgtgaactagacggaccctatgaacagatgcagaccatacatgcggtcaagaatctggagcgggacatgcgagaacaggaaacggtccaggcaaggactaggggacagaacaaggagaatgccactaataggcatcagaagttggtacaggaaaccgaaaaaaaggatctaagagggactgggtgtgcgttgaaggttattggcctttacacatgcaagcagggaccagacattattccaccagctacgcaagaggctgaatgtaggaggcaaggcaggcttgctgtctatgaacaaaggaaagaggctttgggccagagcacaaagtcacccagg

SEQ ID NO: 2759 - DNA, 581 bp, Zea mays
  Clone ID: MRT4577_102513C.1
gttctagatcaaatgtttcagtgtattcagtctgcagaaataatcctgaatatttctttcgggtgtttaaaagtgtgcagcaaatttgcaatgctctagtccagtggaagttacagaacgggtgcgcagaggaaccaatagggccggagtcccctggcacggtcagatgatcgggggcggcggcgtctcccagacgtcgaacacgttctcctcgttgtgcagggcgaagagccggtcgccgccgatggagaagtcgcagatggcgccgccgtggctcctgcggagcgtcgacgtcagcacgtactcgggcccgctgaacacggagatgctgtcgttcatggacgagaagagctgaccgccgtgcgtggcgagcttcgggtagcagctctcctcgccgggcaccttccggttcatcagcttgctccgggagctccaccgtacgccgccggcgccgctccggaggtcgagacagccgaggtcgtcgtactggttgatgacgcagacggagcgctcgtcctccatggcgatggcgtggagcacgcgcttgtcgtccagcgacgcggccgccgacaagagagctc

SEQ ID NO: 2760 - DNA, 444 bp, Zea mays
  unsure (1)..(444): unsure at all n locations
  Clone ID: MRT4577_102514C.1
gggtatgtgtgtttaatagatataattaagttattatttgtttatgtttagtgttttaagggggccggttgcacgtttggaaggggagagcgtgaagaaaaggaatgtgaagaaaaatgtgggggggggggagatnttatttgttgaaaaagggtgggtctgattggaaataaaattggggggtgatacacatagactgaggcgtgcaggtatgtaagcagacctaggtcaccattggaattgggggtggtgctaattggcgtggtgataattcgagattggagtgttgatttttagaaggaggagcaaaaaaactattactggcaaaaaatgggggaaaatggtatataggaagaaaatgaggtcttgtggataaagtagttgtagaagtcagggatgatgggagagatcaaagaatggtacaaaagctggtagataggaaaa

SEQ ID NO: 2761 - DNA, 206 bp, Zea mays
  Clone ID: MRT4577_102515C.1
ggcgggagagagccaggaagaggagggctgtcgatttcgtccggctggtgcatcaacgggaactagggccgctgctacgacttctggctggagttcagcgagtgcatgagccgctgtcgtcagcccttcgactgcggccttcttcgcgaggactaccttgagtgcctccaccactcctaggagttccagcgctggtacaggatcta

SEQ ID NO: 2762 - DNA, 528 bp, Zea mays
  Clone ID: MRT4577_102516C.1
tttttttttttttttttttttttttttattctttttttttttttttttttttttttttttttttttttttttttttttttttttttttttttttttttttttttttgggttttttttttttttcaacaaaccccgcccacccggggcgggacccaaggggaccggggaaaaaaggcccctttgccactaaaaaagccccggcgggtttaaaggccccggcaaaggattaaaccccccccccctgggaaagggagcttcaaggggccccccccgggcccgttggccgggcgggctgacccaaaggcccggcccctgggggcccaaacccccaaaccggggtcggggcgggcgggaaacaaaggcccccgttgcaaacttggattctgactaaaagggggtcaaccaaaatccggcccacggaagcttccccccacgggtttttaaaccaagcccgaagaccaatggggggaaaaaacgggcccccccgaccaagggggaaatacaaagggggggcggacataagggggg

SEQ ID NO: 2763 - DNA, 592 bp, Zea mays
  Clone ID: MRT4577_102517C.1
ttgggaccctcgaggccggccgggactacgggttgtttcagcatctgttaatcccaagtcaagcggcacagcaatcccatacttacgctacttgacagaactattccttcccctacatctcagcctctacggctgacacagacattattcaggaaaaataccttttctgatgctacctacagacagattaaagagcctgatatcattatacggcaaggataataaacggagacatattaatgagagtgtgagcggtatctcggatactacgtagggaaaaaaggttcaggaaactcaaaggaaccctatttcaggagaggctagcgaataagatcacataagcggagctctctctgatgatgatggaggatgcacttctcatggtcctctgaaagcaaatcgtaacacccagttcagaacgacgaggtcttgtataataacaacaccagcataggcctccgcgtgtccatttcctattcctatagctccgagctctctacttgaaccgactgctacacacatgccatgtactctgcacctcggaccttggatgtcactagacgacgatgctcccgagatcaccgttgggtca

SEQ ID NO: 2764 - DNA, 263 bp, Zea mays
  Clone ID: MRT4577_102518C.1
aatggcatgaagcgaatgttgatggtccaacctgcaatattctgtcttgatttggagacagtgattgcaccaaaggtgaagtttttaattgatattggtgtgaggactgatgcaatcggcaatgtgcatgcgaagtttcctcctcgtattaacttatagcttgtacaagaaaatacgcccagtggttatattcctgctgacgaaaggtggagtaaaacaggatgacatcggaaaggttatcgccttggatccgcagctcttgg

SEQ ID NO: 2765 - DNA, 763 bp, Zea mays
  Clone ID: MRT4577_102519C.1
cattgggtacctcgaggccggccggacccacctccatccctcccatcggcatcccggacttctcccaggagctccggggcttccaggctatcacctactaccaggccatcatcaacaactcgctcgttgacctctacgtccagtgcggcacggtggagttcgcacgccatgcgtttgaccggatgccggagcggcaccttgcgtcctggaacgccatggccctcgcgctcgccaaccatggccgcggcaaggactcgctcgatttgttcaaccggatgacgcgggtggagaatgtggtgccaaatgccatcacgttcgtcgcggggttcagcgcctgcaaccacggtggactggccatggcggcgatgggcgcgaccgcttcgccactcccttccctattccccacagggcagcgacacactctactcaagcatcgccttcacccgcagcctcggggacctcgccgccgaggccgtcagggtcatcgtcgagccgagctatgggtgcacgttggggacgacgactcggaccactactgctggcagcagcatgtggacatgaccacgtcacgacgagcgtccgaggttgacgcggaccacccgggctccgaggtcgcagccgtcatggctgccgcgaccgccgtgttccactggaccgtggacgcgcactacgcgcacctactgatccaccatgcgcagcagctattcgacttcgcccacaccctaccgggacgctacgacgccgcgctgcaggtgctcggtct

SEQ ID NO: 2766 - DNA, 133 bp, Zea mays
  Clone ID: MRT4577_10251C.1
accgaccacgcgtccgctcacgcgtacgcaaacacatgatagccattaggcctttaaagcacactcccttctatcgagccatagactcacattctgggataagattgtcagatcgacgagatgcatacctaac

SEQ ID NO: 2767 - DNA, 880 bp, Zea mays
  Clone ID: MRT4577_102520C.1
ccacgcgtccgcggacgcgtgggcggacgcgtgggcggacgcgtgggcagtgggcctctctctaatcacaatttcgacactgatcggtactctctagtgtccgactcgtcacagttttagcgagagagacagagagcgagcgagggagaggaggatgggttccacttccacgggaccggtgagcgggttcgcggcgccggagcgggacatcgacgatctgccgcggaacgacgccaactacacggcgctcactccgctctggttcctcgagcgcgcggcgctggcgcatccgggcagggcctccgtcgtgcacggccccgtgcgctacacctgggctgacacctatcgccgctgccgccgcctcgcatccgccctcgcgcgccagggccgacgagcggtggggcgagtcgccgtgcgcgttcgtgacgctcaaggacggagcagcagccgacgggtcggacgaggcggcgctggccaacgacatcatgcgcttctgccgggagaggatgccggggtactgggtgcccaagtcggtcatcttcgggccgctgcccaagacggccacggggaagatcaagaagcacgagctgagggccagggccaaagagctcggccctgtgaagaagagcaggatgtgagagatctgggggccgacggcgatagcgtgtgatgccatggcaacaactcagaatcttgctccaagtcgtgcatataaaattcctgagttctgaagatgcctaataacttgagtgctttgcttgtatcgttctgaaaccagaagttcagaccagatccgatatataagtaagaactgtaaaaaaaaaaaaaaaaaaaaaaaaaaaaaaaaaaaaaataaaaaaaaaaaaaaaaaaggccccta

SEQ ID NO: 2768 - DNA, 668 bp, Zea mays
  Clone ID: MRT4577_102521C.1
ccacgcgtccgcggacgcgtgggcggacgcgtgggcggacgcgcgggcactctctctaatcacaatttcgacactgatcggtactctctagtgtccgactcgtcacagttttagcgagagagacagagagcgagcgagggagaggaggatgggttccacttccacgggaccggtgagcgggttcgcggcgccggagcgggacatcgacgatctgccgcggaacgacgccaactacacggcgctcactccgctctggttcctcgagcgcgcggcgctggcgcatccgggcagggcctccgtcgtgcacggccccgtgcgctacacctgggctgacacctatcgccgctgccgccgcctcgcatccgccctcgcgcgcctatccgtcggccacggaagcacggttgctgtgatagctcctaatgtcccggctgtctatgaagctcacttcggtgtcccaatgtcaggagctgttgtgaactgcgtcaatattcggctaaacgccgagacaatagcattcctccttgaacactccgtggcagaagttgtgatggtggaccaaaaattctgcaccctagccgaagaatccgctgaaaataattggcaagaagaagacatcggctttcaggcggcctccaatcttgatcgtcctcggcgaccccacctgtgat

SEQ ID NO: 2769 - DNA, 466 bp, Zea mays
  Clone ID: MRT4577_102522C.1
tgcccaccatttgggcgcagcgattcgcaagagcagtatgccgtgcttgacggccatcggacgaccagggcaccatggagtacgacacgcgtgctctggtggggctcctccacagggctctcgtgtctgtgattctacgatcccgatctccggggagcctggatactccacggggatggccctatcggaagcgccggactggtcccgaagcatgccgggaggccgaggattaggttttgccagccgctctggatggtaagacactcttgataaatagacggaaggatggatgcccagaacttgaagaagatgaagcgcaacagcagaaatggaaaagaaattgttgcggacagtaagaagggtggcaccaacccttcatcaacacaactttatgaggtatactagagaatgcaggggtacttgatgtgcctagagaaacttgggagcgcaacatgaaaagggcatc

SEQ ID NO: 2770 - DNA, 190 bp, Zea mays
  Clone ID: MRT4577_102523C.1
gtgactcatgggcggacgcgtggacggacgcgtgggcgacatctgctgcttcggcggcgtctaccatgggcgactatggccacagggggggggaaatgcaggggaaccaggactcccggcacaggggaacagggccagagccctatattccagcagttcaagctcatggcgcagatccacccaacggggg

SEQ ID NO: 2771 - DNA, 1392 bp, Zea mays
  Clone ID: MRT4577_102524C.1
gtgtaatctaatctttgttgcaaatgcttctgtccagatcagtttgtcagtaacttaaatgcttctgtcaactagttgccactgtctgttagtacagtagcttgacaactcttcgtgttcatctgggttcatcattcacatgacaggattataggatccatgggtgtggatatgctcctagtgcacatttcaggaccaatctctgtgaccccttcatcctttgcaagattcctgaagtaaattgttatgtagttccccgttgggaagaaaatttctatgagatctccaagaaccaactgaggctgtgagatagctccatcggaccaatcaagtgtcccagaagctcctatccttttgtcaaatctccatatgctgcgatttgatacaaaactgtaacaggagtcgtggctaacattaatattctccaaaaaggtggatagtttgtactctgcaggctccaaagcatatgtctgatctatgaccacgtccactgtacacagaatagcatggaagttatccatatcctctggatctgaactattaaatctcttatccgtaatagttgcatcaacaatttctgctcctgcatctgtgacatactgtaagatgtaactttctttaacaaatgtccacattccctgtgtgaattcaatccacgctactacaggcttgaatcttgtgccaaggtttgcagctactttgcttaagcacaggtagtttgtctttactgcatcgtagacagcattagccctgttttcagagtttgtgaaagttcccaggtacttgatccactcagccatctgcaatggtgtgccctcttctaagggtacatatgctgcaaagttgcaacctctgtcttcatctgtatcgcttatgaaatgcgcagtaaactgcgagagtgtctgcacatcagttctattcacaagctgggcatttccacttgtatatgactggagcacgcactgagaagcgacttggttcgatgttattcctttcaagctctctagcactccaagcagctcaaagaatgacactggagaggtcgtggtgtcgacggagaagctggcgagggggatgacgaacgacttaatcctccccgtgcagtacttcgtcttggatgccatcttggacgtgttctgcatgagaaggtagctcttgccatcgccggagttcttgatgaccttgaagctctgaccgtagtatatccggaacatggtggcgtcctccaccctggacaccggcccggccaccacaggcgccggcgcggccgtggccgctgaagcgagcgccgaccacagcagcaccgcggccagcaggcagcatctacgaacagcggccattgccttcaatgcacggctcacgagctcttcccaggccggcctcgaggtaccc

SEQ ID NO: 2772 - DNA, 2416 bp, Zea mays
  Clone ID: MRT4577_102525C.1
ccacgcgtccgaccgtagtttacaaaaccttttgttttacctaaccatcatggacccaatctgaaaatggtagctgtatttgggttcttttctgacctgccactttgtctgttatattttatgactttcatgcccattcctttttactacagttagggtttacaagaggggcgaatctccttggtgattggggggggggggcgcagcctatccggccggccgggatcctcctctttcattccactctctcactctctctctaatcacactttcgacactgatcggtactctagtgtccgactcgtcacaattttagcgagagagagagagagagaccgagcgagcgagcgagcgagggagaggatgggttccacttccacggggccggtgagcgggttcgcggcgccggagcgggacatcgacgatctgccgcggaacgacgccaactacacggcgctcacgccgctctggttcctcgagcgcgcggcgctggcgcatccgggcagggcctccgtcgtgcacggccccgtgcgctacacctgggctgacacctatcgccgctgccgccgcctcgcatccgccctcgcgcgcctatccgtcggccacggaagcacggttgctgtgatagctcctaatgtcccagccgtctatgaagctcacttcggtgtcccaatgtcaggagctgttgtgaactgcgtcaatattcggctaaacgccgagacaatagcattcctccttgaacactccgtggcagaagttgtgatggtggaccaagaattcttcaccctagccgaagaatcgctgaaaataattggcaagaagaagacatcggctttcaggcggcctccaatcttgatcgtcatcggcgacccgacctgtgatcccaagtctctacagcatgctctgggaaagggagctatagagtatgaagagtttctgaaaaccggtgacccggagttcagttggaagccaccgaaggacgaatggcagagcatcgccctaggctacacttctgggactacttccagcccaaagggcgtcgtgttgcatcaccgcggtgcttatctcatggcactcagcgttgccatcgtgtgggggatgcctgaaggggctgtctacctgtggactctgcccatgttccattgcaatggttggtgctacacttgggcgctggcagcgttctgcggaacaagcatatgtcttcgccaggtgagcacaaaagctatatacgaaggcatcacgaagcaaggagtgacgcacttctgtgccgcacctgtcgtccttaacaacctgatcaacgctccggcaagcgagaccttcctgccgctgccccgcgtcgtcagtgtcaacgtggccggagccgccccgacgccgtccctgctgggcgcgctgtccatccgtgggttccgcgtcacgcacacgtacggcctgtcagagacgtacggtccctcgacggtgtgcgcgtggaagcccgagtgggacgagctgccgctggaggagcggtcccgcctgcactgccgacagggcgtcaggtacatcgcgatggagggcctggacgtcgtggaccccaagacgatggcgcccgtcccggccgacggcaagtcgtacggcgagatcgtgctgcggggcaacgccgtgatgaaggggtacctcaagaaccccagggcgaacgcggaggcgttcgcgggcagggtggtaccactcgggcgacctcggcgtgaagcaccccgacgggtacgtcgaggtgagggaccggatgaaggacgtgatcatctccggaggggagaacatcagcagcctggaggtggagaaggtgctgtgcgcgcacccggcggtgctcgaggtctcggtggtcgccagggccgacgagcggtggggcgagtcgccgtgcgcgttcgtgacgctcaaggacggagcagcagccgacgggtcggacgaggcggcgctggccaacgacatcatgcgcttctgccgggagaggatgccggggtactgggtgcccaagtcggtcatcttcgggccgctgcccaagacggccacggggaagatcaagaagcacgagctgagggccagggccaaagagctcggccctgtgaagaagagcaggatgtgagagatctgggggccgacggcgatagcgtgtgatgccatggcaacaactcagaatcttgctccaagtcgcgcatataaaattcatgagttctgaagatgcctaataacttgagtgctttgcttgtattgttctgaaaccagaagttcagaccagatccgatatataagtaagaactgtatcagattgtccggtttgcaggcagaccagatccgatatataagtaagaactgtatcaaaaaaaaaaaaaaaaaaaaaaaaaaaaaaaaaaaaaaaaaaaaaaactcgagaagggggcgcggttcc

SEQ ID NO: 2773 - DNA, 134 bp, Zea mays
  Clone ID: MRT4577_102526C.1
cggatggctggccgccaaaaagcgaggcttcgagctaccaaaattgggtgggccagattgggaaatcatgtccctggctattggcaaaaagcggaggagtgcccttctcaccagttgtcaaggacggaagggct

SEQ ID NO: 2774 - DNA, 2189 bp, Zea mays
  Clone ID: MRT4577_102527C.1
attgaaaacagtcgtttgaatttcataagatggtctcttggataattacatcaaattccttttaacatggatacaccgaggtttgtaatcacttattgatcaactgaccaaacagcagttgctgctcaatatttgaaagaaagtatttttctagattgtgtaatctaatctttgttgcaaatgcttctgtccagatcagtttgtcagtaacttaaatgcttctgtcaactagttgccactgtctgttagtacagtagcttgacaactcttcgtgttcatctgggttcatcattcacatgacaggattataggatccatgggtgtggatatgctcctagtgcacatttcaggaccaatctctgtgaccccttcatcctttgcaagattcctgaagtaaattgttatgtagttccccgttgggaagaaaatttctatgagatctccaagaaccaactgaggctgtgagatagctccatcggaccaatcttaaagggaaaaagagtaaatgtgtatgacatcatttctttgagatggaaaaattcattaaatcattacataggtaaaagatatgatactagtaatagtattgcttcggttaccaagtgtcccagaagctcctatccttttgtcaaatctccatatgctgcgatttgatacaaaactgtaacaggagtcgtggctaacattaatattctccaaaaaggtggatagtttgtactctgcaggctccaaagcatatgtctgatctatgaccacgtccactgtctgtaatattcgtgaaccaagcttagttaactgttactaagtgcagagtcatttgaaaaatgtgtcaagtaatagaccatttggtgttttgcaggcattgttcatttgatacaaccagtccagtttatttcaattattaattgtgtcagcattaatcccttttatggccaaaagaggatgtgtcttttgtacgtcacacactcacatgcaacagtgagctcgtcaactaacattacagttgtaatattacattctgagtgattgatactcacacacagaatagcatggaagttatccatatcctctggatctgaactattaaatctcttatccgtaatagttgcatcaacaatttctgctcctgcatctgtgacatactgtaagatgtaactttctttaacaaatgtccacattccctgtgtgaattcaatccacgctactacaggcttgaatcttgtgccaaggtttgcagctactttgcttaagcacaggtagtttgtctttactgcatcgtagacagcattagccctgttttcagagtttgtgaaagttcccaggtacttgatccactcagccatctgcaatggtgtgccctcttctaagggtacatatgctgcaaagttgcaacctctgtcttcatctgtatcgcttatgaaatgcgcagtaaactgcgagagtgtctgcacatcagttctattcacaagctgggcatttccacttgtatatgactggagcacgcactgagaagcgacttggttcgatgttattcctttcaagctctctagcactccaagcagctgcatatatgtcaagtgtacttatgagtttgccataagcttaaagcatactctctcttgattggctcctctgtttcttttgctgctcttgttttaatgtgtatgcatacttgttattagtaacactgtcctgagtacaattttctttagctttaagttcggagtagatgaggaattgaatatttagacatttttctgagttttttttctttcccttgcagaaggacccattgccaattggactgcactgcagagtctcatgcattgctcacctcaaagaatgacactggagaggtcgtggtgtcgacggagaagctggcgagggggatgacgaacgacttaatcctccccgtgcagtacttcgtcttggatgccatcttggacgtgttctgcatgagaaggtagctcttgccatcgccggagttcttgatgaccttgaagctctgaccgtagtatatccggaacatggtggcgtcctccaccctggacaccggcccggccaccacaggcgccggcgcggccgtggccgctgaagcgagcgccgaccacagcagcaccgcggccagcaggcagcatctacgaacagcggccattgccttcaatgcacggctcacgagctcttcccag

SEQ ID NO: 2775 - DNA, 614 bp, Zea mays
  Clone ID: MRT4577_102528C.1
ataataaaggaaccgatcacagagagagagatgagtatatactctatcatgaatggtgttaagaagaaagcggacagcgtgcactggagaacatactgatgcgtctgcaagtcatgagagatacaccaacaggcatgaacgaccgctcgccgaaggtagccgagccggatggctgcctcgcaacaacgtacagggggacgatgctgccgaacaagctgtgctacacgacgggagacatgtcaaatacagttaggatgtctacacatcctcgatttgctcctgcaactatagtgcatccgctgtatgctacatcactatttacacctgatgcttgaggtcattgccgcgaagcacacaacacttacatgaatgggccgtacgactaccatctctccctctcgggagattctatccatgcgatacatggttcgaggcatacatacatgctttatgtatatgatatgcgcattattaaataaacgtgtcagctaaccgagcagcatggagtgttgtgtgtattctacgtacttatggtgatcgaatacaagtgaaatatatgtagaatgagggcaaaaaaaaaaaaaaaaatgctcctagagacctccagctacatc

SEQ ID NO: 2776 - DNA, 349 bp, Zea mays
  unsure (1)..(349): unsure at all n locations
  Clone ID: MRT4577_102529C.1
aggaancggcgggggggtggctttgtttttttggttttttttttttttttttttcccaaaaccaaagaatgaatgtatggttgttttttcgggccccccaaaacggccccaggtgcnngggagcgagcccgaagccggacgatcttacattctggggggggacggttttccaggatttttcagggccngggggggcggccctgttattatattcccccaatagaacgaatccttgggcaaattcaaaaacataatcaaaacggcctttnccccagttcaccgggctgggaaagaaatcccattcttttttcccctccagacattccttccggggcccaaaatttggttt

SEQ ID NO: 2777 - DNA, 387 bp, Zea mays
  Clone ID: MRT4577_10252C.1
cccacgcgtgcgcaagattagtgggttggcaggcccttctgcagaaaggactgatagaactgcaagtccgcaaatctctgtgctaggaaataagttggtgaaagttaaccgagtttttgtaccaacaagtggcacagctacatccctgacagattagtttctgcagctgaagctttgcttagaaggactggatctggttctggtcacaatcgtgagcacaccaagcacagaagtcttatggagtcactgatgccatccaagactgttgtttcggataaagcaaggccacaatcatcgtcgcgcaacgggagcacatcaagaagagctgtcatttcatcaagcaaaccaagctcttctggggatctaagcgaccccaaccgcttgggg

SEQ ID NO: 2778 - DNA, 521 bp, Zea mays
  Clone ID: MRT4577_102530C.1
aatcaaagtttatataaattagacaagcaatccggttaggaatcgctctagcctaccaattcggcacaaaccatcaaggcctatgtatgcggctcaattcactgactaagacaaagagcaaagcaggctcaacataaggactgagctccgaaacacggttaaaagtggcaagagtctaactaataaattaagcaagtgcttttcaaaaaccatggccggaaagtagactagatctgtggctcgattccggacggcgggaacggaaaatattatgggtattgggttcagggatttacgcaaggggtctcattttttggcataagatatatccatggcgctctccggcgagatcttgaagcccttgtgagcctgcatagccaccatggactggccgtcgttctacaacttcacaaagcaaaaactgtttggcttccatcatactgactttccagaagatgggatactgctggaacaggatctggagcatcatgctcgtagtctggtctgtgcaagatctggat

SEQ ID NO: 2779 - DNA, 278 bp, Zea mays
  Clone ID: MRT4577_102531C.1
gggcacgcagcctcctaggagccaacgctcagtcttgggccagtgagcttcagataaggcgcgatcacctgatgatacaaatcttcgggagcaccctggcggtgaagactgtgaccctgctggtggatagtgacggagcaatcgtcggtgtcatggtcaaaatccacgcacgagggaggcatccctgccgacacacatggcttagtgttgtcggtgaatacatgtcagagacgggcgcaccttgcgtcgactacaacaagctgaatgggtccacgctt

SEQ ID NO: 2780 - DNA, 285 bp, Zea mays
  Clone ID: MRT4577_102532C.1
aggaacgcgccccaagcgttttttttttctttgttctgttggattgaaacaatgctttcttcttctaattacaaatggtcattcaagtcattgatcacactggactaacggagtgggacccatgaccatggttggcagcgcaagtacgggcagggagggggctggccattggaagagagaaggcggttctctttgctctaaagcatacaggacctaggacgcgcaaacgcggagcgcggccgcgcccgcgccgagggcgagttcccgcccgctggcggccggttc

SEQ ID NO: 2781 - DNA, 467 bp, Zea mays
  Clone ID: MRT4577_102533C.1
cgtaagctcggaattcggctcgtgacatcctccaacctatattgacagcccacagctaggttacccgccggggctggctctgaagagagggcgcctgaggtgcgcgaccctgacccggcgcgccgacctctgctccgagccagctcgcacgagccacctggctgggcgccacgaaggcgacggatgccgagctcaagaggaccgagatcgaccactagcaccaagaccacggcggcacgactgacccgggcgccggctggagaatgcccatgcaggacaaagactccatcaaggactgcacacataactgacggcaccaacggcagactgcttcgacgcgcgtccacactgagcggccttagcctacaagggcccacgacgtcatccatctgtctcgagactcctcgtcgttgccgacggccatcatactcagggacagcaacggcaccctcaccgctttacgaacg

SEQ ID NO: 2782 - DNA, 431 bp, Zea mays
  Clone ID: MRT4577_102534C.1
cccacgccgtccgtgcgtctccgcggacaccgtcctcgtccctccgggaaagaggcggcggagggcggcgacagccaaggccaataagagggcccgcaaggacccctctgatcctcctcccgccgccgggaagaggagctccgtatacagaggagtcaccaggatcatctcactccgaaatctctaaaacacgggcacatgaggataagacaaatggaggatacatatgtgcctagctcttttgagtacttgtgaattgttaagcatagttaggtgcccatgtgttacatttttttgaacttctcgtccaaggtaattgtatatcagcataatcagtttgatgagctccaagatgtgtatcaccacaaatgttttttaagtatttctatgtaccaacaaagttttgactgaaaatatctctatctttatat

SEQ ID NO: 2783 - DNA, 613 bp, Zea mays
  Clone ID: MRT4577_102535C.1
gccgggctcaccctgctgtatcgccggggccggctgccgggcacacgtgcctggactacgccatcacctgcctagttgcggacgtgctcatcgcgctgaccttgggacatctcggagacagcaggcgcgcgatgcccaacttattcacgcagctcggcgcaatacaactggccctccgagctgttactctggcgggaggccttgtgcttaccggaagcgaactctccacccaggacgcttggtcctatgcgggcctctccgtcactgaggtcatcagatacagcatggctgtggttatatgcaccacgcatgaactactttctggacaaccgtgtcgacaaggcaaagattctcgtccctggagaggcgagcttactctggcgcgttatactagtccacgctgtgcagttccttgcatgcagctgacaatgagcacaaactcgttgactccacgaatgccttcgatcccgagaaaagtgtgactgtggaaccaagcagacaagccggagaaatatatgctcacaaacacttggacgagagtggagcctctggaagccggcaacctcgcagagctgaggcttgcacctgcatgagtatcttgttgagcttgaaa

SEQ ID NO: 2784 - DNA, 397 bp, Zea mays
  unsure (1)..(397): unsure at all n locations
  Clone ID: MRT4577_102536C.1
attaaattaaattattttaatctaaagaaattacatattataatagttcaacgataaatctagtaagtttatttttacgctgtataatcttataaaatatatgatatagccgatcaaagtttgaattagaacaaaactaanaaagataaacgtagggactacataacgttaggttaggcatgtagactcttgaacaaggagcttctagaagctgatgatgatcgacgatggtctaatatcagagcatagagcggtggccgatcgagccttaactgcggcgtggaggatgcagtgatgacgatggacgcacagcagcacagcaatggcgggaatgcccaaccatgcatgtataggccagggtggacaggcctcatttatagtgaattgaaagccttac

SEQ ID NO: 2785 - DNA, 340 bp, Zea mays
  Clone ID: MRT4577_102537C.1
acaaggcgcgcgcgtggaacgcacgccgaggccttggccgcgctgccgagcacggacgccagcagcgcgaactggaggaagtggagcatcgactcgtcgccggcgctgcgcggtaccgctcctgcaagcgtgtgcatgtccatgcatgtgcacgcgtcgactgcaagtgggacgcagaaattggaggtcgcctatgtggtccacgaaggcgttgagcgcccagctcgcagacaccaacatggagacatagagggctgggttgaacacgcagcaaaggaccggccacgttccttttacttatcccctacaccgaccactacgccaatatatattggcccct

SEQ ID NO: 2786 - DNA, 530 bp, Zea mays
  Clone ID: MRT4577_102538C.1
ccctcctcgagtttttttttttttttttttttttttttttttttttttttttttttttttttttttttttttttttagaaaacataccccttgaattttttaataaatatagttttcccggttgaactacaagttgggggagctaaaaaaaaataatggggggcttttgaactacaaggggggctaatttttaaattaacagggcgtaacaaggaaacatacatttggtttttttcactttgccgacccccaaaaaattttttcacccccttttacatacccatgggcccagttttcaataaatcatgctgaaacaacctaatcatcctttttccgattccatcgaaaaacatataacaggttgcccttttcaaactatggggcaggctgatttcactccctcccccaaaaaaaagtttcctggtccaataaaaaattttgttttcccaaactgtaaaaccatttacagctccaatgaggttccatttatgcttgcaagggaacaattcacattatcatttaagctccct

SEQ ID NO: 2787 - DNA, 456 bp, Zea mays
  Clone ID: MRT4577_102539C.1
cgacccaaccctctataaaggctcatgttgacatcttcacctgccccttggatgtcgcccaaaccgagaccaaacgaacagtcgtgatgcacaacgccaatgatatgcgtgattgcactaaaggagaggagaagcacatggagcagatgttgcaaggtatcgccgatgcatgtgtcaatgtcgtcgtcagtggcaatgatgtcggagagctcgcccttcactacttgaacagatttggcatcatggtcgtcaaagttctctcaaagtttgatctgaggagattgtgccgtgtcactggcgctaccgcgctggctcgtgttggtgcccctatggctgaagagatgggattcggcgacattgtcgagagtgttgaacacggaggtgaccgtgttactgtgttcagacatgatgatgagatttcatagactgccacgattgtcagtcgctgtgccaccc

SEQ ID NO: 2788 - DNA, 764 bp, Zea mays
  Clone ID: MRT4577_10253C.1
cgaggaatcgcctcgcccgggatctctccccccccgcgaatccccaggcccgctggccgacaggagggcgcgatcggctccagcgtgagcttgacttgcgttgcggcggggacgtcgccgacgctcggcacggggctcgtcggttcggcggtcgctttaggctcgggccccgtcgaggccagcggtgccggggcaatgcggtcagttcgtggagctgtttgaggcgcttggctgggatctgagggtgccagcgtgccaggtaggggaagcaagcgagctctctgtcggtgggggagctgctggtggttgtaagtgtagagcgcgcgtttggctgacagaatggagcacgtagtcgggggcaagttcaagctcgggaagaagatcgggagtggatcatttggggaactttacctcgccgtgaacgtgcagaatggcgaggaggtggctgtcaaactggaatcagtcacatcacgacatccacagcttcactatgaatcaaaactatacatgcttttgcagggtggaactgggattccacatcttaagtggttcggggtggaggggcagtacaatgtcatggtgattgatctgcttggtccaagtctggaggacttatttaactactgcagcagaaagttctcccttaaaacagtactaatgcttgctgatcagatgatcagtagagtagaatacatgcacacaagggggtttctacatcgtgacatcaagcctgataattttctcatgggtttaggacgtaaagc

SEQ ID NO: 2789 - DNA, 388 bp, Zea mays
  Clone ID: MRT4577_102540C.1
ggagggcaacaaggggtccctcacatccagccaaaaaccgctggaaaagcaaaggaaccatggccgggggaaaaaaaaaaaaaaaaaggaaaaaagggaagaaaaaacccacccagccaaggggccccggggaccccaagcaaaacccaaccacaaaaaccacccatgggactagctactaactcaccccggagctaacttgctagctagcccgggggggggggcccgggggccccgacaaaaaccttccccggggcttttaggccaaaaaacttaccccccgcgtttggttgaagttgtcaaaacccaaaaacccggggaaggggccccgggaggaattaaagggccccttcaagtcctttgacacccgggggggggccttgcaacc

SEQ ID NO: 2790 - DNA, 244 bp, Zea mays
  Clone ID: MRT4577_102541C.1
tgacgctggtgatcacgcgtccgtgcccatgctgttgctgagtgctgttggctgcggcactccttacacggaccttcaggtctctcttgcctctgcgacggtcgtcttctgcgacaacgtgagcgctgtctacatggcagctaatcccgttcatcatcgccgcacgatgcacattgagatcgacatccagtttgttcgcgaaaaggtagcactggggctagttcgggtggtccatgtcccctct

SEQ ID NO: 2791 - DNA, 261 bp, Zea mays
  unsure (1)..(261): unsure at all n locations
  Clone ID: MRT4577_102542C.1
ctcgaccaaggaagaaccaacggacattttttcacacaaaatccacatancttgcgcgcccaaaacattcttctgcttgtcacactccacnacattccaagcatctcagaccccatccctgctcctaaggctcatctcgtcgaccgcaacaccccgacctatgtaccaccccaccgtcatcatcactaccaccaccacttctaaaactactacaactcctttcaccgttcccaccaccccgccacactcgccacaaccacc

SEQ ID NO: 2792 - DNA, 370 bp, Zea mays
  Clone ID: MRT4577_102543C.1
caaggatagatataaggtacatttcttccatttgccatactgggtcattatttggcgtggacgcgcatgagagctgcgcatcattaaattaagagaagaaaacagtccaaaatggaccaaagtacaatgccaaaatatgcaaaacacaagaccatcaattcctgctgcgcacagaactacagcctccttctgcgcatgaaaacaacagtacgcaaaataagaacaacagcataaagtgccagcagaccacacacacaactgctcttcactaatcacccaacagaacccttgacctaaaaattgcagcaccaggacccataacctcaagatgtctagcactgggtcattattctctgttgcaattatgttc

SEQ ID NO: 2793 - DNA, 450 bp, Zea mays
  Clone ID: MRT4577_102544C.1
gggcggggggggttaaacttaattttttatgaaaaatttaggaaaggtcaatccatcgcctgttgggcattgggatacttttgatacccccgggttgtttagctttcacaacaataaccatttggggggatccctgaaaaaaaaagccccagcccaaattctcgttgtaagcagcttaatgcagcttgaaagcacacattgtagcggtttgttttttttgaacacgggtacccgatgctgctgctaggttggggaaattgttgccattattaattaatgaaaaaagaccgtgatttgattattaaaggcccaggagctggcaattttcccaaatggttttgggggagccgcgcaaacgtttggccttctccctggggagctccattttggggacacccttgacccccgcgcgggccaaccttgcggtcaagcttaggaaaaacatttttc

SEQ ID NO: 2794 - DNA, 988 bp, Zea mays
  Clone ID: MRT4577_102545C.1
actcctaagggcgaatgggaccctcgaggccggccgggaatattgtctcccgaatgctcccccggggcagccctcggaatcagactgacaataccgtcctcaggacaaggcacctcagaagcccttctcgtccgcgccgcctccttgaccccgctggccggcgagctgctcagcgcggcttttttttgcatccacaatgccgcagcttggcacatgttcattgcctggagctgcaatctatggcacttcaactaggagatttggaggtttggagtttcagcaacataaagttaatcacatctcatttggtcggaaagcgtctgttaaagcaacattgaaaactgtgagatgcaatgccactcaaacacaaagcgtccaaaagaaatcttcaagtgcaactattcagcgtgataagaaaggaaatgtacaagggccaaaactggatgacggaagcggtgggttccctccattccgctttggcaaaggtgggggtggtggtggaggcgggggaggtggcagcaactactttggcggattccttctcttctcatgtgtgttgctcttggactacctgaaggaattcgagaagtacctgcttgctcagaggcaccgagctggagatgatggcggcaacgggctgttgcaggcatgattgctttccgctggtctcactggcactagcagctactagtttctgatctgaagtgcttccttttgaacataacatgtgtctctgggttaaaatccaactgcaattgattgttctgggaacttgctctgccaaaaaaaaaaaaaaaaaaaaataatatggaaaacgtaaaatgcgtccactcgaactttctcacctcgtcttcagcaaggttcataggaagttaggaacacagtggttaaaactccaagctcttcggaggaacttttttatggtcataataaggaaaacatctcctaggatgatgggaagttcatagtcaaaaaaaaaaaaaaaaaa

SEQ ID NO: 2795 - DNA, 469 bp, Zea mays
  Clone ID: MRT4577_102546C.1
gccctgttccgtgattaaaccacatgatcctgcctcctatttgggttagctctgcccggaggccgaccaatattcggggcattgcctatagaaaaaggtcaggtttcagccaacatttttcttgctcccagcgctttacaagcccaaaagaaatttgccgggggtctaacaaaccggcacatacgattccgtcattggactacagggcataccaaacaacctcccaaaacaaaaagggcttgggcagccttttaaaacccggggccgcccttgaacagggttaaaccaatgcaccacccagccttgcctgcttccaagactctaaccccacttaacccccggtgccttaattttttcccccttcccttaagggttcaaaaaatcttgcccgggaagagaactcctgggatttggagattcatttccaccaccttatggcccacaaggatttgttcttccttgccaataa

SEQ ID NO: 2796 - DNA, 810 bp, Zea mays
  Clone ID: MRT4577_102547C.1
cgggccgggcctcggaatagactgacataccgtcctcaggacaaggcacctcagaagcccttctcgtccgcgccgcctccttgaccccgctggccggcgagctgctcagcgcggcttttttttgcatccacaatgccgcagcttggcacatgttcattgcctggagctgcaatctatggcacttcaactaggagatttggaggtttggagtttcagcaacataaagttaatcacatctcatttggtcggaaagcgtctgttaaagcaacattgaaaactgtgagatgcaatgccactcaaacacaaagcgtccaaaagaaatcttcaagtgcaactattcagcgtgataagaaaggttcaaattcagagttctcatactacattcagaaatgtacaagggccaaaactggatgacggaagcggtgggttccctccattccgctttggcaaaggtgggggtggtggtggaggcgggggaggtggcagcaactactttggcggattccttctcttctcatgtgtgttgctcttggactacctgaaggaattcgagaagtacctgcttgctcagaggcaccgagctggagatgatggcggcaacgggctgttgcaggcatgattgctttccgctggtctcactggcactagcagctactagtttctgatctgaagtgcttccttttgaacataacatgtgtctctgggttaaaatccaactgcaattgattgttctgggaacttgctctgccattgatccgtgtggtgtcaagtactgtggaaatcgtctgctgcgtccactcgaactttctc

SEQ ID NO: 2797 - DNA, 694 bp, Zea mays
  Clone ID: MRT4577_102548C.1
gtctgccgtcgtgaggtactgaggcttttttttgcatccacaatgtcgcagcttggcacatgttcattgcctggagctgcaatctatggcacttcaactaggaaatttggaggtttggagtttcagcaacataaagttaatcacatctcatttggtcggaaagcgtctgttaaagcaacattgaaaactgtgagatgcaatgccactcaaacacaaagcgtccaaaagaaatcttcaagtgcaactattcagcgtgataagaaaggaaatgtacaagggccaaaactggatgacggaagcggtgggttccctccattccgctttggcaaaggtgggggtggtggtggaggcgggggaggtggcagcaactactttggcggattccttctcttctcatgtgtgttgctcttggactacctgaaggaattcgagaagtacctgcttgctcagaggcaccgagctggagatgatggcggcaacgggctgttgcaggcatgattgctttccgccggtctcgtctcatgattgctttccgctggtctcactggcactagcagctactagtttctgatctgaagtgcttctggctgcccttttgaacataacatgtgtgtctgggttaaaatccaactgcaattgattgttctgggaacttgctctgccaaaaaaaaaaaaaaaaacggcccctagggcc

SEQ ID NO: 2798 - DNA, 334 bp, Zea mays
  Clone ID: MRT4577_102549C.1
cttctttttgaagggctgcaatatgatctctctggagctggttgtcttgttgttgcgcggggcagtagaagaacgtgccgttcccctgcgttcttatactgcgcgggaacagtctgtacttgtcgaaggggccatagccggagtggatcaccggcgtaaagtttatccctacctagaaaaccattggcgtatcggctttgggccaggggagcccaaaacccgggtggataccttgatcccccgcatccctaaaagtgagagagacgcgctgcccctaggagacaaatataatgtatcctctgcccccctaccttcggctttgaggccaacgaat

SEQ ID NO: 2799 - DNA, 454 bp, Zea mays
  Clone ID: MRT4577_10254C.1
aagcaaaccgggcatgggatggaaaacaaacccgggggggggaaacaagctttaaaacagggctgaacaagcccaaagcagtataaaaaccaacccccccttatttttacaaagaacgggacaaaaaaaattcggaaaaccggggccaaaaaaccaaacaaaaaaaaaattttttgattctaaaacccccccacaaaaggcccaagggggggggcggcccctggggagggccaaacccaaaaccatgtaactggaaaggcgggctcggcacaacccggaaaacaccggggggccccttgaaaaccctgacccgggggggggggagcttcgcggaaaaacccctgggggggttcttggaggggaaaaaaactgggcccctggccttttgttccctccccaaaacgggggggagggggccgatttgaaacccccaaggggggggggccccgggggg

SEQ ID NO: 2800 - DNA, 432 bp, Zea mays
  Clone ID: MRT4577_102550C.1
actgcgcctgcaggaagacctccgcggcgttccagaggtccagatctaagcgtggatggtgaagaagaaacggaacgtggataacctaaatgctgaagtggataaagcgaagaccatcgttgagcatactgctgttatagaactccagcgatacgggaatattctgttttcggaaaggacagagtcgtcgacaggttcaacgaagagctagcgtggaacactgacctacacagtggtctgaaacaacaccgtgacggtcatgctaaagcctgctgactaatacgaccaccggacctagctctgaaacacgctaaggtcgagtgatgcaaatatgcatgacacagtgcgccgtttgagggtgcctctagagggaccactctaacgtataatgatgcatatatccattaaactggcggccgttcaagcatgcat

SEQ ID NO: 2801 - DNA, 243 bp, Zea mays
  Clone ID: MRT4577_102551C.1
gtgcaggactacacatctggagacgaaaatgtgtccctcgacgacgaacattccggtgacaatgatgactttgatcggaaagaaggggttgtataggctcagacgcggcggtgtgattgcttctgctgcatgagggaccctgctctagaggctgccatctgcaccgtcgatggaagcataattaacctgcctgtcctgattggttatgggtatacatgaaaactggagtgtcgcgcctaacac

SEQ ID NO: 2802 - DNA, 328 bp, Zea mays
  unsure (1)..(328): unsure at all n locations
  Clone ID: MRT4577_102552C.1
aattcngcacgagggctagggtgtggtggggggcctcttatcatgcatcacacacaaactcagcgctgctgcttaatatcaatccagcatacctctcccatatatcatagagggaacagcctacattctcttttactacatgcgtaccagtaactccacagcacaaatccttaatgaaagaacatcgggggggggactgcaccctttttttacaaacctacaggacatcttaccaaggacccacgcgaagttccaaacaatcttaagaattacgtgcatctgggtacgcgcaaccagaggcaacctctaacaggtttaggaaacgcct

SEQ ID NO: 2803 - DNA, 272 bp, Zea mays
  Clone ID: MRT4577_102553C.1
tgagacgtattatctccagtctcgatggaactcagatgcgccgcgctccggccatacgcgctgccgtcggcgtcaccggtggccgccagggtcgcgagcaggagggggccaggcactgtgacctgcgtctcgagcggggggttccccgaagacgggcacctcatgtactacgaggcggccccccggttgaacgcagtggtggccgttgctacggaccttggaaagctccaggccatggggctcgtcccgcgggacccagtcaaggagaacgt

SEQ ID NO: 2804 - DNA, 392 bp, Zea mays
  Clone ID: MRT4577_102554C.1
cccccccctcttttttccgggtgtgtgtgttttttttttttaaaccaacaaccctttcggacggtttattggatatttgcttggccgggctttacaaaaacgctgggggacaaaatgcacaaccccttaattcctggctgcctaaagattgaaaatgaacaaatcttcctttggttcctagcgaacagcatataaccaaattccggctatgctaacaaacaacaagactcggctttgcccaaagggtcttgccttgcatgccctacacctggggagagttttccttcgaccacctttgggtggcgggggatgcttccatttcactcccggagatttaggggaaactttatccccagttgctcttcccttaaaaaagaaccgttttgccccca

SEQ ID NO: 2805 - DNA, 256 bp, Zea mays
  unsure (1)..(256): unsure at all n locations
  Clone ID: MRT4577_102555C.1
ttccttcnttccccccccgacccactcctcctctcttcctccttcgccctctctctctctcactcaaactcctcgtctccaaactcgccagggaacacgcgtgccagggttagcccaccaccccatgggatccggatcgccctgctgcataatgcgcaaccgccaacggctactacctcttattttactcccacggctgcctctaccccaagggcgccctgctggccatcaatattgccctcgcgctactaatgct

SEQ ID NO: 2806 - DNA, 295 bp, Zea mays
  Clone ID: MRT4577_102556C.1
gctattatctaatcggggggtcggttcatattctaagaataatgcatggcacacaatgcacttcgaaaatggacgacacaaaaagcaagaccagcaatcacgacacgctgaatgactacttaaaccatcccaggaccaggacacacaaaaaggcatatataggccgctgccccaccaaagattgacgacgtgctgtacgacaaccgatgcacccgtgccaatcgatcttattacatggtgccattgaaggtgaggagcttccacatcctggacttggagccccggatgccccaca

SEQ ID NO: 2807 - DNA, 474 bp, Zea mays
  Clone ID: MRT4577_102557C.1
aaaaaaaaaaaaaaaaaaaaaaaaaaaaaaaaaaaaaaaaaaaaaaaaaaaaaaaaaaaaaaaaaaaaatttaaaaataaaaaaaaaattatatttaagaaaaaatttatgtttttttttttttattaacactcttttgactttttttttaaatgccctaatttttttttttggtcttttcttttttttttgaggggcctttattttttttttttgggggtttttaaaaacttttggttggccaattttaatttttttgcggatataaccttttcgccacctcgtattttccttggaggccccactttttttctttccgatatttcccttttctaattgtaattagacttttttgaaagggcctttattttttgggattttaggcttcctttagggtaacttaccccttgttatgcctttattcccactccttacctttcttttttttttttcttgccacattccttttttttt

SEQ ID NO: 2808 - DNA, 3314 bp, Zea mays
  Clone ID: MRT4577_102558C.1
ttataaaaccttcctatgaagtatgaacccatctggacctggcgccttgtatgatggttgcttctttatagattcaagaacctccttttcatagatcgatgcatccaaatcagtcaagtcatgagagggtaaacccaagaagtccaggtcaacagtcatggatttgtccaccctgcagcccaaaagcttacaataaaacccatccatcgctttggccttctcatcatgatcagtgtatgtgtcactacccgagacaagtttggcgacaaaattcttcctttttctgtatctagcatgcatatgaaaaaattcggaattggcatcaccctccttaatccagctgattcttgatctcaaacgggcaatggtacccttgagggaagcaagggctagtgaatgctttttaagacccctcataagccaattattaagccacatgaatctacgcttgccagaacacttactgttaagcccaagaatcagtgggcaatgatctgagtcctcatacacagcactcttcctatgaagtatgaacccatctggacctggcgccttgtatgatggttgcttctttatagattcaagaacctccttttcatagatcgatgcatccaaatcagtcaagtcatgagagggtaaacccaagaagtccaggtcaacagtcatggatttgtccaccctttttatcactccaaccttgataaacttactattaagccacatgaatctacgcttgccagaacacttactgttaagcccaagaatcagtgggcaatgatctgagtcctcatacacagcactcgcccaaccaaagaatgctgccaatgcttcaacatgagaaagaggcaattctttagagaaaactttcagatagtcttctatggcttgttggctgattccctccgagtccccaatcactttcagggccttcatgactcttttagtgaaccttgagcataaatcctgcttgtcatattgaacccccacccccgcaagtcgacaactgcgctgtgggataacagcagaagattgggcactcttcaacgtcaaagaaggatcatcaggtgttgcaagaaggctggagacctctttggcaagtttgtcaaagaattgtttatgcacatatgaaagaatgttcgtttcagccgcctgtggagctaactgaatagcatcaacgctagcggctgaactgaactcagtctcctgaaccgttgtcactgcattttcttcagtagcgttcagacccacattcaatggcttcgcaaggcaaccaagctttggcaccttcggctacgaagctggtgctcccaatcacaggcggctcaagttctgaaccagccaataagaagcagaagaaggaagcacagagaagggtacaacatgttggagtgcaaggacccttcatcaagtccaagtggtctcatgtaccaatcaccttctcccaggaagaccttcagctcaaggattatcctcataatgatgcaatggtcatatcttatgtcatcaaggggtttctggttcacaatgtccttgtagacacaggcagtgcaacagacatcatctttgcaaaagctttcaggcagatgcaggagcaggatgacaagatacatgatgcaacacaccccctctgcggcttcggaggaaggcagatagtggcactcggcaagataactatgccgatgaccttcggctatgttcacaacacaaggacagagcaagttgtctttgacattgttgatatggagtatccttacgatgcaatcattgggcgaggaacatttaatgccttcgaagcagtacttcatccagcatatctatgcatgaagataccatctgaccagggccccatagctgtgcatgggagtcaagaggctgctagaagggccgaagggaactggacagattcaaaggctatccataacatagatgaagccgaagctcatcaacagtacacgcataaaagagataaggatgtctttgcttggtcagccaatgaactttgtggtgtcaacagagatgtcattgagcactcacttaacgtagatccgtctatcaggccaaggaagcagaagcttcggaagatgtccgatgacaaagccgaaggtgcaagaaacaaagtcaaaagtctcttgagtgctggagtaatcagagaggtaacatatccagagtggctggccaatactgtgatggtgaagaaggctaatggaaagtggaggatgtgcattgactttacagatcttaataaggcatgtccgaaggatgagttccctttgacaagaatagactcccttgtggatgcatcagctacctcggagctcatgagtctattggaatgctattcatgctatcatcaaatttggatgaagaaagaagatgagcccaaaacaagcttcataacccctagtgggacctactgttacctttggatgcccaaggggctcaaaaatgctggaggaagcttcagcaggatgactgctaaagtcctttgctctcagattggcaggaatgttctaacatatgtcgatgatatcatagtgaatagtaccaagcaagaaaatcacatcgctgatctacaagaaacatttgcaaattttagaaaggcaggcctcaagctcaacccagagaaatgtgtcttcggagtaaggaaagggaaatttcttgggtgtctcgtgttaacaaaaggaattgaggctcacccaaacaagatagaagctatactttggatggaaccaccaaagtcaagaaaaggcgcccggttggcctcattgaacagatttatttcaaggtcaacagaaaggaagccattctttgaattagtgcagcgttggtgcgagaaaagcaagatggccaagcaaagacgggtccaggacgaggaaagaacaaaagataacgaggcttcgacagtgttctgtgatgggtcatggggaaccttcggagcgagtgcagctgccattctaatttcaccatctaagatgagaacctgctacggagccaggcaggagttcaactacacaaataacattgtagaatacaaagcccttgtcttggggcttcgaaaactcgaggcaatgggaataagaagggtaaccctcaaatctgattcacaagttatcacaggccacatcgacaaaagtagtaaagcaagagatccgaagcttgagaaatatctcgatacagtccaaagaatggaagcctctttcgaaggtttctctataaagaatatcccaagaggagaaaatgaacatgcagaactattagccaagtcagcggcacaagggctcccattacctttagaagtatttttgaaacaataa

SEQ ID NO: 2809 - DNA, 162 bp, Zea mays
  Clone ID: MRT4577_102559C.1
gtcatgtggatcggtgatggagatacactagcgaggatgctcttgggccatggacaaggtgacctttgctctgagactagagcgccatgaaaaaaggcgccagccgcacatgaaccttgtgttgctgaggggggatgattgtggtcatcatgatgggaggcc

SEQ ID NO: 2810 - DNA, 326 bp, Zea mays
  Clone ID: MRT4577_10255C.1
atagctctagatcgatagcgtccaccctgttttttaacccgttcgacacaatgtagaaatggactgtcttatttgttctacggcacatacatgagagcaaaaactttatgcttacactatgactcataagatatctaacagaggggaccaccaatgtagcggctgcgggcgaatgctcattgctttgtaaaagcaagctgcgtgaaagtgaccacctgctgcacatgtaagagggtgccagcatttggcacagcgtgctgatataacggcaacaactgatgtggcgtcaagaacatggcactactctaatcaactagctgggtgta

SEQ ID NO: 2811 - DNA, 149 bp, Zea mays
  Clone ID: MRT4577_102560C.1
tccagtccagtttaaatgagcagccacaccgtaaaaatgttagtatgttaaagatgtatctaaatctgttttttttcttgttgtttggttgaaacaccctacattcttttgcattacaaattgtgtggaaaaacacaaatgatgtcatg

SEQ ID NO: 2812 - DNA, 390 bp, Zea mays
  Clone ID: MRT4577_102561C.1
cgacggaaaaaactattgaagaattctcatctgggcaataacaaattaaccattacatgtacctgatgcccacacacatgcggggtttaactgatctagcaaccattctatttgctagcggttatttcccagcgcaccatagaaggctgggaacggcaacttggctactgttgccttaaacccgaaacgaccccaacttgccctccaacagccggcgcaggatgcacacttggatgaccttggcggccataagtgcctttttctggaggaccccgttatgcactgtcctcctgctcatgaggtggatcttactgttggccggaacagcctggacctctagccagagctgtacaacctgaacatagccctggtaaccccggaccggtgcct

SEQ ID NO: 2813 - DNA, 185 bp, Zea mays
  Clone ID: MRT4577_102562C.1
cttcaaaggaaaaaaacccccccaggggattttttttggtgtgggcctcgtaataaaaaccccagttgggaaaaaaccttattttcatggatgctataacccttctaacatgacaaactaaaactccttttgcccaaaaccgattttgtccaaccattcctgggacccatacaatttggatgcct

SEQ ID NO: 2814 - DNA, 560 bp, Zea mays
  Clone ID: MRT4577_102563C.1
aacttctctcttatcctcgcctcgacttggtgtggccgccgccactagtgaagtgcgagggccgagagtccgtcgtcacgaagtccgggctcgtcaaggaacaggccaaagacatggtctccaggcaccccgtcgctggagccggggccgtcatcgctgtcagcgccgtgggcgcctacttcttgaggcccgtggtgggcccggccgtggacgtgatgaaggcgcctggatccgtgggcgtgctcgtctctcgatcggtgattctcgcgaagaaggactctgtgcttcaagctcttgtgcaccgaaggcgttgtggctgctgtcgtcgctttggcgtacctgcgcatgcagtagcgtgcatgctgttagtgaacgagcggccggccggacgtttaaagttgtgtggagaccaagtggatatctagactttcctttagacgatgttgacacttgactatcgagatcggattatgtgtcagataccgatgtatgcgtgcatgatcaggttgatgattcatggtactctgttccgtctgaccgccgtcaaggagcagtggctg

SEQ ID NO: 2815 - DNA, 174 bp, Zea mays
  Clone ID: MRT4577_102564C.1
gcgacttaaataagcgtggcgcaattctcaggtcggtggagatatggagtgttactctctcttggaaatccacttggaagctgaaaggtccacttaaaattacacaactaagcttcctacgcaaggctgaactctgaagggattaggaaccggacgcgtgggcggacgcgtggg

SEQ ID NO: 2816 - DNA, 736 bp, Zea mays
  Clone ID: MRT4577_102565C.1
cccacgcgtccgcccacgcgtccgcccacgcgtccgcttttttttttttttttacgacatgattcattattgtaatccatccacggtatcttacaccggagcagagggagacaatggaatggaggagtcctaggctacagagccaaggccgcgcgccggcctggacacgcccacacagtggttgcccccacccgtgccactggaagtggtcaccccggcaacggagccccgccatcgccatcgccatcgccatggcacagctcggctgccgtcggcctcctctccgactcctcctccggcattccgtcaggtctccggctccagcggagcctccacggccgccgcgtccgggacgaggtgctccgggcggcaccaggcgacgaagtcgacgagctccttgccggactcgtcgtcgtcgcccgcgggcggcggcgagatccggagcagcacggcgaccgccaccaggaagaagcccgtggagaggagcagcggccagaagaaggacaccagggcgctgagcctgggccccacgacggagatcgagacggcggccgcggccaccagcgccaccgctacggccgcctgcacccggtgctcccacattagctcccctagcttccccttcgccgccaaggccgccggatcggcagcgcggccggacatggggatgggatgggagatctaggggaaagaaagcttctggagcgaggtagtagctaggggtttgccactcggc

SEQ ID NO: 2817 - DNA, 513 bp, Zea mays
  Clone ID: MRT4577_102566C.1
atttctagaaaaaaaaaaaaaaaaaaaaaaaaaaaaaaaaaaaaaaaaaaaaaaggtttgtccttcccgggcgggccgttcaaaggggcaatttttgaaaatttccttaaacttgggggccgttcaaccttccttttaaaggcccaatttccccttttagggagccgttttaaatttaattgcccgtgttttaacaccgtgggaattggaaaacccttggctttcccaacttaattcccttggaagaaaatccccttttccccagttgggttattaccaaaaaggccccacccattcgcctttccaaccatttgcccaccttaattggcaatggacccccccttgtaccggcccttaaaccccgggggtggggggggttccccccaggggaaccgttacatttgcaaggcccttagcccccgttcttttggtttttttcctttcttttttggccagtttggccggttttccccgtaaggctttaattcggggcctcctttaagggttccaatt

SEQ ID NO: 2818 - DNA, 325 bp, Zea mays
  unsure (1)..(325): unsure at all n locations
  Clone ID: MRT4577_102567C.1
tgtgtccgctactgccgggtgcgcctcangcgctcagttcctcacctaagcgggggcggtgnncgcgcgggagacgtnnngatggcggntgtcggtagggcggcgagcggtgggggggcnntcacccggttggactgccgacaggaggggtgacgtgtgatcgcgaatccacatgtcttggaggagtggagcatctcagagggtggggggccntctngcgccgttggagctggggggtgagtgacttcactgcaacatggggtgctccgtgccgcgccttggctgcngtttttgctgctttgggcacgaggtccccgggggttgg

SEQ ID NO: 2819 - DNA, 1098 bp, Zea mays
  Clone ID: MRT4577_102568C.1
gcctaactaaaacgggtctttctcccgttcacctgtgcacgctctttcccttcctcgtgccgacgaccgggcgaccgccgcgccccggcccgcgcccccttgtctcaggccactcgccggcaacgagcagccaccaggtccgcaggatggcaccgacttttatggagctagcactcgagcaggctaagtttgcgctggataacctcgaggtccctgttgggtgtgtgattgtggaggacgggaaagtgatttcctctgggagcaacaagacgaatgccactcggaatgctaccagacatgctgagatggaagctattgacgtcctgcttcgggagtggcagagcatgggtcttgatcagccacaggtcgcggagaaatttgcaggatgcgacctttatgtcacgtgtgagccctgtataatgtgcgcgacggcattgtcgataattgggataagagaagtatactttggttgtgccaacgacaaatttggtggatgtggatcaatggtaacaacgcagagtacgcggggcttcgtcgtcagatgaattatcagggagccaagcctctacaccaaaaggtttcaaatgcactggagggatcatggctgaagaagcagttgctctttttaggtgtttctacgaacaaggaaacccaaatgccccaaggcctcacagaccagtacgaatgcctcaacaataattggtttgttttcctggactacaatcataacgcaaaaacttcaggagtgcagacatacaaacttactgtaaaacttgtttaggattctttgtatgctttagtgtgacgcatgtatgctatttgatagtgtctttttagtctgggagcgcagccacatttcttgatcggaccatgcaagttggtcgatttaaaaggatctgtgacagaagagtttgccagtgtccgcaaaatcagcattatgcaattggagtagattgttttcatcatttgcaatcttgaaagaaatattctgtaatgatgtagatacactgcaacgtcattgactcgtgatatggtatgcttttctttgtacaaaaaaaaaaaaaaaagtactctgcgttgttaccactgcttaaggaa

SEQ ID NO: 2820 - DNA, 508 bp, Zea mays
  Clone ID: MRT4577_102569C.1
cttctcgccttcttttttctctagtgctactgccacgagacccttttgcgttgctctctctcccgcagcagcatataggatgggcgccaacgtctagccattgctgcatctgtttgggagaagcaaagcagggtccctccgtatttcccatggtttttgtgacttgtgagagagaacaaggccaaacactgaaacacatctctgaagtctgagccctgacccagcagcgccaagatccgggaccgggagagggacctgctccctggggggtgccctttttgaggcgtgctgaaatcactacaaactttacaagattcccctacaatggcgagcgatccgtcgacgttctcgccaatcggggtggacgccatgggcggcggctacttcatggccggcagcagcagctacggaggcggcggcattatgagcgccgaggtgccgcacttccaccaccccggcgtgcttcttgaccagggcggtttcgggctcggcggtctcggtaacgcgg

SEQ ID NO: 2821 - DNA, 249 bp, Zea mays
  Clone ID: MRT4577_10256C.1
gggggcaaaactttttttggtttttttccctcccttaataaggagaagtccaggggggaacatgtccaacctaaattcttcgtttgggttttccgggcccttaatccccctaaaaaactttttattttaacgcaatgtttttaattgttgggacaataaattactgccatggggaaggggggacattggaatttcagctgggccttttttagcatgccaatttaatttaattgttgggatactgaatta

SEQ ID NO: 2822 - DNA, 259 bp, Zea mays
  Clone ID: MRT4577_102570C.1
aatcggaggcggccgccctttttggtttttttttagggggggggggaaacacccgccctttgctggattttgggaccaaggcgaccggtaaccaggattcaatttccaggagtgggaaatttcctttttttccaaatttttttggggttccagaagctcccaaattgtgggagaagacaccatgccagggcattattgttacttacactgaacgccaaatccaacacatgtaagttcttggcggaccactaaattttta

SEQ ID NO: 2823 - DNA, 379 bp, Zea mays
  Clone ID: MRT4577_102571C.1
gggtacctcgaggccggccggggcttagatccttaacagaacagcgccggactgccttcaccctgcctattctttctcccgttcacccgtgcacgctctttcccttcctcgtgccgacgaccgggcgaccgccgcgccccggcccgcgcccccttgtctcaggccactcgccggcaacgagcagccaccagggatacaagaactagacccatcaaccacgattccatggaacatctctgctaagtgttccatgtccgcaggatggcaccgacttttatggagctagcactcgagcacgctaagtttgcgctggataacctcgaggcccctgccgggtgagcgatcgtgaaggaagattttttttttatacccccccccc

SEQ ID NO: 2824 - DNA, 774 bp, Zea mays
  unsure (1)..(774): unsure at all n locations
  Clone ID: MRT4577_102572C.1
gccgggacggccgcacaggcacagccgcaggcgcgtcccgcactcgcacgaccgctggccgctcggcagacggcagtcccgctccggctccggcgctccgctgctcgctcggccagctggcctgctcatgcagacagcaggctgcagtcctacctgctttgctgcttgtcccacccggcggccggctgatgtaggctgtttgtcccggcccgccgagactgcttgagtttaagtgcttgactgcttggtaactagacaaatgcaattggctagatctcctacaactagattcaactaaaggtccgcaggatggcagcggcttttatggagcaagcactcgagcaggctatagtttgcgcctggataacnctcgaggtccctgttgggtgtgtgattgtggaggacgggaaagtgatttcctctgggagcaacaagacgaatgccacccggaatgctaccagacatgctgagatggaagctattgatgtcctgcttcgggagtggcagagcatgggtcttgatcagccacaggtcgcggagaaatttgcaggatgcgacctttatgtcacgtgtgagccctgcataatgtgcgcgacggcattgtcgataattgggataagagaagtatactttggttgtgccaacgacaaatttggtgggatggtggatcaatcatgtcattgcacaatggtgctgcttcgtcgtcagatgaattatcagggagccaagcctctacccaaaaggtttcaaatgcactgggagggatcatggctg

SEQ ID NO: 2825 - DNA, 312 bp, Zea mays
  Clone ID: MRT4577_102573C.1
ggaaaaggggaaaacgaccccttcatttattgcataaaaaggaaatactgaactggggggaacaatccacggggctggaaaaaacaaatcctgccccctaaaatagggcaaaaaaaaacctgcccggtttttaatgcggggccccataccatacattaggcccaacgatttttaagctggcgtaaaaatttttttggcagccgtttttttcgaagcattgaactttttgaaccacttggctgaccctttaatgtaacgtttgcacccatcgttgcgggcaaaataaacaatgcccaaacgttccgggtagcc

SEQ ID NO: 2826 - DNA, 247 bp, Zea mays
  Clone ID: MRT4577_102574C.1
cccccatgggtggcatcgggggaaaataaagccgaccatggggtttaggatctataaagggacggattactactattgcgacgacccaaccgattatatgtttatgttaatttagaatggttttactcaaacaatttttatagaacctgcctgaaaagctgagtgttcgccacttcccaccattttttggcggccaaaacctacaaaaagtccaaacaaacaggaacattgtttacttgggcggccc

SEQ ID NO: 2827 - DNA, 1938 bp, Zea mays
  Clone ID: MRT4577_102575C.1
ggaaacaatagctaagtttcgttctgatttgcaaccaaatctcgggaaggcttcatcccaggttgctgcgattaaaattaatgttgttgctgttgctccaatagttggagtttgtgacagcaacaatgacatgtacaaagaacctaaagatcaagaaaccatcactggtccagtggcttggtcaccacaggctgtgcatgctgatgttgatttagacaatcacaatgaaccaattaatcctcctattgatggtactcaatcaatgtttggcgaagtcccaagtacagcttttacaggaagagaaaagggaaaatcaaaatctgtatcttttgctctatcggatgtttctgggatagctagccctatagataccaattctgagatgggtaacatcggcgattcctgtagtgacaaattgactgatgaaaatttaagtaactcatctcgtcatatcgctgaaaagcattctattaccaaggaccaatattcaaatgagcaggaccatgagcgggagccactagatcatgctgttcaacagcaaccaaaatcggatgttggagaaagagcatcatctatgaaacgacgttgcaggaaaaaggtgcaaaaagttgggacacctaatcacactgttgatgattattttggtgaagactgtgtcgaaccttcattagctgaagaagataacgatactggtgatcattacactactggtaataagcataaggctaggaaaaagtcaaggggtggtgtagaagagtcacagcagcagaaagctcaaaaaaataaaagcaaggtgtcttcacggggccgcaaacggaccttgaaggatgaatcgacagagaagcctgagaagaagctaacccacagaatacgtcagaggataccaaaagaggttaaggctttactggaaacacctcgtgagcagataaaacccatgaagctttgtgcatcacatctcaggttgttacaagaagctagagagcgtgttgatccaaaagggattccatccgggccatcctctaatacaagaaactttcaactagatgatatggatgatttgggctacagagatgaggaagctaggttctttgacaacgatataacagaggagcatgtacaaaatgcaacaaaattgaactaccattcctacatgaacaaaccagcccggggaaaatggtcaaaatcagataccgacttgttttatgagggtcttcgacaatttggtatcgattttgcaatgatacaacaattattccctgataagactcgccatcaggtgcggcagaaatttaaatctgaggagagaaaaaatccattgctagtccatgatgctatagttcatcgctcaggagataatttgtatttcaaaaaggtaattaagcagctcaacattgaagatgttgtgctgccagatattaaaagtacacaaaaacaagatggtgcatcaagtgaaagaggccctggaaatgagaatgtactggatgatttaaacgaggaggaaaatagttcaaattggttgaacgaagagcatgacgtacagatggctgatgtggaagaagagcatggcgaacagatggatgatgtcgaagaagagcatgatcttggaaatgatggtggtgatgatgatcttggggatgtttttgattggtactagtttgatcatggctggatgatgtggaagaagagcatgatcttggaaatgatggtggtgatgatgatcttggggatgtttttgattggttctagtttgatcatggctgggattaggactcacgatattatgattatgattctgctaatgttttgagtccgggccgatgcggacacttggtttgagaggcagcagcaggaagaggagatgttgcggctgcaggcagagcacgcaccgtgcagtgatgcatgcagcagagaagctgcacatggagaaactggccgctg

SEQ ID NO: 2828 - DNA, 800 bp, Zea mays
  Clone ID: MRT4577_102576C.1
cattgggacctcgagccggcgggatccgtgaacggtgaaccctcttgggttcttcgcgatttctccactgcttcaaccgggaccggccacccatggaggcctacgcgggtgccgcgcccgcggccggcgtcttcgcgggctacggcaccgcggccacgcgccccttcatcatcttcctccgccgccgcgggtctccgcgttccggcgccgggcgggtgcgcctcgtccgggcgccgccgccgccgcgcgctgccgaggacctgcccccgctcgacaagtgggacattatggagctggatttcggcaggttcctcggggaggaccccaagcttaccctcgccaagattcttcttaagaagtcagatccggatgcctcgtctctcgacgtggagaaactaattgccaaaaatagagacaagctagatgatattctgagggagtgcgtggaagctaataagaagggccagggtttcgacacatcagaaagtgggccctctttgaatacgacacggccaacaataagcaagccgaccgaatccaaaagttctttgaatatttccaagcccagtatgggcaaacctatccaaggagggactccattgactttacttcgaccagcaggaagcaaaccgaagcaagatggtccttctctggctcagtcgcgaccagttggaagcaaagcaagtgaagatgcaccttcgtttatcttgtcgcggccaattgggagcaatccaaagttaaggggcactccggtgcaagatagttggcccagtaaagagagtttagctgccgcaacagag

SEQ ID NO: 2829 - DNA, 771 bp, Zea mays
  Clone ID: MRT4577_102577C.1
aattcttgttctgacttactccacgtcctctttccccatgtcctataagctcttctgcagtaatgcctcctatgttgctctggcgctctctgctctcaacagctggcgttgacaccagcaccagggcaacaacgtctatcagggggactctaaccgactccagattgagctgcgccatctctacacgcccagtatcttgtggtgacgtcctcaactcagcgcagcccatcccttcccagcccttacaatctctgctcctcacacatgataatactgactcacaacctcatccagacaatcaccgggttcaagggcgagggactacgtctgtactgatgcttgttctcaccacaccaagacgttccatgagattgacaacaatgaatattggtctttgattcgattaccactgcaagacccgcgatctgaactacccatacatggacaagtgccttgattgcatggatatatcaggagctgctaatcgtagattgccttaacatacttcagccagctctgttgcaccaggggacgctgattgagatccgaatgctcacattgtttgactgcaaaacgcggacgcgaaattgaaggctctccgcgacattgaagaaggcgaggagctgtgcatctgctacatctatgctagcatggatgccgacgctagacagaagattcttgctgatggatttggcttcgagtgccgttgccttcggtgcttgtctggagactagaaagcatgtctactctcttcctgagcatgagtttgtc

SEQ ID NO: 2830 - DNA, 883 bp, Zea mays
  Clone ID: MRT4577_102578C.1
cggacgcgtgggcggacgcgtgggcggacgcgtggggctgatcaggccggctcgtgcaagccggcgtccgttgggtcttcggtggtactggtagaggccaagcccaagcgtggccgaggcaggccgcggaaggatggctctccttcgacactggccgttgctgcaatgtcatcggttgctgttgccggcaaggacgaaatccatgcaccgtccttgaagcccaagcgccgtggccggcctcgcaggcaggcaggggcggaccacagggacaaggagcatgagcctccgcgtgagctggcactggtgatcctcggtgatagctctgccgcaccgatcatggacaagccatgcacaaccttggtccctccaaccacgccgcctgtggacggtggccagcctatcgacctggctctggcgaccaccacagaggtgcctgtgcctgaacctgcggcaacgcccgccatggacaaggacggtgccgatgccgatgcttcttcaatcgaatgacagcatttgcacagcgcccacttcgccagagcctggcagctgggcttgcaagctggcactcgtgcctgctgctaatggtttttgattgctgacaagaaggatggccttacgaaggctccatctctgcaacctacaaggatgttcatcagcatcacaaggccggcactgctccaacactcaactctggcggcaagccggcaagggccgcaaatcagcggtggtggctagtggtgaccgtaattgacttcagtgtgtcctcttctactgaattattaggtggcttagcgcttacgagaaactcagtcacaacatcgatttaaactgtggatgataactggcttatttgaatctcttctgcaacttttgcggataattt

SEQ ID NO: 2831 - DNA, 160 bp, Zea mays
  Clone ID: MRT4577_102579C.1
cacgcgtacgcatgctcggaattcggctcgaggcctgcgcgatcgacactatttagttttcgaaggcacggacagaggcgggcggcgactaggaggctagttcggttcctcgcgcagaggctagccacgcttagacgttccgttgcagggagcagggtca

SEQ ID NO: 2832 - DNA, 845 bp, Zea mays
  Clone ID: MRT4577_10257C.1
cgtgggcatcgtcgaggagtccgtcggccgggtgctcaagctcgactccatcaccggcgacgcgtggctcggcgccgacgtcctcgtcttcaacacgtggcactggtggacgcacaccggcagggaccaaccgtgggactacgtccaagacggagggcaggtgatgaaggacatggaccggctcacggccttctctaaggggatgtccacatgggccaggtgggtcgactccagcgtcgacacctccaggaccaaggtctacttccagggcatctcgccgacccactacaacggagccgactggggcgagggctcgcggagctgcgcgcagcagacgcagccggtccccgggccggcgtaccccgccggccccgtcccggcgcaggccgccgtgcgggccgcgctggccgccatgtccaagccggtgtacctgctcgacgtcacgctgctgtcgcagctcaggcgggacgcccacccctcggcctacagcggcggccacccgggcaacgattgcagccactggtgcctcgccggcgtgccggacacgtggaaccagatcctctacgcgtcgctcctcctggcataggaccggggagagaaaaaaaaccgcacactgtataccaattggcgcaggctatagacatttcgtatttaaaaattggtgatttgattgtttctttttccttcttcttcttggaaaatcaatgttatgtcatatatcagcatataagaagcagcagcaaacgagtttacaataatgttgtataataacatgattgaaacctggggtgattcagttattaaaaaaaaaaaaaaataaaaaaaaaaacaacgaaatgagaaaa

SEQ ID NO: 2833 - DNA, 415 bp, Zea mays
  Clone ID: MRT4577_102580C.1
gtgaaattgaatggaagattgttatttcaatgccttctgtgttgtcaacaggtggagagggtattatcccggccagatgtgtatgcaattgaaagggcaaaggaactgcttataggccaagagcagtcattgcttgatgcaattgccaaacttgatgaagcatctgaccatgaaagcggtaagttgccatggattgctagatttcatgaatgctctatttaaatgaatagttgttctctggacagtgtaaatagatatggtgaagtaccaaatctttattactgtcatttatttcccttcaacatagcgacatatttccatgcgataggaggttccatgtgatgtttcgtgtactgtagtagttgtctggtacgtagtccagcaacatattgttttgaatgcatgctgacagctt

SEQ ID NO: 2834 - DNA, 408 bp, Zea mays
  Clone ID: MRT4577_102581C.1
tacgtaagctcggaattcggctcgtgcgactagagaagaacgtactcctgacacgacgcgaccaatggtcgtacaccgcacctccagaccggactagccctctagcgcccgcacatgcacgcacaggcctgccatctcctcgctggcagacccgtcgtcctcagcctgcatagcaagccagttgcaaaagcaggaaggctgccacattgggctatgtccacatcgacgctaccgccgactacatggccaaggaggacgaggcgctactaggcggcagcgtatacacggccgacgaggaggaagcacaacataaggcagtgagcccagaaagacatgcccatacgcgggcactcaagttcctctggacggtgaagaacatcaacattgcactggaccagctggctcctg

SEQ ID NO: 2835 - DNA, 293 bp, Zea mays
  Clone ID: MRT4577_102582C.1
attgggggtttttaaaaccaacctaaacccaaggcccaggtaaaaaaaatcctccattttgggactaaaaccgaatcggccagggtattttcgggggaaaaaaaaaacagatttccacatgaggggggccccagagaaataatctggggaaagccggttccctgtattttttgaaaaaagggtgtgcataaactacctttggctcgggggaaacttgaaaggttttttaccactgaaccaagttttggcccttttaatttttacaaactaaaaccctccaaaaaaaagttttg

SEQ ID NO: 2836 - DNA, 269 bp, Zea mays
  Clone ID: MRT4577_102584C.1
aggaatttgcttggtagactggtcaagaaatctgtataagcaacagaggacaatcacatggtgcaaaagagtgatagtctagctcaagccaatagaaaaggagtgcgtctgggcattgattctaaaactgaaatgaataatgggaagagccttcaagatcgaccagctgaactgccttccagaggaaggtacaattgtaatggagttggtctatgacacggtaattctggtacacaaagaagctctaaaggtgtacctactgccgctgg

SEQ ID NO: 2837 - DNA, 130 bp, Zea mays
  Clone ID: MRT4577_102585C.1
ctcggctattaataccacgagtgggaagttttcttcttcgtgacctcccgctcgttgcgccagtcaacccaccacctatccgtttgtcgttctccggcccctgcctgattcccctcttccccccctaaaa

SEQ ID NO: 2838 - DNA, 1332 bp, Zea mays
  Clone ID: MRT4577_102586C.1
gccgcgcaagctgggccacgggctcgcgggcgggcatgcgccggttccgcgagcgaccaccccgccatccgcggagcctgccctgcgctgcccaccgctcctccgcctgctccggcctcagctaataacgatgggtggtgggagccgagccctttccctctcctccctctgcgccaccaccctcgccgccgccaagcccccacagcaccccgtccccttcgccccggcccaccgcgcgctcccccaccgcctcgccgccgccatgtcctcctcttcctccccgacccccgccgcatcaggggacgccggtgccccggccccttcggcgtccaacgccatcgacttcctcacgctctgctaccgcctcaagacgaccaagagggcggggtgggtgaagcgcggggtgcaggcgcccgagtcggtggccgaccacatgtaccggatgggcgtcatggcgctcgtcgcggccgatctacccggcgtcaaccgcgacaggtgtgtcaagatggcgattgtgcacgacattgcagaagcaattgttggtgacatcaccccttctgataatgtacccaaggaagagaagaaccgcagggagaaagaagcattggaccatatgtgcgagctgcttggtggtggttcaagagcacaagaaattcgtgaactttggatggagtatgaggagaatgcgtctttggaagcgaaggttgtcaaagattttgacaaggttgagatgatacttcaagctctggagtatgaaaaggagcaaggacgggaccttgaagaattcttccaatcaacagcaggcaaatttcagacagacttgggaaaagcatgggcagcggagattgcatcgagaagaaaaacaaagtgatcaaacgatgctcattttaccacgtcggttccaagacaacttgctggcacagcatttctgttgaactttgcttttactagatgatacttcgaggtggcattgagacgtagggttgccttgggaatgtgaacttcaccacatttcttggtcctgccctgaccctgaggcatattgggcttgcgataccagggctctagataagtaagataacccactttgggtattggttgtagatgctcctgccaagggcagttagctggatccaacgggaaggttcagcaccagctggtggtgatgtaaaatccttcacttcatgaattactgtaccattaccgtttctcttgttaatccagcctcacggtttcggccttttttaatgtaattctattgttttcaagtataatgagcctgaatatttgctatatcattaaaaaattttaattgttgatgcggcaggacgt

SEQ ID NO: 2839 - DNA, 490 bp, Zea mays
  Clone ID: MRT4577_102587C.1
ggacctttgggctgcattagtgcttggttatgtgcttggcgtgacggccctactaaaattaggaaaccgtccgtgtcacattcgtcttggtctacatccgtgaagcccctactatcttccctatataagcaactagcgcggaacgcgccgacgacaccgtaatcggcccaatctgcgactaccacgaaaaacgtctttacgtaacgctaaccacgatcgggacttggcctcgtctctcgtagcacagcaaaaacaagcctaagcactccgacccaagaatgccgtgcggacaccccagctaagtagccgccaggcttacgaaacccttagtcgagctagaaaaggatagcgaacaccgcatattcgagaaagtcaaacccataaagtaaccagagaggtcccacctaaacgcccgggtatcaaaacccgctgagtttttggtagatcctacattactccactaaaccccaagcaatgagtagttcttcgg

SEQ ID NO: 2840 - DNA, 400 bp, Zea mays
  Clone ID: MRT4577_102588C.1
ggggaaaaaaaaaaataaaaaaaaaaaccaaccccctttttaaatccccccaggaaggacagatgaaaaaaaaaaatccccccccaaataaggggccccttaacaaagccttaaacccgggtttttgggccccaagccaaaaccccagaggagggggttccttgacctgggcggggctaaaattaataccggttaggccgggggaaaaagggaaaaaatttttgttccccccccaattaaaaagcccttttttttcagtccaaagccccttttgggccgagggccttagcccaaacaaaaaagctccctccccaaaccttttggtggtaaaaaaaaaaaagacacatttttggggctctccgaattttgggggggggagacccggtttttttttctaaaa

SEQ ID NO: 2841 - DNA, 122 bp, Zea mays
  Clone ID: MRT4577_102589C.1
caaagcgcacaggacgccacagaggcaagcagccgaatcaggcctttatttacgatccggccggccggaatctagaccacctctctgtctctctcctcgtacgtactcgttgagtctttgag

SEQ ID NO: 2842 - DNA, 722 bp, Zea mays
  unsure (1)..(722): unsure at all n locations
  Clone ID: MRT4577_10258C.1
gccggccggttcggggtaagcctcgctttttctcggaattgaagacgggtccgttttaatttgatctgcgctggacgaatttagctaagtctgatcgaattgaatcgtcgtgcagttggatgactgggtgctgtgccggctgtacaacaagaagaacgagtgggagaagatgcagctggggaagaccgccgtcgccggcgtcggcgccaccaaggaggaggcgatggacatggccacctcgcacacgcactcccactcccaatcacactcgcactcgcactcgtggggcgagacgcgcacgccagagtcggagatcgtggacaacgacccgttcccggagctggactcgttcccggcgttccaggacccggcgatgatgatgacggtgcccaaggaggagcaggtggacggctgcagcgccaagagcggcaacctgttcgtggacctcagctacgacgacatccagggcatgtacagcggcctcgacatgctgccgccgcccggggaggacttctactcctcgctcttcgcgtctcccagggtcaaggggaaccagcccgccggagccgccgggttgggacagttctgagctgaggcgaggatggagccatggatcaggagatgaagacggttgcgaactctgtaaatacagcataggagtcgaacctgaccctngaccttgttgnngttacaagggtttccgagtgtcggtgtaacgtaca

SEQ ID NO: 2843 - DNA, 264 bp, Zea mays
  Clone ID: MRT4577_102591C.1
caattcaacaagctactttacatgcttctagtcctaggcaacttagcaattgaggataagcacattcatcagaacatgcacatgagcgtcaacttgcttgtttccctactaaagaaaaactgacagaatgtaagatgcatgtacatcaagagcaccatgaataatccatacagcgtgttctaagtctgctcttttgtgaagtctgctaagttctggcaccgaggttttattgaattaaactcttgttaaaagtatgtttttgga

SEQ ID NO: 2844 - DNA, 326 bp, Zea mays
  Clone ID: MRT4577_102592C.1
aaaacaacaaatgtcactgtaatatataaaaatctgtgtggcaaaatgttagtgtgttgcccgagatgtcgatgagcctgtagcatcctcgatgggcacctgaaagcgagatacattgattgaatcactattacaaccaattggctatttggtaataagtttctatctctaatcctgattattctagcccatggaccatgctagcctataaatactttgaaccatggtagcctataaatactttgatttactatccattacagacctaccatgaagagagttgtgatagcagaaaaaaagcaggaaggtgggtgcaacataaatga

SEQ ID NO: 2845 - DNA, 263 bp, Zea mays
  Clone ID: MRT4577_102593C.1
cccactcggcgaccatcgcgctgtcttcgtcgcccgcgcggccggtctgcaagagggggcacgctcaggtcaagctgcaaggcgactagctgggctgcaccacgttctacgaccgcgagagcttactggcctccgacggggcgcttactctgggatacagcaacatctccttcggattacgcgccgctggtgcgctttggcagccgaatcaactactgcctggtcgaacactttctccccttggaacgccacctgatacctca

SEQ ID NO: 2846 - DNA, 2400 bp, Zea mays
  Clone ID: MRT4577_102594C.1
atgaagatggaagcccctcggtcacaaaagaaggttcagcgactcactggatgtatggcagctctgagcagatttatatccaggctgggagaaaaaggtttgccattttacaagctactcaagaaggtggataagtttcaatggactttagaagcacaagaagctctagacacattgaagaaattcttgacaacaccgccagtactgaaaccaccccggcgagctacgccgactcaaccggctgaagatttgttgctgtatatctcttgcacaactcacgtggtaagcaccgcgttggtagtcgagcgagtagaagaaggacatgcccatccagtacaacatcccgtttacttcatcagtgaggttctaggcccctcgaagaaaaagtatcctcaggttcagaagctgttatatgcagtacttctaactgcccgcaagttgcgccactactttgacgaccacaaagtcatagtagtcactggttttccaataggggacattcttcacaacaaggaagccattggacgaatagccaagtgggcttgtgagctgggacctcatgacatcgagttccggcctcgcactgccatcaaaactcaagcactggttgatttcgtatcagagtggacagaacagcaagtacctgataatccagaaactgcagaagtgtggcgaatgtattttgatggctcgctgaagctgcagggagcaggggcaaggatcctcttcaccgcacctggaggcgaacacctcaagtacgccctccagttgctattcccggcctctaacaatgcagccgagtatgaagctttgatacacggattgaacatcgccatatcgctgggcgtcaagaggttgatggtatacggagattctctagtagtcatcagccaaataaacaaggaatgggattgttcaagtgattcaatgggaaaatactgcgcgaccgtccgaaagttggaagataaattcgagggtctggaatttcatcatgtagaaagagatcggaacacagcagccgatgtactgtccaagctcggatccagtcgaaatcaggtcccacccggggtcttcgtgcaagaaattcttcagccgagtatctcaatggatcaaacagaagagtgcaacatcatagatcaacccgagtcagaccttgatgactggaggcggccgattattaagtatataaagaatgaagaagagccagatgacaagaactcggcagatcgcattgccaggcagtcagctcactatacactcattgaggaagtattgtacagaaggggagcgtcaggcatcctcatgaagtgcgttctcccgtccaccgggaagcaacttctagaggaggtccatgcagggcaatgtggaattcatgcagcatccagaacactagtcggaaaggttttcagatcaggattctattggccgacggcgaagaacgatgcgaccgagttagtccagaggtgtgaagcttgccaatacttgtcaaagcaacagcatatgccagcacagcaactgcagaccataccagtaacctggcctttcgcatgctggggactggatatgattggacctttcaaggaagctcaagggggatatactcatgtattggtggcgattgacaaattcactaaatggatagagttcaagcccattgcttctttaacctctgctaaggctgtggaattcatacaagacataatattcagattcgggacaccaaacagcatcatcaccgacttaggatccaacttcaccagttcagaattcttcgacttctgcgagcaaaagagcattcagatcaagtatgcatctgtagcacatccaagagccaacgggcaggttgagcgagccaacggaatgatattggaggcactcaggaaaagggtcttcaataagaatgaaaaattcgcaggaaagtggataagagaattgccttacgttgtttggagcctgagaacccaacctagccgagccctgcatggaaacactcctttcttcatggtttatgggtcggaggcagtgctacctactgatctcaaatttggggcgccaaggttgatcttcgaaagcatagcagaagccgaggccaccaggctggaggacgttgatgtacttgaggaagaacggctgaatgcggtaatccaatcagcacggtaccagcagactctaaggcgttatcatgacaaggctgtgcggcaacagttcttttcagtaggagacctcgtcctccgccgaattctaacgggggagggacggcacaagttatcacccttatgggaaggacccttcatagtagcggaagtcactcggcccggatcgtatcgcctcactcagatggatggcacagaagttgggaactcctggaacatagagcacctcagaaagttttatccctag

SEQ ID NO: 2847 - DNA, 186 bp, Zea mays
  Clone ID: MRT4577_102595C.1
atgacgtttgtgcgaggcgcggtaggcgctggcagtggcggcggtggccacgaggtacgcgggtcgcttcggcggtcacgcgaggcacatcgtctctggagatggcggtcacaggaggcgtgggtggctctggcgtccttcgacgaccatctcctccgatccggcggcttcagcgacatcctttga

SEQ ID NO: 2848 - DNA, 635 bp, Zea mays
  Clone ID: MRT4577_102596C.1
aattctttgacttctgcgagcaaaagagcattcagatcaggtacgcatctgtagcgcatccaagagccaacgggcaggttgagcgagccaacagaatgatattggaggcactcaggaaaagggtcttcgataagaatgaaaaattcacaggaaaatggataagagaactgccttatgtcgtttggagcttgagaacccaacctagccgagccctgcatggaaacactcctttcttcatggtctatgggtcggaggcagtgctacctgctgatctcaagtttggggcgccaagattgatctttgaaagcatagcagaagccgaggccaccaggctggaggatattgatatacttgaggaagaacgactgaatgcggtgatccaatcagcacgataccagcaaactctaaggcgctatcacgacaaggctgtgcgacaacgcttcttttcgataggagacctcgtccttcgccgaattctaacgggggagggaaggcacaagttatcacccttatgggaagggcctttcatagtagcagaggttactcggcccggatcgtatcgcctcacccagatggatggcacagaagttgggaactcctggaacatagagcacctcagaaagttttacccctag

SEQ ID NO: 2849 - DNA, 562 bp, Zea mays
  Clone ID: MRT4577_102597C.1
cattgggtacctcgaggccggccgggcgaccgtgaaagcgttggcggcggcgcattccatggcgccgctggggtcaaagctggcgcagctgcagtccacgtggccaagcacggatgctcgtaccacaagacgctcatggagaagaacaaacactatgtcgtcgaccctcccaccattgacaagtgcaaggacctctccaagcagctcttctacacccgactcgctagccttcccggtcgttacgagtcgttctggaaagaggttgatggtgcgaagcttctgtggaagaacggaagccgtctgaagattgaggatgctagtgttgcggcgatgtttggcatcgagttgtatgcgtggttctgcctcggtgagatcgtcggtagaggttttaccgtcacgggctaccatgtctgaagcctgaatgcctgccttacctctatctagcatgggcaaccacattaatccacatttgccgacgaaacacctcgtttggatctggaattgaattctattatataataatagtaatttagacgtaaaaaaaaaaaaaaaaaaagcggcc

SEQ ID NO: 2850 - DNA, 600 bp, Zea mays
  Clone ID: MRT4577_102598C.1
tgccatcaaaactggtatagaaaagtaaaataagattgtatgtcgcaatcctttctatatcactaacactcctgtttgaagggtgaaaaactgcatcctaatgatatagaaggtattgaaatatttagaatgacaaataaaatactaggcaaagttgcagggacatacaaagatgggtaataagaaaggggtagcagtggaagggtgaattaaaacatgggtatatgaactcatttatacacagctagcagccatgtgatgtggcctgtcacatcggtggacgtacaatctacacgctctatacccgtacctgcactggtagagtaccattgcagggccgtgctgggcctttaatatggtcacagcattggccagctgccaccacttgaaggcccataaatgttgcagacagtggcatccatataaacactacaccgacagagcacatccacatgcccgaaaaaccctactctctgatgaatctaaaatccttccaacctcccgatccatcaacataatcggtcattatcagcatgtaatgtgcctgaaagactttttagaagtcagcgctaagtttgcaggctctcatcccatgcatta

SEQ ID NO: 2851 - DNA, 900 bp, Zea mays
  Clone ID: MRT4577_102599C.1
atgccagcgcagcagctacagaccataccagtaacttggcctttcgcatgctggggattggatatgattggacctttcaagaaggctcaaggaggatacacccatgtattggtggcaattgacaaattcactaagtggatagagttccagcccattgcctctttgacctctgctaaagccgtggaattcatacaaagcataatattcagatttgggataccaaacagtatcatcactgacttgggatccaacttcaccagttcagaattctttgacttctgcgagcaaaaaggcattcagatcaagtatgcatctgtagcccatccgagagccaacgggcaggttgagcgagccaacggaatgatattggaggcacttagaaaaagggtctttgataaaaacgaaaaactcgcaggaaaatggataagagaattgccttatgttgtttggagcttgagaacccaacctagccgggccctgcatggaaacactcctttcttcatggtctatgggtcggaggcagtgctacctgctgacctcaagtttggggcgccaagattgatcttcgaaagcatagcggaagccgaggccaccaggctggaggatattgatgtactcgaggaagaacgactgaatgcagtaatccaatcagcacgataccagcagactctaaggcgctaccacgacaaggctgtgcggcaacggctcttttcggtaggggacctcgtcctccgccgaattctaacgggggagggacggcacaagctatcacccttatgggaagggcccttcatagtagcagaggtcactcggcccggatcgtatcgcctcacccagacggatggcacagaagtcgggaactcctggaacatagagcacctccgaaagttttacccctag

SEQ ID NO: 2852 - DNA, 803 bp, Zea mays
  unsure (1)..(803): unsure at all n locations
  Clone ID: MRT4577_10259C.1
attgggtacctcgaggccggccggtgtacaacatgaagaacgagtgggagaagatgcagctggggaaggccgccggcgccaccaaggaggaggcgatggacatggccacctcgcacacgcactcccaatcccactcgcactcgtggggcgagacgcgcacgccggattcggagatcgttgacaacgacccgttcccggagctggactcgttcccggcgttccaggacccggcgatgatgacggtgcccaagaaggagcaagtggacgaaggcagcggcaagagcggcaacctgttcgtggacctcagctacgacgacatccagggcatgtacagcggcctcgacatgctgccgccgcccggggaggacttctactcctcgctcttcgcgtctcccagggtcaaggggaaccagcccgccggagccgccgggttgggacagttctgagctgaggcgaggatggacgccgggttgggacagttctgagctgaggcgaggatggagccatggatcaggagatgaagacggctgcaatgttgcgaactctgtaaatacagcataggagtcgaacctgaccctgacccttgttggggttacaaggttttccgagtgtcggtgtagcgtacatggagccggcggcgcggccgggccggctcattctttagtttcacttccgaagcagacggtagatatatgtgtagctgttcacttaaactctcttccccagaacaaccgacgaaattttgctcttgtttataagtaaaaaaaaaaaaaaagggcgccaaaaaaaaaaagcggncctcn

SEQ ID NO: 2853 - DNA, 1849 bp, Zea mays
  Clone ID: MRT4577_1025C.1
tggccacagcggcggcagctcggcacgtggtcgcagtgccgtaccccggccgaggtcacgtcaaccccatgctcgtcgtgtgccgcctgctcgccgccgcggacgctgccttgagcgtgaccgtcgtcgtcacagaggagtggcacgcgctgctggccgcagcgggggtgcccggcacgctccccgaccgcgtccgcctcgccaccatccccaacgtcatcccctccgagagggtccgcggcgccgacttcgcaggcttcgtcgaggccgtgcatatcaagatggtggcgcccgtcgagcggctgctggaccggctgtccctggagcggaagccggacgccatcgtggccgacacattcctggcttggggcgttggggttggatctgcgcgggggataccggtgtgctcgctgtggacgcaaccggccacgttcttcttggcgctctggcacctggaccgttggccgccggtggatggtcatcaaggggaagaaggcctaagctgcaggtccctggatcaatatctcccgttcccagccctcgcgccggtaaaatgttctgatatgaagaccctccgctccatggtgctgccaatgaaacggctagcgcaggtgttctccaacctgcgcaaggcacagtgtgtcctcttcacctccttctacgagctcgaaaccggcgccatcgatggaacatcgcaagtggttccatgccctatatatgcagttggcccttcaattccatatatgccactggaaggtgattcgggcgagtttcaccatgaagaagactacttcggttggctggatgcccagccaagaagctcggtactgtacgtctcatttggcacccatgtctcgatgccttcgtctcagctggaagaggtcgccctggggttgcatgaaagcacggttaggttcttctgggtggcccgggacagagctagcaccgccacccttgagcagatctctgctggtggcaagggcttggtggtgccgtggtgtgaccaactgaaggtcctgtgccacccctccgtcggtggcttcctgagccattgtgggtggaactcgaccctggaggccgtgttcgctggagtgccgatgcttgcctttcccgttgcttgggatcagctggtgattggccatctcgtggctgatgagtggaagatcggcgtcgacttgagggaacggagaagggaggatggtgttgtcggaagggccgcgatctgcgatactgtaacgaagcttatggatttgactgacgatgatagcctagagatgagaagaagggctgcggagctgagagaggcttcacgccgcgcagttcaggaaggtggatcttctcggtgttctttgaacagtttcgttagagatgtcatcgaaggaagactgaatgttgcagaaacttcacggtaggtttttgcttgaatttgtagtttcagggggacagaactgttgctcgtaggcagaaacgttgtgctcctgcaagtaaagtgcaggagtatagctgcacattttctgaagctgaaaacagaagacttgatgctgtctgtagcaaagatgggggacagcgatagtgatggcacaaaaaattctgtgctcctggacttgtgtaggttatgcacgtgatgagcaagcgtgtatatagccataaaaaatattgttttacatcgtatattatttatatagtaaagtttggataagaagtgtgatggggaaggataagaaagacttctagagcagcctaaaaatattaatatcgtggaataatcaagagctttgtatcgtaacagagtttatatgtacttcttaaaaaagtggtgttgtattttatataccaaagtttataggtt

SEQ ID NO: 2854 - DNA, 762 bp, Zea mays
  unsure (1)..(762): unsure at all n locations
  Clone ID: MRT4577_102600C.1
ccacgcgtccgcctccctgccgccctcgatccggcccgggccccgcccgtcccttctcagcgaggcagccgcctcccccaagttccaactcgtgctctcacctcggatctctccatccctttcgtccaaaccaccgaccacaatcagaagcgttggcggcggcgcattccatggcgccgctggggtcaaagctggcgcagctgcagtccaaggcatgcgaggcgacgaggatcgtggccaagcacggatgctcgtaccacaagacgctcatggagaagaacaaacactatgtcgtcgaccctcccaccattgacaagtgcaaggacctctccaagcagctcttctacacccgactcgctagccttcccggtcgttacgagtcgttctggaaagaggttgatggtgcgaagcttctgtggaagaacagaagcagtctgaagggtgaggatgctggtgttgcggcgatgtttggcatcgagttgtatgcgtggttctgcctcggtgagatcgtcggtagaggttttaccgtcacgggctaccatgtctgaagcctgaatgcctgccttacctctatctagcatgggcaaccacattaatccacatttgccgacgaatattatggaatcggtgttgttgatgcaacctcttgctattcggaaccagtattgaatcttgaatcatctcggtggacgagaaattatgagctaataatttgctgtatatcttanaaaaaaaaaaaaaaagcggccctcgagctccagc

SEQ ID NO: 2855 - DNA, 2796 bp, Zea mays
  Clone ID: MRT4577_102601C.1
atgccgttcggcctcaaaaacgctggagcgacttatcagagagccattcaaacatgcttagccgatcactggggcaagcgtgtggaggcttacgtagatgacgtggtgattaaaacagagaatccggaaaacttcatcgaagacttacagctggttttcaacagcctgagaagatatagatggaagcttaatcctgaaaaatgtgttttcggggtaccagcaggaaagttgctcggatttattgtcagccaccagggaattgaggctaatccagataagattgaagctatcatgaaaatggaagctcctcggtcgcaaaagaaggttcagcgactcactggatgtatggcagccctgagcagatttatatccaggctgggagaaaaaggtctgccattttacaaactactcaagaaggtggataagtttcaatggacttcagaagcacaagaagctctagatgcattgaaaaaattcttaacaacaccaccagtactgaaaccacctcggcgagctacgccgactcaaccggctgaagatttgctgctatatatctcttgcacgactcacgtggtaagcactgcgttggtagtcgagcgagtggaagaggggcatgcctatccggtacaacatcctgtttatttcatcagtgaggttctaggcccatcgaagaaaaagtatcctcaagttcagaagctattatatgcagtacttctaactgcccgcaagctgcgccactactttgacgatcacaaagtcatagtagttactggttttccaataggggacattcttcacaacaaggaagccattggccgaatagccaagtgggcttgcgagttgggatcccatgatatcgagttccgacctcgcactgccatcaaaactcaagcactggtcgatttcgtatcagagtggacagaacaacaagtaccagacaatccagaaacggcagaagtatggcgaatgtactttgatggctcactgaagctgcagggagcgggagcagggattctcttcactgcacctggaggcgaacacctcaagtacgctcttcagttgttattcccggcctctaacaatgcagccgagtatgaagctctgatacatggattgaacatcgccatatcactaggcgtcaagagattgatggtatacggagattctctggtagtcatcagccagataaacaaggaatgggattgttcaaatgattcaatgggaaaatactgtgctaccgccccacccggagtcttcgtgcaagaaattctgcagccgagtatctcaatggatcaaacagaagagtgcaacatcataggtcaacccgagtcagactctgatgactggagaaggccgatcattaagtatgacgacaagaactcggcagagcgaattgccaggcagtcggctcactatacactcattggggagacattatacagaaggggggcatcgggcgtcctcatgaagtgcgttctcccgtccactgggaagcaacttctggaagaggtccatgctgggcaatgtggaatacacgcagcatccagaacactagtcgggaaggttttcaggtcaggattctattggccaacggcaaagaacgatgcagccgaattagttcagagatgcgaagcttgccaatacctgtcaaagcaacagcacgtgccagcacagcagctacagaccataccagtaacttggcctttcgcatgctggggattggatatgattggacctttcaagaaagctcaaggaggatgcacccatgtattggtggcaattgacaaattcactaaatggatagagttccagcccattgcctctttaacctccgctaaagccgtggaattcatacaaagcataatattcagattcgggataccaaacagtatcatcactgacttgggatccaacttcactagttcagaattctttgacttctgcgagcaaaagagcattcagattaagtacgcatctgtagcccatccgagagccaacgagcaggttgagcgagccaatggaatgatattggaggcactcaggaaaagggtctttgataagaacgaaaaattcgcaggaaaatggataagagaattgccttatgttgtttggagcttgagaacccaacctagccgagccctgcatgggaacacccctttcttcatggtctatgggtcggaggcagtgctacctgctgatctcaagttcggggcgccaaggttgatcttcgacagtatagcagaagctgaaaccaccagattagaggatattgatgtactcgaggaggaacggctaaatgcagtgatccaatcagcacgataccagcagaccctaaggcgctaccacaacaaagctgtgcgacaacgtttcttttcgataggagacctcgtcctccgccgaattctaacgggggagggacggcacaagttatcacccttatgggaagggccattcatagtagcagaggtcactcggcccggatcatatcgcctcacccagatggatggcacagaagttgggaactcctggaacatagagcacctccgaaagttttacccctagctgtatttcaaaacagctggagcgaccatgtattctgtaaaatggaaatacgtcatcaataaagagagatttcaaagatactcgactcgtttacggttgacttgcattcttacttaattcggggtgaccactatgccctacaaacggagcaatcgacttaagtcggcaacgacttgaggcggtgcaacatgctcacgcttacttaattcggtgtgaccactatgccctacaaac

SEQ ID NO: 2856 - DNA, 312 bp, Zea mays
  Clone ID: MRT4577_102602C.1
accgtgaatttaacaattcaggaagtttctggttttgcgcccgaaatccaaattcggaacgcgcgcttacctgagggagtggggggcctacccccattcaactttttcgcttggccagaacgactccgttgttttctacggacaccccctttttcatttgttccaacccagagtgccggacacttccgtcgatatcttggctgcacaaaacatgcttcacttttagcccgagaaaagctgatcacaaaatctttaaatatggaatttttcgattactaaaacaaaagtgcttgaactaattttagttttttt

SEQ ID NO: 2857 - DNA, 2403 bp, Zea mays
  Clone ID: MRT4577_102603C.1
atgccgttcggcctcaaaaacgctggagcgacttatcagagagccattcaaacatgcttagccgatcactggggcaagcgtgtggaggcctacgtagatgatgtggtaatcaaaacggagaactcggaaaacttcatcgaagacttacagctggttttcaacagtctgaggcggtatcgatggaagcttaatcctgagaaatgtgtttttggggtaccagcaggaaagttactcgggtttattgtcagccaccggggaattgaggctaatccggataagattgaggctatcatgaagatggaagcacctcgatcacaaaagaaggttcagcgacttactggatgtatggcagctctgagcagatttatatccaggctgggagaaaaaggtttgctattttacaagctgctcaagaaagtggataagtttcagtggacttcagaagcacaggaagccctagaggcactgaaaaaattcttggcgacaccactagtgctgaagccgccgcagcgagccacgtcaactcaaccagctgaagacttgttgttgtatatctcttgcacgactcacgtggtgagcaccgcgttggtagtcgagcgagccgaagaaggacatgcctacccagtgcaacatcatgtttatttcatcagtgaagttctgggtccctcgaagaaaaagtaccctcaagttcagaagctattatatgcagtacttctaactgcccgcaagctacgtcactactttgatgaccacaaagtcatagtagtcactggctttccgataggggatattcttcacaataaggaagccattggccgaatagccaagtgggcttcattggttgatttcgtatcagagtggactgagcagcaagtaccagataacccagagactgcagaagtatggcgaatgtattttgatggctcgctgaagctgcagggagtaggagcaggaattctcttcaccgcacctggaggcgagcacctcaaatatgccctccagttgctatttccggcttccaacaatgcagccgagtatgaagctctgatccatggattgaacatcgccatatcattgggcatcaagagactgatggtgtacggagactctctggtagtcattaaccagataaacaaggagtgggattgttcaagcgattcaatgggaaagtactgcactgccgcccgaaagctggaagataaattcgaagagtcagactctgatgactggagaaggccaatcatcaggtatataaagaatgaagaggaaccagatgacaaaaatgcagccgagcgcattgccagacagtcggctcactacacactcattggggagacattgtacagaaggggtgcatcaggcgtcctcatgaagtgcattctctcatctactgggaagcgacttctggaggaggtccatgctgggcaatgtggaatacatgcagcgtccaggacactagtcgggaatgtcttcaggtcaggattctattggccaacagcgaagagtgatgcagctgagttagttcagaggtgcgaagcttgccaatacttgtcaaaacaacaacatctaccagcacagcaactgcagaccataccagtgacttggcccttcgcgtgctggggactggatatgattggacctttcaagaaagctcaaggaggatacacccatgtactggtagcaatcgacaaattcactaaatggatagagttcaaacccattgcttctttaacctcagctaaggccgtggaattcatacaagacataatattcagattcaggataccaagcagcatcataactgacctaggatccaacttcacaagttcagagttcttcaacttctgcgagcaaaaaagcattcagatcaagtatgcttctgtagcacatccaagagccaacgggcaggttgagcgagccaacgggatgataccggaggcactcaagaaaaaggtcttcgataagaatgaaaagttcacaggaaagtggataagggaattgccctatgtcgtctggagcctaagaacccagcctagccgagctctgcatggaaacactcctttcttcatggtctatgggtcagaggcagtattaccagccgacctcaagttcggagcgccaaggttgatcttcgaaagcatagcagaagtcgaagccaccaggctagaggacattgatgtactcgaggaagaacggctgaatgcagtaatccaatcaacacgataccagcagactctaaggcgctatcatgacaaggccgtgcggcagcgatccttctcagtaggagatctcgtcctccgtcgaattctaacgggggagggacggcacaagttatcacccttatgggaaggacccttcgtagtagcagaagtcactcggccaggatcatatcgtctcacttag

SEQ ID NO: 2858 - DNA, 597 bp, Zea mays
  Clone ID: MRT4577_102604C.1
acacacgagctcgctctctgaacctgctcccctgcacagcctcacgcgagccgacgcgatgattgccttcgtactgatgcgatgtatcgaggggcacaaactccgaggaaacaactagacggacatgcaggcgcaaatcaagtagctagaaacgtgagctctccctcctccccggacgaaaggtcacacggaggagcacccaacgagttctcccagatcaaggcggggtgcaccacaatcgcacgcatcgataacagtgatctcgtacagatacaagacctggctgtgcgaggcctgcaacaagaaaaagctgatcactctcaaactcagctctaataagacacgtgccatccgccggcgtttgacgaagcactcagatctctctgaagaccgagatcgtacaaagaaaccagacaactacttcatctcatgacgaaggatgtctatcatcgtgctaagacgacaactgtgatcatgctgcgctatacgatatcaacagggtgtgatctaacttttcggttgaatggacatttgctgtgggccggaatgacgatgtagtccgccatttcgataaatggataaattggtttgactggc

SEQ ID NO: 2859 - DNA, 265 bp, Zea mays
  unsure (1)..(265): unsure at all n locations
  Clone ID: MRT4577_102605C.1
acccccccctgggggtgggcgtcctttnctancactggcgtgggggccccgattgatcaatctggagggctcaaaaccccgtggcgtttggaactccgggctggtttggtggggagggaaatggatggtacctttggggaagagatccttgttatttaagggggggtaacaccggatctctcctttatgggttccttccatttccgtgtttcccccaaccggccttaaggctgtgcacgacgccaaccctactgtgcacacgtgc

SEQ ID NO: 2860 - DNA, 1769 bp, Zea mays
  Clone ID: MRT4577_102606C.1
aacagcaagtaccagacattccagaaactgcagaagtatggcgaatgtatttcgatggctcgctgaagctgcagggagcaggagcagggattctcttcaccgcacctggaggcgagcacctcaagtacgctctccagttgctattcccggcctctaacaatgcagctgagtatgaagctttgatacacggattaaacatcgccatatcactgggcgtcaaaagattgatggtatatggagattctctggtagtcatcagccaaataaacaaagaatgggattgttcaagtgattcaatgggaaaatactgtgctgccgtccgaaagctggaagataaattcgagggtctagagtttcatcatatagaaagagatcggaacacggcagccgatatactgtccaagctcggatccggtcgaactcaggtcccacccggagtcttcgtacaagaaatcctacagccgagtatttcaatggatcaaacagaagagtgcaacatcataaatcaactccagtcagattctgatgactggagaagaccgattattaagtatataaagaatgaagaagaaccggacgacaagaactcggcagagcgcatcgccaggcagtcggcccactatacactcattggggaagaactgtacagaaggggcgcgtcaggcatcctcatgaagtgcattctcccgtccaccgggaaacaacttctggaggaagttcatgcagggcaatgtgggatacatgcggcatctagaacactagtcgggaaggttttcaggtcaggattctattggccaacggcgaagaacgatgcagccgaattagttcagagatgcgaagcttgccaatacttgtcaaagcaacagcacatgccagcacagcagctgcagaccataccagtaacctggcctttcgcatgctggggactagatatgatcggacctttcaagaaagctcaagggggatatacccatgtattggtggcgattgacaaattcactaaatggatagagttcaagcccattgcttccctaacctctgctaaagccgtggaattcatacaagacataatattcagattcgggataccgaacagtatcatcactgacttgggatccaacttcaccagttcagaattctttgacttctgcgagcaaaagagcatccagatcaagtacgcatctgtggcacatccaagagccaacgggcaagttgagcgagccaacggaatgatattggaggcactcaggaaaaaggtcttcgataagaatgaaaaattcgcaggaaagtggataagagaattgccttacgttgtttggagcctgagaacccaacctagccgagccctgcatggaaacactcctttcttcatggtctatgggtcggaggcagtgctacctgctgatctcaagtttggagcgccaaggctgatcttcgaaagcatagcagaagctgaggccaccaggctggaggatattgatgtacttgaggaagaacggctgaatgcaataatacaatcagcacggtaccagcagactctaaggcgctatcacgacaaagctgtgcggcagcggttcttttcaataggagacctcgtcctccgccgaattctaacgggggagggacggcacaagttatcacccctatgggaaggacctttcatagtagcagaagtcactcgacccggatcgtatcgcctcacccagatggatggcacagaagttgggaactcctggaacatagagcacctcagaaagttttatccctag

SEQ ID NO: 2861 - DNA, 274 bp, Zea mays
  unsure (1)..(274): unsure at all n locations
  Clone ID: MRT4577_102607C.1
actggagatatcgatgtgctagcactcctggactcaggaagttctcatacatttctcaacacaatggtagcagaccagttgacaggagtgtcaaccatgaagacgcctgtgaatgtttatgtggccaatgggtcacaaattacttgctgctcggaattggtggatgcttcatggtctattgngggagtgtcttttcgtcacacttcatgtgctgccctgtctacatatgatctcatagtanggatggattggctcgaagctcacagcactatgc

SEQ ID NO: 2862 - DNA, 2640 bp, Zea mays
  Clone ID: MRT4577_102608C.1
atggccgtcactttccacagcaagatcaccatgcgtcccggatccacattctgcttcgggacaatctcatccgtggcggacgaagaaggaattctacatcgcctcgcggatctgtcggaacagaagtctcctccaacaaactccgaaaatgctggaaaaacgctacctccggttcttcagaacaagatcgtctccggggaggctggagctagaggctcgctgacccggaagactccgctgtctacttccccgacgaaagaatggacacaggtcatgagaaggaaggagatcagggagaagccagtcgttcttcccgttcctccgacctcaaaggagaacggaaagaaagtcgccgcggcagaaacaccgttctaccccgacgtcctcttcatcgggagggcagagtcgcccgccgtctccgatgatgaaccgaccgcgcccggagaagaaccaccccagcgagccacgccgactcagccggctgaagatttgctgctatatatctcttgcacgactcacgtggtaagcactgcgttggtagtcgagcgagtggaagaagggcatgctcacccggtgcaacatcctgtctacttcatcagtgaagttctaggcccatcgaagaaaaaatatcctcaagttcagaagctattatatgcagtacttctaactgcccgcaagctgcgccactactttgacgatcacaaagtcatagtagttactggttttccaataggggacattcttcgcaacaaggaagccattggccgaatagccaaatgggcttgcgagttgggatcccatgatatcgagttccgacctcgcactgccatcaaaactcaagcactggtcgatttcgtatcagagtggacagaacagcaagttccggataatccagaaaccgcagaagtatggcgaatgtattttgatggctcgctgaagctgcaaggagcaggagcaggaattctcttcactgcacctggaggcgagcaccttaagtatgctctccagctactattcccggcctctaacaacgcagccgagtatgaagccttgatacacggattaaacatcgccatatcactaggcgtcaagagattgatggtatatggagactctctggtagtcattagccagataaacaaagaatgggattgttcaagtgattcaatgggaagatattgcgctgccgttcgaaagctggaagataagttcgagggtctggaattttatcatgtggaaagggatcgtaacacagcagctgatacactatccaagctcggatccggtcgaactcaggtcccacccggagttttcgtgcaggaaattacacggccgagtatctcaatagaccaaacagaagagtgcaacattgtagatcaacccgagtcagactctgatgactggaggaggccgatcattaagtacataaagaacgaagaagagccagatgacaagaactcagcagagcgcattgccagacagtcggctcactacacactcattggggagatattatacagaaggggcgcatcaggggttctcatgaagtgtattctcccatccactgggaagcaacttctggaggaagtccatgcagggcaatgtggaatacatgcagcctccagaacactagtcgggaaggtcttcagatcagggttctattggccgacagcaaaaaacgacgcagccgagttagttcagagatgcgaagcttgtcaatacctgtcgaagcaacagcacataccagcacagcagctacagaccataccaataacttggcctttcgcatgctggggattggatatgattggacctttcaagaaagctcaaggaggttatacccacatattggtggcaattgacaaattcactaaatggatagagttcaagcccattgcttctttaacctctgctaaggccgtggaattcatacaggatataatattcagatttgggataccaaacagcatcatcactgacttaggatccaacttcaccagctcaaaattctttgacttctgcgatcaaaaaagcattcagatcaagtatgcatctgtagcccatccgagagccaacgggcaggttgagcgagccaacggaatgatattagaggcacttagaaaaagagtctttgataaaaatgaaaaattcgcaggaaaatggataagagaattgccttatgttgtttggagcttgagaactcaacctagccgggccctgcatggaaacactcctttctttatggtttatgggtcggaggcagtgctacccgctgatctcaagtttggggcgccaagattgatcttcgaaagcatagcagaagccgaaaccaccaggctggaggatattgatatacttgaggaagaacgactgaatgcagtaatacaatcagcacgataccagcagactctaaggcgctatcacgataaggctgtgcggcaaaggttcttttcagtaggggacctcgtcctccgccgaattctaacgggggagggacggcacaagctatcacccttatgggaaggacccttcatagtagcagaggtcactcggcccggatcgtatcgcctcacccagacggatggtacagaagtcgggaactcttggaacatagagcacctcagaaagttttacccctag

SEQ ID NO: 2863 - DNA, 647 bp, Zea mays
  unsure (1)..(647): unsure at all n locations
  Clone ID: MRT4577_102609C.1
ccacgccacgcagnagccatgccagtgcccagacacaccgccgcgtcaacctcccgctctctggctcccaagttacatcaccacggacatggaaaccccctcgccgggcgccacgctctccgcggtgattgccgaggaccgccgccgggaggctcgccgccgccaggggggcttcgggcagggcggtctcctcccgtacctcgtcccggcttgcgggcgtccggccggccagaggggcggcaggccgctgcactctgagctcatggtaaaactgcaccgctggggcgccactttcctgcccaagggcggcggcgccgtcgcgcgcgaactcgaggagccgtgccgcgcgccaagcccgccgccacggcctagaccatcattcacaccggctgcatcggcggcggagccggaggtggtgccgcgccacgaggcgcccgccgtgagtgtcgtccccacgacggggccttcgagggagagagaggagccggcggcgggatccgaagccattgccgaagcggacatgtccgccggcgagagcgcggggagcagcgaccaccaggcgacgccggtcgttaccgtcgcgggaggaagtgggggaacctggctcagagcttcgcccaagacgagagcgaggtctccgtcactgc

SEQ ID NO: 2864 - DNA, 448 bp, Zea mays
  Clone ID: MRT4577_10260C.1
cacgcgtacgcagacgcgtggggaatcgtcgtgcagttggatgaatgagtgctgtgccggctgtacaacaagaagaacgagtgggagaagatgcagctggggaagaccgccgtcgccggggtgggcgccaccaaggaggaggcgatggacagggggagctcgcacacgcactcccacgcccaatcacactcgcactcgtggggcgagacgcgcacgccagagtcggagatcgtggacaacgacccgttcccggagctggactcgttcccggcgttccaggacccggcgatgatgatgacggtgcccaaggaggatcattttttttgctgcagcgccaagagcggcaacctgttcgtggacctcagctacgacgacatccacggcatgtacagcggcctcgacatgccgccgccgccccgggaggacttctacccctcgctcctccggt

SEQ ID NO: 2865 - DNA, 3837 bp, Zea mays
  unsure (1)..(3837): unsure at all n locations
  Clone ID: MRT4577_102610C.1
atgagaagctttttggaaaaacaggccatgcgcggaccgtccgggcccttgcggcggaccgtccgcgacacaagaatgaccctcggacagaaccaatgtaaaaacacaagtttccactacggactgtccgaaggaaaagcaaagaccgtccgagccctcgcgcggactgtccggcctcaggcgcggaccgtccggtcgtttcgccctattcacccccctctaggcgactatcagatactggtggcaaccaccggtcctcccgccccataccggtggtcggagcacccgattactttcgctcgggaggatcaatggctcaacttcgaccatccaggcaaatacccgcttctcgtcgatccggtgatccgagaaagccgggtaaagaaggtgctagtggacggggggagcagcatcaacgtcactttcccctggacacttcaaggcttgggagttcacctcaaagagctccacgagtcggacactcctttctttggcatcgtgccgacggaaggggaatacctgctgggccacatctacatgccggtcaccttcggaactccggagaactaccgaaccgagttcctgaggttcgaggtgacaaatttcgactgcgggtacaacgccatcatcgggaggccggggctggccaaattcatggccatcccgcactatacatacatgatactgaagatgccaggaccgcaaggaatcataattgtgcgcgccgacttccaaggcgccgcagaatgtttccgagtggccatccaagcagccctcaccaccaagccgtcaacggttccttctacaccggcgaactctaagcctgaggaagacctcgccgtaccggcaaacgaagctcaggccgcgacctctatgcggccgactgaagaaaccaagcggatcaacctgggttccttccagttcctgcaagataaccgagacgtattcgcatggcaacctgcggatatgccgggagtcccgagggagttggccgagcacaaattgaaagtctatcctcaggcgaggccgatccggcaaaagctgcgtcgtttcacgcccgacaagagagaggtcattcgtgccgagttagctcgcttggtcgcggctggatttattagagaagtattacaccccgagtggttagccaaccctgttcttgtactcaaaaagaataaagtggattggcgcatgtgcgtcgactatactgatctcaacaaacactgtctgaaggatcccttcgggctcccgaggatagatcaggtggtggattccaccgctgggtgttctgtgctgtctttcttagattgctattccgggtatcatcagattagtttggcaaaagaagacgaggaaaaaacggcgttcatcaccccgtttggtgctttctgttatacctccatgtcgttcggcctcaaaaacgctggagcgacttatcagagagccattcgaacatgcttagtcgatcactggggcaagcgtgtggaggcttacgtagatgacgtggtgatcaaaacggagaatccggaaaacttcatcgaagacttacaactggttttcaacagcctgagaagatatagatggaagctcaatcctgaaaaatgtgttttcggggtaccagcaggaaagttgctcggatttattgtcagccaccggggaattgaggctaatccagataagattgaagctatcatgaagatggaagctcctcggtcgcaaaagaaggttcagcgactcactggatgtatggcagccttgagcagatttatatccaggctgggagaaaaaggtctgccattttacaaactactcaagaaggtggataagtttcaatggacttcagaagcacaagaagctctagacgcactgaagaaattcctgacaacaccaccagtactaaaaccgccccggcgagctacgccgactcaaccggctgaagatttactgctatatatctcttgcacgactcacgtgaaaaagtatcctcaggttcagaagctattatatgcagtacttctaactgcccgcaagctgcgtcactactttgacgatcacaaagtcatagtagttactggttttccaataggggacattcttcacaacaaggaagccattggccgaatagccaagtgggcttgcgagttgggatcccatgatatcgagttccgacctcgcactgccatcaaaactcaagcactggtcgatttcgtatcagagtggacagaacagcaagttccagacaatccagaaacgacagaagtatggcgaatgtattttgatggctcgctgaagctgcagggagcaggagcagggattctcttcactgcacctggaggcgaacacctcccgtatgctctccagctgctattcccggcctctaacaacgcagccgagtatgaagctttgatacacggattaaacatcgccatatcactgggtatcaagagactgatggtatatggagattctctggtagtcatcagtcagataaacaaggaatgggattgttcaaatgattcaatgggaaaagggggggctgtcntccgaaagctagaagataaattcgaggggctggagtttcatcatatagaaagagatcagaacacggcggccgatgtactgtccaagctcggatccggtcggactcaggtcccgcccggggtcttcgtgcaagaaattctccagccgagcatctcgacggatcaaatagaagagtgcaacatcatagatcaacccaagtcagactctgatgactggagacaaccaattattaagtatataaagaatgaagaagaaccagatgacaagaactcggcagagcgcattgccagacaatcagctcactatacactcattggggaggtattatacaggaggggcgcgtcaggcgtcctcatgaagtgcgttctcccgtccaccgggaagcaacttctggaggaagtccatgcagggcagtgtggagtacacgcagcatccagaacattggtcgagaagggattggatatgattggacatttcaagaaagctcaaggaggatacacccatgtattggtggcaattgacaaattcactaaatggatagagttccagcccattgcttctttaacctctgctaaagccgtagaattcatacaaagcataatattcagattcgggataccaaacagtatcatcactgacttgggatccaatttcaccagttcagaattctttgacttctgcgagcaaaagagcattcagatcaagtacgcatctgtagcacatccaagagccaacgggcaggttgagcgagccaacgggatgatattggaggcactcaggaaaagggtcttcgataagaatgaaaaattcgcaggaaaatggataagagaactaccttatgtcgtttggagcctgagaacccaacctagccgagccctgcatggaaacactcctttcttcatggtctatgggtcggaggcagtgctacctgctgacctcaagtttggggcgccaagattgatcttcgaaagcgtagcggaagctgaggccaccaggctggaggatattgatgtacttgaggaagaacgactgaatgcagtaatccaatcagcacggtaccagcagactctaaggcgctatcacgataaggctgtgcggcaacggttcttttcagtaggagacctcgtcctccgccgaattctaacgggggagggacgacacaagctatcacccttatgggaaggacccttcatggtagcagaggtcactcggcccggatcgtatcgcctcacccagatggatggcacagaagttgggaactcttggaacatagagcacctcagaaagttttacccctag

SEQ ID NO: 2866 - DNA, 5423 bp, Zea mays
  Clone ID: MRT4577_102611C.1
atggccgtcaccttctatagcaagatcaccctgcgtcccggatccgtattctgcttcggaacaatctcatccatagcggatgaagagggaactctacaccgcattgcggatccgccggaaaagaagtctcctccaacgaactccgaaaatgccggagaagcgcaacctccagctctccggaaaaagatcgtctccggaaagtcgggggccgagggctcgctgacccggagaactccactgtctacttctccaacaaaagaatggacacagatcgcgaggaagaaggagaccagggagaagcgagtttttctttccgttcctccggcctcaaaggagaacggaaagaaggtcgccacgacagcagcaccattctaccccgacgtcctcttcattgggagagtggagtcgcccgccgtctctgacgacgaaccgactgcgcctggagaagaaccacctcaacgagagtcccgccgacggaggaaccggcgcaggaacgttcgacgacatcacgcggccggagaacgggatccggagcagcctgtctcgcgagacgaggtctcggagataggagaaactccggaagaacgcgtcttcagagaacgaaggaactcccgacgacgtgatcgccgacgggctcaggaacaagccgagcaagatgcaaggcaacgccgggagaatccactcttcgggcgcaacctgaatcccgacttcgcccgagctatgaacacgccgagcgaagtcggaggggttctagctcggataactgacggactccctcggactcccgacgcgacgggtttcccctcgtccttcccgaccgccaactgcttcccgcccccctccgccaccgccaccgccacagccacagttgccgccgccggcacgagcagcgggaggagaacgaaaacggataggacagccgcgagcataagttggtgggtgggtcgctgcgacgggggtgcccttcccttcgccatgactcgatatccgaaaaaccggcacaaccgtgggacacaaaatcactcaagcgtcggaggggagagagactccggtcgtacctcaaaaggttccagaccatgagaaatcgttttttttttttttttaaaaaaacttttgatcaggctaagggttacgtcctgcggccaacctaacagctctgataccacctgaagcgtccccaatcctctaggactcaaataatgtgatacaatgactagtcccaggaggctagtaaacacatttatacatcagatgattacatgatctgcttaaccgatacaaacctatacaggtggtgaacaactttaagagttggtccacaactcgggacatatcatcagagtggggctgaagcagcccgatatacgcagcgaagcaattcagcggtccaacagccacaggcaaggttgggaatagtcgtaactctgacctggtctcctcatgccatgttatcgggcgaagggggaaggagagatcgcggaactgccgtctggctccaccgcccggcgtagcctcgaagacctggcctccacgaggcggcacgaacgcaccgataactatgccacaagaacaaggaaacatacagagcaggagggtggaccggaggcgaagcgacactatgcgtgtagccggcagagcggtgtaagtgagtgggtagaggatgattgccctggcagagcgtgttgagggtgtctaccaccggtcctcctgccctatacaggtggtgagagaacccgatcagtataactctgaagaatcaatggctcaatataaacatcagagatcagtctcatggaagaatccatctgttctctgttactctagaaacagtaattcttgcatgggctctgtgtacagcaatggggatgattctaagatggacactccaaggcttgggagttcacctcaaagagctccacgagtcggacactcctttcttcggcatcgtgccgatggaaggggaatacccgctgggccacatctacatgccagtcaccttcggaactccggagaactacagaaccgagttcctgaggttcgaagtggcgaacttcgactccgggtacaacaccatcatcgggaggccggggctggccaaattcatggccatccctcattacacgtatatgatactgaagatgccaggaccgcaaggaatcataactgtgcgcgctgacttccaaggcgccgcagagtgtttccgagtggccatccaagcagccctcaccaccaagtcgtcggcggtttcttcgacactggcgaactctaagcctgaagaggaccttgcagtaccggcaaacgaagctcaggccgcgacctctatgcggccgactgaagaaaccaagaggatcaacctgggcgcgctcgtccagtttctgcaagataaccgagatgtattcgcatggcgacctgcggatatgccgggagtcccaagagaactggccgagcacaaactgaaggtgtatccccaggcaaggccgatttggcaaaagctacgtcgtttcacgcccgacaagagagaggccattcgcgccgagttagctcgcttggtcgtggctagatttattagagaagtgttacaccccgagtggttagccaaccctgttcttgtactcaaaaagaataaagtggattggcgcatgtgcgtcgactataccgatctcaacaaacactgtccgaaggatcccttcgggctcccgaggatagatcaagtggtggactccaccactggatgttccgtgctgtctttcttggattgctattccggataccatcagattagtttggcgaaggaagatgaagaaaaaacagcgttcatcactccgtttggtgctttctgttacacctccatgctgttcggcctcaaaaacgctggagcgacttatcagagagccattcaaacgtgcttagccgatcactggggcaagcgtgtggaggcctacgtagatgatgtggtaatcaaaacggagaattcggaaaacttcatcgaagacttacagctggttttcaacagtctgagacgcaggaaagttactcgggttatcgtcagccaccgaggaattgaggctaatccggataagattgaagctatcatgaagatggaagtgcctcaatcacaaaagaaggttcagcgacttactggatgtatggcagctctgagcagatttatatccaggctggggggaaaaggcttgccgttttacaagctactcaagaaggaagctctagatgcgctgaagaaattcttgacaacgccaccagtactgaagccaccccgacgagctacatcaactcaaccagccgaagatctgctactgtatatttcttgcacgactcacgtggtaagcaccgcgttggtagtcgagcgagtagaagaaggacatgcctacccagtgcaacaccctgtttacttcatcagtgaagttctaggcctctcaaagaaaaagtatcctcaagttcagaagctattatacgcagtacttctaactgcccacaagctacgtcactactttgatgaccacaaagtcatagtagtcaccagttttccaataggggatattcttcacaacaaggaagccattggtcggatagccaaatgggcttgtgaattgggatatcatgacatcgagttccgacctcgcactgccatcaaaactcaagcactggttgatttcgtatcagagtggactgagcagcaagtaccagataacccagagactgcaaaagtatggcgaatgtattttgatggctcgctgaggctgcagggagcaggagcagggattctcttcaccgcacctggaggcgagcacctcaaatacgccctccagttgctatttccggcctccaacaatgcagccgagtatgaagctctgatccatggattgaacatcgccatctcattgggcatcaagagattgatggtatacagagactctctggtagtcatcagccagataaacaaggagtgggattgttcaagcgattcaatgggaaaatactgtgccgccgtccgaaagctggaagataaatttgagggtctggaatttcatcatgtagaaagagatcggaacacagcagccgatgtactgtccaagctaggatccagtcgaactcaggtcccacctggagtctttgtgcaagaaatactacagccgagtatctcaatggatcaaacagaagagtgccacattatagatcaatccgagtcagactctgacgactggagaaggccaatcatcaagtatataaagaatgaagaagaaccagatgacaagaactcggccgagcgcattgccagacagtcggctcactacacactcattggggagacattgtatagaaggggtgcatcaggcgtcctcatgaagtgcatcctcccgtccactgggaagcaacttctggaggaggtccatgctgggcaatgtggaatacatgcaacctccagaacactagtcgggaaggtcttcaggtcaggattctattggccaacaacaaagaacgatgcagccgagttagttcagaggtgcgaagcttgccaatacttgtcaaagcaacaacacctgccagcacagcaactgcagaccataccagtaacttggcctttcgcatgctggggactggatatgattggacctttcaagaaagctcaagagggatacactcatgtattggtagcgatcgacaaattcactaaatggatagagttcaagcccattgcttctttaacctctgctaaggccgtggaattcatacaagacataatattcagattcgggataccaaacaacatcataactgacttaggatccaacttcacaagttcagaattcttcgacttctgcgagcaaaagagcattcagatcaagttgagcgagccaaccgggatgatattggaggcactcaggaaaaaggtcttcgataagaatgaaaaattcgtaggaaagtggataagggaattgccttatgtcgtttggagcctaagaacccaacctagccgagccctgcatggaaacactcctttcttcatggtctatgggtcggaggcagtgctacccgccgatctcaagtttggggcgccaaggttgatcttcgaaaacatagcagaagtcgaggccaccatgctggaggacattgatatacttgaagaagaacggctgaatgcggtaatccaatcagcacggtaccagcagactctaaggcgctaccacgacaaggctgtgcggcaacgatccttttcagtaggagatctcgtcctccgccgaattctaacgggggaaggacggcacaagttatcgcccttatgggaaggacccttcatggtagcagaagtcactcggcccggatcgtatcgtctcactcagatggatggcacagaagtcgggaactcctggaacatagaacacctcagaaagttttatccctag

SEQ ID NO: 2867 - DNA, 295 bp, Zea mays
  unsure (1)..(295): unsure at all n locations
  Clone ID: MRT4577_102612C.1
gcggtacgtanngggggggtttataatattttttttttgtctcatacctgtccttctcttatttgtgggatgccccattcatccgactgaaaactttgttattggcctgtttctcttcacgaaatctcaactactgcccttccccccactccctgggggtatgacgggggcctttttnccacacccacttnttttnctggggggggggggggcagctcctagagggggggggcttttgcctctgcgtcctgggcgcccggccgcccccgcgggtgtggctggcgggggggggggc

SEQ ID NO: 2868 - DNA, 2691 bp, Zea mays
  Clone ID: MRT4577_102613C.1
atgccgttcggcctcaaaaacgctggagcgacttatcagagagccattcaaacatgcttagccgatcactggggcaagcgtgtggaggcttacgtagacgacgtggtgatcaaaacggagaatccggaaaacttcatcgaagacttacagctggttttcaacagcctgagaagatatagatggaagctcaatcctgaaaaatgtgttttcggggtaccagcaggaaagttactcggatttattgtcagccaccggggaattgaagctaatccagataagattgaagctatcatgaagatggaagctcctcggtcgcaaaagaaggttcagcgactcactggatgtatggcagccctgagcagattcatatccaggctgggagaaaaaggtctgccattttacaaactactcaagaaggtggataagtttcaatggacttcagaagcacaagaagctctagacgcactgaagaaattcctgacaacaccaccagtactaaaaccgccccggcgagctacgccgactcaaccggctgaagatttgctgctatatatctcttgcacgactcacgtggtaagcactgcgttggtagtcgagcgagtggaagaagggcatgcctatccggtacaacatcctgtctacttcatcagtgaggttctaggcccatcgaagaaaaagtatcctcaagttcagaagctattatatgcagtacttctaactgcccgcaagctgcgccactactttgacgaccacaaagtcatagtagtcactggttttccaataggggacattcttcacaacaaggaagccattggccgaatagccaagtgggcttgcgagttgggatcccatgatatcgagttccgacctcgcactgccatcaaaactcaagcactggtcgatttcgtatcagagtggacagaacagcaagttccagacaatccagaaacggcagaagtatggcgaatgtattttgatggctcgctgaagctgcagggagcaggagcagggattctcttcactgcacctggaggcgagcacctcaagtatgctctccagttgctattcccggcctctaacaatgcagccgagtatgaagctttgatacacggattaaacatcgccatatcactgggcgtcaagagactgatggtgtatggagattctctggtagtcatcagtcagataaacaaggaatgggattgttcaagtgattcaatgggaaaatactgcgccgccgtccgaaagctagaagataaattcgagggtctggagtttcatcatatagaaagagatcggaacacggcggccgatgtactgtccaagctcggatccggtcggactcaggtcccgcccggggtcttcgtgcaagaaattctccagccgagcatctcgacggatcaaatagaagaatgcaacatcatagatcaacccgagtcagactctgatgactggagacaaccgattattaagtatataaagaatgaagaagaaccagatgacaagaactcggcagagcgcattgccagacaatcagctcactatacactcattggggaggtattatacaggaggggcgcgtcaggcgtcctcatgaagtgcgttctcccgtccaccgggaagcaacttctggaggaagtccatgcagggcagtgtggagtacatgcagcatccagaacactagtcgggaaggttttcaggtcaggattctattggccgacggcgaagaacgatgcagccgagttagtccagaggtgcgaagcttgccagtacctgtcaaagcaacagcacatgccagcacaccagctgcagaccataccagtaacctggcctttcgcatgctggggactggatatgattggacctttcaagaaagctcaagggggatacacccatgtactggtggcgattgacaaattcactaaatggatagagttccagcccattgcctctttaacctctgctaaggccgtggaattcatacaaggcataatattcagattcgggataccaaacagcatcatcaccgacttgggatccaacttcaccagttcagaattcttcgacttctgcgagcaaaggagcattcagatcaggtacgcatccgtagcccatccgagagccaacgggcaggtcgagcgagccaacggaatgatattggaggcactcaggaaaagggtcttcgataagaacgaaaaattcgcaggaaagtggataagagaattgccttatgttgtttggagcctgagaacccaacctagccgggccctgcatggaaacactcctttcttcatggtctatgggtcggaggcagtgctacctgctgatctcaagtttggggcgccaagattgatcttcgaaagcatagcagaggccgaggccaccaggctggaggatgttgatgtacttgaggaggaacggctgaatgcggtaatccaatcagcacggtaccagcagactctaaggcgctaccacgacaaggctgtgcggcagcggttcttttcggtaggagacctcgtcctccgccgaattctaacgggggagggacggcacaagttatcacccttatgggaagggcccttcatagtagcagaggtcactcggcccggatcgtatcgcctcacccagatggatggcacagaagttgggaactcctggaacatagagcacctccgaaagttctacccctag

SEQ ID NO: 2869 - DNA, 161 bp, Zea mays
  Clone ID: MRT4577_102614C.1
gcgtatgccagcgttccgcttgtgttcacaggaacacgaatgacgtagggagcgcctagctaagtctgcaactatactgaagggaggctggctaacagcgccccctgtattatgcgagatgaaaggtgaaaaaggtcgtcgatggcacaactgctgacgcg

SEQ ID NO: 2870 - DNA, 321 bp, Zea mays
  unsure (1)..(321): unsure at all n locations
  Clone ID: MRT4577_102615C.1
gcagaagcggcgggcgagcggccgcccgggcagggacggcngggcaggcacaggagcagcggaggcagngggcgcccaggggaacngagcccccnnccgacggcgnggcngancncgcngcngnggcancanccggngggggcaaaaccnnnggggggggccgccnagcaaaaagggcccacgggacacgggaaggnngnangnnganacggnnacaccgnagccganganangnagggggaannncnccccnnnnannanccccgggcgaacaanaaaaaaaaaaaaaaaaaaaaaaaggaccgcggccgcgaccacgcg

SEQ ID NO: 2871 - DNA, 1012 bp, Zea mays
  unsure (1)..(1012): unsure at all n locations
  Clone ID: MRT4577_102616C.1
gctagctagctagcaagcaagcaagcaagctgaaatggaacgctactcttgctgccgttgggtgcttgcgtgttctatccttgccctgtgcctcggtgggcagggcgcgaggtgccagctgacgtcggatttctacgacagcacctgccctcagctgtactacgtcgtgcagcagcacgtgttcgacgccatgagagacgagatgaggatgggcgcctccctcctcaggctgcatttccacgactgctttgtcaatgggtgtgacgcttcgatccttttggacggcgacgatggcgagaagtttgcgctgcccaacctcaactccgtcagagggtacgnggtcatcgacgccataaaggccgacctcgagagcgcgtgccccgaggtggtgncgtgcgcggacgtcgtagcactcgcggccagctacggagtactcttcagcggagggccttattacgatgttcttctcgggaggttggacgggctggtggccaatcagtccggagccgacgacggcancgagaccgccgcgctcgacgtcagctccccctacgtgttcgacaacgactactacaagaacctgctgacggagcgaggcctcctgtcctccgaccagggcctcttctccacccccgaaggcgtcgccgccagcaccaaggatctggtggaggcctacagcagcgacggcgaccagttcttctacgatttcgtctggtccatgatcaggatggggaacatcccgctcgccgccggctccgacggggaggtccgcaagaactgcagagtagtcaactaatagcatgtggcgatcagcaaatttcgatcgccgttcactgttatttcttgtgtgtgtgtgagagagaggggtacgtgaactgttaagagtctcctatatatgtaatgtaaggtttgtgggtgcaacgttgagcagctagctacatgcttacgaagatgaggaataagaactgtacactgccaaattggtcccacaataagaactactatgagatca

SEQ ID NO: 2872 - DNA, 1225 bp, Zea mays
  Clone ID: MRT4577_102617C.1
gcggctcgagggagatcgagacagctagcaagcaacaagcaagctgaaatggagcgctactcttgctgccgttgggtgcttgcgtgttctatccttgccctgtgcctcggtgggcagggcgcgaggtgccagctgacgtcggatttctacgacagcacctgccctcagctgtactacgtcgtgcagcagcacgtgttcgacgccatgagagaggagatgaggatgggcgcctccctcctcaggctgcatttccacgactgctttgtcaatgggtgtgacgcttcgatccttttggacggcgacgacggcgagaagtttgcgctgcccaacctcaactccgtcagagggtacgaggtcatcgacgccataaaggctgacctcgagagcgcgtgccccgaggtggtgtcgtgcgcggacgtcgtagccctcgcggccagctacggagtactcttcagcggagggccttattacgatgttcttctcgggaggttggacgggcgggtggccaatcagtccggagccgacaacggtttgccgtcgccgttcgaacccgtcgactcgatcatccagaagttcgccgccgtcggcctcaacacgaccgacgtcgtggtcttatcaggagcccacaccatcgggcgagcccggtgcgcgctgttcagcaaccggctgtccaacttctcggccacggattcagcggacccgacgctggaggccagcctcgccgacagcctccagagcctctgcgcgggcggcaacggcgacggcaacgagaccgccgcgctcgacgtcagctccccctacgtgttcgacaacgactactacaagaacctgctgacggagcggggcctcctgtcctccgacctgggcctcttctccagccccgaagacgcgtcggcgagcaccaaggatctggtggaggcctacagcagcgacggcgaccagttcttctacgatttcgtctggtccatgatcaggatggggaacatcccgctcgccgccggctccgacggggaggtccgcaagaactgcagagtagtcaactaatagcatgtgacgatcagcaaatttcgatcgccgttcactgttatttcttgtgtgtgtgtgtgtgtgtgaggggtacgtcaactgttaagtcacctatatagtaatctatactacctattaagagtgtaacgttgagcagctacatgcttacgaagatgaggaataagaattgtacactgcc

SEQ ID NO: 2873 - DNA, 321 bp, Zea mays
  Clone ID: MRT4577_102618C.1
gcggagcacgacgggattgcaaacattaatggtaccgacagtcagatcccactgactgggccaaactcaatcattggcatatctgctgatgttcacgctgatcccgatgatcttggaaagggtggacacgatctcatgaagatcaccgaaaacgctggcggccgtgttgattgtggtatcatcggactccatggctgaactgaatcattatgttcgctggacttacatggcgcctgatacagccgacaccatcaggctagaaaacataccgaaacatggtgaattaataataagaacgcctgatatgtgatcactggtgat

SEQ ID NO: 2874 - DNA, 580 bp, Zea mays
  unsure (1)..(580): unsure at all n locations
  Clone ID: MRT4577_102619C.1
tccggaggaaaagagaggcttggaaagcttagctatgcaactgtatccttttgttcgctgctgacaaaattagttctattatattctgtggaattggtgagtggccatcttaatatgattctcccaatttgtgtactttccatatctagctgaacactgttcatttcggagctacttgttgaatcttaatattttgaaaggaagattctacggaagaatgttgattcactagatttggctgtcagtcaattgcttcgccttccctagtcaatggatactatcaatgaagttacaaggcaactgactgctggaaatatgaagtggcttatagcaacagaggactggacactggaggacttcccctttttatggcatgataaaacactactagttcttgatttgatttacgtttccatcttatctgtatttgtaaacaacacatttattgaaaacatctctatcttcttgtgatgcgtgcatgaagtttgtatgtaaaatgggtcattgagcccatggactatctctgtaaattggagggaaatggcaacagaagtttttctgtnttnntttttnntttttt

SEQ ID NO: 2875 - DNA, 444 bp, Zea mays
  Clone ID: MRT4577_10261C.1
tggcctggaacctttgggctgatttatgtgcttgtttatgtgcttgtttatgtgcttctttatctgcttggatttatgtgcttgtagaagcacgattcccttaattcccggggcggctagcgtaaatttcgacattgcgcccgaagcggcttctgactccgacaaatacaagtgacacgagcgggacacgccgatagtcgacccggagccggcggaaagaaccgacggacatcatgacgcggcccacggaattcacgaatttaaacacccaaaccggcggaaacttaacaaggaccccgcccctctctgataacggccctgcggataagacggagtacacattaccccgtagatcttcgtcggctacaataaaagattcttaaagtacggtcatgagtgaataaagactaatttactaatacgggaaacaaggatcccgcacat

SEQ ID NO: 2876 - DNA, 1180 bp, Zea mays
  Clone ID: MRT4577_102620C.1
cattgggtacctcgaggccggccgggacgtcgctgcctgcctgccttcttctcagcgcgggaacagcaaagaaagccccagattttcccgcgttcgtggtctgcactctccagttctccgttccccaaccccaacctagcatccttgcatcccggggctcagttagcgttgccgccgcaccgtactacacctccggtggccgctcacccatttcccgccgatcaagcgcgatggcctcgacgagggatctagtcatagcttctctctcagctgcgaccggcgccgttgttgccgccgctgcactgcgcctcctgtcttcccgcagaacatcctccgtcagaccccagaacctccccgccgccgctaacggatctgcctccgagcgcccgctggctcagtcccccttcgatcctgtcaagagggaaggatatatttcctgggacgactacttcatggcgatcgccttcctttcggctgagcggtctaaggatcctaaccggcaggttggagcatgcttggttagccaagagggaataatcctaggaattggctacaatggcttccctagaggttgttccgatgacaagcttccttgggcaaagaaatctgcaagtggagatccattagagacaaaattcccctacgttgtccatgctgaggttaatgcaattctaaataccaaccatgcttcagcggctggacagaaattatatgtcaccatgttcccatgcaatgaatgtgccaagattattattcagtcaggcgtatctgaggtcatatatttcgttgaaaaaaagattgacaactcagctcacgtttatgttgcctctcacaagctattgtcgatggctggtgtcaaggtcaggaagcatcagccccagatggcgcaaataccgatcaagttccaggagccatgaagccggtactagttccagccttccaggagcactagtgagcgaataaacagtgcaagatacctgttgaccgcggcacctgtgacaatcgacaatggccgacccgcagcggtctcggtatgcggcgtcggtccctctccctccctcagaggctgttgtaaaactatagctagaattcgtactggtaataatgtaaagacatttcaattctcctctctgataccagcttatcttttacgtgcgtttggatcccttcattttagagg

SEQ ID NO: 2877 - DNA, 623 bp, Zea mays
  Clone ID: MRT4577_102621C.1
ggatcattcggtgaatatgggaaaatcattctcttttctctaaacataactgtccgacactccacctccaactcaacattttccccccttggttaccagaggccgaagcaacatcaacctcgagtcctcgacctgcaggtctcgtcgtcatctcccgtctgtcacgctacaaggttgaagtagacggtgtagaactcgtccctcaaggtgaacaatggctccaggaggaagctcctcctcacgcccctggcagcgaagctcatggggtggtaccgccgcagcggctcgccccgcgcgaagctggccgaccgccggaaccaggcgccgtcgccgcgcttctgctgggcaccaccggcacagcccacctgcaccttctcgccgccgccgaccaagaagcaccccggcctggacgcgagctcgagcgacaccgagccgggcgcaccggcgagccccggcacgacgttgaacgcggcgcccgagctcttctccgcggccaccgtgagcctatctcttctccgcagacccggcatgtccgtccgttcgagcaccatccccggcatgccgcgccggccgagcatcgcgggggcgcccgcgccggcgcctccctgcgggacgagcctgaa

SEQ ID NO: 2878 - DNA, 569 bp, Zea mays
  Clone ID: MRT4577_102622C.1
tttttttttttttttttttttttattacatgcttatggaagttgattcatgacctttaaaccattacaaactgaaacttgaacaagatggtacttaaatgaaatgttgaactaaaacaagtttgttgacaaagcatacttaactaaaactagaaaattctagatattgaaacgtcttgcaagaatctcgttctgacgatcttcataatactgccgttgtttatagttcatggggctaagggccaaaccaattattctgtcttcttcgagctgtctttggaacgcaaacttttctttggccaatttcatcctttcttcttggaaagcaaaggctttattgcacctctcctctttcttcaagtccttttcaagggcaaaatctttcttctttgcaattagatagcctacaacttccatggacgtacgttggcgtagcttttgtttctccttcttcttaccggcgggtctgcatgatggttcatcatgatcagcacccccaagaggggcatctacgacaattgcatttgcaattgatgctggaaaaaaatttggcggtggcttctggttctt

SEQ ID NO: 2879 - DNA, 250 bp, Zea mays
  Clone ID: MRT4577_102623C.1
cccgcgctaaataagaactgttttaaaatgttattgaccattcattactccaaggttcacagtggatatactatcggactatggattgcaaccataattgataaaaggtcatacatcgcaaaaatgacataaataatactctgacatatatgagcatacaactagatccatacaactattcaataattaaataggctgaacacatttacgtagatagattactacattacagtgtcttactgattctatc

SEQ ID NO: 2880 - DNA, 561 bp, Zea mays
  Clone ID: MRT4577_102624C.1
tcgagcggccgcccgggcaggttaaaaaaaaaaaaaaaaaaaaaaaaaaaaaaaagaaaaaaaaaaaaaaaaaaaaagaaaaaaaaaaaaaaaaaaaagaaaaaaaaaaaaaaaaaaaaaaaaaaaaaaaaaaaaaaaaaaaaaaaaaaaaaaaaaaaaaaaaaaaaaaggtttgccctttgcccggaaccccttttggggctttttttgaaattttccttaaccttgggggcggttaaactttccttttaagggccccatttcccctttttgggggttttttaaaaattcttgggccgcttttttaaaacgtgggaattggaaaacccttgggtttccccactttattccctttgaaacaaatccccttttcccaagttggtttattaccaaaaaggccccccctttccccctttccaaaaagtgccccaccctgatggggaattggcccccccctttaggggcgctttaagtttggggggtgtggtgtttccccccagggggcccgtttcctttgcaaggcccttaacccccgctcttttcctttttttcctttttttt

SEQ ID NO: 2881 - DNA, 372 bp, Zea mays
  Clone ID: MRT4577_102625C.1
ccacgcgtccggctcgtttacgtgaggggcgtgtccgtgtgcatggggacctcgctgctgaatccaactgactgttacacccactacaagacacactagtcgatcacccacgacgatcgatattccacaactggttgttctccagcaccagcaacttcatcatactgaactggactaaagcacaacagaactgcatcatgatcacacagatgtcaatggacaaggaacagaactcagtgacggaacagggtggctgcagcccaaaacatgaagctcgatcctggcttccaaaactgccgcctggtgcccgaccagaagctgttcccggaccgcttcaagatcccctcgtacctgggccgcccctggaaggag

SEQ ID NO: 2882 - DNA, 627 bp, Zea mays
  unsure (1)..(627): unsure at all n locations
  Clone ID: MRT4577_102626C.1
tcgaggcnncggccgggattactcgatgttcatatataccgacccaaggaacgaacatattacattgcgactgcgactgttagcatgaggaggccatctggcgatatgaagttctccctctccacttctttttttcccatttctggcggcgctataaccaatgcctgcaacctactcttcgacgtcacctaccctcgatacgtgctgatatattgttctactacatgaatggcaccggcaaaatctacgacgactttcaaggtgcactgcaaagaataaaatggagttgccgaatgtgaggacacaagcccaagctcatcatacctacaagggtgaagaatcctgccactactatcacagagcttccctaaaagatatggaacatgtgcggcctgaatgagaaggacaccattacacctgatcatgtctttgatgactgggacaagtacccgagtgattacatggacgcaaaatacaacccggataacgaacgccaggtcaacgactgattgatatgtccacactgtcactgcactcaacgggagatgcaaaccgcgaaccaaattaagactcttaaactgaaaagactactcgtgtgtgttcatcatagatctccagtggtcttgc

SEQ ID NO: 2883 - DNA, 573 bp, Zea mays
  Clone ID: MRT4577_102627C.1
tttttttttttgtttttttctttttttttttttttttttttttttttttttttttttttttttttttttttttttaaaaacaaaaaaggcctttcttatttcggggaagccccaaacctcaaacaaaaaactttattattgaaccggggggcgaaaaaatctaaaaaagggccccccccatgagggggtgttggaaaaaagccgctgggtttgccaaaacaagttggttaaaaggcaattgttgttgttccaaaaaaaaaccaaagttcaatgcccctagttgggtgaaaggaaaaaaccgctgttgctgaaaataagcaacaagggttgctaacccaaattgttgaaattgttgggccccgaggttttgggcccaaaaatgccccaaagggaaccgctgtaaaaaggccgaagattggtggaggaacaagggggaaaaagggaaaaagccccctgcgattgcctgtgggaccctcggggggggaaaaattgggttttcacaaaccaaaaacacccttggtgaaagggacgggggaaaaaagggaacctataagagcttgggacccttggggg

SEQ ID NO: 2884 - DNA, 550 bp, Zea mays
  unsure (1)..(550): unsure at all n locations
  Clone ID: MRT4577_102628C.1
tccctcactgggcatcttcttcttcctcctcgttctgcatatcacacaagctagctagcagctgctgtcattgatcaaccttcgggagcccaagagagaacttcagcccttcaacaatggagtccatccctctcctgacgccgtacaagatgggccagctcaacctcgcccaccggatcgtcctggccccgctcacccgccagcgctcctacggcaacgtgccgcagccgcacgccgccttgtactactcccagcgcgcctccgccggcgggttgctcatcaccgaggccaccggggtctccgacacggcccaggggtaccgcgatacaccgggcgtctggacggcggagcacgtcgaggcatggaagccaattgtcgatgcagtgcacgccaagggcgcgctcatcttctgccagatctggcacgtcggccgcgtgtccacctatgagtaccagcccggcggtgccgcgccgctgtcgtgcacggacaagggggtgggnccgcaaatgagctatgacgggaggctggaggagttctcgccgacgaggag

SEQ ID NO: 2885 - DNA, 319 bp, Zea mays
  Clone ID: MRT4577_102629C.1
agcagtggtaacaacgcagagtactctgtttttttttcttgtctgattgtacgggctattgcgctagggagcaaccttttgatgatcccgccatatcaacatatctgggcattgttgggttgtaccatgatggggaccgacgacggaccctgattgcacgaattgagagagggtgccagagaccatagttccacaaccaatgaaggcaatccgctctcatagttttaaattcctgaacaagctgaccagcgtaatttgcttgcatcatcccgcgtactctgcgttgttccctgcgcttaagggcgagttaaggacaata

SEQ ID NO: 2886 - DNA, 1386 bp, Zea mays
  Clone ID: MRT4577_10262C.1
aatgacagcgcagaacccgcccacaggacaggacacacagagccgagccaccccacccaccatcggcgaccagcagccagccgcgggagcgagctgtttaaagacaccgagtcggagtcggacggaggactggcaggcacaaccgaagccaccgcttctagttctcgggttcatcgccagcaatccagaccacataatgggactgccggtgacgaggaggagggagagggacgcggaggcggagctggacctgccgccggggttccggttccaccccaccgacgacgagctggtggagcactacctgtgccgcaaggcggcggggcagcgcctccccgtgcccatcatcgccgaggtggacctgtacaggttcgacccctgggacctgccggagcgcgcgctcttcggggcccgggagtggtacttcttcacgcccagggaccgcaagtaccccaacggctcccgccccaaccgcgccgccggcgacggatactggaaggccaccggcgccgacaagcccgtcgcgccgcgcggcgcccgcacgctcgggatcaagaaggcgctcgtcttctacgccggcaaggcgccgcgcggggtcaagacggactggatcatgcacgagtacaggctcgctgacgccggccgccgcgccaagaaagggtcgctcaggttggatgactgggtgctgtgccggctgtacaacaagaagaacgagtgggagaagatgcggctggggaaggagggcgccgccaaagaggaggccatggacatgagcacctcccactcgtggggcgagacgcgcacgccggagtcggagatcgtggacaacgacccgccgttcccggatccgccggcgccggcgatgatggtgcccaagaaggagcgggtggacgccggcggcagcgccaggagcagcgacctgttcgtggatctcagctacgacgacatccagggcatgtacagcggcctcgacatgctgccgccgcccggcgaggacttctactcctcgctcttcgcgtcgcccagggtcagggggaaccagcccaccggagccgcggggttgggccccttctgagtgagctcaggcgaggatggaggcatggagatgaggagagaagacggacggcgttgcgaactctgtaaatacagcataggactaggagtcgaacctggtcggggttacaagtcgagtgtgtcggtgtttcgtacatgggagccggcccggtctttggcttggcgctggctcattctttagtttcacttcctgcgcagacggtaggtagatgtgtatgcgtagctgtgcactatcacttcctcttcaacagaaccgattcactccgaatggcaatgtttgaagtgaaatcagcgaacggaaaaggttggttc

SEQ ID NO: 2887 - DNA, 339 bp, Zea mays
  Clone ID: MRT4577_102630C.1
aaaaaacaaaaacaaaataaaaaataaaataaacagataaaaaaaaaaaaaatgaaaaggggaaaaagaagggggggggttttcgaggatccagattctagtactcgtgcatgcccagtaatgactattttattgggcaatctaaatccaatgctttgttgatcggtttacaacctctactctgttaaaacgctggcgtttccggaattaatcgcgtttcgactgatccccctttcaccatgtggggtaaaagcgaaaatgcccataccgatggcccttccaaacatttggccaacgtgaatgggtattgggacacgccctgaatcggctcattaaccc

SEQ ID NO: 2888 - DNA, 306 bp, Zea mays
  Clone ID: MRT4577_102631C.1
aaaaaaaactttttttttttttagggtcaaaacatttccctaatttcttaactccaaacattaaagggcacacccatggtaacatacatttttaactgatcaaatgatttgacatctttagcctttttataaaagcgagaaactcccccacacattatcaaaaagaaggaattgccctagtttaattccataaattttgaccatagtatcacagtaaacttgggggtatccccttttattctttttttcccacacgggcagtttattttttctggtacacacaagggaattacttggccttttaaa

SEQ ID NO: 2889 - DNA, 1506 bp, Zea mays
  Clone ID: MRT4577_102633C.1
ttggtaccctcgaggccgcgggcgcgtggtcgtgttcgctccacacgcgccaccaccagagacctcccgctggttacaccaatggaggccgtcctacggcatccatcgctctcgcgcaccaggcctccgaacctgaaccctcccacaacgccatctccatcccttcatgcaccatctcttctccgcctccgcgcgcgccggctcatcgccgccgcggtgttccaggaccagaagccgaaggagccagcaagcaagggaggtgatgacgaggaggaggcgtacggcgaggtggaccgcatcgtctccagccgcacagtcagcagcccggtgttcgcggaggacggctcggccaccgccgccgtcgccacggagttcctggtggagtggaaggacgggcacgagccgtcgtgggtgcccgcggaggccatagccgcggacgtggtggccgagtacgagacgccgtggtggacggcggccaagaaggcggactcggaggcgctggcggcgctgctcgcggacgagacgttgcggcgggaccccgacgcggaggacgcgcaggggcgcaccgcggcgcacttcgccgctgggctggggtccgaggagtgcctgcgcgcgctcggcgcggctggagcggacgtgggccgtcgggagcgcgcggggggcgggctcacgccgctacacatggcggtcgggtacggccgcgcgtgcgccgtgcgcgcgctgctggagctgggcgccgacccggaggcccccgacgggcagggccgcacgccgctggagctggtccaggaggtgctcgccagggcgcccaagggcaacccggcgacgttccagcttcggcaggggctggaggcggcgcagaaggagctggagaaggccgtgtacgagtgggccgaggtggagaaggtgatcgacggccgcggcgaaggcaagtggcgggagtacctggtggagtggcgcgacggcggcgagagggagtgggtgaaggcggcgtgggtggcggaggacctggtgagcgacttcgaggccgggctggagtacgccgtggccgaggccgtgctcgacaagaggcaggcggcgacagcgacggcggaaggggaggacagctgggagtaccttgtcaaatgggtcgacattgaggaggccacgtgggagcccgccgagaacgtggacaccgagctcgtgcagaagttcgagcagcagcagtcggggtctgcaggcggtgattgatggcggcagcactgcgccaccgtcgccgcaggtgatagagattacttgatgaaggtgattgcgttttattcgtcgggtattcaaagcactgcccgggttgtattttaggatgaaacttttgtgagtatcatattttcaccggaattgcagtttcagccttcccgcttggaaactttttattcgtcgggtattcaaagcactgcccgggttgtattttaggatgaaacttttgtgagtatcatattttcactcaaaaaaaaaaaaaaaaaagcggcc

SEQ ID NO: 2890 - DNA, 334 bp, Zea mays
  Clone ID: MRT4577_102634C.1
ccaagcacctccctaatccagattgagaatgtaactctaaggaagaagttgcgtggtactgtgggaagcgcatggcttacatctacaaagcgaaggtaaagaagaacggaagccactatcgctgcatttggggtaaggtcaccaggcctcatggtaacagtggtatagttcgagctaagttcaagtccaatctgccacctaggtcaatgggtgcaagggttagagtattcatgtatccaagcaatatatgagatattaagtgtaaaacctttctgcttgagcctactcctttatccgtggagatatgctccaatattccaggattcgtgtgtcg

SEQ ID NO: 2891 - DNA, 177 bp, Zea mays
  Clone ID: MRT4577_102635C.1
cccacattttactttgaatggatggctactcttacgcctccggcggctactatgggagggggtataccagaggggagggggtctcctttcgcctttattcaacttataatcatgatggacgtactatgcttttaatgggtgttttgaatacggaatattgcgggaactggattattt

SEQ ID NO: 2892 - DNA, 218 bp, Zea mays
  Clone ID: MRT4577_102636C.1
aacaaaaaccagcaatcactagatctgtttttattaactattccacacaaaaccaatcacccctaatgttcattattactccaatcccacacacactaactcatcataaccattcatcaccattaatttttcttacttaataatttttaactcactctccccattcccaaaactcacccatttttttttttaacacacatatgcaaaaataactatat

SEQ ID NO: 2893 - DNA, 515 bp, Zea mays
  unsure (1)..(515): unsure at all n locations
  Clone ID: MRT4577_102637C.1
aactgaaaccatactgcctttatgttatcatttagaagtgccgttaagaaaaatatactgttatggtacaaaaattgtatgacatantcgaaatcacattgaaggtcttgatcactttgttatcaaaatctagcctcaaaacatccctcctactacatgtattcgccaagatattccccctcctccggtgcccctgcaaatttctgctaatctaagctctattcacacgaatgagttgtccttccaattcctgacaccacatttaattgtagaacaatataaaacattagcgacaggttatgttccaaagtttgatatcaaaagcatgccaactttcaaggcttcagaaatcttttgaatagcaaatataggagattatggtcttgatgtgtgctgaagtacggttgaagaacgggcaatgttattaatatcagcaaataagtttctgtgggaatgatatgtcagaacaatatggcaccagttgacgtagttgagatgatgtaattctaactcat

SEQ ID NO: 2894 - DNA, 385 bp, Zea mays
  Clone ID: MRT4577_102638C.1
aaaaaggggaaaatttgtcccgctttttggggtattgccctttttttaaacaaagttcccgggggtcaaattccgtccaactcaggcgggttatttcccggggcccaaatttaacgccaaatggaaatcaaatcggctttggggaacccccggtaataccccgggggggggggattggggccccccttctcgggggccctggggggggtgggcccgccctggccggcaattggaagcccgtggccgaccccggaatggcctttgtattacgggggaggggagcccacctccttttctgggggtctggggaaggggggcgtcacccccggggggcggggggtggggggttcccactttatgcaccttttaacagccctttgccatt

SEQ ID NO: 2895 - DNA, 270 bp, Zea mays
  Clone ID: MRT4577_102639C.1
ccccgtgcttctccgccgtcgacgccgcgtcccagtgcgaagagaccacgactcacatggccagccgctgggtccggcccgacgtgtacccgctgttcgccgcaacgggcgtcgccgtcggcatctgccgatttcagctcttccggaacaccaccggcaacccggaagtcagggtaaacaaggcagggagggcagctggtgtgcttgacaaccatgaggaggggaggcgttacgccatgcatggcctaacacgctttgtgcacgacaaga

SEQ ID NO: 2896 - DNA, 1212 bp, Zea mays
  Clone ID: MRT4577_10263C.1
ggtaccactcgaggcctgccgtgggaggactggcaggcacaaccgaagccaccgcttctagttctcgggttcatcgccagcaatccgggacacataatgggacagccggtgacgaggaggagggagagggacgaggaggcggagctggacctgccgccggggttccggttccaccccacagacgacgagctggtggagcactacctgtgccgcaaggcggcggggcagcgcctccccgtgcccatcatcgccgaggtggacctgtacaggttcgacccgtgggacctgccggagcgcgcgctcttcggggcccgggagtggtacttcttcacgcccagggaccgcaagtaccccaacggctcccgccccaaccgcgccgccggcgacgggtactggaaggccaccggcgccgacaagcccgtcgcgccgcgcgccgccgccgccgacgcccgcacgctcgggatcaagaaggcgctcgtcttctacgccggcaaggcgccgcgcggggtcaagacggactggatcatgcacgagtacaggctcgctgaccccggcggacgcgctaagaaggggtcgctcaggttggatgactgggtgctgtgccggctgtacaacaagaagaacgagtgggagaagatgcggctggggaaaggggcagccgccggcgtcatcggcgcagccaaagaggaggaggccatggacgtgagcatctcccactcgcagacccactcgtggggcgagacgcgcacgccggagtcggagatcgtggacaacgatccgccgccgccggcgatgatggtgcccaagaagaagcgggtggacgacggcggcagcgccaggaccagcgacctgttcgtggatctcagctacgacgacatccagggcatgtacagcggcctcgacatgctgccgccggccggcgaggacttctactcctcgctcttcgcgtcgcccagggtcagggggaaccagcccaccggagccgcggggtcttgggccccttctgagtgagctcaggcgaggatggaggcatggagatgaggagagaagacggacggcgttgcgaactctgtaaatacaggcagcataggaggagtcgaacctgactggacctggtcggggttacaagtcgagtgtgtcggtgtttcgtacatggtacatacagagaacatattctttgcaatcacttattttggtgcaaacgtgcaatcc

SEQ ID NO: 2897 - DNA, 472 bp, Zea mays
  Clone ID: MRT4577_102640C.1
gcatatcggatatacggagcctcaccatcatctgccatgcccgcacgaccagcacatcactactaccacccactcctcgcgaaggcgatgctcgagctcgcccgctccgtcctctccgacactccccctgacgtcaacgccgagcaggatgctgtgctccacctccaacggaacaagattcgagcgccatcatagaataggcgaaggccacaccagcgactcagcattcgacgaccaattggacatatgcgcgagatgaactagaccatatggttcatacgcctctgaagaatctatcgccactagcttagagatctgccatctaccagcatctatctaagttagatagatacccatgaattcgctggccatatcatccgttactctgaacaggatatgactcctctgcgtacgctgttcatctcgaatgttcagatgcactgatcatgcactgatcttcccctggcatctc

SEQ ID NO: 2898 - DNA, 336 bp, Zea mays
  Clone ID: MRT4577_102641C.1
ggggaaaaaaaaacatgcttttgcctcccggcccgggggggaaaaccggccaaaacccccaagggccaaggggaaacccttttttttggtttaaagatccacaaacgggaaaggggtccccggccccccatccccctttggggttttcccctttttccgttaaaaatttaaagccggtgaaacctgtttgggaagggggaacctttttagaaccccccctttcggcctcaaaagggggcctcagttttccggacccccttttttgggccaaagatgaacccccttggtggggggccctttgcccccccaatttttttttaaaccttgcgacctttt

SEQ ID NO: 2899 - DNA, 267 bp, Zea mays
  Clone ID: MRT4577_102642C.1
cgaccatgaatatccgggaaggacttggttaatacataaggcggacctttgccaattgttgaaccaaaaaaaattaaggttcttcgggacaggaaataagaaaggggggcccttttttggggttccaagttgacatgggcatgatagggggggacttacaaggaaaggagagcgtgaaatgaaaaaaaactttgagggtgcgtaaaacagcgtacaagagaaaaccatggtgtggcctaaaataatcggcctgaagaacaggccctt

SEQ ID NO: 2900 - DNA, 226 bp, Zea mays
  Clone ID: MRT4577_102643C.1
ggccaccgccgatgcaccatgacgcgtctgctgctggcgtgcctggctctgctgctggcgcgggcgggcgtggcgcgggaatacaccgccgtcttcaacttcggcgactccctgtcggacaccggcaacctgtgcgtggaccgcataccggactacctggccaccgggcacatcgcggacgggatgacctaactcggctatcccaccgggcgcgttttcgacgggc

SEQ ID NO: 2901 - DNA, 566 bp, Zea mays
  Clone ID: MRT4577_102644C.1
ggaaaaaaaaaacttgttcacccctcctaaaagggacttgataaataaacttgttcacccctctttgaaaaaaatttgcttgcggtctccaaaacaattagttttactcccattaccaggcttccaaacccggttgggggcatgactggcctgccgtttgataattaggttaccccctttgccctttgagtttagttgttttgaccaaacaactttttttcccggtggcctgatgccatttttgggagggaaaaacactggagttccctccacttttttaatccggccttggcccggaaaaggcagggttaacccgcaaacaaccaccaattcgggaaatccaaccatttccccaaaaaattcgggttcccaaacttattttgaaaaaaaacaaatggtataaccggttttgggtcaaacatattagttgaagggccaaagcccttgtttccctaattcaaataacctaaggatctcggggactgaacagcaccaggacccagttttattaaaaatcttcccttcaccaaagatccttagaatttggaccaggggcaaagctaaaa

SEQ ID NO: 2902 - DNA, 1657 bp, Zea mays
  Clone ID: MRT4577_102645C.1
gtcttaccgcctcccaacaacagcgagcggcgcgacctaagccgctctgcgcccaccggccagccggggcggagagggaccgaccgctcctccgttcgaagcgccggtcctgagccaccggcgtcgcccgcatccgctgctcggctcgcccgccagcctggtggcgatcggcatcctcttttactccagaaaaaaaagatcttctcgcaaaaaaaaaaaaggaaaaaaaagagaaaaggtcaatgcactgcaatggttgattctgaaacttggatcagatagacactgatactcatttctactcatcaaataagcgttgtcagatcacggtgctacacacactggttcagtgaatctgcaggtgctgctcatatggaaacatacactactgatgacgctcttacgctcatggggtttggaaagttccaagcacttgtccttgcatatgcaggaatgggctgggttgcagaagccatggaggtcatgctattgtcattccttggaccagtggtgcgggaagagtggaatgtctctccccaagacgagagtctgctatccagtgttgtgtttgctggcatgctaatcggagcttgtgcttggggctttatttccgacagatacggaagaaagactgttttattgctttcgactctgcttactagtggattgggtcttctaagtgctctatctattaactacttgtgcttgctggttcttcggttttttgtcggcataggagtgggcagtgggcatgtattttcatcttggttcttggagttcgttcctgcaggaaatcgtggcacttggatggttattttttcctttttttggactattggcacagtcttggaggcttcacttgcatgggctgtactatcagcattgagttggaggtggttgctggcattgtcttcccttccatgcttcctcttgcttcttttcttcagaatcacacctgagtcaccacgctatctttgcgcacaaaatagaatgactgatgcaaggtttgtcctggagagaatggccattgcaaaccaagcagctcttcctatgggagttctcacataccaccaagaaacaaaaactgaatgcattactcatgtttctgaggatgaacatcttattccagtcagagagaaggaacatacagataggaatgctattagttccaaatctggtgctgttgctgtattgcacaagctattatcacataacttgctcaaatcaactctacttctttggtttgtttactatgccagttccttcgcttattatgggataacattgctgacatcacaactaagtgatgtgaatagaagctgtaaatctgatctggtctttgaagtgcaccaaaataatggcaatctttataaagatacttttatcactagtttagcagagatcccaggcttgattttatccgctttgcttgttgatcggtttggccggaaagctactatgtcgtgcctgatgtttgcatgttgtgctttccttgggccactcgtacttcatcagaatgagttgctgacaactactcttttattcggagctcgtgcttgtggcaccggtgccactacaactttatgtctatatgcccccgaggttcgttttaactttcttatggcaacatgtattttaatataagtttattttgttc

SEQ ID NO: 2903 - DNA, 2149 bp, Zea mays
  Clone ID: MRT4577_102646C.1
ctcgttcgtcttaactcttacctcctcccaacaaagcgagcggcgcgacctaagccgctccgcgcccaccggccagccggggcggagagggaccgacctctcctccgttcgaagcgccggtcctgagccaccggcgtcggccgcatccgctgctcggctcgcccgccagcctggtggcgatcggcatcctcttttactccagaaaaaaaagatcttctcgcaaaaaaaaggaaaaaaaaaagagaaaaggtcaatgcactgcaatggttgattctgaaacttggatcagatagacactgatactcatttctactcatcaaataagcgttgtcagatcacggtgctacacacactggttcagtgaatctgcaggtgctgctcatatggaaacatacactactgatgacgctcttacgctcatggggtttggaaagttccaagcacttgtccttgcatatgcaggaatgggctgggttgcagaagccatggaggtcaagctattgtcattccttggaccagtggtgcgggaagagtggaatgtctctccccaagacgagagtctgctatccagtgttgtgtttgctggcatgctaatcggagcttgtgcttggggctttatttccgacagatacggaagaaagtaaggatctgctccagcaaactctttatgtttcaatttacaggccttggcttcttaaggcaggcaggaataagataaagtcctttaggattcacaggaaactgatttcatttctcactagtctgaagatattggatctaatcacacctacatccaaataaccaatacagttttgacagtggtcgtggtactggtattagttttactatgtgacctgtggttggaatcagttcactgagtcaataaaccaatgagtcatttcagttagcgacctcatgtagtgaatcagcacggtaaaaggctgtactatcagcattgagttggaggtggttgctggcattgtcttcccttccatgcttcctcttgcttcttttcttcagaatcacacctgagtcaccacgctatctttgcgcacaaaatagaatgactgatgcaaggtttgtcctggagagaatggccattgcaaaccaagcagctcttcctatgggagttctcacataccaccaagaaacaaaaactgaatgcattactcatgtttctgaggatgaacatcttattccagtcagagagaaggaacatacagataggaatgctattagttccaaatctggtgctgttgctgtattgcacaagctattatcacataacttgctcaaatcaactctacttctttggtttgtttactatgccagttccttcgcttattatgggataacattgctgacatcacaactaagtgatgtgaatagaagctgtaaatctgatctggtctttgaagtgcaccaaaataatggcaatctttataaagatacttttatcactagtttagcaggtagactacaagatcccaggcttgattttatccgctttgcttgttgatcggtttggccggaaagctactatgtcgtgcctgatgtttgcatgttgtgctttccttgggccactcgtacttcatcagaatgagttgctgacaactactcttttattcggagctcgtgcttgtggcaccggtgccactacaactttatgtctatatgcccccgaggtgtatccgacatatgttcgctcaacaggggtcgggatcgcaaccgccatcggtaagatcggcggggttatttgccccctcgtcgccgtgggcatgctgcggagctgccatcagatggaagcggtgctggtgtttgagctggtgctgttcctcgctggggtctcctgcatcctcttccctgtggagaccaagggccgagaaatggactgagcacgcacggtggtggtagctcagcacatttgggcatccagatgggcttgtggttcatcttgattctgtataaacacaactctactacatccgcgacaagcttagcggatatgcaaaggggtgtaaacaggagctatagtaattacgagaaagaactggcaatgagcaatatttgtaacaggattattgttatagaacttcctcatcatcagtcaggaggtaaataaatatgtgaagttaaatagtaataaggt

SEQ ID NO: 2904 - DNA, 428 bp, Zea mays
  Clone ID: MRT4577_102647C.1
gtcagtactttgcgtaagacatttatgcctattgactgctaattgatcctatctatgatgtaacatgcgtgcttcttttactttacatcccagtgatcactgtctttgcctagaaaaagttgtaaattgtgaagactgccatcatcttacgaattgttttcccttgactatttggtggttgattacaggaaaaacaggcacagagaccatggccaaaggataggatatgggtgttcaagagtgatccgagatactttggcagtccaatgatggatgccgtgttgaataattccccccttgacaaggagatggtgcattggctcaagacgagaccaaacgttttcctaggctagaaaaaaaatgattgtaggcagataagatggtatttggttgtttctcccttttggagattttagtctgcaggattt

SEQ ID NO: 2905 - DNA, 500 bp, Zea mays
  Clone ID: MRT4577_102648C.1
ccggccgggagcaatcctatcgtacgcaaggaaccaatgaaagtggagtgtttcgctcgccgcctcaccgttgtggaatcgcgcggcggcggcggaggcagcagcgaggtcggagggcgaggccgcggggatggagatggaaagctgcgtggcgtcgtccgccgccatgtcgccgctctcccgcggccactcgtcgaggaaacgccgcaggggctgcttctcgtcggagccggtgtcgggctcgggcagcggcttgtcgaggctcaggtcggccccgagcacgtggaagtgccgtcgcctgagctccgccgcgtcccggagctccttggactgcccgtagtcgtagtcgtagccgtagccgccgcccgggaagagcgacgacgctggcggtgtgtagtgggcgtacctgtggtaggacggcggtcaagctgtttaagatactgctcattactacgaggatgatactgctactactggcacatgtgctgtatgtggtgctc

SEQ ID NO: 2906 - DNA, 567 bp, Zea mays
  Clone ID: MRT4577_102649C.1
ccggccgagacgccgtgactccgccgcaaagagagggagagtccaccgttattcgtgtcctggcatccgcagagagcttgttccgtcctggcaaccaaaatgcaagttgccccgccgcgcacaggaagaatagagcagaggaggatggttcgtacgaatgagaccgcccgtaagtccacgggaggaaaggccccccgcaagcagctcgccaccaaggcggagaggaaatcggcgtcgaccaccggctcagtgaagaagccccatagtgacatggcccgaaaccgcggcgctgaacgagattccctagtacaagaagagcactgagttgctgatccgtaagctgcccttccagaggctgtggcgcaagatttcgcaggactttgagaaagaccttgggttatatactcacggcgtgttgcatgtccagaaggctcttgaggcctacctcgactatctcttcgaggactgcaaactctgcgacatcgacgctaacatcgtcgccatcatgcgctgggacttacaactcctccgccgtgttgggggtcatcgcctgtatccatcatttcc

SEQ ID NO: 2907 - DNA, 1424 bp, Zea mays
  unsure (1)..(1424): unsure at all n locations
  Clone ID: MRT4577_10264C.1
tcgctttttctcggaattgaagacgggtccgttttaatttgatctgcgctgggcgaatttagctagtctgatcgaattgaatcgtcgtgcagttggatgactgggtgctgtgccggctgtacaacaagaagaacgagtgggagaagatgcagctggggaagaccgccgtcgccggcgtcggcgccaccaaggaggaggcgatggacatggtcacctcgcacacgcactcccactcccaatcacactcgcactcgcactcgtggggcgagacgcgcacgcccggggcgagtctgcacttgcatcccattccacatgtcatcatgcctgggtctttaattgcttcatgtccagacctgctcttcggtgaagntcaacatctttacagcagagtcggaggggccccactaactcatgtattagtacatgtgtaaacccgcgccccgattcggcggnaaaagaagggaaaaagtcggccgcacagcaactgtccgaatatggatctgaaaaaaanaatgaacggatcggaggngagatgaggttantatcatctgcatgaaatggacgagaagatatatgtgtatgctgtgcactaaaactctcttcgacagatacaaccgacgaaattttgctcataaaaaaaaaaaaacggccggggcggctcattctttagagttcacttccgaagcagacggtagatatatgtgtagctgttcacttaaactctcttcgacagaacaaccgacgaaattttgctctaaaaaaaaaaaaaacggccgggccggctcattctttagtttcacttccgaagcagacggtagatatatgtgtagctgttcacttaaactctcttcgacagaacaaccgacgaaattttgctcttgtttataagaactaccttgactgtcgcttccctttgtctgtctcttccctaccctgtgttgtgtacttgtattggcatgcttgcagttgcagcgaccacggggacagcggcgggctcaggcctagatgtgtcaacagagatccgatacccgataattttcgaagattttaatctccatgtacagatctggaagaaattcttctccattggatatgaatatgtgtacgaagattttaatccctgagtacaaatttgggagattcttccgtattggatatataagtatggtatgaaaaaacagaactctgaacctaattgtccacggataatattcacacagtaataaaattaggtgtgtatctttataggaaacaagcctaacaactaaccctaactctctcaaccttttaagctaagcacctatataatatgattatgcttttttattggggataaggacgtattaagatccaatacccgaatgggtatgtatgtaagatgaattatgtgcctgtgatgggtatggatatggggatgantgata

SEQ ID NO: 2908 - DNA, 491 bp, Zea mays
  Clone ID: MRT4577_102650C.1
ccaaccaaaatattgattatttctaggaaacacatgccggtttgagggccccattatcgattccatctaatatgaaatcaaaaaaagggcccccccaacgatgggttgctgccacaacaaggcagggttaataaaaaaaaactggctgtatggaaacaattgttgctgctgtagaaaggcaggaaccaatgggttaggccctgctaggggataaaaaaactgttgcccctgttgtaggtccccaccaaagttcaacacaaccagttggttaaatggaaccacctgttgcaagtaggcaacagggtttgccacagttagctgagtcaaagctggtccaatctgttgcaaaaattgttgttgcaggtatttaggtgcattacccacaacgaggagggctaaataaaagcatttgttgcttttgtaggtaggcggcagggttcaccatggttagttaactgacccctggcaaaaactgttgcaattgttgttgt

SEQ ID NO: 2909 - DNA, 179 bp, Zea mays
  Clone ID: MRT4577_102651C.1
gttgggacacgaaaatcattgttctgaaaccaaccaggttataacagcagacagcaggtgtactagaagtggacactacgtaacttttttatgtaggttaacatgggacaggacgcatgagtgactgcaagacatcacggaatgaacaccgtggacacaaggaacgccccctggcctga

SEQ ID NO: 2910 - DNA, 187 bp, Zea mays
  Clone ID: MRT4577_102652C.1
caaaattcttaatttaagagattgtatgtaatatttatttcattaatttcgttccttgtttacgtaaattttgaaagattgcatgatttcttgacagaaatcgatcttgatgctgtggaagtagtttgaggaacatcctatgagttttcttagaatgtataaaggttgtagcccatccaacttcaaa

SEQ ID NO: 2911 - DNA, 494 bp, Zea mays
  Clone ID: MRT4577_102653C.1
agaaactgctcactaaaagatatgttggttaaccatttatcctacaaaatctagtagctgaggcaacgaatacctggcacggttacttgaaactaaaaaccgctgttcaagccaaagtagtacaaaacagactagaacaagcagtaatagttcaagccaaagtagttcttcagtacattaaaaaaagtctcatatcaaatgcttctagagctgagcagggctacgggctaaaagcaagctcacttcttgccgccccgcttccttgatttcttcttgcccttcttgttctgcgttctctttgttgcagttgcagtcgcagtcgaacaagacgttacatcttcttccttggctggttccaccgcgtccatccctgctgtgtcaggttcatcattatcagagcatccactccattcatcagccatgtgcgtggggaactgggcagcaggtgctttgtccttccttttgacagattcttttcccgaagttttctcata

SEQ ID NO: 2912 - DNA, 320 bp, Zea mays
  Clone ID: MRT4577_102654C.1
gaagcactaatgaataatcaacttcaaacaccacaaagaagaatataaactttgcaacacaagcagatggttacttcacctccggtggctacagcaggtaacatgtgtgcagatgattaactgaaatgtccaccataacatggcgcgcagcaggccaaccaacctatggcctttacaacacaaacatgactttaggtcatagatactccagcacacaggacatatacactcaggttcataaaactgatgccaactatgaacctaaagaagtcattaagatggccctcgttcaagttgtcaggaacccacccactgttacc

SEQ ID NO: 2913 - DNA, 385 bp, Zea mays
  Clone ID: MRT4577_102655C.1
ggttccggtcaggaattcccgggccgacccacgcgtccacccacgcgtccgcccacgcgtccgcccacgcgtccgcccacgcgtccgcttgatgagtatggaactaatgtaacaaaattagcacaggagggaaaattacatcctgttgttggaaggcagccacacagtgagcgtgtggtacacattttaggcagacgaaccaagaacagaccctgcttgattggcgagcctgacgttggaaaaactgcaattgctgaaggacttgctcagcgcatttctacaggcgatgtacctgatacagtacaagggaaaaaggtcataacccttgacatgggacttcttgttgctggcacaaagtaccctggagaattcgaagaacgcttaa

SEQ ID NO: 2914 - DNA, 138 bp, Zea mays
  Clone ID: MRT4577_102656C.1
gggcatcaagggaacaatttattgggcccccgtttagcaaggattggcctccgcacaacttttaaatctttccttaccggggtcaaaaccccacaagcagctagaaagggggccaggtaccccccccaaacaggaaac

SEQ ID NO: 2915 - DNA, 498 bp, Zea mays
  Clone ID: MRT4577_102657C.1
ggccgcttttttttttttttttttaaattgtaacgagttgatatatagttttattagaataaagtatgtgtagtaactgtcgtcggaaaggaaactttagcaaatcccttgcacgaaactgctggatggacaagctggaagtgcgaatggtcgatataataatggtaatggagcggcttatatgaggtgaacgttgaactggagtagagtctcgacgccgtctgtggtgtgctcgtcgccaggatgcagcgtctggatggcggcgaagcccttggcgttctcgtacttgccggtgcctccgatgacggcgatgtgggactccggcgccgccatgcggtggaccccgaagaagctgagcgtgtcgccgccatgcggtgcctcggggccctcgaacatggcggtaagcacgatggtcttgctggtgccgtcctgcgagctggcgacgtagaagccctgcgccctgccgacgacccccgcgccgagctcgtgcccggccgg

SEQ ID NO: 2916 - DNA, 427 bp, Zea mays
  Clone ID: MRT4577_102658C.1
ttatattgtaaacagtaccctggtgagcatcattggaactctatcccttcaggaacgatcgtggacaggagatgctgaacctggtagctggccttctggaaagcacacctacaattagcagtgtacgcatgcatttgcatccgcagctatagaactggcacacaacattcttcggcgcctgggaggcgtgcaacgtagtactaggagactgacaagggtgctgtgtgtctgtttgtttcagggctccaggcaaccgtttgttatggagacagtgaaagctgacgatgccacataactgggtacctcccctaatcaccatttgtatggaatactagtacttagcattggaatagaattaggaggtacaatgacgatccgtttggcttacattcatgtaaataaacaaacgaatggatctacagggaaa

SEQ ID NO: 2917 - DNA, 255 bp, Zea mays
  unsure (1)..(255): unsure at all n locations
  Clone ID: MRT4577_102659C.1
cccacgcgnccgggcgacgcngaaccggaaagcaaagaaccagacacgggggccaaggcgggaggcgcgcagcgaagcccgggcacggcagaacgcggcgccgaagacanggcaagggcgcccngagaacgnggaggcagcgcagaaggcccngcgggngcgcgcaaaggccaacgcgggggcccagcacggncgcnacaccggngagggcgagagcgangaagccaagaaaggcangacccagaagggcnacac

SEQ ID NO: 2918 - DNA, 309 bp, Zea mays
  Clone ID: MRT4577_10265C.1
gagctgccaataccagcagggcataggctgatcctgccacacaagcacacccccgtcgatgggctgtgcgtaagcgaaccaccctgtgtggctctgcattacgtacacgtcatactctcgctctgcatcacgctcatactgtgatcgcaataggactgcttacacaaacctggtggtatgtccttctggcccatagctaatcggcttaaccatgcgatagtgatcacacattggcactacgtgctaccactgctcgagggtactctatggctcatcatctgctctgaacatgcgcgagcaacttcaggg

SEQ ID NO: 2919 - DNA, 245 bp, Zea mays
  Clone ID: MRT4577_102660C.1
gccccctctctctctctctctctctcgtcaagcacaagcttctgcgcattcgtgttgtgttgcggccctgtctgctgattggctgtggatccagaggcgaagctatggctctgacgctgcgttcctcgacgtcgttcctgtcgcatgtggactccgcctccaagctcctccacaagcccaccgacgaggcggcgccctgctgcgtctccgtgccgcctgcgcccagccgaaggccgcgcgcgctc

SEQ ID NO: 2920 - DNA, 391 bp, Zea mays
  unsure (1)..(391): unsure at all n locations
  Clone ID: MRT4577_102661C.1
cggacgcgtgggctttggccctgtttggatccttcaagcccggctagagctagagctaggttctagctctaactctagcccaaactagctctagctctctacgtgtttggatccaagggctagtttacaataaatgctattttataatcatttgtctcgtttaaacctttccttatccggatttagtgtggcaaactcttgtgtggcttctcccacacacaaataacacaaataaatttattttcacaaatcaaacatccaaatcacaataaattagtaaattacaatagtcgaaaatgcattcaataagaaattagacaaaacaaatccgttgttttcctgttctttccaatgtggccagccgtgcccctncactacctttccatggatc

SEQ ID NO: 2921 - DNA, 350 bp, Zea mays
  Clone ID: MRT4577_102662C.1
cccgatcacatcctgtactcatgctaactgctcctgcgccttgtactaggtccagccaagccagggaccgccactgaggactcggaggatcaccactcaccaatcgagagcaggcgccggagcgtccaatagctaccaggagctcgcaggcaccgttcgtaatatcggttagatcgacattaccaacctgtcctgctcaggcaaggggaggtatcatacctcatagactgttaagcagggtacactgccaaatgaccactaggttgccatcgatctattggcacggcaaaaagctcgcagatagtctcccttcgtcatacaattgacatacatttcaagtgaaccatgct

SEQ ID NO: 2922 - DNA, 333 bp, Zea mays
  Clone ID: MRT4577_102663C.1
tgcgtaagctcggaattcggctcgagcatggtcacgacacatagttggattagggtgacaggcgctacgagcctgtaggcctttgcttgacagatacccttggccttgattggcaggctggtggttttgtacaatacctgatattcataggccaaaatctccgttgcacataaagcctgctgatgtaactagccggattcatttcccaaatcgtacagcctctagaaatagggctctactttatccgctcactgcctggcgtttttccggtcagtatattagcagacgtgcacattgttcttgccatgccagtcgttatcaaagaggatcttc

SEQ ID NO: 2923 - DNA, 345 bp, Zea mays
  Clone ID: MRT4577_102664C.1
gcgacgagcgcgtcacatcagccaattgaggagttacaagaacattcattggggcaggtaaccatacaagagatagcaacgcatcaattacaacaatctagaccagcactgagccaactagctgtgaagaaccatggcgtctactggcaacaggagctgatcgcatgcaaccaactagctctggctaacatagtggcataccagcaacaccaacagtcgcaacagcattctaccagcgctcagccaactagccatggtgaaccctgacgtctacctacgacagctacaactgagttaatgtagcacctataggtgagggtaacgcacctacatacctgcagcaac

SEQ ID NO: 2924 - DNA, 338 bp, Zea mays
  Clone ID: MRT4577_102665C.1
cattccaattttcttggataagttttttttatagagaacaaaaataatccaacactaatgaacagatcaaaaaaaaaaacacttcaaaaaaataattgtcaaacacgcatagccccgtaataacataaacccatgtcaaaacttgaggcgtaaaaacaatcttgattctcaaaatagttaaccaaggggactaccaggtcatataaaggcccctaatctgagaaaatctcatctcctaaaaaatatacaaatgacaaaaatgggaggggggcggctttaaactcctttacccttgaaccatacaaagaaaaagggccctctaacaaaaccactagctt

SEQ ID NO: 2925 - DNA, 376 bp, Zea mays
  Clone ID: MRT4577_102666C.1
gataataactttacgtatgtgcataattgcagaggggattagatatacatttgcatgaaccgatcaacatatatttatatatatagtagtgagatctcccgctccatcaccgtgttcctctttcacggtgaacgagatgcgtgtgcgaagattagatatacatatacatatatacgtgcatcgttgtcagccttttgcagtggtgggaaggaaacatccaaacatcttggacacgaaaggggtcttctgatgggcgcgcctcatcgcggcgccctccggcggcgactgcacgcgcggcacattcgtcaccccggacctggccaccttccggttccgcttcacgttctctaactgcaccgtgaacccctgcgcggcc

SEQ ID NO: 2926 - DNA, 583 bp, Zea mays
  Clone ID: MRT4577_102667C.1
acgctgcagagcatgcaggctctcgtccgcgcgcaggccaccgtgcgcgcgagacgagccggcgccgccgccctcccgcacctccaccacctgcccggccgcccgcgctactcgatgcaagagcggtgcgcggacgacgcgcggatcgagcacggggtggcggcgcacagcagccggcggctgtcggcgagcgtggagtcctcgtcgtacggctacgaccggagtcccaagatcgtggaggtggaccccggccgccccaagtcgcggtcgtcctcgcgccgctcgagcgccccgctgctcgacgccggcagctgctgcggcgaggagtggtgcgccagcgccaaccccgcgtcctcgccgctgccgtgctacctgtccgccgggccgccgacgcgcatcgccgtgccgacctcgcgccagttcccggactacgactggtgcgcgctggagaaggcccggccggccacggcgcaaagcacgccgcggtgcctgctgcaggcgcacgcgccggccaccccgaccaagtccgtcgtcgcgggccactcgccgtcgcttaacgggtgcccgaactacatgtcgagca

SEQ ID NO: 2927 - DNA, 300 bp, Zea mays
  Clone ID: MRT4577_102668C.1
gtcgcttccagccgccgccgcgttcgcctcgccaagcgcagcagccgccgcagcacattgctcggtcgatctcagccatggcggaggtggagcagcaacaggacacgccgaagctcttcaaccgctggaccttcgatgatgtccaggtgaacgacatctcgctgaacgactacctcgctgtgaacgcgacgaagcacgcgatgttcctgccgcacaccgggggacgttacttcaagaagcggttccccaaggggcaatgcccgatcgttgagcgcctcacaaacttttttattgattcac

SEQ ID NO: 2928 - DNA, 304 bp, Zea mays
  Clone ID: MRT4577_102669C.1
acggacgtgtgtattcactttgccaaccatgatcacacaagcacgaccacgcacacgcggtaaacaataggagaaaaaccatgccactcaaatcttcgaagggtcgaactaggcccgtcagagaatcagagctctgaggttgttcacatcatgccagcaccaacccgtcacgtaggcggtggcgtcgtcggcgaaggcagagatggcgtccagggccagggcggatgtcttggtggcggagctacggtcggagctgtctctcgcgcatcaagcggtggcgtgggcggttaacgcgcccgggtcc

SEQ ID NO: 2929 - DNA, 1455 bp, Zea mays
  Clone ID: MRT4577_10266C.1
cgtccgttctcggacgcgtgggatttccctcacctcccgcagcagctagccgccagccaacaaccgaaccaaccaaccaacccacagcgagcgagtaaagcgtccaatggtagcgatggcggccgtgcagcagaagcagcagcagcagcgccgcgacgcggaggcggagctcaacctgcccccgggcttccggttccacccgacggacgaggagctggtggcgcactacctctgcgcgcgcgccgcggggcgccgcccgccggtgtccatcatcgccgaggtcgacctgtaccgcttcgacccctgggacctgccggagcgcgccctctttgggcgccgcgagtggtacttcttcacgccgcgggaccgcaagtaccccaacggctcccgccccaaccgcgccgctgggtcgggctactggaaggccacgggcgcggacaagcccgtggagcacgggggccggacggcggggatcaagaaggcgctcgtgttctaccacggcaagccgtcgcgcggggtcaagacggaggggatcatgcacgcacgctcgggatccagaaggcgctcgtcccctacgccggcaaggcgccgcgcggggtcaagacagactggctcatggctgagtacaggctcgctgacgccggccgccgcgccaagaaggggtcgctcaggttggatgactgggtgctgtgccggctgtacaacaagaagaacgagtgggagaagatgcggctggggaagggggcagccgccggcgccggacgcgtgggggaggccatggacatgagcacctcccactcgcagatcacccactcgtggggcgagacgcgcacgccggagtcggagatcgtggacaacgacctgccgttcccggatccggcgatgatggtgcccaagaaggagcgggtggacgacggcggcagcgccaggaccagcgacctgttcgtggatctcagctacgacgacatccaaggcatgtacagcggcctcgacatgctgccgccggccggcgaggacttgtactcctcgctcttcgcgtcgcccagggtcagggggaaccagcccaccggacccgcggggttgggccccttctgagtgagctcaggcgaggatggaggcatggagatcaggagagaagacggacggcgttgccaactctgtaaatacagcataggacgaggagtcgaacctgactgaacctggtcggggttacaagtcgagtgtgtcggtgtttcgtacatgggaaccgggccttacatgggagccggcccggtcttggtttggcgctggctcattctttagtttcacttcctgcgcagacggtagatgtgtatgcatagctgttcactatcacttcctcttcaacagaaccgattcactccgaaacacaaaaaaaaaaaaaaaaaaaaatttataataattaatttttttttaaattttattgtatttaatttt

SEQ ID NO: 2930 - DNA, 367 bp, Zea mays
  Clone ID: MRT4577_102670C.1
caactttttcatactcattacatttttcggactctagatttcatttaacaaggggttcatctcttttctttcatttattaaccccattaccacttttctatttcacattctctttataattcttgtggtctttccttatctcatacttccaacattttttctttacatcttccttatatggattttgaacttcctctatctacctccttatccttcacacattaataccaatatcttttcatacgagagtctcttcattctttattaacttttactatatatttcttatactatttccttaccaccccttaatccttttattttttaaattattactttattaccacactttcttgttttttttttt

SEQ ID NO: 2931 - DNA, 290 bp, Zea mays
  Clone ID: MRT4577_102671C.1
aattatatctattttttttctcccccttcttttgtgtttgttttttttttgaaaaatgttcgatgtcttcatcgagcgcgtgatatttttcaagcttccaggctaagtttgctgaagttgaaaccaaaaacaatatcaacaattttcagcaaatcaaagtgttagttacaccaaagttgcccatacagattttttactattaactagagaccatgactcaattcctttcttaaaggaagggttgacttaacaggggggtggattaataataagtaccttactaccaatct

SEQ ID NO: 2932 - DNA, 1172 bp, Zea mays
  Clone ID: MRT4577_102672C.1
acgacgcgtccgcgcacctggcaggcctcgaggccgtggcaccaccggagccgagcaacgcgaggagttgagccgatggaggtggcgtcgggggatgaggatctggaatcgctgctccagaacttccatcgcgtgtcccaggggtacaaagatgcacttatgcaggtccaggttttaagagtaaattgcagcactgagttcaaaaggcgggaagctcttgaatcacatattacagatcttaagaaagataatgagcggttaagaaggcaatacacagaaactttattcaaggtcaccaaccaggtgaaattccgcgcagaagctcaaagcctgaaggaagagctggacaaggcaaatagtagattgttatccatggaagaggaacacaagagggaaactgagcaacttaagcacagcagtgaaatgaacatcaatgccctggagaacaagctcagccacgcccttgtacagcaagcaagagatgaagctgcaatgaagcaactgaagttggagctgagtgcccataaatctcacatcgacatgttaggtagcaggttggagcaggttactaatgacgtgcattcgcagtataaaaatgagatccaggatttgagggatgtggtttctgttgaacaagaggagaaaaaggacattcacaggaagcttcagaatgtggaaaacgagttgaggatcacgaggatgaagcaggcggagcagcaaagggattctgtctcggtccagcacgtggagacgctgaagcagaaggtcatgaggctccggaaggagaacgagtccctgaagaggaggctggcgagctctgaagtctgaactggagtgcacatgaaaactgcaactgctttccttcacgccgtagttttatctcatactgtaggatgtagaaaaatccactgctccaaaaacacatatcacttccagatgctttaaaactagcaatgataggtatgttttcactgaaagttattatcaccaatcgacacactcataaccttttcatatgaaattatataaagataaactctatgtccaagatatagagttcaaagaactttttagttgacaacattttcatataagacaatttggatgttcgaatattcaatataaagatcacatgcctattaaactatcttgggtaaaaaaaaaaaaaaaaa

SEQ ID NO: 2933 - DNA, 576 bp, Zea mays
  Clone ID: MRT4577_102673C.1
ttttttttttttttattcaaagagaaatacatacacatatatttaataataatataattaatataatatagatgagtaccaatcaatatttcatacataagtgtactctaaatccaaaccaaaacactgagataatcttgtaattaaccaaacaatctgtgcaagtgcggaatacagtgtacatcagattgatttgcatcatgtcaaaaccagattgtccaagggatacatcggttgccgctgccgcacccctcctgtcgatgttccatgactccattcttgctggccactttgtcccaagcatttcaccaaacagtcaacaccctcgttactgcaatcacatcaaactacccatgtacagttaactgacagaggaaaaacaactcatcaatagacacaagaaagagatgacaatgttgtgctaaagcctaaagttgagctggataaatccatattatgtctaaaaggccaagcatgcaccacctcgatacaccaaacaagtcaaggttccaataatacttgtgaatttcataattttttaatacggtgaacttacgcgactatgatatcttcttt

SEQ ID NO: 2934 - DNA, 356 bp, Zea mays
  Clone ID: MRT4577_102674C.1
agtgggtgttttttatggacaattgttctttggctccccttgttttgggtctttttttgcccataggggcgaccaaccaacaacagcccagagaggtcacatgccccacctgattcattatttttcctaacaatcaacaaaagggtgaaaaaaagtacaagcagttatgtgggcggctgccccttcctaccgcggcaggccgtcagtttttacggtcgggcgtgttacggggccctggcgaccaacagattctttattcgactactggcacatggggaatcgcgagccctaaccaaagagcccagccatttggcacgacgcctataacaacttggctaggcggaggttgaacttct

SEQ ID NO: 2935 - DNA, 404 bp, Zea mays
  unsure (1)..(404): unsure at all n locations
  Clone ID: MRT4577_102675C.1
tnnnnaaaaaaaaaaaaggccacatggccttttttttttttccctttcaaccgagaaaaaaccccctttggggggaatttactttggggggtccctcggaggggtttttggggaaaaaaaacatttggtttaaaaaaggcccgattaatgggaatccattttttgggcccgcccttttaaaaggggtattcgatggggggcccgccggggacaacctacgtttaaactcgctcagggcctgagttgaaccccccgtccccccggggcatgcatacatgcatgcatgggtgggttttttttttaagggggctttttttcaaaaagggggggggggggaggaccttttgcagttctcgctgaggggggggtttttttctttggggcagggaaccctgaaggccttg

SEQ ID NO: 2936 - DNA, 281 bp, Zea mays
  Clone ID: MRT4577_102676C.1
aaagccttgccatcttatcatgttttcttatgtggcggcggatttaatcgagattgaacctctgccgaaagtacccggtggaaatagcctaaccatgtccatgttcccagaaagcggattactgctacttgtacatacacaactttagcgagttattctaaaactcatgcagcatcctggactctggcggaccaaaccagtttatatgggcgtgacacgtcctataaagcatccatacaccgatggcgctccagacacacaacctgatacacgggggctgc

SEQ ID NO: 2937 - DNA, 600 bp, Zea mays
  Clone ID: MRT4577_102677C.1
cggccgctcgagccggcgggcggaatcattcttctttcccgagatctcccactcgcctccccgcgtcgccgtcgaacccactccgccgccccgtcgccggcagcgcccccctcccgcgatggccacccccgacctcctcttcaacctgcgcaacctcttctacctcggcgcctaccagtccgccatcaacaacagcgacgtcccgggcctcgacgccgacgccgcggccgagcgcgacgtcatcgtcttccgctcctacatcgccctcggatcctaccagctggtgatcagcgagatcgactcgtcggcggcgacgtcgctgcaggccgtcaagctgctcgcgctctacctcaccggcgacaaggaaggtgcgatcgccagcctgaaggaatggttgagtgattcagctataggaagcaatcctgttctgcgattgattgctggaattatatttatgcatgagcaagactacaatgaggctctcaagcacacacacactggggggactctggacctgcatgcactgaatgtccagatcttcctcaagatgcaccggtcagattatgctgacaagcaactgaagatcatgcaacaaactga

SEQ ID NO: 2938 - DNA, 2339 bp, Zea mays
  Clone ID: MRT4577_102678C.1
taaagatttagctcttacaccacccaacttaattaggtagagaacaattttagaacgtattatttttgcttcaaaaactagagaacattagaacaatgagtttgtatctttgttttctcaaataaagatttacctgtaactatttttaagtaatagagaacatttgaacagtgagtttgtatctttgttttctcaaataaagatttacctgtaactatttttaagtattcagctagatttttttatacataaaaccaagtaactattttaagtaatcagctccccacttgtcgctccacagcaccccagcaagcaagagccccgctctcccttcacaccaaagatttcctcttccgcgtgcgcttccctttgccccgctctcccccagcctcgctcgccatataatacgggccggccggccggccagctgggtccccgcggatgggctcggtctcgcggggctagggtttggtcggtcgtctcgccggcgtcgaggccgccagcgctgctagctagctctctcgcgttagggttccccgtagccatggtgctgcagcgcttctcgtggccgtacggcggccggagcgccaccttctgcggtagcttcaccgggtggagagagtgtcccatggggctggtcggggccgtgttccaggtcgtcttcgatctgccccccggagtttaccagtaccggtttttggttgatggtgtctggaggtgtgatgagacaaaaccctttgtacgtgatgaatatggactgatcagcaatgaagtgcttgtggaaaacaatgtacaacctgttgtgcagccagagccttctatcagaggaactaatatggataagggtaccattttgaaaacaatgcccccggagccatcatctcagaacccaagcatgcaaatagcagttatccgccatgtggtctctggaatattattacacaataccatatatgacgttgttcccctttctagcaagttaacagttttggacactcagcttcctgttaaacaagcatttaaaataatgcatgatgagggtcttgctctggttcctctttgggatgaccgtcagggaaccataacaggcatgctcactgcatcagattttgttttaatcttgagaaagttgcagagaaacattcaagttattggcaacgaagagcccatttctgcttggaaagaagcaaagctacagttctatggtgggcctgatggtgctgccatgcagagaaggccattaatccatgttaaggattcagataatttagtggatgtggcactgactataatcagaaatgaaatatcttcagttcctatctttaagtgcatggcagattcatcaggggtgcctttccttaatcttgcaaccttacaggggatcttgaaatttctttgctcgaagctacaagaagaggctgagggctgttcccttctgcacaatcagcttctcagtattcctattggtacatggtctccacatacggggaggtcaagtagcaggcaactcagaactttgctactgagttctcctctaaatacctgcctggatattctgcttcaagatagagtaagctcaattcctatagttgatgacaatggatccctccgtgatgtctactcactcagtgatatcatggctctggcgaagaatgatgtttatgctcgcatcgaacttgaacaagtgaccgtacaaaatgctttggatgtgcaataccaggtgcatggccgaagacagtgtcatacttgtttacagacgagtaccttgctggaagttttggagggattgtccattccaggagtgcgacggcttgttgttattgaacaaagtaccagatttgtggaaggaatcatctcattgagagacgtatttacatttctccttggatagcatgtgtagccattccatacatgaaaaagcttgctgtacttggttcaaacgaaataaaaagcttacaaatgtgatagtcatcttctaaaaaaaaaaaaaaaaaaaaaaaaacaacattgatctcagggccaagaaagaagctcaactcggcatgcttcctgtttgaagcaagggcaacaaacttaccccaccagatctctgtcgacaaagcagggctagtgaataagctgtggttcctcccggattgtcactgcttttatatttgtgcatttattttgagggaaacattttgcccaaaaaaaggcctgcagtgcacgttttaaacatgacatttgaaccaactcttatgctgaaaactgtatgtgatactgcaaaaggcaacacactagcttgataggaaagttggttggcaagcataggtggactctggtgccttcatatatctata

SEQ ID NO: 2939 - DNA, 3236 bp, Zea mays
  Clone ID: MRT4577_102679C.1
ttcttgagcagagcccccttcacaccaaaaatttcctctttgcgtcgcgccccgtcagctgagtccccgcggatgggctcggtctcgcggggctcgggtttggtcggtcgtctcgtcggcgtccagggcgccggcgctgctagctagtagtagctcgctcgcgctagggttctcaggagccatggtgatgcagcgcttctcgtgggcgggtggagggagtatcccatctggttggggccgagttccaggtcgtcttcgatccgcctcccggggtttaccagtaccggtttttggttgatggtgtctggaggtgtgatgagacgaaaccctttgtatgtgatgaatatggactgatcagcaatgaagtgcttgtggaaaacaatgtgcaacctgttgtgcagccagagccttctatcagaggaactaatttggatgagggtaccgttttgacaacaatgcccccggagtcatcatctcagaacccaggcgtgcaaatagcagttttccgccatgtggtctctggaatattattacacaataccatatatgaagttgttcctctttctagcaaggttaggtttatttcttgcaagtcagcgcttctctttagactatgtgaataatcggacttcatatgaacatttcagttagcagttttggacactcagctacctgttaaacaggcatttaaaataatgcatgacgaggtatgtgtgttgctgtacatgcaagagttgtttcaaatcattcactttccctctatggtgcttgtttgctctcatttcaactttgctctgtttttactttcattttgaagaatttttaaaggtgtgctagcaattatttgcctttttaagtagcagtttaatttgttttcctattatgttttgcagtttaaaaacacaacaaaatcgctcctagaagcaggcacttctttcatctgcactgcatacgtggcatcagtttaataatttaagaatagcttcaaaccttttgtgtctcatagggtcttgctctggttcctctttgggatgaccgtcagggaaccataacaggcatgctcactgcatcagattttgttttaatcttgagaaagttgcagagaaacattcaagttattggcaacgaagagcccatttctgcttggaaagaagcaaagctacagttctatggtgggcctgatggtgctgccatgcagagaaggccattaatccatgttaaggattcagataatttagtggatgtggcactgactataatcagaaatgaaatatcttcagttcctatctttaagtgcatggcagattcatcaggggtgcctttccttaatcttgcaaccttacaggggatcttgaaatttctttgctcgaagctacaagaagaggctgagggctgttcccttctgcacaatcagcttctcagtattcctattggtacatggtctccacatacggggaggtcaagtagcaggcaactcagaactttgctactgagttctcctctaaatacctgcctggatattctgcttcaagatagagtaagctcaattcctatagttgatgacaatggatccctccgtgatgtctactcactcagtgatatcatggctctggcgaagaatgatgtttatgctcgcatcgaacttgaacaagtgaccgtacaaaatgtaatccatttcctcttgctttttaattttagcagacactgctgctttggcatttttttttttgcatatactcacataactgaaaaacagcaattcctctgcttttgattttgatggccagcattcaacacaagtcctttgcagtattgtgttccatcagaatggaaaatgcaaacaagatttgtgttccactcttaagtccaatagcccattatgtttaatatatgaataagtctattttagaatcacatcctgaattacgaaacaggttatttaccttttcatcttgacagaactgaccagatggctgcaaacaacgtggtagctgtagattgtgacagaactgaccagatggctgcaacttgcctcgtcaatacttcagagcttgttaatgtctactcaaaacaatagtcgtggtaggatctgaatgcggtgagtggtgcaaatatgagttcttaggttggggctcatttcaacggtggtggcagagcacctaggatatggtctgacggagacaacattggattaaggagagttgatggtaaattagctcctcaaacttgctttgaatctaatcagaggaagcaggcagaacaacccaaaaaatagactcaggcctgtttggcagagctcggctcctagattctctggctctgctctttgattctctagtgaagacgtgaagtgattgtacttgattatggtgggggagcagggtgggagtaggtgagatttgattctagatggttttgaacagggagtagtggatatcaggttttttagctgccaccttgtaatgtaaatggagaagtgattcttgcctgcgtccattcaaagtgttgactttatagcagttgttaatgtttttatatttcatcataagacttgcataattggttctcagagaataatacaatccttgtcttttactctatattaggctttggatgtgcaataccaggtgcatggccgaagacagtgtcatacttgtttacagacgagtaccttgctggaagttttggagggattgtccattccaggagtgcgacggcttgttgttattgaacaaagtaccagatttgtggaaggaatcatctcattgagagacgtatttacatttctccttggatagcatgtgtagccattccatacatgaaaaagcttgttgtacttggttcaaacgaaataaaaagcttacaaatgtgatagtcatcttctatcttccttcttgatttggttcatattataccgcagacactacataattgagttgcaccgaaggaaagaacaggtaggtgctgcaggatggagaagtgttcaggtgattgtttcctgctcgaccagtccagccgccaattatttgcaggcttccagaattgttacttgcaaggggattttttgaaggaaatgaatctcgtggatttttcttccttggaatgaagtcgaaggacctcttcaaatgcgagcatatatatcttttttttgtggaaacatgaacgacgtcatgcaaatgattttcttgaagcattgctgtcattccagttctataagatttgaagtgtttctgtac

SEQ ID NO: 2940 - DNA, 835 bp, Zea mays
  Clone ID: MRT4577_10267C.1
cgggacactccccaatccctatccccagccgtaccgccgtatcatccccttcggcatcagccgcgccgccgccaccccattagcgctcagtccaccacctaagttctgtttagaattcaccacctcagttttgtttggaatccaccagacgatcgggatccatggcgccagcaactcgtcgccggacgttggaggattcatctcagtcgtcgccgtcagcaaaccgacgtcgtttgatggacccaccaccgctgtcaatggtgttatcaacaggacgccaattaatggagacaaccccgccgcgcgacatgccggcctccctgtcaggctttccggatgctagtgagaaccagagaagtgcgaccgcctcattaggaacacctggagaaactgcaactgatggaagtggaacacagggtgttggggtagttcctgttgaagatggtagtgttgatgatgatcctgttgacaagaagcaaaagaagtgcacttcaggtgtttgggagtactttgacaagtacttggtgacagtagaggtaaatggcaagcaggagacacaacactgggcaaaatgcaaattcaaaggttgtaaaaacaagaccagcaaaggtagatgtgagagcaggtttggaacaactgccttttggactcatctaaggcattatcatagtattgttaaaggtcagcagcaacttaaaacagaaaacgatgagacgaaaggtgtcaccattgttaaacctttcaaatatgatcaagatgaaagtctgcagaaattttataaggcaatgattgtccatgagtatccatttaatatggttgagcatgagctttttca

SEQ ID NO: 2941 - DNA, 342 bp, Zea mays
  Clone ID: MRT4577_102680C.1
aaaaaaaatatttgctcaaatttacgtacgcaacaacataaaaacatttggtgtccaataagggcccaagcaacttgtacatgcatacctccctgcggataaaagggtagcacaagcacccatttatttgattgatcctactgtcacacgggctcaaaaactagaagatgcactaattcttcttatgaaacttgcaaggatccacggtctgtgtgaaacgaaataaattaaagtcccacatgatcacttagagaaggcggtaaaagcatcccttagcttggcctcccagagggaataagtttcaggacttaacactttctggaactgagcttttagaccaag

SEQ ID NO: 2942 - DNA, 1395 bp, Zea mays
  Clone ID: MRT4577_102681C.1
ccggccgggagcagggggagggaggtagaggaggggagggaactgctggtggtcggcagtgggcgaaggcgcgacaatccaggatatggattcctgagcgtcacccacccgcccatccacgtcgcgcggtgtagtcatcccctatccgcagccgcctcgctccctctcccacaacaaatccattctcctcctcccactcgacgaggatcgcgaggatgctggaggacgtcgtcgctgtcacgcttgacgttagggcctccgatgcttgacgttagggcctctcgcttgaagaggaacacaaacagagctcatgttttttattttgctctgcattatctactgcttctctgtgggggcgttatttacagtatgtggcctgtttgttgtgttgttcctgcggaagggcgggcgggccgaatgtgtttaataaaatgttgttgtcaacatcaacctcctggaagggccagaacgcaggcagcgcctcaactcgtcaccccatcagcacgtaccggtttttggttgatggtgtctggaggtgtgatgagacaaaaccctttgtacgtgatgaatatggactgatcagcaatgaagtgcttgtggaaaacaatgtactacccgttgtgcagccagagccttctatcagaggaactaatatggataagggtaccattttgaaaacaatgcccctggagccatcatctcagaacccaagcatgcaaatagcagttatccgccatgtggtctctggaatattattacacaataccatatatgacgttgttcccctttctagcaagctttctagcaagggtcttgctctggttcctttttgggatgaccgtcagggaaccataacaggcatgctcactgcatcagattttgttttaatcttgagaaagttgcagagaaacattcaagttattggcaacgaagagcccatttctgcttggaaagaagcaaagctacagttctatggtgggcctgatggtgctgtcatgcagagaacgccattaatccatacaggcaacattgatctcagggccaagaaagaagctcaactcggcatgcttcctgtttgaagcaagggcaacaaacttaccccaccagatctctgtcgccaaagcagggctagtgaataagctgtgtttcctcccggattgtcactgcttttatatttgtgcatttattttgagggaaacattttgcccaaaaaaggcctgcagtgcacgttttaaacaagtcatttgaaccaactcttatgctgaaaactgtatgtgatactgcagaaggcaacacactagcttgataggaaagttggttggcaagcataggtggactctggtgccttcatatatctatatatatattttaagttgacgatcttcgtgatgctga

SEQ ID NO: 2943 - DNA, 1243 bp, Zea mays
  Clone ID: MRT4577_102682C.1
aaccataacaggcatgctcactgcattcacagaattctcattggctatgcagttgcagagaaatattcgagttactggcaatgaagagcttgaaatgcatcccatttctgcttggaaagaagcaaagctacagttttatggtgggcctgatggtgctgccatgcagagaaggccattaatccatgttaaggattccgatagtttggcggatgtggcactgactataatcagaaatgaaatatcttcagttcctatctttaagtgcatgccagattcatcaggagtgcctttccttaatcttgcaaccctccaggggattttgaaatttctttgcccgaagctacaagaacaggctggaggctgttcccttctgcacaatcagcttctcagcattcctattggtacatggtctccacatacgggggaggtcaagtagcaggcatctcagaactttgctactgaccggccgtgtaaatacctgcctggattttctgcttgaagatagagtaagctcaattcctatagttgatgacaggggagcgctccatgatgtttactcactcagtgacatcatggctctggcgaagaatgatgtttatgctcgcatcgaacttgagcaagtgactgtgcaaaatgctttggatgtgcaataccaggtgcatggtcgacgacagtgttatacttgtttacagacaaataccttgctggaagtcttagagggattgtctattccaggagttcgacggcttgttgttattgaacaaagtaccagatttgtggaaggaatcatctcattgagagacatatttacatttctccttggatagcatctgtgtagccattccatacatgaaaaagcttgttgtacttggttcaaacgaaataaaaaggttacaaatgtgatagccatcttctatcttccttcttgatttggttcatattataccgcagacactacataattgagttgcaccgaaggaaagaacaggtaggtgctgcaggatggagaagtgttcaggtgattgtttcctgctcgaccagtccagccgccaattatttgcaggcttccagaattgttacttgcaagttaggagcttgactacctttttaagaactttgagatttttctctggttgtattctttgaacattgatacaggctacagaatcattttcataggatctttgaaacagggggatttttttgaaggaaatgaatctcgtggatttttcttctttggaat

SEQ ID NO: 2944 - DNA, 401 bp, Zea mays
  Clone ID: MRT4577_102683C.1
gcacacgtacgggaggtaagaaagttgagttagatgatgtacctgtcgagggacctgttctaaagtgggaagcactgattgtataggttgctagtccaaatgcatatcatcccaaaaacagaaaagtcaagctcaatgtgactgtgaacgaattgggactttcactacatgctttccgtcagttgcgtcaagttgttagaaagaggtataattctcctaaagatgatctcacaatcatcagtgaactgttttaacaccgggaatacaacataaaatactcgtttaagacactctctactctaatataatacccaatgaaagctgacaaacttgatcaacattccattaattcttatgataaatgaagacttaacgctaatccacaatttatggaactattt

SEQ ID NO: 2945 - DNA, 1230 bp, Zea mays
  Clone ID: MRT4577_102684C.1
aattcgcggcgaggccgcaatccgctcctccaccaccgcgctcctcacccacgccagggacaagactgtctacctccacgcccgcctcaccaactccgcggccaccgccaccgccacgcccctcccccatggtcgtcgagtccgagtggtggaaccagcgacgcatgcgcgtcgagggcgacgtgaaataggtgctccaccgcgggcacaacgggcacagtggaggtggaacgagcaccatcgagttctggttccaccgaatccaccgctcgcacaccggatccatcgctcccacatgcccgcacaccggatccaccgctccctcccccgcgatggcctggttccaccgagacaactgcggggctagggtttggattcgtgggtggagcccaaggctagatccagcagggggagggaggtagaggaggggagggaactgctggtggtcggcagtgggcgaaggcgcgacaatccaggatatggattcttttgtgttctccctaaacctacgcctgccctgcctgagcgtcacccacccgcccatccacgtcgcgcggtgtagtcatcccctatccgcagccgcctcgctccctctcccacaacaaatccattctcctcctcccactcgacgaggatcgcgaggatgctggaggacgtcgtcgctgtcacgcttgacgttagggcctccgatgcttgacgttagggcctctcgcttgaagaggaacacaaacagagctcatgttttttattttgctctgcattatctactgcttctctgtgggggcgttatttacagtatgtggccttttgttgtgttgttcctgcggaagggcgggcgggccgaaggtgtttaagaaaatgttgttgtcaacatcaacctcctggaagggccagaacgcaggcagcgcctcaactcgtcaccccatcagcacggtgagccccttatctggattgttatcatggtacgcggtgcgctgcaagcctgcaagtgacatcaaattggattggtagtcagcgggtgtcatagtgtcagttcgatggaatggttctgcagtgcatgtgcttctgtaatttccgcaagaagcagtcaacttctccctgatatggcactaggacattgtagtgattcccgcacgtttgtggaactcgacaacctaccagagcgccagatgtttcattgagaagagactcctccagtctggctttccactggtctagtctctcctttaa

SEQ ID NO: 2946 - DNA, 580 bp, Zea mays
  Clone ID: MRT4577_102685C.1
ccggccgggactaaaaaaaccagcagctagctagcgatgactggagcctgggcactgatcatccatctcgcggctgtcgtcctgcccctggccgcgcgcgcggcgtctgcaggcggcggagccgcggaggagccgaagatctgcatgaagactccgtcccccaacctgcgcaccactacggctgaataaccaagtcaacctgtacaaggtgtcggacgcggtgacgctggtacaaatgcgactgcacccagtcaacaaacccgtggacgcgtttcgaaggctcgccgaggaggaggtcacgacggccgcgacgcccgaggtgcggaggacgctgaacctctacaagactctacatacctggacgtcgacagatacctcggagcctgcaagagcgccatcggcttccgcgacgtcgtcaccatcaactccacgatgagcatgatgatgcaggacacgtacaactgcaacgaggagatcacgaaggccagctccaagaactccatgaaggaccacaacaggtcgatcatcgagatggccgagatctgctgcacgctctccagcatgatcccgtacgaacatg

SEQ ID NO: 2947 - DNA, 1363 bp, Zea mays
  Clone ID: MRT4577_102686C.1
aattcggcacgaggagttagactaaatgaatcttgaatgccccttaactgttggctttacatggaactacttttgcatataccagacaactattttgaacttcaatatgtttttcaattccagcaattgatcgaaacatgatatatttgacatattcatgatggatttttgtatttgatgtgtcgctttttcatctatcaatgtaattcttggacataacattgcgcacaggtaccaaattcacacccttgttattgcgagttctgtaaatcatgatgttcacatgtgatggtttgattcagttcaatggttagcaagctatttgaacatgatactatagtagtgcatatttgctgtacaaatggccactgcccagctatttgcataagatattatgtttctcctgtgacattttctatgccacatacatttatatggcatttttgtgcaatttagtaccggtttttggttgatggtgtctggaggtgtgatgagacaaaaccctttgtacgtgatgaatatggactgatcagcaatgaagtgcttgtggaaaacaatgtactacccgttgtgcagccagagccttctatcagaggaactaatatggataagggtaccattttgaaaacagtatgtcttagaagtttaacattatattttcttgttctccatattcctgataactaatggtctgttatttactgtggccttaaataaacaaagatgcccctggagccatcatctcagaacccaagcatgcaaatagcagttatccgccatgtggtctctggaatattattacacaataccatatatgacgttgttcccctttctagcaaggttaggtttatttcttgcaagccagcacttctctttagactatgtgtataatcggatttcatatgaacatttcagttaacagctttggacactcagcttcctgttaaacaagcatttaaaataatgcatgatgagcttcgaaccttttgtgtctcatagggtcttgctctggttcctctttgggatgaccgtcagggaaccataacaggcatgctcactgcatcagattttgttttaatcttgagaaagttgcaaagaaacattcaagttattggcaacgaagagcccatttctgcttggaaagaagcaaagctacagttctatggtgggcctgatggtgctgccatgcagagaaggccattaatccatgtacttctccatatttgttgattctttcatttgattcaatgtgttaaggattcagataatttagtggatgtggcactgactataatcagaaatgaaatatcttcagttcctatctttaagtgcatggcagattcatcaggggtgcctttcctta

SEQ ID NO: 2948 - DNA, 419 bp, Zea mays
  unsure (1)..(419): unsure at all n locations
  Clone ID: MRT4577_102687C.1
ccggggggcggttcccaccatggcggcctcccccacttcctccctcgccccgccggtggtgcctatggagcttcacgccggcaaccgcgaccgcctcgtcgccgcgctccgcggccacatctccgcctccgcgcgcccgctccacggtctcgtcctccttcagggcggcgaggagaagacacgggactgcaacgatcaactacaactcttcaggggggagaggtactccgcctatccgttgggatgttggaaaccatgaataaacatgcgcagtcgagatggcgatcaggaggagggaactagacgaggttgaaacgggaatgttagaagcactgtttgacaggctttaaatgatactagncagcgagattggagaggagaccttgataattgctgagcttatggggaagtggaaacca

SEQ ID NO: 2949 - DNA, 1493 bp, Zea mays
  Clone ID: MRT4577_102688C.1
gcccatttctgcttggaaagaagcaaagctacagttctatggtgggcctgatggtgctgtcatgcagagaacgccattaatccatgtacttctccatatatttgctgattctttcatttgattcaatgtgtaagcagttgcaagatcagcactttcataatataaatatattacttgtatgaaattctagatatggtctccaatacaacattaagcttaatgtcgtttgtgttaaaaaattacaaatcatcttatgtcttgaaataaggagaaattgtttgggtttctcctccccaactttcagaattacctatttctattgtatgtttgatcatttggacttccattccatcaacaattttggtttattcagtgaggaactatgtttttaaccactctgtagtttgtacagacaggcaacattgatctcagggccaagaaagaagctcaactcggcatgcttcctgtttgaagcaagggcaacaaacttaccccaccagatctctgtcgccaaagcagggctagtgaataagctgtgtttcctcccggattgtcactgcttttatatttgtgcatttattttgagggaaacattttgcccaaaaaaggcctgcagtgcacgttttaaacaagtcatttgaaccaactcttatgctgaaaactgtatgtgatactgcagaaggcaacacactagcttgataggaaagttggttggcaagcataggtagtgtaatcacttcaccaatgatatcagtactcttcttgcctttaactcgtgcatctttaaatttagcctcttcaagtctggttctcatggcaggtggactctggtgccttcatatatctatatatatattttaagttgacgatcttcgtgatgctgaaactgatgaagacctccgatgaaaaaagagacatgctgcacatgcacgagggtacttgcagatcgatgtcggctctatggacgaacactcgaccaagtcagatgaggagtatgagggcctagccatgcgcgacgtgatggctactggtccgacgatgagcagcaagctgtgagttaaagatgaactcacctgccctggagagtaacatccataggagtgaggcaaaatggctggtaccaccacaacatggacccgttcctgaagatgtccaaggaggtggtagccgacaccataatgtcttgtgtcattgtgtcaccggtcggcaacacactgcgctggtaccggcgggtgttgtgtttcttaggcgtctgcttctgtgctttgagttgtgctatagagtggttgtgccaactactgattttaaaagaaaaaggtgagctgagaatcattgttgaaaacaaacatgtaattgttcgttctcatcagttgtgccaactaccaagcatttcattgatcagaatttatcgttgctcatgagaaccaaaagtaagacacttctcaataacattggatgcaaatttctgctagctaaaaaaaaaaaaaaaaaaa

SEQ ID NO: 2950 - DNA, 327 bp, Zea mays
  Clone ID: MRT4577_102689C.1
ctgttgtcaccaagcaacagtggactaaacatacggaagaggctactaccttaggatgttatgatatccaaagatgtaaaagccatgtcaaaaggtgatagacaacgcatgactgtggcacagcttgctacaaagaacacagctagaccaggctgacacttacagaacaagatgcctaaaggcacctccaaaactagatgcactcccacattctcaaatgagttatgacccgtgcatgatttcttgctcaaaacatattaggccatgtgaaccacggtcgatattagaggacgtctcactactccgggtgagagcacgaaagcggac

SEQ ID NO: 2951 - DNA, 1555 bp, Zea mays
  unsure (1)..(1555): unsure at all n locations
  Clone ID: MRT4577_10268C.1
aaaaacgggctcgggcccggcgtgggacaccgcgcgcgcaatacacgggacacacacgcagatccgagctaaccaccatcgacgagcgccagccgccagcagccgagccggagcgaccttttcttttttcttttacacagcgggacagagaaaggagtcaggcagccaaagccacccaccgcttttacccaccgatcggcgttgccgccaccgctagcattgtcggcttcagctccatccaaatccaccgccagcaagcaagcaagcaagccggcgccatgggtctgccgatgaggagggagagggacgcggaggcggagctgaacctgccgccggggttccggttccaccccaccgacgacgagctggtggagcactacctgtgccgcaaggcggcggggcagcgcctccccgtgcccatcatcgccgaggtggacctgtacaggttcgacccctgggacctgccggagcgcgcgctcttcggggcccgcgagtggtacttcttcacgcccagggaccgcaagtaccccaacggctcccgccccaaccgcgccgccggcaacgggtactggaaggccaccggcgccgacaagcccgtcgcgccgcgcggccgcacgctcgggatcaagaaggcgctcgtcttctacgccggcaaggcgccgcgcggggtcaagacggactggatcatgcacgagtacaggctcgccgacgccggccgcgccgccgccgccaagaaggggtcgcttaggttggatgactgggtgctgtgccggctgtacaacaagaagaacgagtgggagaagatgcagctggggaagaccgccgtcgccggcgtcggcgccaccaaggaggaggcgatggacatggccacctcgcacacgcactcccactcccaatcacactcgcactcgcactcgtggggcgagacgcgcacgccagagtcggagatcgtggacaacgacccgttcccggagctggactcgttcccggcgttccaggacccggcgatgatgatgacggtgcccaaggaggagcaggtggacggctgcagcgccaagagcggcaacctgttcgtggacctcagctacgacgacatccagggcatgtacagcggcctcgacatgctgccgccgcccggggaggacttctactcctcgctcttcgcgtctcccagggtcaaggggaaccagcccgccggagccgccgggttgggacagttctgagctgaggcgaggatggagccatggatcaggagatgaagacggttgcgaactctgtaaatacagcataggagtcgaacctgaccctgacccttgttggggttacaaggttttccgagtgtcggtgtagcgtacatggagccggcggcgcggccgggccggctcattctttagtttcacttccaaagcagacgggtagatatatgtgtagctgttcacttaaactctcttcgacagaacaaccgacgaaattttgctcttgtttataagaactaccttgactgtcgcttccaaaaacaccaaaaaaaaaaaaacggacgctggaaaagnctggg

SEQ ID NO: 2952 - DNA, 231 bp, Zea mays
  Clone ID: MRT4577_102690C.1
ctatttactaatcttttacaacacatacttggtgcaagggttacataccatgacattgaagctatccaccctgcgtactacaagaatttgagggggatgctcgacaatgacataagtgatcgttttggatctaaccttcttcctggacgcggacgacgagaatctgatcttgtacaagcaggactcatattaatgccttcctggaagggcttaatgaactcattccacgga

SEQ ID NO: 2953 - DNA, 325 bp, Zea mays
  Clone ID: MRT4577_102691C.1
cagcggggaaccccatccccacactcggcatctagccgccgaactggaccggtccgcgcacaccggcccgaacggagaccccacaagaatgggcaccgtgcggggcatcccaggacgccgggcggcgtcatggcgacaaccgccctcctggccgcgccggggccaaccgccctgacggctgcctgcgggcaaggagggcatcatggcgacggaacaccagcagcagaggcaagatgcgagcgcaagccacctacaacgtgaaacagatcacgccagacggggaggcggagctgcaggcgcccaaccacgtgtacatcctgcacca

SEQ ID NO: 2954 - DNA, 411 bp, Zea mays
  Clone ID: MRT4577_102692C.1
gcccctggctgcagcgccggactcctggttcacgccgaggccgtgaggaggtctgggcgcggaccccttcagtcttcgctgtgaacgcgctcatcagcttctactgtaggatcctggactaccgcttggggagacaacgtgttctacgaggcaggcggggtctcatggaactgcatagtcgctgggtacgtcgggtgccgggagatggggctcgtgcaggagctgttcgacgaaatgccacagagagacgcgttctcttgggagtctcgatcgatgggtatggttggaagcaaggtggtgctggtgtggaccgtgcacgcgagttgtctgatcaaatgcccaagaggaatttcgtgtgctggaacttgatgatcgatggtgatgccggacaaggaaggatgcattaaggga

SEQ ID NO: 2955 - DNA, 942 bp, Zea mays
  Clone ID: MRT4577_102693C.1
ggggtgggactggaacacatttccatcaccactgaattaattaatcaacaatacatgcgtcacaccagcatttgatacactatacattaaaaataaattcactcaatggccatatatggtcgctatgtatatgcatatgatctgagtggataaccaaaccacgcgtacgtatcatcaaacaagcgcgtagaacaaggctccaataatggcaaacgccgccgcgccggcaagtcctgccatcttgggcggcgcggcactttggtggcggatacgcggccgtgggactcggcgagatgtcgatgccaaagggtggcggcggcggagagaaggcggagaatgggccgttgggggacgacgacgacgacggacgacgcgccagccccgtgccgcccgtgccgatggccgcgcgctcggccatgacgacgacgaccagcttctcgccgcggtcgcagttgcctttgctgccgctgatgaagtagaaggggccggagcggttgaaggtgaagacggtgctgccgtcggcgaaggtgtcggtcggcgagctcgtgtcgcaggcgtcgtaggacctctcgtcgacgaggagcaccgagtctttgccgggctggtacgtgaaagcgatggcgtcacccacgcggaaacggttgcgttgcgcccacgcgttgtacgcgctgacgttgccgctagcggccgcggctggcacgcgccactcgcccgtgccgcccgccttgaacacgaacgcggacgcggtggacggcacagacgccgccaccagcaggcacgccaggaacacgcagcccatcatcatcatccgcccgtgcgccatccagatccagccagagccagcccctcaccaccaacaacaaaaaaaaaaaaagagagtagcgtgtgcgtttgcgatcgagcgttggcttagtccccggcccggccggcctcgaggtaccc

SEQ ID NO: 2956 - DNA, 243 bp, Zea mays
  Clone ID: MRT4577_102694C.1
gggacaaaaaaaactccaaacggggttcaactgggatcagggtgcaaaacccgaaatttcgtccagttttccacagggggagccggggggttttcccgcccaatggaaataagggggggggcaaggggacttaaacggttagcagtttcaggttgtgcgggttttttcggggagggggggaaaaagggctgctttggtttgccttactaatatgcgacgcgcgggtttttcttttcggggggg

SEQ ID NO: 2957 - DNA, 326 bp, Zea mays
  Clone ID: MRT4577_102695C.1
cggacgcgtgggcggacgcgtgggcacatttgaaggctatggcggcaaaagctttgtggaagcttgctcataaccatttgggtgtgtgcaagagcattacagactcacgtgcgccactgtgctttgctgtgctccttgaaaagggtgatggcgatatgggcactaatgtgcagtacttctcagcaatggccatcatggagattgcccgtgtcgctgaacacagcctcgtgctgcgccaatcagcattctaacccagttccccagcagccaaggctgttgttgatcagctgcttcgtgttgtccgcacgggtgaatacgatgcattg

SEQ ID NO: 2958 - DNA, 339 bp, Zea mays
  Clone ID: MRT4577_102696C.1
cccacgcgttccgcccagccgtgcggggggggggggcgtggttgcaaaccagcagcacgacggttcctacagttgttgctctcgctcaggtcgtttgcgctggggcgccctgccgtctacgtgcaacaccaacaactggtttcatctattccgaacgctgcgggcaatgctcttgcgtgggggcggcatcaattgttgcagcagattgttccagctgtgactgaactagctgcggcacaccctgtggcctgcttgcagcaggtgcttccatcgaaccaaatgactctgttgtactctgctgcgtacctgcaacagcgtcaactgttccttaattcattg

SEQ ID NO: 2959 - DNA, 259 bp, Zea mays
  unsure (1)..(259): unsure at all n locations
  Clone ID: MRT4577_102697C.1
ggtgggttggcttctcctccccctccttttcgggttcgggttcgtgaggttctccgnagttacttttcaaaaatgagcggatcgagatagcatcatacaatgttgagtaccgctgcttcttcagcagcctcgcctgtgccacagactaccactcacttcacaactccttcagcacctacagcaaggtcctctagtccaaaatcattctagatcggcaaacacaaaaatcccacgtcttctacttctttaccttcttcac

SEQ ID NO: 2960 - DNA, 1452 bp, Zea mays
  Clone ID: MRT4577_102698C.1
aaactggactacacgacacactttcagctgcttctccaatgtgctgtggggatacatcaattttactagagcaaataagttcaaagaatccatatgaaaccaccttacattccaaccatcagttcaaacatctgataaattcttctagaacacatcagagctttagaaacttttaagaaatggcttgcaagaaaaatgaataattcttctgcagtcatcattttacactcatagcgacatgatgctatacactggttaccggggctagtttttcttagtaggtcaaaatctacataaggccttgttcggttattcccattacatatgaattggatatgactggaaaaaaataagaagtttgacttgcttggaatttaatcacacctaatcacacttaatccacatggattgagagcgaaccgaagaagcctaagttagctgattaggttcaaactagggaacagaatctgtgggctattttttctctctttgagatcttaaattctggcctagtgcagtggcaggtgctaggtcacgggttcaaagcagtgtctccgcatttgtgaaggaaagaattcctcagtttgtcccttctcggtgtgggtgcctccagcactaggtctgccaagcctaaaagcccatgatcatctctttttcttgctttcattaggtctgatcatctgcacaggtgcagctggaatgcgagcccaccactctctaattcgcctgcggaatttttcagtgttctgtttccttaggggcatctcccttgtgtacatttccaggactaacatctgtatcagaggcctggaaggtaggaagacaagaaatgcagctgcgacaataagtacagctgcaactacttcagtggccttaggaacacaggcaaacaagacagatctgaacttcagaagagtaatatttgcagactgtagaaaattttctaacttggatatagcctcctgcaatgtcaaaatctgctcaacggcatttttacttggaggaggtttcacttcaagcacttccaacaattttccgtctccaatatacttatgccaaagcatgataatagcaaaagttaagaaaacaaagggcgcgatgtaactgatgagacccctttgaatagcatacagcataaaagctaagaatagaagtgatttcaaaggatcttcccattggctgagagagtaaacaatcttgcctgcttgaattaaagggaaaagtaactcctgcatgagagcaagatttgcatcaacgccttccacctttacttgatcaactgtagcacgtgctgactctattctctcagagtaacaaattgactcttctagggcagcctccaaagattttgttacaccaaagcaaacagcacaaaagctcatttccttttcagatttatcgtttgtcttcagcagaagaaaacccattctagagagagcatacaaagaaaat

SEQ ID NO: 2961 - DNA, 1333 bp, Zea mays
  Clone ID: MRT4577_102699C.1
cagctgtaccctcgctgccggccgggagagcagcccgagcgcgagtcgcccggtcgcccctcgtggaactggtctgggagtcatctccacgctccgggttcgcgcccgactcccctacaaattcgctccaccggcggctccggctgcaaaccgcgactgactgctgaccccgagcggcaccagcgcgcccgccccgccatggctatccccaacgcctttgactcccccctcgcggccaggtccgccgtcggcgcggcgctggcggccgtcatcgccgtccgcgcggtacgccgccgctccctagacgcctcgggcggggtcgccggcttcgtcgtcatggcggtccacatcgcatgcggctacaggtacggggcgctgctgctggccttcttcttctcctcgtccaaggtaaccaagatcggggaggaccacaagcgccgcatcgaggagaacttcaaggagggcgggcagcgcaactggatccaagttctagcaaatagcacaattgccactgtactggttgtgatatttgcactaatgactggagggcaagatcagtgcatggactcaaatggttcaaagcttataactggcatcataggtggtatcattggccactactgttgctgcaatggagatacttggtcatctgaaatcggtgtgcttagtaatgaacaaccaaggcttattacatcccttaagcctgtcaggaagggtacaaatggtggagtcaccttacaaggacttcttgctgccacaggaggaggccttatcattggtctcactttcgttgttgttggactgttgactgctgaatgttcttccgatatggccatcaggcagctcctagtactacccatctctgctgcagctggtttgcttgggagtctaattgattcattgctgggagctacacttgaattcagtgggtattgcagtgttcggaagaaggtggtcagcaaaaggggccctacggttacaaagatttctgggatgactatcctggacaacgatgctgttaatgcagtatctattctgctaacaactgtacttacagcttatgtatgcatttacatcttttagaaaactagttgggtaaatcttgagttgaaccctatttttcattgggcaatgtattgcgaccttagcctgcacggttcctggaaatggaacagcctgcaacttctctgtgactgtattggtagaatttgtattatggcacagaaaggccgattcatctccagcttgatactaatggttcactggaaactttttttattcccattgcaaaatgttacgatattggaattatccttcatacggattttaacct

SEQ ID NO: 2962 - DNA, 475 bp, Zea mays
  Clone ID: MRT4577_10269C.1
acaagctttttttttttttttttttttttttttttttttttaataattttttttttttttttttatctttttttttatcacccttaggggccattcccacccaatggggggccttcccaaggggggccggccctggaccaagcccggggcccaccccggaacaggcggaaaccgaggaaaaagttattccggcaaaaattcacacaacccccacacccgaaaaaaaaaggggaaaacccggggagcccaaagaggggggggacccacaataagggggcaaaccccaaaaaccggcgtcccggccggaaacccggtaggcccgggggaaccaagaaggggcccaacccccaagaaagggcccccccgcaaagggcgcctttccgcttgggggacccccggcccccttcaccaaaaaaaaccggctcagcgggggggaaagcttaccccaaggggggcacccccctcccccccggaa

SEQ ID NO: 2963 - DNA, 263 bp, Zea mays
  Clone ID: MRT4577_1026C.1
agccatgctttcgtcgtgaactacgggaccgggggagcagggtgcatgcaggggggctctaatcatgctggctgttgaccgcctaatgccatgctgcgtttttctcatgcgctgctcttcatgccatcagcagctgtgttgccagagaaagcccaatgcggcttggccagggcgcgctttggatgcttcactgacacagacagtgggctgcactttgccatgacgcacgtttcctgcttgacgctacagacggggtcgtcatg

SEQ ID NO: 2964 - DNA, 700 bp, Zea mays
  Clone ID: MRT4577_102700C.1
cctcgaagccggccggatactcgttatccatccgctcacgtctctcagacactactccgacggcgagcacgaactacacagtcccgctccacttgcttacggttatctccatcatctgccgtgcctctctcacgcaacaccatgtgtcgatcggcgaaccacatctcaccgcactatgcatatcgacaaagttaactggagatgcttccaggctcgttctatgatggatgacgaagcgctgcatcactaccatcgcaatagtaacggagatgccctcccttgtgcagaaacctaccgaatgagagatgaaggagatgatcaacgatgacgaatgccaatgcaaaagggaccttctacttcccaaagaccctgaacctgatggatatgaagatgaagacacgacactgcagaagatgagtcacacacgctcttataaggcttccacaaggaccacaagaagatcatctgtgctgctgactccaccatgacttgaccaaccttgaacagaaactaaatgaccaggatcacgactaaaagcttcgaggggcctaccatgactgtcaccatcaaatctactacttaccatgtcctccagggtatgatgaactaggtgatgagcgtgccctcgtgaaataagtatctatcacatcgagccaatcatcaagcacaatagccgtactctggcctgcccctttgatga

SEQ ID NO: 2965 - DNA, 222 bp, Zea mays
  Clone ID: MRT4577_102701C.1
ggcacgcaggaagaaagaattaggcgagccgagagccattctcatggaggcggcgatggatctgatgccgcggatgccgacaccgagcgcggagacagcgctcaacgcgctggtgttcctactccccgaccactccctagagcttctcttccaagtcgacctcccgctccaggtttgcatggataaagacagcctgaaagaaacattctatgccaatataac

SEQ ID NO: 2966 - DNA, 294 bp, Zea mays
  Clone ID: MRT4577_102702C.1
tatccttctaacttcccctccgtcgccttcgctccgcatccatccgaccgtggcgagcttcaactgcgcgcaccggccaggaggctaaaccctaccgtgcgccgccatggactcggcggtgctctcactcacctgcgcgggcctcggcgcctcgcaggaggacgaggacggggccgtcatcggctacgccaagcccgaccactgcttagataatctgaaggatctgcagagattcctgcgacgggacgacccgcagcggcgggaggttttcaagctagtctgcaagtggaagat

SEQ ID NO: 2967 - DNA, 2742 bp, Zea mays
  Clone ID: MRT4577_102703C.1
gtcgacccagcgttcgcacgcacaacgcaacgcaggccaacggatcgccaaatcaacttgagctttggagcatcccaccaatccactccccaacagcaatggacgccgcccagcgccgcgtcggtacccacctccagcgcccgccgccgcccgccgggggctacggcctcaccgtcaaccccaccgcggccgagtacgtccacgcgcagggctacagtgtcctcctccctgagaaattgcaaaccggcaggtggaacgtgtaccgatccgcgcgttcaccgttaaggctgataagtagattccctgacaccccagacattggaacgctgcatgacaatttcacgtatgcagttgagacatttacagactgtaagtacctgggaacaagaatcagagcagatggaacaattggagactacaaatggatgacatatggagaagctagcacgagcaggactgcagtaggttctggccttatctatcatggagttcgtgagggtgcatgcattggtctgtattttgtaaacagacctgagtggattatagttgaccatgcttgttctgcatattcatatgtatctgtgccactttatgacacacttggcccagatgctgttcaattcattgtgaaccatgcagcggtggaagttatattctgtgtgcctcaaactctaagcactctgttaagttttatagctcaaatgccatgtgttcggcttatagtggtagttggtggagatgatgcaaatctgccatcaacgccagtaactactggagtgcaaatcataacttactccaggttgctcatccagggaaaggctagtcctcaacctttttgtcttccaaaacctgaagatgttgccactatctgttacactagtggcactactggcacaccgaagggagctgttctttctcatgggaacttaattgcaaatgtagcaggatcaagcctaaacattaagttttacccctccgatgtgtatatctcatatctgcctttggctcacatttacgagagggttaaccagattgcagcactgcactgtggtgttgccattggattctaccaaggggataatttgaagctcatggatgatctggctgctttgagaccgacaatattcgcaagtgttccccggttatataacagaatttatactgcgattacaaatgctgtgaaggagtctggtgggctgaaagaaaaattgtttcatactgcatacaatgccaagagacaagcaatccttaaagggaaaaatccatcccctgtgtgggataagttggtatttaacaaaataaaagctaggcttggtggacgagtgagacttatgagttcaggtgcttctccattgtcagcagatgtcatggaattcctgagaatatgctttggtggtgaagttcttgaaggctatggaatgacggagacatcctgtatcatatctgcaatggatattggtgacagatcaattggtcatgttggatccccaactgcatcttgtgaggtgaaacttgtggatgtcccagaaatgaattatacatctgatgatcaaccttatcctcgtggagaaatttgtgttagaggacctataatattccagggttactataaggatgaagttcaaacaaaagaagtcattgatgaagatggttggttgcacactggagacataggtctgtggctacctggaggacgtttaaagatcatcgataggaaaaagaacattttcaagttagctcaaggagaatacatagctccagagaagattgaaaatgtctatgccaaatgcaagttcattgcccaatgttttatatatggcgacagtttcaactcttccttagttggtattgttgcagttgaaccagaggttatgaaggcttgggctgcatctgaagggatccagtgcgaagacttgagacagctttgtgctgaccctagagcaagagctgcagtcctggccgacatggattctgttgggaaggaagcacagctaagaggttttgaatttgctaaagctgttcggcttgtcgctgagccattcacagtggacaatggtctcctcaccccaacattcaaggtcaaaaggcagcaagcaaagacatactttgcaaaggaaatttcagatatgtacgcggagctgcgggaggcagaggcacccaggtcgaagttgtaatgatcaattcaaggagaagcgacatatacaggcttacagatcatatgtctagaagaaacgtaatcatctttttactggcgcagcaaataatggttcctgcaatggtcaggaagagtcgagacttataccagacggaggcagtgcttggtgcaaatcatatagatgaatgctgttttcccttgtccaacgtgccaagccacgttagcctcaacgaaagatactagatagagaaaaaaaaaagatattctgcaaatgtaacagtgatcagttaacaatcgtggtgtgttgttgcatagctagttgatcggaacgacctagagaaatgtgaagaacacgaagcgcctttctgtttgaatttgaataaggattcacgatggcctcccaaaaaaaaaaaaaaaaaaaaaaaaaaaaaaaaaaaaaaaaaaaaaaaaaaaaaaaaaaatagggctgggggctgctaaatgatccaagattactgccatgttcatgcagagctaatgagattgttatatagtgtgacctaaaataaaattaatgggcctgacatttacaacacggggattgggaa

SEQ ID NO: 2968 - DNA, 2858 bp, Zea mays
  Clone ID: MRT4577_102704C.1
acagcaatggacgccgccgagcgccgcgtcggtacccctcgcccgccgccgcccgccgggggcggcctcaccgtcaaccccaccgcggccgagtacgtccacgcgcagggcagtgtcctcctccctgagaaattgcaaaccggcaggtggaacgtgtaccgatccgcgcgttcaccgttaaggctgataagtagattccctgacaccccagacattggaacgctgcatgacaatttcacgtatgcagttgagacatttacagactgtaagtacctgggaacaagaatcagagcagatggaacaattggagactacaaatggatgacatatggagaagctagcacgagcaggactgcagtaggttctggccttatatatcatggagttcgtgaaggtgcatgcattggtctgtattttgtaaacagacctgagtggattatagttgaccatgcttgttctgcatattcatatgtatctgtgccactttatgacacacttggcccagatgctgttcaattcattgtgaaccatgcagcggtggaagttatattctgtgtgcctcaaactctaagcactctgttaagttttatagctcaaatgccatgtgttcggcttatagtgttggtggagatgatgcaaatctgccatcaacgccagtaactactggagtgcaaatcataacttactccaggttgctcatccagggaaaggctagtcctcaacctttttgtcttccaaaacctgaagatgttgccactatctgttacactagtggcactactggcacaccgaagggagctgttctttctcatgggaacttaattgcaaatgtagcaggatcaagcctaaacattaagttttacccctccgatgtgtatatctcatatctgcctttggctcacatttacgagagggttaaccagattgcagcactgcactgtggtgttgccattggattctaccaaggggataatttgaagctcatggatgatctggctgctttgagaccgacaatattcgcaagtgttccccggttatataacagaatttatactgcgattacaaatgctgtgaaggagtctggtgggctgaaagaaaaattgtttcatactgcatacaatgccaagagacaagcaatccttaaagggaaaaatccatccccagtgtgggataagttggtatttaacaaaataaaagctaggcttggtggacgagtgagacttatgagttcaggtgcttctccactgtcagcagatgtcatggaattcctgaggatgtaagctgtctccttttgagctcccttggatgattttggaacttggcttggtgacatttactgtttcaatttctatagatgctttggtggtgaagttcttgaaggctatggaatgacggagacatcctgtatcatatctgcaatggatattggtgacagatcaattggtcatgttggatccccaactgcatcttgtgaggtgaaacttgtggatgtcccagaaatgaattatacatctgatgatcaaccttatcctcgtggagaaatttgtgttagaggacctataatattccagggttactataaggatgaagttcaaacaaaagaagtcattgatgaagatggttggttgcacactggagacatagctctgtggctacctagctcacgtttaaagataatcgataggaaatagaacattttccattgcgctctgtttgaataatggcgacagtttcaactcttccttagttggtattgttgcagttgaaccagaggttatgaaggcttgggctgcatctgaggggatccagtgcgaagacttgaggcagctttgtgctgaccctagagcaagagctgcagtcctggccgacatggattctgttgggaaggaagcacagctaagaggttttgaatttgctaaagctgttcggcttgcggacgcgtgggtcacagtggacaatggtctcctcaccccaacattcaaggtcaaaaggcagcaagcaaagacatactttgcaaaggaaatttcagatatgtacgcggagctgcgggaggcagaggcacccaggtcgaagttgtaatccccgccatgtaatgatcaattcaaggagaagcgacatatacaggcttacagatcatatgtctagaagaaacgtaatcatctttttactggcgcagcaaataatggttcctgcaatggtcaggaagagtcgagacataccagacggaggcagtgcttggtgcaaatcatatagatgaatcctcgttatgaacctctcaactgaatgccgttttcccttgtccaacgtgccaagccacgttagcctgatactaggtagagaggaaaaagatattctgcaaatgtaacagtgaacagttaacaatcgtggtgtgttgttgcatatctagttgatcggaacgacctagagaaatgtgaagaacacgaagcgcctttctgtttgaatttaaataaggattattcgcgacatatacaggcttatagatcatatgtctagaagaaacgtaatcatctttttactggcgcagcaaataatggttcctgcaatggtcaggaagagtcgagacttataccagacggaggcagtgcttggtgccaatcatatagatgaatgctgttttcccttgtccaacgggccaagccacgttagcctcaacgaaagatactagatagagaaaaaaaaaagattttctgcaaatgtaacagtgatcagttaacaatcgtggtgtgttgttgcatagctagttgatcggaacgccctagagaaatgtgaagaacccgaagcgcccttctgtttgaatttgcataagggttctcaatggcccaaaaccaaaagaaaaa

SEQ ID NO: 2969 - DNA, 435 bp, Zea mays
  Clone ID: MRT4577_102705C.1
ataaaaaaaaaaaaaaaaataaaaaaaaaaaaaaaaaaaaaaaaaaaaaaaaaaaccaaaaaaaaaaaaaaaaaaaaaaaaaaaaaaaaaaaaaaaaaaaaaaaatttttccttaaggcctgaacccccttaggggcatttttttggggttttccttcccattgggggccgttctagcttccttttaggggccccttttggccttttagtgggtctttttaaatttttttgtccctttttttccaccgtggggtttggaaaacccttttttttaccccttttattcccttttttaaaattccttttttaacaacttggtttattactaaaagggcccgcccagttggcctttcccaacttttctccaccttgattggcaaatggcccccctttttgccggccctttatgcgcgggggttgggggggttcccccca

SEQ ID NO: 2970 - DNA, 280 bp, Zea mays
  Clone ID: MRT4577_102706C.1
aaaaaaaagaatcttgatgtaatattttttacttgatattcaaacagccaaaaatatccttttcttaaaatgtcttttctaaaagcgtataatttttcttgagaaatttgcactgagccactttaggcaaaaagttttaagtatttttaacaatgggcccttttatagatttattaatattaataatatagcatttattacagaaacattaccaagaactcctcagtgccatcaaggtattattatcatgttcatatatttttattgcctttctttctgt

SEQ ID NO: 2971 - DNA, 309 bp, Zea mays
  Clone ID: MRT4577_102707C.1
agcggggaagcggggacaagcgttaggaggacgaggggggggattgggcaccccaagaccaaggcttcaggcggggcgcgcaggcggagggggacgagagcgcgtcgtcgcgggggaaaaggcgcagggaccagcagcagcagcatccctgcacccacgaaggcattttggatcggcggcgccccggggcgcaagccgccggcgaggctcccccgcaaatctgaacaaaaaggcggttgaggcaacaaattttttcgcttccgcgtaggagggattcctttcttcttattcttttttcggacccgtggg

SEQ ID NO: 2972 - DNA, 133 bp, Zea mays
  Clone ID: MRT4577_102708C.1
gtcggtaacgcgtccgcccacgcgcccgaccacgcgtgtcgttttaggacttcagccctgcgctccgcaggggaacctcacaggaagaagcattttgttcagtacacaatggcgattgacaatcaaggtgctt

SEQ ID NO: 2973 - DNA, 1104 bp, Zea mays
  Clone ID: MRT4577_102709C.1
gggaccctcgaggccggccgggccgagatatcgaaaaaaaataagcgcagagatagcttcccaagtaggccataatggttctaatgcaaatacacatccatggaaatatctctctggctgtgtccgatgaagtcgagaagagatgcgatgaaatccagaagaggctcatcttgtagatgatagccattttcctcgacggcgtggatggcaagagttacgagaagatattggaaggcgaatcgctggcgcaggtgtcccttgtacatgacaataaagacacggtcctggcagcagatgaggatgaccacgttgtcgatatcctcactctagctgctctacgaaagaacagcgagcaccgaatgagtgcagaacatatcctgaagaatctgtgcggccatgacaccacgaatgattgtcgtgtccaaaagctgaagaacacaatgatcaatgatgcgatttgaaaggtggtgaggaaactactagggtgcaatccgactgcagaagaacacaggctagccggagccaatttagaataccctctctgcacccccattcaacttttaccaaccccagtacaccatgcccctttaccacggcccatacaatgttgaagagcaggaggcgactgtcatccctttgcgcaaccgtacatgccagactgacgaaccaagttcctgatttggccacttcgttcgaccaaaaagccgcggagatctgcagggacatggcgatggaggccatgtccttcggtaacctcgtcaaaatggccgcagacgttgtggcgagcaggaggcggtcctggacgacgacagcgggtgcgccgatgtgttttacgatcgcaaacccccccgacgcgtgttgtatctcgtgactacgcgcgtatacatctcgtggtaattctcccgctcgtcagctagtagcatgcctaaacttcttgtctaccgcatcatccatgcgtcgtcttaaatttgtatggtacctggtgtaagcagtcttacataatactcgtaaaaatgtacttctttaatgaactcccctagtccatcagcctagccacgggcagcgatcttattagaaaatttaaaaaaaaaaaaaaaaaaaaaa

SEQ ID NO: 2974 - DNA, 354 bp, Zea mays
  Clone ID: MRT4577_10270C.1
acttcttcctttttttttcacaccaaaaagaggggttctacaatcacaacaaaaaacaccccgccccccccttaaaaaaaaaacccgaaatccaaatcagggcctccttccctcaggaaaaaacattacaactcgccaccttctcatattacccccccaacccaaccccaaaaaaccaggtcttttaccccccccaaaaaagcccacccccagggcaaaaaataaacctttcccccaaaacttcttattaccatccccgggggggcgccaaaacattcccccacaaaccctaaaccccgggaagggatttcccccccccaatcactttacctgaatacaaaaaaggggcccccc

SEQ ID NO: 2975 - DNA, 316 bp, Zea mays
  Clone ID: MRT4577_102710C.1
ccagcacaaacaagcctttttttttccaaacccgtaaatttatttccccggccaacagaaattttcctgccagggcccgttaagctggcaaactggggggggcccaaaaaggtctgcccggaacaaaatatttttttctttttcaaagttgttctgggccccaactggctttgcaaatgggtaaccaagggccccacaactcaggaaccggttggggggggctttaaatttctgggtcccaagggtggggcagatgggtttcaacgggtaaacaagcgttactcccttaaaaaccggccgacaaactggggttccc

SEQ ID NO: 2976 - DNA, 228 bp, Zea mays
  unsure (1)..(228): unsure at all n locations
  Clone ID: MRT4577_102711C.1
ccgactatttcgggtaaaccaaaaagcgagtccaaggacaaagagaagaagcatacacagcataaagacacngagagggacaacgacaaggaccatacgaagcacgaacatcggcataaagatcggagtaaggacaaagataaagacaaagacaaggataagaaaaaagatcagagtggtcatcatgactctgattcaacgaaacatcatgaaaagcagaggaagcac

SEQ ID NO: 2977 - DNA, 178 bp, Zea mays
  Clone ID: MRT4577_102712C.1
taaaaaaaaaaaataattttaaataaaaaaaaacaattttaaaaaaaaaaaaatttacttacgctttcaggacgccgccaaatacgggctttggtgtccccccctttaaaagatctacggtgtctttcaaattcatgcaatgggaaaacttttttttacggccacctaaattaaattc

SEQ ID NO: 2978 - DNA, 236 bp, Zea mays
  Clone ID: MRT4577_102713C.1
gccgggaaggaaagaacgtggtgggacgacgatttataatcgacggcggccgaccaaaaaaacggggggcttttttaggaattagggcgggcacacaagaagggaggagcaaaaagcggccaccgccatcacagacaggacgcacaccgctggcaggcactgtacaggtcgccaaaagaaggaacggaaagaacacacgggcacgaacagatacgcggggcataaacgcggacaac

SEQ ID NO: 2979 - DNA, 451 bp, Zea mays
  Clone ID: MRT4577_102714C.1
aaagaacaatccgttacatttttttttcttttagaggacagagctttctggcaaagccgctccacacaagggcccgggacaggacaaggggctccaaacggatcctaacaaaccaggggggagagttacccacccttggaaccgggcgaacacgggagcaaaatctaacaaaagaacgaggcctgagcggttttaacggatgaacggccaaaaggcatttggcgacacacaaattttactaacgcaggttagaacataataaacttgaccctttgcggggggctgatgaccacaaatatttaacttgttaaaacccccggggagcaaactcaacagggagtaatcggccgtaggggacaaaggcgcctcgaccatttatgcaatacacagggcgtttaccacttcacaggccgtgggggacgtggggcccacgggggtggtggcgggggaa

SEQ ID NO: 2980 - DNA, 285 bp, Zea mays
  unsure (1)..(285): unsure at all n locations
  Clone ID: MRT4577_102715C.1
cggctcgagcattaagaaccgtcttttgtttgctgtagctcgtcaatatggtcaacgtgtaaagcatgcacgtgaattaggacaaagtttgcttaggaaacgtactgcagctcgtccatatgcaaagcaacttgtgcgtcaacttgctggagaacatgttcgtgcttatttgaccagacgcctggttacaaagccaaaattggctcaacaggctgctcgtcgtgctagtcaaaaggctaagaaataaatttgataaaaatacataaatcacctanaagcactatc

SEQ ID NO: 2981 - DNA, 291 bp, Zea mays
  Clone ID: MRT4577_102716C.1
tagcctcatgcgtacgagctcggatgcgctcgaggaatgtaatccagggacaaggagagagtaccacacagaaaaactggtcacttctaaaggagctgaagagctcaggacaggtaaagagaaggtcacctctgttagcacaaccaccacgcgtcgttcatgctctaaaaccgttactaagactgttattggtcctgatggtcacgaagaagttaccaaagaagtggtgacctccgaagatggttctgactatctcgaggcaatagatttaggcacattgtctggcatagg

SEQ ID NO: 2982 - DNA, 586 bp, Zea mays
  Clone ID: MRT4577_102717C.1
ccggttcttggccggagtcgcccaccaccagaattgcggaccatgacctgcaacacgccagccctcgctaacacgtaccacgacggcgggtggaatgggcccaatgttacactcccgggccatgattcaccccgggcccgcgtcaccactactcaccacaccatagattgtcactactactagtttataaaggacaggaaacaaccttaggtttccagtctaggtcgaggaccgttcgttctactactactagtttaacatcagtgcgaaaaagaatgcgaataagagccccaacaacatagaaaacattaaaaggaacattaacattaataacgctgcaagggagaaggactacttgggacttccagatggtcgtagacaatcaggaggttacatagacgacatagactacggggaaggaggaggcgaaggtgactccaaactaggccgtccccaggacgacggggagggaggtgggtccctgttagtactctcagtacccgaaggtgaccaggaccagggaagagaagactaaggaccgtacctgctgtagggaagaggagaagagaggcggggagacccggaa

SEQ ID NO: 2983 - DNA, 119 bp, Zea mays
  Clone ID: MRT4577_102718C.1
tgttgacgcgttcattttagatttttatgaggcttgagcttgcgctgacatttttacgatgctcttggttttccttcgctgtgctcatcgcatagcaagtgatgatgtttgagattgtt

SEQ ID NO: 2984 - DNA, 588 bp, Zea mays
  Clone ID: MRT4577_102719C.1
ttttcgcgtcatcactcgcggggcaggtcgcactgtcgcagcatgcttcgcctctccatcgccgtcctcacctcaactctcctccccacgtccgtccccaccgtccgaccccatccgcgccgcctactccgcctccgtctgcgctccctcgccgccgccgcctcgctctcgccgtccgcccgcagcctccgcctcctcgagtggggcaaggtatgcgacgccgtcgcctccttcgccggcactgcccacggccgcgacgccacaacgaaacaactgtgggaggtggaggatgtgagctatgagcagagccagatgctgctccaggagacggaggcggccgtgttgctgcttgacaacgctggtggggcaatggatttctcggggttggatacagttgcgctgccatgaagctggatgaaggctcatgtagtcgattaacaacacttacagaaaccaaatttagatgctgtcattaacaagtcactagtgaaatccatacaagatattggtgatgatgatggctctgttaaagacactgcaagccctgagctaagacggtatcgagagcaagtacaacggctagaaaac

SEQ ID NO: 2985 - DNA, 175 bp, Zea mays
  Clone ID: MRT4577_10271C.1
gtccttcacagggtttctcccctgtttttttcttttttttgagaaatccccaaccgcgtatgtgtattcctttgctcggcccccgagcaatttattactagacacacggccctgcttacccatgaatgaatacgtttttacccctcgcatttacctgttcctgtatgcaaatata

SEQ ID NO: 2986 - DNA, 714 bp, Zea mays
  Clone ID: MRT4577_102720C.1
gagcgcaatcactgccagcgaactctacactaaccttttcactgctacgagaagaggagtggccgtgcgtcgcttccatgtccacggcgctccatcgatgggtgcgcaggcgactgggacagccctcagggtcgagctctcacgaacggggccagctgcttcctttctcgcctcttgccagtggtgtcgcgccctcgactgtggtcatccgcacgattgcacatagatagaccgatggggacactgaaagatgcggcgccaaagtaccttatactgtcaacgatccgtgatgatgggccagacggggtaggccgccctgaacctccggatgatctagaacttgaactgtactggctggatcagaaggtcttttgcaaggacttcgatggcatcatccaaaaatacgatggagaaactccaatgcaagtcaacctaactgcctacaaagatagaagcgtcgagtctccggtcaagccgccactgggatcatgtctcctcaagaagggacatggtatccaaactggcagcactcacccaagagaggctcatgtatggtacctgaccctacgccacgtatacgagattgcaaagatgaatcatgctgaccgcttctgcaagtgcatctctcttgaggcgctgtgctatggcatcaattgcacgggcaagtctacgtgtattgcgattgctacggatatatgaacacgaatgacaggc

SEQ ID NO: 2987 - DNA, 273 bp, Zea mays
  Clone ID: MRT4577_102721C.1
ccaatcacaacacaaaatatttcttccaataaaaacaggtgctaaaaagcatcatcttcctgctcaacagggaccagttaacaatgctctaaaatccctaaatatctttcaaaacccatgccacagcaacaaaacgctcttctactcagtagaaaaatagctctattctatttgcccccttctttcctatacctttatcccaaatttcatttcttctatctctagcccttacaaactttcttactttcctgcccacatataccttgatctgtt

SEQ ID NO: 2988 - DNA, 1743 bp, Zea mays
  Clone ID: MRT4577_102722C.1
gcgggttctttccacacatttctgtcattcattcatgagagtgcaccatactgtaacatatgagccgtggacggattgttgatttagcaaatcttgttcctattaggaaatctattttctattcgtgactgtctcgtagaaaagaattacacttcctcgtgcaacaaatcaacataggggcctttttttttttttctttttgagtttttttttcatgaattaaccttttgagatgcattttcatgccaaaacccatgtttttaacagcaaacaaaggcatgtggcagcatgattccaagatcggacttacacagggaaaaccaaagctcctttcggtgtgcgaaaaacatgtcagacctatctgtgagcactaaatccctaactgttggacacgcggcaatataggaaaaaatatatcgccttgctaacgatccaagacaaaaactcatgccaaaaatgattctcagcgtcccaacatggccggcctcgggtgttccaattatctttagtcccctgtactcttgtgctgctgctgctgcttctcgtccagctcaatatggaggagaatgctcttgacttcttcattgaactgcatagactgaagcttcttcttgagttcctcacagccttttaccgtgtctgcaatctcgtcgaaatccaaaggtgtcacttgcactatttcatcttctttccaaccaagcaacatcatgaaacgcttatcttctggagaaatgtcagctggatggaaatcatcatctgattcagtatcctctgataatgaacttgcttcctcattgccagattgggatctattccatccatcatctgaatctgcaagtgttgaggacaaactgacttctgcgctgtccgataggaacgactgaaatccttcatcacctgtgtccgcaggttcagatgatgagttagcttctctcctttcaactagaggctgctgaggcattccacccataacgctcagtttcaaggatgcaatgtgctcctcggtatcagataggtgcctctgagacccatcagaagaatttgcttcttcacagaaacacctcctgtgctccgtgcatttgatctcagaacagaacacgtggaagtcatttccaagattaagagaagaatcctgcttcacatcaactaagctggatggggatggttggcttcctggctcaaaggcagtgcttgaaccatttgaagacttggtccgtagcatctcaaagaatctaaccttgtctcttgcatttgactttctgtcacgagatggaccttgcaggggcagaagactctcattggtgccaaacttcaacttttggctcgccactgtttttttctgtgtttccagcgacgccaaaggagttggaggactcacaggtttcacaggacagtctttggcggtgtgtgcagtaccgttttgctctcgactgagaacttggaagcttcctggctgagagagctttgaaacatctgctttaactggagctctagaagaagtgttggctgactgtatttttaatagttgtgaggtcttactaggaccagtaggatgatctccaagccttgtaccttttattttcaaagaactaagagcagaagatttgcttgctggaggtgtaataggtcttagagtaagctgcttcaaggttctttcttcaatcttctgagcctcggtcgataactcaggcccaatggaaattctcagaggagcttgcatcactgtctctgccatgcttaatg

SEQ ID NO: 2989 - DNA, 598 bp, Zea mays
  unsure (1)..(598): unsure at all n locations
  Clone ID: MRT4577_102723C.1
cgcgcccgggngcgcgggcggcgcggcgcggccgggcgcnccggccggcggggcccccgggnccngcgggcccggcgggcccnnccccggcggggggcncccggncgggggggccgcgccgggcggcggcgggccgnncgncgngnccccggggnngggggnggccggcggcggngggcggnngnngnngnncggcggcgggggnggccgcgcgggcggcggcggcggcggcgncgggnncagcnccgggcagtcggcnccgccgcacggggagacccgccgcacttcacctccccctcggccgccgcagcggccgcgatggcgatggtcaccgccgccagcgcgaggacggccgctggagccactgatgatgaccttcgtcctcccatcaccggccgggcggcgagctgagctggctgcctaggtaggagaactaggcttacacacactgcgtacgatcgagaaaggtgtgtgcgaaggtaagatcgagaggaggcgtatggtgagtgggaggctgggcctcgcaggcgctctgacgctctctcttatgacgcgagtgcgacctatctactccctttgtttgcatgaatattaaatc

SEQ ID NO: 2990 - DNA, 320 bp, Zea mays
  Clone ID: MRT4577_102724C.1
cggggcgccgccacttcccctccgagcctcagttcgcatccacgcgcgccgccgccgcctcgccggtcgacgctcatcgcgcagccatggtggaacagactgagaaggctttcctcatgcagcctaaggttttcctcatctcatagaactctgtcttgtggtggaagcctggcatgggcggcatccgattctggaagagcattggccttggctttcggactcccagtgaagctttctatgggacctaccttggctggatatgtccattctctgccctctgttcctactctccttctcctttattgcttgcacctgcctct

SEQ ID NO: 2991 - DNA, 299 bp, Zea mays
  unsure (1)..(299): unsure at all n locations
  Clone ID: MRT4577_102725C.1
aattcggctcgagtgcgcgcctccctggcttcagcgcagcggtggtcacctcactgcacctggggggtggcctgtccagctcagcatccttggaagtggccacgtacaccttcgtccagcagctctgtgcagactcgggcccaataggtgnnagcgcccaggtgtgtcagcaggccgagcacagcttcgcagggaatgcccctcccatnctggacnagttcatctcacttatgggacagaaaggccacgcgctgctcattgactgcaggtccttggtagacaggctggtgccatctcgg

SEQ ID NO: 2992 - DNA, 289 bp, Zea mays
  Clone ID: MRT4577_102726C.1
cccccggcgaccctggaatttggtttcgaggcagagtctgacgcctaagatttttactacaccagacagcccgaaagcaagagcggctggttggaccgtccagagcgcccaaggctattcctgcaaaccccaccaggaatgagatcgccgcgatatcgcacggcgagagcgaaccgtctcgtctactaaggccagagcagcgaaccggatggggcacgacatggtcggtaatgcgaagctgcctagctcgctttgccttacccggccactcaacataaatggccatagt

SEQ ID NO: 2993 - DNA, 842 bp, Zea mays
  Clone ID: MRT4577_102727C.1
cacacttcgcatttgcatccatccctcgctcggttatgaaattttttaaaccccttccgatcctaaataaaacggaaatcaaccccacaaaacccctgcgtaaagagacccaattgctatctcctccagcatccacccaacggatccgcggcaaccgaccacccatgggatcgctccggggcgcggcagcctcctccgcggcgccgcgcgcgggcgacctggtgaccacgcaggttagccttggtggatttgatgccaccgtcaaggcgctcgatctcgccgacttcctcgagttgaatgcgggctcggtctggcgctgccgcctcaagacctcctggactccgccggacgcctatcccgacttccttctccccaccgtcacctccgccgccgcgccgccgccacagtacgatcgcgtgcctccgcacgccttcgtccactttgcgcgcccggagggcgcgcgcgccgccgccgacgcagcgggccgatccgagctcatcctctccggcaaacccctgcgcgccgcctccgcacaggacagctcccttcgggcatcccgccgccgtagtgtctcgccattccgcttccctggctcgcgcctcgaggtcggggatctcccggcctcggacgccttcatcgccgcctggcgcggcccggcctctgggctcgagttctccgtcgacccgttcgacgggtcttgccacttcatcttcgcccgcgacaccgctttcaaagtccgggagttccgcgagtctgtggtgatgcgctgcgacgtcaagctccagttccccgtccgcgatgttgccgaagtcagggtgtttccgctcgactgctcgctgctg

SEQ ID NO: 2994 - DNA, 153 bp, Zea mays
  Clone ID: MRT4577_102728C.1
cccggttccatcaaaatcagtttaggcaaacgacattaccaccagggccaaccaacaattggtagaattttagggggggggaggaaaaaaccggtttttttttgttttgggggctccaacaacaaattaacctgagtggctttggagcaaaga

SEQ ID NO: 2995 - DNA, 684 bp, Zea mays
  unsure (1)..(684): unsure at all n locations
  Clone ID: MRT4577_102729C.1
gtttattatcgttcattgtgcacagttcaatatggtccttaattgagttgagtaagtatcaagcatgccttttaggcgaatgctatacacaatagctaacagaaggagaaatggtttgagcacagacgagtcaatgtttttcacccacagataagatgctagtaatcatctcccttccagattttttttaacagaaaggggttccccccatttcattaagaaataggtagcagttcgtgttagaatacaatataagtgaattgcacgcctcttcttatcagtttaaacttttgggttgaactaattggtacatacaacttaatttggtatcagagccagatgtctcgagttcgaatcctggttaatacaattaaataaaataattgttgcatgctcctatattccacgtcagagacttaaaagaggcttaacgtaagggggaacattagaatacaatataagtgaattgcacacatctttgaactagttggtgcatgcaatttaacagttcggaacactgacaacaacccaagaacattacaagacttagcgactgcaatgcaataactggctagctntatcctaatcagaaagcgaacttgataaggaaaaaaaagaccaggagtgttagaatataatataagtgaattgacacctcgtctcatcagctaagtttttggctga

SEQ ID NO: 2996 - DNA, 179 bp, Zea mays
  Clone ID: MRT4577_10272C.1
gcgtccgcgcagcgcgtgaattaatcagatgcaaccacctggctcttgttccatgacgtgttttaactacctgaagttgcacctcaacaggtaggggaatgtactcaaggggcaggtcggtatcctcgagacgcaacgtactcagtacgaatcacaaacaaaaaaaaggcatgacatag

SEQ ID NO: 2997 - DNA, 352 bp, Zea mays
  Clone ID: MRT4577_102730C.1
acatcgaccgccctccctttttttttttattttttctattaacacaatctaacccttttaccggtcagcaacttatacatatcctacaacccaccaaacatcaataaattttttaataaattaccacatctccataaacaccaccacaaatcttatccccccctccacctaacatctatctattcataactacattaactagctcttaaacaaaaccctcaaaacaagacatccatcacatacgacgctatcaacacaattttacccttgccattctcccctcaacccgttattcaaccctttaattcctcacccttacctgcaatcgtaccaactttccctatatatattc

SEQ ID NO: 2998 - DNA, 359 bp, Zea mays
  Clone ID: MRT4577_102731C.1
ctgtacaagacgtacgctgaagctcccgaccgtgcggcagccattgtaccgtacagtgccacctaaccggagaaaccgtgccaactgtgcacatccgatgctcacggaagacagtgttcatgaatgcattaatccgcttgtagcagatcagtattctgctagttgagctgataagctagagcgaatcaccgagcactgtttgcagcactagcgcaccttgaatgcggacatggacaccgtctgccgcgtcatatactacgccgtctttctagaccatacgcgcatcgtgtgatttgcagtcgcgaccaatctagctactattgctgtgaatatcatgcatgtcttgctgcgcatatgtt

SEQ ID NO: 2999 - DNA, 415 bp, Zea mays
  unsure (1)..(415): unsure at all n locations
  Clone ID: MRT4577_102732C.1
accctccnggcgacgacagggcggccgaccggccgncgccgccgccccacgccagggggcaaaggcnncgncaggcccnncnccggcgacnngagcaccacagggngacaagganagcnnncncgggncacggaaggaagacancnncncgacgcgnnagaccnncngacggncggcggggggggcncnaagngnncaaggggnggannaggaccgggaaacncngnacggaagggaaggncaaaagngncaagagagcnngnnccaaganggangaaggncagggagnnaggnannggngccacangngncaggaggnganagancccangcccgagangaagngcccaggcngcgagggcgggnnngnggaggaganggacncngaagacnnngagccagcngcgaacgcgag

SEQ ID NO: 3000 - DNA, 601 bp, Zea mays
  Clone ID: MRT4577_102733C.1
caggacggcggagctgccaagcctgctggtgccggtgatggagtcagcgcagcgtttgggccagctcctaataaacacagcggcccgccattgccggctccgccggccacagtagcaccgcagtgtgagcagccggttcccgtgcgtttaccagccgtcgccagcaaggtggcggcgggcggcgcgccaacggggccgccggtgcctgtgccaccgccggacgttatggccggggacatgggccagcagatccaagggaagaccagggtgggctccagggtccgcaaccgcaaggcgctctccaagtagtagagaggtgaacacggtggccggtgggatttaggaagaagctaatgatcctggtcgtttatgcagcagcgatccttacatttgattatggatatcaggatgtggtttaatctctgtgagatcctttctgtgagcgtgagaacgttgatatcctatcaaagttctcggaatatacaatcactacaaatgtaaaatatcatgcttctagtgtactagctggatgtccgtgcgttgcaacgggaatatataataccagtatactacgataacttatatacaaaatctgtattat

SEQ ID NO: 3001 - DNA, 330 bp, Zea mays
  Clone ID: MRT4577_102734C.1
gttgtacggttcaatttttcaggctatttggggcaaagttctcgagagctttcaatttttgccgctacggatcatccacaagggaccacccctgcggggggctcgatgatggcccttccaaaacactggggcactccgtgtccaactttagcaggtctcattagcggtatcgaccgcataccaaaattgcggatgggttgacaagacatgtattgaaaaagccgattcaggcttaaccacgggtggcttcttttatttttgggagggggcttggaaaccttggggccgggggggggccttttctccacactcttgatgactcctgttggc

SEQ ID NO: 3002 - DNA, 767 bp, Zea mays
  unsure (1)..(767): unsure at all n locations
  Clone ID: MRT4577_102735C.1
cctcgaggccggccggggctttgctcattctcgtgctcggcaggggaacggtgcgaagcggaggagcggcgatgcagatccgggtgcagtgcgcgtgcggcgagtcgtcgtgcccggaatgggccgtcgtggagctgcagggcgtggtgcagccgcaggcctccttcgccggcgacatccggggactccacatcggccgcctctgctcctccccttccccagcctccgcctcgtccaaggcagggttcaccttcacggtggggtaccacgagctcgccggcacaaaggtgacgctcaagaagcccctgctggtgctcaggaagaagaaggttaatgctggtgctcaggaagaagagccaccgacggcggcggaggtggagctggaggtgatcggcatcatccggcacaagatcctattcaaggaccgccccaaggccctcatctcaaagccgccaaccaaggagaagaaggccgtgcagccagcagcaaagtgacgcgacgccagcaactccgtgccccttgagaatctgaagctctcttggtttggctgcgtattccctgaatattgcgcctgttgtagtcatgcctggtttggccgatacttagtcagttgtagtcgcacgttcttttttatttgtcacattttaatttaaaaatgaacttgtgagtgacaaatattttagaatggaaaaagtataagtttaaggatgtttcctctcggaaaaaaaagtttaaggatgatcaaaaatattggcaagcggncctcn

SEQ ID NO: 3003 - DNA, 2261 bp, Zea mays
  Clone ID: MRT4577_102736C.1
cattgggtacctcgaggccggccggggggtctctgcccatctccaacctcgagagcccaccaaacccaaagcccaggcctctccgtccccaatcccccatccggcttgccccccatgtcgtcgcagtgcccctactgccgcgcgtcggggccggcgcggtgcgcgacgacgcagccgccgctctcgcgcgccgtctccgagtgctccgcctgcgcccgaatcgtcctcgagcgccacctccacacgcaccccttcttccccctcctcccctcactccatccgctcccccttgtcacccccgacctcgccacagccatcgatcccgccccatctccttcccccggcgacgaagatgacgaggacccctttctccccgcgggcttcgtctccgccttctcggctttctccctcgagcgccaccccgtcctcgcccgctccgcctccaccttctccggacacctcgccgagctcgagcgcgcgctcgctgtcgactccgccaccgcggcctccaacccggaccccgccggccccatggtctccgtcgacagcctccgcgcctacctccagatcgtcgacgtcgcctccatactcaggctcgacagggacatagcggatcacgctttcgagctcttcaaggattgctcgtccgcgacttgcctcaggaatcggagcgtcgaggcgctcgcgaccgccgcgctcgtgcaggctatccgcgaggcgcagcaaccacggacgctgcaggaaatctctactgctagcaatcttcctcaaaaggagataggaaaatacatcaaaatactcggcgaatctctgaaactgagtcaaccacttaacagcaactcaatagctgttcatatgcccagattttgcagcttgctccagctgaataaatctgctcaggaacttgcagctcatattggtgaggtggttgttaataagtgcttctgcacacggcggaatcccataagtatatctgctgctgctatctaccttgcatgtcagcttgaagacaaacgcaaaactcaggcagagatctgtaaggttacgggcctcacggaggtcacactacgcaaagtgtacaaagaactgttggagaattgggatgatttgctcccccctgactatacgcctgccacaccaccagagaaagcttttcccatgaccaacatttactcagggcgctcagcgagtggcaaggatatgtatcaggataagatattcgagagtattaagcaaaaatgccctgagcctgcagagcctgaccacatggtcgtggtgaaagaagaggaagacaagaaaacagctgctcttggccgtccgcctacaaaacttgaccatcctgagttgggcaaggtgttccggccaccaaatgcccctttctcaacatctcctaaatctgatcgtgacaaaacggaaactagcttacgtggattcaaccttaatgaggtatcatgtgcaatggactctgatagaacagacatcacagtgaaaccaacttttggtgatcgattgtcaaatgatcccaatgcgaatccatctcccaacaggcagcctttaccctggcagcttaagcaaggggcgcctgcaactgctccatcatattcaaggcttcgcgagcagcagtcgggcctggatcttgtagctgctctgaagggggttgggaaaaggagtcctggggatagtgatgtccgggataaagaagggaagtgaatagttggtgccttgtagatggggaacgactcttaagtgttaaatttgcaactatggtcggatcacgatccaaaggcccagaggactcgcacacctaagtcttgtctgtagtagagttagtttagccacctctatggctctatcactctgtatttcttttgcctcaggccggggctgtgaaatgtcatttcaggcgcattagcttctgttgtaaaattttactagtgtttatgaattatttatctgactaaagaggtgtttactttttaggaactaatttttaatctttccattttattccattttaatccctacattgttaaacactgaaactaatactttattttagtttttgtatttggcacttatggactaaaatgaaataaaatagaaagactaaaaattagtctctaaaagttattccttccatttctttttagttgtcgctagatagttcaattttgcactatttagcgacaactaaaacgaaacggatggagtcaccatgtttcgtgcaatgaaatgcagttccttcaaaaaaaaaaaaaaaa

SEQ ID NO: 3004 - DNA, 1735 bp, Zea mays
  Clone ID: MRT4577_102737C.1
gacctcgccacagccatcgatcccgccccgtctccttcccccggcgacgaagatgacgaggacccctttctccccgcgggcttcgtctccgccttctcggctttctccctcgagcgccaccccgtcctcgcccgctccgcctccaccttctctggacacctcgccgagctcgagcgcgcgctcgctgtcgactccgccaccgcggcctccaacccggaccccgccggccccatggtctccgtcgacagcctccgcgcctacctccagatcgtcgacgtcgcctccatactcaggctcgacagggacatagcggatcacgctttcgagctcttcaaggattgctcgtccgcgacttgcctcaggaatcggagcgtcgaggcgctcgcgaccgccgcgctcgtgcaggctatccgcgaggcgcagcaaccacggacgctgcaggaaatctctactgctagcaatcttcctcaaaaggagataggaaaatacatcaaaatactcggcgaatctctgaaactgagtcaaccacttaacagcaactcaatagctgttcatatgcccagattttgcagcttgctccagctgaataaatctgctcaggaacttgcagctcatattggtgaggtggttgccaataagtgcttctgcacacggcggaatcccataagtatatctgctgctgctatctaccttgcatgtcagcttgaagacaaacgcaaaactcaggcagagatctgtaaggttacgggcctcacggaggtcacactacgcaaagtgtacaaagaactgttggagaattgggatgatttgctcccccctgactatacacctgccacaccaccagagaaagcttttcccatgaccaacatttactcagggcgctcagcgagtggcaaggatatgtatcaggataagatattcgagagtattaagcaaaaatgccctgagcctgcagagcctgaccacatggtcgtggtgaaagaagagggagacaagaaaacagctgctcttggccgtccgcctacaaaacttgaccatcctgagttaggcaaggtgttccggccaccaaatgcccctttctcaacatctcctaaatctgatcgtgacaaaacggaaactagcttacgtggattcaaccttaatgaggtatcatgtgcaatggactctgatagaacagacatcacagtgaaaccaacttttggtgatcgattgtcaaatgatcccaatgcgaatccatctcccaacaggcagcctttaccctggcagcttaagcaaggggcgcctgcaactgctccatcatattcaaggcttcgcgagcagcagtcgggcctggatcttgtagctgctctgaagggggttgggaaaaggagtcctggggatagtgatgtccgggataaagaagggaagtgaataattggtgctttgtagatggggaacgactattaagtgttaaatttgcaactatggtcggatcacgatccaaagttccagaggactcgcacacctaagtcttgcttgcacaacgttgttgctttgtagatgtatgtctgtagtagagttagtttagccacctctatggctcaatcactctgtatttcttttgcctcatgccggggctgtgaaatgtcatttcaggcgcattagcttctgttgtaaaattttactagtgtttatgaattatttatctgactaaagaggtgtttactttttaggaactaaaaaaaaaaaaaaaaaa

SEQ ID NO: 3005 - DNA, 625 bp, Zea mays
  Clone ID: MRT4577_102738C.1
tcgagttttttttttttttttttttttttttttttttttttttttttttttttttttttttttgtttttttttttttttttttttttttttttttttttttggttcttacctgggggatcaccatccctataactcttggaataagggggccaggacaaaaaggggcacgcccaagggaaaaaaccatcaatccacctgcccccccaactaaccaaccgggggggggcggggagggggccccgacggaacccctgaaccacggggggccgcccgggcggaacaccgagcgggcgcagttgaccgggggcccaccccccacgccccccgcccccccgagcccccacccccccccgaccaccccggcgcccacggggcccccgcccacaagggggccccccccccccaggaccgacaaccccccgcacgcgaaaaaaagcaggtggacccaccgaaggacccccctggggaacgggccccccaacttactgaaggaacccctggacgccccccaattgagggccccccagccgacgcccaccccggagaccaccaaccctggggcaggggtgggcccagggacccccgggaggcccggaccttgggctggggcccaggccccccccc

SEQ ID NO: 3006 - DNA, 1916 bp, Zea mays
  unsure (1)..(1916): unsure at all n locations
  Clone ID: MRT4577_102739C.1
ccatcctccatnccgcctncncggctcctccccacctggccaccactaccacctcccgtctcctcgcctccttccaaatccaccggttgccatccgtccgacgaggacggaaagggaccggcgtgagggaaacctagatgacccgttcctgggtcgggaccagagagccttccgggctgcgccttcgatcgccgccccgccgcctagggttcccgcgcctgtagatcgggtttgggggacgaggaaggggagtgccaagtaagggaacgatggggccgaggcgctccaagcgcgtttcgtgggccacaggggccaatctctgcaaggtaaggttttttatttcggaggattccccttctcaagctggattgagaccgcaggacaatctccaagcaaaaggctcatggttaatgcatgcagctggcccaagctcagatgattcgctgccacctggcttcgaatcattgcagccaacaagctgtctcaaaattgacatatcccaaatccatgttattaggtggagatgcccaccacaggtattgcataatcctgtttggcttgtagctgctggagaagaaagtgaggaggttgccttgcagaatgataggatatttggagcacttgaggctatatatccacggccgtcgaacattcctccaaacccatttgttactcctgatgtgaaagactcccaatatgatgattcccgaacccagttggttccgttgctcccagttgaagaggatgatgcctctgaccagttggaagaaccacctgttggtctatcaagtagttaccagcagtcagataagtacgactcagcaacattcagggtcccacaagcctcagacgctccctttaccactgcgcagcagcagcagccgaatggttccatcaacaccacaaggtctggtgcccccgttgagcctgacacagtggctgctgcatctgctgcttacactgcaataattcagagcaaccgaatgggaaatatgattgaccaagatctgctcgtcgaaatgctaagtgaccctgcccaacttgagaggttaatgaaagaatatggcgcgcttaagcacgaacagtcaactaacagttctgttgccccaatggtgcaaggtccaccaccccagatgacagctagtgttccggtctccttcccagatcacaccactacttttcacaacataaactctacactgccgcctccacctgttctgaatcgtctgcctcctccagctattccttcagcagttaccatcaatccaccagcaagttcaagtcaagcaattagctttccaactggccgaaccagcggcttgaactattaccagaccctgatccatcagcatggaggggagaggcaggagccacagccacttcaacagcatggaatgcactttccaatgcatcaccgcactgtcgcttcccagtctagcgccactgatattgtcagcagtggtactatgccagctagggatactaagcaaaggcctatgaagccttgcgcttacttcaacagcgccagaggatgccgcaatggtgtgaactgcacgtttctgcacgatgtgtctgccgcgaggaaagaacagccaaagggatccaaaagaattaagctagacagtagaatagctggtcggtattgaggaggctgctgccggttgattttttactgttctttggttcaaaatccttttcctcctttttttccttcaaaaaattattcagtaaatattgcgccccagctcctttcctttctcttagccaatttctatttgtttactagaagaacatgctcttagcccatttctctttgttgactaaaagaaaatgttttagaagaaagaaaaaaatatgccatgattaaatggagctctgtcgttattgaaccagttgaacacatgttaattggtggc

SEQ ID NO: 3007 - DNA, 770 bp, Zea mays
  Clone ID: MRT4577_10273C.1
ccggccggatcgtctgtgcccacaataataactccggtggattgctggcggcctcacattccttgcgtcccgcatctctcggccttggtctcctttgcacgtggttgtttggacggtacttacattcgcatatataatcacgggcttacccaatccttcccgcaaacccttgtgcgctgccctcccgcgattgcttattacttcggcttcacgatgacggaaccgtttcctccgctgaatggcggactgccgcacaatcctgcccctcaaagcgcacccaggcgccgaaggaaatcaagtgccctcggcgctgacgtccctggcgatgttgacgtcccgtccctggccacatatcgatctgtcacccctccgctgcacagcccagtgaccatggactcgaaatcagacaagtcgggacgccgctcaaaacgaaagacgacacgtcgatacctctcaaaggcaaagcgaatgtgcattcggcacacctggttgctccctctcgtcctcacccttaccattgtatcactatacctcgtctacccttactcgtccaatccgctgtcggcctgtctcttcctgtcatacccactcgcacgcgacgaccccctcatccccgcccacgtgcgagccgaccccaatgcgcccctacactatggcaaaggcggacgggatttcgctttcgtcggcctctacaccattgtcctgagctttacccgcgagttttgcatgcagcgtctcatccgccccattgcccttcactttggcatccg

SEQ ID NO: 3008 - DNA, 529 bp, Zea mays
  Clone ID: MRT4577_102740C.1
ggggataaagggaatttacgatataatccggctatgtttaagatccaatgatccatagaccagattttgcagccaactggacctcatctttcctatgagaatcacacccatggacatcaaacgtcgtctatgggatgaaggaaattttgaagcctacatggacctgttattattctttaaactttgcaggcacctggacctcatgaggataaatgtatgtatatttgtccacatgctagagcccggccagctacgtatattcgtatgtacactgaagcgctgcaagatgttgctccgtagcacgcagcgttggaagcttcactctctgagggtgatgagcttgagctccttgtgaagcgccatcgcctttattattattaggtgcagagaacagtatgctggaacaagctccgtcctcctcggcttccagttccagccggtagagttgctggccggcggcgaaattgcccagcagctggtacgagctcgccgagccgtccatggttaagcacatctcgtcggtgcatgc

SEQ ID NO: 3009 - DNA, 278 bp, Zea mays
  unsure (1)..(278): unsure at all n locations
  Clone ID: MRT4577_102741C.1
ggaaaagggggccgacccacgcgttcgattttaaccaacaagcatcttatttagaggtatacagnccccacactcgtgcaggggaggcggtcaattatattttacattcttatacaaccagctcactctcatgtgttgcataacgcgaccaactgtacaaacatactcacaaactcatataactgcccttctacccaatacctttcatcaaggagccgttaatatgagaaaacccaacccatcaaccttacaagcattaacacagcaattaataacaa

SEQ ID NO: 3010 - DNA, 265 bp, Zea mays
  Clone ID: MRT4577_102742C.1
ggtgtataaagacagaaaaagcatcattgcctgcttccagaatgggccggattattcttatataagtcgcatgatacgtggagcttcagttaagcaaccatgcacggaacctgatatacagtatggcccatcacgtgaaacctaataaggtggaaccccttcttcgcattaccggaggccaaataaggaggtaaactcaaccgacaaggggctggataccccttcctgagggccaacttggagcaagactcccaaacccttttta

SEQ ID NO: 3011 - DNA, 121 bp, Zea mays
  Clone ID: MRT4577_102743C.1
acgcccgcgggtactgcaagaacggcagcgcttgccggttcgtgcacggcggcctcaccgacgacgccaccgctaagatggacaccgccaccttggagcagcagtgccaggacatcctgct

SEQ ID NO: 3012 - DNA, 183 bp, Zea mays
  Clone ID: MRT4577_102744C.1
gctagcctctctcatcatggtccatatatcctatcctctcagcatataagttcgcccacttagccaatcactcgataggctgctagccgcggacctgctcactctgacgggtagcggaggtcagccggcaaggctcgctttgacgatcacggtgcaaggagcatccgtgctgtacttgacgac

SEQ ID NO: 3013 - DNA, 718 bp, Zea mays
  Clone ID: MRT4577_102745C.1
gaaagaagttcttctttatagaaaatgatttctagattgacacctcacatgcatatgatccggacaggaaacaggcgagcttgagagctgtagacattcagcaaagataacgccacacaaactgtacaaggcataatgacagtccctcttcatggtcggagaaatttggggcaatgactacaacctttacctacctctcatctctagagtgccgattgaaaagatccgctcattcacaccaagtgtcattgccaaagtttcttcaacaatcaccgtgaacatctatgtcatttcatatgttgctgctgctgctgatctgacatattatatagatagtaatgtaactgattggtgtttgccggaattgattacgttaggagccaagactctggtagttcctgggaacctcccaactaggtgtgccaaaatatatgttgatattcaagagtgatgacagagaagattatgagccggaaacagactgcctcatgtggatgaacgaattttcagagtactacaacaagcttctcttggaggaactagataaactgctcaagatgaatcctgcagtgactattatctatgctgactattatggagctgcaatggaaattttccatttctttgaaccatttggtgctcgttgctgatgtagtattttttattatcaatatccatgtgtggtgaacatgttttgtttagtaatttagtttcttta

SEQ ID NO: 3014 - DNA, 581 bp, Zea mays
  Clone ID: MRT4577_102746C.1
ccccgcgtccgccccgcgtccgcggccgcgtgggcaagacaaagacacacagccaggcagcaaacgacccgcggcgacgcaagaagagaagccagcagtcgtctggatccatcgattgacatagccatggcggcggcagcggagggcaagagccggaggttcgcgctggcctgcggggtgctgagccagtacgtgaaggcctccacggcggcgccgctcaccatcttctacggcggcagggtggtcgtgttcgacgacttcccggcggagaaggcggccgaggtcatgcgcctcgcagccggcgccgagcgcccggcggccccggccccggcgccgcgcgacgacctgcccatcgcccggaaggcgtcgctgcagcggttcctggccaagcgcaaggaccgcctcgtggagcgcgccccctacgcccgcccatccccatccgaggaggcggagaaggcgaagccggcctcctggctcgggctcggcggcacggacgccgagcgcctcaacatcgcgctgtgatttggatctcgcttgctacccacctggatcgaccgggggcgatttgattggctgggttc

SEQ ID NO: 3015 - DNA, 442 bp, Zea mays
  Clone ID: MRT4577_102747C.1
aaaggacggggcacacccttgattatggggggggggaaaggacgggccgattcggaagaagatcaccttggatcgccgccgccgcctgggtttttacagccaaaaaaaaccctttccctgtttacgaacaacccatttttaggggggccacgatacataggcatagggctaattcacccactcaagggctgggcacctccttttggggggccttgggggccgcaggccgcgcctgagctggtggaacagggtcgccctcgcctcctgggggggattctcccgcgcccccttgggtagctttacccatgccatcctgaataccagggggggtaaaatttcctcctccttaaaaaacaggttggccccaagcgggcgcccttggaaattggtccttgatccagggctcattttcccaaatggccagagatgggggccaactagt

SEQ ID NO: 3016 - DNA, 842 bp, Zea mays
  Clone ID: MRT4577_102748C.1
ccggccgggatccattcccacagcaccaagcaagagcaaagagcaacacaagccaaggcagcaaacgacccgcggcgacgcaagaagagaagccagcagtcgtctggatccatcgattgacatggccatggcggcggcagcggagggcaagagccggaggttcgcgctggcctgcggggtgctgagccagtacgtgaaggccgagcaggccgccgcgagggggcaggagacggccgggtccgcctccacggcggcgccgctcaccatcttctacggcggcagggtggtcgtgttcgacgacttcccggcggagaaggcggccgaggtcatgcgcctcgcagctggcgccgagcgcccggcggccccggccccggcgccggcgccgcgcgacgacctgcccatcgcccggaaggcgtcgctgcagcggttcctggccaagcgcaaggaccgcctcgtggagcgcgccccctacgcccgcccgtccccatccgaggaggcggagaaggcgaagccggcctcctctggctcgggctcggcggcacggacgccgagcgcctcaacatcgcgctgtgatttggatctcgcttgctacccacccggatcgaccgggggcgatttgattggctgggttcctggcttcctttgggtcttgctggattggggttggtgtggagatcggagacggaggattgtagaaacgtattcttgttttttttctctctcccttacgagagagtttggctgttaattgattcgataatagaaagatggaggatgtacaattcgtgtcaaaaaaaaaaaaaaaaaaaaaaaaaaaagtactctgcgttgttaccactgct

SEQ ID NO: 3017 - DNA, 225 bp, Zea mays
  Clone ID: MRT4577_102749C.1
aatgggccgggataatcagttgatgtttgtggcctacacgctgaactctccttttgtttttatcagggaaaaagaaacgtcaaaacgcgccctctttacctataaccgtacccaaaaaattcctgctaaagaaaattctcacaaaaaaggaggcgcggctgtggtcatacctcgacataagaaacattgtgggggcgctcaaagccggctgcgtggggcaattcc

SEQ ID NO: 3018 - DNA, 872 bp, Zea mays
  unsure (1)..(872): unsure at all n locations
  Clone ID: MRT4577_10274C.1
nnnnnnnnnnnnnnnnnnnnnnnnnnngattatggccagataccgtgnnatattttgggtcgtcatacctggcatgcanaatttactttttgcattattttctccagatataggcccttaggtgagcggacgcgtgggattgtgcaactccatgatttgaagtattcctggcatgatcttgtatcaagggggaataaaaatgctttgaccattctgagcctatgggcaccagtcttagctatatacctgatggacatccacatttggtacactcttttatcagcacttgttggtggcgttatgggtgccagagatcgccttggagagattcggtcaattgaaatgcttcataaacgttttgagagctttccagaagcgtttgctaaaaacctttccgcttcaaggatacctagcagacgcattgatcgtgtaaatgaatcagaaattacaactaagacgtatgcctcaatattttccccattttggaatgaaattatcaagagcttgcgtgaagaggactatatcagcaacagggaaatggatttgcttatgatgccaagtaactccggaaatttaatgcttgtacagtggccactgtttctattgactagcaagatcatgtcggcaaatgacctatggcttctgactgcaaagactcgcagtatgagctatgggatagaatatcaaaagatgaatacatggcttatgccgccaaagaatgttactacagcactgaaaaaattcttcactctttagttgatgctgacaggcatcactgggttgtaaggcttttccgagatcttaatgacagtataacacacgggtcactcctagtgactataaatctgaggaagctgcagatagtacagtct

SEQ ID NO: 3019 - DNA, 1297 bp, Zea mays
  Clone ID: MRT4577_102750C.1
gcagtcagcacgtctccgtccccgacgatgccggggagcaatgccaatggagggcgcagcctgtacggacacggccgaccggccatcttcatccccctttccttgccgccccggccgggaccgccccgcgctacggccccagtcgcgctcctcaccggccggcaccaccccgtccgccctcgccttttgcctgccgagatttaggcctggcattctagcaatgcagaagaagtgatcttataatcataaaagataacaatggggatatccaaggtgaccggcattgctgcgacagcttttcttgtcacatctgttggtctgtaccagctcggcatgagaattgttgtgcttcctttcctagccaccagtattgttgcttctgttgtcaccgttgcatcccatgatgccatcaacctaccgtggatcctggggaagaactcagtgggaaggtttcctctttggtcagttatactgtttggtcctttcttgacgcttgctcggacatatgcaatggttaagagatacatgaggaaagagtccgtgtatgacaagattgtggagggcctatatcttggaggatggccctttctcttgaaacatttgccccctggaaacccatctgtcatagactgcacttgtgagcttccaagaagttccttcgttccagcagacgagtatctttgtcttgcaacttgggataccagagctccaacaccataccaaattgaaaaagctgcacgttgggcttgtggaaagagatctgaggggaagccggtttatgtccattgcgcatttgtatattaattgtcatgtttattcttcgtgatggacacattaggtcatggaagaagtgcttgtgtcgtgtgtgcaattctagtagcgctgggcattgctgagaactggaaagaggctgagaacatcatccgtgaaagaagaaagataaaaatgaacgcccttcacaggaaaaccttggaagagtggtccaaacaacgggattctcagaaaaaggctaagtagttgtaagtgtaacattttccttagagataaacttgtttgtggtgttaaagcttgtttcaaacatcatacaatggcatatctacttaggccaagtgcaatgtctgtgaaattattattattaaaaaaaaaaaaaaaaaacatcatacaatggcatatctacagtggccaagtgtaatgtctgtgaaattattattattattttctcggtgtttctacctttaaacatatttgatttatatccagatttggtactttttttgtccaaaaaaaaaaaaaaaaa

SEQ ID NO: 3020 - DNA, 527 bp, Zea mays
  Clone ID: MRT4577_102751C.1
cctccgagctgctcacccctactttctttccccatcactccaccacatcgtctgaagatggaggaagcacagaccaaggcagcaacagctcagcgacgatccagacctccccctatccatctggtggtgccgtgcagagccaccgagcgggccgcatcaaggcgtctggtggagtcgcgccgcggtggctgaggagctgtgcccagtcgctgtcggtcccaagccgccaggggatgcgccgtgccccttcttcaccgaggggcccgtttccgccgcatacgccgtcctcgacgttgtcttctccatcgacctcgacgggctgtgagccgcatgccccaccaggtccctccctaccttctactacttttgattttttccggcttccctaaggattgtcgacgcgcaggcaacgtcgagcatgtgttgaggcaagatactggctgatatggttctcgctccgatgagcatggatccgcttactcagtagcatggatctgcgcgatatggtggaggatatggcatctccc

SEQ ID NO: 3021 - DNA, 512 bp, Zea mays
  Clone ID: MRT4577_102753C.1
ccacaaaagccaagggatttttcgatccccaccacggccaaaattttttgggcggcgggcccaaaaataatttttccccaaccttggttctagcttgacctactaccgactcccactccccaagggatttcgggttttggatgggggttaaattctaacaggtttccccacacaaaaaaaaaaataacgggactttttccatgcgggaaaagggcccccaatttttcgtaaaaatcctcccccccttttctaaacataaaaattctaccttccaaggcccttaacggtgtttggagcaaaaagggccaaaaaggggtggaagggtttttaaacgggcctccctggtaaaaaattttttaaaaaaacccccttgttctcattttttttggaacccccgaaaaaggccctgattttaaccaaaggggggggggggaacccctttatttaattggaatgcccggacctgggatcattaccccaccctggaaagaatttggaaatggcccctcccc

SEQ ID NO: 3022 - DNA, 319 bp, Zea mays
  Clone ID: MRT4577_102754C.1
gttgttgttctgacagcgcacgagctcctcctccgccgccgtgcgaagaacgccgatgcgacgacgctgctgaacatcgtccgaaggtgactgggatcgccaagagaagagagacgaaccgtcgtcggagcacggctcggttttttatctgcgctatggtggtggtgttcgcggcggcgctgttgctggcttgctgggagcaggaccaccaccccagtaacgagctgtacttcgtagtacctacttaggcctggttcgtttctgctggattggtgggtccgaacgatttctaactgaattactttgttaatgtatataa

SEQ ID NO: 3023 - DNA, 279 bp, Zea mays
  unsure (1)..(279): unsure at all n locations
  Clone ID: MRT4577_102755C.1
aagcangcagatctaagctccaggcagcgtcgcgacagaatggagctaatgagtagccccaacaacaccaggggcttccttgaaggccgcaaacccaacggagttgccgggccaggcaaggagcccgcgcccaaacttcaggaaaacgggaacaaacccgcaggccgcaagagccgcggcgttaagaaggctgagcataaaccccgggaaaccaaaaggaagggtgaaaagcacaaaccaggcggggggggccaaaagggacggaccgttccggggggg

SEQ ID NO: 3024 - DNA, 867 bp, Zea mays
  Clone ID: MRT4577_102756C.1
ggggggggggtggttttttaggtcaatcaatgtgcgctttagaagttagaacaagcccctcaatctgaatgtagccatcgagcaaacaaggttccacaagttcttaagaaagaatacatgctgcatcatcgagcatatgtttaatagtttaagctaagagtgtagatcagcaatgaaaatatccattctgcagattctaaaatagcttgctcgccaattccttaaactttctagttactagactgtacctatacttgaatccgtatgcagcaggactgccggagttcagcgcatcagtactaattccattcttctcaaacaactcaaccacgtcctcccagtagatgatgcttgttgtgtcgttgcgcacggccagcagcagagacttgtaggtggcttcatcaggtacaagctgatcatgtgattccatctggcgacacaacaagaacgccccttggaggtccctggtcttgcaatacccgtcaatgacaatgttgtacatctctgtcgtcgggaccaaccctgcctccgcaaatgtccgcagcaccttctctgcgagtgaaactttctgaatcctgcaaagctcctcgagaaaggtagtacaaacattacccgctgcagcagcaccgttcttcgcagattcctcaatgatggccagtaacttatcttcgttggttctagataggaactcaagcaggctgccatgagcgatcttatgtaaagctgtaacgtctcccagccattcagctaagcagtgttctgccatcagcaaatggcaggtgtattcgtgtggcttgaagccatcccgcaccatctgatccagcagggcgagcgcagcctccagatctccattctcgttcttcctcg

SEQ ID NO: 3025 - DNA, 649 bp, Zea mays
  Clone ID: MRT4577_102757C.1
ccccctcgagtttttttttttttttttttatacaaacatgaagctattattatatatatagaaagagcagtccttgatacatcacagtaatacctgagattaaactggctagaagaacggcctcatctagacaggaaaccaaaaatctagtacataggcttcttcatcaggatactaaactcagttacaaaggggattcatcctaaaggacaccaccacctcttccaacgcgcaggggtgcgagaacaaaaaggctacggctctgttcttgatttcgaacgaacacaaccacagaacgggacccgcttcttctttcccttctgcccgcctccacggtccttccttccatacaggtagtccctcaaaagcacacgagtgcgcttatcagagactttgagccttctggactcgggctcctcctcaagcttcagcaagacgtactggatcttctggagctccagttccaaccttgccacgttttccgaccctctctgcacctgctccgagatcttcctcctgctggaataccctcctcgctcggtgctcgtattatctgacaatgcgggatagttctcaaccttcctggtcaacttggtggtggaattgatctggtccaagacaagactttggtactcatgcgcgctacact

SEQ ID NO: 3026 - DNA, 1088 bp, Zea mays
  Clone ID: MRT4577_102758C.1
cggccgcgtgggttttttttttttttttttttttttttttttgaacaaaagaaaactgtgtgccattcatataatgtcacgcttccagtatcatatcaataacatgcagtgtatcagatataagatgcataatttgatttcgtcctaacaatcagatcgcgtataaagcgaaagaagtcacaaagtcagatccaagacgaaagaactcgtctctcagatgcgcggtatcacgtcaccactgcgctgctctagaaatcgaagccaccgccgtcgtcgaacccggcgtcgtagccggcatcatacgccgacgaatccgagatcatgtccccgaccagaaggcccccgacggcgcctcccagcagcccggcgccgagccccatcccgaagttgttcttcttcttggcctgctgctgatacccgtacccggcggtctgcggcggctggtacccgtacccggcctgtggcggcggcgggtacccgtacgcggcggcctgcggtggcgggtacccgtaaccgccgtactgcgacggaggagcggcgtagggcgccgccgtgctgggaccggcggcagggtaggccgtcaccggcttgcccgccttggccggcttgcctgccgcaggcgggtacgcgccgcccggaggtgggtacccgtcggccttggctgccggcgggtatgcggcaggaggcgggtacgcgtcggccttgcctgaaggaggcgggtacgtgtcggccttgccggacggtggctggtacgcggaggtaggcgggtacgcagcggcctgggtgtaggcggcctgggcgggggcgtagccgttggcgcctgtcgtctgggtgacctcgccgagcctgtacgacaggttgaggactccctggggcttgcccgaggagatcttgcggacctggtaggcgacaaacttggcggggacggggccgtcgggggcgccggagaggagctcggagagcgggatgtggacctcaccgacgtcgcggtcgccgagggcgcgctcggcgcggaggaggatgtggagggaggaggaggcgccggttgccgggacggcgaagcggagcgtggcgttccaggtagggtt

SEQ ID NO: 3027 - DNA, 233 bp, Zea mays
  Clone ID: MRT4577_102759C.1
cgtcctgcacgctcgtagcttggtccttaggcgccgccttttttttttttttacaaaaaccaccctttgccaaactgttctcttagtgtcacgccaactatactcgcttgcctatcatgcaacgtgaacaaagaccacatgctctcgcacatcaatatccactcgtcacccttccgtccgaaagacatgaattgcatagcatagccgtggcttagttgccgggacaacgaccg

SEQ ID NO: 3028 - DNA, 276 bp, Zea mays
  Clone ID: MRT4577_10275C.1
agacttcatttttcctaacaggattagacagtcaaggagtggcttactacatgtgggagcttttggtatgtgacatgcgggctgggcagctgttagagtccaacgtggggcagcacagagagggggccacctccccaggccgtggctgcccacaaccccaattagctgaattcgcgtgtggcagagggaggaaaaggaggcaaacgtgggctgggcaatggcctcacataggaaacagggtcttcctggagatttggtgatcgagatgtcaagcag

SEQ ID NO: 3029 - DNA, 363 bp, Zea mays
  Clone ID: MRT4577_102760C.1
gcaaaatcctaccctcggtaacagccacgtttatcgagtgtctctagactgacactcggtaaactatgttttgacgagtgtcaaaataagacactccgtaaaacattctttgccgagtgcctgccgtggaacactcgacaacgtatttaaaaaaaataaaacaatctttgtcaagtgcttatcaaagggcactcgacaaagacagctttgccgagtgtcagatcgaggacactcggcaaagtatatttttaaattaaaaaataactttgccgactgctagatcgcgacactcgacaaagtctgtttacatagtcttaactggccttcttcttctcttcatttttctttctcttcttcacgccg

SEQ ID NO: 3030 - DNA, 769 bp, Zea mays
  Clone ID: MRT4577_102761C.1
acccgtacccggcggtctgcggcggctggtacccgtacccggcctgtggcggcggcgggtacccgtacgcggcggcctgcggtggcgggtacccgtaaccgccgtactgcgacggaggagcggcgtagggcgccgccgtgctgggaccggcggctgggtaggccgtcaccggctcgcccgccttggccggcttgcttgccgcgggcgggtacgcgccgcccggaggtgggtacccgtcggccttggctgccggcgggtatgcggcaggaggcgggtacgcgtcggccttgcctgaaggaggcgggtaggcgccgccgggaggtgggtacgcgtgggccttggttgccggcgggtatgcggcaggaggcgggtacgcgtcggccttgcctgaaggaggcgggtacgcgtcggccttgccggacggtggcgggtacgcggaggcaggcgggtacgcagcggcctgggtgtaggcggcctgggcgggggcgtagccgttggcgcctgtcgtctgggtgacctcgccgagcctgtacgacaggttgaggactccctggggcttgcccgaggagatcttgcggacctggtaggcgacgaacttggcggggacgggaccgtcgggggcgccggagaggagctcggagagcgggatgtggacctcgcccacgtcacggtcgccgagggcgcgctcggcgcggaggaggatgtggagggaggaggcggcgccggttgccgggacggcgaagcggagcgtggcgtcccaggtagggtt

SEQ ID NO: 3031 - DNA, 1471 bp, Zea mays
  Clone ID: MRT4577_102762C.1
gatgaaacgatcgccagattgataaaattccgaaagttggcacagatctgaaaagaagaaaactgcgtgcaattcatacagtataatgtcacgctttcagcatcaataccatatatgtatgcataatcttgattgatttcgttccgacaattacatagattgcgtacagaaggaaacaaatcacaaaaggcaaatccaaaacgggaacctctccgtctctgatgcgcggcgtggcgtcaccacccatgccaccggagcgcgctagaaatcgaagccgccgccgtcgtcgaacccggcgtcgtagccggcgtcgtacgccgacgagtccgagatcatgtcgccgatcaggaggcccccgacggcgcctccgagcagcccggccccgagccccatcccgaagttgttcttcttcttctgcggcctcacggcctgctgctggtacccgtacccggcggcctgcggcggcgggtagccgtacccgtacccggcctgctgcgggggcgggtagccgtacccggcggcctgctgcggcgggtacccgtagccgccgtactgcggcggaggagcagcgtagggcgccgccgtgctgggaccggccgaagggtaggccgtcaccggttcgccccccttggctggcttgcctgccgcgggtgggtagccggatgagggcgggtaagcagcgtcggccttgccgccggcgggcgggtaggcgccgtatggaggtgggtacgcgtcggccttggctgccggcgggtatgcggtggcagggggcgcgtacgcgtcggccttgcccgaaggaggcgggtacgcggcgggaggcgcgtaggcgtcagccttgcctgaaggaggcgggtacgcggcggtcggtggaggatgggcgtaggcggactgggcggcggaagcgggggcgtagccgttggcgacctcgccgagcttgtacgagaggttgaggactccctggggcttgccggaggagatcttgcgcacctggtaggcgacgaacttggcggggacagggccgtcgggggcgccggagaggagctcggacagcgggatgtggacctcgccgacatcgcggtcgccgagggcgcgctcggcgcggaggaggacgtggagggagccggcgccagtggctgggacggcgaagcggagcgtggcgttccaggtcgggttgcggccgccggtgcggtcggcctggacccgctgccgcgaccgggggtcgccggagagcgacaccacggcgtagacctccatcctggacatcaggttcacgtccttgaggtccttgcccgagatcagcgtcagctccagcgaccgcgtcgccatggccgggatcttttttccttgtttgatcggcgatgaaattggttggttctctccctctcctagatcgatcggtatgtgcgctgctaccgctggatcgacgactttgagaatttgagatttttttgtcttttttgataaggccggc

SEQ ID NO: 3032 - DNA, 330 bp, Zea mays
  Clone ID: MRT4577_102763C.1
aagaggactctccgactaaagcatctgcgggtggctcgatgaatgtcaacctcttcataaacgaagatacctaaggcggtgccgacagacgtaatgacctggacatgaatcctggctggcaccatttgtccctgtgccttaatttcatgcaagctttcctcacacaaaagtttatgcgccacaccgccaaaaacgtgcgacgtgccaatcgcactacaggatacatactgccattaactctgaagcaacttcttacctcttcgacgctcacacataaactcatgacagaggccctcattttaacacctcctgaatggcaaaacacgtatg

SEQ ID NO: 3033 - DNA, 167 bp, Zea mays
  unsure (1)..(167): unsure at all n locations
  Clone ID: MRT4577_102764C.1
cagctagctacatggactcctgcttttactttnctcatacagccactcctgcactgtccgccttcttctcctactcccctgcctgccaccaactgccaagtttccaagtgcatataccctccctgcctcacaaacaactccaccctttactaaataccatcatgttc

SEQ ID NO: 3034 - DNA, 351 bp, Zea mays
  unsure (1)..(351): unsure at all n locations
  Clone ID: MRT4577_102765C.1
tcatccctaaattcggctctagcatctagcaacttcccatgcacaatgntctacagaaccggccattttatggatttgtctgaagttactcaacatcttaaattcttcaccttcacctctgatcgatggacctagttcatggttcacaagcccgaagaggtgttcctgctcagccttctccccacgaccctgagtccactgagatggcttatcctcaagctgtccgaagtctactacaagaggaacatccctattcataagcacgggatggctccggactgcaccttctcacacgggaacctgagctctcatctatgcatactccccgagggattctacaaccagttcaac

SEQ ID NO: 3035 - DNA, 218 bp, Zea mays
  Clone ID: MRT4577_102766C.1
gatcaggatcagcgcagttgcagccgaacagctgctacagccatggcaggctgagccccttctgcgagcgcatccagttcgtccagtcgtcatcgtagtcgagctccacatgcacaggtttatacatccagaggctcaagttgggtaatcgacagcaggtgcacaaaccacatgacatgtgagaagaagatgttctcctcctacgagaaaaaccaaga

SEQ ID NO: 3036 - DNA, 369 bp, Zea mays
  Clone ID: MRT4577_102767C.1
gtgtggtgcgtgctcgcatgtgttgccgatgcgcgtgcaggcggagttcatcgaggcgctggggcccgatttgggcctcggcatgacaccgagcaggctcgacgacggcgggcctggtctaagccgaggaggaagctgagtttgacggcccaccgatggtccacctgtcttcagacatccttcgtacggagcttaatttgctcaaggacgacgcgctccctgccggtggcgactagtctgttggcattatctggcttgaagaccaagacagcgaggatggccgtctcttgggaggaagagataccggtgtttacccagctgacatgaacgcgttgtacgctgactgccttggtggaaacgtgaccgagc

SEQ ID NO: 3037 - DNA, 626 bp, Zea mays
  Clone ID: MRT4577_102768C.1
tcctgtatagcgtacgaccgtcggcctttttttttaacgaattcatcccctttgaattaatgattctgccaagtaaacatatacccgttggtttttacagtaacaagtcaacaagaagaccaaaactttttttaagtcatcgagacaaagactaggatgtgcaaaatttcttctgtagtttcaagggtgtgcaaaattattgatcagtatctacgctactacactctcctttccttcaattacagggactacaccaagtaagtttaccggagcagcttcagatccagccaagacataagcttagacgatggtccaaaacctgacacgggcgaaactggagcctgctccatggcaaaactggtattgttatccttgactgaaatggacactgtccatgaaaaagcctgtcgtgtcttgactgttgggcactctgatcttccaacttacacctagccctgtcagagtaactagcctaccatgccttcacaaaatgggagggcttccatcttatcaacaaaactaggtcatgaggtgtgcctttgatgaagagcgtaccggacgaccgggtagaaggaaatgacaatcccaaccgatggaccagcgcgggcaacacgtgggccaacgcc

SEQ ID NO: 3038 - DNA, 1710 bp, Zea mays
  unsure (1)..(1710): unsure at all n locations
  Clone ID: MRT4577_102769C.1
tccctcggtcggtccccaaccatagcggctgtcaaatccccagatcaaatgcttattcggtgggtgcagagataaaactcccgggccggggctcccggccactagaggtcgggcaacattccccagtttggaaggacacgagtggatccaatcgactgcactccaccgccaccatctccaccagcatcgcccacaccgctgtcatccgctccgtcgctgtgccatcgtcgtccactgtgccgccatccgctccaccgtcgtgccatcgtcgtccactgagccgccattggaagagtgctaagtggaagcaacatatgaagctcacatggagaaggaaaatggaacgacagtccacatgaagcttgtaaaaaaggagttaaactcataatactttctagtgtcaaagttcaacatgatacatggttgtgggtttttcataaaaaaaaaaaaaaaaaaaaaaaaaaaaaaaaaaaaaaaaaaaaaaaaaaaaaaaaaaaaaaaaaaaaaaaaaaaaaaaaaaaaaaaaaaaaaaaaaaaaaaaaaaaaaatggcagcatctgatctggggttttttttgctccccccccccgggggggcgttttaaccgccggccggaaacgctcccagccgcctctcccgacgccatccccaggggcgccttctccgacgccgtctccgctccgccgcattctccgacgccgtctccgctccgccgtcttctccgacgtcgtcaccttcccctcgacaagaactgcattggtgcaatcgacggcacacatatacccatcaccatagcagaacatagggctgctccatatagaaacaggaaaggaactctttcacacaatgttatggtagcctgcgactttgaccttaatttcacatttgtttcatgtggatgggaggggtcagcctcaaatgcaggggtgcttcgatctgctattagcaaaggatttagtgtgccagaaggaaagttttatctagtagatggtggttatgcaaatacatcatccttcattgcaccatatagaggggttcgataccatctcaacgagtttaggaggcgtcgttcatcacaaagtggttatgcgaactacagagagttgttcaaccaccgccatgcaattctccgtaaccatatagagagggccatcagtgttctaaaaaaaaggttcccgattctaaaagtaggcacatttcatcccatagagaaccaaattaagatcgcagctgcaactgttgcatttcacaacataattagagggcaaaatggagacgaaagatggcttgacaaccaaccggattacatctctccaagtcaatatgttgatgttccagagggagatatcaactatctcaatgacacagaatcaagtgatggaagtgctctaagagatcagatcgcacttcagatgtgggctgcctacaatagctagatgttataataggatgcctacaatagctagttgtgggctgcctactattattgcttagagcacaataactatctttatggtttgtagtttgtcatgtaggtagttgccaagttatgaacttaaagttgcttagttatgtactattatttccacaatttcagtataaatgttagtgcattccctcattttgtttctgaaaactgttagtgtaccctataaatgttagtatatgtttgtataaatttagtnnnnnnnnnnnnnnnnnnnnnnnntg

SEQ ID NO: 3039 - DNA, 409 bp, Zea mays
  Clone ID: MRT4577_10276C.1
ggggaaagggggaaacacttcttggcctcagcagacatgaatagggcaaaaacagaattacccgacggggctaaaattgaaaaaacaggggggggccccccaccagtatcctgggatcgcaaaaggagcatcggtgaaaaacaactaaaacattccaacctcaaaaggaggtcatggcctcaggcagaaacaactgggggggggggttcaggaggggcattggcaccgacgaggtcacgcctgggggactccctcgccccggccttgggaacaattttgataacaaaggtctggggggggacaaccaatggcaggcgaatttccttggtgcacttggaaaaaaggactaaggcttcctcaaaagaaatgtccggggggggcaacttggccatggggagagaagggagtg

SEQ ID NO: 3040 - DNA, 258 bp, Zea mays
  Clone ID: MRT4577_102770C.1
ctgcttcgtgctccagtccaagcaagcgaagagcacatcctggagatcactccctgcccgggccgccatagacacagatgactcggtggtcgacccgctccgggagttcgccatagacagcatccgactcggcaagcgctgccacaagccggaccgcatggagtttaccaaggtctccgggcgatctgtaatcggcttcgtcgtcatgggattcgtcgacttctttgggaggctcatggggatccctatcaacaacat

SEQ ID NO: 3041 - DNA, 449 bp, Zea mays
  Clone ID: MRT4577_102771C.1
ccctcgagttttttcttttttttttttttttttttttttttttttttaaattgtattcatttttttttttttctcctttttttgaaaaaagaggagtgaacatgtcacccaaaaatagcaagtgagggggccccacaagccgggaaaggagagattaggaagaaggcacataggggaagaaagggtatatttttaaaagggcaaatgggggaaataagagataattaggcattaggccttctaacaaacataaaaggaaaagcgccttaaatcgacacaaaaggcttaggggggaggtgactcgaactccaaaaatgatttgtggcaactgaaggctcagcaccttgaaacagtggtttccggctgaaaggacccaccctccaaaaaaccattaggggaatttttgggttcctccccacaaaccctgacttcattatgagggagggaag

SEQ ID NO: 3042 - DNA, 1067 bp, Zea mays
  Clone ID: MRT4577_102772C.1
tgtgccacccacgcgtccggcaatggtttgtaatgcagatttggacagctgttcttctgaaattctggagctcttcaataaagctgaggataatattgagaaaggtatagagatgtgggaggaaatggaagaacagcgtctgaagaatcgatctaaacctagccaggagaatattgtgctagagaagatgggcttggaggagtatatcaaggatgtatccactgatgatgcggctgaacaggcttccaatttaaggtctcagataaacattttatggggtatgctcctttatgaacgttcagttgtggaatttaaattaggtctcccaatgtgggaggattgtttgatggctgctattgaaaagttcaaacttgggggagcttctgccacagatattgctgtgctggtgaaaaaccactgtgccaatgaaactgctcaagatggtttgggcttcaagattgatgaaattgttcaagcctggaatgaaatgtatgacattaaacggtggctgcgtggtgttccatcatttcgccttgagccattatttaggcgaagagttccacaattgcatactgcacttgaacatatatagtactcatgaagttgttctacatcatattggatttcaatgcttttttatcagtgacacttttctctttttttggtcaatttctgcatgggatacactacatggatttgttatattgcattttttacacctgaaagagtctgcttcctggttgtgaagctattcatacaagcctattcttttcacaaggctggtagccctctgcggtttgcatactctagttcttgttttggtcaggtttgctatgtaactcacaggaagctgtgcttttgttattgaattagttattcatatgattatgacatggtagtccattgttgggggatgtcatgggtggcaccctccttttcctttgtggtattttatctgttctgcaatgcgcaaactcagttaggcttgtactgcagttacatttagaattcgttgttttcttaaaaaaaaaaaaaaaaaaaaaaaaaaaaaaaaaaaaaaaaaaaaa

SEQ ID NO: 3043 - DNA, 292 bp, Zea mays
  unsure (1)..(292): unsure at all n locations
  Clone ID: MRT4577_102773C.1
ttttgttttttttttttgtgttttttcggaggtgtgttcctccctggtntcttcatcttttctctgcttttgtccacctctctacatctgttatttgccgaccaaaaaaagtttactcctttttgnnngnnggnnngcagttgaaggggggggaggatctttttttcngctgncnggtcccaagggggggggggaggaaggccggtncntgcacgaactcaacaccnggcgcntgcttggcctgggtgccngcccgtccttgggtgngccggcttgctcggaagggtacacc

SEQ ID NO: 3044 - DNA, 300 bp, Zea mays
  Clone ID: MRT4577_102774C.1
cggctcgagctctgctcaccaaacaacattatcagtagaagttagtttttctgattggatgagagcaaggcctgaactgtacagcattcttcgaaggtgagatatggcaacttgactgtacaaatgtcagcagtatatacagcttgtaagagtgtatgcagcccaaataatgtttccttcctgagattaattcttgaaaaatcaaaaaaaaaaaaaaaaaaaacaaagaaaaaaaaacgataaaaaaaacaacccgctaaaaaagggcggggggctccgtatcaattgtactcccccccc

SEQ ID NO: 3045 - DNA, 413 bp, Zea mays
  Clone ID: MRT4577_102775C.1
ctgtttttagactggtcccctaataattatatatgaatggtgcaggacctgtttggtaggtgtgagagggaagtttttaatagccagtagcttcaaatttcctacaagggggcagattgtttctgttaactcaatctaactcaaaattcgaaataacactttggcctaaattaatcaagttttgtgaatcaaccaattcgagcataggtcaagggatcaagatttaagcaaatgtttaatcgtatcgagttctatatacttattaagcacttacctcatatatgaaggttccaccaggtactcaaagtggagtggaaggagggccatggtattttttttccttaaaacttcttaagtagtgttgcaaactcagggcctcttggctctggactaagcacaaaagccttaaattg

SEQ ID NO: 3046 - DNA, 406 bp, Zea mays
  Clone ID: MRT4577_102776C.1
atgtgttggaggttcatcttgacggtgtttatctcctaacgaccacagccattctaatgaatatattacataaaacacaggtggtccattaaacatgcatgcatacattccacacaaaaaataatggtcacaacttattacacaagagataaagcaatccaaaagggtcaggaacgcatgtagactgaccgaaagcaggcacacaagcgtagcggcaatataatgggggtaatatatgggggagagcactagctagagccatgcatgcatgggccacagcaggccatggcctttatttcccgtcaccgccactggacacgttgtggatcacaaaagcaccgacccagttagctttcagtcaagcacgcgtgttccgagcaggattaacgcatcgtccttcacctcc

SEQ ID NO: 3047 - DNA, 459 bp, Zea mays
  Clone ID: MRT4577_102777C.1
acattgaacccgataaatacatccatcgagctttgtctaataacattatttgatgttgacctgtgttgtatttgggagaacagggtatttcttgtacttcagcttatgtctaccataagattcatcacacagctgatgaattacaaattgtgtgagacaaattttgaagaaagctacctctggttgtcgcgatctctgttactgtcatcatcacatcaatgagattgatcatatttttgaccctcaagttcgcacaacgttggcacaaacagaggtcattgtcatcaaactactgctatttttcatcatgtgtggactctcactaatgtccaaggctaataaacttttcatggagcctacactaattggtggttacgttacgttcgtatgcctgctagcgatgacaagatgggacgtagatattgggtggatcagcacatgggtccatatcgctagcga

SEQ ID NO: 3048 - DNA, 325 bp, Zea mays
  Clone ID: MRT4577_102778C.1
acagagcaccaccagggatcagagcctttaaaaggggacaagttcatgatttttattacaagggccaaactgaaaagataattaagactggaatttccaaactagaacctgaaaactgggatacagggcaccaccagggttcttattcgaaacaaacttgggggcaggaaacatttaacaagttcagaacgaaagggaaaatggtaccaacatgttatgccacgatagcataacattttttactagggactttttttttggggggggggttgttttcccggccggcgataactgggtggtactaaaaaaaaattattttgggcgg

SEQ ID NO: 3049 - DNA, 940 bp, Zea mays
  Clone ID: MRT4577_102779C.1
aaaaaacaagagataaaccattttttaattcgattgataatgtttaatcggtcgtattcctctatatttataggggggggggctgaacccattacatacaaatttcccaagttaattccgcgaatttagccaacaactgtagcaggaaactcagaaccctaactgacttttttttttttttgtttttactcggggccggaccgttagcacggtcaatttgccatccaacacagagctctaaaaggttacaaaaataattttgttcctgtcaagtgtcaactactatcaagtatcaaccgcaccatttggaagaaaaaaaacaggaaaccgaacatagatgagttcttgtcctagggagcatcgcattgtacactgcttggtacttgatcacttctagttgattacagagaaaccatggggaaaatgggcgcgcagtgcttcattagttggttcccgatgatgattaggatgagaaaccataaaaaaaatgaagcactcggcggtgaggctggggctggtgaaatcacatagaaacgaattgccaggaaatcacaaactgcaccgcacagctcgttgttcgttgcatagaagactcaaactttgtcagcggcatccagtgatgtgccgccctctgaactcctgactgcagccagcttctcagctaatctttgctccagtgcccgttgacccctctctctcctcctgtttgcctcaaacgaatctgaaccaggtaatggtgaggtgtctaatgtttctcccctggcatcagatcttccacaaagtaacctatggaatacagatgctattgggtcgagaaatggtcttacaaattcagggaagaagcttgagaaagagaactcctcacttggatcccctttaggctggtctaaagtctcttttgaagtaacggaggtagatccaactcatatacatgccaaac

SEQ ID NO: 3050 - DNA, 487 bp, Zea mays
  Clone ID: MRT4577_10277C.1
ccattctttcgtatgcttctttttcttgccccgaaggatgaagaattttattgataaaaggttgtctacaacctccaatttaacacatggggggacttttaagaccctccccatggctgaacttggcaagggcaggacggacccatggacccctaatttattgggaaacgacccgactaccactacctgtggtactgccccctgaataaatctgctcgcaacctacggtcccatggcgcgagatcttttaccccgtttttaccgtcggcattctccgacccctgcgcaatatggataatgacctcatgctcgcctagtgcatgtttcacctgtacaagcacaaaggggcctctttcacacatgctatgtgcgcataggtccattgcaaactgttaatttcacacggagggctctctgaagaacttgttcatgcccaacaaactggacggtgttatcatgcggccacctttgatgacattattgtccc

SEQ ID NO: 3051 - DNA, 396 bp, Zea mays
  unsure (1)..(396): unsure at all n locations
  Clone ID: MRT4577_102780C.1
gtagtacaatgcgatgctccgtagagacaacgagcacgggagcaaagatttgctgagaagctggctgcngncaggagttcagagggcggcacatcactggatgccgctgacaaagtttgagtcttctatgcaacgaacaacgagctgtgcggagcagtttgtgatttcctggcaatttgtttctatgtgatttcctgaaggattgaacggacgcgaatgtttcatgtaccttcaccagccccagcctcaccgacgagggcttcatcttttttatgggatctcatcctaatcatcattaggaaccaactaatgaagcactgcagccccatcttccccatggtttttctgttatcaactagaagtgatcaagtaccaagcagcgtacaaagcgatgct

SEQ ID NO: 3052 - DNA, 670 bp, Zea mays
  Clone ID: MRT4577_102781C.1
aattcggcacgaggagaaagtggtggtggaatacatagcaagccaaaaaaaaacatttcttccctttttccttgcctcgcttcccctcccccgtctcctgttctctcctctcttctccgtctgcttcagcccctagaaatcgaagccaccaccaccatagagctccgagcccctcgccctcctccccgcccgttcgctgcgtggatctacaggcaggatgctcactcccgcgcgcgcgggcgccgctcggtgagcggctgtgaagaaaaggtgcctgatgagatagtgggcggccaaggaagcgaagtttctcgcactccacctgttgaacttaccaacttggtatgctggagtgtaaggataagagcaggcccaattgcttcacagctcttgggttcttagtgccgactgtagcagcagcagatctggggcgagcagcgaaggcgttcatcagatgttatccagtgagcagccttcaggcccctcatgttccttcaagtctactggcccgggtgtgagcactgatccggcaacctccgtggccgaggggccgccgagccaggatcccagagatctggtccaaccttatcccaagttctccataagagattatgtgtttgcttcaagaagcaaaggcatcaagagaagctgacctttccatccccactca

SEQ ID NO: 3053 - DNA, 677 bp, Zea mays
  unsure (1)..(677): unsure at all n locations
  Clone ID: MRT4577_102782C.1
gggtatgatctgtagcttgtgacgaaggcaacgcctacctgtaaggctgtaatgacccctaacaacctggctaataaaccccaagagcagaagacagctataggagctagagtattagtgtatgagcatactacatgcatatgttggcctacctagggtcagatgactcttaacacccaacatccgacaaatggattaagaaccagagtacagtggtgatcaagtaagcaaaaaggcagtgccgagagaatccaaccgcactatcgcttaattcatgggtgaaagtgattaacaatttgaataagccttggtcttctgcggcagatgctgctgctacgcacatgcatggacggagacaagagcatggagcttccaggtctggccggcagctttgtggtggtgtgtacgaccaagtgtccttgccatatggcacctttgctgctgctaataaaagagaaaggaaatggttctcttttaggccagttgctctcattatgcattgcacttatgaattatgcatgcatgcatgatgaagggcagatataggtccatggccaccctcagccacggaccaaagtggtccaaaattttttttaacttgaaggatcgaaacaagtggccaaaggaggtaaactcantaaagttcttgctttagtcaatcttagtttattttaaaa

SEQ ID NO: 3054 - DNA, 774 bp, Zea mays
  Clone ID: MRT4577_102783C.1
cgggacttccccgtttgcgttttggcccgaatctccgtctccgtctccatctccatctccatctccatctccatctcctagccgccgcggctccactcctcagtccgaagctccgcatccactgccaccatgagccgcgatcgctacttccaccgcctcctcgacctccacctccacgccaacgacgacctcttcttccccttccctacccctgcctcgtcctgcccctacatctccgcctcctccgcccaccaccgcttcctcctcgacgaccaccccttctacccaacctcctgcccgctcggcatcacctcccgctccccgatcgacgacaccttcgacctcgacctcctcctccccctccacgccgccgtctccgcgcccccgtgcgcggccttcgacttcgaccccttcctcctcgacaccctcggccaccgcgtctccgccctcgagcgcgcgctcgccctcgccccaccccgccgcaagtacacctacgccgccgaggccaacggcaggaagctcaagtggaccgccgaggacaggcccgccgggggccgcaacctcaagtgggaggccgagctcaggaccccgcacaccgacggcttcgaccgcaagtggaagtgggagtccaaggagtccgccaccggttccaccaaggtcaagtgggccaaggagatcaaggggaagggctgcctcgagccttggtccaactcctactccgtcgaggagacctacggtgaggatgaccatgccgacgacgacagggagaagaag

SEQ ID NO: 3055 - DNA, 398 bp, Zea mays
  Clone ID: MRT4577_102784C.1
tgcacgcgtccgtcggctgggatcctcctgtgcggccgccgcccttttttttttttgtttttttaactcgagaagacgacgcactgattgcggggtatatttccattctttattacgcgcgtattgaacattgtacacatggccgcgacatacagagtgatcaggtgcaattaatccatgccactctgtccccagaaactctgccaggtacagtcaaaggcaccaaaactgatacaatccctgtattttgcatcatttctgactgtgcctcatgttcgagtccaccggggtgtactgaccagtgaaacaccacgcaatggctcatcccgacagaatggctggatcacaactgctcaatgctggacagcagctcacatgcgtgacctggacgaaccttg

SEQ ID NO: 3056 - DNA, 1741 bp, Zea mays
  Clone ID: MRT4577_102785C.1
attgggacctcgaggcggccaaaaaccgcccccaccgcttcctcctcgacgaccaccccttctacccaacctcctgcccgctcggcatcacctcccgctccccgatcgacgacaccttcgacttcgaccccttcctcctcgacaccctcggccaccgcatctccgtcctcgagcgcgcgctcgccctcgccccaccccgccgcaagtacacctacgccgccgaggccaacggcaggaagctcaagtggaccgccgaggacaggcccgccgggggccgcaacctcaagtgggaggccgagctcaggaccccgcacaccgacggcttcgaccgcaagtggaagtgggagtccaaggagtccgccaccggttccaccaaggtcaagtgggccaaggagatcaaggggaagggctgcctcgagccttggtccaactcctactccgtcgaggagacctacggtgaggatgaccatgccgacgacgacagggagaagaagaaacccactggcgtccagaagaaagtcaagggggaaaacaagcagcagcagaagaagcagggcaatgtggagatcgtcgagatcgaggaccaacactgccggatgcgtcgccatcagaaaggcttttgaaatgaacccactgcaagggcaagaggaaggaactttccccaccaggatgccgcactgctcatccagatgaactacagggcgcacctggcccatcgctcccaggtgctccgttgccttcgcgacctcgccgtcgccaaggccaagctcaaggagatcaggtccttcttctacaacatcacgtaccgccgccgcatcgcatatgacaatgaagagctccagaggtttgctgagaagatcattgtcctgctactgacagttgatgcccttgagggaccggactacatggtccgcaacgcaaggaggtccatgctggaggagctggaggggatgctggagatcgtggagcctcagccgccggggaagccgaggacgcttagccgcaggaggttcgatctcccagaaggcggagccatcgaaaaggagacgcgggaggcgggcaagtgaagtgcatcggtgggtggtggcatgcttgggcagtttggtatatgcgcgatgcggactatagagtttgagtttgtgctgctaccgaaccgtggaccaccttaccccgttgagatgtttgatagctggactttttgtgctgttgtatttgtagaccagaacgttgttctttgtaataaattggcgtgtgctgctttttgctaatattcgcttggctttaaaaaaaaaaaaaaaaaaaaaaaaaaaaaaaaaaaaatttcaaaaaaaaaaaaaaaaaaaaaagcggcccaaaaaaaaaaaaaccacaaaaagccacagacctaggccccctaaagcgcgcgcgctaacgcccgcctgcggagctgaaagaaaaaaggggcccccctgcgccccctttttcgcccccttcagggggggacactacgcccccgggggccacaggggctaacggcgggccccccctaaaagtgtttcccttcccattactcccctcgggcttgccgcccggctttaccggggtggaccccggggccccccggggggggaagcctctccgctagggggggggggcgcccgccccccttccccgggctatcccccttcccccctcgcggtttataaacccccccccgcccggggggggcgcgcgttctcatttacccccctccccccctccc

SEQ ID NO: 3057 - DNA, 402 bp, Zea mays
  Clone ID: MRT4577_102786C.1
gtgatctgaacaagaatctcaacaaaagacgttgtccccacttcacttcgacaaccaggatgtgatgccaggaggagaaaaatggacagtgcttcgtctatcatgtctagtttcttgtcgccaagtattttcagcaaagcagccatgattcctgcttcaatagccctaaatttgtttggatggttcagtatcagattgaaaagtgctgtagcagcatctttcttgcctctgattgtcccatcccttaagaggtccacaagaggagctataccacccaaaacccctatagccgccttgttctcgtctatcatagacaaactgaacaatgtcgctgctgagttctcctgaccttcaatgctgccatttttaaggacttcaatgatcaaaggtaaggctcctcct

SEQ ID NO: 3058 - DNA, 1918 bp, Zea mays
  Clone ID: MRT4577_102787C.1
cctcgaggccggccgggaaaaaaattcaaaaaaaaaaaaaaaaaaaaaaaaaaaaaaaaaaaaaaaaaaaaaaaaaaaaaaaaaattacaaccgaagcgataggggggcacgatggggaactctctctccttccccgtccctgtcgccatctatcactttccccgtttgcgttttggcccgaatctccgtctccgtctccgtctccatctccatctcctagccgccgcggctccactcctcagtcctcagtccgaagcgaactctccctccgcatccactgccaccatgagccgcgatcgctacttccaccgcctcctcgacctccacctccacgccaacgacgacctcttcttccccttccctacccctgcctcgtcctgcccctacatcaccgcctcctccgcccaccaccgcttcctcctcgacgaccaccccttctacccaacctcctgcccgctcggcatcacctcccgctccccgatcgacgacaccttcgacctcgacctcctcctccccctccccctccacgccgccgtctccgcgcccccgtgcgcggccttcgacttcgaccccttcctcctcgacaccctcggccaccgcatctccgtcctcgagcgcgcgctcgccctcgccccaccccgccgcaagtacacctacgccgccgaggccaacggcaggaagctcaagtggaccgccgaggacaggcccgccgggggccgcaacctcaagtgggaggccgagctcaggaccccgcacaccgacggcttcgaccgcaagtggaagtgggagtccaaggagtccgccaccggttccaccaaggtcaagtgggccaaggagatcaaggggaagggctgcctcgagccttggtccaactcctactccgtcgaggagacctacggtgaggatgaccatgccgacgacgacagggagaagaagaaacccactggcgtccagaagaaagtcaagggggaaaacaagcagcagcagaagaagcagggcaatgtggagatcgtcgagatcgaggacaacactgccggatgcgtcgccatcagaaaggcttttgaaatgaaccactgcaagggcaagaggaaggaactttccccacaggatgccgcactgctcatccagatgaactacagggcgcacctggcccatcgctcccaggtgctccgttgccttcgcgacctcgccgtcgccaaggccaagctcaaggagatcaggtccttcttctacaacatcacataccgccgccgcatcgcatatgacaatgaagagcgccagaggtttgctgagaagatcattgtcctgctactgacagttgatgcccttgagggaccggactacatggtccgcaacgcaaggaggtccatgctggaggagctggaggggatgctggagatcgtggagcctcagccgccggggaagccgaggacgcttagccgcaggaggttcgatctcccagaaggcggagccatcgaaaaggagacgagggaggagggcaagtgaagtgcatcggtgggtggtggcatgcttgggcagtttggtatgcgcgatgcggactatagagtttgagtttgtgctgctaccgaaccgtggaccaccttaccccgttgagatgtttgatagctggactttttgtgctgttgtatttgtagaccagaacgttgttctttgtaataaattggcgtgtgctgctttttgctaataaaaaaaaaaaaaaaatctgtaccgtgttctactacctgaacaatgtttttttctcggtggactgaagtatcagtttgaatagctagctttaatttgaagcgaacaggctttgtacttttgaattctggcatcttgaatgaattttcttgaagtaccctaaaaaaaaaaaaaaaaaaaaaaaaaaaaaaaaactcgagagggggccggtcc

SEQ ID NO: 3059 - DNA, 639 bp, Zea mays
  Clone ID: MRT4577_102788C.1
aattcggcacgagggcagttcagcggttcagccccctcaagtcgaggtcgcggcacgccgcctccgcaatgccgcccccttccgcctccgcctccccctccgcctcccgcttcgcgaagcactggatagctgacgtcctcgccggcgaagaatccgtcgacttctccctgctcaaggttctggtgggggcctcgtcgaagcccctcgcgggcgccccggaggccacgcgtgagcgggtcgcgctccggtccattcaggaggtgtcgtccgtgatagccgctgggggtgatgccgcggccacggcgggggtgcttagtgttgatggcgcccggtcatgcgaggatgggctgtttcggcttatcagagaggttggaagtttcggagaattggagaaggatttgcttccacctttcagtcaagacatccaggaaaatatatgtaccaagaagtttacattaccaggaatttctttccagttgctagaaagagttgagccatggatagcatctatggccccacaaccccaaatggaacacaatggcactgaacaatgtgtcaatgatcagtcactgcgcagcagccacggatgtgtaaatatagagaagcctgtgtttcatacagacaatgctggggttcagc

SEQ ID NO: 3060 - DNA, 256 bp, Zea mays
  Clone ID: MRT4577_102789C.1
gattatacgtgtggattagcgggggagtaccgggtcgggaaacctccacgggcatggcccacgcgggtggagcaagagctcctgtagcactaattacgactgccacattcttcctaacttgctgttgatggacttcgcgaacacaggtgaggtgtgcggggggacactcctcaactgcaaggatgccacatgaacacataccggagcgcggacatgcttgtcaaggacgtgaccgctaccgcgcccggggacagcc

SEQ ID NO: 3061 - DNA, 288 bp, Zea mays
  Clone ID: MRT4577_10278C.1
gctagacgtccaacgacaactattgatcatgggatagcactacataagaggattacactgatcacaatggggcaaggaggagagggctatctaaattacatgggaaaggagttcggacatactgaacggatagatttttcaagaggtccgcacagactttcaagtggaaagcttattccaagaaagaacgtctgttgtgacaaatgtcttagaagatttgacctgtgtgacgaagacgatggtaggtattaaggtaggcaagagcttgatcagccaatgaattataaa

SEQ ID NO: 3062 - DNA, 491 bp, Zea mays
  Clone ID: MRT4577_102790C.1
cctcgaggccggccgggaagccacacaaccagattgcctcttctccctcttgacgaccatgcataaaagcaatagctgaagaagacgtcagagatatagtattgaatgggaagcggatgcttcctgttcatctcgcagtgcttgaatatgccacactgcgacaaggtgttggaccaggtgactaataccgggcttgatgcatgactcacgtaggaccccgatagtgatgtgtcctgcgagacctgcaccaagaccaacatggcgatggtgatcgagatagatcacaaccaaggagaccgtggactatcagaagatcgtgcgcgatacctggcgagagatcagattcacctccgacgacgtggaactcgacgacgaccgctgctaggctgctgctgaacatcgagcaggagtcccccgacatcgagaaggcggtgacacgatcacttcacgaagcgctcctaggagatcagaacgcctgaccagcgccacat

SEQ ID NO: 3063 - DNA, 156 bp, Zea mays
  Clone ID: MRT4577_102791C.1
ggagacgagtccgctatagacacgcacacaagaagctagattacaagctgggacacagggctggtgctgcagcaggtggtgaggtggcgggggcgcactagcaggacaggacgccagcacagggatctctactaacgagagggttcgagcctgggt

SEQ ID NO: 3064 - DNA, 154 bp, Zea mays
  unsure (1)..(154): unsure at all n locations
  Clone ID: MRT4577_102792C.1
gccgcgcggaggagaatcgttacccggctctctcaccatctcacttgacccctccatccctgcganccacacgcgcgtacctccgactcccacgaggaggagggggggagaccctcgccaccgctcccactcccgatccccacactccaccgcc

SEQ ID NO: 3065 - DNA, 541 bp, Zea mays
  Clone ID: MRT4577_102793C.1
gcggccgcgttccatctccttcacttcattgcgcgtacgaggagagttaaatacgaccttttcgacactcgccacgttcaagggcatgtacctcgtgatctctcacagcgcgatctccatcaccaacgacgcgccatggatgttgacgcacgcgaagaacaccatgaaccgcgcgatacacaccaccgtcttgatcagcgacagagacgtcttcgacgcagagtagttgttccagatcacggaacaacaccacgcggcggccgctgaccatcgtcttaccgagacgcaacggtagaccctaagcccgcaactgatacacgccgacggaggacgaggtgagggccaaggcgacgcctgagcgacagactctccatcacggagcacttcgagcaggcgctgatggtgtccgcgtacatcggcaccagcttgatcctcatgaacaaggtgtcgcatgacgttaaccaccttcgccgacacgcacatcctgccgcggtgacacgtgagctaccccgcgtggtccaagatcgcgtggcacatcaaa

SEQ ID NO: 3066 - DNA, 189 bp, Zea mays
  Clone ID: MRT4577_102794C.1
gaccagggccgggtaacgtggttctcttggttaaggattttacctaaccaccagtgaaccccctccacccttttaaaatggtcctaccataaaatggccgtatgttaccttttctaggggtcccatcaaacattaccaaaggcccggcattttttgaaaacaaaggtccccacgcaagaaaggggaaaa

SEQ ID NO: 3067 - DNA, 349 bp, Zea mays
  Clone ID: MRT4577_102795C.1
cggacgcatcggcggactcgtcagttgcctgggaagatcagcggggcgccacgcccgtcccagtgacaaaccacatatcacctgatcacagaaagcgcttccgggaagcgcgcataaacagccgttgtccagcacatcagccgcatacaaagagttagcatcactgtgtggaagggcagggatcttaggtgaccgcgatgacgatgctcgtagtgagcgacagagccacggatagagtggccacgctcactgatccagcggttcgaggatcttgacagcgctgcgttgtgacagattatctggacgttttgtgtctgtctgaccaggtcattagccgcatctaagtcgc

SEQ ID NO: 3068 - DNA, 454 bp, Zea mays
  Clone ID: MRT4577_102796C.1
tcgttcacgcgtccggtttttcttttcattggggggcttggtcggctcttcagggcccttttccacttggtttttgttggctctgttgtgtttgtgcttccctttcctcgcgaccgcgactcggatcggatctctctcctgtgtagcgccatgctgtgctgtgctggtagtagcagcagcagtagcaatgagtagtccagtccacagctccaagaacacgtggccgtcctttccttgcctctccctatcggtattcggccacgcagggggagggcgccaccggctttaaccatgggccggcccttctgcccttatctggggggctggtccctctggtctatcccatcccccttgagcaggctggtgggcaagctggactcataccaacctcgtatttttcccgtccgcgttttttttactctcaatttccgggagattttttcccctttttttt

SEQ ID NO: 3069 - DNA, 1193 bp, Zea mays
  Clone ID: MRT4577_102797C.1
gaggctcggccgggaaggacgccttcccggcctttatcgagagggcggagcttctcgtttctccagccaccaccaaccaccacagcgaaacacctctttctcgctctctcataaacgacgaggaggccgtacggcactccgcaagcttctcagttcactctctggtctccagtctccaccgctccagcagcctgagctagtgagctcagctgagccccgagctgctataccgtacagccagtgcagaagcggatcggatcggatcggagcgagatggccgcggccggtctgggcgtgaaggcgacgccgttcacgtacgcggcgcacgcgctggccgcggtggcggcggcgctggtgctggtgtggtgcgtccacttccgcggcggcctcgcgctcgaggcacagaacaagaacctcatcttcaacgttcatcctgttcttatgctgatcggctacattatcctcggcagtgaagccattatgatctacaaggtgtttccgaacctgaaccacgacacggccaagctgacgcacctgatcctccacgccatcgcgaccgtgctcggcgccttcggcatctactgcgcgttcaagtaccacaacgacagcggcatcgccaacctctacagcctgcactcctggctcgggatcgggaccatcgctctgtacgccattcagtgggtgttcgggttcgtgaccttcttcctccccggcgcggcgcccggcgtgaggcgcggcgcgctgccctggcacgcgctcttcggcctcttcgtctacgttctggcgctggcgaccgcggagctcgggttcctggagaagctgaccttcctggagagcggggggctcgacaagtacggcgccgaggcgttcctggtcaacttcacggctctcgtcgtcgtgctgctcggcgccttcgtcgtcgtctccgcggtcacgccggcgcacgccgaggaaccgcggggctacgccccgattccggtcagctaagagagggggaggagttcgctgggcagtcagaagagggcagctgtgttttgtttttgaattgaaccatgacacatcaggcgtgtgcgtgcctcgcgtccgggtttacttcaaagcggacgcgacgggtttcggtctatgaatgaatacagcccgatgggccgcagcttttccacaaaaaaaaaaaaaaaaaaaaaaaaaaaagggcg

SEQ ID NO: 3070 - DNA, 1524 bp, Zea mays
  Clone ID: MRT4577_102798C.1
aagagccctaacaaattataaataaacatttgaatcaggatccgttaccacagcactagtccttggtcgattagcttacccaccgagatgggcagtttacgtaccgtactaattgcggcaacaaaggtccctgccctgactgacaagaccctgcttaacagcagcctcgcaggtacaccaggccacccgaggctcagacacagtggcaacaaaacaaaaaaactgcagcaagacttggcgcagttgaacgactcgactaataagaccacaaaaaagacgtccgtttagaggccagccagaggcacaaccacacaagcgttctcacgtgcattacattgcacaacacgaatgctataatattgggcagtgtactactgctgttgcttctacaaatactacgtcatctcgagaagtagccaagctgccacgtttcggaaaaggcttaagccgcataccatctcttttgtcctgtcggttattgtattgctgacatgaatcaccaattccagaccccatcacagcatctgcaaggccgtgcaggcaacagtggcatcagccaaccttttcctcacttgtactcgaacgatggtatcggactgctgggcgtgtcgaagctctccaagatctccgacttgcccgcgctggatttcttctcttcatccttcctgccaatcagtcccccaaaccacccacccgcgccgctggagctcgccacttccggaggtgccacgaccggcggcgcctgtggcaggcccgggaaagggttgtcgcccatggccgcggtaaggttgggatcctctgcgggcagcggcgggttggcgaggacgcggttgagcataaggccggcgccctcgatgagggccaggaggacgccgcccatgagcgcggaccggcccgccgcccccatgccctggcgcatagagagaaacccgcccgtggcggcgcccgcgataatggagttccagggatcctccttctggcgcgcgtagaccatggcgcagtcgaaggttgagaagaggccgccccagacggcgaagctgccccccacgcgcggcgcgttcatgcgcacggcctgcgcgcccccggacatgcgcatcccgttgggggagttgtagatgcccttgatgaagtggaaggccgagccgccgacggcgcccatcccgaacgcgccgccgacgtcgtccaggatccggtccgggcatggctcccgcgacgtctccggcgtccccatgttcctcccctggcgctaataactcggcttcacctactcctcttctccgtcggcggcggcggcggcggcggcggcgagagaggaaaccctagctcggagctcgggccctggcgtgggaagcaagtagggcgaaaggggaggaaccgaggaagggggagatgcgatgcgcggtgcaaagcgtggagaaattgcttagctcgccgcgggtgctccccaaagagggctccttgccctattttttggggttattgtgacaacactctctcactgtgtttgggtcccgcacagagtgg

SEQ ID NO: 3071 - DNA, 1588 bp, Zea mays
  Clone ID: MRT4577_102799C.1
ccgtacttcttcttttttttaaaaaaaataacactgatatttgtttaaaagtatttgtggtgctccaattattgctccagttagtgatgatggaagagaggcgtcattacctcgatgtgtgcttgttgttggagtaatatactactatatctctacaactattaaaagcgaactgtagactgcccccgctcgagcagcccgcacgacgcaaatccccaatataaaaaatacggttggttgtttcacacggacgcgcgtttgtcgcgatcgacgatcgagaaaatcctagggttttcctctctcgccgccgccgacttaaagaggacagaggagtaggcgaagtagcgccgggagagtaacatgggcacgccggagacgtcgcgggagccgtgcccggaccggatcctggacgacgtcggcggcgcgttcgggatgggcgccgttggcggctccgcttatcacttcatcaagggcatctacaactcccccaacgggatgcgcctgtccggaggcgcgcagaccgtgcgcatgaacgcgccgcgcgtggggggcagcttcgccgtctggggcggcctcttctccaccttcgactgcgccatggtgtacgcgcgccagaaggaggacccttggaactccatcgttgcgggcgcagccacgggcgggttcctctctatgcgccagggcatgggggccgcgggccggtccgcgctcatgggcggcatcctgctggccctcatcgagggcgccggactcatgctcaaccgcgtcctcgccaacccgccgctgcccgccgacgatcccaaccttacagcggccatgggcggcaaccctttcccgggcctgccgcaggcgccgccggtcgtggcacctccggaagcggcgacctccagcggcgtgggtggcttgttcgggggactgtttggcaggaaggaggaggagaagaaacccagcgcaggcgggggcaagtcggagatcttggagagcttcgacacgcccagcagtccgataccatcgttcgagtacaagtgaggaaaaggtatggcgccttttaaaactggggtcacagcctgggatgaaatgaaagggacctgcacactgcgctgcaggcaggcaggcaggccggcctagcaagcgatgatgaatcaagcaaccataccggaaattgcagacagagagggtctgcaattacaagcacttaatcgaggactgcaatttgcgtaaaggaagaaactattctgtttttacattggttaatccaaaacatgatttagtgtttagaaacatatactcatcaagttacttcagtcaatggagcataaccttcaacctttcctatggttagagatttttttggtggaatacaaggcagcaaaagagaagtcgaaagagatagataggcttgcaaaggagcgtcaaaagcagaggggaaaagagtatgatgtggaggcagggatagagataccagaagagagaggtctagggagcatgcctataatcgtgatcgtaaactgatgaacattgtgtttctgatatttctatgtatgctgaagctttgttccgatatattggaatcgaatgttaaattagt

SEQ ID NO: 3072 - DNA, 363 bp, Zea mays
  Clone ID: MRT4577_10279C.1
gcctcgacgcgcctctgatttctcagagccgccgggccgtcagtctccctctgcgtctcccgtcagctaggccaatatttttctaatggctgtggaggaccatgctaaccaacctactgtctgtgcgtaagctagggtggtcatgtccacctgtgctcgatcatctctgaaggtgtacggcaccgtaacatatgctcatctgtctcatgttatgaaacgagatttgccacaaggaactacatgactcagagcctttagggccctccgatggctgttagcggtggcatcaatgtcgcagtgatgcggaccccgctctgtgatattgctcctgatgagaaagggggcaagaactccatgatcgat

SEQ ID NO: 3073 - DNA, 109 bp, Zea mays
  Clone ID: MRT4577_1027C.1
tgtaaatgtgtgtatagtccggcatggtagcctgcgaaaggattgtagataaccgttttaaaggaaaggaaacatgtagcctttaagttaatctatgtgttgtgggggg

SEQ ID NO: 3074 - DNA, 1158 bp, Zea mays
  Clone ID: MRT4577_102800C.1
cgggaaaaaaaaatcccaaatccccttgagaggcctgcaatttttagcctcctgaaccctgcgattggagccggcggtggcggcgccagcgcccgcggtcggatcgtcgcatggccgagattcgcaagtacgccatgtccaaccagcccccagatattcctcagatactactggaagctcagagtaggtggctgcggcccactgaaatctgccaaatattgtcaaactacaagaagttttccattgcgccagagccaccaaacagacctcaaagtggttcgctgtttctgtttgaccggaaaatattgagatacttccggaaggatggacacaactggagaaagaaaaaggacggaaagacagttaaagaagcacatgagaagctcaaagttggcagtgttgatgtacttcattgctattatgcccatggtgaagagaatgagaacttccaaagacgaacatattggctgcttgaagagggtttcatgaatattgttcttgttcactaccttgaaatcaagggtgccaaacaaagtttcaatcatgctaaagaagctgaagagactgcaggattatctaatgccgatagtcctgcatgctcaaactctttcgctagtcagagccaggtagcctcccgatctatggatgctgaaagcccaattagtggacagatttcggaatatgaagatgctgaaacagataattctcgagcaagctccagataccaccctttcactgagatgcagcagcctgtggatggtaccgtgatgggtaacttctttggcgcttcatctccaagtgtttctgtaaataatctagctgcaggttatcttggtgaaatgcaacctacgggagctaattttaccagtcattttgccactcgcaatgacatagctagtgtgttcaatgatactggctctgagttaggaggtggtcccaaaacttcaattgattcagtactgttgggtgaaccatttccagaatatccaggcggcttcatggagtcgacactctattcttctgttgcaacattgggtaacagtctggaagatggcttgcagacacttcatgtctgaggctctctacaccaacaatctcactcaaaaggaagttgatgcacttggtgcagcaggcataacatcctcgaagagaatgatg

SEQ ID NO: 3075 - DNA, 265 bp, Zea mays
  Clone ID: MRT4577_102801C.1
aagaagctccaggtgagctccacagttttttacttatgatgatacaatgatgtgttgttgacacttaaccagtcgctaatcgtctagtcctaccttttagactggagtcaataagcttattactgcagttatgatgatacaatgatgtgttgttgacccttaacaaattggtaaaaaatgaaaattgatagaggaaaatttgtgctgaagctttattcgtcttttggttaagtgattactatgaatacaaaattgtaaacatcct

SEQ ID NO: 3076 - DNA, 396 bp, Zea mays
  Clone ID: MRT4577_102802C.1
aacacgcgtgcgtgcacacttccgtagtctacatcgctccatgatccaaaagctgctcgactggtacacctgatgcgggtgtgaatacaacgcgtcgtataccgagttctctcctaccgattttcaagggccgccttggcgcacagtacaccgctgcgatgtgcgatagctgttccagtcgatggaccctacctgcggctgaaccgactccagggttggcggaccgttaagcataaaagataactcttcccgaggccccagccagcgtatccatgatttctaacatcgtcagctgcattcacgtgccggctctggaaatctcaacgcgactccctttaagacgacgcgcgttatcgctctatgtgcacagtttacctacatcattaagatctgctt

SEQ ID NO: 3077 - DNA, 420 bp, Zea mays
  Clone ID: MRT4577_102803C.1
gacccacgcgtcagcgttaaatcaaaaatcaaaaaacagaaaaagaaaagaaaacatcataaaaaaaaaaaatgaatccaatcggaatcattgaaagctttgttcctatgcatcgaaccaattggtttctgtcgatccagtctttggcattaatgccactccacagactttccctcatatttgtgcgggctttgctcgggggttgcagtgcgactgtaaccacaatacgtccaggtcattcaccaggtgcgtcttcatccttctcgagcattcttttttccacgttgttgttttcctctgccatctgtggaaccgcctggctctcatcatcttactggccatcaggtgaatgtcccactcctattgatccgtatcactatacctgtgcacatggtttccaccgaacgattataagctctc

SEQ ID NO: 3078 - DNA, 234 bp, Zea mays
  Clone ID: MRT4577_102804C.1
ttacatgttttagaccgcgagcggccgcccggggggggttttttaattttaacgcggggtcgcaaaccactgggggactcattctttgattgcttcacagcaacaaaagatgcaaggaacaatagcactgtatgtgttagccagagacactactactgcgtgcttgtcttgcctacaagggtctccatacaccagaacattacacgctcctaatgccaggtcaaacccttctta

SEQ ID NO: 3079 - DNA, 539 bp, Zea mays
  Clone ID: MRT4577_102805C.1
catgactacatgtcatgttggatctaaacaaaacaacaaacaaggttatggacatctgatgaaccacttaaaaagtccaaaactgcattttcaaagtttttggacctaggtgataaatgcaaaagttaatggacctatgatgcatttaactcttctacaaactaattagagtaaatttcagaaaactacatataggtagaataaattttgcaaaactacactattcttggaaccaattttgccatacacatttttctcatgcataacaaaacccacttcttagaattaattcaaagcagtgtacttttttcagttcatattgtggagctacacattttattagtattccatatcgttaacttgcatgcttgtttgggcttaaaaatcaatgtatagttctgtgatatgtgaaacaatatgaaatgtgcagttatgtagtatgcaataaagtattgtaatagaagtttagtttgcaatttttattgttaaaaaggtaagtttagcaatatagaatgggaatgggagtgtacttttgatga

SEQ ID NO: 3080 - DNA, 505 bp, Zea mays
  Clone ID: MRT4577_102806C.1
ctgtgcctgctcagcttttgacaccgcgaagcactatggtgatggcggagagcagcgcgctgacgtagctacagtgccgtgggcgtgcccagatctgctggcgccgacgtcccggtccggctcaactgacgccgttatgcacgaacggcacatctctggccgtgtaaccatgtccgctgagtggatccacggtcaggcacgcggtgaccacctggaactatcctctgaccaagactatgggttatatccgctaggcctccctcaccgagccgtataacttctagcggatgaaggagtcataggtgaaccactgtcgctgggccatgcttgacgccttctacatcctggagcacggaagctatgcacctgggcaactggaccaaggactaggactaggacggcgaacacgaccggcaggccacttacatggacgacctggtgccgtaggagacgctgccgaacattctgcagatcgagttcggggtcatggacttggacgaacacc

SEQ ID NO: 3081 - DNA, 382 bp, Zea mays
  Clone ID: MRT4577_102807C.1
aattgagcatcgcagagataggcgtcttcgtactcgcctacctccgcggctcaaacctttcccccttctcccaattccttccgccggccgccgctccatccggacgaagacaccactgagggagtgcctttcgatccaaattgggcaggccggtattcaagtcggaaacgcgtgctgggagctggactggcttgagcatggcattcaagctgacgggcaaatgcccggtgacaagaacacttgggggaggggaagatgctttcaacaacttctttaatgagaatggtgctgggaaacacgtgccccgtgctggttttggtgaccttgaacccactggcatttgtgaagggagaactgggacctaacggcaggtttttcaacc

SEQ ID NO: 3082 - DNA, 223 bp, Zea mays
  Clone ID: MRT4577_102808C.1
ctatagatgaagcacagaaacatgcatcccatgccataatggccaaagatgtctcaacgaatgacgcactgggagaccaactcacgtctgagcaaacccaacagctgaccctggaactgaaatcatccgacgaccagaaccaaatcaccaggtgcaagcacgcatcttgacgcactatagagaacatgccagcacaacgcaaccaccaccaccagcactacca

SEQ ID NO: 3083 - DNA, 486 bp, Zea mays
  Clone ID: MRT4577_102809C.1
gggactcgcggttcgacgcaagactctacactgacgtcgtattagtctttgatcggcctctatattctctctgaggaggaatgggcataccatgatgaagcccctgtcaagatcgacttttggatgaggaacctcaccagcttgaagcattcactagacaagttggccatacctttggtcgtcaagagggctgcttgcaaagcagaggtcgccggcattgtcgaggccgtcgttcgtgagatggagatcagtcatgtgttttggaatgcagagctgatgatagatgagcaaagacgcgacgcagccgtcaggaaagtgctctccaggctgtccaacgtgcatgtggaggagtgtgatgatcagtgtgtcgtaccacctatggatgtcaaaactaagacagggaacccgtatacagtcttcacgccattccacaacagctgggtgcaaactggtggaaacagagcctcattagccccaaactgtcag

SEQ ID NO: 3084 - DNA, 182 bp, Zea mays
  Clone ID: MRT4577_10280C.1
agtcctgatacagctaacggcggctcgttatcttgccccgcgccgagctcatggacctggagcccggtaccatggagttcatcacggctggcccctttagaggcatataccgtccggacaacattgtatacagacagttacgcgccgggaacaactggggcaatggcctactacacccaggg

SEQ ID NO: 3085 - DNA, 381 bp, Zea mays
  Clone ID: MRT4577_102810C.1
tatcctatctgccggacttacccgccacggagggggtgtcaatctcctaggccatgcgttccctaatcccgcagaaattctcgacgcgctagtcactaaacatgtatcaagcccaagccctggctccaccccaagcacatctacaccatctagaccggcctctcgggcgagaacattcgcatgctgctgaacgacttattcataatcaacaagccccacaagctcctctcaaggtacccgccaaggacgacccacgacgccaagcaccacgtgcggcacataggtctcttgaagctcaaccgtaccagcgacgctttgctccacaccataatccttcggatccgcacgctgcgtgtccttatgcgtgtggtgtgcaagtac

SEQ ID NO: 3086 - DNA, 555 bp, Zea mays
  Clone ID: MRT4577_102811C.1
cccagctcttattccaattacttttagggaaggtgggacccccggcaggtccggtcccggatttccggggccgcccaagccgtccgaagaactttttccaaatttattaaccttttttgcgtcggctaaggatggctccagggggatcagggatggttcaattggaagtggaaaacttagacaagcgatttggaccattgaacccctggcagtttggggatgtggttgcacttccaggaaacaaagctgacattatacctggagttgaggggatgggaaatattaatgcagaaaagctgatatctaagttgggttcctggaataatctactgaaacccggggacgaagttgaggataaacgaattaaacaggctttgatttctaactcggaacaggcaatcctttgcaaaaacctggccacgctgcgttctgatcttcctaataatatggaccctttcaagacagccgaccttgtttttaagaggccacaggatgatggagagaaatccataaaactcttacaagcatgggaagcttatgcagaaggttcctcat

SEQ ID NO: 3087 - DNA, 149 bp, Zea mays
  Clone ID: MRT4577_102812C.1
gatctctatgaggatacaaattcctgcaacatggtcaaggtacaatggcttggcaaagctgatgagtcctgagtgcccagcactacgagaagttcaagagtgatactagatagagaaatcaaaaaccttatttttgctatcggcagatt

SEQ ID NO: 3088 - DNA, 462 bp, Zea mays
  Clone ID: MRT4577_102813C.1
tagggctgttatataccaaacaagaaatacattttggccctttaacttaaacacatagacatatcgactttttcttggcatcgcctcatcttttctgtgcaaccatggaattgaatgaacaaatgacttgttgcagtgcacctcatggaatctgacatcaacttgaaacttgctaaacctcttgatcccactaatcatgcataagccaacagagcagccaaggcaacccagaataccaagaatgggagtgccaatggttttgttagagggcttgcattcggcagccatggataatagagatacacagcaggatggagtcttctgagcaagaaattgggaatatgtgcaggtcacattccatgtcattagagcttgggttgccctgcgcccgtccgcggtgaaaaacttcgtaggcctgccaacaatggcacgcccacatgtgtacccagggcctggagtctt

SEQ ID NO: 3089 - DNA, 2176 bp, Zea mays
  Clone ID: MRT4577_102814C.1
gatattcccccaccacccacaccgagccaccgaggcgcggcaggaaggaaaacagcgctgcggcctgcgggaatagagtgtgtcgctgtaaaaacaggggagggggacgcgcccgctgccagtgcctgccgcacacgcgtgacgcgtttagcctttaagtcccactcctcgccgccccagatctccgccctcctcaccactgcccccccattccccggcgcccagcacccggcgccgcaaccgccgcagtccggagcaagatcggtgggtagacggacgggcgacaggcgggcgggcgcggctctgtctgtatctatctgttggtgggagaccggttgtgtcggttaggcggcggcgggtgggaaggaagaatggcggcgggcggcagatccatcgcgtgctttgccgccgtgctgctcgcggccgcgctgctcctctccgcaccgaccaccacagaggcttacgattcgctggatccaaacggcaatatcactataaaatgggatatcatgcagtggactcctgacggatatgtggctgttgtcacaatgttcaattatcaacaatttcggcacatcggggcacctggatggcagcttgggtggacatgggcaaaaaaggaggttatatggtcaatggttggggctcagaccactgaacagggtgactgctcaaagttcaagggaaacaccccccattgctgcaagaaagatccaacaattgttgatttacttccaggcactccatacaacatgcaaattgccaattgctgcaaggcaggagttataaatacctttaaccaggacccagcaaatgctgcttcctccttccagatcagtgttggtcttgctggaactaccaataaaactgttaaggtgccgaagaacttcactcttaagactccaggccctgggtacacatgtgggcgtgctattgttggcaggccaacaaagtttttcactgcggatgggcgcagggtaacccaagctctaatgacatggaatgtgacctgcacatattcccaatttcttgctcagaagactccgtcctgctgtgtatctctctcatcattttataatgacacaattgtgaactgcccgacatgctcatgtggctgccagaacccaagtgggtcaaactgtgtgaacgaggattcacctaatctacaagccgcaattgatggtcctggtaaatggactggccagcctcttgtacaatgcacttctcacatgtgcccaataagaatccactggcatgtgaagctcaactacaaggaatactggagagtgaaaatcactatcacgaacttcaacttccgcatgaattacacacagtggaacttagtcgctcagcatccaaattttgataatatcactcagttgttcagcttcaactacaaaccacttactccatatgggggtggcataaatgatacggcaatgttctggggtgtaaaattctacaatgatttgctgatgcaagccggcaaacttgggaatgtgcaatcagaactgcttctccgcaaggactcacggactttcaccttcgaaaagggatgggccttcccacgccgagtgtacttcaatggtgataattgtgtcatgccatctcctgaaaattatccatggctgccgaatgcaagccctctaacaaaacaaccattgacactcccactcttgatattctgggttgccttggctgctctgttggcttatgcatgatgagtgggatcaagatgtttagcaagcttcaagttgatgtcggattccatgaggtgcactgcaacgggatatttattcattcaattccatagcggcacaggagagatgaggcgaagccaagaaaaagtcgatgtgtgtgtgtgtgtgtgtgtttgtaagttaaagggccaaaatgtatttcttgtctggtagtatatagcagctctacaacactttggtgaacttagttactgcaaattaggcaattacagttgcaccttttgtattttatagcaaacccagacttctattggattctatgactgcccctcttgtagtaaacgcaaggcttcactggtactcctgtttaaagattggtcaaatagaagagacgacggtgattgtctgattgagataactaaaaaaaaaaaaaaaaaaaaaaaaaaaaaaaaaaaaaaaaaaaaaaaaacaaaaac

SEQ ID NO: 3090 - DNA, 351 bp, Zea mays
  Clone ID: MRT4577_102815C.1
gggacaaatgctttttatcaacggaccacaatgatacctagcgccagaaaaaaagaaaaagacggcttgagtggaaacaacaggaaccacaacggggcccataaggggcaccaacaaatggggcacgggaggaaatcaaaagggcccacccccaagaccggactggaaaaccaccctattttttgcggcaccaactatgggttaacccggttggggaaaaccaagtacccccttggatgaaagggagggccacccaattttcgggctgcggcttcccacttacggctttggccgacaagaagggcttattaggctccacaacacccgctgagcttgtgataaaccacgccc

SEQ ID NO: 3091 - DNA, 386 bp, Zea mays
  Clone ID: MRT4577_102816C.1
aagcaagcctcattggacatttatatagggggacaacaaacaggccatgggacactttttttttgcaaactagggagaggggggcccaaacggaggcgcagcactcattggaccaaaccatttacacctcgtacaaagggttaacaacaaaaaaaaagcgggggggtttttttttggcccgaaaccatgttgaaaaacaaacattgacagacggggggttttttacttgcgtaacaaaaaaaacatgggggacaaaccaaaaggcaaaattctttttgaaactggtaaaccttttccggcttccaaaaaaatccctacaggcactggatatccccctcttgctctggactggaaaaagcaaccattttagtggcgattcttggact

SEQ ID NO: 3092 - DNA, 3146 bp, Zea mays
  Clone ID: MRT4577_102817C.1
gggaccctcgaggccggccgggccgggagcgctgcggaagagtgtctcgtgctgctgcttccgctgcagtaaaatacggggaagaggaggggagggagacgcggccgctgcctgccgcacatgctttaagtcccactccccaccaccccagatctccgccctcctccccaccgccccccattcctcccctcggccgcaaccgtagccgccgcactacggagcaagatcgtcgggtagacggacgggcgggagggcgggcgggcgcggctctgtatctatctgtcggtgggagaccgcgtgtgtcggttaggcggcgggtggcaaggaagaatggcggcgagcggcagatccgtcgcgtgctgtgccgccgcgctgctcgcggccgcgctgctcctctccgcaccgactgcaacagaggcttatgattcgctggatccaaacggcaacatcactataaaatgggatatcatgcagtggactcctgatggatatgtcgctgttgtcacaatgtttaattatcaacaatttcggcatatcggcgcacctggttggcagcttgggtggacatgggcaaagaaggaggttatatggtcaatggttggggctcagaccactgaacagggcgactgctcaaagttcaagagcagcccaccccattgctgcaagaaagatccaacaattgtcgatttacttccaggcactccatacaacatgcaaattgccaattgctgcaaggcaggagttgtaaatacctttaaccaggacccagcaaatgctgcttcctccttccagatcagtgttggtcttgctggaactaccaataaaactgttaaggtgcccaggaacttcactcttaagactccaggccctgggtacacatgtgggcgtgccattgttggcaggcctacgaagtttttcaccgcggacgggcgcagggcaacccaagctctaatgacatggaatgtgacctgcacatattcccaatttcttgctcagaagactccatcctgctgtgtatctctatcatcgttttataatgacacaattgtgaactgcccaacatgctcatgtggctgccagaacccaagtgggtcaaactgtgtgaatgaggattcacctaatctacaagctgcaattgatggccctggcaaatggactggtcagccccttgtacaatgcacttcccacatgtgcccgataagaatccactggcatgtgaagctcaactacaaggattactggagagtgaaaatcactatcacaaacttcaacttccgcatgaattacacgcagtggaacttagtagcccagcatccaaactttgataatatcactcagttgttcagcttcaactacaaaccacttactccatatggtggtggcataaatgatacggcaatgttctggggtgtaaaattctacaatgatctgctgatgcaagccggcaaacttgggaatgtgcaatcagagctgcttctccgcaaggactcccggactttcactttcgaaaagggatgggccttcccacgccgagtttacttcaatggtgataattgtgtcatgccatctcctgaaaattatccatggctgccgaatgcaagccctctaacaaaaccattggcactcccattcttggtattctgggttgccttggctgctctgttggcttatgcatgattagtgggatcaagaggtttagcaagtttcaagttgatgtcagattccatgaggtgcactgcaacaagtcatttgttcattcaattccatggttgcacagaaaagatgaggcgatgccaagaaaaagtcgatatgtctatgtgtttaagttaaagggccaaaatgtatttcttgtttggtatataacagccctacaacactttggtgaacttagttactgcagattaggtaattacagttgcaccttttgtattttatagcaaacccagaatttttcattggattctacgactgcccctcttgtagtaaatgcaaggcttccctgatactcctgtctcaaaaaaaaaaagaaaataaaaaaaaaaatggcttgtacctgcccgggcggccgcccgggcaggaacttcttttctttcatattgggtgtcaaatggatcctgtaagaattcccacttcatagatacggggtataaagtttatccaaaaagttccaatttcaaaacacatattcaaaacacatatgagtaatgagtagtaggggcatatcctgaatgtgcctgatagacaaaaatttttcatgaaaataaagatattaaatttgactggacttgacactttattttttgttttctgagaaagaaaaaaatgcttagaaatgcatctaatctacgagttcataagagataattattctctttaataaacttttgtgtcgtgcagggcacaatacgattctatctttcgcttcatcagaaaaaatctgggacgaaaggattcgaacctccgagtaacgggaccaaaacccgctgccttgccacttggccacgccccatgtcatttcgttttatgaaacactaataaacactattatttttatatattattcgtcaatcccacttcaattacctaaaaatgagggatattttcttgctaggattctagacatgcagataatatagaatccaaaaaatgcattgatcattacatggaattctattaagatattatatgaaagtcgaatttcttccattctcatttgagaatgcgaatacaaggaggtattttgtgtttgggaaagtccgaagaaaaaggatttggaatctaccttttcttttgctttttcccttataaaaataactcaatcaaaatccaattatctactctacaagaatgaaatgcttgttatgcctaatatacttagtttaacctgtatctgttttaattctgttctttgtccgactagctttttcttcgccaaattacccgaagcttatgccattttcaacccaatcgtggatgttatgcctgtcatacctgtactcttttttctattagcgtttgtttggcaagctgctgtaagttttcgatgaaatctttactattctgcctgccaaattgaatgatgtattcattccaaaaaaaaaaaaaaaaaaaaaaaaaaaaaagtactctgcgttgttaccactgct

SEQ ID NO: 3093 - DNA, 238 bp, Zea mays
  Clone ID: MRT4577_102818C.1
gcacgaggactagtgctcggaaacaagttgcgctccaagtacgatatcgcctagcagttctaacgcgtcttccacaacggcgaggtgcagtacctccaccatcaaggaagtcgtctacccggataatgtcaaccccggcagctacaggattaggccataacttgcgcagcatcgtcaagaaagtcaataccatcgacgtcaagttcactcggcaaggccaccttcggctaatcagact

SEQ ID NO: 3094 - DNA, 187 bp, Zea mays
  Clone ID: MRT4577_10281C.1
gacccacacgtccggcgcataataacacaatccacaccatgatgttttttctcgtttccctaacatctccttactcgatatttgacgccatctccactcatacaatctttctcatcgcaccaacagccacacactatttttcatataccaccgcctcttcatctcccaattccacatcacctcccac

SEQ ID NO: 3095 - DNA, 341 bp, Zea mays
  Clone ID: MRT4577_102821C.1
ccgacgcgtccgctgacgcgtcggcgccttcttcctaccgagctaacagcgtacgttctcgcgtgaaaccatcagcagcagcggatcgtgctacagtgaccctagcattaaagactgcgcttgaaggagtatgacagtctgctacctcgatcatgactcaagaataaggctaactgcaagcctgacttgtaaaagcccaggctcgatacgccgtcatgcgttgccaacgggcaaggttaggaacgaaaatgcttgatacaggatcactggactccaacaactagtcgctccttttggaaagacggacacagcatcggtgctcaatgagaccatcgagtaca

SEQ ID NO: 3096 - DNA, 235 bp, Zea mays
  Clone ID: MRT4577_102822C.1
gtggattgctacattccagtgccacagcggtagaccgacctaacgatcttactcgctggggaagatgtcttgttcatcaccggtcctggtacagatgccactggtcgtatcgagcgtgtctacggccatattgctgacacagttgatatcgttgaaatctgggacaccacgcactgctccgtgactggcgtcgaaatgttccagaagaccatggacgataccatggctgtagaca

SEQ ID NO: 3097 - DNA, 921 bp, Zea mays
  unsure (1)..(921): unsure at all n locations
  Clone ID: MRT4577_102823C.1
gcacgagccaaagcttacatctcttgtcaaatgcaatgatcctacccgagataaaatccgggaactccttgctgaagcctttgcaaaggttcccagagagactagtaatgatgaccgagatgaagtgagaaacatcttggatgaagttgatgcatgcgacccattcagagttgctgtgacagtagagtctgcactatttgagaggtttgggcgttccactggggcccacaaggcaaaatacaggtcaatcatgttcaacctgagggctgaaaacaacactgattttcggagaagggttctcattggtcaagtgaccccagagaggcttccagacatatcccctgatgagatggctagtgatgcaaggaagcaagagaatttgcagatcaaggagaaggctctgtttgactgtgagcggggagcagcaccaaaggcaacaacggatcagttcaaatgtggcagatgtggacagcggaagacaacttactatcagctgcagactcggagtgctgatgaaccaatgacgacattcgtcacatgtgtgaactgcaacaatcactggaagttctgctgaatggcagcctgctaaaatgtttgtttagttgcgctgagcacccagctgtaatttgtgctctgttagttagctctgcgactcaaagttcaacagggcaggcggaactcagttttttttcctaaactaggagccgttatactcttcctctgttagtcgctctttgtgattctgattcattcagattgtactacttgaacgcataaatgttgtaaacttgatcatatcatcaccagctgtaccttaagttttggatggctatgtggttcattgtaaatgtgattgtttggttgttttaaaattgtgttcatgtttgctaaaaaaaaaaaaaaaaaaaaanctgagactag

SEQ ID NO: 3098 - DNA, 716 bp, Zea mays
  Clone ID: MRT4577_102824C.1
gattgagaatcgtgcgccgctcccggccccgtctgcttcgcttccccgtccgagcccggacgagcaacaggaagggaggcatgcgttagacatgagggagatctctcgcactgctatcgcgataatcagatctctcgcaagatgttgcgaggtgatgtgccaggagcacggacatggacggctcgcgacgactacgcggcggactcagacctccagcctcgagcgcgtcaacgtactactagaactacggcaggggtgaacggttcgtcgcgcgcgcgctggccatcatggacgtcgatgccgcataccatgcgactccctgtactgcgtgacgcacttcggtcatcatcttccgccgcgacaacttctgcttcggacagtccggcgcctaaaacaactggcgcaaggcgtcatctacgccgagggcgtggagctcatcgactccgtcgtctatctccaccgccaggaggccgagaactgtgactgcctccaggggatttctttggcatctgatttgctccacgctaccgcatctctcgcgctgatgaatacgctgttcagtcaaccacgaacgtgaatatgcactgatgaattcgccaagcgatgtgcgttgttgttaagcattggtctctgcaccggttgttatgcgagtacggatattgaaatcattgcttgtcgctgagtatttagctattttttgcacctaccatgatgga

SEQ ID NO: 3099 - DNA, 383 bp, Zea mays
  Clone ID: MRT4577_102825C.1
gccggccgggttgggctctcgaaaccctagccctctgctgctgctatcttggatggcactcttctccgattcaccgacaccgcccatatcatacctcccttcgacagctctgctgacatggatatcagatatttatgaatgtcgatgcccacgccttaccttttccatctcggcacggaccagtcttgcgacggcgtgtggaaggactaccgaaggaagatctcccgcacggccagaaaaaccgaaccacagcttcggacgaggcacggcatcgactcgccagcgcctcgatcggagagtgcgaagcaagaagcttgataaacatggaaacccatgcagacaacgacgtgtcatgccgaacccaatcattgttcctcacgcca

SEQ ID NO: 3100 - DNA, 298 bp, Zea mays
  Clone ID: MRT4577_102826C.1
gtacaagaaaccgaatgcctgttattaaccaaagtgtcacatacgtgcaatcttacaaggcaagagatctaaacttgcgccaaaaacagcttgctattataaacattcatcccagtggcctgtacctgtccgagactgatgccctgcctcccatccatcacctgctgtgttaagagttagtagctatccgaataccgaggagacggatcccgcacgagcttgaattgaggtatgaaaatctggtctgcttgtaggatatggaccaagtgcgcaagtaagggtttacggctgccgttcg

SEQ ID NO: 3101 - DNA, 234 bp, Zea mays
  Clone ID: MRT4577_102827C.1
cgaccacgcgtactggtatcacgctgctcaacttttttttcttttcatgaacaagcaccaaagcaataagggggaaatgggggacatttttcatgacggttccccctcacacccccaacacggatggcatacacatgagcgactcatcctgaatcactattaccaacaccgtcattgtccttacttgaccactgcatctccttctgccctgtgacctctcaaggagaacattac

SEQ ID NO: 3102 - DNA, 392 bp, Zea mays
  Clone ID: MRT4577_102828C.1
taagctcggaattcggctcgagaccaaggacgcggccatttttccaagtctactgccccataaacctctggggcgctcgtaaccagccacggggtacaccctgacgatccccacttcctgcctctgccacagccacttgctcgtgtttatcctgaccacccttacatggacctgactagataccgaacttgcgcatcacgccgggactgcgagagggaaacacgatcgacggtcgaatcaagactgacgggctgatcgatagtgtgtctgggctatcagggcaaacgtctaacacaaccatcttccttctgggtccccacagggttacattcaccatgcctgacgcctactctacatttatcagcgaacgagcttgaactcatgtatttgag

SEQ ID NO: 3103 - DNA, 570 bp, Zea mays
  Clone ID: MRT4577_102829C.1
cccacgcgtccggccggaacccactaccatcacatagtagcaacactggcgaccaagattttaccctgcttatgctccaccgctctaactgaatgagtggctaacacaacatttgtgcctcaatgctcacaagctcctatatctcccttgtgcccgatccttacatattgatagcttcattatgtgaaaaccgagatcttcaaccctataacgctacaacaagcaatcgtaggaggcaacatacctttatcacccttgggtaaacaagcgccagccctactatacggtgcactgagttgatgcataaccatcaagacacgagagctgaactaactagtgctacctggaatcaaccaagtagatctggcgaaccttacactgtactttcagcaacaacaatgtgttacattcaaacaactgactacattgaaccgagctacttatgtgcggtatcaaatatgaccattgagacagctaactgctgcctactctcatcaacgcagactgtttcatttaaccaagggggggtaacagtaccaatgtgattatttgcagcactaatactactac

SEQ ID NO: 3104 - DNA, 151 bp, Zea mays
  unsure (1)..(151): unsure at all n locations
  Clone ID: MRT4577_10282C.1
agaagcacgccggcggaagccgccccggacaggaattaacccccgggacgagcagcctaaaggcggcggccgccccgactgtgtgggggggcatgaacaacnacggcgggtgaaaaaaacccagccaggccagacacgagaccaccgccca

SEQ ID NO: 3105 - DNA, 297 bp, Zea mays
  Clone ID: MRT4577_102830C.1
tgaagccataaggggaaagtttagaggcgtcagccgtgaaaacaaagcggctgccggagcgtgacaacaacaccggcattagagatgtggagggaagcctcacagaaacagccggactggaggaacagagatgggataagacctactacacaggtaatggaactggccgacgcctagcgctggcaaacggcggaaagcatgtgacccctggagcgctggcgctgggtggcaaatcccctgatatcacagattcaaatgtttgatctggatgatgcatgctaagaggatggactgggg

SEQ ID NO: 3106 - DNA, 1161 bp, Zea mays
  Clone ID: MRT4577_102831C.1
gcgcgctgtccaacctccggacgctggacgtgagcttcaaccagatctccggcgccatcccgccgtccgtcgccgcgctgccgtcgatcaccaacctcatcctctgccacaaccagctcaccggcggcgtcccgtcgttcccggactcgtccccgctgctccggctggacctcaagcacaatgcgctctccggcggcgtgcccgccctgccggccgggctgcagtacctgtcgctgtccgcgaacaagctcagcggcacggtggaccaggtgctgccccggctggcccggctgaacttcctggacctgagcgtgaaccagctggagggcccgatcccggcgtcggtgttcgcgctgccgctgtccgtgctgcagctgcagaggaacttcttcgcggggccggtgcagccgtcgggcgacgtgacgatcccagtggtggacctgagctacaaccggttctggggccagctgtcgccgctcctcgcgggcgtcgggcagctgtacctgaacaacaaccggttcagcggcgaggtccccgcgcggctggtgcaggagctggtgggctccggcggcctgcaggtgctgtacctgcagcacaacttcctgacgggcatcgagatatcgccgtcgtcgtcgctcccttccacggtgtcgctctgcctgatgtacaactgcatggtgccgccggtgtacgcgccgtgcccgatcaaggccaggtcgcagaacacgcggccggccgaccagtgcccggagtggaggggctgagcctgatgtcggggtgagcttgatcgtgtctcagcaacgccagtgccaatgccggatcgcctccgatcaccggttgggaatagcgggaaagcagaactgaaggtcactgattctttgattgatttgggtatagttacaggcaagtaagtgccttaataatccggatttacaggtgtgtgtttgtttagttggtgtatgtgcgtttgtgtatctctctgtgctgtatagtgagcagtactccctcccggagcttctatggcactgccgcatgatgacgctgtctgcatctgatgatggatggtgttagtaagaggccgtgaagttattatttatcgaatcatgtcgctgatcaattcaatatatggaccaagcatgcactgtgcttgattttgttcgc

SEQ ID NO: 3107 - DNA, 665 bp, Zea mays
  unsure (1)..(665): unsure at all n locations
  Clone ID: MRT4577_102832C.1
gtacgcctgcaggtaccggtccggaattcccgggtcgacccacgcgtccggcgccagagcgcgctagccgcattgcgagctgggcacggagcaggcgccatggttctgctgcacgtgctgttcgagcatgcggtcggctacgcgctgttggcgctgaaggaagtggaggagatcagcctgctgctgccgcaggtggaggaatgtgtgcttaaccttgcaaattccacaatgtcgttcgtctggtggccttctgtcccttctcttcatcccaggtggccttggaaaatgccaatgctgtgtctgaaggtgttgttcacgaggacctccgcctgctcctggagacatacctgccatctaaaaagaagaaagtacttctgggggttggagaccccaagattggtgctgcaatacaggaagagttggggtacaactgccagactggtggtgtgatagctgagatccttcgaggagttcgtctgcatttccataatctggtgaagggtctgacagatctttctgcttgtaaggcccagctagggctgngacacagctactctcgtgccaaagttaaatttaatgtgaaccgagtggacaacatgattattcagtccataagcctnctggaccaactgnataaagatatcaataccttctcgatgcgcgtc

SEQ ID NO: 3108 - DNA, 752 bp, Zea mays
  Clone ID: MRT4577_102833C.1
ggggatcgacttaagattggggatcgtggccaatacaaggcttttggcgagagttggaatgccaggactgcttgaaactgatccttttgctgaggcagatcagtaccttgcattctgcaggggtgggcttgatcatttccatttctcagtggtgacaaagcgatacttgattctcctcgatttgagacagccattgacgcctgtgttggcgtggcagcatgagctgaaaagtcctagtaatgttgctatgtttcgactttctgaattgaggccttccaaggagcatgagtgggcatcaaattctggttttgctattttggttggttcgttcaagacaggggagttcagtgttttctgttatggacctaaagagcaaggctgtccagataactctcacctgtatgcttgggatcttccttcacggttttcgctgacaggtcatcactgcagctgcagcagcggaagaatgaaagatgtattctcaatgcctgtttcaagagatgaatatgcttcaaaatggagtaaaaactccattattggctactatgtgcttccaaaccacctctcagtttcagagacatcatttactggctttgctttggtctgcttgacagccatggggaaattagaaatgcaaaggtaccgtgcatctgcagattcaacaaatgatatcccatgtgatgaatcaaaacatacagccagggctagtaattcagctatatttcctgacactccgtatgacaatttctccc

SEQ ID NO: 3109 - DNA, 379 bp, Zea mays
  Clone ID: MRT4577_102834C.1
cacatatcccttctctcatcacctcagctagcgatttcctcttttctttggagtaccatccgattatcgccacccacccaggaccagcctcacggctcttccgccggtagcatacgatccttcctaccaccctacaataatgactctcatgatattaaacgaagcaaagatgagaccatcaacgaaaaatgctacttacttccataccctttcaacaaataaatggtctcatacaccccaaatatcaaccatagttctaatcaactgctcaagtttcatcagagcttccagcaaacttaccaatatataccagggcataagaatcactactttatgccccggacaaagaacccctcttggaaacttccaaaccaacttt

SEQ ID NO: 3110 - DNA, 203 bp, Zea mays
  unsure (1)..(203): unsure at all n locations
  Clone ID: MRT4577_102835C.1
gggaaggggtttttttttttggggacaacactgacatttagggttattgtttttggtcaataaattgncctgaaattcagagttagatcacaagcccacttattccatttaacaaacctattatttttggattcattctagattaaattgacattggtgatcgatcaaatgaacagccttcttctgagacaagatctccataa

SEQ ID NO: 3111 - DNA, 540 bp, Zea mays
  Clone ID: MRT4577_102836C.1
gaaaaacaaaatttatttgatcggaaaccattataccagttaaaccaattttaacatttttattatgccaaccataaacgggggaaaggcaaaaccaaacagggaaaaaggggggggaacaaccatgcaattaaagcccccctggttgactgaccccaaagaaaaaaacccttgcctccaaatggaggactaaaaactaagtttcctcgccctaattttaaacttaagctccaatttcctaaaaatccttctccagggctgaaaaatcctcccttgcctttaaaaactcccttttttccttcctttccccgacataccaaggaacaaaggcccgttgggcatacataaaataaaactggggggcaaaacgaaaaaaaacctcacccaggggggggttgttgctagaaatgcaaacggctcgttgcaccttggccaggccccctcaagggactacaggggggggtggggagtttatcccacacttgaaaccaggggggccccaataaacaaactgcactgtttttttggccttgttggaag

SEQ ID NO: 3112 - DNA, 562 bp, Zea mays
  Clone ID: MRT4577_102837C.1
gcggcattctgcatgcttaacgccttcgactacatctcatcggcacgctgcggctccactggcgtagacacgctgtaagtgcaatgcgtcggaaagtcgagcggcggcggtgagcagcagggtgacgaaatgacacccctgagtgctcagattaatatgagtgggtccttaatgggtccttcaaaacatccttcaaaaaaagctcagccaattaatcaactaaactagcgtacgtcaagtgtaggtatcttgtctgctttcatggtttttcttcattcgcaactatcttagaacatacggagtatgtgtgtgtgagggttagattaatctcacaaagcgatagatagctgatcacaattaaccttggccgggccaagttaatttaagggtgtgtagttatgtaaattcaactcatgtatggatgcatgagtagaagtggtttgggtagctgaacctatatattagtccccttacacgcgggttgagctaatactatgtatatgtagttgtgtgtaaatgcaaatgatgtattatctatttatcttactatttcgacaaccca

SEQ ID NO: 3113 - DNA, 383 bp, Zea mays
  unsure (1)..(383): unsure at all n locations
  Clone ID: MRT4577_102838C.1
ccgcatcggcggcgacgcgccagacacaaactaccgctttatgggcgattacgtcggtgctcaagctgactgtggctcagtcgacggtgttattgatgctaaacggactgttcaagctgatgatggcttcctcactgttgcttctcggatctcaaagattctttcgggcgttatcacgtgacagattagtctatttggtatctaccgtggctactactctgtggagactgtgtcgttgttagtggctctaaaagtacgttatagagacagaatcacaatattgagaggaaatcatgagagcagacaaataactcaagtgtatggcttctatgatgaatgctngcggaaatatggaaatgcaaatgtgtggaagtactttacag

SEQ ID NO: 3114 - DNA, 376 bp, Zea mays
  Clone ID: MRT4577_102839C.1
aaattggggggcacagaacaacaagacccaaaagttttagacagggtggctaacaataacgatacccgagtagtctgggaccttcctttgcttatcatgaaatctaggaatgggggtatggccttgggctgtctggccagtgacggacccaactaaggaccgagcatgtatgggcccggttcaccccaatgcacggccccatctgcatgccgccaagccccaacaaggctggggataaatacctaaccaacaaacccaaagggggggggagcataaccagtcagcggctaacttaatctcatgcagaatgcaaaggctggtcactgaaaggaatacactgggttaaacgaaggattttctttggaaagaaaacgag

SEQ ID NO: 3115 - DNA, 485 bp, Zea mays
  Clone ID: MRT4577_10283C.1
gcgctgtctgtccagtgtttagtgggcggcgacggcggttctctaaggtcgactccggcggaaggatttggacctcgccaccatcgttgattcgtcggatccgcggtccagaggaggagaaggcctgagccaaggtgcggaccacccaacccaccaccatctcgaattattaggcgaggtcgccgccggccaggaggatgaaacggagggaatgtgttgcgtcggagtccaggtcagggcacgggaaggtggcctgtagcctatctgtatcccaccccaaagcttcttgcacgggaccacgccatgcacctgaccaaagagctaaccgcaccttccatttgcattcatcactttgtccaatcgagttggtttatggaagctcgaatggaattgcttggattcggatgtgagattatttagctgttaattgtctccggggctcggggtttaagaaatttatcaatcgagtagatatattctgactg

SEQ ID NO: 3116 - DNA, 267 bp, Zea mays
  Clone ID: MRT4577_102840C.1
atcatgctatcatcaacacgagcgttcaaattctgatctgctattacatgaatggggctcttattgtattgactctccagataatacaacttctcatatttctttcaattgaagcgtgcctggcaatttctttccttggcttgaacgccgccatctacatcaccaggaaatggctatgggtgtatattgacaactaaatctagacttttgctttcaatgcttatacgaccaggctactgattctgtgtgatgtcccgcttttcgcat

SEQ ID NO: 3117 - DNA, 416 bp, Zea mays
  Clone ID: MRT4577_102841C.1
aaccatatgtaaataaaacacaaagcaatctatataaaacaaaccaaacttacaaacacaggcatactaaaaaaataaactataatatacacccacctaaaatcaaattcaccaaccataaagggccgccccttctgaataacccaacttctacgacccacccaactcaacctcctagcctttcattcggctcccctaaattaaattaactacccggcatttaccaacctatctccttaaaaaaccttggctttcccaaattaaatatctttacacaccatcccctttttcaccattggcttaataccaaaaaggcccacacagatcgccttttcaaacagttacccacctaaaatgccaaatggacccccccttttatcgccccttaaacccgcgcctttgtgtggcttcccccc

SEQ ID NO: 3118 - DNA, 115 bp, Zea mays
  Clone ID: MRT4577_102842C.1
ctcacattggctagtcatgtatctttcagatggtgaggttgagaatttagctgcacggatgatcaaatggttacaagtcggtggataagcattcttcagagaatcacgtgtccac

SEQ ID NO: 3119 - DNA, 299 bp, Zea mays
  Clone ID: MRT4577_102843C.1
aacaaaaaaaagctggaaaactgggaagccaaatacccgttttagggggacccccataaatgggggttacacaaaatagccaacatgcaaattattttaaaactggccagatgcaggggggggaatttttggggggggctacacaagggggcaccgggcactggaatgcccaaaaacaagattgttgcaacaaacatggaaaaaaaaggggcggggggcaagggaacaattccccatgacgaggtaccgggggttaaaatttttctggtacccaaccggggggaaccccccctagattt

SEQ ID NO: 3120 - DNA, 433 bp, Zea mays
  Clone ID: MRT4577_102844C.1
aaaatggaaaaaaagggggaccccgcccggggggccggtcaaaaggggaaattccaacacacgggggggcgttactaggggaacccagccgggaaccaaactgggggaaaaaaagggaaaaactgttccccggggaaaaatggtatcccctaaaaattccacaaaaaaaacaagccggaagaaaaaagggaaaacccgggggggcccaaggggggggccaacccaaattaatgggggggggcccaccgccccctttccaaggggaaaacctggggggccagctgaataaaaaaaacggccaacccccggggaaagggggtttgggaattgggcccttttccgcttcctcgctaaaaaaatcggtgggctcgggcgttcgggtggggggaggggtttaaactcaccaaaaggggggaaaacggttatccaaaaa

SEQ ID NO: 3121 - DNA, 276 bp, Zea mays
  Clone ID: MRT4577_102845C.1
gggggcccccaaaaaaaaaaccccaagggttatattcttaacaaagcccaaaagaactaaaacttaggggggttgttacagggcggggggggataagttaaacccaaaaaggcaaccggggccaaaacccgggggggacccagggtccgggggccccggccaaatttattttcaacataaacaagccgcaaagatgggctgcgaccaaagggcatcggggaccacccttgatgggggggcagaaaaatctctttacgggggcttgaacaagggggg

SEQ ID NO: 3122 - DNA, 288 bp, Zea mays
  Clone ID: MRT4577_102846C.1
cgtaagctcggaattcgtctcgaggactatctacacaaccttttttgcagaaacactccttccgcacctgcggggaattttcaaatctttggggaaaccctgactggcaagacttttacccttcggcgtgttgccctctgacaccattgacaacattaaggccattatccaggacaaggagggcattcccccagaccacatggaaatgaaatttgtggtcaaacagcttgaagactggcgcacgcttgcttactacaacatccaaaaggagagcaccctccactataa

SEQ ID NO: 3123 - DNA, 157 bp, Zea mays
  Clone ID: MRT4577_102847C.1
acaatgcgcacgatatagatggccaaacagggatgaggaggtgtgtgtgaagctttaccttaccagatccgcagaccatcggtgatggataagacagaggagaggcagatccacagatctagtacaccggagtccatagcagagggggcgacagcaa

SEQ ID NO: 3124 - DNA, 813 bp, Zea mays
  unsure (1)..(813): unsure at all n locations
  Clone ID: MRT4577_102848C.1
tgctggacgctgcgcagcatttttcttggncgtttctgctctgcccgcgcactagccatgcatgcgtgtcaggggcgcaaatttttcctgtccagtcgcttccagcagctgcgcgcacattttttttcagccccacactactgccgtgtgcgcagccttttgctcttgtgaccagtcgctgtgtcacccgcgcagcaagaaatttgaattttttttgggcatcttccctctgctgtttctggttctctgaccacactggtcagaaccagctgaactggcccatgggggcggttgaactggtcctgaggaccagctcaactgcctatatatacttgaactctccccttctcttctcccacttcattcactctcgccttggtcgcttcacaacctctagagcctctccttcacactcttcaaccggttcacagtttcaccaccttttcaatcatggtgcgtcgtcgcaacccctctgtgattgagtttagcagcgactccgacgagattcaggaggaatctcccatcccctctcctccgcctcgtcgctccctctctaagagaggacgtggctctggtcggatggatggcgagggctcttctatgccctcgcagccgactcgcaggagacgccaaaaggttggtgcctctcgtcctcgtcgtagcacgtcttcctctgggtatgctccccgccaggaggaggatggggctttcgacgacttcgtcgaccttctggcgcctgatgctctctacgtcaccggactccacatgcatcaagcgaacgtcagccgcgatccgcatgaatctcccgtcccc

SEQ ID NO: 3125 - DNA, 358 bp, Zea mays
  unsure (1)..(358): unsure at all n locations
  Clone ID: MRT4577_102849C.1
ggagttacgcagcttgtcggaccactacacgttctgcttgatttcgctctcgccgctggactggcgantctatgcgcttgttgaggagctgatgccctttatcagcgagttcagcctaatcagataccgagttctcatcgagatcaagtggctactgaaactttctcaaattcctgagatcactgaagtgcctcagttcatcaaggaagcacattccttgttaaatgccattattgataatttttacattagatgaatcaaaagaagttaataaaatctaaaaagttaccaaccatgaagtgaaaaccctaaaataccttcttaaacaaatggtacatttcaaattcataaattgcaa

SEQ ID NO: 3126 - DNA, 416 bp, Zea mays
  Clone ID: MRT4577_10284C.1
tgacggggtgctcttgataagacaagtctggttctatctccaattctagttgacggggtgctcttgataagacaagtctggttctatctccaattctagtgtggaatacatcatgaattgctgacatatgaggtggcaacttcaactggtatgctacaggtccacaagcctctttgatctcataaggcccaatatagcgaggagctaacttgcccttgatcccaaatctttgaacacctttagtgggtgacacattaagatatacatgatctcccacttcgaattgtagaggcttccttctcttatcatgatctctcttctgtctggcctgagcgccaagtcaggtctgtcggcattgttcatcccgagacaaaactgatgtcaaaccttgtcagatggtcttggcttgggttcaa

SEQ ID NO: 3127 - DNA, 475 bp, Zea mays
  Clone ID: MRT4577_102850C.1
caaaaggcaaagataaaaggcaaaagctggagagagagagggacgagggagggaggccattgatagagaccacgagctgttctagaagtcaccgcgctgcagcctgcagctcaggggggcctgttccctggatctcgccatcgccattgccgctgccccccacctactactcctgctcctagtcctacacccctcctactccaatccaagaggtgctttggatcgcattgcttcgtgctagagttcggtggtcagcctgcgtgtgggacagtgaatttgaaattggcggggctgttgttcaaagaattggagatggacaggaagaattgtcctccatcgccatcgccaagatcgaccgagaagtctggaagagaattgagatctggggaggccaatgtcagcacaaataccaatagcaacctcatcgcaaaagtgacaaggagaaaggagtcaatgtgcaagtcattctaagatg

SEQ ID NO: 3128 - DNA, 1032 bp, Zea mays
  Clone ID: MRT4577_102851C.1
atggcatacccatggtggaagcttgacgacgaagattgtcgtcagtttcccgctgacgtcgtgccacctcatggacatcagcagaaatgttgtggcacatggagaaaaatgtcgcaaacccatggaccaagcgagcacccatccctcggccacgacctcgaccacgaccacgagcacgtggcatgggagatccgcggccaggagagggatgcgaggcagcggcggggcgagaggaagatggatgatggggaggctggggaggtgtctcagtggaggaggcagggcctccagaccctcagggagcccgcttcgtacgagcagttgggttggaggaatcaacccagtaggacaccctctgagaggagaccaggaagcacggacgatctcttcccagatcatgtcaaacacattgatgcgggcgagactgtttggagcaaggaggaggaggaagactcgactctccccaaggacgttcatttgatttccgcccttcgggagaacggtcatcctggacaaagaattaaggtacctgtagtacctatgcatgttagcggtcgtccagaactcccgctcattagagacatgaataaattccgtctcttcccgcatgggccgcctaatgttatgcactcgcatgttgctgccctgaatatctgcatcagagaagcccagaatatgggcaaaacgacgataactgactttgtgccagttaccctggatgaagaaatacatgactgggtaatcctacccatcggcttcctcatctacttcctttatccagagggtggcataaaactgagctaccacctcgttgttccagggaatgacagaattgtagaagtcagcctggaaaagattccagaaccgagggtcctggacaccaggatgacgaggagtgagagtaggattggtgaacctcaggcgctgaagggtgtctattcccttcagagaaaagtcgacaggaggttcatgtggaccgcgagtgacgttcgccggatgcatgtgcagtccggtgacatagagagcatctag

SEQ ID NO: 3129 - DNA, 349 bp, Zea mays
  unsure (1)..(349): unsure at all n locations
  Clone ID: MRT4577_102852C.1
gcnagacttaacacatagagcacccgacattttatttttgtttataaccaaaggacacacaagaccaccagaaacctagcccaaaggaaaacacacactctaaacttaaaacacatcgtgttacggagcaccccaccaatgacacgcttcctatcactaagggggtggaacagggggtagcaccctaattatgcaaaacagcgggagcattccgagccatcaaaccatggatctatccaggcgactcattcagcgttgagaacctgggcgcagataagctcggaggccgccaccatgttgtaaaggcagggctcgacctgcgggcacttgcgggtatggagaccacagc

SEQ ID NO: 3130 - DNA, 839 bp, Zea mays
  unsure (1)..(839): unsure at all n locations
  Clone ID: MRT4577_102853C.1
ccgggnattataaatagagaatgactttcgagtttgcatttgcgtcgagaataaaagtttttaacaggctccaaattcggccttctggagatcgagtaaaatcagaaatcggtgaaaccttcacaagtaacttgataaatggagataaacgtgatcgagaaatagaaaatttcactgagcgtccgagattaggacaaatctcccgtcataacacgaaactgacacctggggtgtcacagaggcggaggagaagggacgggagattcctcctgaatctcgtcggagtcgctgctaaactcaatcacagaggggttgcgatgacgcaccatgattgaaaaaggtggtgaaactgcgaaccggttgaggtgtgtgaaagagtggctctaaaggttgtgaagcgactaaggcgagagtgaatgaagtgggagaagagaagtggagagtcaagtatatataggcaattgagctggtcctcaggaccagttcaaccgcccccatgggccagttcagctggttctgaccagtgtggtcagagaaccagaaacagcagagggaagatgccaaaaaaaatcaaatttctgacacaggattctgaaaaagtgtattgcggagattccatgcgcctaaaaaaattagaaccaagtgtctgcgcagatgagaccggacgacaaaagtttccttgctgcgcgggtgacacagtgactggtcacaagagcaaaaggctgcgcacacggcagtagtgtnggggcttgtgaaaaattttgcgcgcagctgctggaagcgactggacaggaaggaaaaattggcgcccctgacacgcatgcatggcgcacgggctg

SEQ ID NO: 3131 - DNA, 1409 bp, Zea mays
  Clone ID: MRT4577_102854C.1
attgggaccctcgaggccggccgggctggagtttgctatttaaacccgtttcctctcttgccccgccggacaatcacaggcctcccggcctcccgtgcgctattctctatcagcttacccagcacacagtacacactctaatctccacacgacccaatagatatacggggctgaaggatgaagcttagagcaaaagggatcggcctcctgcttctccttgtcttgcttgctctttgctccaccattgaagtcggcgaggcaagaagaggcaagcattggaggtcgtcgaggagctcaccgggctcatcccagctcaagaaaggcaagggaaagaagagcagctcccaccggcagtacggcgccaaccggccaggtccgaagccaccggtcagctcgacaccaagctctggcgctggcaagggaaatcatcagaatccgtaccaaccaagcccaagtccaagcccgaatgcccctgacatccctcctatgccaagccctgccaatggcagcaggcattccactcccgagccgccggctccaagctgtgggaagggtcagcagcagccatcacagccgccgccagcgacctcgcagggtgcagtattcaatgtggttgattttggagccaagggtgacggagttacagacgatactaaggctttttgaaggagcgtgggctgctgcctgcaaaaaaggggcatgtacagttctcgtaccacagaattagaggtcgaggttgacccaatctactctcactcctcgtcatcctggtgtccaggaccctcggttctggaatcttttccaggctgacttctacaattctgtcattctttccaagaaacacccagtcgtccgacatagatttattgactgggagggttgtgagaatatgggagatgctgacatgtcgtcagctctcgtaaacttagagagaaaggggttacgaaacattatgaccatggaatacccctgaaacgatgaggtggtagctcagttctatgccaccctctggataaagaaagtagatgaggaagccgatgggtatgattacccagtcatgtatttcttcatccagggtaactggcacaaagtcagttatcgtcgttttgcccatatactgggcttctctgatgcagatattcagggcagcaacatgcgtgtgcatgacattcggctgcccatgcgggaagagacggaattcattcatgtctctactgagcgggagttctggacaaccgctaacatgcataggtactacaggtaccttaattctttgtaccggatgaccgttcttccgaagggcggaaatcaaatgaacgtccttggggagagtcgagtcttcctcctcctccttgctccaaacagtctcgcccgcatcaatgtgtttgacatgatctgggaagagatcg

SEQ ID NO: 3132 - DNA, 1423 bp, Zea mays
  Clone ID: MRT4577_102855C.1
ccggccgggggataagcggggaatttggggattcccccgcaacccaggcctcccgcgctctattctctctatctaccactactactacccagcagcagcaggccagcacacaatacacacactctaatctctccacacagccaacacagatacggacaggaggatgaagctgagagcaaaaggcctcggcctactgctcctccttgtcttgcttgccctttgctccaccattgaagtcggcgaggcaagaagagcagcccggcattggaggccgtcgaggacctcctcctctcagctgctgaagaaaggcaaaggaaagaagaccagctcccgccgccaatacggcagcaaccggccaagtccgaagccaccggccagctcgacaccgagctctggtgccggcggcaaaggaaaccagactccgtaccaaccaagcccgaatgcccctcacgtcccgaggccaagcccccctgccaatggcagcgcccattccactcccaagccgccgactcctccaagctgcgggaaggctcatcagcagccatcacagtcacagccgccaccaccagcaacctcctcgcagcatggtgcagtattcaatgtggttgattttggagccaagggtgacggagttagcgacgatactaaggcttttgcatgagcgtgggctgctgcctgcacccagggggcatgaacacttctcgcgccagaagttcaagaaacccttctctcactcctcgtcatcctggtgtccaggaccctcgggactggaatcttttccaggctgacttctacaattctgtcattctttccaagaaacacccagtcgtcagacataggtttattgactgggaggattgtgagaatatgggagatgctgacatgatgtcagctcctgaaaacttagagagaaaggggttacgaaacattatgaccatggaatacccctggaacgacgaggtggtagctcagttctatgccaccctctagataaagaaagtagatgaggaagccgatgggtatgattacccggtcatgtatttcttcatccagggtaactggcacaaagtcagttatcgtcgttttgcccatattctgggcttctctgatgcagatattcagggcatcaacatgcgagtgcatgacattcggctgcccatgcgggaagagacggaattcattcatgtctctactgagcgggagttctggatgaccgctaacatgcataggtactacaggtaccttaattctttgtcccggatgaccgttctcccgaagggcggaaatcaaatgaacgtccttggggagagtcgagtcttcctcctcctccttgctccaaacagtctcgcccgcatcaatgtgtttgacatgatctgggaagagatcgtccgtgcctcctggtctcctctctttttttttcccg

SEQ ID NO: 3133 - DNA, 1170 bp, Zea mays
  unsure (1)..(1170): unsure at all n locations
  Clone ID: MRT4577_102856C.1
gccctgtccagtcacttccactcgctgcgcgcgcgcagagtacttttttttcggtcgcttcttgtcagcgcgccactttttctatccggtcagcaggggtgtgcatgcagaatcttttttctgggtgtgcatgcagagttcggtcacttctcctctgctgggcgctgcgcagcatttttctttgtcgttcctgctcagcccgcgcactagccatgcatgcgtgtcaggggcgccaatttttcctgtccagtcgcttccagcagctgcgcgcaaattttttttttggcccacactactgccgtgtgcgcagccttttgctcttgtgaccagtcactgtgtcacccgcgcagcaagggaactattttttttgtcacttccgtgcagcagtgtgagggataaagggcgcgcagaacttttcttttgcgcagttctttttttcttttgccgtccggtctcatctgcgcagacacttggttctgattttttttggcgcatggaatctccacagtacactttttcagaatcctgcgccagaaatttcattttttggcatcttccctctgctgtttctggttctctgaccacactggtcagaaccacctgaactggcccatgggggcagtttgaaccggtcctgacgaccagctcaactgcctatatatatttgacactccccttctcttctcccactccatccactctcgcnttagtcgcttcacaacatttagagccttctctctcacacacctcaaccagttctcagtttcaaaaccttttcaatcatggtgcgtcgtcgcaacccttccgtgattgagtttagcagcgactcggacgagattcaggaggaatctcccatcccctctcctccgcctcgtcgctccctctctaagagaggacgtggctctggcaggatggatggagagggttcttccatgccctcgcagccgactcgcgggagacgccaaaaggttggcgcctctcgacctcgtcgtagcacgtcctcctctgggtatgctccctgccaggaggaggatggggctttcgacgacttcatcgaccttccagattcagatgctctctacgtcaccggacagcacatgcatccggcgaacgtcacccgcggtccacatgaacctcccgtcgacttctctctaagggaaatatccggcc

SEQ ID NO: 3134 - DNA, 1136 bp, Zea mays
  Clone ID: MRT4577_102857C.1
gtgacactatagaagagctatgacgtcgcatgcacgcgtacgtaagctcggaattcggcccgctagaatctcccttctcctactctcgtcattcctagattatgttgcttggagcggacgctcacaaattgatatcggagacactgatctaagcgctagcacacacctactacacgcgtcgcgcgaaggaatccggatccatggagcccaacctgaagatggcgatcgaggaacaatccaagcttcttcgcgacatctgtgaccacctctttgctcaggagacgcgttggtgcacgctcgagacaaccgtcgcgtggaacaccgcgtcaccgcaacatctggaagccaacatcgccatcgagagtctgacatcgatccacgtggaactcgacgcccaggtcaccgcagcgatcgagcgcctcgatgaagtcgaggccgctttcgtaatgcgcctcggtgccctcgtgtcggcttacgcggccttcgagtcgtggcggcccgacgtggaggcttcggtcgacgagatccacacctccgtgcatcttctgcgtgacgaggtgtccaagtgggctgcccaagcgccgccgccacagctcgataccgccgcgggtattctcggcccgtaccagtcggtggcggagcgctcgcctgctgccgcgtacaacaccgacagcccagatgggaattgcttcgacaaaaatcgctgggggcatggttttgggcatctccttgcccaaaaccatctcccgatcaatggaggagattgtggaggcatcaagaattcgggagtacaagaaatttgattccagtacagccagcaagactccatctcgtggtccttttccgctacctccaccgcccaagtctgctcctggcaagctagtggactctaaagccctagaacatcttgatgcaccagttatggcggattgtctctactccgtctatgctttttgtaaggcctagggcctctgctacaaatgtggattgtcatatttccgaggccatcaatgtccggatactgttccgcttcacttggtagaagaattatggcatcagtttcaacctccatctaaagataatcaatcagtgttggggatcaaaaaaaaaaaaaaaaacaaaaaaaaaaaaaaaaa

SEQ ID NO: 3135 - DNA, 874 bp, Zea mays
  Clone ID: MRT4577_102858C.1
ctgtccggtctcatctgtgcagacacttggttttgatttttttttgcatagaatctccgcagtacactttttcagaatcctgcgtcagaaatttgattttttggcatcttccctctcctgtttctggttctctgaccacactggtcagaaccagctgaactggcccatgggggcggttgaactggtcctgaggaccaactcaactgcctatatatacttgactttcccttcttttctcccacttcattcactcttgccttagtcgcttcacaacctttagagccactctttcacacacctcaaccggttcacagtttcaccacctttttcaatcatggtgcgtcgtcgcaacccctctgtgattgagtttagcagcgactccgacgagattcaggaggaatctcccgtcccctctcctccgcctcgtcgctccctctttaagagaggacgtggctctggtcggatggatggcgagggctcttccatgccctcgcagccgactcgcgggagacgccaaaaggttggcgcctctcgtcctcgtcgtagcacgtcttcctctgggtatgctccctgccaggaggaggatggggctttcgatgatttcgtcgaccttccggcgcctgatgctctctacgtcaccggactccacatgcatccggcgaacgtcagccgtggtctgcatgaatctcccgtcgacttcactctgaagggaatagacacccttcagcgtctgaggtttaccaaccctactctcactcctcgtcatcctggtgtccaggaccctcggttctggaatcttttccaggctgacttctacaattctgtcattctttccaagaaacacccagtcgtccgacatagatttattactccc

SEQ ID NO: 3136 - DNA, 377 bp, Zea mays
  Clone ID: MRT4577_102859C.1
ggaagatggacggcggtattggtccattatgcaaaatttgggaattaaaccttcaatggagaattatggctgcatggttgatctcctgtgtcgatctggccttctggatgatgcttactcctttgttattggcatgcctgtctcaccgaattcagtaatctggaggacacttctcgtggcttgtaaaagctcgaacaggattgacatagcagaatcagcaacaaagaggctccttgagttagaacctcacaatccagagaactacgttctgctctccaacttgtacgcatccaactcccagtgggacagagtgagctatctgaggagaaagatgaaaggcaagaatgttactgctattgctggacgtagttcgattg

SEQ ID NO: 3137 - DNA, 288 bp, Zea mays
  Clone ID: MRT4577_10285C.1
ctcttggagtcatgtaggatctgacgcctgttcaccacgtgcctttcttcctccttggttcttcacagcgggtcctgccggatcacagcttactggtgaccgcacctccgttcctctctcctgagtcttctctcctcaccaagacaacagtcgccactgtccactgtccccacccgactgcctgcataaaaaaaaaaccgaggttcaacaaacagccactgaaatcttcatgcccatccttacttcctacccacacaccatatctctttcacatgaggatttctttcc

SEQ ID NO: 3138 - DNA, 2007 bp, Zea mays
  Clone ID: MRT4577_102860C.1
ggtaccctcattgggtacctcgaggccggccgggcagggaaaatcacaggcctcccggcctcccgtgcgctattctctatcagcttacccagcacacagtacacactctaatctccacacgacccaatagatatacggggctgaaggatgaagcttagagcaaaagggatcggcctcctgcttctccttgtcttgcttgctctttgctccaccattgaagtcggcgaggcaagaagaggcaagcattggaggtcgtcgaggagctcaccgggctcatcccagctcaagaaagacaagggaaagaagagcagctcccgccggcagtacggcgccaaccggccaggtccgaagccaccggtcagctcgacaccaagctctggtgctgccaagggaaatcatcagaatccttaccaaccaagcccaagtccaagcccgaatgcccctgacatccctcctatgccaagccctgccaatggcagcaggcattccactcccgagccgccggctccaagctgtgggaagggtcagcagcagccatcacagccgccgccagcgacctcgcagggtgcagtattcaatgtggttgattttggagccaagggtgacggagttacagacgatactaaggcttttgaaggagcgtgggctgctgcctgcaaaaagggggcatgtacagttctcgtaccaccagaactagagttcctagttgggccaatctcgttctctgggccttactgcaaatcgaatattgtctttcagctggaaggaacaatcctagctccaaccagtgctaaatcctggggttcaggcttgctccagtggctcgagttcaccaaactaaatggaatggttattcaagggaacggcattataaatggcagagggcaacaatggtggacctactcagacccagaggatgaggatgatgatgacacgtaccatgtagagtttcaaagaatgccacagattaaacctacagcgttgaggttttatggtagtttcaacgttgtagtgtctggtatcactattgtcaacagctcacagtgccatcttaagttcgacaactgtcaaggagtgatggtccatgatgtgaccatatcctcccctgagaacagtctcaacactgacggaatacacctgcagaactccaaagatgtcagcattcatcatacaaccctggcttgtggtgatgattgcatctccatccagacaggatgcagcaacataaatatacacaacgtgaattgtggaccaggccatggaatcagcataggtggactaggccgagacaacacaaaagcatgtgtatcaaatgttacagtaagagatgtcaacatgttcagaaccatgaatggtgtcagaatcaagacctggcagggtggcgtaggattggttcaagacataaggttctcaaatatacaagtctcagaggttcaaacacccattatcatagatcagttttattgtgacagaagcacttgcagaaatcaaacatcagcagtggcagtatcaggggttcaatacgagaatatcagaggaacatttacaatcaagcctgtccattttgcatgcagtgacagcttaccttgttcaggaatctctcttactggtgtgcaactcaggccagtgcaagtaccccactaccacctgaataacccattctgctggcaagcttttggggagctctacactccaaccgtccctcccatagcttgcttgcagattggaaaacctgctggcaataacttacagtcatatgacgacatatgttgagaaactcaaagtgcctttgtctgttcattggtgcttatccatgagtggtcgttgtgatacatgcgaccccatttgcaccattgcttgttgatgtgcacatatacagttattttgaggtcatcatatcacaacattttaattttttcatcaaagtaaacataaatatattcataaaaaaaaatcatacagcaacagtatgacttagttctgaaaaaaaaaaaaaaaaaagcggcc

SEQ ID NO: 3139 - DNA, 428 bp, Zea mays
  Clone ID: MRT4577_102861C.1
gtgtgcctggggggcaaaacaactaattttttgtttggaacctgggggccaccaaaccaaaacaggcccttggcttatttgccggttaaagttcaaaggggaaagggggtttatactaaatcggttttttttaactaggcgctccaccttttactagaaccccccggggggggagcccggttttggcaagccagcgagggggacaccactcctggggttgtttattcaaaagcccccttctttttgctttagaaaaggttgggcaaaaaggagttcaccattttttgaacccccatggtgggggggggttcaaaggcgggcacaagatttttggggcttttaatttcccccccaaaaaaaacacccttttaggggaggtttttttggagggggttttttttttccccacagggcgggttttttttggc

SEQ ID NO: 3140 - DNA, 264 bp, Zea mays
  Clone ID: MRT4577_102862C.1
cgcctgaggcccttacactgcgtatagtttctatgtgccaaggactttccaccaaatacctgcacagatagatcttgcacttcgtgtacaatctttgcttagaagtcatctcttttcaaagaagcctaacctaatcatctgatttaaaatattgcaccttccccagaatcctcccttcgttgcttctgtttttttcatagtacttacattctaaccttctaacatcgtcattttctatatctattttctattgccttccctccg

SEQ ID NO: 3141 - DNA, 2121 bp, Zea mays
  Clone ID: MRT4577_102863C.1
ttttggcgcatggaatctccgcagtacactttttcagaatcctgcgtcagaaatttgatttttttggcatcttccctctgctgtttctggttctctgaccacactggtcagaaccagctgaactggcccatgggggcggttgaactggtcctgaggaccagctcaactgccttatatatacttgactctccccttctcttctcccacttcattcactctcgccttagtcgcttcacaacctttagagccactctttcacacacctcaaccggttcgcagtttcaccacctttttcaatcatggtgcgtcgtcgcaacccctctgtgattgagtttagcagcgactccgacgagattcaggaggaatctcccgtcccttctcctctgcctcgtcgctccctctctaagagaggacgtggctctggtcggatggatggcgagggcttcttccatgccctcgcagccgactcgcgggagacgccaaaaggttggcgcctctcgtcctcgtcgtagcacgtcttcctctgggtatgctccctgccaggaggaggatggggctttcgacgacttcgtcgaccttccggcgcctgatgctctctacgtcaccggactgcacatgcatccggcgaacgtcagccgcggtccgcatgaatctcccgtcgacttcactcagaagggaatagacacccttcagcgtctgaggtttaccaaccctactctcactcctcgtcatcctggtgtccaggaccctcggttctggaatcttttccaggctgacttctacaattctgtcattctttccaagaaacacccagtcgtccgacatagatttattgactgggagggctgtgagaatatgggagatgctgacatgtcgtcagctctcgtaaacttagagagaaaggggttacgaaacattatgaccatggaatacccctggaacgatgaggtggtagctcagttctatgccaccctctggataaagaaagtagatgaggaagccgatgggtatgattacccagtcatgtatttcttcatccagggtaactggcacaaagtcagttatcgtcgttttgcccatattctgggcttctctgatgcagacattcagggcagcaacatgcgagtgcatggcattcggctgcccatgcgggaagagacggaattcattcatgtctctactgagcgggagttctggacaaccgctaacatgcataggtactacaggtaccttaattccttgtcccggatgaccgttctcccaaagggcggtaatcaaatgaacgtccttggggagagtcgagtcctcctcctcctccttgctccaaacagtctcgcccgcatcaatgtgtttgacatgatctgggaggagatcgtccgtgcttcctggtctcctcacagagggtgtcttcatgcaccctttatcatgaagatgatcgaagtggtcacccagacccacttcgaaaaacccgtcaaacactcccgctacgtaccctactgggttgattcctccaacccagctgctcgtacgaagcgggttccctcacggtctggaggccctgcctcctcctctgagccacctcgccagcctccccatcatccatcctcctctccacccgctgctgcctcgcgtccctctcctggccgcggatctcccatgccacgtgctagtggtcgtggtcgaggtcgtggccgcgggatgggtgctcgcttgctccatgggcttgcggcatttttctccgcgtgcagcaacatttctgctgatgtccatgaggtggcacggcgtcagcgggagactgacgacaatcttcgtcgtcaagcctcctccatgggcatgccttttgtccctcgttcgcctgatgtgcctctccatcctcctcccccggagatcaatgagtggcaccagcaggcctacggggtgccttttatgtctgcagacgatgaagatgaagaagtctatgttgatgatcgcgaggagtttgtcccgcctccctaccatggggatccgggtcaatcatcctcccaccctccgcctccttacccgggtccgggacccattcctggtgaccctggcccggcccgcccgagggtccacccttcacctacttctgatcatcgtaca

SEQ ID NO: 3142 - DNA, 796 bp, Zea mays
  unsure (1)..(796): unsure at all n locations
  Clone ID: MRT4577_102864C.1
gcccgccggcctccctccctccccacgacgacagcctgcatgcccatggcgccgcaatgataacattcctctgagagctcgcccccgactccaaaaccgagcacacatctgctccggcttctacttctaccagtacacatccgcagtaccagccgtgtgcgcgtgcaggcaggactgcttccccttctcctcgccactgcacgccgcctagctcggcctcagctctgaccgggtgactcactgaccgacgacgcctcggaagcttctctgccgccggcctggccacgtcggtcgccgtcgtcggaccccgaatgagagccggcgatcgtcccgcagagcgcacgccgtcccgtgcctggtgatcgggggccgacaacgacagcttggggagcgaggcagaggcacacgcccggaccggaagacgatgccgcccgcgagggtgcgcggcgccgccgccggcctggccgacgacgcgcgggacctccagcgccagatgggctgcatggccggcatactccagaacttcgaccgccagcgtctcatcgctggggccgccgccgccaagccgcccggcagcggcaggcgcacaaaaagcttcctccccttcgctccccacccggggcaatactcatacaaatagcagcagcactgttcaagtnnagtacttnaaaatcttcttgagaaacattagcaatttatnaccanaacagcagcnttcantcaatcatcanagctnttctcctctctncttcccaccttctcnccntcatgcaaaaanagtcagnggncctcntaa

SEQ ID NO: 3143 - DNA, 791 bp, Zea mays
  Clone ID: MRT4577_102865C.1
ccggccggggtaaagattttcaacggaagtaaaatttaacctcagtaagtgtgtgttaagaatcttaagatcctttgggtctctgcgggtttactattacgctcgtttgtgcttctgatcttgttgccacccgaggccgaggagctgcttgttgttgtggcttctgaacttgagttggtttctgagcattcgaataagcatctgcagaacatcacagaaaaaaaaaaaaagaaactactaactattaaggggtactgtagactgcccccgctcccaccctcacgcccgcctgccagccgcagcgcacgctccatgaaccccgccgccccgcaaactccgccactaccgcacgcctgcatcctgcacggctcgccgaagaacgcggagccgcttgccgctgttgctgaacgcgagggccagcgccatctgcacgtccacgccgccggcgttggctgcgggcgccgtctgcttgcctcctcgtcctccttgtaacggcatgatggcgtgcgactcggcgacggccggcgcgtcatggcggcgcggcgtcctggtctagcaatggagctgctgctgccttgccggtgctggaagtgcagagcaaacctgaagatattgcagtctctggaagaatctgtcaccgatcccgatgtgaagtacggctatgtcccgaagttgactcctgctattggcaagacgtacaacttcactgaagaggagcttgtgaagtgggaccagctgagcctgtcagctgccatgggaccagctgcagaagaactgcttgcttcagggct

SEQ ID NO: 3144 - DNA, 246 bp, Zea mays
  Clone ID: MRT4577_102866C.1
aagagcgtgagtgtaaagtatggtgaccattcgtaccggacacttcctgaacaaagaaatggtcgcgaatgggcgggactcggacaatgcggaggactctatattgtcaaccgaagcaatcagcgataggcgcgctaagtacatcatggccaacctaccacacaaatggtcgttcatcaacaagttattcgccaaaagcgaacgggacctaccggtgtagcgctgagcatacgcatagattcgggg

SEQ ID NO: 3145 - DNA, 1118 bp, Zea mays
  Clone ID: MRT4577_102867C.1
cattgggtacctcgaggccggccgaggcagtctccagcggtcagcagcgcaccctcgtgctcccggaccgctcgtaccacccgacccgcagcctgttcgcctcatcgtcgctgtccatcccgccgtgggcgcagcggaggtcggcgcccagctggctcacgcagcgcaccagctttgtcggctacgtcgccgtccgtgaaaacgagcgcgaggtccgtcgcatgggccgccgcgacatagccatcgtgctacgtggcaccgccacgtgccccgagtgggccgagaatctccgcgccggcctcgtgccgctcacggcggacgacgacgcgtccgcgcccaaggtggcgaaggggttcctgagcctatacaggacgccaggagaccatgcgcccagcctctcgaccgccatagtggaggaggtgaagcgtctcatgcaggtgtacaggggggaggagctcagcatcacactcgtcggccacagccttggcgcgtcgctggccctcctcgccgccgacgagctcagcgcctgcctggctgctgaaacagacggcaccgcggaccaccagccgccgccgatcgcggtggtctccttcggaggccccaagaccggaaaccgcgcgttcgcagagcggctgcagcgcgagcgcggtgtgaacgtcttgcgggtggtgaacgcgggcgacgtggtgacgcgcgtgccggcgccgatcgcgcgggaagggtatgtgcacgcgggtggtgctgagcttagactgcacaacagcgactcgccgtgcctgcgtcccgacgcgggcccagcgtgctgccacgacttggaggcgtacctacaccttctggacgggttcgccggctccgggcggccgttccgcccagacgcgagccgcagcgtggcgaggctgctgacataccagcggcccaacgtgaagcttgcgtacgtggagcgcgcgcggatgctcgggttcgagcaggcttcgcccaggaccgccacggccaacggcgccgccgccgacggccagtacggctacctggccagcccgacatgactctattgtttgtagctagaaagccagcatgcatgcaaactccgttctcaaaaaaaaaaaaaaaaaaggccccta

SEQ ID NO: 3146 - DNA, 334 bp, Zea mays
  Clone ID: MRT4577_102868C.1
ctttgccgggcacctacggttttaactgcaagccgaaccaaggagcaggaatggccggcaggaccacagtcaattaaagttggctttccattcaaggcatctggacctgtttgtcctccgcccgtcaatggatgatccatccatctttactggtttccctaacatgtccaccatttaaggcaccaaataaagtccgtcctggggggaaaaaataaaaaaaaaataaaattaaaaaaaaaaaaataaaaattaatagggggcgcccgttttaaaggaccaaggttacctacccctgccttccaaggtaaaagttttttttaagtgtacctaaaat

SEQ ID NO: 3147 - DNA, 149 bp, Zea mays
  Clone ID: MRT4577_102869C.1
ccccggaccccaaagactttgatttctcataaggtgccagcggggtcctattagtaacacccgctgatccctggtcggcatcggttatggttgagactaggacggtatctggtcgtcttcgagcgaccaactttcgtacttgattagtg

SEQ ID NO: 3148 - DNA, 377 bp, Zea mays
  unsure (1)..(377): unsure at all n locations
  Clone ID: MRT4577_10286C.1
tccgcaactgtttgtggcnnggcggtgggtgccctgaagnncgagccagnnctggtgnntcgggcgctgnagggttnngtgcctaaggggaggtttcttggtgtctggtcagggttggnagggaacccgaaccgtgcaggnnatgttgtngnngtgaaccatgtatgnatnnctgggtnnngctgaggggttgctncttttgtgtccggcgtgtggaagnnttcttcgnnaagcagggacccggnnacaanngcagggnnagtagnannagttgttggnnnagttgcgccaaggtgcncnttccctttggnnaaacagnannagctgctgnannagtgaaacccagcaccatttctcgnnttgccgannnagcggct

SEQ ID NO: 3149 - DNA, 489 bp, Zea mays
  Clone ID: MRT4577_102870C.1
gcgggtgggggaacctgatttttgaagggggggtattttcaaatgcgaggggggggggccgtggcccccctgggaaaacagaggcctttttttggttgtggactggggctggtgggggatacttcaggggccccagggttttttgtgactccactttgttttctttttattttgaatgttgtattcatttttaaagggatgatacacgttttaggggtgttgttggaccgggtttcctttccaggaccagggcggcggtttgtggtgtttttccgatttttaatcttttggtgtgaatttctttgggggtcattttcaatggcggggggccctgggccctcttggtgctgtccttggccagttttttcatggggctgatgaactttcgcatgggcttggggtgccccgggtgcgttttcaggttggggggaccacccctttgggtccccagcggctcctattgggccttgggtgggccccacagcccct

SEQ ID NO: 3150 - DNA, 282 bp, Zea mays
  unsure (1)..(282): unsure at all n locations
  Clone ID: MRT4577_102871C.1
accggcgctncatccgacgancctttccttttcgaggtcgaccctgtttttgtgaccgcctttggatccaccgtcatcgtcgaaggctgtgacaacagccgttcgatctcctgggttcacgcttggactgttcgtgatgggacaatcacccaagggagggagtatttcaacacttctttcaccgttactcgccttggagactctccaccgtcagcttgcagttcttcgacggcggagattgcgccggtgcattgcccttacgtttgggagagtagtcttttc

SEQ ID NO: 3151 - DNA, 483 bp, Zea mays
  Clone ID: MRT4577_102872C.1
ccggccgggagctgagtcgccagttttcatcagcagtaccactagtaaaaggattctctgcaatcgaggattgcaatttgtatcttctcttctcctaccggttcggctacgacggagaagtttcttcctctggttagttcgctgacgccgactgttcttgccacggggcttccttctgcaggagaggaggcgttctccaccgggtcataggaatcctgacgagatggacggcaatgctaggtcgacggcggcgagtcagaagaagtccatcgtcccggacgacgacctcgtggagctgctctggcacaacggaagcgtcgtggcgcagccccaggggcaccacaggccggcgccgccctccgaccgcgactgcccgggcaccagcggccttactggcgaggagacggcgcgtgggttcccgacacccttgacgactcgctggagaagggcccttacacccagctctggtacagcacgatcgcg

SEQ ID NO: 3152 - DNA, 714 bp, Zea mays
  Clone ID: MRT4577_102873C.1
ccggttcccgttgctgtcgccgttgctatcatatgtattttgagtttacctgaaaatataactgagtacattttttttggaaatggaaatatcattccggacttttgaattttcatgcatacaaccatacaactcaaataatacatcatcccaacaatttgtggatcaaacaaacttcaacttaaaacatgatatgtaataaaagattacaaacactaaaccgcgtcaatccttgtattagaccgccacttgtgactcgcgaagacctctgagtacatgacacacacacatgcttcacaagattcaaatacaaaatacaatcacaccacgtcgagggttgtatagatttagctcgacgtccttatttatctttgcactacacacacatgcatgcataaacatgcatggcttggccataaacgtgaacatagatacggctacctcaccatcccagaacgattgaaacagagacaagtgatgagcaaaaacaaggcaatctagtttcctccaccgccacctcctcctccattaccaccgccatcaccaccgccaccaccgccgccacctccgcctccaccgccgccgccgcctccccctcctcctcctcctcctcctcctccgagagactggtggagttgttgagcgagtatccttgaagaagccatttgcttaaactgctagcacacgtacgcgtgcatgcgacgtcatagctct

SEQ ID NO: 3153 - DNA, 360 bp, Zea mays
  Clone ID: MRT4577_102874C.1
ttttataataaggagagacacggtcggggccatggggtatgaacagacttctggcatgcctaatccaaatgtgtgtacacacatatgcatgtgccacaccctacttgacaggcgaaacacgcacgaacctgaacccaagaagggactgcgctcgggcatggagggactgcacactgacgacctgtgctactctgtgtattacggacccgaccctgtacgcgtgcctggtatccatatagggcgttgtttttatggttggaccaccaccacacgcttgatggattctgagccacgcgtgcgtggactccaagtccgaccctcagacggacccgtaggctgacgcgtgagtcctgccgggca

SEQ ID NO: 3154 - DNA, 591 bp, Zea mays
  Clone ID: MRT4577_102875C.1
aacctgctcgttttgttggagcgtacagacacacacaccagatgctctcccaaatctacccgctccgcatcttcgtttccagatgcatatctttgagaaaccctgacctgcaacgactatatccctcaaagaggagttgtatgacaccatcgtcttcttcaacgcccagatatacgaccaccttcccatcacccctgacctcaagtggctcatcttctctggcctgcaacatgagtacgaccgcacgcttgctgactacgacctccacaaggagaactactaccctttgagctcctcatcatgcaattcatgatgatcttctccatgaccctgatcagctagactatcgacctagtacatggacaactctgacgccattgacaacgtatgaccatgatcatccaagatcatcaagggcatccctccactatctgctactcatcatctactcttctgattacatcatcgacaagttatagccttaccgagtacgctgttcagaacgacagcaccctccacttggagcattacctctggaaacggatgcagatcttggtgaacacctctgaccttcacagactatcaacctcg

SEQ ID NO: 3155 - DNA, 523 bp, Zea mays
  Clone ID: MRT4577_102876C.1
ttttttttttttttttttttttttttttttttttttttttttttttttttttttttttttttttttttttttttttttttttttttttttttttttttggggacaaaattggggggaaaaataaaaaacaaaaggggctttgggtccccaagaagttcggcgaaaaaacaaaaaaacagggggttttttcccaaggggaaaaattatccctggccgaaaaaagaaaatttactttattgggagggaccaccccccccgggggcccttgatccccgacccggagaatttttcctggggggaaaaaatgggggggcacaaccccaaacagggccaggttgttgggcccgtaaaaacccgggttgcctgttttggctggccctctaacttaaagggattggtctggaaagagtttaaaaagcccccactacagaacggggggtcccgtgttaaaaaaacccaccaacttgggcggggttaaaggaagggtaaagggcctttggggcagggctagaattctgggggc

SEQ ID NO: 3156 - DNA, 352 bp, Zea mays
  unsure (1)..(352): unsure at all n locations
  Clone ID: MRT4577_102877C.1
aaagaaagggggcctccgcttttttttaattaaaacctgggggggaaaatcccccaaaaaaactccgatacccaaacccccctttttggcctttatccttttacttggggcccagggaaatttcccgcccacacataaatgcaaggcaatgcaaatggacgggccgaaccaatcccccccaaaaaaacaggttttatccaggggccgggccttccagccgggaaaaaaccgggcctccaccactccgttaatttaaaattaggctttcgggagtangggaacgaaaacccccggggcccctaaaaaaggctcctaaagggaggggggtgcccatgccccccaaaagggtttt

SEQ ID NO: 3157 - DNA, 821 bp, Zea mays
  Clone ID: MRT4577_102878C.1
gtcgccctccgcccgccccaccaccactctctcctcgccgccacactcctcactccccactgcgcttcgtcgcgctcgccagccagagaagatgagggagatcctgcacatccagggtgggcagtgtggaaaccagattggttccaagttctgggaggtggtgtgtgatgagcatggcatcgaccccactgggcggtatgtcggcacctctgacctgcagctggagcgtgtcaacgtctactacaatgaggcctcatgtggtcgctttgtgccccgtgctgtccttatggatcttgagccgggcaccatggacagtgtccgtactggaccgtacgggcagatcttccgccctgacaactttgtgtttgggcagtctggagctggtaacaactgggccaagggtcactacaccgagggtgctgagctcattgactccgttcttgacgttgtcaggaaggaggctgagaactgtgactgccttcaaggtttccaagtatgccactctcttggtggtggtactggatcaggcatggggacccttttgatatcaaagatcagggaggagtaccctgaccgcatgatgcttacgttctctgttttcccctcaccgaaagtatctgatactgtggttgagccttacaatgccactctttcggtccatcagttggttgagaatgcagatgagtgcatggttcttgacaacgaggccctttatgacatctgtttcaggactctcaagctgaccactcccagctttggagatttgaaccatctgatctctgccaccatgagcggagtgacctgctgcctgaggttccccg

SEQ ID NO: 3158 - DNA, 556 bp, Zea mays
  Clone ID: MRT4577_102879C.1
cggacgaaggacccgatgatggagcagatcataacatccagcccagcgagagcctcagaggaatgtacgctgaaggatgtatggtcgtaatcagaccgggatattgaaggtacaatgacccttcaggatgaaagatccgacaggctgtctactgttcagaccatgacgcataccggggacgtgagcaccttactcccttagggaagcatctttcttggtaataggttacacgacaggcacacgatttctgagtacaacattcagattgagagaaccctgcaccttgagctccgcgtaagggaggcactgcagacatttaggaaaaccctgaccggcaggactatacaccctggaggaggagttatctgacactcattgacagcgacaaggacaagatccaggacaaggagggcatccctccagaccacaaggggctcatatttgctgggaagcaactggaggacgggcgcacgcttgccgactacaacatccagaatgagagcaccctccacttggtgctgcgcctcaggggaggcatgcagatcttagtgaagac

SEQ ID NO: 3159 - DNA, 444 bp, Zea mays
  Clone ID: MRT4577_10287C.1
aaaagcattcccaagctttggaggacaaaacaaaaatttggggcccattatccaggcattaaattctatacaaagagcctgggccaacaagatccacccccgctataacattggggacggcgggtccaactcccttttattaagacggaccagaccagcggcagggattagaaaggcaacgggaaaggacccggggggcaaaaacagggtaaacccatcacccaagtccaaaaccatccacaacaattatgggttttaagcaaaccacacagagccggggccccaatttaaagcgccgggggaataattccactttctaattttgggcggccggagaaccagcaccagccccgggcggttcgaccaggggtttaaattcactcgcaccctaatcgttcttcggagctccaggctggtatggacacgcagggggaacttttaaag

SEQ ID NO: 3160 - DNA, 409 bp, Zea mays
  Clone ID: MRT4577_102880C.1
gggggcccaaaaaaaaaagaagggggttaaaaattaccgggggccccaggggccccgtaaaagctaaccaagagcccaaaaccccccgggggggtaaggaaccagttaaaggggcccacccccccgatttttccaaaaccccaaattttaaacaaaaacgtttaaaattaccagaaaaaggtcaaaaaaaaaaaacaggccgcaaaaaaaaaaaccggaaattttaagccttggggggcacaacgggtaaaaactcccccctaaaaaaattttggaaaaaaaggcccttttttttggggaccaacctaaaaggggtttgcctccaccacttgggtttaaagggggttgtctgacccaaaagagggcctttgccgggggattggggcgaagggtcgcccccccccctggg

SEQ ID NO: 3161 - DNA, 258 bp, Zea mays
  unsure (1)..(258): unsure at all n locations
  Clone ID: MRT4577_102881C.1
gcggttcgccgtccccgacgtcgcgagaagtccattgaaccttatcatttanaggaagggttgaagttagcgctgatgaacttctcttgtaaatggatgtgctccctcctaggtttgctcctttaggaccttgtattattgagtgttaacttggaatttcgtctgattggtctctagtagttagtgaggtgtgggagcaacatttgctattagcccgagtggttggagtaccatgtgttcgttgtggtcaggtccatg

SEQ ID NO: 3162 - DNA, 468 bp, Zea mays
  Clone ID: MRT4577_102882C.1
tgattatccctgcttcatgcaacagaagcagccctgaacgtctgttgacatggttgctaattcttgctgtgtgtatacagtttgttaaagccgggaaaatggcaagtgtgatgcattgtgtgatctatttgaaatggatgaaagggattcggtgtcggacaatgaaatttaaactacgagatttccagcatcggtaaaattaatcaacgaagaactagagaaggaagagggcaatgcactggagcaccttgtatcttggggaggcaaatttgctagcaattataatgtcttggagcaaattcttgctgtgcttatacagtttgttaaagacaagaaattggagcatcagcaccaatttgatgatctgaagaagacctggcttatcaaaaggtgtcggacaatgaatgctaaactaagctatctggagcatcatctattgcgtgacacttacaccaaggacacagtacc

SEQ ID NO: 3163 - DNA, 386 bp, Zea mays
  Clone ID: MRT4577_102883C.1
atatgaactatgaaggaatgctgatggtcaggatatccactggaggacaatagttaatgcagactcgagagtcaacatgcctaaaacgatgtatgatcatgagtgcgttatatattatatattggctctggttacctgtactatttagtgcatcatttggtacttattttaatagtccaacggaacatagcgtcatactgtagccattctgaggatagtgcgatactattagacacttagctatcataggttaccagttcagctcatggtagcgacatttggtgacgcattacagttaagcttgctgcataacgtacgcatgtcctatgtgatctcaactatacgatcaactcaccatatgtgaagacacaccaacttatatccaa

SEQ ID NO: 3164 - DNA, 465 bp, Zea mays
  Clone ID: MRT4577_102884C.1
ttttagcttactctaacagctccacagcggcggggtgttctatatcactaccgggagtgctaccaaggacttgtaggcgacgcacctgaagaacactgcaggaactctcacgacctctacaccaagggcgacacaaaaccgagcgagctgctaatgggactagctgcacccatctcactgcgacaaatctgatgagacacctgaagctcgccctggtatagcgaacacagattatgctcagcgaaccgcacgagggaggcacagctcgagctatggctaattggaaagttgacccggacattgtctactgccaagatcgcgtctattattacaacgacacgtatctatcaagcaaaatacctacaaaattgatcacttaccgtgatgaatacttcatgattttgctagtggaccattattctgtaccataaatgggcacgaacaggacaacccatacgactacta

SEQ ID NO: 3165 - DNA, 1759 bp, Zea mays
  unsure (1)..(1759): unsure at all n locations
  Clone ID: MRT4577_102885C.1
ttttggggtaccctccgaggccggccggggtcgaggccggcaagcaaccccattcctccgccggccgccggcagccgcccgcgatgtcgaaggccgcggcagcgtccctcccgccgccgccgccagaggtggcgcaccttgtggagcagctccagcgccaccacctcgccccggacgcgtccctcctctccagctccgcgcactccgacctcctccaggcgcgcgaggaggtcgcggcggagcgcgcgctgtacctcgaggcactggcggtgtacgcggaggcggtggccatggtggaggagtaccatgcggctgccggcgccggcaagaagctcaactgctccccgcaggtgtacgagtctttggagcaccggttggccgtggcagaggcagcacagaggcttaggctcccactgctctctcaggacggggaggtccatgagcaggagatcgaaaagctgagcacctattcaagaagttcattcgatagcaccctcacaagcgcgacacccagctcaagttcaatctcgacgagttacaacaattatagcagcagcgctagtgcggtgactgttgctgctccacattggagtggtagttctgatgcagttgaacctggagttggtggtgttcctgaccgttttcttgggatcacttctgattatctctaccaagtgcaacaagagcagccagccatgtctgttgacatggttgattatcagagaactttggctagggagattgaagcccggttagaagccaagtgtgatgctttggctgatctatttgctatggatgaaagggattcgtcatccctcagtcaaatttcaagtgctaggcttccagaaagggtaaaattaatcatcgaagagatagagaaggaagaggcacatctcctggaggaccttgcttcaatggacagaaaatttgctgaacattataatgtcttggagcaaattcttgctgtgcttatacagtttgttaaagacaagaaattggagcatcagcaccaatttgatgatctgaagaagacctggcttatcaaaaggtgtcggacaatgaatgctaaactaagctatctggagcatcatctattgcgtgacacttacaccaaggacacagtaccagcactgcacaggatcaggaagtatcttgtagaggccacaaaagaagcatccaattcttataatgaagcggtttcgcggttgcgtgagtaccagggtgtagatccacggttcgatgtgattgcgaggcagtaccacgagattgtaaagaaactggagggcatgcagtggacaattcaccaggtggagatggacctgaaacctcaccatgaccacgcagctgtttaagtccacatctgttggaggccatgtttattacctgaatgcagcgggtgcgagttaggggggttgcagtggatttgatttgagtcagagggtttctgtttgtgcatgtttttttttgtgtatatccatgttggataatagcaccatcaatgcttgcttagttatacggtcatgtattcggtttgtttgatgacgagaaacactagaagagagcgagacatggaaaacaccagaacaattatcattgtactacgcatccactgccatgtcatacaaaacaaggcaagtctagatgacttttattaggaatcctaatggctataatggaacgtagtagccgagaagaaggcttcgtccggaggcatctgttttgccaggaagtgattanaaaaaaaaaaaaaaaagcggcc

SEQ ID NO: 3166 - DNA, 281 bp, Zea mays
  Clone ID: MRT4577_102886C.1
tttcctgtgcagcgcccgtacctatatcagtggcgaggtatgttcaccatgacacgcatagccttgcgacttacacggatgttgctagaagatagatcggctggccccaaggaccattgctcagtgcctaaggagctaacatgctggtgcatcctgttggagtcaaccaccggatggctactagtcactggacgctggagatgcccttgatgcactttggatcacgctatgtgttgcgctggagcatccatgatcgagcgtacattttaactctgttactg

SEQ ID NO: 3167 - DNA, 429 bp, Zea mays
  Clone ID: MRT4577_102887C.1
ccggccggaacccggggggaccaaggcgtccggttcagggccaggtacccggtggtggccggtttggcggccgacgcttgaattgggaggtttgggggtaaattaattttgtctggcttttgggggggttaagggtggggctggttggttggtggttggtggtttggttaccaaataatttgaatggaaggacgtttgtgatgggcctgttgaatagttggggttcttagtcctggattacactgttgggttaccacatgacatgatgtactggggggggcttgggtggtggggtaattccatgaccatgatcagtattttgattaaaaaaaaaaataaaaattataaataataaaaaaataaaaaaaaatatataataaaaaaaaaaaaaaaatggggggggccgttttaggggatcaaggtttactt

SEQ ID NO: 3168 - DNA, 368 bp, Zea mays
  Clone ID: MRT4577_102888C.1
gggaattggagattagggcatccatattggaagaatctggtattgctcagcaaagcaaccttgatggtgataaaatggaaccagagattattgtgtgcaagctggaagatgtttctgaagaatctggtgcctgcactgaaagcaacctacatgataatacagagtatgttatagacgatgctgaaatgagacaagaaattactttatgcaagcgggaagatgcttctaaagaaactggaattgatcaagaaaccttagaagatgatagctcaacatgtggtattgttgatgacagaaacaatctggagatcaataactgcaaatcggaagatgttttcatagaatctgttggcactcatgaagctgat

SEQ ID NO: 3169 - DNA, 675 bp, Zea mays
  unsure (1)..(675): unsure at all n locations
  Clone ID: MRT4577_102889C.1
ggccggtactaaccctaccagctaggccactgctgcctttgctgccctttcagctcgagccggactcttcatcccacggtcgcctaacggtccgtgcggctcttgacctccctcctactggcgctcagcagaagccggtgggctactcaaacgacacagcccagtgagaagcgtgaggagcaggctcaggaccgcaaacctaccgagcctgaacgcgactacaacaactgctttgaacattactttaggactacgacatcttgaactaataggaatacgctaatgctatcgtaatgaggcattggacgctcgagtatgggacccggtggaatcaatgcctctttgacgcatctggttctaccataaggccacgtatatctgcgcttcatctggtctttgaacattgcaagaataagatccgaccttattcatgtgaacaggcatggctggtgaatacaacaccagtccttattccttggagacactagggtcaatacactgtgccttagatcagctgaccgtgttatagactataaatgaagccacttattagatgctgatgtaaatgaggatgcctatactgcaaaggacacatcggtattattactgtattggcttgagcgctatactggaacacagattctccatttatttgacaggngagattatgctggt

SEQ ID NO: 3170 - DNA, 1072 bp, Zea mays
  Clone ID: MRT4577_10288C.1
attggcatttgcttatgtaattctaagtatatcaatactttactttactcctatttattatattatttctttttttatattattccggaaattttgtatttatcgggacagacaataccctaggaaccccaagaagggctgatttgagcgtgatcaatttagaggatatgctcgccctcttccttcccgtccttagtttaggacagtggaaagtatttttccttttattttaggaattttgggaacatttcaacaaaggagatctttcacaggtcaaacgagacctaagacttaatctaaaagaaattattagattgaatctatttgcattaaaaaaaccgatcaaaaaaggacgagcgaagtaagtaatcgaaaaactttcttctttgttcgtcctatctataagaggagagcatatgaaaaatgtaacccattcttttgtttttttagctcactggccattcgctgggagtttcgggcttaataccgatattttagcaacaaatctaataaatctaactgtagtggttggtgtattgattttttttggaaagggagtgttaaaagatttattagataatcgaaaacagaggattttaagtactattcgaaattcggaagaattgcgtaaagggacccttgaacaactcgaaaaagctcgtattcgattacagaaagtcgaactggaagcagatgagtatcgaatgaatggatactctgaaatagaacgagaaaaagaaaatttgattaatgctacttctattagtttggaacaattagaaaagtctaaaaacgaaaccctttattttgaaaaacaaagggcgatgaatcaggtccgacaacgggttttccaacaagctgtacaaggagctctaggaactctgaatagttgtttgaataccgagttacatttccgtacgattcgtgctaatattggcattctcggggccatagaatggaagagataattcaatttattaggttttgaacttctacttttgtttagaatttaggcattatttttcccttgcttccaaaaaaaaaaaaaaaaaaaaaaaaaaaaaaaaaaaaa

SEQ ID NO: 3171 - DNA, 1412 bp, Zea mays
  Clone ID: MRT4577_102890C.1
cactcctaagggcgattgggaccctcgaggccggccgggattcacaatcacaccaccacctttaccaccgaagagagaaacgcgagcaaccagcgatcgccccatggccgccatggctcgttccgtctccctcgtcgtggcgcccctgctcctcctctccctcctcgtctccgccgcggccagtgcgcggaccgtgggcgacaccgtgcaggacgcgtgcagcaagacccagttccccaagatctgcgtggacagcctcgccgccaagccggagagccagaaggcgacgccgcgcaagctggcggagctgttcgtgaacatcgcggccgagaagggatccgggatggccaccttcgtgcaccgcaagtacagcgacaaggaggacagcgacatagtcaagtgctacgacagctgctccgacgacgtggaggaggccgtcgcccacctcaacggcctcgtccgggagcccaccgacgccaagttcctcgagctcaagtcgtggctctcctccacgctcggcggcacctccacctgcgaggacgcctgcaaggacctgcccaagaccagcgacaaggacgacgtcgtcaacttcagcctcgacttcgagaagctgcagcgcgtcacgctcgacctcatcaccgaggcgtccggcaccatgtccgcaggcatcgccctgccaccctccaacgccggagcgccctcctacggcgcggcggcgccttccgggggctccgccgatgcccccgccggcgcctccgagggccctgcgagcgccagcggcccgtctggtgacgacgcgccggcgtccggtgctggtgccagcgcgtcggctgctgatgctccggcggcggcggcctcatccggtccctctagcgcaccagcgccatcgtcgtcgtctgagtcctccgccgcaccaggcccatcttctgatggcacctccagcgccccagcaccatcgtccggcgacgattctgattccgacgacgatgggtcagcttgagcctgaccgatgacgcgggtttgggttaccggtgccactcaaaatacgatcccttttattgtaaaagagggatcccttctttccattgcattcttgcaatccgtttcttcttgactatgtttcttcttgactatgtaacgataataacatgagaaaattatctgaatgacattatattttttctaaaaaaaaaaaaaaaaaaaaaaaaaaaaaaaaaaaaaaaaaaaaaaaaaaaaaaaaaaaaaaaaaaaaaattccaaaaaaaaaaaaaaaaaataaaaaaaaaaaaaaaataaaaataaaaaaatgggggggcccttttaagggtaccaagtttaacctccctggcatggcaataaaaattttttttatatgggtccccaaaaaaaaaataaatggcccgttttaaaaa

SEQ ID NO: 3172 - DNA, 685 bp, Zea mays
  Clone ID: MRT4577_102891C.1
acacaccacacaagtgcacaaccagcaccaagaaaacaaaaagcatgaagatgatgagcaccagggccctcgcgctcggcgcggctgccgtcctcgccttcgccgcggcgaccgctcaggcccagaggtgcggcgagcaaggcagcaacatggagtgccccaacaacctctgctgcagccagtacggctactgcgggatgggcggcgactactgcggcaagggctgccagaacggcgcctgctggaccagcaagcgctgcggcagccaggccggcggcgcgacgtgcaccaacaaccagtgctgcagccagtacgggtactgcggcttcggcgccgagtactgcggcgccggctgccagggcggcccctgccgcgccgacatcaagtgcggcagccaggccggcggcaagctgtgcccgaacaacctctgctgcagccagtggggattctgcggcctcggttccgagttctgcggcggcggctgccagagcggtgcttgcagcaccgacaaaccgtgcggcaaggacgccggcggcagagtttgcactaacaactactgctgtagcaagtggggatcctgtggcatcggcccgggctattgcggtgcaggctgccagagcggcggctgcgatggtgtcttcgccgaggccatcgccaccaactccactcttctcgcagaatgatg

SEQ ID NO: 3173 - DNA, 376 bp, Zea mays
  unsure (1)..(376): unsure at all n locations
  Clone ID: MRT4577_102892C.1
cttcggaacctttcacaaacctgacaaaagcctaaatttcctctcctggttgggttattgttggggaccttgttttaatgttggcagcttgntcccctggttaaactaaaacatttaccaagttcaattggccctgttttttttggcctccaaaggaccacttaaaaaatattctggagaaaaaaggcctggaaagtccctgctactaataaccccaggtcaggggagaatgggctatgtttaatggcagacccttgatggtttcatctgatcagctaagagtaacagttacatattgacccacacttggggatcatagtgggttttagtcttttccgttcactgatagatacgaacttctgttgtgaagcacgga

SEQ ID NO: 3174 - DNA, 431 bp, Zea mays
  Clone ID: MRT4577_102893C.1
aacagggaaacctgctgcctctttcccatctggctacaagtattcatctcagggacttcaagaagcttgttacacggcgagctaaagttattaaacaacaccagggctattttcacaaccctacgccacatattgtgcttactgggccaatcttcatattggtgaacagacctaccatgctcattcggaggctgatggccgggccattcacctcacccttattaatacctcccgtgcttggctggattgttaatcctacaggagggaaatccaattggattgcccacacatggatacattgatgacattggaactgacttgtagcccaattgctttattttcctgatagtgacaccaaccagagagacaatctttgtatgacggacgcgagattttggaatacctacaatcattgaaggattctaatatat

SEQ ID NO: 3175 - DNA, 383 bp, Zea mays
  Clone ID: MRT4577_102895C.1
tcgagccggcgggattacctggacgggtcgactggggataggaagccctgtggctaggtcagtggccgattgcacatggcgggtgcgctggcttaccatctccccaagtgggagagtggacgtcataatttgtggtagagggggtacgcgttcgcgcggcccctgccaaatctgataaatttaatgtaggtcctttgtctgataaatttcttttaggtccttcattagttgaaagtttggtcgcgactcgcattattgttcactgtactgtagagtttgaaatctgataaatttaatttaggccgaaagtttggtcgcgactcgcattattgttcactgtattgttttaagagtttgaaaagagaatatctactcataatacg

SEQ ID NO: 3176 - DNA, 1024 bp, Zea mays
  Clone ID: MRT4577_102896C.1
gccggccggtaactgatgcccagtctccttcgtttagtttcactgacatgtagcctccagccctgacccgcaacccatgggtccacatgtcatacatcaatatcgctttctgctgtgtcgaaggatgcctcgccgcttcgtcttccccgtcccctttcgcctttcccctcctatcgacaccaccatgtccaccaccaccgccactccgccacagttcgaatattcctagcttgagattgcaagaggaggggaggggagccgagcgctcagctctaattttctccatctattgctaacagctcagacctcaggcaagggaggtacaatgccaagagcaaatgagatgttgagggcagattcaagaatgatggtggtctttggtgccttgacatcgaaaccagagcaactgacatttgaagaatccctcatatttgtcaagaaagttaaagcccgtgactacatgctgtacctgtcattattcgacgttctcggcagaacggaattaccccagctcgacgcctaccgagagttacagcagatgtttcaaaaccacccagatctgcgcgaagagctcgagaggttcagaccgccgccgccgccgccggtgcctacctcaaagcaggcagcaaacaacaacatctggccctgggtcatcgtgtgcgctgctgtcccgttggtcgcagccagcctgctcccgtcactttgaaacccagtgctgtggcttgctcaacaccctgttggccaaaaaatggccgtctgatcgaagaaccgctgcatgcagtacatacattacatgtgcagtggaccgaaccggcctcctgttgctattcgtgccatcacaactgaatcacagtattgtctgtgtatatatattagagtagtgttctggaagggaacctgcgttcttggtcatcaggtaccactgggcaagaaatgtagtcggtacttgctggcggcgcggtgcaacggtttggccatttgggttgggctttaactgctaaaaatcaagcttgcattttgaatc

SEQ ID NO: 3177 - DNA, 1197 bp, Zea mays
  Clone ID: MRT4577_102897C.1
ccggccgggacataaaatcgctttctgctgtgtcgaaggatacctcgccgcttcgtcttccccgtcccctttcgcctttcccctcctatcgacaccaccatgtccaccaccaccgccactccgccacagttcgaatattcctagcttgagattgcaagaggtctccaagaggagggtaggggagccgagcgctcagctctaattttctccatctattgctaacagctctggccaatcatataaaaaaacgttggttacaagccaaatggcacttcctggtagctgctgattttctatcgacaagatcagagctcagacctcaggcaagggaggtacaatgccaagagcaaatgagatgttgagggcagattcaagaatgatggtggtctttggtgccttgtcatcgaaaccagagcaactgacatttgaagaatccctcatatttgtcaagaaagttaaagcccgtgactacatgctgtacctgtcattattcgacgttctcggcagaacggaattaccccagctcgacgcctaccgagagttacagcagatgtttcaaaaccacccagatctgcgcgaagagctcgagaggttcagaccgccgccgccgccgccggtgcctacctcaaagcaggcagcaaacaacaacatctggccctgggtcatcgtctgcgctgctgtcccgttggtcgcagccagcctgctcccgtcactttgaaacccagtgctgtggcttgctcaacaccctgttggcgaaaaaatggccgtctgatcgaagaaccgctgcatgcagtacatacattacatgtgcagtggaccgaaccggcctcctgttgctattcgtgccatcacaactgaatcacagtattgtctgtgtatatatattagagtagtgttctggaagggaacctgcgttcttggtcatcaggtaccactcggcaagaaatgtagtcggtacatgctggcggtgctgcgcaacggtttggccatttggatcaatggtctgatcaacatgatgttagatttttgttgcgctctggaaggcagatgcacccgatcgggtatgaagaaacatgattagtttaggttatcattatgcctgtggatttagtgctagtttggttgcaaggttgggcaaaattgcaatctactactacttgtagccacaatgtttacttagaagaaaatattttcacc

SEQ ID NO: 3178 - DNA, 230 bp, Zea mays
  Clone ID: MRT4577_102898C.1
ggggggaaaaaaacccaaaactaagagcagcctcacggtacacaaagcgcaaccccccccccaaaaaggggggggtcacccctttttccccaaccccgggggggtcaccccacaaaaccccctaccaaatatggcgaggagcacaaaatattccaacttttgaaagaagggcccgttaaaaaggccaaaagcccccaggtttgggccgcccaatatgggggtgacccccg

SEQ ID NO: 3179 - DNA, 138 bp, Zea mays
  Clone ID: MRT4577_102899C.1
ttggtgtttttttttaggacgaacgacgtggtacgcgcgaacataggcacacacaaaccaactaggggttgcgtacgagtacaaggcagtgggtgtaaatgaaacgacatctttcgttggatacgagatcctagggtc

SEQ ID NO: 3180 - DNA, 264 bp, Zea mays
  Clone ID: MRT4577_10289C.1
ttctctatagaggacgacgttggttctttttttttgataaactgcgcattttaattaactcgggcaggaaccagacaacctcatatggatatacagtctgtcctaagcgatacatgaacaatctgtgtttttttgaacgaatgtacatattatgaagaacaagcgtgcttgcctactcttaggttggtacgacaactaaacatgggttttgcgcgccagattaaacgaacaaaccgggtgccatgatatgattttatcaggaag

SEQ ID NO: 3181 - DNA, 692 bp, Zea mays
  unsure (1)..(692): unsure at all n locations
  Clone ID: MRT4577_1028C.1
gtgcggcgctcgaggcggccgtctatcaaaacggctcccaagctagagtttccactcaatccatcccaaattagacagcaatgctctactgcacgtgctacacagcgtgggaggtgctgcgccccgatagctcgatggaaaaatacctcactcatcaaccgacaccgtacatagctacttctactatccgaccactgacatgcggacagcctgccaagatccgagagcgggacgtataccacgccaataaccgaggatctgaaggctactccggaccggcatgatcaatgtgaaggtcacggcgatagaacagcaactgcatccggtccatctccttcatctacatcggaggcgatgcgaaaccgtacaacgaggcgccatgcgacttcgtgcacactgactacggagtacaagattgatctgtgcaggttcgaccagagcttgacccagatctccggtaccactacgccatcctacaacatttgacaatctgtcctagtctctcaaattcatcaccaacgagacgcgcttacggaccgtacggnagggacgaggccacaccgttccgtgtcaaggagatgaacaatcgtcacgtcgctggcttctttgcacgctctggagattgcctgtacgcaatcggactctacgtggactacgactaataactaatacgatggattggatcatccgca

SEQ ID NO: 3182 - DNA, 196 bp, Zea mays
  Clone ID: MRT4577_102900C.1
aattccctggccgacgagttcttaagacggcggccgccctagatgatgggaggttttaatacagagcaggcccgcacaattcccccacacgaaattggcccattacagacaacaaaaatggaaccaactggcagaagaaccagaacaagccgactggaaaaaaaccagcagcgacaatactaatcgcaacccaaca

SEQ ID NO: 3183 - DNA, 226 bp, Zea mays
  Clone ID: MRT4577_102901C.1
cggacaaccgacaacatcgctcgccggcgacgacgcggcgcgcggcggcgatggatgggggacacacgacgaggcagccgatgtctccagagatctcggcgtcgactgtgctaccgcagcagcggcagatgcagcctcaccaccacccggcgcggccggcaatcgccgatctcttcaccctatacctcggcatgaactcgaagcagcgagcggaagacccattgag

SEQ ID NO: 3184 - DNA, 396 bp, Zea mays
  Clone ID: MRT4577_102902C.1
gaagatctaacagtgatttcctactaggttattttctgttatttccgaaggaacatcatggctccagctgtaattgaaaccccgccaacagagtacaagtctggtgttggagcatacaaggagtttggcctaggaggtcccaagttctttcaaaaggaccttgagctaaagggcactgaaaagcactcgcctgctaaataccctcactacctgcctgtctgggacaatgagaagggacaaaaactacccccctgggagcccttcacccacgtcgagcacggtaaagacgccgacccaacctttcccaacctcctcaagaatgccaccgtccatgacataactggcaacacaggcgctgaagtccaccgcgtccaactgagccagctcaccaacgcc

SEQ ID NO: 3185 - DNA, 215 bp, Zea mays
  Clone ID: MRT4577_102903C.1
tggtttaacacgcaacaagcattgacaaattgtggggtttttttaaaggaaggtctcgtttgatacgactcaaagatgtgacgctgcttcaatgggcgtggacaaacagacaagccgcacaaaagaacagaaggaaccgtgcaacgatcaagacatgatatggctgatatggatgctactcaaacaggctgtgatcgtggcgaggatttttcccc

SEQ ID NO: 3186 - DNA, 279 bp, Zea mays
  Clone ID: MRT4577_102904C.1
tttgtcaaagcccgtccctctcctactcctgccccagggttcctttcagttccctccggtatgtcaaaaccgtcaacctgacacccggctcgctgggtgggtcggtcggccactgatgccccgaggctcggatctcaggtgggcgtcacaaccgcgggtgccgtcggctgctactggctatcttaggccacgggtctcaagggtgacagcgctctacacttgcaggcccccccctgcagctgactgtcattatcatggaagaactggccccagcggcca

SEQ ID NO: 3187 - DNA, 1718 bp, Zea mays
  Clone ID: MRT4577_102905C.1
tgttgtcattgcccaaggctctgcagaaagtgggcagagattatctaaattattttctaataaggaactgatgacaaccattccagtagatcaacaagtgattgcattttgattgaattctaccaaagactgagagaagagtccttgacagcaatatcccggcacgtgaaggatcttaggggagcacagaagggatctacaatctctgatgaaaacaacaaagcgactgcaatgggaggggatattcaggaaatatatgacaaactaaaagattcttcattgcccgaaggctttttcacagaggaacagccttggaaggatatatatatcacagaactccttaattgtatcaaagaggaacatctgaaggattttgaacaagagtattgtttagcagaaaagatagaaggggcaacggaggacacagatattgcagttgaactttataagctcagtatttccaccctagatctattgaaactagcatccaaagaggaacagggtgattatgtcggtgcatggtacagtatgcttctgtcctgtgctcaagaattgaagcatggcgtggcactttggcaagagttttatcatgcaaatgtctgcgacagagtagtttctgaaggcggtcactactttattgctcttggggagatatatagagttgcacagattttatacttatccttgcagcgtttcaagccctgggttcttgcagatcctggaatgttgagtaaaatgttgtcttgtttggacagctgcacttatgcttggactagtggtctggaaacggctcttaagatggtcattgacagcagtcacatagattcatcccttgctaaagctctgatggagtccattaagaatattacaaaacttgaggtgcccaatctacaaaaaaatattcccaacaatgagatgcaatgtagactaactctcttgccaagtagtcttctgccaggattgaacttggtcatttggaatggtggtcactattttgttaaagtcgcaaatctgtgggcaaatcggatatctcctgatcctcctcttctgccaagcaaccccacctcttcaatgaacaatgcagcaacacacagccagtcatgctgaataacatgtcaaacatctgaggctgtgacctacactctgatggaagcatcaaatgcatgttgtgtaaaacatattcgtcaagttatcttttttatatacgtaaactgagcaagcaccgtgctgattgagggctgttcttggaagatagagatccaaggtgactgttcctttgcaggtcattcttttgtacaagttgtaatttacaacattctttccatagtgccggatgatgtcactaagtatagcaagtcgaaagggaatgacaagtttggaagtggacgtctggtataatgttgtactaaaacccatccgaaatggtgccaatgtgtagattatcaaagctgagaattggaatacggatcgtggaaactgtcactcttttgctaggttaatattatgggctttgctgtgttttgctagatcagttggtattcctcagctacgcattgtgatttgggactgtgtctcgataagttgctcagcccagcgttgactatttattgacttgaaacgaagatagatcttactccgttctttccacgctgatggacaatggcactagtatagcaagtcaaaaaagaatgttcagtttggaactgaacgtattgcat

SEQ ID NO: 3188 - DNA, 468 bp, Zea mays
  Clone ID: MRT4577_102906C.1
gggacggggttccatgttatattgcaaaaaccaccaaattaaaaaaccccctaatttaatgcgaaaaaaaaaaatggcaaaaagggataaaaaaaagccttgactataaactatttaaaaggaaattttgaaattccccaattaaaaaccatgctaacctaaaaaaaaaacccatgcctgttaaattttactggaaaaaaaaaaattcgggtttttttatttaataaaaacaaaaacccccgggctaaggtgggctggtgggtttttaaatgggtcaaaggtttaaaaatttaaacaaacccggtttttccgtttttttggaaattggggaagacccatgttatttttgggattaaaaatctcaagggcaccaaccccaaaaaggggaactggggctttcttttaattgtaaacgccattatacctccccagggctggaaaaaaaaaaaatggttttgggtaaacttt

SEQ ID NO: 3189 - DNA, 676 bp, Zea mays
  unsure (1)..(676): unsure at all n locations
  Clone ID: MRT4577_102907C.1
tcacatagattcatccctgctaaagctctgatggagtccattaagaatattacaaaacttgaggtgcccaatcnnnnnnnnnnnnnnnnnnnnnnngagatgcaatgtagactaactctcttgccaagtagtcttctgccaggattgaacttggtcatttggaatggtggtcactattttgttaaagtcgcaaatctgtgggcaaatcggatatctcctgatcctcctcttctgccaagcaaccccacctcttcaatgaacaatgcagcaacacacagccagtcatgctgaataacatgtcaaacatctgaggctgtgacctacactctgatggaagcatcaaatgcatgttgtgtaaaacatattcgtcaagttatcttttttatatacgtaaactgagcaagcaccgtgctgattgagggctgttcttggaagatagagatccaaggtgactgttcctttgcaggtcattcttttgtacaagttgtaatttacaacattctttccatagtgccggatgatgtcactaagtatagcaagtcgaaagggaatgacaagtttggaagtggacgtctggtataatgtgtagattatcaaagctgagaattggaatacggatcgtggaaactgtcactcttttgctaggttaatattatgggctttgctgtgttttgct

SEQ ID NO: 3190 - DNA, 844 bp, Zea mays
  Clone ID: MRT4577_102908C.1
gccctatagttcttgatctgccaccacctcagcctggttcaatgtctggactcacttctgttgatatggtatctgcctctgatccaaaatctgcaatggcactccaaagattagttcaagctgctgtttggtttctaggagaaaatgctaattatgctgcatctgagtatgcctgggagtctgcaacaccacccggtactgcattaatgatgctagatgctgataaaatggctgctgctgcgacgaccgtgtgaccgtagtcgttatttgtgtgtacggaataaagtggtgagcgctgagacgtgcgtgtcagcctagtaataactaaaataatggccgtgttcatgtaacgtgctcgccgtatgtacaagccgagtgtaataatacagtactatgtgtattaaaaaaaaaaaaaaaaaaaaaaaaaaaaaaaaaaaaaaaaaaacacgagggcggcattttcaaatgcggcaaccgcaagagcggtggcggcaagttcaacaagtggaagtgaagcgaccgaaacgaatcaagacaacaccctcggtctcgcttcgcacacgtgccccgcacacgaatcctagtgctacataataaagtgcaagcaggcaggaggcgtacgtgtgcgagtaagtgctgctgctgcggcgaccgtgtgaccgtagtcgttatctgtgtgtatacggaataaagtggtgagcgctgagacgtgcgtgtcagcctagtaataactaaaataatggccgtgttcacgtaacgtactcgccgtatgtcccctcgtgtgtccaagccgagtgtaataatacagtcctatactactatgtgtattattaagggctcgttt

SEQ ID NO: 3191 - DNA, 607 bp, Zea mays
  unsure (1)..(607): unsure at all n locations
  Clone ID: MRT4577_102909C.1
gggatctacaatctctgatgaaaacaacaaagcgactgcaatgggaggggatattcaggaaatatatgacaaactaaaagattcttcattgcccgaaggctttttcacagaggaacagccttggaaggatatatatatcacagaactccttaattgtatcaaagaggaacatctgaaggattttgaacaagagtattgtttagcagaaaagatagaaggggtatgtatcatactattattgtctatgtcacgcaacggaggacacagatattgcagttgaactttataagctcagtatttccaccctagatctattgaaactagcatccaaagaggaacagggtgattatgtcggtgcatggtacagtatgcttctgtcctgtgctcaagaattgaagcatggcgtggcactttggcaagagttttatcatgcaaatgtctgcgacagagtagtttctgaaggcggtcactactttattgctcttggggagatatatagagttgcacagattntatacttatccttgcagcgtttcaagccctnggttcttgcagatcctgnaatgttgagtaaaatgttgtcttgtttggacagctgcacttatgc

SEQ ID NO: 3192 - DNA, 8489 bp, Zea mays
  Clone ID: MRT4577_10290C.1
acccgtcatgggcagcctgcttttctatgctatatagacttgcatgtaactattcagagtcaggatattctacatagtgtgaatattccgttaaaaagcttgattctagtgcaaaatgatcaatatgtagaatctgaacaagtaattgcggagattcgtgccggaacgtccactttgcattttaaagaaaaggtacaaaagcatatttattccgaatcagacggggaaatgcactggagtactgatgtttaccatgcgcccgaatatcaatatggtaatcttcgtcgattaccaaaaacaagccatttatggatattgtcagtaagtatgtgcagatccagtatagcatctttttcgctgcacaaggatcaagatcaaatgaatacttattctttttctgttgatggaagatatatctttgacttctcaatggctaatgatcaagtaagccatagactgttggatacttttggtaaaaaagatagagaaattcttgattatttaacgccagatcgaatcgtgttcaacggtcattggaattgtttctatccttccattcttcaagataattcagatttgttggcgaaaaagcgaagaaataggctcgtcgttccattacaatatcatcaagaacaagaaaaagagcgaatatcctgtttgggtatttcaatggaaataccctttatgggtgttttacgtagaaatactatttttgcttattttgacgatccacgatacagaaaagataaaaggggttcaggaattgttaaatttagatataggaccctggaggaagaatatcggacccaagaggaagagtataggactcgagaggaagaatatcggactcgagaggaagactcagaagacgaatatgagagcccagagaacaaatataggacccgagagggagagggcgaatataaaatcctagaagacgaatataggactctagaggacgaatatgaaaccctagaagatgaatatgggatcctagaggacgaatataggactctagagaaagactcagaggaagaatatgggagcctagagaacaaatataggactcgagagggagagggcgaatatgaaatcctagaggaagaatcagaagaagaatatgggagctctgaagatggctcagagaaggaatatgggactttagaagaagactcagaagaagactcagaggaagactcagaagacgaatatgggagcccggaggaagattctatcttaaaaaaagagggttttattgagcatcgaggaacaaaagaatttagtctaaaataccaaaaagaagtagatcggttttttttcattcttcaagaactgcatatcttgccgagatcctcatccctaaaggtacttgacaatagtattattggagtcgatacacaactcacaaaaaatacaagaagtcgactaggtggattggtccgagtgaagagaaaaaaaagccatacagaactcaaaatcttttccggagatattcattttcctgaagaggcggataagatattaggtggcagtttgataccaccagaaagagaaaaaaaagattctaaggaatcaaaaaaaaggaaaaattgggtttatgttcaacggaaaaaatttctcaaaagcaaggaaaagtattttgttttggttcgacctgcagtcgcatatgaaatggacgaagggataaatttagcaacacttttcccgcaggatctcctgcaagaagaggataatctccaacttcgacttgtcaattttatttctcatgaaaatagcaagttaactcaaagaatttatcacacgaatagtcaattcgttcgaacttgcttagtagtgaattgggaacaagaagaaaaagagggagctcgtgcttctcttgttgaggtaaaaacaaatgatctaattcgcgatttcctaagaattgagttagtcaagtctactattttgtatacacgaagaaggtatgataggacaagtgtaggattgattcccaataataggttagatcgcaacaataccaattccttttattccaaggcgaagattcaatcacttagccaacatcaagaagttattggcaccttgttgaatcgaaataaagaatatccatctttgatgattttgttggcatccaactgttctcgaattggtttattcaagaattctaaatatcccaatgcggtaaaagaatcgaatcctagaattcctattcgagatatttttgggctcttaggcgttattgtacctagtatatcgaatttttcttcatcttactatttattaacgcataatcagatcttgttaaaaaaatacttgttccttgacaatttgaaacaaaccttacaagtacttcaaggacttaaatactctttaatagacgaaaataaaaggatttcgaattttgacagtaacatcatgttggagccattccatttgaattggcactttctccatcatgactcatgggaagagacattggcaataattcaccttgggcaatttatttgtgaaaatttatgtctatttaaattacacataaaaaaatctggtcaaattttcattgttaatatggactcctttgttctaagagcagctaagccttatttggccactataggagcaactgttcatggtcattatggaaaaatcctttacaaaggagataggttagttacgtttatatatgaaaaatcgagatccagtgatataacgcaaggtcttccaaaagtagaacaaatcttcgaagcgcgttcaattgattcactatcgccgaatctcgaaaggagaattgaggattggaatgaacgtataccaagaattcttggggttccctggggattcttgattggagctgagctaaccatagcccaaagtcgtatctctttggttaataagatccaaaaggtttatcgatcccaaggggtacagatccataatagacatatagagattattatacgccaagtaacatcaaaagtaagggtttccgaagatggaatgtctaatgtttttttacctggggaattaataggactattgcgagcggaacgagcagggcgggctttagatgaatcgatctattatcgggcaatcttattgggaataacaagggcttccctgaatacccaaagtttcatatctgaagcaagttttcaagaaactgctcgagttttagcaaaagctgccctacgaggtcgtattgattggttgaaaggtctgaaagaaaacgtagttctgggggggattatacctgttggtaccggattccaaaaatttgtgcatcgttccccacaagacaagaacctttatttagaaattcaaaaaaaaaatctattcgcgtcggaaatgagagatattttgtttctccatacagaattagtttcttctgattctgacgtaacaaacaatttctatgaaacatcagagaccccgtttacccctatttatacgatttaagtatacataaagcaattttttttactttaatttaaactatacttttgaccttagaatgctaacaggtctgattttcgattttgtacttaaatttaaattgtattttaataagtaaaagaagtcagttaattcattaaggctatgtttataccgtgtatcaatggtcaagaaggttccattggaacaattattatttatttcaagctatttcggctctttcttaatcttcaaaaagaaatgaattccgtaatggtaacacgaaaaaagaaaaaaaaaggaagtgtggaaaaaatgacaagaagatattggaacatcaatttgaaagagatgatagaagcgggagttcattttggtcatggtattaagaaatggaatcccaaaatggccccttacatctcggcaaagcgtaaaggtactcatattataaatcttgctagaacagctcgttttttatcagaagcttgtgatttagtttttgatgcagcaagtcagggaaaaagcttcttaattgttggtaccaaaaaaagagcagcggatttagtagcatcagctgcaataaggtctcgttgtcattatgttaataaaaagtggttcagcggtatgttaacgaattggtcgattaccaaaactagactttctcaatttagagacttaagagcagaagaaaaaatgggaaaattccaccatctcccaaaaagagatgcggcaatcttaaagagaaaattatctaccttgcaaagatatctcggcgggatcaaatatatgacgaggttgcctgacattgtggtcgtccttgatcagcaaaaagagtatatagctcttcaggaatgtgccattttggggattcctactatttctttagtcgatacaaattgtgacccagatcttgcgaatatatcgattcctgccaacgatgacactatgacttcaattcgattaattcttaacaaattagtatttgcaatttctgggggccgttctctctatataagaaatcgttgattaagaagaatagtgaattcttgagcaactgcgtagatttataggattaattactattcttttttgttttgcatagataaaagaagggaaatattgatatatattagagggtattgatatatattatgatctgatgtgatttcttggtatattaaatataagattaatacttcaagttgctgagttgagaaagagatgcttgaatcaaaagaattccttttttgaagttcaatttttatcagaggacaatatgaatattacaccatgttccattaaaacactcaaggggttatatgatatatcgggtgtagaagtagggcaacacttctattggcaaataggaggtttccaaattcatgcccaagtactcatcacttcttgggtcgtaattactattttgctaggttcagttatcatagctgttcggaatccacaaaccatcccgaccgatggtcagaatttcttcgaatatgtccttgagtttattcgagacttgagcaaaactcagattggagaagaatatggtccctgggttccctttattggaactatgttcctttttatttttgtttcgaattggtcaggtgctcttttaccttggaaaattatagagttaccccatggggaattagcagcgcccacgaatgatataaatactactgttgctttagctttactaacatcagcggcatatttttatgcgggtcttagcaaaaaaggattgagttatttcgaaaaatatattaaaccaaccccaatccttttacctattaacatcctagaagatttcacaaaaccattatcacttagttttcgacttttcggaaatatattggcggatgaattagtcgttgttgttcttgtttctttagtccccttagtagtccctataccggtcatgtttcttggattatttacaagcggtattcaagctcttatttttgcaacgttagccgcagcctatataggtgaatccatggaaggtcatcattgaattaactagtttttgaaatagtctttctttttttagcttagcccaattcatgcatgattccggataatcctcttagttggaaaactaaatagttcgaaaggcgtatgaatatacaacctagagttgtaggagagagaatagactatattatggaagaggtaaagtatatatgcattcaggggggccaagtcaggttagatctatatctttaatgcctataagacagtcatcttttgtgtggctttctaaagaatgattttagaatcggattcaatagaaaatgagaaaataggcaaacaaaatagaagaaacaaatgtatatgggattttttttattcctaagttagattcattatctaatccgatatatagaattcccttctatatggaactggattccatatctagttctatgcagcatattgttatcaattgtatatcttgatttgattcctattggatttggattagttcgatttcaataggggttcttcctgtatttcgtcttttattatgttagatgaaggggaaaaaatgggaactcaaagatatcgaagagtaaaaaaaaggatggaataaaagagtgattggttgaaaagaaagagaaatagaataatgagaatcatatggatttacacaaacctctaatgattagaaactaagaacgagatctcgaagtaattcgaacgatttcgattatcatttatttgtacttattagttacttctacccgatagagcttagaagttggaagtaataatttcttggttgattgtatccttaaccatttctttttttttgacacgaggaactcatcatgaatccactaattgctgctgcttccgttattgctgctggattggccgtagggcttgcttctattgggcccggagttggtcaaggtactgctgcaggacaagctgtagaaggtattgcgagacagccagaagcagaaggtaaaataagaggtactttattgcttagtctagcttttatggaagctttaacaatttatggactggttgtggcactagcgcttttatttgcgaacccttttgtttaatcctaaaaaagaaaatgagtcctttagattagatacttttttctttttttagtacattggcatttgcttatgtaattctaagtatatcaatactttactttactcctatttattatattatttcttttttatattattccggaaattttgtatttatcgggacagacaataccctaggaaccccaagaagggctgatttgagcatgatcaatttagaggatatgctcgccctcttccttcccgtccttagtttaggacagtggaaagtatttttccttttattttaggaattttgggaacatttcaacaaaggagatctttcacaggtcaaacgagacctaagacttaatctaaaagaaattattagattgaatctatttgcattaaaaaaaaccgatcaaaaaaggacgagcgaagtaagtaatcgaaaaactttcttctttgttcgtcctatctataagaggagagcatatgaaaaatgtaacccattcttttgtttttttagctcactggccattcgctgggagtttcgggcttaataccgatattttagcaacaaatctaataaatctaactgtagtggttggtgtattgattttttttggaaagggagtgtgtgcgagttgtctatttcaagaatagattggatctatccggctgcactttagaatatttttagtattttttttgataaataagaaaaggtgcacgatctcgacgaattacttctgaataacttcagaaatcatatggaagaaccatagcatttcgcgattcattggtaaatttactttgattctctatagaccaataatgtgagaccattaacacggttaaagctaaactgcttgaagtccgggcaaaaaggggtactctttctacaactacattagtattagtctcgaaatgctttaaacgggaaatagctagtgtagaatttatctgatatagaacactcatatcgataaaatagtttgaactatttactagaagggcacgcagccctttttccaatgccaaatcgacgacctatgtataaaaaaaagagaaattttttggatttgaagaaaaaataaaaggaattctatcaatttttattttccatttatttagttagtttttcttaatgaaattgaaattattaactaacagagcaaacacaaataaagaaacaactttgctgaccatgatagatttttatctagttggaagagtcctcttaatattcatctagtcttatataagtttgggtatatagaaatacaaacagaaaagagaggatagaggataggctcattacataaaaaaaagatatggaaatagccataatacataacaaaaaagaaaaaaaggagcgggagagccaaatgaatcgaaagattcatgtttggttcgggaagagatcataaaaattgtaaacttaatagcaagataatctactttcattaaaagatttattagataatcgaaaacagaggattttaagtactattcgaaattcggaagaattgcgtaaagggacccttgaacaactcgaaaaagctcgtattcgattacagaaagtcgaactggaagcagatgagtatcgaatgaatggatactctgaaatagaacgagaaaaagaaaatttgattaatgctacttctattagtttggaacaattagaaaagtctaaaaacgaaaccctttattttgaaaaacaaagggcgatgaatcaggtccgacaacgggttttccaacaagctgtacaaggagctctaggaactctgaatagttgtttgaataccgagttacatttccgtacgattcgtgctaatattggcattctcggggccatagaatggaagagataattcaatttattaggttttgaacttctacttttgtttagaatttaggcattatttttcccttgcttccaaaaaaaaaaaaaaaaaaaaaaaaaaaaaagtactctgcgttgttaccactgct

SEQ ID NO: 3193 - DNA, 452 bp, Zea mays
  Clone ID: MRT4577_102910C.1
caagcacaagcgcggcggcggcatgttcggcggaggcaaccgcaaaaccggcgcgttcggcggcggcaagttcaacaagtggaagtgaagcgcccgaaacgaatcaaatcatcacccagagtcacgcttcgcacacgtgcaccgcacacgaatcctagtgctacataataaagtgcaagcaggcaggaggcgtacgacgtgtgcgagtgagtgctgctgctgcggcgaccgtgtgaccgtagtcgttatctgtgtgtacggaataaagtggtgagcgctgagacgtgcgtgtcagcctagtaataactaaaataatggccgtgttcacgtaacgtactcgccgtatgtaccatcgtgtgtacaagccgagtgtaataatacagtactatactactatgtgtattattaaaaaaaaaaaaaaaaaaaaaaaaagggcggcccggacgcgtggg

SEQ ID NO: 3194 - DNA, 246 bp, Zea mays
  Clone ID: MRT4577_102911C.1
cgcgattgatcactgcggctggtgccactaccgcaactgtgttccgagctgcagatggagctgtgggaagtgaagatcggcgtgctgacaaaatggacttgaagccaggatagagcccatggccgcccatgggaccttttcgagcaagcattttcatgaatagatagatatacagcttgcagtcttactgtacataatgtgaccaggatgtggggtatatatgacattatttatgctatctgatta

SEQ ID NO: 3195 - DNA, 1294 bp, Zea mays
  Clone ID: MRT4577_102913C.1
ggaacctaccaggaccaaagaaaagataatgaattttagaatccattaacgagaaggatgatttcttggaatgccagatgacttgctcgttaaggaaaataagaaatttgttatattgaaaaatgcttatgctctagaggtagaaaatgtgaaaatttatccagagagcttaatatgtgcaatgatccattttcttgtcttagaattgagaatgatgatttgattgctaagattgaagaattgaatgtttgcaagccatctacatcttctgttgaacatgtcactatttgtactacatgtagagatgttaatattaatgctatagatgatcaccttgccatgattaaagaacaaaatgatcatatagctcagttgaatgctaaaattgccaagcatgaacatgagaatgaaaaatttaaatctgctcattaatgggagacgccttggcattaaggttggcattggcttccaacaaggaagtcaaagcaacgtcaaacttaatgcgcctaagaacaaactatctaattttgttaaggttaaggctcccatggttcaggatagagaaggttacgttttataccctgagaactatcccgagcacaaaattaggaaaattcatgttagaaaatcttatattatttctcatcatacttatatgtatagtaatgaggcatctagctctaggcattcaactcatgttaagatgcctcagaaaaagattgttgatgcatcaaatgaacataacatttcgtttaaaacctttgatgcatcattgtttcttgctaacaaatcagacaaggtagttgccaaatatgttgggggcaaacacaagagtctaaagacttgtgtttaggtacccaaggtgcttgtttctaatgtgaaaggacccaagaccgtttgggtacctaaggacaaggcctaaatttgtgttgtaggtttatgcatcaggcggaacaagttggataatcgacaatgggtgcacaaaccacattaaaggggagaaaagaatgttctcctcatgagaaaaatgatgatccccaaagagcaatcacattcggggatggaaatcaaggtttggaaaaaggatttggtaaaattgctatatctcctgaccattccatttttaatgtttttgttgtagattctctagattacaacttgctttctgtttctcaattatgcaaaatgggctacaattgtttatttactgatgttgatgttaccgtctttagaagaagtgatgattcactagcttttaagggagtattagatggtcaactatatttaattgccc

SEQ ID NO: 3196 - DNA, 438 bp, Zea mays
  Clone ID: MRT4577_102914C.1
gggcttcctacggcgggtccggccggtgcctggacgcctggagcctgttcgacgaaagggccgccaggaacggcgtcttcgggaacgccgtcctcgccgcttacgtgggcgcggccgagtgggctcccgtgctgaggttcgccaggaggttctcggaactgcggctgcaggttgactggtacacgatgacggctgtggcgcgggcgtgtggcgagggggcggcgctgatctcggcgtccaggcgcatgggcatgcggtcaggaggctgggaggtgtagaggtggacgtgttcttggtcagcgcgttcgtggacatgtacgccaagtgcgggcttatcagccaagcggagcgtgtgtttcgtcttgcgcaacaggagaccgttggaataggtgacgttgttctgtttacggtcatgttgaacgtatattatcagtgatg

SEQ ID NO: 3197 - DNA, 1254 bp, Zea mays
  Clone ID: MRT4577_102915C.1
atgatttcctcgccattggccgggaaaaggagtgtgacttgccgtgccgttccagcggttctctctcactggcggcggcggcggcggcgaggcctctgcgtcttccagatccctcgtacgggagggaatctccgcagccgagttgagcggcggaggagctgggggtttcgtacaacattttccccccattattttcttatatgtttgtgggtttcgtcctccattcgttacgatgaaatggtctgatgctaaatttgggagatggttcttgtgcacttagcatggcttgttgcgaaacacttttggtggtctggaaccttaatccaactgggtcttgcaagctgtccatgtaatttctgcatatccctgtgatgagcattttagtaaaaaaaaaaaaaaaaaaaaaaaaaaaaaaaaaaaaaaactccgccggctcccccactcagaaaacccagccgccgccgcatcggcctcccaggtaagcagtagcgtccaccccagccgccgccatgaagcgcaacccccgcgtcacgagctcccgccggaagtgccgcaaggcgcacttcacggccccgtcctccgtccgccgcgtgctcatgtccgcggcgctatcgacggagctccgccacaagtacaatgtgcgttccatcccgatccgcaaggacgacgaggtgcaggtcgtgcgcggcacctacaagggccgtgagggcaaagtggtgcaggtgtaccgccgtcgctgggtcatccacgttgagcggatcacccgcgagaaggtgaacggctccaccgtgaacgtgggcatccacccttccaaggtcatggttacaaagctgaagcttgacaaggaccgcaaggcgctcctcgaccgcaaggcccggggccgcgccgccgacaaggctaagggcaagtttactggccgacgacgtcgccgccgctgctggtggcgccgccgccactggcgcgtctctccaggagatcgactaggcgcttcgcggggatctgatggtggtcctaccgcctattactccttatcgctctagtttttgctatcaatgattatgtgctaggagttttatgttacttataaactgctttgagcctcgatgggagttgaacttaatgtggagtgtatctgagatatgaagaactcattatatggctaatatctcttgttgtgttctgctaaatggttgccgagttttggctttactatattgcttattacatgcatctagtggtttatgttttcagttt

SEQ ID NO: 3198 - DNA, 951 bp, Zea mays
  Clone ID: MRT4577_102916C.1
tggttattagtcctaaatttttatttttatatttatataaataacaacgaatctatatacatatataaaacacatacattaattattctgtgaatctattgattcacgccttttcattgcctgaacaaacatgtcgaagttgcggtgcgacgagcccccacgggtgacgctcccacgcgcagcccttttcatgtcctccaccctctccctcatgccggcgtcacccatcaactcctccaccctactggcgatgtgctccttggtgacgacgcccgactcatcggcctcggccgggagcccgaccttccagacgtcgcagatgtacgcctggttgacgaactggtcggtgaagtagggccaggcgaggaagggcaccccgttgcggacgccctccatggtcgagttccagccgcagtgcgagacgaagcacgcgaccgcagggtgcgccaacacccgctgctgcggcgaccacgccaccaccatgccgcggccagtcgcgctgacgcggtcgaggaagccgtcggggtagccgtggatgccgccgccgccgaggacgatgtcagggcgcacgacccacaggaacggccgaccagagagctccagccccagtgccagctcccggaactggcgcgcgtcgaacatggtgtggctgccgaaggccacgtacacgacggacctcgccgcctgcgcgttgagccaggccatgcacgcgccgtcctcgggccgccagaaatgccccaccaccgctgccgcctgcttgccaccactgccacggcgacggcgctcgcccgtgaggagagggccgactgggacgatccgcgggaaccgcgcgaaggtcgccggctcggcgtcgtggaaagagttgcagaggatgaagtcgcactcttccaccgcgcggacgccggcgcgcccacgcgtccgcccacgcgtccgcccacgcgtccgaggtaa

SEQ ID NO: 3199 - DNA, 400 bp, Zea mays
  Clone ID: MRT4577_102917C.1
agccggagagattcccgtcgtttcgacgcaccggatcgcgggacctctcgtctcccctcccttcccttccctgcgccgcccacggcagaatggcgggagccgacggggcgcagcaacaccatccttgcagcatctgcatggagcccatggcgccctccgcggcccaccgcggcggtttcgcctgcactcacgcattctgcggcgcgtgcctgtccggtcacgtccgcgccaagctagagtgcggcggcggcggcgccgtggtgcggtgccccgacgcgtcctgcgctgccacgctcgacccggagctctgccgcggcgcgctcccctccgaagtcttcgagcgctggtgcgccaagctctgcgagtccctgttcctcggagcgcgccgcacctactgccc

SEQ ID NO: 3200 - DNA, 1580 bp, Zea mays
  Clone ID: MRT4577_102918C.1
cacaggaaggcgctcacacggttggtccgtcaccctgctgcctctgctctaggatctaccgtgtgtggtgtaatagatcgggccccatatactacgggaagcccagcacccggcccacttccccgcccatccacttcccgcagggcaaacatctctgcttcacacaaccatgctgcttttgttacggagtctggggaggttttcacctgtggtgataattcatcattatgctgtggtcatggcgaagtggggagaactatatttcgaccaatgcaagtagaagcgcttaaagggattccctgcaagcaggttgctactggtctaagttttactgtgattcttacaagggatggacaagtatatacttgtggaagcaatacacatggccaacttggtcacggtgacaccatagacagggccactccaaagcttatagaattgtttgaaggccccactcaggtggtgcagattgcagccggcgcaagctacacttttgctgtaacagatgatgggactgttcattcgtttgggtcttgcactaatttctgccttggacatggggatcagcatgacgaacttcttcctcgtgcaatccaatcatttaagaggaggaacattcatgtagtccgtgtttctgctggagatgagcatgctgtggctcttgatgcactaggacacgtttatacttggggcagaggatactgtggagccttaggtcatggtgatgagaacgataaaactagcccagaattgatcggcagcttgaagggccaagttgctgtgcaggtatgtgcaaggaagaggaagacgtttgtcctcacggacgagggctcagttgttgcgtttggatggatgggttttgggagtctagggtttcttgaccgaggaacatcagacaaagtaatgaggccccgcgttcttgagagcctgcaggatcactacgtctcccaaataagcaccggactgtatcacactgtcgcagtgacaaataagggcattgtattcgggttcggggacaacgagcgagcacaacttgggcaggagtacattcgtgggtgcttaaaacctaccgagataatgttccaaaagagtatcgaagacataccaattgcggcgcctagtggttgacctcaaggccaagaggccaagaccaccattttggacactgttgcctgcatatatgttgtacttatattgaaattcttctcggtaagtgtattttatactttgtgatttgtgatgaacgggggaggacggaagagcaaagttggaggacagtgttgtgttgtgtagccaaagaagcatgtagtttagtaacgtgtgatgtaccgaataattcaacccaccatttttattctgtataaaatttattggtgtgtttgtattcaaaaaaaaaaaaaaaaaaaaaaaaaaaaaaaaaaaaaaaaaaaaaaacacccattttttttttgtacagaatttattggtgcgtttgtatttttttgtctctctcttgtccccttcatgtttttttggttctgtgctagcaactgttgagtaaatagcatttgttccccctggaacttgttatattagtgcct

SEQ ID NO: 3201 - DNA, 229 bp, Zea mays
  Clone ID: MRT4577_102919C.1
gcacgagcaaatgcatagaggaggtttagtgtttccttcacagcaaagaccagttgctgttaaacaaaatgctgatttcgattgaattttccattttatatacaagatagctacaattttaatatcattggatcgattgcacatttttatgttacatgtattcactatttgtgatgctaagacaagttgcagcttaacatgcaatgtttttcatattcagaaagaattg

SEQ ID NO: 3202 - DNA, 287 bp, Zea mays
  unsure (1)..(287): unsure at all n locations
  Clone ID: MRT4577_10291C.1
ccgccgtcgtctccgtcgctccgccgcacctccccccataccggctctctagtagccctatccctagccgccatggcggctgttgcggcggccacctcgcacctcctacgccaccaccgcaacccccaccttctcctcctccgcgcagcgatctcatcctcccgtgctttgccccagcagccggagctgtcccccggcgcgagggggggcacccctgacctcnccggagccgtcccactccatacaaaccgtatcacgggctgccggctttaaaccgggagctgtac

SEQ ID NO: 3203 - DNA, 390 bp, Zea mays
  unsure (1)..(390): unsure at all n locations
  Clone ID: MRT4577_102921C.1
gcatgcacgcgttcttttgcttgngacctctatacggccggcgtggggtttttttttttcttgcnagtcaggcggggggtcttgctcggtggatccgttccgctgttcagctctcgatgcggcccgttctcttttggcgctgttctaccctcaacacacttggtaattgttgttccacgaagccaagcctgatgcggtggggtgaatcgtcaggattcgcttccgcgctgaagccgcggcatcgtggtaggccttcccaggggctcgctgctcatgtctgcctggggtgccgtgctggtgtgccttggcctctctcgtgcggttctgccctcggtcttggtctcctggttggcggccctgctgatcttgtggaagcgcgcctttttgctg

SEQ ID NO: 3204 - DNA, 428 bp, Zea mays
  unsure (1)..(428): unsure at all n locations
  Clone ID: MRT4577_102922C.1
aattataccgctaaaacaaaatataccacaaacatagactaagatagtatttatctcaattcagcatctaaaaatacaataaacttgataaaaaatataaaagtacctaattagaggcgatttggtccttccccgcctctaataacttcatcaacattagcacgtgaatttgaacctacacattgcaagttatatatttgtntaaaatgagagatacaacatgacaatataactaatgaatgcaaaaatttataagtgagcacaaaaatataccacttgaactttggagagggagctttttcatacgactcttcaattcttgaaaatggtataaaatattatcactttgaatgcttgcaaatatctctctctctctatatagcataccatgctatgattcaaccaatcattttccatcttatttctca

SEQ ID NO: 3205 - DNA, 241 bp, Zea mays
  Clone ID: MRT4577_102923C.1
atcatgcactagcgttggtcgtacgccactcctgacaaggcatgatcggactttcacgtggtccggtcctgctgctcagcatatgcccgccggcagagattgccctggagatcccatctcttacgcctactcttgcagacgccactctggaagcgttactgcgatgaaacaggctcagcgctgtagattattgtcccgaagtttcctgctagccctgaagaacactaactgcatgtagcca

SEQ ID NO: 3206 - DNA, 2985 bp, Zea mays
  Clone ID: MRT4577_102924C.1
atggcacccaagagagctagctcgaaggcagccccatccgttgacgaagcagcgaaggcagcgctgctagccgagaaaaaggtcaagacccttgcagacaccacccaccaagaagcctgcgaagacgacctccagaggacagccacaagaaccaccccaggcttcgctccactagagggcgaggacgccatagaagacgacaaaatcatcggcatcccagccgaggaacaactacagctgcgggccctgcgcatcaagaaccgcaacctccagaaacagaaagaaatcctcgaggccaagcgccaacgtgtctctgcgcaggccaagcgcagacccttcgtcccacacgccacagcattccaaggcatcaactaccttgatgagcggagccccctggcgccgcaactgcaagtgtcaccatggcccgccaacttcagggcagggacctaccccaagtacaacggcagcaccgacccaacacagtacatcatgagctatcatgtcgctgtcgcatcattcggaggggacgacgccacgatggccaagtccttcatcatcgccctcgaagggtaccacccagacaccgatgccttggctgaactgtcactctgcaagcagctggagaaagaaaccctgcgggagtactaccgcaagttcctgactctcaagtcacaactgcctttggtcgatgaccaaattgccattcactacaccatcagtggccttcgggttggcgtcctttacagtcactgcatcaaggacccacccaagaacctccaagagctctatcagctgtttgaaaagtatgccagatccgaagagctccaccagcgcaaggtcgagtcccagaggaaacccaaggaccctccacagtccagccgaacatggacaagaccttcgcagtcagactccggtcgggacagacgcagtcaacagcaggtgcataacattgacaaccagcaccccgccggcgagacccctcgccgtcaagattatccccctagggccgcggcaatggcactcgcgatcggggctgaggacgggcgcatcagccgcgcagattttactgcctgtttcacggaagacttcgctgaccagccgtatcgcggagtcattcacatgatcactagggggtccagcgtcgacttcgacacgaagcgacagaagagggaccactaccgaagcatcaaccacgtcgccgtcaccggcccagtcgtgcaaaagaagtggtcccatgtgccgttgaccttcgatgccagagatgtcgacctgcacagcgcaccccacattgacgccatggtaatcaactgcagtgtggcaggctgggacctgcacaaagtcttagttgacaacggcagccaggcggacatcatcttcctccacgccttcgaccgcatgggcatcagccacagtttacttaagccttcggacaatcccctatatggcttcggcggcaagggcacctttcctgtgggcaagatagagctacccttgtccttcggtgtagcacccaatgcacgaagtgagcaggtcaccttcgacatcgtcgacatggtatacacgtacaacgccataatgggtcggggctccatcaacaagtttgaagcggccattcacggactttacctgtgcatgaaaatcccgggtccgcaaggcatgatcatagtctatggcaaccagcagactgcgcgcaacattgaaagagacttcgttccagggcaacggaacgtacactgccttacgacgcagcgcgaggtccccgaggctacccgcccaaccgccaacgagcttcaaaaggcacagctgcagagcaacgacggaacaaagacggtcccccttgaccaggcaatgcccaagcaaacggtcatcataatcgaagacccgactttgcaagacgaggagaaactcatctcctgtctttccagaaataaggacgtcttcgcctggtctgcactcgacctggtcggagtgagtcgcactatcatcgaacacagtctgggcatcgacccttcggtgcggctgaagaagcagaggttgcgcaaaatgtctgatgaaaaaacagaagccaccaaagccaaggtacaccacctgcttgaggccaatttcatcgaaccagtcgcctaccctacgtggctcgctaacgtagtcatggtgcaaaataaaagcgtcaagtggcggatgtgcatcgatttcacaagcctcaataaagcctgccccaaggataatttcccgctgccacggatcgacaagatagtcgatagtgcaactggatgcgaagtcatgtcgctcctcgactgtttctccggctaccaccaaatatacatgaaggaggaagacaagaccagtaccagtttcatcacgcccttcggcatgtactgcttcgtcagaatgccggagggactaaagaacgctggatccaccttctctcgcctcaccaagacggtgctcgagagccaagtaggccggaacattttcacgtatgtggacaacatcgtcgtcgccagcaaaaacaaagaggatcatctggccgacctcgtagagacattcgcgaacatgcgggacacacgacttcgcctaaaccccgagaagtgtgtcttcagagtttgccaggggaagatactgggctacctagtgtcgcaccgcgggatcgaggccaacccgaccaagatacaggctatcatcaacatgacgcctccgcagtcagccagagacgtccaacgtctgacaggcagattggccaccctcaacagattcatttccaagtccatagagcgaagcctacccttcctcaagacgctacgcggcacaaaagactttgcatggggaccagagcaagcggcagccttcgcatcactcaagcagcacctgttagagttggcaacccttacaagccccgacccctcgctacctctgttgctctacgtcgcagcttcgccacacgcagtcagcgcagcgttggtccaagagcaggacagagagggctga

SEQ ID NO: 3207 - DNA, 181 bp, Zea mays
  Clone ID: MRT4577_102925C.1
tgtagcagttatgtactactatccccactaccgctagcccccgcgctggtgatccggtggcgactcgccttcctacccacagccgacgtcgccggctactcctctagctccctacttacccccaacaataagctcatgctacatgcctacctatccggagggagagacagagaaaggggac

SEQ ID NO: 3208 - DNA, 1932 bp, Zea mays
  Clone ID: MRT4577_102926C.1
atggcacccaaaagagctagctcgaaggcagccccatccattgacgaagcagcgaaggcagcgttgctggccgagaaaaagagcaaggcccttgcagacaccacccaccaagaagcctgcgaagacgacgtcgtcagcaagagacagcgcaacgaccaaccaactcccgagggcagcctccacacctgcagctccggaggacagccacaggaaccacccccaggcttcgctctgctagagggcgaggacgccacagaggacggcgaagtcatcggtgtttcagcagaagaacagctacagctgcgggccctccgcatcaagaaccgcaacctccagaagcagaaagaaatcctcgaggccaagcgccaacgtgtttccacgcaggccatggtgcgcctgatgatacgagacgaggagcagagggctcaagaactcgagcaagagattgcgctcatgcagcgtgaaggccaacatgatctgcagcacggcccgcccctccaacagcacgtgccagtcggagacttattcattcctcagcgcggacccgtcatcccgcatgccgcagcattccaaggcgtcaactaccttgatgagcggagtcccctggcgccgcaactgcaaaagtctctgggacaaatttctgctcaacttccaagggtacgcccagacaccgatgccttggccgaactgtcactctgcaagaaactggagaaagaaaccctgcgggagtattaccgcaggttcctgactctcaagtcacaactgccttcggtcgatgaccaaattgccattcactacgccatcagcggccttcaggctggcgtcctttacagtcactgcatcagggacccacccaagaacctccaagagctctatcagctgtttgaaaaatatgccagatccgaagagctccaccagcgtaaggtcgagtcccagaggaaacccaaggaccctccgcagtccagtcgaacatggacaagaccttcgcagttagactccggtcgggacagccgctgtcagcagcaggtgcataacattgccaaccagcaccccgcgggtgaggcctctcaccgtcaagattatcccccccagggccacaacaatggcactcgtggtcggggccaaggacgggcgcaacagccgcatagattttgctgcctgtttcacggtgaagattgcgcgcacccaacgagggactacccagaaacgaaggccaccagggacaggatgtctcgggcgcaaccagccgacaaccaaagagttgtcgcgcacacatatcaacaccaccaggagaagagggaccactaccgaagcatcaaccacgtcgccgtcaccggcccagtcgtgcaaacgaagtggtcccacgtgtcgctgaccttcgacgccagagatgtcgacctgcgcagcgcaccccacattgacgccatggtaatcaactgcagcgtggcaggttgggacctgcacaaagttttagttgacaacggcagccaggcggacatcattttcctccacgccttcgaccgcatgggcatcaaccacagattactaaagccttcggacaaccccctatatggcttcggcagcaagggcacctttcctgtgggcaagatagagctacccttgtccttcagtgtagcacccaatgcacgaagtgagcaggtcaccttcgacatcgtcgacatggtatacccgtacaacgctataatgggtcggggctccatcaacaagtttgaagcggccattcacagactttacctgtgcatgaaaatcccgggtccgcaaggcgtgatcacagtctatggcaaccagcagaccgcgcgcaacattgaaagagacttcgttccagggcaacggaacgtacactgccttacgacgcagcgcgaaatccctgaggctaaccgcccaaccgccaacgagcatgaaaaggcatag

SEQ ID NO: 3209 - DNA, 4356 bp, Zea mays
  Clone ID: MRT4577_102927C.1
atggcacacaagagagccaactcgaaagcagcccaaaccgttggagatagggatgggagttagatctgcgggtatgagtacacgccggtggcgtagccaccgcacatggatatagtctcgactcacatctgtactgtgtattcaatacccgcttcatacccgacggggcggggccggggtatagtttctcgctggatttgctaggtgggtggcgaaccgccgaaggcagcgctgctgcccgagcaaaagcgcaaggccctcgaagacagagtcgtggaagaagcctgaaaagctgacgcagtcaggcagaggcagcgcaatgatcaaccaacttccgaaggcaccctccgcacctgcagctccggaggacaaccacaagcacccccaggcttcgctccactagagggcgaggacgccacagaggatggcgaagtcatcagcgtttcagcagaggaacaactacagctgcgggccttgcgcatcaagaatcgtaacctccagaagcagaaagagatcctcgaggccaagcgccaacgtgtctctgcgcaggccaaggtgcgccagatgatacgagacgaggagcagagggctcaggagctcgagcaagagattgcgctcatgcagcgcgaaggccaacatgatctgcagcacggtccgcccctccaacaacgcgcgccaatcggagacctattcattcctcagcgcggacccgtcatcccacatgctgcagcattccaaggcgtcaactaccttgatgagtggagtcccctagcaccgcaactgcaagtgtcaccatggcccgccaatttcagggcaggggcctaccccaagtacaacggcagcaccgacccagcacagtatatcatgagctatgaagtcgctgtcgcatcggacgtaggggacgacgccatgatggctaagtcctcaatgatggaactcgaaggtccggcaataagctgccactgcatcagggactcaccaatgaacctccaggagctctatcaaatgattgaaaaatatggtagctccgagaaggtgggccagagcaagggggagttcctatggaaacataaagtccctccgcagtactgccgaacgtggacaagaccttcgcagtcagactccggtcgggacagccgcagtcagcagcagactgcgcgcacccaacaagggactgcccagagacgaaggccaccagggataggatgtctcgggcgcaaccagccgacaacccaagagttgtcgcgcacacatatcaacaccacctcccacaaccatacaaccaccgccccgctcagcatccacctaaccatgcataccaacaccactaggagcgtcgacttcgacacgaagcgacagaagagggaccactaccgaagcatcaaccacgtcgctgtcatcggcccagtcgtgcaaacgaagtggtcccacgtgtcgctgaccttcgacgccagagatgtcgacctgtgcagcgcaccccacatggacgccatggtaatcaactgcagcgtggcaggctgggacctgcacaaagtcttagttgacaaaggcagccaggtggacatcattttcctccacgccttcgaccgcatgggcatcagccacagcttactaaagccttcggacaaccccctatatggcttcggcagcaaaggcacctttcctgtgggcaagatagagctacccctgtccttcggtgtagcacccaatgcgcgaagtgagcaggtcaccttcaacatcgtcgacatggtatacccatacaacaccataatgggtcggggctccatcaacaagtttgaagcagccattcacagactttacctatgcatgaaaataccgggtccgcaaggcgtgatcacggtctatggcaaccagcagactgcgtgcaacattgaaagagacttcgttctagggcaacggaacgtgcactgccttacgacgcagcgcgaagtccccaatgctacccgcccaaccgccaacgagcatgaaaaggcacagctgcagagcaatgatggaacaaagatagttccccttaaccaagcaacgccaatgcaaacggtcatcataagcgaagacctaacttcgcaagacgaggagggactcatctcctgtctttccagaaataaggacttcttcgcctggtctgccctcgacctggtcggagtcagtcgcactatcatcgagcacagtctgggcatcgacccttcgatgcggccgaagaagcagaggctgcgcaaaatgtctgatgagaaaacagaagccgccaaagccgaggtacaccgcctgcttgaggccaatttcatcgaaccagtcgcctaccctacgtggctcgctaacgtagtcatggtgcaaaagaagagtggcaagtggcgtatgtgcatcgatttcactagcctcaacaaggcctgccccaaggataatttcccactgcctcggatcgacaagatcgtcgatagtgaggccggatgcgaagtcatgtcactccttgactgcttttctggctatcaccaaatatatatgaaggaggaagacaaggccagtaccagtttcatcacaccctttggcacgtattgcttcgtcagaatgccggagggactaaagaaagttgggtccaccttctctcgcctcaccaagacagtgctcgagagccaagtcggccggaacatattcacgtatgtggacgacatcgtcgtcgccagcaaaaacaaagaggaccatctggccgacctcgcagaaacattcgcgaacatgcgggacgcacgacttcgcctaaaccccaagaagtgtgtcttcggcgttcgccaggggaagatactgggctacctggtgtcgcactgcgggatcgaagccaacccaaccaagatccaggccatcatcaacatgacgccttctgcagtcagccagagacgtccaacgtctaacaggaagattggccgccctcaacagattcatttccaacttcgccacacgcaatcagcagcgttggtccaagagcaggccagagagggcacaactcggcagtgtccagtttattacatctctgaagtcctcacgacttccaaatgcaacatgatagagttggagaaaattgcctacgcagtcgttatggcatcgcgcaagttgcgccactatttcgaagcattcaagtatctcacggttgtccgcagtcttgagaggcaatttaagggctttaccttgcaacatgtggaccgaggcaagaacgaggaggccgacgcattggccaaagcagcagccagaggcgaggccttgccctccgacgtgttctaccatgtcatcggcacaccagtcgtccgcagcccagagggcctacaaataaccaacgacaccgaaggccaccgcatagtcaacctcatcatgaccgaagactggcgagcaccaatcaccctgttcctgcagggatattaccatccaagcgacatcaacgaggccaagtgcctcaagcaccgaagccgagacttcgcactcattgagggccagctttataagaagggggtcagccaacccatgcttaaatgcgtcaccgagaccgaaggcgtccaaatcctgcgcgaagtccacaacgaaacttgcggctctcacgcggggcctagggccctcgctgccaaggtgatccatcaaggcttctactggcccgctatgatctgcaccgcgaatcgagtcacgaggttgtgcgaagcctgccagaagttttcccctcgttcgggcaacccttcgcaattcacaaagctgatagcccacacgtggctccttcagcgctggggcctggacattgtcgggccactacccacggcccaagggaacctcaagttcaccttcgtcgtcgtcgagtattttaccaagtggatcgaggcgagggcagtatccacaataacatcgaagactacccagaaattcttctggcaaaacattgtttgccgattcggagtcccgtctgagctcacagctcacaacggcaaacaatttgacagccaggacttcaggacttctgcttctccattggcaccaagcttgccttcgcctcagtatatcacccacaatctaacggcgtcgtggagcgcgccaacggcaaaattttcatggccatcaagaaaatgcttctcgacgacaagaagggccctcaacaaataccaagctcaaacaaaagcatggcgcgaccacacagtcgtcccaagagaattcaacaaaggggacctcgtactcgtccggactactcggacagagtcacggggcaagctggagccaaagtgggagggtcccttcatcgtcaagacaaaggtgtctcccagcgcgtataggctaacaacgccatccggcgaagacctagagcattcctag

SEQ ID NO: 3210 - DNA, 286 bp, Zea mays
  Clone ID: MRT4577_102928C.1
tagagcttttataaagctcacaatcctggtattgatgctaggtctgatgcaggcaacaaatttaaagaggtgtctgatgctgttgcacctaatgtccagcagggatttgatacatatccaacctttggaaagtaagttggtccacttcctggaacaatttgttgataaaaagatgatatggctggtcaagcctctcatttttacaaagcttgacaagtacccattttacatccctttatcagcactttttttgatcttcaacaacaatgattttttgtaccaaact

SEQ ID NO: 3211 - DNA, 3492 bp, Zea mays
  Clone ID: MRT4577_102929C.1
atggctaaggcaactttcaacttccaagggtaccgcccagacaccgacgccttggccgaactgtcactctgcaagcaactggagaaagaaactctgcgggagtactaccgcaagttcctgaccctcaagtcacaactgccttcggtcgacgaccaaattgcaattcactacgccatcagtggccttcgggctggcgtcctctacagccactgcatcagggacccaccaaagaacctccaggagctctatcaactatttgaaaaatatgccagatccgaggaactccaccaacgcaaggtcgagtcgcagaggaaacccaaggaccctccgcagtccagccaaacatggacaagaccttcgcagtcagactccggtcgggacagccgcagtcaacatcaagtgcacaacattgccaaccagcaccccgcttgcgtcgacttcgacacgaagcgacagaagagggaccactaccgaagcatcaaccacgtcgccgtcaccggcccagtcgtgcaaacgaagtggtcccacatgccgctgaccttcgacgccagagatgtcgatctgcgcagcgcacctcatatggacgccatggtaatcaactgcagcgtggcaggctgggacctgcacaaaatcttggttgacaacggcagccaggcggacatcattttccttcacgccttcgaccgcatgggcatcagccacaatctactcaagccttcggacaaccctttatatggcttcggcggcaagggcacctttcctgtgggcaagatagagctccccctgtccttcggtgtagcacccaatgcgcgaattccccttgaccaggctatgcccaagcagacggtcgtcataagcgaagaccttacttcgcatgacgaagagagactcatctcctgtctctccaaaaataaggacgtcttcgcctggtccgccctcgacctggtcggcgtcagtcgcactatcatcgaacatagcctgggcatcaacccttcggtgcggccgaagaaccagagactgcgcaaaatgtctgatgaaaaaaccgaagccgccaaagccgaggtacaccgcctgcttgaggccaatttcattgaaccagttgcctaccctacgtggctcgccaacgtagtcatggtgcaaaagaagagtggcaagtggcggatgtgcattgatttcaccagtctcaacaaggcctgccccaaggataatttcccgctgcctcggatcgacaagattctcgatagtgcggccggatgcgaagtcatgtcactccttgactgcttctcgggctatcaccaaatatatatgaaggagaaagacaagaccagtaccagcttcatcacacccttcggcacgtattgcttcgtcagaatgccggagggactaaagaacgctgggtccaccttctctcgcctcaccaagagagtgcttgagagccaagtcggccggaacatattcactgtgtattcgggcgttcgccaggggaagatactgggctacctggtgtcgcaccgcgggatcgaagccaacccgacaaaaatccaggctatcatcaacatgacgcctccgcagtcagccagagacgtccaacgtctgacaggaagattggccgccctcaatagattcatttccaagtccgcagagcgaagcctacctttcctcaaaacgctacgcgacgcaaaagacttcgcatggggaccagagcaagcgacggccttcgcatcactaaagcagcacctgtcagagttggcaatccttaccagccccaacccctcgctacccctgttgctctacgtcgcagcttcgccccacgcagtcagcacagcgttggtccaagagcagaccagagagggcacaactcggcagtgtcctgtttattatgtctccgaagtcctcacgacttccaaatgcaacatgacggagttggaaaaaattgcctatgcagtcgttatggcatcacgcaagttgcgccactatttcgaagcattgaaggtacaggtcacctcagacaggggactcgacgaattattcagaaatccagaggcgtctgtccggatcgccaaatgggcagccgagctctctggctatcacattaccttcgagcccaggacagccatcaagtcacaagtcctggcagacttcatcgttgactggacagggccaataacgcagccggacggccctgcagagaagtccgacagatgcaccaacaatgtagcagagtacgaagttgtcatcctcggccttcgcaagctacgggcgcttggtgtcactacatgcataatcaaaacagactccaaagtagttgccggccaggtcgaaaaagattatgcagcaaaggaccccgcactcatgcaatatctcacggctgttcgcagtcttgacagacaatttaagggcttcaccttgcaacatgtagaccgcgccaaaaacgaggaggccgatgcgttggccaaagcagcagccagaagcgaggccttgccctccgacgtgttctatcatgtcatcggtacgccagccgttcgcagcccaaagggcctacaaataaccaatgacaccttaggccaccacatagttaacctcatcatgaccgaagactggcgcgcgccaatcaccctgttcctgcagggatattaccatccaagtgacatcaacgaggccaagcgcctcaagcaccgaagccgagacttcgtactcattgaaggccagctttacaagaaggggcgctggggcctggacattgtcgggccactacccatggcccaagggaacctcaagttcaccttcgtcgtcgtcgagtattttaccaagtggatcgaggcaagggcaatatccacgataacatcgaagactgcccagaaattcttctggcaaaacattgtttgccgattcggagtcccgtccgagctcacagttgacaatggcaaacaatttgatagccaggacttcaaagacttctgcttctcaattggcaccaagcttgccttcgcctcagtatatcacccacaatccaacggcgtcgtggagcgcgccaacggtaaaattttcacggccatcaagaaaatgcttctcgacgacaagaagggcaaatgggcccacttgctacctgaagcagtatgggcgctgaacacgatcgagtgtcgggcgactgggttcacacctttccgcctgctatatggatcgaaggccatgaccccgcaggaaatcaaacatgggtcaccacggacaagcacttcagccgtccccgacgtagacgaaccaacttccaaggatctcatcgacgaagaccgtgtcttcgccctgcaggccctcaacaaataccaattcaaacaaaagcatggcgcgaccacacagtcgtcccgagagaattcaacgaaggggacctcgtactcgtccggacagctcggacagagtcacggggcaagctggagccgaagtgggagggtcccttcatcgtcaagacgaaggcgtcccccagcgcgtataggctaa

SEQ ID NO: 3212 - DNA, 136 bp, Zea mays
  Clone ID: MRT4577_10292C.1
ctcgagcgctttttatttttttaatttaaataatgctcctgcataacttctgtgatccctacagcaatgtgcaaggcgtccttctagtgcttagagaatttgcagccagtctcaacgaatcttttaggattcacac

SEQ ID NO: 3213 - DNA, 367 bp, Zea mays
  unsure (1)..(367): unsure at all n locations
  Clone ID: MRT4577_102930C.1
acacacaggggaccaangaaaagacggggcaagangnccaccgnnnggagccgncaaaacagaacaggggccaaacgcaccaccaaagaaanccgcaaaggggncaaagggangaacaagagccagcaagagcaaacgggncaagcagggaccgggggggannnggnaacgnnnaccagganganngcnggagnngcgggggacagacnannggannaagnggcacgaccngancnanngagcnaagcccacaccngcagcacngagggggaaanngccgnggagaagggnagncnnncaagcacgacaanggccgcngnnaagcncgggagngccgccancnnnngggccaaaganggggnagagg

SEQ ID NO: 3214 - DNA, 1931 bp, Zea mays
  Clone ID: MRT4577_102931C.1
agaatctttcccagtttctgctgaagtgcttgattctagtttttgcctaccgattggcaaagctaaggtatgttgtgtcttgggtgcatatgggtgtatgggaaggagattactttaggtaggactatttctataagtttaccttgggatggttttgagtggacttcctattgctttcaaaacggttctccatttccttttctggattatacttgataccatgtgcacttcactgtgggcctcatctttctgtagatagaacgtgggggtaaagatgttaccattactgcattctccaagatggttggctatgctctccaggtatgcgatgttgtactttgtaaacaatgtaaaggaggattaattattaattcattaatcgaataagcattaccctataggttggaaaataattagcatatgtgtttcccaatatatgtttacttctgtagggatttggatgtactgcatcaatgcacttttgttagtcgttaaactgatctacaaggttgtccgttcgaaaactgtaattttgatttttgtcctaagagggatatttaggtgacagatggttttagtagtgctcatttcacttgtctgtcttaatttttcatcatagtgggctgttattttggtgcattctcatgctaagtttgcttcaggctgcagagatactgtccaaggaaggaatcagtgctgaggtgatcaaccttcgatcgatcagaccacttgatagagctgctattaatgcatctgtcaggaaaaccaaccgattggtgactgttgaagaagggttccctcaacatgggattggtgccgagatatgcatgtctgttgtagaagaaagctttgagtaccttgatgccccagttgagaggatcgctggagctgatgtacctatgccctatgctgccaaccttgagagaatggctgttccacaggtcgatgacattgtgcgggcagcaaagcgggcctgctacagggcagtaccaatggccgcagctgcctgattggtgtacagacctttctgtttttcttcctcagttttcgctctctggcagcaagaaacatgtagtattcataaagtgccggcaaattggccggaccccagactccaagcgagctagtttttgtaaaaaaaaaattaaaaaaaaaaaaaaaaatataaaatttaaaaaaaaaaataataattaaaaaaaaaatttataattataaaaaaattttttttttttttatatttggggctccccgcccttttgggcttcccctccccccggactttttttccttccgggccttcccggtctttcctttttttcctttttggggtttttttttgctttgggcgtgttcttgtgttttctcgtttcccttttgattttgttttcttttcccctttcctccccccttagctcccgtcggcgttatggtttatcctctggggttcccacttgtggtcctcccctcccttttttgggttggttttccgtcccctttttttgtgggggacccttttttccctctcctcttttttggttcccccccccccccggtggagggctttttgcgtttttgccctcatctcgtttttttttttcccccgttgtgcgccctccccctttttttccctccccccgtggggcttttttttcccttcggtttgcccccccccctttttttcccccctctccgcgctttccttttggtttgtggttttcccgggtttttttttttgcccttttttttttttctatttttctccctttttcttgtttattctgtctctttttttttggcccggccttttgctgttttggcgcccctttggccctcctttctcccttcttttccgcggcggccccccacttctttggtgtggcctcttccccccccttttcaccttttctccgggccttgcttccccccctccc

SEQ ID NO: 3215 - DNA, 771 bp, Zea mays
  Clone ID: MRT4577_102932C.1
atgccggaggggctaaagaacgctgggtccaccttctctcgcctcaccaagacggtgctcgagagccaagtaggccggaacatttttacgtatgtggacgacatcgtcgtcgccaacaaaaacaaagtggatcatctggccgacctcgcagaaacattcgcgaacatgcgagaagcacgacttcgcctaaaccccgagaagtgcgtcttcagagttcgccaggggaagatactgggctacctggtgtcgcaccacaggatcgaggccaacccgaccaagatccaggctatcatcaacatgatgcctccacagtcaactagagacgtccaacgcctgacaggcagattcatttccaagtcggcagagcgaagcctacctttcctcaagacgctatgcggcgcaaaagactttgcatggggacaagagcaagtggcagccttcgcattactcaaacagcacctgtcagagttggcaacccttacaagccccgacccctcgctacctctgttgctctacgttgcagcttcgccacacgcagtcagcgcagcgttggtccaagagcaggacagagagggcacaacttggcagtgtccagtttattacgtctccgaagtcctcatgacttccaaatgcaacatgacggagttggaaaaaattgcctacgcagtcgtcatggcatcgtgcaagttaccactacttcgaagcgttcaaggtgcgggtcaccacagacaggggactcgacgaattattcaggaatccagaggcatctga

SEQ ID NO: 3216 - DNA, 1491 bp, Zea mays
  Clone ID: MRT4577_102933C.1
gcagaggaaggtgtacgccgccagaacgctcctgttcctggacggcgaggactcgtcgatgctcagaccgctggcgatcgagctcagctcgccgcacccggagaaggagcagctcggcgcggtcagcacggtgtacactccaccggacagcggggacgacggcatcacggccgggaggttctcaacctgggaactggcaaaggtttacgcctctgccaacgacgcagccgagaacaacttcgtcactcactggctcaacacgcacgcatccatggagccgatcgtgatcgcggcgaaccggcagctgagcgtgctgcacccaatccacaggctcctcaagccgcacttccggaagacgctccacatcaacgccgtcgcacgccagatcatcgtcggctcgggtgaccagaggaaggacggcagcgtcttccgtggcatagacgaggtcacctacttccccagcaagtacaacatggagatgtcctccaaggcgtacaaagcctggaacttcacggaccttgctcttcccaacgatctcatcaagagaggtctggcgaaaggagatccaaagaagccagagacgctggagctggcgataaaggactacccgtacgcggtggacgggctcgacatgtgggcggcgatcaagaagtgggtggctgactactgcgccatctactacgccgacgacggcgcggtggcgagggacagcgagctgcaggggtggtggagcgaggtcaggaacgtggggcacggcgacctggcggacgcgccgtggtggccggcgatggactgcgtcgccgacctcgtggagacctgcgccaccgtcgtctggctgagctcggcgagcggagggcggccgaggcgctggcggagttccgggcgaggttggaggaggtcgcgggcaacatcgacaggcggaacgcggaccctgcgctgaagaaccggacggggcaggtggaggtgccctatacgctgctcaagccgacggcacagcccggactggtgctccgtggcatacccaacagcatcaccgtttgagcagcagagcgccgtcggcagctgtcagctgtgtacagtacagaataataaggtggtcgtgtttggcgctatctccaccacataaacgtgaaaatgtttttttttgaattatatggacatgcagggccgcagcccgtaagcctggccccagtttcggttttctgtttttttttttttgcctcgatctggtgatcagcaagccacgtcggtccgggtgatctcgctaccggagatagaatgtgtacacgaaacctaataggtttttactccattaggatacgaggttgagtcaattttcatacctatagatttgttaatgagcataaatctatacccgacgagttcatgagtataagtttattatgtgaaccgtgggtttttaaacccgaccaaacttagtgtatattgtcattttattttataaacggacaataaacttgttatctcctt

SEQ ID NO: 3217 - DNA, 429 bp, Zea mays
  Clone ID: MRT4577_102934C.1
atggcacccaagagagctagctcgaaggcagccccatcccttgatgaagcagcgaaggcagcgccgctggccgagaaaaagggcaaggcccttgtcgacaccacccaccgagaagcctgcgaagacgacgccctcagcaagagacagcgcaacgatcaacctactcccgagggcaccctccgcacctgcagctccggaggacagccgcaggaacctcccccaggcttcgctccactagagggcgaggacgccactgaggacggcgaagtcatcggcgtttcagcagaggaacagctacagctgcgggccctgcgcatcaagaaccgcaacctccagaagcagaaggagatcctcgaggccaagcgccaacgcgtctccgcgcaggccaaggtgcgccagatgatacgagacgaggagcagagggcttag

SEQ ID NO: 3218 - DNA, 2984 bp, Zea mays
  unsure (1)..(2984): unsure at all n locations
  Clone ID: MRT4577_102935C.1
cctcgccggcgggcccatcctctctaacccacggaagcaagacaaaagctcgtgctggacgacatctcccctgtcgatccacgaccatgatgcagcagctccgtcacagccagccgagcccgtgcctctgcggcctgcgggcggcacggcctatgctcgccctcggcgcagcagcatcccgttcgcggcccgccggaaaactgcaaccgagcgtctgcctcggcctcggccatgtagccccagccgcggcgagaggacagccccgtccccgtgccgttgccgactcggcgctgggagcatcgcctacgagcgtgcatgtcggaggcaagctgctgctgcagaacttcgccgccgacagccagcagcggctcaagctctccatccagcttgtcagcgccaccgtggccgatcccgacgggcgcggggtgaaggcggaggcgtcggtgctggacgccgtcgtgggcagcggggacagcgagctcgacgtggacctgatctgggacgaggcgctgggcgcgcccggcgcggtggtggtgaagaaccactccgacttccccgtgtacctgaggctgctgagcgtgccggccggcgtcggcggcgccgacgacgaggccgccgccgtccacttcgcctgcaacggatgggtgtaccccgtcgacaagcacccgtaccgcctcttcttcaccaacgacgcgtgtgtcaaggaagaaacgccgagcgccctgctcaagtaccgggaggacgagctcggcgcgctccggggagacggcgagacgacggagcgaccgttccagccgtgggaccgcgtgtacgactacgcgctgtacaacgacctggggaacccagacctgcgccaggacctggcgcgccccgtgctgggaggatcccaggagtacccgtaccctcggcgtaccaagaccggccgaccagccgccaaaacagatcctcggtcggagagcagagcgccgctggacgaagagatctacgtcccctgcgacgagcgcgtcggcttcgccagcatccccgcgccgacgcttccgccgctgggcgggcacttcaggtccctcgccgatgtctaccgcctcttcggcctcgacgacctcggccggctcccggaggccaaggcggtcatcaacagcggcgcgccgttccccgtcgtgcctcaggtcatttcagttaacccgacacattggcggaaggacgaagagttcgcgcggcagatgatcgccggggcgaacccggtgtgcatcaagcgcgtcaccaagttcccgctggcgagcgagcttgaccgcggggtgttcggcgaccaggacagcaagataaccaaggaccatgtcgagaagaacatgggcggcatgacggtgcagcaggccgtagaggaggggaggctgtacgtcgtggaccaccacgactgggtgatgccatacctgaagcgcatcaacgagctccctgcaagcgaggagaaggcggaggtgtcgcagaggaaggtgtacgccgccagaacgctcctgttcctggacggcgaggactcgtcgatgctcagaccgctggcgatcgagctcagctcgccgcacccggagaaggagcagctcggcgcggtcagcacggtgtacactccaccggacagcggggacgacggcatcacggccgggaggttctcaacctgggaactggcaaaggtttacgcctctgccaacgacgcagccgagaacaacttcgtcactcactggctcaacacgcacgcatccatggagccgatcgtgatcgcggcgaaccggcagctgagcgtgctgcacccaatccacaggctcctcaagccgcacttccggaagacgctccacatcaacgccgtcgcacgccagatcatcgtcggctcgggtgaccagaggaaggacggcagcgtcttccgtggcatagacgaggtcacgtacttccccagcaagtacaacatggagatgtcctccaaggcgtacaaagcctggaacttcacggaccttgctcttcccaacgatctcatcaagagaggtctggcaaaaggagatccaaagaagccagagacggtggagctggcgataaaggactacccgtacgcggtggacgggctcgacatgtgggcggcgatcaagaagtgggtggctgactactgcgccatctactacgccgacgacggcgcggtggcgagggacagcgagctgcaggggtggtggagcgaggtcaggaacgtggggcacggcgacctggcggacgcgccgtggtggccggcgatggactgcgtcgccgacctcgtggagacctgcgccaccgtcgtctggctgagctcggcgtaccacgcgtccatcagcttcgggcagtacgactacctgggcttcgtcccgaacgggccctccatcaccacgcggccggtgccgggcccggacgccggggcggaggtcacggagtcggacttcctggcgagcgtcacgccggtcaccgaggcgctcggcttcatgtccatcgcctcggggccgatggggctcaagggcacggaggtgtacctggggcagcgcccggacacggagcagtggacgcgcgagcggagggcggccgaggcgctggcggagttccgggcgaggttggaggaggtcgcgggcaacatcgacaggcggaacgcggaccctgcgctgaagaaccggacggggcaggtggaggtgccctatacgctgctcaagccgacggcacagcccggactggtgctccgtggcatacccaacagcatcaccgtttgagcagcagagcgccgtcggcagctgtcagctgtgtacagtaatnnnncagaataataaggtggtcgtgtatggcgctatctccacctcctaaacgtgaaaatgtttttttttgaattatatggacatgcagggccgcagcccgtaagcctggccccagttaaacaagtcaaacctcttaaaaaaaaaaaaaaaaaaactcgagagggggcgccgtgtacc

SEQ ID NO: 3219 - DNA, 3932 bp, Zea mays
  Clone ID: MRT4577_102936C.1
tattcggcacgaggcccaccccggtcggtctcaagctctcagcccacacgccgccatcaggcacgtatgcgacctgacctcgtgttacatgctactacggccgtgtatataacaacgatcagtccaccgtgggccgggtcatcctctctaacccacggaagcaaggcaaaagctcgtgctggacgacatctcccctgtcgatccacgaccatgatgcagcagctccgtcacagccagccgagcccgtgcctctgcggcctgcgggcggcacggcctatgctcgcgctcggcgcagcagcatcccgttcgcggcccgccggaaaactgcaaccgagcgcctgcctcggcctcggccatgtagccccagccgcggcgagaggacagccccgtccccgtgccgttgccgactcggcgctgggagcatcgcctacgagcgtgcatgtcggaggcaagctgctgctgcagaacttcgccgccgacagccagcagcggctcaagctctccatccagcttgtcagcgccaccgtggccgatcccgacgggcgcggggtgaaggcggaggcgtcggtgctggacgccgtcgtgggcagcggggacagcgagctcgacgtggacctgatctgggacgaggcgctgggcgcgcccggcgcggtggtggtgaagaaccactccgacttccccgtgtacctgaggctgctgagcgtgccggccggcgtcggcggcgccgacgacgaggccgccgccgtccacttcgcctgcaacggatgggtgtaccccgtcgacaagcacccgtaccgcctcttcttcaccaacgacgtgcgtgcgtgcgcagctagctaaccactgcacgctgaccgacgaccctagcacaccacaaggctcgaaacttgcatcacgtccgtacgctgttcccttcctctgcaggcgtgtgtcaaggaagaaacgccgagcgccctgctcaagtaccgggaggacgagctcggcgcgctccggggagacggcgagacgacggagcgaccgttccagccgtgggaccgcgtgtacgactacgcgctgtacaacgacctggggaacccagacctgcgccaggacctggcgcgccccgtgctgggaggatcccaggagtacccgtaccctcggcgtaccaagaccggccgaccagccgccaaaacaggcccgtgcccgttcacgatctccgtttcccaaaaacgttccgttccagcgagccgccacagcaggggaggatctcgctcgctcgctcgctagctctctcacttgctgcctcgtcgtgcgtcatcagatcctcggtcggagagcagagcgccgctggacgaagagatctacgtcccctgcgacgagcgcgtcggcttcgccagcatccccgcgccgacgcttccgccgctgggcgggcacttcaggtccctcgccgatgtctaccgcctcttcggcctcgacgacctcggccggctcccggaggccaaggcggtcatcaacagcggcgcgccgttccccgtcgtgcctcaggtcatttcaggtgcgacagcaataatgcatggtgtgatgtgctcaagggaaaggaaaggaaaaaaaaaagaactgtatgtctctatctttctgtctgtctggtgcagtgaacccgacacattggcggaaggacgaagagttcgcgcggcagatgatcgccggggcgaacccggtgtgcatcaagcgcgtcaccaagttcccgctggcgagcgagcttgaccgcggggtgttcggcgaccaggacagcaagataaccaaggaccatgtcgagaagaacatgggcggcatgacggtgcagcaggtgtgccgtacgacgggcactttttttaagcttctagtccctaggcgatctttcaggcaaaatgacgcttgttgggaaatatgcagttctttctcttttttctgtctgaactcgactcgaccatggatcgatgcacgcaggccgtagaggaggggaggctgtacgtcgtggaccaccacgactgggtgatgccatacctgaagcgcatcaacgagctccctgcgagcgaggagaaggcggaggtgtcgcagaggaaggtgtacgccgccagaacgctcctgttcctggacggcgaggactcgtcgatgctcagaccgctggcgatcgagctcagctcgccgcacccggagaaggagcagctcggcgcggtcagcacggtgtacactccaccggacagcggggacgacggcatcacggccgggaggttctcaacctgggaactggcaaaggtttacgcctctgccaacgacgcagccgagaacaacttcgtcactcactggtatgtacgtacactcgttcgtacgtagagacaagacgaggtcaatgtgtgtctctgtgtgtgtaggctcaacacgcacgcatccatggagccgatcgtgatcgcggcgaaccggcagctgagcgtgctgcacccaatccacaggctcctcaagccgcacttccggaagacgctccacatcaacgccgtcgcacgccagatcatcgtcggctcgggtgaccagaggaaggacggcagcgtcttccgtggcatagacgaggtcacgtacttccccagcaagtacaacatggagatgtcctccaaggcgtacaaagcctggaacttcacggaccttgctcttcccaacgatctcatcaagaggtaataccagtactagatacgaaacgaaatgacatgtattcgttcacataccatagcaacagcatgctatacatgacgaacagaggtctggcaaaaggagatccaaagaagccagagacggtggagctggcgataaaggactacccgtacgcggtggacgggctcgacatgtgggcggcgatcaagaagtgggtggctgactactgcgccatctactacgccgacgacggcgcggtggcgagggacagcgagctgcaggggtggtggagcgaggtcaggaacgtggggcacggcgacctggcggacgcgccgtggtggccggcgatggactgcgtcgccgacctcgtggagacctgcgccaccgtcgtctggctgagctcggcgtaccacgcgtccatcagcttcgggcagtacgactacctgggcttcgtcccgaacgggccctccatcaccacgcggccggtgccgggcccggacgccggggcggaggtcacggagtcggacttcctggcgagcgtcacgccggtcaccgaggcgctcggcttcatgtccatcgcctcggggccgatggggctcaagggcacggaggtgtacctggggcagcgcccggacacggagcagtggacgcgcgagcggagggcggccgaggcgctggcggagttccgggcgaggttggaggaggtcgcgggcaacatcgacaggcggaacgcggaccctgcgctgaagaaccggacggggcaggtggaggtgccctatacgctgctcaagccgacggcacagcccggactggtgctccgtggcatacccaacagcatcaccgtttgagcagcagagcgccgtcggcagctgtcagctgtgtacagtacagaataataaggtggtcgtgtttggcgctatctccaccacataaacgtgaaaatgtttttttttgaattatatggacatgcagggccgcagcccgtaagcctggccccagtttcggttttctgttttttttttttttgcctcgatctggtgatcagcaagccacgtcggtccgggtgatctcgctaccggagatagaatgtgtacacgaaacctaataggtttttactccattaggatacgaggttgagtcaattttcatacctatagatttgttaatgagcataaattaaaaaaaaaaaaaaaaaaaaaaaaaaaaaaaaaaaaaaaaaaaaaaaaaaaaaacttctgcttggtcttttggtggcccccggggaaaacccc

SEQ ID NO: 3220 - DNA, 369 bp, Zea mays
  Clone ID: MRT4577_102937C.1
ttttttttttttttttttttttttttttttttttttttttttttttttttttttttttttttttttttttttttttttttttttttgaaccaaaaaattgacccttttagggggatcaacgaaaccaaacccatttttcataaacaataattataataatggtgttaaaccagaaaacactgttttaaaccctaacaggtgtggttgttaaaccagcctttactggaaaagggtaaaaaactttgactaaaccttaaaagttttttaataaaccacaattcaacggtgctttttttgtaggcaagacaagcacggttttcttcccaaaaagggggcctttttttttttgggcaccctgttcccacccac

SEQ ID NO: 3221 - DNA, 448 bp, Zea mays
  Clone ID: MRT4577_102938C.1
ggccctaggggccttttttttttttttttttcttttttttttttttttttttttttatttctttttttttttttttttttttttttttttttatgttttatttgttactatgttttaatatttactttccttaattattttgggggaaaaaaaacacccccccctcaaaactaaaaaacacccagaaggaaaaagcgcagcagccacatcgggggggccccccccgcggggggggcgcaagacccaacctgccgggggaaaaaaaaaaagggaaaatgtttggggcaaaaaaacagactcaaccatttggggggcgcccccccaaatgggggccccgcattaaatggcgcgacgtaaaaaaaagctgacggaccatttaaagcggggcaacagagaacaacccccggagaaaaccccccaagaaacccgggcaaatatgttcccccga

SEQ ID NO: 3222 - DNA, 434 bp, Zea mays
  Clone ID: MRT4577_102939C.1
tctttcagcccatgccctatcacagtctaatccggttgatgtaaactacatatcctacttggggttgagtgtttttcatgacccatctgtcatggaccaagatcatggactgtacatcatatatgtcatatatcgtcttaaactaccagatgttgttatcagtgcggacattcaaggtcatgtttgatgtggtcaatattaacaacacatttgatgactttcactactaatctcgtccggattggatgaccatgttgtaagttcagcgttcatgctctgtgttggtatggagccgctctaaggaagaagaaatgtattccctctttaggatcgcctatattatgcagataggtttcatggttaacagcttatctttatctgtttaggtgtgtaatgcttttatatgtaatgatacaattatttgtgagtagact

SEQ ID NO: 3223 - DNA, 376 bp, Zea mays
  Clone ID: MRT4577_10293C.1
gccccgcctgctcctgaaactgcgacgcgcgcccgctgctgggccgcacagtggacaagaggtacgcactgcggaggggtcaatagcctcgcgtgcgtagaagagacagacaagagtgtctcagacctcgggtgcagcggagctaacactgagagctcaggcagcatcgcaagctcaccaagcggacagcattaatgagctcagagcccataagatagggacgcactataggaagcaagctcacaaatgcaggtgaagcacagatacctgcattgcaactacggagaactaagagggtggattggtccaacaagagagaacgacactggtgagggagccgtaggcactctacctaggatagctacccgagaacgcc

SEQ ID NO: 3224 - DNA, 714 bp, Zea mays
  Clone ID: MRT4577_102940C.1
atgacttcgcttggccaacccgaccacttccagaccgaggcgacactcaatgtggtgcaccacctgctcggatggagcgcaccggcgctcgccgggaggatccgcgctggcgccatccccctcggagacctcgccgcgggggagttcgttttgtttgtctcctacatctcctgcgggaaggctagggaccatcttggtgcctactattttcagacgaggctggatttggccgtgtcctacatctccaccctcggcagcgcaaggtgggagaactggcgcgccgactgggtgatcgtcagcgccgaagccaatgaccgcctcgtcctgccgagcaatgggccaaccattgaccgcaagctctggaggacccagtcatcgctatcgccagagctcctgcccgtgctggactggatcgagaccttggcgaccggtggcctgacctccatgcatgtgggcgacctccccctctgctcccaaggtcgtgcctcctccgcctccggccgctgccgccgagacagcgccaccgggctcccatgctccagttgggggtccggcagcggcggtgccaacgccaagcggcaccgtagcggtggagggggtcccaactaccccaacggctaccgcagccccaacgacggcgatgccgtcgagtacaccgtcggcagcggcagaggaggccccaactgcgcccggccccgctgtcgagtaccgtaa

SEQ ID NO: 3225 - DNA, 290 bp, Zea mays
  Clone ID: MRT4577_102941C.1
ccggaccggaatcaattcaattgccgacgagacattaatggcggggaggccgcacacgcacggggtggggtttgttttaaaagacttccgttcaacccacacgggcgagcaccggttgaaggtggtacatgggcaatgagcttacgcgatgtgatacagagacggcaacaaaggccacaccatggacagtgagagcggatactgcaacctatacagtcaggggaacggtacctacacagccaggatgaatacggcgtgtttcaacaactgaataagctgcggactctgat

SEQ ID NO: 3226 - DNA, 284 bp, Zea mays
  Clone ID: MRT4577_102942C.1
attcggctcgaggtccatccctttgttttgtgacgggggcagcgatgttggcgaggcctttgctactaccagatctccccgtcgaggatgaagtctttacagcggaggggagggagatgtcttacatgcagggtgtcctgctgaccatgatgctgaatctgctgaatggccttcccaggcccgagccccggtggctcatggtcttggaactggctccgacagtgacattttgttgcccacaggggaagagcaagaatgctggtgctttctaaagatgtgtatgt

SEQ ID NO: 3227 - DNA, 280 bp, Zea mays
  Clone ID: MRT4577_102943C.1
gagcaatcagtcggcggccgcccttcttttttttttttcagtttttttggactatggcggtaacatatccgtcaggccctaactgggcgccacccccgcaacactacaagtcaaactccctccctcttccaaggcagaaacttgtaagtgttccataaaaaatataaacggaaagacctgatggggctacaacatgcatccctgggaagactagttcaccgcaacccccgaagacactgtccgtgaaaacaggggccggccgggggcgcaccccggggct

SEQ ID NO: 3228 - DNA, 577 bp, Zea mays
  unsure (1)..(577): unsure at all n locations
  Clone ID: MRT4577_102944C.1
ggcgcgccgctggggggggttttttttttttttttttcattaaaaccaaactttattatgaccatgcgtatattatggggcataccacacatgagaatgggtgtggtcttactgcgttattacatatatagatagagagagaggggtaaaggagatttccggggggggtgaatcattattaggggggaatgggaccggaaaccccacagggggtggggcgggacctgggcacctgggactgggaaagtccacccatggggcgggtgtgctgcgccatcatcatgggcatgggggggagaccctgggctgccagcaactgctgcggctgctgcatcaaaggtgggtcgtacaggctgctgctggggggancggcaccctcaagctgcatcatcatctgcagctgctgcgcgacggactgcacntccatcatcctcatctgcggcggggancactgtggccggagcgggtggaacatggggctcgggtgcccacacccggcgtantagggcgccgccgccagcgggctgcactgcgggtgcctcagggactccgcgtgaggggacagcccgccggggcc

SEQ ID NO: 3229 - DNA, 474 bp, Zea mays
  unsure (1)..(474): unsure at all n locations
  Clone ID: MRT4577_102945C.1
cgatgagggaagcggagagaaagcgagcgcagatactgtggttagctactagtagagcgattgagtgagaccagcgttagtaagcaaggccaacgccaaggcagcatacggtctacggcagaggcttgcgtccagccatcattcctgcagcacatgggcgcgtcaaaaactggcaggcagcccagacggtgtccacactctctccccatagtccatgtctcttatctcttcatccccctctcttaaccttcctaagccgctcttaaccttcttcgccagtcacggctcgngancacatcaacacaccacacacaagtcaggcacgcacaagaaacacctgccgccgtcggcggccgcccggtcgctcgctgccgatcgacggccatggacttgacgaccacgaccacggtgacaaggagatggcgcccattccnatgccggtgagctccagctacgacgccccgcctctggcag

SEQ ID NO: 3230 - DNA, 261 bp, Zea mays
  Clone ID: MRT4577_102946C.1
gagttctctagtcggcggccgccctcacctttttgtttctgaaagggatcacagccattgcccagccgtttattcaaagaacccgagctcgagtgcgatgatagtactccactaattgtatctcaagataggcttgcctgaaccggtgcctcttgccgacccacttttgcacacgggctgaaactcgtacggcctatgctatgcaatctgtactccaaaccacacctaacaagacaagcgtctgcaggctgataccacaaa

SEQ ID NO: 3231 - DNA, 834 bp, Zea mays
  unsure (1)..(834): unsure at all n locations
  Clone ID: MRT4577_102947C.1
ccggggaaagtacaactgaacatcacaccaaacatgtaaaaacattggaaccacatctttaaaaagacacaatgctacataaggaataatgaattcaaagtataacatgaaatataacataaatttacttcatttggaaatagattactatttccctaagtgttacttacaagtacataatcatagttcaatttattttattgtggcataaaaattagaacagagatgaactcatgtaatacaaattattaatctcacaagataacacatgtttaaatctctaaggttctccttttatttattttattaactaaataaaactacatctatattagttcatactcaatcataaaaattagaatgtgcagacagtaaatgaaaccattttatttagacagaggataattctatgaacattttgcaatttgaatcactaaatttggagttcatatgcaaaagttatgaaataaacaagtttgggaattcaaaatatgaaattaggtctaattctgtgaatatttaaaagtccagggttaaatctgcaagattacaggggtctgcgcacgaaaaccagggacggtgtgttaattcccaacaacccgagggtttctttaataaaacagccacacgaaggggtatcgggtgaatctaaccatcagatctaaaaccaacggctaagattagatctgcggccgagggcgcgcgcatgggcgggcgagcactgacaagcgggccagggngcgtcagtgacagagggggagggtgcactgaccgagcgggcccagcgctagagggcttgggctctgacggcgagccagggcgttagcgcgcgtg

SEQ ID NO: 3232 - DNA, 234 bp, Zea mays
  Clone ID: MRT4577_102948C.1
ttctaatgtctgccagacataaccacacggggatcacgggaattttttcagggttgagcgggataaaactacttatgtaaagcatgatcttggcattaaatgcctgtcaatgaaagttactgtccatcgcttcaaggtaaacaaaactttgtctgttgataaatgttgatgataattcactccattccgttctatatttacaaatcgaacagaatgtccaagatgaaaaacata

SEQ ID NO: 3233 - DNA, 731 bp, Zea mays
  Clone ID: MRT4577_102949C.1
gaagccgggcaagccctgcgacaaggttccgctgtcccaaatccctgacgtctccaaggagattgcggtggacgaggcgcgggagcaagctgttgtccacagcctccgtgtgcaggagagccacacactgtccgtgcaggagaagaagcactgcgaaaaggattcggggaaaatgctcgcgcacctggttaggagcaagtcgagcgatgcagataatctgagccagtgcagctccgcgttccagtgcgaaagggctgggagctcgtattctggtgacgaaggcagctcgggcaatgctaggaggcagtactctcagaccgtctccgcgtcgccattggttggtctccctgagttctcgcatctgggttgggggcattggtttactttgagggatttggagcatgcgacgaatcggttttctaaggagaatgtcattggagaaggtgggtatggagtagtttaccgtggccgcctcataaatggtactgatgttgcaataaagaagctccttaataacatgggccaagcagaaaaggagttcagggttgaagttgaggcaattggacatgtcaggcataagaatcttgtccgccttcttggatattgcgtggagggaatacacaggatgcttgtgtatgagtacgtgaacaatggaaatttagaacagtggcttcatggtgccatgcgtcagcatggtgttcttacttgggaagcccggatgaaaatcattc

SEQ ID NO: 3234 - DNA, 315 bp, Zea mays
  unsure (1)..(315): unsure at all n locations
  Clone ID: MRT4577_10294C.1
tcttagcaaccaggattatgcgctgatctttatcttttagtttggtcgtccagtatttttttttcttccccttttcgagtctgtactgaaactgctgagagatttgcagtttttaatctatcaatattcgtatgttactgttcnnncaaaataaaaaacaaaaaaacacaaaaattgtgggggggggggaggaaaaaacctaacaagggttaaaaaaaaaaaaaaaaaaaaagggaagggggcggccgtttttggggtcccaggtttccggccgggggcttgcgccgccttggctttttgtggggggcccctagt

SEQ ID NO: 3235 - DNA, 363 bp, Zea mays
  Clone ID: MRT4577_102950C.1
ttcagtaacaactataaattattcacgaccaccactcatagacatgcggggaatatataattatagtgcggcgcccatatcctcctttgtaccaatacaagccaacactagtagatgtattattatttatattaatacgctttcacatacatgtacctctgctacctgaaaaaggatgtgattcgagttatcaaattaaaacacctgccacaaaaaactatatatttttcattaaaaaaaataaataaaaaatggccgcctttctatatgatccaaacttactatctcgtgccttctatatcataaattattttatatatctaacctaaaatccaaatttacttatccgatctttttaacaac

SEQ ID NO: 3236 - DNA, 625 bp, Zea mays
  unsure (1)..(625): unsure at all n locations
  Clone ID: MRT4577_102952C.1
agatcaaatttcatgcatatctattttaaaatattaaatttgtcatactaaacattccaactttaatatcaaatatacaattaattgatcttgttgagagtagagtagacattagtcaatggtttagatagatagtttatcacaaaaaagtgccatccagaccaatttaaggcgcattaaggacatgcttgtctacactctagattttggagccctgggtgacccttttccatcttcatttggttgtctgggcagaaagggaaacacagagctcatcgactatccagccttgtgcctgtgacgaaatgtccggaatggcatccgtatgcgtttcgtcaaacattttttttttaacttcacaaggtttcctgcgagtaagacgacgaaacctttttttaactccacaaaacttcttgccaataaggcgatttggaacttttttttactccacagtattcctgcaaaaaaaaaaagttcattcagggcagcagcaaccttcgacattcatgcaccaaccattcatnggactgttctaggactaaaatgataagctcaccacagacgaatagaaagaagactcgtcatttaggtgtatcaatcatctcaatctgatggcagcatgctc

SEQ ID NO: 3237 - DNA, 360 bp, Zea mays
  unsure (1)..(360): unsure at all n locations
  Clone ID: MRT4577_102953C.1
ggaattcngctcgagatccaatctacaaaatacaaggagtagcataaactaaaagggaacttaaattttagcatttctttatccataacgctgcgtttcactctcccaacatttagaagaagagaactgaaaccatataccactactattagttctgatgaaaacgacaaacccaaagaatcattatcagaaccgcacaacataaagatattgtcaaacaacgacattcttacagcttactactccttaaccgtacataatatagatcgtgatatctgcattctcacaaaataaatcagtcactggcttttgctcacacacaacgatcagatttagtgtagaatgataatctattgaata

SEQ ID NO: 3238 - DNA, 436 bp, Zea mays
  Clone ID: MRT4577_102954C.1
caaatattttgcacgaccagaaaagttttatacttatccttgcagcgtttcaagatctgggttcttgcagatcctggaatgttgagtaaaacgttgtcttgtttggacagctgcagttttcagcggaataaataactataaccgtgttactgctagacacaaagccttctctgaacaaagcttgcacacatgttattagttcagctagcagcaatttcagtcagctatatagcgcgcctcattggttgactgaagtggtgaatgtctatgctcaagacccaaattaaaggcgatgcaacttcttgctgcgatgccagctagccggatcagtttctggaggccattatattataatataatatgaagaatacagattattgtatatgtcatgggtatatttcatcttcagatgcttgtcctattatcttttattcat

SEQ ID NO: 3239 - DNA, 460 bp, Zea mays
  unsure (1)..(460): unsure at all n locations
  Clone ID: MRT4577_102955C.1
taacggcgcccttttgtttttttttttgaaaaacattttcttttattttccgagaaaatcaaacccaccagtgcgccagcatatgcgatggcatgcagatacgccggatattgctgcaactgctactaggttcatgatgcgacgggtggccattgggaagcgggaggagctcttgacccgaccggagcgtccgccgaatggccccctccgggagtggaatctcaggtcggctaagtgtcatggcgccgtgcgcacggggctcgaccccggaactgaacagagtcctcttccatacctgagcaccggggccggaactgggtccagccgtgcggatttgcgaagactgttggcactggagcgggtagcggagccggactttcgagagcttggcgtaccgtccagtcctcncgtgaaccatccgggggggccggacggtcggccaggcctgatctcctgccct

SEQ ID NO: 3240 - DNA, 479 bp, Zea mays
  Clone ID: MRT4577_102956C.1
ttttttttttttttttcgtttttttttttttttttttttttttttttttttttttttttttccaatccctccactccacacgtttgggttgatttaaacaaaaccaacaaggttctcactgatgacaatggttactgctacatggtaataacaatcattaaataaaaaacagaaaccataaaaccaaagcggattaatcccttgaaagtcacaacatgattacattgcaggggaacaaaaccaaaccaattttcacccacccccccaacgcaaaagctgctgaaacaaaaaaaaggcgacccgaaccaaccaccggcacccaagtcgatcgatgaatgatggcattctcctcgctcacggggatgggggccaggtgcaccatgaacacggcaaacccgatggggaggggacccaaaaccgggacgtgggattcccgggcgttgcccttggggtcggtggcggaaaaaacggtgtaaaca

SEQ ID NO: 3241 - DNA, 2027 bp, Zea mays
  Clone ID: MRT4577_102957C.1
ctttttttttttttttgttttaaaaaagcaatttttccacgtaatcagcacatatgtcaatgtcaaaagaagggccatacaaagttcacccgttcaaaaatacaggtacaagccagtaaactctagaaatatagccgttgatatttatacccacggcaaacaactccggtgaacatagagatatcagatatgtacatcgctactgttaactgagaagtgaggattaattcaagtacgaaaggtccacagattaatgaagcaaggccggaactgccaccatcagatcccagcatttggattgttgccagcaaggatcagagatatctccaaacctctgctgaacgcctggttgaacagaagtcgcgtctggaaagtggatatgaatggaaaccacgagcaaatggctatgggtatgaaaatgaccatccccattccagcatcatagaggcgagctagggcacgaacagttttccacaaacccaatttcttcacgacaggtttccatgccatggcaatcgaaatgattccccacccagttggcacaaatgctagaatggaagcaaaaacatctctcacactgagtttcgtaaacaaaattgccaggaccagagcagccaaaaccatcaataacgctacacttttgaccaaacgcaggaacaattggaaatgtaccatggccttggggtttaaaccaaagaccaagaggaggatgaaaaggccaccaagcacagcccaagaaatccaatacaccaataaagctgtacttcctccgctagcattcatgtggtaaacaactccgaattggaaaatgaaaaacctcaggcttaatatggtttccagtatcctccctcgaatgctgtaaatatgttgcagttcttcttcccaccaagcttcccagctttcttctcctttaacaccaataccacctcgataaaacagccaatttgtccagtctctgaaatcctcaacaatcttctgccattcaaatccagatgggttaaataaatagggagcaaaaagccaagacaatgccataatccaactgcttatagagagtaaaatatagccaactgctccaccattgttaaacccatacgctaggaagatcaccaacaaaagtgcaacctccatccctttcacaaaatggcttcgagaataaatacggtagttctcagcaaacttgatatgtcgtaccacaaaacctctaccggttgctctatactttgcacctccatgtaatattgcacggccaaagtagtgggttcttgttccaagtgagaaagtgaaaaatacagagcacatttggaactgcattgtaataaactgaacaaaagccgttaaaacacctgattcaaggatgaaaccaagaatcatgggaacagcagtaaatacaccaatctggaaaagaaattgagtgttcagagcagcattcaaggctgcgttctgcagtatatccgctctattttgaattgattctccaacaccagataaggccagatacattttcccatagagaaatatgtacacggtcagcacggttagcatagtacagaagtagaatccaacagttgtcacgtagaaagataacatcctgaaaaagtcaaaaagttgtccgagtctatatatgtctcggctaagaacttgttcaccatttccaccagcaacttttccttcaaatagtgcaatctgattaagtccaacatccctacctttgccaacctgaatatattcatgatgagttatgcatccttgacgcagagttgagttgaatcctgcatatatatcctcactgatattgatgctgcgagaggccttactaattccaccccttgttatatgaaaaattctatcaaaaacatctggatgaccatagtgcattctcactttcagcgggttagcaagaacacgctgtcctaatgtcacaaaacttgtctcctgattagacataaatgaggccagggaggaaacacttcccgtgaagacatgctccctaacaccaagaatagaagggtaatgcttgccacgct

SEQ ID NO: 3242 - DNA, 149 bp, Zea mays
  Clone ID: MRT4577_102958C.1
tccacattttgcggaaagcagacccacgcgggggtgtttaggccttaacaggggctggcaagatactgagacgggcagcccgccatgctatgactgatcaagaaatctatcatctatgaggaggcatccctgttgaggacgccaagaag

SEQ ID NO: 3243 - DNA, 652 bp, Zea mays
  Clone ID: MRT4577_102959C.1
ttccaataagagagcctgtacacaaaactgctcgcacccagccgtattcgaccgactcctgacctcgaccgatcctcttctgctagcgccatggggacctcggcggaactctccaacggcgacaaacccacaccacattcatacagcccacgctctacactgtatgattccgggaaggatgttgggcggaatatggaccgcaaaagcattccaacgcaagcatatgtgctgatcaacgcatgcatagacagccatctcgcggcgatcagcctctccctacatgggagaaaaagaatgtgatgcaacctcctactcctcggggccatctagaagtacagcatccccatggttgtcccctaccgagacttcttctatccagaccgctcagctaaaggcggcggccggaactacactaaccatatactgagcaacaacatcaccgcgcactggtggctcaacataccacggccccgactgaccaaacgctggcgcaagccatctaagtcgacctctcgacagtacctgccgctgtagccagatgagacactagccaactacgccatcaacgatcgtgcgttctcacctctgctgcagtctggactgggaacggaaattagaacagttacatactgtccctgacaccgatcccaat

SEQ ID NO: 3244 - DNA, 387 bp, Zea mays
  unsure (1)..(387): unsure at all n locations
  Clone ID: MRT4577_10295C.1
attcggctcgagccgacatcaacttctagcttttcggcgcgggggagataggaacattgggccggaacaccaacaccagtgcctggagccagctcaaccggtggaagaaataatcgtattaatcactaaggacgtacagtcgtacgacgatcctgcgctaacgggtcgcagcatcatgatacgcatacatgggcaaattcttttattaattgaagcaaacatttagtttgacagttctgtgtagcaactactcatgtttgtacagatcacacctcggcaaccaggtccgatcgaacgggatagtctacacctggggagactaatatanggacaatccctataactcaattatttatctgtcgtcagcgttgtcgaaaaaaaagaaaa

SEQ ID NO: 3245 - DNA, 207 bp, Zea mays
  Clone ID: MRT4577_102960C.1
tcgcagacgcctaggcactactcttaaagaatcaatagacttagggatcaactgtgcaaagctatcttctattggtctctgctaggacaactttgaataggttcgacagcttcaccaaacattatggcattgactacgtctaccgcaacaataactagcacgcgctatatgaatgaatccgccaagtatttcgaaacagtccaacgc

SEQ ID NO: 3246 - DNA, 331 bp, Zea mays
  Clone ID: MRT4577_102961C.1
atctgcgacgtagctcgaattcgctcagcggaaccttctgtgatgcctgttcaacaaatgaactgcctcttccttcaagtatcaagcttgagcgagtttgcaatccctgtcacaagcatctgatgaagcaatattctaccagcccatcataagactggaggccaagacctggaccaaaacgtttatgcaggctcctctgtacctgtgatttagctgtcaggatctcatagagcccagttcttagagtcaactaaagagttgataggaatttactaggtccagggagaaaaggcagtggttgagagtactggaagatttgctcattttctct

SEQ ID NO: 3247 - DNA, 225 bp, Zea mays
  Clone ID: MRT4577_102962C.1
attcggctcgagggtttttccccctcccttttttgtccacacatacgagtacactaccaagggggggaaataaatacttgcggggggggacaagacaaatgcgaccaccgaggaaaaatattcccacgtcctgtggaaattgtggcctcacaattattgtaaacaaagttgaaacggcaccccttcaatttcaaaaacccttatattataaaattatctgcctga

SEQ ID NO: 3248 - DNA, 208 bp, Zea mays
  Clone ID: MRT4577_102963C.1
acgtacgctcggtattcgtctcgcgcgcggttgtgaccatttactccaaaacctgcacactgtgtctgagggggggctttatataatgacattgtggtcaactaactcgcgggcctcagatttccagtttcatctccatttagaggtaaaaaaaaaaaaaataaaaaagggccggccgtccactagtgagctcaccaacccggcaatt

SEQ ID NO: 3249 - DNA, 1372 bp, Zea mays
  Clone ID: MRT4577_102964C.1
aacgaccacgcgtacgcccacgcgtccgccgccatctcgcccttcgcggttatcgctttaacgtcggggaacaagcaccgggggtccgggccgcgtggcacgccgatacctcccccatactcgtttggggatagcaactcccatgactacaatgggattagcttctctgttcccggtttgtttccggatggttccaacggcgaggatacgttttaccttgagcaataaagcgggcagctgggcaatcatgaaggcgctgctcttgtagcatatagcaaattccatgttgtggtgcaggagcagcctgaggccgtggttactctccctaatgggaacaacggaattggcactgagattgagtgcggagtgtaaaaggttctcgtcgcacctcgccccgcccgcagagagacggggcgcgcccgctcgagccgtgcgcgccagacagccccatggcctcggaccgccaggccctctcggtcccggccgtccccgtcccgcccaaccctaacccgaccgcaccagccgacctgaccccgccctcggcgtccgccgcgcgcaagctccccatcaagcggcgctccccgcggccgtcgtcctcgcccccgtcctcttcttccccggcctcctccgacccgctccgcgcgcccgcgcccgcggcggcggcggatccgaccagcagcagccgcccttcaagttccagcgcatctggtccgagtccgacgagctccgcttcctgcagggcctcctcggctgcggcacgcagggcctcgtcttcccgcgcgacctcaacgtcttctacgaccgcttctccgagtccatgccccagccctacacccgcgcccagctctcggagaagctccgccgcctcaagaacaagttccgcagcatgtccgcgcgcgtcgcgggaggcatagacccggcccgcctcgcgccgcacgaccgcgacgtgctccacctctgctccaggctgtgggaccccgccaacgccgccacctcgcccttcgcggccagcgccggaacgtcggggaacaagcgccgccgctccaacccgcgtggcacgccgctccctcccccagacgcgtctggggatagcaactcccatgactacaatgggattagctcctctgctcccggtttgtttccggatggttccaacggcgaggttacgttttaccttgagcaagaaagcgggcagctgggcaatcatgaaggcgctgctcttgtagcagatagcaaattcgatgttgttgtgcaggagcagcctgagggcgtggttactctcccgaatgggaacaacggaattggcagtgagatgagtgcggagtgtaaaacggtggtgccgtgcagcaacgagcaccgaatggcaaatgct

SEQ ID NO: 3250 - DNA, 114 bp, Zea mays
  Clone ID: MRT4577_102965C.1
atatagatataaatttgatccaactcaagatgctcggactctccaaaaaatgtgtggaatttcctataatttcggtatacatccctaaaatttgcgatggcggtccgaatttaa

SEQ ID NO: 3251 - DNA, 352 bp, Zea mays
  unsure (1)..(352): unsure at all n locations
  Clone ID: MRT4577_102966C.1
gcgaggtggagaacgaggccttagcgtgttttttttttttgttcatccttttgttttttcttgcccagccttctttttctgtacctcacatcattggccgatgccctcttttagattgcttattagttgtaattcaataatgaagttttttggctgatgtctggggggggggggaaataagaagctacttttccagcncntaaagcgcggcgggggggggggctgctctccccgtgcccgcttctcttgccgcgccctatcgcccgctcctccctctctctggcggtccttcgtccncgcgttcgctggccctccccgtcccgctcgggggtggggctcccttttggggtcc

SEQ ID NO: 3252 - DNA, 334 bp, Zea mays
  Clone ID: MRT4577_102967C.1
atcagtcgttcgacaaaccgggagtaaacaggcactggggaagtccttcaataagcactcgatttcccacgcgggcggtgatgaacgatgagacgagaagggtgacgtgctgacggacgttccccaggagacgacgacgttgactaaggccctggatgagtgtcgcgtgaagagaccaacactgggggctaccaccaggggacataactgccaacaggtcctgaagcagccatctacacaggaattacaacaggcgtctctatgggtgaagagtgccacaagatgagcttgatggctagcttcacctctgcgtggagccgtgggttcgggagag

SEQ ID NO: 3253 - DNA, 416 bp, Zea mays
  unsure (1)..(416): unsure at all n locations
  Clone ID: MRT4577_102968C.1
cccgcccccnaagagagacagcccaagaaacggaaccgcggacccccgggngaacccaaaaagacacccaaacaaaaacaaccccaaactctcctcttgcaaggggagggaaaagcaanggaagcgacaccctaagccacctaaaccacgaaaagagaaggaggggaaggagttaaccacacaggagcccctcaagggcctacaaaattaaccatcgggcaagggatgaacatgacagccaggtcggaaaacaaggcgctaacaacaagaagcaagagctaggggatgagcccgacgccaaagccccagagcctcggggccaactccatgtcctcggcggccgcgccgggctcgcacaggcaacagtcacagaagaacttcccggacacgccctccacatgcggggggagagccaa

SEQ ID NO: 3254 - DNA, 854 bp, Zea mays
  unsure (1)..(854): unsure at all n locations
  Clone ID: MRT4577_102969C.1
ggntnnnnnnnnnnnnnnnnnnnnnnnnnnnnnnnnnntttttttttttttttaaaagatcaccaataggtgaatccctgttcactaaatttaattaaccaacaccaaatccaatgtgtaccccaataagcaaccctcaaaatttttcgctgccaggttacatcgtatatgccagggcagaaagaagaaaaggaaaaagagtatagtcacgaaaagaaaaagaaaagctgtattgttgtctgtagaagttggatcagcaggagtctcaactggcagctcatgcaccgatgacaccagacatccacggcacgacaacaggtgcagtgggatgagcgtctctgtaaggctctgaatacttgtctttgaagttcagtttggggtggtcagcctgtttcaaccagcactcctgatgtttatgctcatatttgtctggcgagaagcatccaaattccgatgggcagtaaacccatatattgcacttcaattcccctggcttggcattcttagcttgatcaaggcaagcttgacaacaatcagcagcagattctttgtggtgtgttaaaccccatctaacagcggcaccatcataatctgtatgtagctcagcattacattgtggggacaagggtggacctgctactatctcttcttcttctggttcattttcaggtttatcatcatgtacagtatgtgtgacttcatctggtatccaaaggccaatatcctcaaggagcataagccagttgaactccagggcttgttttaacattctggtttcctcactagataagtccaaacttgattgattccgagtggatgcactgtttttaaggccggcctcgaggtacccaatg

SEQ ID NO: 3255 - DNA, 667 bp, Zea mays
  Clone ID: MRT4577_10296C.1
cattgggaccctcgaggccggccgtgagtgcatgcgatcgatccggcagactgccctgtgagagaactggaagagacccggccgtcggaatcactcctgaaaccaagacatcgtcttgtatgatgaattacgaggagcctgctcgacaaggaaaagaccttgcctgagagcacgagtaatgagaacgactgatcctctacgggttctacaagcgagccacagatggagaggcccatatggatcgaccggttatattctaccaaaagggcaagggcaggtgtaatgactgctaatgctgctgaatgaaaatcaattgatgaagcgatgaatgactacatcaccaatgaggaatgccttcactacgctgatgccgcctcttatgaaacacatgataatggaggcgaagatctatatgccagtgagctatgagccagtaccgcataagaaaagatacttctgctgttgtacatctgtgtaccatgtacctgccttctcctggagtttatatttcgagatgataataggaggactcgcgacacgtatattaaatgacactcaacatacaaggttcataagatgatatgcagctatcaatctatgaaaccggtttaagcacctactacccgagaactgccagtgaggaccagcgcctgctcccatctatcta

SEQ ID NO: 3256 - DNA, 390 bp, Zea mays
  Clone ID: MRT4577_102970C.1
atggcccagcctctgccatgcattgtcccaggaaggttctgctacgcttccgttgacgcttcagacgatttgcacgggaattccatttttttgaacggcatcgatctgagattccgagtagaagtcacagaaataggtgattattgcgatatgttggaggggcggcagacttgggaggtggcggtgatgaccgtggagcacggcgtcgtcgaccagcagcgcacggagtcgcttcatccagccaaacgcgagcatcgatttcttgggcttggttggagaaagcagccgacaaacgtcattgggaggagaggcggcggcgtttgtagcagagggccaagtggaggtggcgctggccatggacagagatctgaggagcgacggcagccatga

SEQ ID NO: 3257 - DNA, 321 bp, Zea mays
  Clone ID: MRT4577_102971C.1
ggggaaaattcggaagctttcgcataaacccaaattttacaaatgggggaacttttcccttaagccccccccgtttgacctaacttccccccaaaacccttttacctccaaaaaacaaggggggcaggcccaacgaaaaagctgaattaacagcagggcggcattaactaaaatgggcctagctgtaagggaatgccccaaggggttgggtgtccatttcccccccttcccctattaagggggccttttggcaaggggttttttgagaccctttacgatcttggaaaaccctttttttttcatagggaacaagttgggggg

SEQ ID NO: 3258 - DNA, 205 bp, Zea mays
  Clone ID: MRT4577_102972C.1
cccacgcgtccgaagtttttgattttgccaagcggcaagcacctaaacacaaggcgacaaggaaggacacagacgagctggacaccacaacctacaccgagaacacacaggatctcccagaccgtcgcaatgagagccgaacaaacatccatgaacacacggccctgatgaaacaggcacaccacccacacatgctcatgcaagg

SEQ ID NO: 3259 - DNA, 574 bp, Zea mays
  Clone ID: MRT4577_102974C.1
cgtccggtcccaccaagctgcgcgccggctcactccgctcgcccgttctcgatggcggcgccggccatgtcctaatgctttcacccacgcgtcgaccgccagatcctccgtcttctctcacattctggaccaaggttcttcgtggggctcagggcgcagaccaagatcggttcgcctgagtcttcatgcccgaatgtctgcgctgggttacacactgaagacaatcgacataatctttttcaggttgaacaaaaagaaggcgacacagtatccagatttagaggataggctattggaactacacgtgtgccttaccgaacacatggcgaagggacctggcactggcttgacactatggaacgctgtgaaccgtgagcggcttatctctattgatgacattgttgattaagaatagactaaccaagggccggcaagcatgctttatcttgacagcattgatcttttcaaatagatagtgctatacattaatggaccatacatgaaatgttacatggtgtataggactatgtgataccatgctaacaataaaaagatctattggcactcactgttt

SEQ ID NO: 3260 - DNA, 809 bp, Zea mays
  Clone ID: MRT4577_102975C.1
aacaggtagtctgagtattttttatttactcttcatatgcttgcttttgcatgagcagggacagtgcttcactgcttattgacttcttcaggagttgagatttagctcaattacaaagtttatttaatcattgtgatgtacctagttgcaactaaagccaaactcagaactaaagcacagcataaaaaaattgtgttcacactatttttatgtgcagttcttctgtggctgctgacagcagcctgcataaagactggtcggccacaaatggcaaaacgtgccattgagctcgcagagtcaaggctgctcaaggacggctggcccgagtattacgatggcaagctaggaagattcgttggcaagcaggccaggaagttccagacctggtccattgccggttacctcgtcgcccgcatgatgctggaggacccatcgacactgatgatgatctccatggaggaggaccggcctgtgaagccgaccatgcggcggtcagcatcatggaatgcctgaatgcgtggacagttgtttctgaattaaggaaatttagaagcaaaggttatacgtgagtttttttgggatcataaaagtttgatgtgattttgttgggaccggaatagttcaacgttcattatagttgagctctgtcaattaggacagaaattgtataccatagaggatcataggagttacacaggattttgtcacacctttttgttttgaatactaggatcctgttcagttgaaaccttgattttggaataacaaatcactatttatgcacccttttcactgtggcattaaaacaa

SEQ ID NO: 3261 - DNA, 454 bp, Zea mays
  Clone ID: MRT4577_102976C.1
ctaccccggcaaagaggttatcagtttttcaccggaccagggggggaggcaaaactgaagcaggcggggcccctgccccagggggccgccagagagacccccgacagacagacccatgtggtaaaaacgcaaaaaaacccccatatagatctaaatattaaacccggcccgaaacggacaggatcgacggggggggcatccccgtcggaaagccgggaggacgttcaaacaaaccccaggaaacccaggcgaggagcgagcgaccatggataagggggggggcagttgacaggatcttatttacgggaccccgttattatatttattaaacccctcctggggggggtcctttcgactttggggcgccatcgccgagccgggccggttaatttgcagttgcaacaggaccagcccaagctggggccgcacttgcaggggttgcaaccccaccccc

SEQ ID NO: 3262 - DNA, 236 bp, Zea mays
  Clone ID: MRT4577_102977C.1
attactacacccactagtgagtcgtattaagagtgcgacgacacacgactcagacggccacccgctgggttcggccccaggtgtacccggtgttcgcggcatggggcgtggccgtcggcatgagcggatttcagctcgtccggaacatcagcggcaacccggaagctcagggtaaacaaggcagggagggcacctggtgtgcgtgagaaccatgatgaggggaggcgttacgccat

SEQ ID NO: 3263 - DNA, 521 bp, Zea mays
  Clone ID: MRT4577_102978C.1
aattcggcacgagggatcattacaggctgagaactatgctccaacggtaccgggcggcaacgcaggcaatccaccaacgcctactcggcctggaccgtgaactctactgccgccgtgatcattactacagcgacgcgcactacggcggcggcggcatcgtgacgccggaggactcttgagccgacccgcaccggatgtggcacgcgaacatacagggcaacggaagcgggcagacgctgccgctccagccaactacgaagagtgtactagaccgccaaccacaactacgctatgaacggccctgacgataacgtggggcaccacccgctcaaccgcaaggacgaggaccagcactgagtcaaggacatgccgtgcagctcacagcactccggacgactaatgttacgcatcgttaccgctagggaacaaggtcaccggtgatggcatagagcactcgctgtgacaaaaccaccctgtgcgccatgatgactacgaaccctacatatctgaacgagtgacac

SEQ ID NO: 3264 - DNA, 464 bp, Zea mays
  Clone ID: MRT4577_102979C.1
gcttactcacacagcgcgtacgcgatgtgtgagtgatgtggaccccataactgaagacatggttgtgtctgaccgataaggatgcctaccagctagtggatgatgatcttgatgcccactgcgacagtcaaatgaggacgacgacaccgaattggtggtaagcgactccagggttgtctactgtgattccagatgtcaagcgctcgggtgcagagcaaggtggattggtgaagaagaacttgaagaggcgggcgactgaatcaagtttgtatccttagttatctgttctagtctgactctctccttgtgtgacaaggatgtagttctagtacacgggacaaggcccaattgtaaacgccacagctgctattacatgacccaagttggcccaaggcattttggattcagcttcttcacccgccttacactgttcacttgaactccagctggtcgcgctttctctt

SEQ ID NO: 3265 - DNA, 334 bp, Zea mays
  Clone ID: MRT4577_10297C.1
cagctagcaacataaaagttcatttttcaaccaacaatgacagctaagaggtttggattacttatgatccttggtcgaattgcaagtactgttacctgaaccattttcccacaatgctcacatgctcctataccttcctatcttaccctatatcaatcaacagcagagtattcagaatgtgaaaacccaattacttaaaccctaccagatccaacacgcaataacaatacgcatcttacctatatcacgcttgttaatgcaacaaccgataaacctattacaactattacctttggtgcattaattgacacaaaacattaaggcacaacaacta

SEQ ID NO: 3266 - DNA, 3635 bp, Zea mays
  Clone ID: MRT4577_102980C.1
aatttggcacgaggatcgtccccgtcacacctctgcccacgcaccatcgccgatcctattgcccactacaatttccccatttctctcacgtaagtaggccacaccatcgcgtcatctctgctccgcctccttcccgccggcttcccgccgtcctttcgctgccgctgccattaccgccactgccgcaccggctggccgcgctaaaacagcagccgcgcccgcgctacgctgaccggcgacggcggccggcaagactgcccgttcgtccggtcccttcactccaccttcgcgcaacggcacaaggcggcaagggaccggacggggccggcctcgtgctttttgtgcgtggttggagtggttgagcgagccgatggcgacgatcccgggcggcgtggcgccatgacggcagccatttcaatacgcgccccccagcagctgaaacctgacaagctaaccagattttaggtggttacccgtgccgtgtcgcctgcctcgcacacccctcgcccttcgcctcttttccaccctggacccaggatatagttcccgctctcgtcgcttgcgcttgtatcttcctcgtctcaggcctccccgccgcgcctttcggttcgggttcagcgaattcagccacgaagcgagcgggcggccggagggttcctggtaacggaactcgctcgctttccagtttccaggtcaggccaggcgacgaccgccgcctcggcagttttctattccagcgtcgcggttccgggtcagaaattggttgcaggctcgcagccagccagtagcccggcgagatcgtcttgtgacagcggcaagtccacggcggttagcgggctgagcgaaccagttgcctggctacttaccagcttgccgtgccatgtgcaactgcggttcttcctgctgatctcgggagctgcaagccggctctcggcgaccgttcgtgggcgtcatggcggcggaccacggggagggcgtcggccggtgcatactggtggggctgcacatggacgccgtcggcagggacctgctccagtgggcgctccaccaggaggccaggcggggcgaccgcatcgtcgccgtgcacatttaccgcaagtccgacaagacgaacacactgaagctgatcaggacgctggacgactacctggcggaatacgaggccctctgcaaccagaaacaggtggttctcgtcggccgggtgacgccgggaagctcgatccagaaggagctggtgaaggaggccaagctctgcgccgccatggtcgtggtgcttggcgccaataagaagtactccttcggagggtcgtcctgcctggccaagtactgcgccaagaagctgccgccgacaaccaccgtcgtcgccatccaggacggcaaggccgtcttcgtccgggaggcgcccaggccgccacttggagcagagccaaagccggtgctccgcacggtgctgcacccgagcgtggggctggagcccaaggtgatcatcccgaacccgaaccggcgcgcgcggtccatgtccatggacttggacgctccatgctgcggtcacggcgccgcggacgcgccggcaagcaggtgcttggacgacgccaccaaaggcgacggcggcgtggcgcccgagcagaggctcgggtggccgctgctccgccgcgcgcacgccgccgccgcctcagctgcccctgtacagacgcccggcggcaagaatcatgagccgcggaagcagtcggtggtgcactgggtgatgagcctgccccggcggtccgcgccgtcggagtccgccgagccgcatgccggggcggggctcgagtcggagctcaaggcaatgcttggcggcagtggcgcgcggtgccggtggttccgctacgaggagctctacgactccaccaaccacttctccgcagagaacctgatcgggaacggagggaacagcagggtgtacaggggcagcctcgcgtgcggccggcaggtggcgatcaagctgtgcaaggcgtcggtggaggcgtccaaggacttcctgcgtgaggtggacatcatcaccaagctgcagcaccaccggatcgtccccttgatcggcgtctgcgtggaaggccgcaacctcatctccgtttaccgctacctccccaggggcagcctcgaggacaacctacacggggaaaggtcaaagccggcgctgtcgtgggagaaccggtacaaggctgcgctggggatcgcggaggctctgagctacctgcactccggcagctcgcggccggtgatccacagggacgtcaagtcgtccaacatcctccttacagaagagttcgagcctcagctatccgatttcgggctggccatctgggcgccgacgaatccgacgtccctgacgcacagcgacgtcgtcggcacattcgggtacctggcgccggagtacttcatgtacgggaaggtgaccgacagggtggacgtgtacgcgttgggcgtcgtcctgctggagctcctgtccggccggaagtccatcagcagcgacgggtcgtcacccaagggccaggagagtctcgtcatgtgggcaactccggtgcttagcagcggcaacatctgtgacctgttggacccgaggctggacgtgaagcacgacgaggtggaggtcaggcggatggcctctgccgcgtcgctctgcctccggaggggggcacgactcaggccgccgatatcgcagatactgagtatactacgaggagaaagcgcggcgagcatcgccgaccagggcgcgacggagccggactgcgtggacgacgaggcgtccccgccgcgaacgtgaggtcgcacctgggcctcgcgcttctcgacgtggaggactcggagtccatctccagcacggagcacagcagcggcctcagcccgttggaggagtacctgcgagaacgttggagccgatcgtccagcttcgactgatgattcatgcccgcgctgcgattttgtttgtgggcatgtgttttagtttttttttccctctccgccggtgtccggccggaagccatcagcagcgacgggtcgtcacccaagggccaggagagtctcgtcatgtgggcaactccggtgcttagcagcggcaacatctgtgacctgctggacccgaggctggacgtgaagcacgacgaggtggaggtcaggcggatggcctctgccgcgtcgctctgcctccggaggtcggctcgactcaggccgccgatatcgcagatactgagcatactacgaggagaaagcgcggcgagcatcgccgaccagggcgcgacggagccggactgcgtggacgacgaggcctaccccgccgcgaacgtgaggtcgcacctgggcctcgcgcttctcgacgtggaggactcggagtccatctccagcacggagcacagcagcggcctcagcccgttggaggagtacctgcgagaacgttggagccgatcgtccagcttcgactgatgattcatgcccgcgctgcgattttgtttgtgggcatgtgttttcgttttttttcccctctccgccggtaattcacatgtttattgtatggtttggttaccggggccgtgtgtacagtggacagtcaaaaatcaccagagccacatcttcggcgacaaaaacgcgattggttgagcttc

SEQ ID NO: 3267 - DNA, 342 bp, Zea mays
  Clone ID: MRT4577_102981C.1
ttcatgtgttcgatctcctcatccatatccggaggagccgctagacgcgctgagaggaccgatgttcacagctatcgctactgttatcggtgctgttatcctcactgcttgcctccttggacgcgtcatgttgcggctgacgttgccgactttgtccagagccttgtccagaaccgagacgaggaccgagaacggaaccgagaacggaatcgaggacgctatcgacgctattgccgtggctatggtcgggctcaggcttgaactgacgctgataccggagtccgttgacgagtccggcgaggagatcggcgagaagagctctgttaccagggctgcttacaa

SEQ ID NO: 3268 - DNA, 662 bp, Zea mays
  Clone ID: MRT4577_102982C.1
atcatgctgctgctgattcaattgacatgccaccattgaatgattttgtgtcaggtggttctcgtcggccgggtgacgccgggaagctcgatccagaaggagctggtgaaggaggccaagctctgcgccgccatggtcgtggtgcttggcgccaataagaagtactccttcgggtaagtacgctggcagcaacctttgtatgatctagctaactgctggttccgtcaccatcccttagcaaaccttctccttttttccccccattttggttgcggttgcgcagagggtcgtcctgcctggccaagtactgcgccaagaagctgccgccgacaaccaccgtcgtcgccatccaggacggcaaggccgtcttcgtccgggaggcgcccaggccgccacttggtaataaagtgcccattaattaattgtggttatcagttgtggagattttggttagcgagtcgctaatcgttgggtggcgagctggtgcgcaggagcagagccaaagccggtgctccgcacggtgctgcacccgagcgtggggctggagcccaaggtgatcatcccgaacccgaaacggcgcgcgcggtccatgtccatggacttggacgccccatgctgcggtcacggcgccgcggacgcgccggaagcaggtgcttggacga

SEQ ID NO: 3269 - DNA, 496 bp, Zea mays
  Clone ID: MRT4577_102983C.1
aaaaaacaaaaaaaaagggaaaaaaaaaaaaaaattaaaaaaaaaaaaaaaaaaaaaaaaaaaaaaaaaaaaaaaaaaaaaacccgtaatgggaaaaaaaaaaaccccaaaaattaaaaattttttaaaaaaatttaattttttttcaaaaaaacaaaaaaaaaaaaacccgttgttgtaaaaattaaatgaaaaggaaaattggccgaaaagttgggccaattttaaaagtttaaggggggggggccttttttgggggttccatttttggggcggggggttggaaccatatttttttttttttggggccctttcttctttggccttgggccctcttttttcacgctggggggttgggaaaacccctggcgtttcccctatttttttggtttgacaaaaaactccctttttcccaaggggcgcggacggcttagtggcctttcttttttttttttcccaaacctggggaatttctttttggccttttgggcccccc

SEQ ID NO: 3270 - DNA, 1006 bp, Zea mays
  Clone ID: MRT4577_102984C.1
aattcggcacgaggtgtggtctgcaggggaaaggtcaaagccggcgctgtcgtgggagaaccggtacaaggctgcgctggggatcgcggaggccctgagctacctgcactccggcagctcgcggccggtgatccacagggacgtcaagtcgtccaacatcctccttacagaagagttcgagcctcagctatccgatttcgggctggccatctgggcgccgacgaatccgacgtccctgacgcacagcgacgtcgtcggcacattcgggtacctggcgccggagtacttcatgtacgggaaggtgaccgacagggtggacgtgtacgcgttgggcgtcgtcctgctggagctcctgtccggccggaagtccatcagcagcgacgggtcgtcacccaagggccaggagagtctcgtcatgtgggcaactccggtgcttagcagcggcaacatctgtgacctgctggacccgaggctggacgtgaagcacgacgaggtggaggtcaggcggatggcctctgccgcgtcgctctgcctccggaggtcggctcgactcaggccgccgatatcgcagatactgagcatactacgaggagaaagcgcggcgagcatcgccgaccagggcgcgacggagccggactgcgtggacgacgaggcctaccccgccgcgaacgtgaggtcgcacctgggcctcgcgcttctcgacgtggaggactcggagtccatctccagcacggagcacagcagcggcctcagcccgttggaggagtacctgcgagaacgttggagccgatcgtccagcttcgactgatgattcatgcccgcgctgcgattttgtttgtgggcatgtgttttcgttttttttcccctctccgccggtaattcacatgtttattgtatggtttggttaccggggccgtgtgtacagtggacagtcaaaaatcaccagagcgagccacatcttcggcgacaacaaaaaaaaaaaaaaaaaaaaaaaaagatttttaaa

SEQ ID NO: 3271 - DNA, 145 bp, Zea mays
  Clone ID: MRT4577_102985C.1
tatctatgagctatgatgcagcatgcacgtcatccgtaagtctctgttcagtcgtagcgcggtcgcccttttttttttttttttttaaacacaagcatgtcaaatgcttatattcatgttccagcaaatataaggttctccatct

SEQ ID NO: 3272 - DNA, 264 bp, Zea mays
  Clone ID: MRT4577_102986C.1
cacaactgcagtgtaagtagcgctacgcggccggagagagatagggaaagcgggaagcaaggacgatggcgtctctgctcagcctgtacggcggcgacgccgctgccggtcggaggaggatgagccgaggtagcggcacggcgccggcgccggtgaggcgtctgctgaggaggctgaggtccagcttcatcagacggagcgcggcgcggccgaggacgagggcggcggctgaggttcgcctacgacctgcgcagttactcccag

SEQ ID NO: 3273 - DNA, 455 bp, Zea mays
  Clone ID: MRT4577_102987C.1
gacacacgtgaaaaggaactcattctggggtacacatccagcatgaacacgtgaattctacacaccagtacaactacgcagtctcaattgcctggcaaaacattggaaactactctcctctgatggagaaaggcgaaggtaacacaaatgccggtgctcatgcaacaagtggggccaccgtttccttccggctcatataccccgtgctctactaaccaggtggaggtgagtggaacatcatccctcaattgaaaaaacgttcgcattgcccaagagggaacgtatgctgccttcttaacaactcgcgcttacaccatgctgctaatagttctgaagaaagtccttgctgcgttaaagaagaactccgtgagacccgggatgaccccctgtctgagatgcaaaccatcatttcactcattacgtgctggaaaactcgaagatcatgtacgaaggac

SEQ ID NO: 3274 - DNA, 428 bp, Zea mays
  Clone ID: MRT4577_102988C.1
cccactcttccggcttcaactaacaacgttactaagatcaaccctgacacgatggcacgggtcatttacttgcacatcatgcgcatagttccctactctgatcatgtaccaatggctgatgaaaccaccttgctggctaattcgtatggaaaacatgaactaactcaacgaatacatcatccaagaacacttatggacaatagtattcgttcataccgagagcactaaatccatcatctgtctcacgcaaaagctccacatactcagctcaagcaacccttatacttacttcatactcgctgaagacaccatctcaaaccaccttcaaacttacctcctgaatgcaatccataacgttcatgcatacctatatcgccttccactcatcatacactggtatcctatctatatacagacacatatgatat

SEQ ID NO: 3275 - DNA, 246 bp, Zea mays
  Clone ID: MRT4577_102989C.1
atgattatgctgaaagagagcgtatgcagcatattagggggtttattacaactgctgtacacatggatattcctgttatgctggagaagtccttaaagaaagaaatatcttcagttggacctgctgttgcacggacaacagctcctattattgagaaaacactatcttctgctgtttctgatcactccagaaagttcttggtgacaaggttgcgaaataactggacaaaacccttaagtacaaaac

SEQ ID NO: 3276 - DNA, 868 bp, Zea mays
  Clone ID: MRT4577_10298C.1
gctttattgtcagatgagatattccagcctaaggttatttggtcccttgctgatgtacaggcaacatgtggaacacttggcttatctacagcaactgtgaaactgatagggccagatggagaggagagaatagcatgttcagttggaacaggtccagttgatgcagcttacaaggctgttgaccaaataatccagattccaaccgtcctccgagaatacggcatgacttcagtcacagaaggcattgacgctattgcgacgactcgagtggttgtcaccggagacgtggccaacaactccaaacacgccttgactggccactctttcaaccgctccttcagcgggagcggggcggcaatggacatcgtcgtgtccagcgtcagagcttacctgagtgccctgaacaagatgtgcagcttcgctggcgctgcgagagccagcagcaccgaggtgcctgggagcgcaagtgttcaacgcgcagaatgagctcggcggcgttcgtgttagttctcgtatgggatgccaggatggactgtgctgttgaggtgacatttcgtttcagtaacaggctgctcgatattatggggtaccccttgtcagtggggtgacgacaatgctgttctttttctgggaggatagtcccttcagcttagaacatgcaggaaattttggccctgtgtagtgtacattttgtatctttaaacatactttcaataatgaaataatattagggtccatctagccacatgggtggccatcggcatgaaaacgatcgaaaataaatatttattcggtttgtctttttttttctttgattacaaataaataggatatagaatttataatgaaaaaatatattcttattttt

SEQ ID NO: 3277 - DNA, 475 bp, Zea mays
  Clone ID: MRT4577_102990C.1
agtggggttaacattcacatttttccagggggcccccaattcaagccccggcgggtttcattgggggaaaatttgaggggggtttgccccaacaggggccttataccggggctgggaatagcaagggggcccccaaaaaaaaaatttggaataactttaatccagggcatttttagcatcgggcggtgggggggcaaaacaatgccccttgggtgggttccaacaggttcaccccccttaaaaccaattggggggggggaaaactactttattttttggaaaggggagccctcccaggtgaccccccttgggggtttccaccataaccctgggagacattatttggacctttggcatgggttggtccattcgcagcagctgggaacacaaatggggggcccgttcgaactttccctaaaaaagccttatttgggggggttttttttttggctggaaaggggcggtactaaccccc

SEQ ID NO: 3278 - DNA, 280 bp, Zea mays
  unsure (1)..(280): unsure at all n locations
  Clone ID: MRT4577_102991C.1
gttntanatnncgancggnngcacttnngnnctatanttatagctcgangattncaaatnatcgttccattgatagcaacatgntgantattagcaagcntagccaacctagaactagcnagcccctaattaacctcataggcgagttatncattgttatagcaacattnctcctgatcgaacccctctatcatccttatagcaactaacattgtcatcacaggaaatnngcaatatatatggttatcacaacccagcgaggnnnctaaccagccacata

SEQ ID NO: 3279 - DNA, 376 bp, Zea mays
  Clone ID: MRT4577_102992C.1
aaaaaaacaaacggggccaaaaaggttaataactattatggccgcccggttaattaaaggggggggggaaaaacctgtccttgcaaaagttaaaaaaccccacatgtggggtttaattaatcaaaaggagggccccccgtttaaaaacaacgggggtttttgaatttgccggcctgcatgcagggatgcatacaaacccaggagggatctgcctggcctttgtggctaaaaaggcaaaaaacgggtagtcaacgtggggggggcccatttggtatcccgggccggggggggcaatcttttaaaacaccgtttttaaaccaaggccaaggccccctttgttgaattggcccaaaatccttccaaagaaggacccccc

SEQ ID NO: 3280 - DNA, 1469 bp, Zea mays
  Clone ID: MRT4577_102993C.1
gttcaccgtcagaggattattggaggaaatctaagcttccccatgccaccattttcaaaccgcaacacccgtatgcaaggcgtgtaccagaaacatttaaagagttccctgttcctgctctggcattagtagatgttcttctttcagtagacccagctgatcgtggaactgcgtcttctgcattgcaaagtgagttttttacaacaaaaccacatgcctgcaatccttcaagcttgcctaggtaccccccaagcaaagagtttgatgcaaaacgtcgggaggaggaagctcgaaggcaaggtgttactggaggaaagcaacataaacatgaccctgaaagaagaaccagagaatcaagagcagtccctgcccctgaggcaaatgcagaattagtatcatcattgcagaaaaggcaagcccaagctaataccaggagcaggagcgaaatgttcaatccctgcaaagaagactccgcgtccggattccgaatcgaaccaccccggccaactcctgttaccgagtcttctgaagacccacaacgtgcctacccaaccaggatcttccattctgggcctctagttaaccagagccagccatcaaaggctggaggcggcaaaaatggtgaacctcaggtccctggtgttgcgaatcaccctgtggttttgtcgacaagatcaggtccccgggcagacgatagcggccggacaatggtcgctcaagctgaagcatttactcatgggcggaggctgtcggagtccatcaatgagcatttcagtaacagtgggaagtacgatcaagtgttcccgaagaggatgacaggaacattagggctgatggagctattggctacggatccaaaggcagcaagatccaccactctgggcccctgacctgtccttcaggcagcaacgtcgacgagatgctgaaggagaacgaccggcaaatccaagaagtgttccggagaacccgggtggagaagtcgagagcgaggagggaccatggacatcaccagggcggtataaggcccggcgatttcggcgccatcccagtcttcccttccagccgctccagctatcaggctgtgcagcagtaaggccggagctcgaacaagatcggttggcgttggaacctccgatgtgtttcggtcccacgctttttccgggaggggatgtgtagcatacgctatgctatgctatgtacagggacagggagggcagcagcagcagccgtgtagagactctgaaggtgaggagagggggaggtgatttgtttattggcggcgattcgagtgtctcggtgaccaaactcgtgtatcgtcaggtagttttgagatgttcgctgcaactgcaatgcaatatggtgtgtgtatctcagtctcagctcgccaagacgaagttggccaccaagagcattttcactgtgatggcatcaaatctttcaaacccatgctgagacttgggagctttgtt

SEQ ID NO: 3281 - DNA, 287 bp, Zea mays
  Clone ID: MRT4577_102994C.1
ggccgagcaggaggcgccatcatggggagggggcatccgccataacaaggaccgctaggttcggcgcaagggagcccaagagccaggatatctacccgaggctgttggtcaagttatacaggtttctggccagacgaaccaactccacattcaaccaggttgtgttgaagaggttgtttatgagtcgcaccaagcggccgcctctgtccctttcccggatgatccggaagatgaagcttcctggccgggaaaacaagacggcccgtggtgtggggaccataactgat

SEQ ID NO: 3282 - DNA, 2868 bp, Zea mays
  Clone ID: MRT4577_102995C.1
aattcggcacgaggtctctcgaagccgccgcctcctgccatcctgcgactgcgactgcgactgcgagtggccgttgctgctcccactcccacagttcgaccgcgccaccgtttcacccccttcctcctcctccgccaccacagtgccacgccactcctaaccctaattctcgggagcctaaccctagcctcaagatccgctcgcctcatgcctctcccttcccgccggcgccgcaggctgagctgagccggaccggcgattccagtcgacgggcgccgttgctgtcgcagttacaacccgcgccatgggctgcgtctgcggccgcccctcctccttcgaggatggccagtgccgcgcgacgcctccgccggccgcgaagctctcggcggcggtgaggagggaggaggaggcgcggaagcagcagttgcagcttcagcagcatgcgagggcagggagtgggagggaggaggcgctcgagaggaggcgggcgatgatggcgatggcagcggcgtgccaggtgaggagcccggtgccgagggcggttgaggcggagcaggtggccgtggggtggccgccttggctcgtcgccgtcgctccggaggccgtgcgcggatgggtgccacgccgcgccgagtctttcgagaagctcgacaagattggtcagggtacatatagtaatgtttacagagcccgtgatcttgaaaaggagaagattgttgctttgaagaaagtgcggtttgataatttggaaccagagagcgtgaaatttatggcaagggaaattctcattttgcgtcgccttgatcatccaaatgttatcaagctagaggggctagtaacatcaaggatgtcctgcagcttatatctggtttttgagtacatggaacatgatctagctggactagcatctttccgtggagtaaagtttaccgagtctcaggtaaagtgttacatgcaacagctcctccgtggtcttgagcattgccacagtcgtcacattctgcaccgtgacattaagggttcaaatctcttgattgataaccgaggcatattgaagatagcagattttggattggcaagcttctttgatcctgaacaacgacagcctttgactagccgtgttgtcacactatggtacaggccaccagagctcttgctcggtgccaccaattatggtgttgccgtagacctctggagtgctggctgcattcttgccgagctatatgctggcaagcctatcatgcctggtagaacagaggttgagcagttgcataaaatatttaaactctgtggttcaccgtcagaggattattggaggaaatctaagcttccccatgccaccattttcaaaccgcaacacccgtatgcaaggcgtgtagcagaaacatttaaagagttccctgctcctactctggcattatgaaaaaaacaacaatcaaaaaaaccagctgatcgtcatactgcaatgcctgcatttgatttttttttacaaatcatagtcatacactttttaggcaaggtgttactggaggaaagcaacataaacatgaccctgaaagaagaactagagaatcaagagcagtccctgcccctgatgcaaatgcagaattagtatcatcattgcaggtaattctccacttgttgacagttgacacttcctttatctttagctttggagatgcacatgtactacttgtttttttatcatttcaaaccatacataacctgtgttgcttgctgtatgaatatctttgacttcagaaaaggcaagcccaagctaataccaggagcaggagcgagatgttcaatccctgcaaagaagactccgcgtccggattccgaatcgaaccaccccagccaactcctgttaccgagtcttctgaagacccacaacgtgcctacccaaccaggatcttccattccgggcctctagttaaccagagccagccatcaaaggctggaggcggcaaaaatggtgaacctcaggtccctggtgttgcgaatcaccctgtggttttgttgacaagatcaggtccccgggcagacggtagtggccagacaatggtcgctcaagctgaagcatttgctcatgggcggaggctgtcggagtccatcaatgagcatttcagtaacagtgggaagtacgatcaagtgttcccgaagaaggatgacaggaacacttagggctgatggagctattgtaagtaacgtcctaccattttctggctcttgacaaaacagggctacggatccaagggcaacaagatccaccattctgggcccctgacctgcccttcgggcagcgtcgtcgacgagatgctaaaggagaacgaccggcaaatccaagaagtcttccggcgaacccgggtggagaagtcgagagcgaggagggaccatggacatcaccagggcggcatgaggcccgccgattttggcgccatcccggtcttcccttccagccgctccagttatcaggccgtgcaacagtgaggcgctctccaacaagatcggttggagttggaaccttttgttcggtcctgtgctggtttcgggtggtgggacgctatgctatgctatgccatgctatgtacagggtgggagaagcagagggtgtgaaggtgagggggaggtgatttgtttattggcggagtgtctcggtgaccagagtgagtcatgtatcatcaggtgggctttggttgaagtgtttgctcgccgagcctgaaactgaaacccttcttcactgtgatttcaccaaatctcagacctgggagctttgttgaagcagctgttcttgtaaccttgttggggtgcatatagaacaagtcttagtctggtaaaaaaaaaaaaaaaaaaaaactcgagagtact

SEQ ID NO: 3283 - DNA, 753 bp, Zea mays
  Clone ID: MRT4577_102996C.1
agcttcccatagagaaaggcgcttatttcggcctagtcagagctcccagtgccgtgattgcccgtctcaatgcacttctcctttgcgatctcgtatccattgccggatctgtccgttctatggacgatgcgtcgctccatcggaatgctcctctctgcatggatcccctgggcacttgccctgccgagagacgctcctcctccgggtcgcggaagccaaaatactatcgccgaggaccgccggtgcgaaaaaacacccacgagcaccacaacaacaagatgacggagagcaacaagatatccggagcgccagccgcagccgcagccgcagcagcaccaccaaaataaccagcagcagcaccaccaccaaagtaaccaccagcagcagcatcaccaaaatcaccaccagcagcagcagcaacagcagcagcagtggctgcggcgaaaccagatcaccgcggccgggaccagcgggcccaaggtcgtggcgccacccccagcggcggtcggcaacgatcctagttcacaagattggaaggcccaactgaagcttccacccgcagatacacggttcaggacagaggatgttactgccaccaaagggaatgagtttgaagattattttcttaagcgtgaactcctgatgggaatatatgagaaaggatttgaaaagccctctccaatccaggaagaaagcattcctattgcattaactggtagggatattcttgctagagcaaaaaatggaactggc

SEQ ID NO: 3284 - DNA, 203 bp, Zea mays
  Clone ID: MRT4577_102997C.1
ggggcccccccccccaggctcgtggcggcgtttaatgatctgctcccctgcagggagccgcgcggcaaggaatatgcaccccggcagcgtagagcgaaggccgctgtcctataggacaggctgccgccgcacgagtgcggctacccggacagcggcttcaagccgctaaactgcgggcccacacttgtgagcaaggggaagga

SEQ ID NO: 3285 - DNA, 309 bp, Zea mays
  Clone ID: MRT4577_102998C.1
gttggggtcattcaattgcatttgtgggtgcccacaatcactcagagacacaataggaaaccaccagaagaggacttggggtttaccgccactcggccaacaacaactggaagaagacgggaaaaacggcctacgacataaagaaacaccacgttgatgaactataacctgggcagtgaccaccacctctactcaactaaccgagcccccaggcattgactacaagctggaccaacttgaggcaaaaccacgcctttgaggcgggaagggaaactctgaagcgcgaaactccttaagagcaggaccccg

SEQ ID NO: 3286 - DNA, 365 bp, Zea mays
  unsure (1)..(365): unsure at all n locations
  Clone ID: MRT4577_102999C.1
ctcgcgcntatcagactcattctattaaatcctttactgctagacatcgctcacgatgacgcagcaactacagtgcaatgtttttatgctttcctatagagggcatgctatttcttacttctattatatttatgccattcaaacttgtagctctcaataatttgtgggtttaaatgttcttgttttctttatttgtgttacatctaaatctgattttctttgtgggtatggtgagagtgatggctatccttctcagaaagggagagatcaagaaagatgagatataaattcatatgctaccagaacaagaaagataagagcggttggtggtcgagactcctaacaaaggacctgaggtcttgtag

SEQ ID NO: 3287 - DNA, 829 bp, Zea mays
  Clone ID: MRT4577_10299C.1
tttcatttccacatcaaacacgaggccctgccgcgtgccgccgccgccgcccgggcgccccctcctaaaccccgcgacgacactgagcgagccgagccccggcgaccaaccatggccttctccgctaaaccccactgctcctgctccaccaccaccaaaccccccacccccgtcgcccacctctctccacccccctccctctccgtccgcgccgccgcctgcgccccgcgctccgcctatggcctctctgccgccggcgtgggcggcggcaaggcgtcccccagcaccgttcgcctccgcgctcgggcccagcgcatccgcgcgtcgcagcagcagccgcggcggcgccctgaaaacgtgccgaaccgcatcgacgacccccggcgacgaccgcagtggttgtcaccggatccgtggccaacaactccaaacacgccttgacatgccactctttcaaccgctcgctcagcgggagcggggcggcaatggacatcgtcgtgtccagcgtcagagcttacctgagtgccctgaacaagatgtgcagcttcgctggcgctgcgagagccagcagcactgaggtgcctgggagcgcaagtgttcaacgcgcagaatgagctcggcggcgttcgcgttcgtgttagttctcgtatgggatgccaggatggactgtgcgttgtaagagcttgtcaagctgttgaggtgacatttcgtttcagtaacaggctgctcgatattatggggtaccccttgtcagtggggtgacgacaatgctgttctttttctgggaggatagtcccttcagcttagaacatgcaggaaattttggccc

SEQ ID NO: 3288 - DNA, 2066 bp, Zea mays
  Clone ID: MRT4577_1029C.1
ctcgaggccggccgggatctcctctataatcgctccagtcaaatctcgtctatgtacaggaggtaatagtcttcagcccagctcgctctgcagtctgcgcgtagcaaaaacaatggccacagcggcggcagctcggcacgtggtcgcagtgccgtaccccggccgaggtcacgtcaaccccatgctcgtcgtgtgccgcctgctcgccgccgcggacgctgccttgagcgtgaccgtcgtcgtcacagaggagtggcacgcgctgctggccgcagcgggggtgcccggcacgctccccgaccgcgtccgcctcgccaccatccccaacgtcatcccctccgagagggtccgcggcgccgacttcgcaggcttcgtcgaggccgtgcatatcaagatggtggcgcccgtcgagcggctgctggaccggctgtccctggagcggaagccggacgccatcgtggccgacaccttcctggcttggggcgttggggttggatctgcgcgggggataccggtgtgctcgctgtggacgcaaccggccacgttcttcttggcgctctggcacctggaccgttggccgccggtggatggtcatcaaggggaagaaggcctaagctgcaggtccctggatcaatatctcccgttcccagccctcgcgccggtaaaatgttctgatatgaagaccctccgctccatggtgctgccaatgaaacggctagcgcaggtgttctccaacctgcgcaaggcacagtgtgtcctcttcacctccttctacgagctcgaaaccggcgccatcgatggaacatcgcaagtggttccatgccctatatatgcagttggcccttcaattccatatatgccactggaaggtgattcgggcgagtttcaccatgaagaagactacttcggttggctggatgcccagccaagaagctcggtactgtacgtctcatttggcacccatgtctcgatgccttcgtctcagctggaagaggtcgccctggggttgcatgaaagcacggttaggttcttctgggtggcccgggacagagctagcaccgccacccttgagcagatctctgctggtggcaagggcttggtggtgccgtggtgtgaccaactgaaggtcctgtgccacccctccgtcggtggcttcctgagccattgtgggtggaactcgaccctggaggccgtgttcgctggagtgccgatgcttgcctttcccgttgcttgggatcagctggtgattggccatctcgtggctgatgagtggaagatcggcgtcgacttgagggaacggagaagggaggatggtgttgtcggaagggccgcgatctgcgatactgtaacgaagcttatggatttgactgacgatgatagcctagagatgagaagaagggctgcggagctgagagaggcttcacgccgcgcagttcaggaaggtggatcttctcggtgttctttgaacagtttcgttagagatgtcatcgaaggaagactgaatgttgcagaaacttcacggtaggtttttgcttgaatttgtagtttcagggggacagaactgttgctcgtaggcagaaacgttgtgctcctgcaagtaaaggtacgtggctcctatcatgttcacgcatattcaccgccaccccactcgcaacaattattactggcttgaaatcacgattgccacagtacaggagtatagctgcacattttctgaagctgaaaacagaagacttgatgctgtctgtagcaaagatgggggacagcgatagtgatggcacaaaaaattctgtgctcctggacttgtgtaggttatgcacgtgatgagcaagcgtgtatatagccataaaaaatattgttttacatcgtatattatttatatagtaaagtttggataagaagtgtgatggggaaggataagaaagacttctagagcagcctaaaaatattaatatcgtggaataatcaagagctttgtatcgtaacagagtttatatgtacttcttaaaaaagtggtgttgtattttatataccaaagtttataggttttatgaatgactaacacg

SEQ ID NO: 3289 - DNA, 231 bp, Zea mays
  unsure (1)..(231): unsure at all n locations
  Clone ID: MRT4577_102C.1
aaaatatgtctgttgacatcgtttagagacacatgcctagttgagatagtccccagagatgccactccaacaagaggttagagttggatcctgtcctgtcttctccagttctctgtctatatcatgtatcaactatttatcctatcatcactctgaccactttggtattgtgatttcccttcattattatagagttntgttaagtttctggaatccacatgcacatataca

SEQ ID NO: 3290 - DNA, 157 bp, Zea mays
  Clone ID: MRT4577_103000C.1
atttgaaatagcaagtcaaatgtagtgaccaaattgtggaagagatttctgtcaaataggaaatgtgtaagttcgtctagaagctgatggttatgtaagttgctcaggcactcagatgacagcagattctgggttctgggagtgttctgtgcatctt

SEQ ID NO: 3291 - DNA, 344 bp, Zea mays
  Clone ID: MRT4577_103001C.1
ccgccacgaccccggtcacatgcctctactcaaacccctcggaacgctagcccactaccctcgccattgtctcacggggaaccgactcttactagactgaggccatcaacggtctcgccacatgtcttatctgcggaaggaagctcgccgatgtcaggccggctgcccgctccatacgtaagccccgtgcagtcgccggggtggccaagtacggagacaagagcgtttactttgacctcatcgacatattcaacaccaccggacagtgggacctctacggttctgacgcgccctcgccctacaacccgctactgagcaagttctttcgagacggtccgcggctc

SEQ ID NO: 3292 - DNA, 331 bp, Zea mays
  unsure (1)..(331): unsure at all n locations
  Clone ID: MRT4577_103002C.1
nnnnnnntntttttttnnnnnnnnnnnnnnnnngnnnnnngggnnnntttttnnnnnnttggcccaaaaccacccagggggtttttttttgggtcacaaagcttggagcgccgcccaccggggtttttagggggtgggcggattttacaacaacagggggggggcgggacacattggtccaagagaaataaaactcctaaccaatctggcctttggcgctaatatacagactgtaaaaagggaataccctggccatactctggaatgggcatcactgtttaactgtaaaactttttaatttactcaacaaacaggagcggggacctttttt

SEQ ID NO: 3293 - DNA, 440 bp, Zea mays
  unsure (1)..(440): unsure at all n locations
  Clone ID: MRT4577_103003C.1
aaaaaaaggaacaaataatctgttaacgaaaaaaccaaaaacagacccaaatggacctacaaccaaaaaaaaagggggggggggacattctttctttcaaaacaaaaaaaaaaggaactgtttggcaaaaaaaaaaaaaaaaaagggttagaggcactaaaaaaaaagccaaaaattacaggaaggtgcccagaaaccaaaggccaaatttttggaaatcccaattaatggaaactaaagggcaaaattgaaaaattttaaaacaaaaggtaattcaatggaagtgaaaagaataaaaacagaattccaaagcgaaaaaaggaaaaatacatgtgcgnacggactaaggtcccctgggacccgaggcataaaaccactaaatcgttgcggggaaaaaatgaaaaaaagaaaaaaaaaaataaaaaaacaaaaaagggaaa

SEQ ID NO: 3294 - DNA, 1466 bp, Zea mays
  Clone ID: MRT4577_103004C.1
gtttatctcagcaactaattacgtgtgaattgactgcattcatcatggctaccaaagaagaagctagcgctgtccccgccgccagtaaaacttcatggagtagcttcctgaagtccatcgcatccttcaacggcgacctctcctctctcaccgcaccgccgttcatcctctcaacaacctctttaaccgagtattctgcgtactggtgcgaacatcctgcactcttcgttgcccccgcacgtgagcccgatcctgcgaagagagcgctcttggtgctgaaatggttcctgagcacattgcaccaacagtactgctctcgaagcgaaaagctaggaagcgagaaaaagccgctcaacccgttcctgggcgagcttttcctgggcaagtggatagaggatgaggatgtgggcgagacaaggttgatcagcgagcaagtcagccatcatcctcctgcgacagcgtattcaatagtcaatgagaaacatggagttgagctccaaggatacaacgcccaaaaagcctccttctccagcaccatccaagtgaaacaactaggccacgcctatctctccttaacgccgcccggaaaagatgcaaacaacgaagacgaccgtgagcactacctcatcaccctccccaacctccacatcgaatccctgatctatgggacaccattcgttgaattggaaaagagttgcaagatcgccagctcaaccgggtacatctctaagatagacttttcgggcaaaggctggctgagcggaaagaaaaataccttctccgcagttttatacaaggaaagcgacggcgaaaaaaatcctttatacacagccgacggtcaatggtcgagcagcttcactatccgcgatgcacgcgctaagaaggatattgagaccttcactatcagcaatctgaaaacaacccccttaacagtcgcccctcttgatgaacaagatgaatgggaaactcgccgtgcatggcgcgacgtagcagccgccatcgaacgcggcgacatggaagccacatcaaacgccaaaaccaagatcgaagtcgcgcaacgagaactccgcaaaaaggagaaagagcaaggcgaggagtgggaacgacgattcttcaagcgagtcaacgaaaaggatgaacctacctttatgagattggcggcgatgctggatttgacgcaaggcatcgaaagtgaccgcaccgggggagtttggaggtttgatccttcacgtgctgtggatgcgaatccgccgtatcacaaggttggcggcgaagggttgggattgtaatttatttatgaggcatcttttatatttcataaaaacagggtctaggccgtttattcattagatgtgtattaagtagcgctttttctcgaccgttgagattcatggatgcaagtgtacctaatagctcaatgcgagactctttccaagcaaaaaaaaaaaaaaaaaaagggcggccgc

SEQ ID NO: 3295 - DNA, 203 bp, Zea mays
  unsure (1)..(203): unsure at all n locations
  Clone ID: MRT4577_103005C.1
agtaaacgttcggaaaagagtttaggtgaaaattgccgcgcccgaccaaaacagggctctggaattcaaaagtaaaaanacaacaggnattgttcattttttcattgtcaaccgtccccatcctgggggaaggctangncatnnnaaagaaaaaaacanannnnnnnnnctctttttttttttttttcccagncacctttcac

SEQ ID NO: 3296 - DNA, 257 bp, Zea mays
  unsure (1)..(257): unsure at all n locations
  Clone ID: MRT4577_103006C.1
gggcggaaggagaacnanaggctgaggcaaancaaccattagcagagtctgaagagcggcagggagccgggcgcggccgcgacggaccgcgacgacaaggacaaganccgcagcgaggggaccgccgcgcccggcccgcccccgagaagaggaggaggcggaggggcgacacgnccagacanccgagccggacgcagaagacggggagggccccgacgcccgccctgcagcccaacacagcgaggacgccgcagccg

SEQ ID NO: 3297 - DNA, 425 bp, Zea mays
  Clone ID: MRT4577_103007C.1
tgaattatatgatggaaggattgaagacaccgtgtgacatgaagaacacattatctgaagcaaggactaccgaagcaggtttagataaagaaggaacaatgggaagacaacgaagggacctgttttacagagcctacaaactatatctaggagaagtatgaatagcaccagtagcaagcaaaaggacggaacacacagctgtaaaaattgagatgctaggccaagaaacagctctattttgaccgaagaacttatatgacttcacttgagaagaacaggagacagatattgctggtgaaatgaatgaaaggaagacacatgcattagaattgtaaagtgttgaaaagcaatatgaggattacaatgggacgaatgccagtatcaggaacattggtgaaggagacaattgacataaactatgttgg

SEQ ID NO: 3298 - DNA, 1154 bp, Zea mays
  Clone ID: MRT4577_103008C.1
gcggaacaacccaatgtttagcagaaaatatttgcaccgatcaagaaaggttgtccagtgatgactgtgatggcagtaaccaggaacctccccctgttttccaatatatggagcatgatgcaccatatggaagacaaccattagcagatatggtatgtctttttcggttcttgtgcaaccaaatgtagtatttgtaacctagctgacagttatattttattaatacctacagatttcagtatttgcatgtaagtttcctgatctaaatacatacaagagctgtgatcttctcccgtccagttggatctctgtagcctggtatcccatataccggataccaacaggacctacgctacaagatctagatgcttgctttttaacattccattcattgtcaacaacacctgatggtacgataagcggttgtcctgagacaaataacttacataacagtaaagttgcttctgttcctgggaagatcacactgcctctgatcggcctagcatcttacaaattaaatggttccttgtggacgtcaaatcagcaccatgagcagcagttgactacgtcgcttctgaaagctgctgatgactggctttgccagcggcaagtagatcacccagattaccgcttcttcctcacacactaaattggatgtccatccaaactacctacctactgaacatcacagctcgatgcccactattttattcaatgaacttacattatcactttatatagtccccaatcccaagtaccagtatgctctgtaatatcatttttggggcttagtttatgttagtcccatattggtatctaggcaggattagttggtgactgttttggggttgtactgtaggaaccaattagacatagatcccctatattacgttcagtaccaattgcgggtgtgggtgatctgcaatcgggctaagtaggagattgattggcaatatacatttggcgtacttcaaaggcggttttaggatatattgatgatggcgataaaaatatttttttaaaaaaaaaaaaaaaaaaaaaaaaaaaaaaaaaaaaaaaacctgcggctggactcgagttatatgtattaccccgagaacgtatcatgtgttaccacaggttaggctgtgtgacatcatgtgatgaaaaaaaaa

SEQ ID NO: 3299 - DNA, 831 bp, Zea mays
  Clone ID: MRT4577_103009C.1
agaaaaacagattcctcaccgcaatatacagaatttcaaaagtccactgttgtttgggaattcctcaaaggaaggatattgcctggtatagcagcattggataaatgttacccctaccggattccatggagtactgtcttctgtgaacctacactacccttagtggttgatatcggaagtggaaatggtttgtttctttttcaaatggctaaaagttgtgaaagttcaaatttccttgggtttgagatgaatgaaaagcttgtcattaggtgcctccaaggtatggcttcagatgagaaaaggaacctatattttgtgtcaacaaatgcaacgtccacatttcgttccatagtttcaagttatcctggacggttgactcttgtcacaatacagtgcccaaatcctgacttcaacaaagagcaaaataggtggagaatggtgcgaagaatgctcattgaagctatcgtcgaccttcttcataccaatggacaggtttatctgcagtcagatgtggagtccgttctgctcgtgatgaaagagcagttcctctcctacagcaagggtcagcttgtcacggacggcgatggtggcaactgcatcgataacccgttcggcgtggtatccgactgggagcgccatgtcctcgctcgcggagctcccatgtacagggcgatgttaaagaaaatgtgattccatttcctccgtctctgaggtctgaacattgcattgttttgtcaccatggctgcttcggacatggacaacgttcatggattcactcggttagataaaactctcttcttttcggagaaaacatcatatggacacatgac

SEQ ID NO: 3300 - DNA, 1962 bp, Zea mays
  Clone ID: MRT4577_10300C.1
cccagcgccagacggtcagagcagggtagaagacgaagcagccgtggggacggtgctggaaggagcggcaaatgacaccgacgatcttgccacacgcgcggtggtggattctttgcaatcgagcatttctgctggtgaaagcgagccgcccgaggacttgggccacgagtcactagtgttggacaataaggaaggcacaatcatggaggacaccgagtacattaccatggaggcaccgccgagaggctccgatgttttcggatcagcagtgcctgtgttgcgtggtgaagacgatatggttcagagagcggtagaagctcctcttacagccaaggaatcagtccaagaattatctgtatcagacagtgaggatagaacacaggacgacaagtgcaaagatgcggagtcttccaaggagattctgtcactgagcgtcgacatcactgaatcaagtgacttcccggtgccgggcaatgaaggtattgtggttcagaggggaaatggtgaaacaatttctgtccgaaaatcaggccaagattctcattcaacagagattggggatgaaatggagggccacaaaaccgaagaagagataccactgcacgacgctaatgtttcagaatcgtcggtgctggatgatacagtgctggaggagaggaagatagaaggtgatgtaacagtggggatggccgtgaaagaagtgaccatttacacggatccttgtacaggggaggtggctggtgatcaagtagattccattgccattgccctacctgctgaaagcgagttgatgcaagccagcaatgttgacgatgttatcaacgctgctttaacagaaggcattgtgctggatattggtgatactagtacagagggcacggagcactacggtgagggaggtgtttctactgccgtctcggtggtgaccgtggacgatgttgcagagacagtttccagtaggagtccagcagtctcagtcatcggcgatgacatgactagtgtcaagagtaggccagatgctgacagctccgatcaaacaactggctacgacgcgctaaggagcaaggaatttcgggagaaagagtgtgtgaaaacagaggagagcaaaaccatggacgacaaggtgcctacagagagcacgccaccaccacggatcattcaagtttctagttcgccagcgccagacggtcagagcagggtagaagacgaagcagccgtggggacggtgctggaaggagcggcgaatgacaccgacgatcttgccacacgcgcggtggtggttgctttgcaatcgagcatttctgctggtgaaagcgagccgccgtcagcgagtgaccgtgttgagtacaagccggcgaacgaaggatttaggaggaatgcgatagctgaggacacggacaactacacggaggaacagatgagggagcagcttgatgccctaagaacaataaccgggtaccgtcccacgccgtctttgactctggaagccgagctcgtgggtctctatgtattcgtgggcgtggaaccccctgtcggctccggctccagggaagactccgacctgagtgatctcagcgcaaaactcaggctcctgaaatcgatcataggcgtggagtaaagatctgaagcgggaactgatttaccaggagttctgtgcttgtgtataatgcataaggttcagcggtccagggttcatcccgcacgtgagctttgttacgctctgctggttttaatctcaaaatccatccatgtggactagagtggattgaggatgtttaaattcctagcaactcaaaaatctctcctgctccctctcaatcccctttgaccttcatggtgggacgacaggtagctgtgaactacgtatcctactctatatttttgtgtggaaaagacgttaacgaacgtgctgtatatggcctacttcgcactagtgatgcgaacaagggatggccatttgtg

SEQ ID NO: 3301 - DNA, 842 bp, Zea mays
  unsure (1)..(842): unsure at all n locations
  Clone ID: MRT4577_103010C.1
ggtacacctcgnaggtcggccattgagaaaaacaaaaaaggaaactcccatcccagatcaggattagccgaccacccgccgaaggccagagagaaatatctcatcttctctccaccggatcggttcaatcgagagcgagggagaaagggaggtggtgcgtcgaggggggccgagattttgccggtttggagccagataggggtatgagctgcttcgcgcaccgccgccgctccgacgtcgcccgccgccaggacggcctcctcgtcttcgtcttcttcctctcgattcccatacgtaccagtagttttaatttaagtagtagtaattgtagtagcaatctcttgtaaactgcgctcgcctttgcgtgttcgtggtccttttgcgctttctcgtccctctttctctcaatctctccttattcttctccttccacggcgaagccggcggctggtatggatcccaatggcctcaaaactggaggtattgaaatttcgttttatctctctgtttttatgatgtttacctctctttttgtgttctgtatgttccggatagaaagggggatttgtttttgtcccgatctgtttattatgagctcgtagatattttgttctcacctggttggctggttccgtatgaatctcgtcctgatctcaaataaataaatgaaaaaaatccaggccttttgctcccgaccatcgagaggcggtgcacgtcgcctccatccgtcattgtcatcggcggtggcatctcgggcgttgcagctgcccgtgccctctcaattcttcatttaaggtgactgttttgggatcgagagatcgtattggcgggcgcatcatact

SEQ ID NO: 3302 - DNA, 289 bp, Zea mays
  Clone ID: MRT4577_103011C.1
ggtcgacagcgccgagacattgtcatgttctgaggacggctctatgccacaggcagtgtttgactgcgtaactgggtgcgtagctgagtgcgagagaccctgcctgaggcagcccgcggcagccacgcgtctcggggccggaaaaagcggcccgatcgcaggcggggggtcgcaggcgccacgtgactgcgggcactgaaggcacctgaactgtgtacatgacgacaccatgttgtatatctattactgggggggtgaacataataacaggccgactggtgcatacata

SEQ ID NO: 3303 - DNA, 1621 bp, Zea mays
  unsure (1)..(1621): unsure at all n locations
  Clone ID: MRT4577_103012C.1
atcccagatacggattagccgaccacccgccgaaggccagagagaaatatctcatcttctctccccggatcggttcaatcgagagcgagggagaaagggaggtggtgcgtcgaggggggccgagattttgccggtttggagccagatagggccggcggctggtatggatcccaatggcctcaaaactggaggccttttgctcccgaccatcgagaggcggtgcacgtcgcctccatccgtcattgtcatcggcggtggcatctcgggcgttgcagctgcccgtgccctctccaattcttcatttaaggtgactgttttggaatcgagagatcgtattggcgggcgcattcatactgataactcgtttggatgcccaattgatatgggagcctcatggctacacggcgtgtgcaatgagaatccactggcaccattgataagctatcttgggctgaggttataccgcacaagcgatgataactcagttctgtatgatcatgatttagaaagctatgctctctttgataaggatggtaatcaggtcccaaaggagacagtcgataaagttggagaaacattcgagagaattcttgaagagacggtgaaagtgcgcgatgagcaggaacacgacatgccactgctacaggcaatttctattgtgtttgagaggcacccccatctaaagcttgaagggctagatgatcaggtcttacaatgggtgtgtctgccggcttgacccacgcgtccgtgcagatgcagatgaaatatctctgaagaactgggatcaggagcgtgttcttactggtggacatggactgatggtaaatgggtactatcctgttattgaagctcttgctcaaggtcttgacatcaggcttaaccaaaggtttgtttttccgcactgtcttatattgctggatctggttgccaacttgtagcattgtactcatagtcccatggaagttttagttgggtggacacagcactagcaaatactttcaaagtattcatttatcacaggacaacttatttaaatgagcaaatacattcaaaatatttatttatttttacttcattgtcgattgataaataaatttgcccactttatttgaatgagaaaatactttcagagtatttatttatcactggataatgaagtaaaaataattggaactgtggtagttcttttcaaagtttcaagacagaaaggagtataaggcaactntgaaaggaaccaccacagtgggatttatttttacttcattatatatccagtgacaaataaatctgctcacgtgaatgaatgatgatgggcttcagggtcaccgaaattacccgccagcacaatggagtcaagggcactactgaagatggcacaagctacttggccgacgcctgcataatctcagtgccactcggcgtgctcaaggcgaacgtaataaagttcgagcctgagctgccccagtggaagagctccgccatcgccgacctcggcgtgggcaccgagaacaagatcgccatgcacttcgacagggtcttttggcccaacgtcgaggtgctgggaatggtcgggccgacgcccaaagcctgtgggtacttcctgatcctgcacaaagccacc

SEQ ID NO: 3304 - DNA, 604 bp, Zea mays
  unsure (1)..(604): unsure at all n locations
  Clone ID: MRT4577_103014C.1
natcnatctgatctgcaggagcgtgcccttttttgtggtcttggactgatggtcaatggctactatcctgntattgaagctcttgctcaaggtcttgacatcaggcttaaccaaaggtttgtttttccgcactgtcttatattgctggatctggttgccaacttgtagcattgtactcatagtcccatggaagttttagttgggtggacacagcactagcaaatactttcaaagtatttatttatttttacttcattgtcgattgataaataaatttgcccactttatttgaatgagaaaatactttcagagtatttatttatcactggataatgaagtaaaaataattggaactgtggtagttcttttcaaagtttcaagacagaaaggagtataaggcaactttgaaaggaacgaccacagttccatttatttttacttcattatatatccagtgacaaataaatctgctcacttgaatgaatgatgatggtcttcagggtcaccgaaattacccgccagcacaatggagtcaaggtcactactgaagatggcacaagctacttggccgacgcctgcataatctcagtgccactcggcgtgc

SEQ ID NO: 3305 - DNA, 348 bp, Zea mays
  Clone ID: MRT4577_103015C.1
atcaactcgcaattccgcattcgttccactcctgagcactttctcctcgtccccgacaagccaatcgaaggcgagatacggccatggactccaccggtaccggagcagggggtaaggggaacaacggagcgtccgtgcgcaaggtctgcgcgccaaggaagaagtcggtgtcgaggtccctgaaggtcggggtcccggttcccggcgggcggatcgggcggtactttaaaaaaggtcgcttcgcgcaacggggtgggaaccggggcccccttttacttcgcggttgtctcccataacctctccgtgaaggtctgggagctcgttgttaatgttgccgggggcaccaga

SEQ ID NO: 3306 - DNA, 323 bp, Zea mays
  Clone ID: MRT4577_103016C.1
aggccatgccgatcagtcagcaggtctacatgtagatgttgctctccatactccgcaaataagaaatataggtcgtgcagggactgaagtattacagctattttgccttaccagctaaaatgaccatgaattgttggcatacagaccgattcttcttgagagcactcggtgatatcgcaggggccaacccttccccgcttcagatgcatgctgaacctggaatcttgactacgatgataggcccacgcggggctcatggttcccagacaggagtcttcaaagcggttgctgccccctgccaaaccatagtataggattatgga

SEQ ID NO: 3307 - DNA, 606 bp, Zea mays
  unsure (1)..(606): unsure at all n locations
  Clone ID: MRT4577_103017C.1
gtaccctcggagcctgccgggagttccccgctgctagcctcatcgccgtcgccacggcaatggtcaccgccaccgccacggtctcttgctcttatccacagctccggtatcgcccctctcctcgatgccggcgccacggccccgcagcggccaccgtggccgccttggcgacgccgcggtcggagcaggacatcgtcatcgtcggcgcgggcgtcgcgggactggccacggcggtggcgctgcggcggctcggcgtgggcgccgccgtgctggagcagggcgacgccctgcgcgcgggcggcacgtccctgacgctgttcaagaacgggtggcgcgtgctggacgccatcggcgtcgccgacgagctccgccccaagtacctccgcatccaggggatgaggatgaggtcgccggggcgggatctgcgcgagttctccttcgacgaggaagctcccgggcaggaggtacgcgcggtggagaggagagcgcttntcgagacgcttgcttctaagctgccaccaggcgccatatcgttctcgtngtagctgtaatttttctttttttttgggcgtgcaggcaccctgctcgaactggtagacggttggc

SEQ ID NO: 3308 - DNA, 515 bp, Zea mays
  Clone ID: MRT4577_103018C.1
ccggccgggaccggaagcggggcaagacagggctacagcctacacgagcacggggaccggggaggagaggaggaaccgaagcggaaaagaagatcaaaaaatcggggagaaaccagaactggagagaagaaaataaataaatttatggccaaaccctagccgagacccgccccgcttgcgctctccgccgagcgccccaccccctctccgtccgcgatgcgccgggcgaagccgccgccgcagcagccctcgccgtcgccggagattcggtaccgcggcgtgcggaggcggccgtcggggcgctacgccgccgagatccgggacccggccaagaagaccccgatctggctcggcacctacgactgcgccgaggccgccgcgcacgcctacgacgccgctgcccgatctctccgcgggcccaccgcccgcaccaacttccccagcgctgcggtccgtgcgccgcggcacagggctccctccgcctccgccgcagctcccacggcgccggcggccgc

SEQ ID NO: 3309 - DNA, 163 bp, Zea mays
  Clone ID: MRT4577_103019C.1
tcgtttttttttactttttttcggtgacatcattcttggggaggacaaaggagttacggaggaatgtgtgacggacttgaaggagcaacagactaccagtgatggaggccattcttgggtatatgctgctgtagaagatcgatggtggtttgtttcaactggt

SEQ ID NO: 3310 - DNA, 540 bp, Zea mays
  Clone ID: MRT4577_10301C.1
gatcaatgcgattcgttaatgaggaatttacaactgttttacattatctcaacctacaacatttgacaaccaatcatcacagctctgcttcaaaatgttgagcacagctgaacccgacagatctgacgaagaaccgggttacatctctagacgaatcctctcaaaattacaactaaatcgttacatcgcaattcctcagccatcaacagcacaacaagaagacaagaaccaacagaagatcgggacaaagaatatgggggaggggaatacaactgcgggaagcgcgagaggcgcatcagaggaaaccgaggaggacggcggcgccgagcacgaagagccagacgatgtggacgagcagcagcgcctggcccgagacgggcgcggagccggcgccgacctcgcagtagccgcgccgcgccacgcgggcgcccgcgcatgccgcctcggggcagccgcaccagtacgtgaccccgtcggcgccgcagaccgggtccggccggaagcaccgcaccgggcacagcgggacgtcgccgtccccgt

SEQ ID NO: 3311 - DNA, 397 bp, Zea mays
  Clone ID: MRT4577_103020C.1
cgacgggcacaagcttttttttttttatttttttttttttttatttttttttttttttttttttttttttttttttttttttttttttttggggggaacaaaaggtttgttttttcccaccaaatacccaacaggatgggcttcccccccccacccgaccaaatgaccaataatcccccatttaatacccccccccttatataaaaaacccatgttgggggccgggcctaccagcaacccgaaaccaaggaaccaaaaaaaaatcaaccggttgcaaaaaccaaaactggtggccacccccaatttaccccccccagccccaaacccttgtccctgggcccgacccccccaaaggggaaattcaacacaactgggggccctaacaggggaaaccaac

SEQ ID NO: 3312 - DNA, 845 bp, Zea mays
  Clone ID: MRT4577_103021C.1
gggtacttggccacctcgcggggactcctcagttccttcgctcctctgtaacccggggcggccgacgaggccgggaccaccgacggcgacgatgggcggcggcgagggcaagtccaagaaacgccgctcttctacctcctcagcggatgaagaagggggggaacggaagaggcgggacaagaaggagagcaagaggaggagccgagacgacagggaggatgacgatgacagacacaagaagaaggggaaacacatcgacaggaacaaaggaaaagagagagattcgaaggataggcattccaaggagaagacgagcaagagaaaagacaaggacgctgccttcaaagaaatatccaaggatgactactttgcaaagaacaacgagttcgctacctggttgaaggaggaaaagggcaaatatttctcagatttgtcttcagagtctgctcgtgatcttttcttgaagtttgtgaaacaatggaacaaaggcaagctgccatcacaatactatgaggggattacgagtggcccacgatcagcgcacaattggaacatcaaagcatgatacgttttctggttaatcgggtccttcggcttgagatgttttttgctttcctggcgagatttttctaatagttgcatctagcaactgcttttaatattctgggttgttgtatttaagctgatgttcagaatgtctgtctaagcaggagggtagatcgtgggtctctctagtatccagtgtttaacatcaacgctacttttccattgatcactactgtttgatcctacaatgagcaaacatattgtttctaaaaaaaaaaaaacaaaaaaaaacggcaata

SEQ ID NO: 3313 - DNA, 263 bp, Zea mays
  Clone ID: MRT4577_103022C.1
tgttgctgtggagaacaagaaccaactttcttcttttttcccccaaaagaattactgttaaaaaaatgttcagcccttaaaggggtttcagcagcccctatagtagggcgccccgccacaaatttcagcagcttacttggtcaccaacgatccacaaatttaacaaccgcatttattgccaatcaatggatcgtcagctaggggggggctgccccttttgcaaacgcttggtccgacccctttggtttcccctttaaattttt

SEQ ID NO: 3314 - DNA, 722 bp, Zea mays
  Clone ID: MRT4577_103023C.1
acctcgagccggccgggaaaaattatgggctttacacttgggcccaacacgaggctcccggactcctcagttccttcgctcctctgtaacccggggcggccgacgaggccgggaccaccgacggcgacgatgggcggcggcgagggcaagtccaagaaacgccgctcttctacctcctcaggtacccagccacccagggatacctatcgtatcccctatttggttgaatccgtcgtgtcgttttgctgcggaccatcgatttctttcttccttggtttagcggaggaagaagggggggaacggaagaggcgggacaagaaggagagcaagaggaggagccgagacgacagggaggatgacgatgacagacacaagaagaaggggaaacacatcgacaggaacaaaggaaaagagagagattcgaaggataggcattccaaggagaagacgagcaagagaaaagacaaggacgctgccttcaaagaaatatccaaggatgactactttgcaaagaacaacgagttcgctacctggttgaaggaggaaaagggcaaatatttctcagatttgtcttcagagtctgctcgtgatcttttcttgaagtttgtgaaacaatgggacaaagggcagctgccatcacaatactatgaggggattacgagtgggccacgatcagcgcacaattgggacatcaaagcatgatacgttttctggttaatcgg

SEQ ID NO: 3315 - DNA, 701 bp, Zea mays
  unsure (1)..(701): unsure at all n locations
  Clone ID: MRT4577_103024C.1
cgctgctgctcgccccctcataacatatataaccggagctagaagcttattactgtactcggattagcatttgagcttaaggctcgattcgtgaggagtanagctagcaagaagctccaatagtcgagatcgaacgaacacggaacacatggccaacttggctgctcagatcaaggacaagttcctcggcctcgtcgaccgtgtcaccgacgccgccgccggatttggccgcgctgccggaggcaaggacgacgacgtacaggaccccactactactaagctgcacctgcacgccgtccagcgtgctgaggttattattagatcgcgaggaggagaacccgtcgtggacacaggatcgactgcgggggccaattaacaatgccgcccgtttttatagattgttgcgcgtgtgccatggaagttcatatagcagatagcccagcagaatgcaatggcacttgctagctagtgcctctgttctacttgcaaaacatttctcttattatttgtagctggtgcatgtcagcgggtatatctatcttgcagttctatatattatgttcctttcagtgggctctctagtctagctccctgatgttattaggcaaggctctttttgttgcaagttgtaatatgttatagagctctctgctccaatactctaaataaaaaaagtttgtcgaaaaaaaaaaaaaaaaaaa

SEQ ID NO: 3316 - DNA, 355 bp, Zea mays
  Clone ID: MRT4577_103025C.1
ggacgatctggcgacagatgcatatgggtgtggaagcaagccaacgtgcccacggtacagttaatgtcagcgccactgccactgccacctatggtcttacagcagcctgtggttcctatccaaccgccatgcttcctatggatccaaccgagctaacgtgagatacgggcacgctactatcctaatcggaaaatctagtgggatcactatcgctgacaggtactgatggagccacccagacgataagcgcgtcgaccaatacggatccaattacaaagaaagcgaaaaggatagtgacatgcacaccacatgctgctgtgctagtgcgtcctacatcgataattacgtcgctgat

SEQ ID NO: 3317 - DNA, 396 bp, Zea mays
  Clone ID: MRT4577_103026C.1
tctggctccttccagttcccaccagaggggaaaggatcgctttctccaagataggcccggtgtcttccgttgcccctcttgggcttggcttggcactccaaggcacacccccgtcggccccggcgaacattgtgcctctattgaactccactggtgaggtcgcttgcttttcaaatgcgatccattaccgttttttgttatgggggccccttttttggaagctatatttttgattttgggtgattttacatctttatcccccttttaaaaggttggatgggaggccaatcctgtcccccacgtttggcatcttattgttccattcggtggcctcaaattttttgcttccttgggttccgattggatcttttcttgcaaaggattttggtccctttt

SEQ ID NO: 3318 - DNA, 291 bp, Zea mays
  Clone ID: MRT4577_103027C.1
gagcagcgaatgattttttgaacgggcttctaaatccgaatgggggctcaatcaaaggtcacgggttacaacaggggcccctgaaacaaaatagaaactcccttgcccttttttcggggcatttaaggggttttttttccctttataaaagtctacaaaaaagggattttttttatgcccatcccggaaccaaagggaaaaagggttgaccacgggttttggggggtggcttaaaaaaaggaagttttgttaggttttacttagggccatgccctttccaaccggggttgg

SEQ ID NO: 3319 - DNA, 313 bp, Zea mays
  Clone ID: MRT4577_103028C.1
aaaaaaaaaaaaaaaaaaaaaaaaaaaaaagaataaaaaaaaaaaaaaaaaaaaaaaaataaaagtaaaattacaaaggaaaaaaaaaaaaaactcctccactttatccaatcctactttccctacccttccatccaaccttttttctcttctttaacttcccctcaattcacttcactgtccttcattatacaacttcttacctggcaaaaccttttctttacccaatttaacctcctttcatctcatccccctttccccatctttcttattcccaaacatccccgaaccgacctccctttccaaccttatc

SEQ ID NO: 3320 - DNA, 567 bp, Zea mays
  Clone ID: MRT4577_103029C.1
gcactaaacatgtctgatctttgaacactatattaatggagctgtgcaacagctgaacagcacgcgataagacccgcgaactttcgagaaacttgagccgtgcagcacaggcatcatgaaaaatctgggctattcgacccacaagaaaaggcattggatcactaaacattgagaaccaaattcggatccgaccggtgcggaaagacaaacacatgtcttaaggtcagtgacttgtgctcttattcctgctcttcatgctgggccacaagcttctatatgaactccctgcgaacaccttagaagacattgtcccgagatgaatcactgccaccatgcccattattcagtaccgaaacagactggcaaagggctaacgcaacagattcaggagggcatctattttcaccaaacttgctgcaaaccaacataagtgcctttgacagcactgatgctatacaccgagcttgtaggaacattgctatctgagtaggtgaggatgcactccgtggagataattgtaacaaacttggtagctggatacctagtagccaattcttccaaacaata

SEQ ID NO: 3321 - DNA, 461 bp, Zea mays
  Clone ID: MRT4577_10302C.1
gggaaggaccaaaatccggaaaaacccatcaaaaaaattaaaaaatcgcaagggcccccttgaagggacaaaaggcgatttattaacaaaagttcagcacaaaaaaaaatcccaccaattgaaataaaaccatttttatttctttggataacaaacatttaaaaaggcattataaacactgctccagggaaaggggcgggaaaaaacaaagggggcaaaacccccgcaaaaaaggcaacatggcaaagggtgaccccaaaaaaaaatttgaaacacttgcttttgagggacaaaattttcccacaggggcaaaaaaactcaaaggcagcctttttttaaaaatttttttgggagggcattgttcaacgggaaaaggggccccagtccccaacaataaaaccaagtccattatacccctcaaatatataccacaaacctagccttcacgggttttttttttt

SEQ ID NO: 3322 - DNA, 399 bp, Zea mays
  Clone ID: MRT4577_103030C.1
ctcactgacaacaattctgttgtggtgacactgaacttatacatgacacaactcaaagtgacgcctgctgatctggagctactagcgaataactgaaaaccatcgatgtatccgaatatggatgactgtgaactctcaccatctgagtgggctactccaaacctgcaatgcattgcatgaattagccggatgtgccttctgcgaaccaggagagcacaccacacacgaaaagggtgattagcgaccaacgctatgcttctgaagaggacttaccttcatgggtaaaaacgagatgccggttatacttaccaatggcacaatgcttagaacaccggacttggcaatcactattctcaccactgaaaaccacatggagcttattgctaaatgccccaacct

SEQ ID NO: 3323 - DNA, 368 bp, Zea mays
  Clone ID: MRT4577_103031C.1
cgtccgagtcaacctgcggcagtctacgctcctgcagatgtgcatgaatacatgtgacactgcggatggcgtgttcacagattgacggatcctagatctagattaagagctgggtatgcctcttagctgatgtaagcactctcgatagacacttcatctttactggcgcggacactgtccgatgatctgagactttaccgaacaatttgctggactcaaccgatactgtgtccacctgaaatctggtgtctatgatgacttgacagagcatgcatgatgacacagacagacagtgtctcatatactacaccgctgactacacagatcaactaatgttcaaccttcatatacgcatcactggtctggac

SEQ ID NO: 3324 - DNA, 547 bp, Zea mays
  Clone ID: MRT4577_103032C.1
gacttctttatctcattctttgctcctcttcaaaggttcgcagaatggagatgagactatatctctccctcgaaaccctagtatagccactgccttggccgcacgctaggaatgcgaagatatgggcgccgagaaggacgccgctgcacgccgctagagtctccgcgcccgctgtgccggcaaggagctcctctgcacccccgacggggccccaacccctgccacccacagagaacatcagaatgggagaccatgacatggcagaagagccagaattacgaggtcatcatgatagacctggtgaggctgctacaaaggatgggacgcccactgaggatgccgaagagggtgaacatgatgctgagcttccagccgtgaagttcagaaactaccttcgccaagatcaacaacttcgaggaggtaagatggctccagtgtctcttcccaagtttgaagacccaattagtgtggaaaatgcatatccaaagaaagtggagaagctttgtggaacatatacatcccagaacccgaattgggatcttgaact

SEQ ID NO: 3325 - DNA, 414 bp, Zea mays
  Clone ID: MRT4577_103033C.1
cttggccggcctccacaaaaccatgatccaaaaaacccagggtggattcaaaaaaggattttccgataaattttccactggttggtaaaaaattctagggcctatcaaaataaagtttacaagagtaattttaccactgatttttaacaatctaagctttttgtcatcattgttaacatcatttggggcaccttcttggggtgccccgctttactccaaaatggaattcccgaaaatttttttttaactattactcccttacattttttggccattcttttttggcccctgggcttttcccgggggggcaaaaaaaaccacctggaaaaaaaccacctcttaaaggctttttatttaaaggttccgaaactgtttggggggaaaccgttttttcacaacaatttttttttaaaa

SEQ ID NO: 3326 - DNA, 329 bp, Zea mays
  unsure (1)..(329): unsure at all n locations
  Clone ID: MRT4577_103034C.1
aaagaatccttatggttttttttttttttttttatttgaaacagtgtcctagctactgatctcctttcggttcaaaatagaatagtttaaactgtttattaaaaaaaaaattggagtttttgttgcctaatcaataagtctgcctagaaaacttaaatttcgcaggggcgaagtcataggcacggtgaaggctgagaggtgtgcctattcaancggacaaatggtagggtaaaggtagaggtcgggccactgttgatccaagctcatgtttacgctgnnggttgatagccangtggagggcaagtcncggaggaataacaacaacagct

SEQ ID NO: 3327 - DNA, 228 bp, Zea mays
  Clone ID: MRT4577_103035C.1
ggaaagatctagggattagccgatcgcggggccatggtttccgactatgctcaccaatccgagtcaagacttttttttgccacattgcgcgggacttaacattgaggatcacaggggattcaggctatatgcaaattttcttggacgacttgtaattacgttccttcacccttttcataaacagaaatagactgtcttctgcctttgtacaggaaaaaaccactactt

SEQ ID NO: 3328 - DNA, 477 bp, Zea mays
  Clone ID: MRT4577_103036C.1
gacatgacgaagtcgagcggcagccatgtgatgggcgtccccgtcacctccacggcgtacgccatcgaggacgcgacgagggaccggccgccggcggcggctaagaaggatggagaagatcgccttgccgtctcgctgacgcacccgagcccgtacacttccttcggctacaagcagggtcacgtgatccactggatgaacaagctgggaagacgagctcagagcttcagggaccacgtgacactgggtcccaagctgtcggagacggtgcgggggaagctcagcctgggcgcgaggatcctgcaggccggcggcgtggagcgcgcgttccggcgcgccttctcggccgagaaaggcgagcggctggtcaaggccctccagtgctacctctacaccaccggcgggcccatcgccgggatgctcttcgtctccacccgcaggatcgccttccgcagcgaccgctcgctcgccgtcacc

SEQ ID NO: 3329 - DNA, 397 bp, Zea mays
  Clone ID: MRT4577_103037C.1
agcaaaccccccatttgccaccaacccctacgagcggagatgaccggcacggtgtctaagctggcaagcgccccgtccggcggttccgtcgctcctgccgaagtccctccggaccgacgccctcgcctttgtcccctccgcgcgccgggtccgcattttcgtcgccgggcgagccataaaccccatcattgcgataagcttcgccaatgaaggaattggtgctccgaccaagaggactgctcttcatgatctctacgaactccatggcctgtccccgtggttcgtcaacctattgccgcctgtaacagacttgctggccattattatcagcggcgtccgtggagtcaccatcaacccaacgatttttcaaaaagacatttcattcgttcaacgcata

SEQ ID NO: 3330 - DNA, 272 bp, Zea mays
  Clone ID: MRT4577_103038C.1
ggggtcacttggggaggaaataagtcaactatcttacctccaataccaacagatgttctgttcagcacctacacagtctcatctgggtttcatccataaaggggggttttttttattttaataaattacatccctcacagctctttccttgattgcccgcttctctgagccaatgtaacttctacaagcttacaccttacgcgccctattttaatcaaatcatcattccactttgccttttctatggcgttaacctggaactgatttaaaat

SEQ ID NO: 3331 - DNA, 451 bp, Zea mays
  Clone ID: MRT4577_103039C.1
gccccaaaaccccaaatggtttaaaaaaacccgggggggctccacgataataattttggcaaaacaaaggaaaccgcccgggaagcttttcccccttgctttaccctttgggaaaacaaattttttttgtacccaaacccgggcaaaattgtcccctaaataaaagggttcctgccccccccgggggtttttttttccccttttttttaggggcggaaccaaaaaaaaaccccctaaacccttccaaaaggtccctactttgaaaaccaggtccttacccctggaaacagggaccccccccctgcctttgggggcaaaacggggggggaccttccctaaattttccccccctcccaagttggggataaaaaagggggggagccccccttggtgaaagccccccccctccacctcagggtcaaagcaaccgatccagggaaaaaatttccct

SEQ ID NO: 3332 - DNA, 137 bp, Zea mays
  Clone ID: MRT4577_10303C.1
ttaccacatgtgcaaaacatcatttacaaaggagcattttagcgaggacactccctagctaaggcgagtgcacaattctcgggtacaaccatacaataaacgtgtgtgggaaaacccttacctttatttttttttaa

SEQ ID NO: 3333 - DNA, 574 bp, Zea mays
  Clone ID: MRT4577_103040C.1
ctagtgttccaacaggggaggccaaaaattatacataaaaatgcttcttggactatatctaagagcaaatacaaagaagacaccaccaaagaggtggcagcggctaaacgctgctttgtttgccaaaacctgttaccagaatggtatcaattgtgggaaaacccaaaggttgacccctacaggatccaacaggctaataacaacgtggaactaactgacctttgatcacaactaaggtacgtacaacattacaaccagcctctattgacatgcaatggacacttatggtggcatctgattggaaacaaaacatgaaggcacaagatctacaacaacttgaggtaacaaacctttgtgggtacgcagaacgacagtagctgaatggattcaaccaactaggtgaataaaactctgattcatagcagctacaacgacaactaccattaaaccaggtacgctgctgactagccgcaggaattgcttgcatacaaccaactggcagcagtgaactgtgctgctgatccacagaatgcaccactgctaccattcaaacagctatctggagtgagccctg

SEQ ID NO: 3334 - DNA, 519 bp, Zea mays
  Clone ID: MRT4577_103041C.1
ataattgaaaagacctccattagcgaaggacgaaaaaatcatattctaatgcggcaaccgtgtgatcgaccgtgctgatatggactctgctctatctctgtttaacaggtggccttataactgccctaccatggatgaacacacactccccacccttcagctcgtaccaacacgaactgataacggcaggacaaaaacaagcttacttcctagactttctaaccttttaagcattccccgcgaactggggaaaccggaaaccatatagcatgaacaaaaaatgataagtaaatactgagcacataaatcaatactgaacgcttagcataactggtgggttttataactctaccgttacctacaccccaacatggactgtggataactgctagataagtcctgaaatactatcttttttccaattgttctccgaaccctgctgacgccacacccctttaccggcctgacgcttcccttgtgcaccgacagttatgcctgccccctgagccactctaggta

SEQ ID NO: 3335 - DNA, 839 bp, Zea mays
  Clone ID: MRT4577_103042C.1
tggatcctccgccactccgctctcccaaagttcttgtttcgcaaaccacacgaagaaaaaagcaaaggagatggcgaccacgaattggacgctccccgaccaccccacgctccccaaggggaagacggtggccgtcgtcgtgctcgacggatggggcgaggccagccccgaccagtacaactgcatccatgtcgcccagacgcccgtcatggattcgctcaagaatggtgctcctgagaagtggagactagtgaaggctcatggaactgctgttggtctcccaagtgacgacgacatgggcaacagtgaagttggccacaatgctcttggagctggccgaatctttgctcaaggtgcgaagcttgttgatgctgctcttgcttccgggaagatttgggaagacgaggggttcaattacatcaaggaatcttttgataagggtactctgcaccttattggtttgttgagtgatggaggcgttcactcccggctagaccaagtgcagttgattgtgaaaggtgccagtgagaggggagcaaaaagaattcgccttcacattcttactgatgggcgtgatgttttggatggcagtagtgttggttttgtagagacaattgagaaagatcttgctcagcttcgtgagcagggtgttgatgcacggattgcatctggtggtggaaggatgtatgttaccatggaccgctacgagaatgactggagtgtggtcaagcgtgggtgggatgcccaggtacttggagaaacacacacaaattccaaatgcacttgaagctgtggagactctaagagcagagcccaagcccaatgatcagtatttgcct

SEQ ID NO: 3336 - DNA, 2246 bp, Zea mays
  Clone ID: MRT4577_103043C.1
cattgggtacctcgaggccggccgggacccattgtcatctctagtcctgctcgcctgccccatccgccgcgccgcgagccgcctctccttcctcggcgtgttcctggcttgcctttgccgcggtaagtgaggttggaaataagcttagaacccgctacgaattccttctcatcttccttcgattccgtgttcttttgcttttttctctctcttgacaaaattatgccccgtccgattgccgagcgacgctgttggtgatagtcgtttcattccccaatctagctctagaagcagtggcatgagggcggggcggccgaagatcggcgaccaagcgaccagcgacgtggtagtgcggctacggacgccggagggccgcgacgagtggctctactgccactccgcggtcctcgccgccggcagcacctacttcgccgaccgcctctccgacgcctggccgacgtgccagatcctcggctcgcgctactgcgtcgaggtctactgccaggagctggacctgagctcctatgtcacagcgctccggctcctatacgccatcgagccctgctcgcatttcggcgtccgcggcgcgctgggcgtgctccaggcggccgtgcaccttggatgcgggcagatcgccgccgcctgcgccggctacattgagtccgccccctgggaggaggccgacgaggaggagattctgaggaccgtccccggcctcggcccgcagtacgagtgcatcctcgcgcgtctccggccaatcgatccggctccggtgacgagcatattcctttcggcgttccggcacgcgacgctctcgtcggcggctgggccagcgcgggagctcaagtccgccgctcaggagcagctggagtacatgctcaccgaagatgacgacgccccattgatagcccttgacaacgacactgtgaagtctcaagtgaaggattgtgccactgctttactaagccagttcagtgctttcatgagctctatcctgacgaaacaaaaggaggcgcctcctcttgatggtgagcacggccagcttcagcaggagttacagttttttctttgtgatatctcttgggtctctcaggtcctgagcaagctcgagatgatgaagtgcattgttgtctactgggtcggagtgtccactgatatggtagaaactgttgacgcggtatgcactggggatgactgtctgaagaccaggctgaaggtggtagaggtgtctgcaaaagtcctggaggctgttgcatttggcaatgtcatccttccagccgaaaaacgccgtcatatggtgaatttgtggattcgattcgcaagggtgacaaaatctttggctgatcagggcgatcaggatggtgacggcgaagctgagacaccaaaggaaaacctggacaatgaggtctggcagggcctggagtctgcaattgtttcgattgtgctgacactgccgtcaaatagtcaagctgagattttgtcagagtggcttcagtcgaaacatgttagatatcctgaccttacagaggcacttgaagcctggtgttatagatcgaaggttgctaaaagaaggctctctttcttgagcgacattggccaggtatcttgattcctgaccaattaacaattaaccgaagcggacctgagatatctgaattgaacaagtttgcatgctttctgctggggaaaatcatcaggttctgtgatcaccagcataaattttggaatttggaggcagtgcagaaaagggctcttgccaatattcgtatccatgacatgaatcctgataacaagtagccgaagcggggagggcctgttcggttgtttgggattggagccccgaattaattcctagccgaattacttatctaatttatatagattttaataagctggaatgaatcctggcttattccggtacaaccgaacgggcccttagtaaattacccagagtttgtctctatagattgcaggctaactttaatctgaagcgaaacggcctgtgattaatagggtgtcatttcttgcttgtggaaaagaagtttgtaatgagtgatcagttaacattgtctttgagaaaagactcaagggatgcgacatattcacttaccgaatgtaaatcatgattcatgagcagttgacatgcatctatacgtgtgtcctttgtttcgtgagggtaactcgcttcccacgctggacgcagagcttttataacagggcaactgttattccgggaaaatcctatg

SEQ ID NO: 3337 - DNA, 110 bp, Zea mays
  Clone ID: MRT4577_103044C.1
tgtagttagtgcctagtaggaatgatttatagagcagagaacatccattcagagtaggtactagttcagggttttaattggtagcgacatcaggtcctatgcaaggtact

SEQ ID NO: 3338 - DNA, 823 bp, Zea mays
  Clone ID: MRT4577_103045C.1
tttttacaaagatagatgctgttgatgcaagcactgtgaagcgtgttgcaaacgctttcatcttggatcggtcccatcgcagcaatagcaacatcctgatcaaagatgaagctattgctgcgatgggaccgatccaaggacttccagaccacaactggttcagacgccggacctacatgctccgttactaagatcaatctgccggtgtaccatgtttacggtgtgcaaggacaaagataaaatttgcctctttcggcgtcagtatatcaaggcctcagcactgcacatcgcttgctgcgacagaggtttttttcttcttcagaatttgttttctttcttgtcttgctcaaaatccacaaatctgccaataatgataggcaggttcgactgacgtggctgacttgggtggtcagcctatgttatttttcttacaatgagtcatgacccttaccgttccatcttttgctggaaggtttttactttggcaaataatttgatgtggctcgttatatgtaaagatggtacagttttagcttgtgcaattttttttataccttgttggaaggttattacaaagagcaggtaactgttgcgagaactaagcagtttgtactgctcccaacccttgtaaaccaagtgacgtgcacgttccccacttgcaactggccgacggacgtggtgtacatgcgggatccaatggcctcctcgccatgactcgactcttcacttgtatatatatatgatgggaatgcaataaagaaacagtgccctcgcgttcaataaaaaaaaaaaaaaaaaaaaaaaaaaaaaaaaccccaacaac

SEQ ID NO: 3339 - DNA, 475 bp, Zea mays
  Clone ID: MRT4577_103046C.1
tcgagttttttttttttttttttttttttttttttttttttttttttttttttttttttttttttttttttttttgggaaaaaaaaaggggttaacggggggggcgggaaaaacatgggttacataataccgggggtattatacccccagtgggggggggacgcaaacaaaagcatttgggggtttgtttttgggtgggggggcccccatggggggtgggttttaagggcctttcccccccccgttgggaaaaggccggcgcgcacccttggaaaaattcctcaagggagaagttgtttgaaaaacccaaaccccaagtagttatttttatattggccaaacggaaaattacaccaggggcgaaaaaaagtcgccgttgcccttgtggtggaacctccacgggttgaagcaaaacgggttgggtcgccggttgctttttttaaatgactgaacaacgggggcgcctccgccgcgg

SEQ ID NO: 3340 - DNA, 281 bp, Zea mays
  Clone ID: MRT4577_103047C.1
taatgtagtggctattgctggagacgactattcaattattgcatcagacacgcgtttggttaatggatatcaaatttacactcgtaatcaatctaaactttttaaagtaactaacaacactgttttaggatctactggttgttggtgtgatgttgttactttcaatcgtattttagaaacacaagtcaaaatgtattcttatgatcataaccaagaaatgtcttgtcaagctgctgctcagcttatttcaattatgctctacaatcgacgatttttccctt

SEQ ID NO: 3341 - DNA, 854 bp, Zea mays
  Clone ID: MRT4577_103048C.1
aaaaaaatactggaaacaacacacgacacgaaacgaccatcacctctctagtggctactggctagtgcgaaaggaagatggcgactaagctcgcagcgctcgtcgtcttggccgcgttcctcgccgggccggcggcgtgcgacggcgccagcatttgcttcaacggctggctgaggctgcccacctacaacgcggcgctctgtcgccccaggccggacgttcagacgcggcagaggagacctgctccctcggggtcaggactcagctccggctattacaacaccaggtgccctagcgcggagaagatcgtcacggatgccgtgaagaaggccgtggatgcgaatcctggcattggtgcggggctcatccgtctcttcttccatgactgcttcgttcggggctgcgatggttccgtccttctcaacacgaccaactcgaagaacagcgacacggagagggaaggccctcccaaccagaacagcctccgagggttcgaggtgattgacgaggccaaggcggcgatcgaggctgcctgccccgacacagtctcatgtgctgacatcgtcgcctacgccgcccgcgacgcgtcctacttcctcagcgaccgcaagatcaacatcagaaaaggccggggcgggccgctacgacggccgcgagtcattctccaacgagacagaccagctgcccgggcccttctctaacctcacggcgcttcaggggagtttcgcggccaagggactcacctccgacgagatggtcacgctctccggggcgcacaccatgggccgcgccccgctgcttgttcttctccagccgtttctctgagatggactcggcattagccgccaaactca

SEQ ID NO: 3342 - DNA, 363 bp, Zea mays
  Clone ID: MRT4577_103049C.1
atggccaggagtggactggccacggcggccgagcgctcgggttgcttggcgggcggcacagagctcgctggacaaagtgctgggcttgagaggttaagtgaggtgcggagggagtatggccgaggcttgcctgctcttatagacgcggcgcggtgcacgggtgggcctagaccgacgtggccgcgcgggcgtgcacgactgggcgtgggaaccttcggattcgggatgaagctatacacgatatggatagcagggtcagaacgaaggctgaaccagcgccgaagctatgcacaagggagcttcggctcaggagcagaaaaaggaaccgacttaaggatgaaaaggctatctagttgccgatag

SEQ ID NO: 3343 - DNA, 394 bp, Zea mays
  Clone ID: MRT4577_10304C.1
tttctcttttttttttttttttttttttttttttgtgggtgtttttttttttttttttttttttttgtccctcgaaaccgccccatggtttatatttttttaaccccgggccccttttgggggggctgagccaaagaaagaaaatccctgcctggtgccgggtatcatccgcctgggtgcttgggggccttccggttgaaaaaaaggggggaaaggggctccttaaaaattcttgggcccctgggtcctgacccccaacttcccgttagcagggggaacgtgccctgggggggcccttcggggggcgctgggcatcacccggaacggcagcgacccccatgggggggcccccccggtgtgcccaacttggccccaggtgggctttaatttcggc

SEQ ID NO: 3344 - DNA, 618 bp, Zea mays
  Clone ID: MRT4577_103050C.1
accccggggaacccctgggtttggaataaattggccctaaaaaggcttcccaaccaattttttggggaaaaaaaagatggccggcagaaaaaaaaaaccccccggttttttttggggggggggggggaaaaaaaaggccccggggggggtggaaacggctttgtttcccccccccccccccacgtttttgggggggggtggaaaaactcggggccatgacccagggggggggggggggaaaccttttcccccttggggcgggcaaaaaaaatttttaacacaggctcgggggggaccccctttccctggggccgggggaaacccccccgttccttgggggaaacgggcagggttgggggcccaacaccggccagtggcccaaattggtcccccccgggccccccctggggggattctttccccagggggaaaacctcagttggtttttccggaacaacccgaaaaattggggggtttggttacccaacctttggaaccatgggcggaaaaattgggggataacccgggacaaacggagggggggcttaaaccggggaaacctgcccaagggaataaaaagccccaaatcctgccccggaaaaaccccggggtgggccc

SEQ ID NO: 3345 - DNA, 268 bp, Zea mays
  Clone ID: MRT4577_103051C.1
aagaaaaagatactctggggccggtaatcagcgaacagcaaaggccactgccaaccaacatgcaagtggacacacgacggcaagacccaaagactgtcgacaacctgcacagaagatacaagacggacaacaacattctcttgtcattaacacaccacacataacctgaggatgggggacaaaacgagcccgcttaatacaggaaaactcccgccacaagctagactgatcagacaaagtgccagggaacccacccgatggcaccaga

SEQ ID NO: 3346 - DNA, 456 bp, Zea mays
  unsure (1)..(456): unsure at all n locations
  Clone ID: MRT4577_103052C.1
aacaagnattttcccttttttctctggccttcctgtagcgtacaatatgtttatatatgtctgctctaactgaagataaaaaccaatctaatctaaacaataggaactattttagcctaaataataggaatagacttagtctaaacaataggaaaaatcttcaacagacctaatctctatggcttgtggtgatgatctaatgcacattttgcttgcagactcctaattgctcgtgcttcattatactcctattaatgactcgtttctttttttctagcagataggccgtgtatcctcttcagtcctgcaccaatagatttacaaaattcacgttcaacacccccgtcctcgctacgtcgttgggccagcatctaatagattagtaatttgctcgcgctctgcgcgagtctgtgaccggtacatttgtgttacacagttagcttgatgcgtttacac

SEQ ID NO: 3347 - DNA, 1346 bp, Zea mays
  Clone ID: MRT4577_103053C.1
aggaattcggcacgagggtctgctgagctctccaagctcgctgccaacgcgttcctggcacagaggatctcctctgtgaacgccatctccgccctctgcgaggccaccggccgcgaatgtgactgaggtggcttacgccgtgggcaaggacacgaggattggccccaagttcctgaacgccagtgttgggttcggtgggtcttgcttccagaaggacatcctgaacctggtgtacatctgcgagtgcaatggcctgcccgaggtggccaactactggaagcaggtgatcaagatcaacgactaccagaagagccggttcgtgaaccgcgtcgtgtcgtccatgttcaacaccgtcgccggcaagaagatcgccgtcctcggcttcgctttcaagaaggacaccggcgacaccagggagaccccggccatcgatgtctgcaagggcctgctgggtgataaggcccagatcagcatctacgacccccaggtgacggaggaccagatccagcgggacctggccatgaacaagttcgactgggaccacccgatgcacctgcagccgacgagcccgacggctgtgaagcaggtgagctgcgtgtgggacgcgtacgaggccaccaagggcgcccacgggctgtgcatcctgaccgagtgggacgagttcaagaccctggactaccagaagatcttcgacaacatgcagaagcccgccttcgtcttcgacggccgcaacatcgtcgaccccgagaagctgagggagatcggcttcatcgtctactccatcggcaagccgctcgacgcctggctcaaggacatgcccgcggtcgcctaatccccccctcacccatggattggattcggggaaggaagaggagaggagaggagctggttgaccgttcttcattacagtttgtttttgcaggctacgctaccgattttctcttgtgtcaggcataaaaaaaggttggacggcgctgctagtattccctgctgtttggtgttttcgtatcggaggacgtctgtagatgtacaattcctcaggccccttgtgttcggcttgaggaagtttccgttgtaccctggacctgctatagccggtttgattcttcaattgtattcctaaaagttactacacagtcgatatgttccttttcttttttgcatagtagcaatacctgtcccacatcagtcacagtaaacatgcgctgctgttaaggaaatgcgtgcagggcattttctttgataacggtgtaatctctctatttcccccttccactgtttcacatgaatcgtgaacggctcacgtgtatatggtttcgtccctgcctaagggtcggtttgcctgt

SEQ ID NO: 3348 - DNA, 1511 bp, Zea mays
  Clone ID: MRT4577_103054C.1
ctcaaggtggtgtacgcccactgggtgcccgaggcgaacatcatcaccaccaacctgtggtcggccgagctctccaagctggccgccaacgcgttcctggcgcagaggatctcgtccgtgaacgccatgtcggcgctgtgcgaggccaccggcgccaacgtgtcggaggtgtcgtacgccatcggcaaggactcgcggatcgggcccaagttcctgaacgccagcgtggggttcggcgggtcgtgcttccagaaggacatcctgaacctggtgtacatctgcgagtgcaacggcctgccggaggtggccaactactggaagcaggtgatcaagatcaacgactaccagaagagccggttcgtgaaccgggtggtgtcgtccatgttcaacacggtgtccggcaagaagatcgcggtgctcgggttcgcgttcaagaaggacacgggcgacacccgggagacgccggcgatcgacgtgtgcaagggcctggtgggcgacaaggcccaggtgagcatctacgacccgcaggtgacggaggagcagatccagcgggacctggccatgaacaagttcgactgggaccacccgatgcacctgcagccgaccagccccacggcggtgaagcaggtgagcgtggtgtgggacgcgtacgaggcctgcaagggcgcccacggcgtgtgcatcctgaccgagtgggacgagttcaagaccctggactaccagaagatcttcgacaacatgcagaagcccgccttcgtcttcgacggccgcaacatcttcgactccgagaagctgagggagatcggcttcatcgtctactccatcggcaagccgctcgacgcctggctcaaggacatgcccgcggtcgcctaatcccacccccctcacccatggattggattccgggaaggaagaggagagaagctggttgaccgttctttattacagtttgtttttgcaggctacgctaccgattttctcttgtgtcaggcataaaaaaaggttggacgggctgctagtattccctgctgtttggtgttttcgtatcggaggacgtctgtagatgtacaattcctcaggccccttgtgttcggcttgaggaagtttccgttgtaccctggacctgctatagccggttgattcttcaattgtattcctaaaagttactacacagtcgatatgttccttttcttttttgcatagtagcaatacctgtcccacatcagtcacagtaaacatgcgctgctgttaaggaaatgcgtgcagggcattttctttgataacggtgtaatctctctatttcccccttccactgtttcacatgaatcgtgaacggctcacgtgtatatggtttcgtacctgcctgaggtcggttgcctgtaccgaaatttggcttaagagtttttctgtttccactaggtcacgttagtctattcttctggtaaaagctggacagcttgatgagcctaattgtacgagcatcgggtgtgagtaaataatcccaaggtgca

SEQ ID NO: 3349 - DNA, 504 bp, Zea mays
  Clone ID: MRT4577_103055C.1
cccccaaaagattaacctttttccggggcggttttttgtttcccaaacatatgggagggcttgacctttggaaaaacataaaaaattggctccccttcccacaacaggaggagcttatgaatggaaattttcggggaaaaagggccaaccaaccgggaaaaaaaaggaacatatccctcccccttttttacccaaggggggcaaaccagggggggccttttttttttccaagccccccaggtagctgccaaaaaattcagttgccccagcattcatttttttagttttttggaaaacgggaatcaaacttcggggggcaaaaaaagccgcttttaattggcggggaacatgactccaaccctttccaaaactcaaacggggggggggaccaaaaaaagctcaggtttttttgaaagcatccacttttctccagttgggccaccaagcactatggcttttgttcctccaacaacacaggggcgggggccccaggcaaaacggggg

SEQ ID NO: 3350 - DNA, 342 bp, Zea mays
  Clone ID: MRT4577_103056C.1
ctctcacacactgttagtacaagagctgaggagtcatatcgagacctccagctgccaaacatggatcatatcgatcgagtacgactcggacctcctgaacagtgaaacacgaagatgtccgccattaaggcatggtcaacggccatgcttgccatctgtgtgctacatatgttggcccccacttacagttgccttgcccgagcccagtccatgccatctacttcactgatctatactataggccttaacatgacgcctctatgtaactgtaaacaggcttggaccttcgcccacgtaaaaagatagggccgtagcctcacacttatgctgccaaagatatga

SEQ ID NO: 3351 - DNA, 283 bp, Zea mays
  Clone ID: MRT4577_103057C.1
tccacgcgtcctggcgagcttccgatgttaccgccagctgaactcatgttccatcccggggcatgatggggagaattttctggtggccgcctgtccttctagaactgttaggccctgtttggaatcttagggggcgttttggacataagtttttccaaagttttttgaagaataatgcagtattctcaaaaactttagtattatataccaaaacttctttgacatactatctaaattctcttttttcaaaactaaaatattacaaattcttgctctcttttta

SEQ ID NO: 3352 - DNA, 550 bp, Zea mays
  Clone ID: MRT4577_103058C.1
ccggccgggaaatcagtacagacaagacgcatcctctctccttttatctcgccgtagctagaatctcctcaccgctatgacggaagtgtggcaatgatcgacccagcacaccgagcggacgaccttcgcaacaacacggcgtaagtgcatctgccaaacacatctgggcatggtagatacacgtctacagactcgcgagcaaaggacctgagatgcaaagactatatcattagggctactgacagtataactgcagacaacactgctccaccaacgggtgatgatcccgaaaatatgtcaaagataccgaccatggcaactcaattacccgccctcgatcttatggagtttccaccactgatatcatatgggactgctacaggcccctaccttaatctctccccaccaatacaacgtattgcggagaacaaggatgcagtcaacaacgttatctcaagtgaactactcctgagagggaagagattgttggtacgtcctcccacagaatcacgtgagttgcccataactgcctgcgctccaaggtatcctg

SEQ ID NO: 3353 - DNA, 182 bp, Zea mays
  Clone ID: MRT4577_103059C.1
tctctgcacctttcacagggacaaagggatgggggtctttctgcttggctggaggggcataaaagctcccaagcccaaaacaaaatgcccgcaaaaaccaaacgcagttcagcaagagccgagcctgaaccccagggacgggtccatcgcctagcctgtgtccggtatgcccactggggggc

SEQ ID NO: 3354 - DNA, 364 bp, Zea mays
  Clone ID: MRT4577_10305C.1
taaacttatcctttcaaccctaacgttattctactccgcttaccacccttttgctcacctggctggattcccctgactatgatgccgcattcacatcgttgcttcatgatctggcaatttccatgctatcccactgaatggccagtttataacactggccccagtccttgtctgccaatgttccaaaatgctagagaatggtgttcatagtgctaggaagcttcctgctgcaacgatgtactcatccaaacacctgcttctaccaatatatggatgattgctggatgtatggcccaattgattacccctttttggcaaaaataaatgtctttgaccatcaatacattatctttgactaatgtat

SEQ ID NO: 3355 - DNA, 845 bp, Zea mays
  unsure (1)..(845): unsure at all n locations
  Clone ID: MRT4577_103060C.1
tttttacattcaccccctagacacactctaagacacaacttaagacagtcattgtagatgccctaaccaccaactacaaaactagcattattataatatgcttcattttatacattttgtatatatattataatatgttcatttggtttataaatattgttaatctttctataaactcagtcgatcattaaagtgtttgatttaacgatgacaataaaaaacgatttactatagatacgtgaggaaagtataaaaaaatgttaggcgtgcacctatttattttttttacaaagaagtagtaggcacgtagacatccgcgacgcaccagggatttggggaactttttttctaaaaagatctttttttttgtaattctggattcctaaataataatctagatgtcatgaaaatttagatatcgctgagtttgtatacaaaagaggatgaaagggtatgtatgttttatggtttagataacggcggattcctctcgttacgacgactcaactcaacgtattgcacgtttatgttgattcgaacgatttttcgtagaagatggtcttagctatcgtatggaaaaataacaaaaaaaaaaccaagattcaaacccaggttcactacaagcacagcgtcatgccttaccacaagaacacacaattgtttcaatcatatataggagcgatattataaatatgtatantgtttggtaaccgaaaaatttaaaaaaacataactatatctgaataaatatatcatttaaataaggtgtactcatatagtatataaaaactatangcaggtacggaccactaactaatatttatatctataccacaatttaaaga

SEQ ID NO: 3356 - DNA, 417 bp, Zea mays
  unsure (1)..(417): unsure at all n locations
  Clone ID: MRT4577_103061C.1
cggcgcgcccttttttttttttnngcaaagaagagaaagcggtattccatcctgttagtatgatcgacctcctgaactcgcagatgcggacacagcaacacatcggttactataatactaagcctaatgaatatgcctaacactttgactctactgaacctacaaccacttgaccacggaaacagagaacaccgtgtaggtgataacccgagattattatcggacacaccgattaatacgccttaacgcgtccacgtagcacactctaaactttagctgcaccgaacgcgcagaagcgtcccatcccgatcatcaccggccatgggtcgctgagtctaccttcttaatcttgggcccggcgccggtgccacctacgttgccggtgccaccgacgggcacattctagctcatgcccgc

SEQ ID NO: 3357 - DNA, 227 bp, Zea mays
  Clone ID: MRT4577_103062C.1
acgtccgggcgggcgggaccagctgtgcacataccgcacaaaaacctgtggggtgtccgctgtcatcttcgccctattaactgagtaatgagatttgggaaaaatcctctatacatctctctctatatatatatgtgataaagcgcagagacaacacacacagtggggtgtggggtgacaccaattatatacgcggggacataataaagttggggtttttgtgtctc

SEQ ID NO: 3358 - DNA, 299 bp, Zea mays
  Clone ID: MRT4577_103063C.1
ctcaaccgatctaagtgaccgattgagagaggaaaagggttggaatacacctggactttgtggcctcctcaacaagaactatgttctttggaaccgaacctgggtagagaaattaccgcgtttacttgtgttagtcttcactcgatttgcttcttccactttgctctgtgtagaagttcccttgctcatattgattagagtttgcttccacaggaatctgcattgattgagcagctcatagcaggaggaacaatcttgcgcactccgaattatttctaacacttacctcgggaagtgcg

SEQ ID NO: 3359 - DNA, 239 bp, Zea mays
  Clone ID: MRT4577_103064C.1
ttttaaaggacccaagtttacttccccttgcttgcaacgtattagtttttttttggggcaacctaattcaattcaactgcccgcggtttaacaccgtctggcctggaaaacccctgcctttcccaaactaattggcttggaagaaattccccttttcgccagttggcttattaccaaaaaggcccgaaccgttggcctttccaaccatttgcccaccctgattggcaattggaaccccc

SEQ ID NO: 3360 - DNA, 287 bp, Zea mays
  unsure (1)..(287): unsure at all n locations
  Clone ID: MRT4577_103065C.1
cccgtatgtctagataatgggggccctgagcgttggcataccctgcacaccctgggggcggtccctgttttgatgcatgcgctnncaccggcccgggctagtacaagacttcctccacgtgcaccgagaagctcctggagggcttcgacaaccaggcaaaccattcgttcctagacaagaaacaagtcgaagccagattctcgctcactttattaagacacccaccgcgacaatgacacatatatattcacaacattgtacatgattacctttatcagacgcgacca

SEQ ID NO: 3361 - DNA, 400 bp, Zea mays
  Clone ID: MRT4577_103066C.1
agttggcagttctggtccaggcaattacagtggtcagaaatcatttgattcttgtaggcatgaaaaagcagttttaaatcattctaaaaactggattgtctcgttgctggaaaacacattgaagcacggtgtcatgagcaagacaaacataatgctgttatccgaagtattggcatatcgccaatatccattgccttcactttccggattctgttcttttttgcttggtctcacaaccggagtatttgtttattttacgaaagatcgttatctaaaataattgcagtggggttaggcaaaatattcacataaatgatatgaaatagagccaaatattatatatattgtttatatgttattgattagggcacttcttttaaattagaattcttaattacca

SEQ ID NO: 3362 - DNA, 106 bp, Zea mays
  Clone ID: MRT4577_103067C.1
acccttccggccgaattgcgcgctcttacaaccaatggttaacaacaacttgttcttcaaggggcgcgttcaaggtggacccgaattcccaacaacattgcggggg

SEQ ID NO: 3363 - DNA, 337 bp, Zea mays
  Clone ID: MRT4577_103068C.1
cttaggcaaagcgtagttgcgcagtcggcacgcggagcctcggacgaatgatggcttggtcctgcgtgaccttggaggtcagggcgtgtttgccctgtgatttcctggtactcgggtgtcttggtacgattagggatgtaatctgggtacccttaattatggtacccgatagttgggttcgcagaggcacaaagaactagttctacacaatagatctcataatttttctggaagtgccacatgaagaaagtctagcagtgtgccagctggaactgggaagtttggtagtttctctattggatatttaaattatctggaaaaataaagacctattttt

SEQ ID NO: 3364 - DNA, 271 bp, Zea mays
  Clone ID: MRT4577_103069C.1
ggggggttctttttttttttgaccttcgattccacccctgcaaacaaggcggggacaactcacggccgcccaagagccccaaaaccggagaaaaggggaacggagtcagggaacacttcctagctgtacctccaatccttggaattcggcgctaaaacttaaacggggacagaccgtctctgctacaaaaaccctgtgcagaaaaaaggaacccttacttacttcccttttagattcagtatgattatcgtgtaaaaaaacaaaccgaatt

SEQ ID NO: 3365 - DNA, 490 bp, Zea mays
  Clone ID: MRT4577_10306C.1
gggggaaaaatgggaaatccaaaaaaggggcccccttcactgcactggggggatggaagtaaatgaagtcggcattccctaataaatcagggcaccaaccggtgtaccctagcgtgagaggctgaatggagcgctggggccggcggggcctgccctggggcaccgcataacactcgaccacgtccacccataatggcccgccgcccgcccctagggccacactttcactagccacccgcacccgcagcttttggccttttgccgccgcaccatgcctgcgcatacgactactgctggggactgacccgccccgccccgcccaaattaaggacgaaagggccaccatgcgcccgccgggcaaaaagaccgtcgcctgctccttcggccgcctagccttcgggcgccattaagtggccaccttcttcctacgcggcattcgggccgttgggaccaggtccggggcccgaaccatctgccgcggcggcagcgg

SEQ ID NO: 3366 - DNA, 351 bp, Zea mays
  Clone ID: MRT4577_103070C.1
tctgactcctgcgaattaactagacagttggaagagaccatcaactttgtgaccttcaatgacggatatgctttacatggctacgatactgtctcagagccatcagacccaaacactcttggttctaagactcgtgcatgacgtgcactgcggatgcgatagcaacatgacaagccatgatcgctcatgtccaccctcgataggatgtgaagatcacacgctgatccaatgggtcatctgaggctatccctagcgctccgtcattaaatgattatcaccaggaccataactcaagtaaccatgatgattactgggcctagtgataactcaaatttgaccaatagctgatct

SEQ ID NO: 3367 - DNA, 328 bp, Zea mays
  Clone ID: MRT4577_103071C.1
gaaagctggtacgcccgcagtacctgagctggaaatattgctcgtgtgttttggttactcacgtgtaggcaggccaagaggcatttacctggactccaagggacaacgtgcagaaaataaccatttgaaaaataaaaattaaacggggtggcgacaatataggggattcatagacaacagcctgtttttcacttcccgctgggacaaaagagaatctccaatcttgatttcttctctgttgcgtaatctgatgctgcacccttctaaacctgggggtataggcccggaagtcttccggaccttgccctatgagttagagagctacttg

SEQ ID NO: 3368 - DNA, 292 bp, Zea mays
  Clone ID: MRT4577_103072C.1
attagacaccaattttttaatagtgttacttaaaagcgccgaataatagaagtgtgtaagggccgagccaaacaaactaaacaatgcccgcgataatggccgacggacggaagtacagcacgcacgtgatgggaacacattgacaagtagcataatggcctttcatacggggagcacggaaacaaacgccgccgcactcaccgaaggaaacaacacaagccccataccaactagaaggaggtgaggatgggactcgggccatgaggacaaaaattggccatgctagtggcaa

SEQ ID NO: 3369 - DNA, 601 bp, Zea mays
  Clone ID: MRT4577_103073C.1
attcccgggcccgacccacgcgtccgcggacgcgtgggcggacgcgtgggaaaacacaaaaaaaaataaaacctttctatttctcttcctcctttgagctttgacctctcctccatctcccccacccttttatgcaacaatgggaaattgttgctctcacggacgggactcagccgataacggagacgcattggaaaacggagcttccgcttcaaatgctgccaattcgactggtccaaccgcggaagcttctgtaccacaatcaaaacatgcacctccttctcctcctcctgcaaccaaacaaggccctataggccctgtcttaggtcgacccatggaagatgtaaaagcttcatattctttagggaaagagctcgggcgaggccaatttggtgtcacacacctctgcacacagaaggcaacaggtcatcaatttgcttgcaagacgattgcaaaaagaaagcttgtaaacaaggaagacattgaggatgcaagaagagaagtgcagataatgcatcacttgactggtcaaccaaacattgcggagcttacaggggcttaagaggataagcattccgtgcattcggttatgggagctttg

SEQ ID NO: 3370 - DNA, 436 bp, Zea mays
  Clone ID: MRT4577_103074C.1
attcggctcgagcaattctcaaatttatagctcgggaacagagaaggagaaatagaatggacgccattgattctgtgttcgatccgttgagagaattcgcaaaggacagcgtgaggctcgtgaagcgctgccacaaacccgatcgcaaagaattctccaaggttgccgtgcgtaccgcaattggtttcgttgtgatgggattcgtgggtttcttcgtgaagcttattttcattccaattaacaacatcatcgtcggatctggttaggatgaagggtactacaatcgcctcaggaattcaggttgtcaagcaaaagtaggcagaaagagttcccacatcaatagatcattctatgccctcaatcttagttctgtttttcattttttgttttttttctcatcttaagaagtgttacttactttagacgtaaaatttta

SEQ ID NO: 3371 - DNA, 2056 bp, Zea mays
  Clone ID: MRT4577_103075C.1
gtgcggtgcggacacgacacaagcaaagcgagcacagacagacaccgttacgcgagcacgcaacgcgacgaggagaggagaggagacgcttaccgagcgaagagcactaggctccgccatcgacgtacgcacgcaagcgcgtgaagcgtcctcgactcgcctttcggttcggttcctcgccgtcgcgggcggcctcgtcgggcgaccgctctctcggcattctttctatctggttgctgtgtgtggattggaggccttgtgagctcgcggaggcggcgcggttcatggccgtggcggagcggttcggaactcggtggccgccgtctcgattcttcgttgctgtgctcctcgtcctgctcacagatggcggagcggcgtggaagagagcagaaggcctgtcgttgggcatcaactacgggcagatcgcggacaacctgccgtcgccggcgagggtgtcgtacctagtccggtcgatgcaggtgagcaaggtgaagctgtacgacgcggacccgtacgtgctgagcgcgttcgtcgacacggacgtggagttcgtggtgggcatcggcaacgagaacgtgtcggcgatggtggagccggcggcggcgcgggcgtgggtggagcggcacgtgcagccgtacctcccgggcacgcgcatcacctgcatcaccgtcggcaacgaggtgttcaagggcaacgacagcgcgctcaaggcgagcctcctgccggccatgcagtccgtgtaccaggcgctgaccgcggtgggcctgcagggccgggtgaacgtcagcacggcgcactcgctggacatcatgggcagcacctacccgccctccgccggcgcgttcgggcccgacgccgtgccctacctccagccgctcctggccttcttgtccgcggcgcggtccccgttcctcatcaactgctacccctacttcgcgtacaaggccgacccgggcaacgtgccgctcgagtacgtcctgttccagcccgacgccgccggggtcaccgacgccggcacggggctcaggtacgacaacatgctgtacgcgcaggtcgactcggtgtacgccgccatccagaagctgggccacaccgacgtcgacgtcaaggtctccgagaccgggtggccgtccaggggcgaccccgacgaggccggcgccacgccggagtacgccaggacgtacatcggcaacctgctgcagaggatcgagatggggcagggcacgccgatgaggccgtcggcgcccgtcgacgtctacgtcttcgcgctcttcaacgagaacctcaagcccggcccggcctccgaacggaactacggcttgctctaccccgacggcacgcccgtgtacgatgtcggcctgcggggataccttccacccatggattattcacaaggcaccagagaggcggtccgtttcttcgccttcatcagcttcgtagccattgcatcgatcactctcagcttatcctcctgagagcattgccgtaaagttgataaagaaagcgcggagactgaggacctcttgctgctaggatagcagatcgatcacaagccctcggagaagcaactaaagtcggcatgtaccatcaggcaagctttagaagcagaaatttgtctctgacttgttacacggccagccaaaacggtatcgaagtggtttttgatgacatccagcagccaaaactggctccgcgcgctgacagtaaagtagaactgactgaagattgcggccgacacgcacccaatgcacgcatagtagaattttccatttaatttgttctagagatgtcttctttatccaactccgcaactgtatatttgtatatcggccaaacagaaaggacataaattcaggtcaaggctggccatttatacttagttttttaaaactgtgacccctgattgttttgtgttttttttttaagtaaggtgcatttccagtcccttaactttaaattatgtaggtgtgttaactctgtccataaatttttaaagtgttctaaccacccttatgcatacaaaaaaaaaaaaaaaaaaaaaaaacaaaaaaattat

SEQ ID NO: 3372 - DNA, 326 bp, Zea mays
  Clone ID: MRT4577_103076C.1
cccgcctagggattcctaccgagggaggccgcacgcacccacggatgccctgcaagggtcaaagcgtccttaaccacagtggccgtcgtccacgctctgctccctgtaccattatgccgcacctctctcatgcttctatacatgaagcccaatgggctgctcgtatcaccagaactgtatgaagtttgtacttgccgaatagaagcaccttactggttccgtcaggcagttgaagttggctttttacacttatcactctggatcgtgcaacactcatcagccacatatcaactgttaccgtcggtgcacttattgtgacaaaacat

SEQ ID NO: 3373 - DNA, 330 bp, Zea mays
  Clone ID: MRT4577_103077C.1
tcggctgctgcttgctttcgacccatttgttttggggcaagtcgtggcttaccagcaacaacaacaggtgctacagtttatgccagagctcaatcgactagccatggagaaccctgaacgttacctacaactcgtttattttccggatcactgtgggcattgacgccaccattcctacaacaccagttgttgtaacataagaaatcgagctctgactcaactggctgtgtgcaagcctgctgcctacttacaacaggtgcttccattcaaccaactggctgtggcaaactgtggtgcgtacctacaacagtgaccactggcacttaattc

SEQ ID NO: 3374 - DNA, 325 bp, Zea mays
  Clone ID: MRT4577_103078C.1
cggacgcgtgcggtcacgcgtccgttcactgcgtcagggccttgaggactggaagaggctgtgctgacacacaggagaccaccttaccggtaggccacacatgccaggcgctgtgagacatgtgtcagccaccaggtctacgcatgtggagctctgtgactacaaccacgctgacctacaacagccgtcctgcatgcgatcctgaacaaggatgctgaatgccagctcccgatggtcatgtgccgccaggtcgcgtatgacctgacgctcatgtgcggtcttgagctgcactagacactgaactgcccttggaacttacctggcc

SEQ ID NO: 3375 - DNA, 270 bp, Zea mays
  Clone ID: MRT4577_103079C.1
cagatccaatcggacgcgactggcaaccttctaccgtatatctcacgcaaacgcaaggccggcaagtgtctcattaacaacggcgcgaagcgtcacctgaaggtccttcccaacaacatccagaggatcacgaaccccaccatccagaggctcactaagacggctatcctgaagctcatctgcaggcttatctactagtacaccctctgcctgctctacatctttatccacaatgtgatccacaactctgtgacctacactgatcacgcc

SEQ ID NO: 3376 - DNA, 366 bp, Zea mays
  Clone ID: MRT4577_10307C.1
attcggctcgaggaaaaacagtatgctttttattgagacgcagaccaagacagctgctgatataatccaactgcatgaggcaattgcagaggggtggcctaggccaacggcattgtgaccgaacacttgtgtgtatggcttgtaccatgttatggatggcactccatatacacgggtactgtatggactacaggctacctctcatgttaagatatatgccccattctgtcatagctatggatgacactcggtgtcgagaatatcctgtgatgtgttaaattgggtctctgatgaccacgtgtttgtgtttgcttttacctagctctaagcattctaacggcctgtagtatatgacttataaagaac

SEQ ID NO: 3377 - DNA, 398 bp, Zea mays
  unsure (1)..(398): unsure at all n locations
  Clone ID: MRT4577_103080C.1
atttccgctatgtcgtgtcggagtcgctatgagttcgccgtctaccacaagacttcgtcgcacaagccgtccccttacctcatctctaacctccggaagcatgaagcgctccagaagcgatgcggccctggaacggccgcgcacaagaaggcagtccggcggctcgactccggtgagggcgtcgtcgacgatgacgatggctgccgctacctcgtctacatcagctaccgtggcctcggcaaccgcatgctcggcattacgtcggccttcctctatgcggtgctcaccgagcgcgtcctcctcgtcgacggcggcaaggacactggcgcgctcttctgcgagccctttccaggaacgacgtggctgctaccgcaaggcggctggntctccttctcccc

SEQ ID NO: 3378 - DNA, 245 bp, Zea mays
  Clone ID: MRT4577_103081C.1
gtacctggtacagctcctcatagcctggtgttgtatttattcaacctgtttacattagaattggagaaagggcactggatcttggtgggctgccactgtacccccaagagccttttgatagagggacttgggacacgttatggtctatcagggatgcttttaccacaaagaaatggtatggaatcaagtgggatgattgatgtatgattgacacagtaccacagtgcactcttcaatgtagatgt

SEQ ID NO: 3379 - DNA, 311 bp, Zea mays
  unsure (1)..(311): unsure at all n locations
  Clone ID: MRT4577_103082C.1
tnnnttnnnnnnnnntgtnntntttttcgattgggtccctcgaggccggncgggactcgattcatagtagtctgtaatcctgttctccgtctctcaacccctccgattctctgccacggcgagtgctctacagttctcttgcctccctgctgatagcgaggagagatggaagacgcagcaaagggatgcatgtatcgatagatatccttctctaagactctagcttcgcgactaggtgcctccgctcagactagaacatgatgatgccattgcacgatctcccacctccagactctcagcatgctccttca

SEQ ID NO: 3380 - DNA, 551 bp, Zea mays
  unsure (1)..(551): unsure at all n locations
  Clone ID: MRT4577_103083C.1
acgagggcggtgttagcatgttgggacatggagacatgtcatttccttacctcattgaatcatttccaatgcttcttctctgctcagaagataatcatctcgagccgttagttgattttctcgagcacattggaattccaaagccaaagattgcatcagttttgctgctatttcctcctatcattctttctgatgttgaaaacgatattaagcctagaattcgtgaatgggagaaggctggcattgaacaagactatattactaggatgttgttgaagtatccatggattctttcaacgagtgtgatagagaactacagtaaaatgttgttgtttttcaaccaaaaagggatttccagtacagtcctcgctattgctgtgaaaagttggccacatattcttggctcctcttcaaaaagaatgaattcagttttggagctgtttcgtgttctgggcatcagtaaaaaaatggnggttccagtcattacatcaagtccacagttattactgagaaaacctgatcagtttatgcaggatgaactacttattgga

SEQ ID NO: 3381 - DNA, 576 bp, Zea mays
  Clone ID: MRT4577_103084C.1
gattgaagaggaaaggcggaaaccgatctcccgggtcgcgaactcccgacccttttccttttgatccttccttcctcgggaaaactagggcttaggcttgaagagccgcgatgtactgcgtgggaggaggctcggggcactactacttaggcataggaggactgcggtgaattctaacgcacctcttccgagacggaggcttcatgccctcacagtccacgccaggacctcagaagatggtgctctctaagggtaggagtgcgaatatgctgctcccgatcaccgtgaaacagaccatggacgcggcgtaaaccagcggtgagaagactaatttcgccatctgccgagattgaggtgactacgactacgcttgatggattcatgctacgtgaatgtgaccgagtcacagatgatgcattcactcttgatgaaggtactggcaacagatatgagaatcgctggtgaaaagaggctactatgctactggatggctgatgctaataacgagaactatgccataaacattgagaggttgaaaggttttcaaggaaagcctcatgtatatggctatgctga

SEQ ID NO: 3382 - DNA, 296 bp, Zea mays
  Clone ID: MRT4577_103085C.1
aaaaaaaaaaaaaataaaaatataaaataaataaaaaaaataaaaaataataaaaagggaagggaactaattattaaacaaaacaaagggcctgccttatttagaggactccaggattttctgttcgccgtacccttacgacggccatactatttggtatagcggatctctattcgaattgatttcccgtgctttatcaatctttggcttgcgaactccctggtggtccgatctttagtgccttggatatacttcgccttttggcttgcttctttatcggcgccgaggcctgatcc

SEQ ID NO: 3383 - DNA, 284 bp, Zea mays
  Clone ID: MRT4577_103086C.1
ggggattgggttcctcgaggccggccgggacggccgcctccagcatcaagctccttgctccccgaccaaaccctacctgtacccgccgccgccttcgcagcagacatgccgcccaaattggacccctctcaagcggtggaggccttcatccgcgtgacggtaggcgaggacgacgacgccgccacactggaccccaagatcgacgcgctcggcctctccccgaagaatatcgctgaggacatcctcacggacaccgacaaggactgcaaagccctccgcaacaa

SEQ ID NO: 3384 - DNA, 529 bp, Zea mays
  unsure (1)..(529): unsure at all n locations
  Clone ID: MRT4577_103087C.1
aacaacacaccgaacaccgtcacangcaacngtagctctggtctagggnngaagagctctttgggttcagcgtgtgcgcgtgcacaacagcacggcancgctggtggttggtttgcattcgcnnccccgccaagaaagaacgctgcnncgtgagcgggcntnngagcgggcgggaagcanngcagcaggcggacgaacatnngccgagcggcatgttttntnntctccgggtnncggtgaaccgtgggggggcggtgaagctgggngtacccagtanncctggtgaaccanncttcctgacgcgtgggtgcgtggtgccggtgatggccccgccacggcgctggagnnctggcgcgcctcggccccggcgagctgctctcgctgtggnncgctcgctggagnnctggacctggtccacatcgctgtgcgtgcggcgttcctggtcgttcttcttttggtcaccgngtaccgtgnnatgtcgcggtcccaggtccggttgtaccctggtgggacttacgtcctgctgcaa

SEQ ID NO: 3385 - DNA, 261 bp, Zea mays
  Clone ID: MRT4577_103088C.1
aaaaaaaaagcaccaacaccaaaaaaaatatctctgttaaatgttacacatcttgtacaagaaaattattgttgcatacacaattcccaacaaagacgaaagccactcacacacacaaaccaccaaatccatttctacacgtgggaccacaggtggcttcagtaaaactaaacgactcgtaggtctgcactcaaaagaacccccaggctggtttcacgacggaacataaaccctgcccctggtaatttcgttccaaccttt

SEQ ID NO: 3386 - DNA, 393 bp, Zea mays
  Clone ID: MRT4577_103089C.1
tcgatttttagcatttagaaatttattttgcgaagcgcactagcaacaaccgaacgagcaatggctaccaagatattagccctccttgcgctacttgcccttttagtgagcgcaacaaatgcgttcattattccacagtgctcacttgctcctagtgccattatttcacagattcttccaccagttacttcaatgggcttcgaacatccagacgtgcaagcctacaggctacaactagcgcttgctgagagcgtcttacaacaaccaattgctcaatagctacatcaatttcttggcacatttaaacctacaaaccattgtaacgcaacagcaacatcagcttctgtcatcactgatccacctagctttggtgaactctgtcgactacttgaa

SEQ ID NO: 3387 - DNA, 404 bp, Zea mays
  Clone ID: MRT4577_10308C.1
gaatcatggcacaggatcgaatggcacatttttactacataacatgaattctatacaaaataaataattccattataaggggacaacgggccagcaacccaaagttgactgggagacgacggcctaaaccactcacgaactcattacaacatcctccaagcgcctaatcctgggggacctggtcttgacctggcccttaaaattccaggtactagggggattcttcggatactcgaaacctcccaaccacgggtccggggggggaacaattccggccacggggcaacgcatgccaacccttcaaagcatgcccaggtctgcccaaccttagggggacgacgacggacccgtaccgggaaggaaaccccatgggccgaggccatccatccctacatcccgggctt

SEQ ID NO: 3388 - DNA, 332 bp, Zea mays
  Clone ID: MRT4577_103090C.1
cggacgcgtgggcggacgcgtggggactagttctatatacggtttgttgcaaaaaaaagggtagggaaaaaaaaaaaggagggagaaaaaaaaaataaaataaaaaaaaaaaaaaaaaatacattataatttataaaattaataaaataattattaggggcggctcgttttaaggttccttttttacttcctcgtgcttgctatgtttaagtttttcttttgtgtttcctaaataatatatcttggcctttttttaacatcgtcgggcttggaaaaaccctggggtttcctattttaatcgtctgggtgaaaatccccctttctccggttgg

SEQ ID NO: 3389 - DNA, 444 bp, Zea mays
  Clone ID: MRT4577_103091C.1
agaggagcaacaggggctatatggccattggaaccaaaaggggggcaagggacacgtacccccccccacacgttaaaaaggcaccacctgcaggcacctgccggccgggggggcgaacgagggtgctgagtctgatcttaacaaccaccacgtagggatctagcccaagatctggtcgagggccccggggtttttgagccccaacacaaagcccacccccaggatggggcccacggcccccaaggccaacgggtcggggagggggaacccggggggggcacccctctgcaggccggaatcccccccctccaacttaaacccccccgtcgccttggggtttgccgacggggccaacccaaaccgccccgggaacagaaaaaaggtcgtcgtcgtaaccaaaaacagggtggggggggagcccatgtaatcgaagaggatgccctg

SEQ ID NO: 3390 - DNA, 141 bp, Zea mays
  Clone ID: MRT4577_103092C.1
gggggctatcaaaactctcgcctggattaacccttgaccgaagttaaccgcccaattgggcctgaattcccaaccaacccaactcgttaacggcccctcgggggccaacagggcccggcccgaacgggcctttaaccctcc

SEQ ID NO: 3391 - DNA, 633 bp, Zea mays
  Clone ID: MRT4577_103093C.1
gaggacaaaaaaatttagagtgtgctgtaaaggacagagaatattcttttagtggatggaatttaggagacgttgctggatgcagcacttttgtccagctcccctgagaagagctattattatttagacaaccattgatctgatattttgtatgcgagttctggtgttaatacatgatagctaccaaatttcagcgaaagtgattttggttgcagtagggcgtgccctgaccacatctttgttgtgtgaagtacttgaagtcaaaagcagaaactctctatccacgatgcctacaggtttgaacagacgcccaaagcttcgctcatgaagttgaccgaagagtagatcgacaaggcgattattcccagaaattttgaggaagacatggagacacatggttagatacagctacggcataaaaaaagatgctactagcaaaaaattgttgctgaagtcattgcacaatccaatatgcatataaatcaaaacaattagtctgtagaagataatttaatttgcaatcacatgcctgatcatatcaagtgctgctgcaagtaagtacagcctcaaatttgaatacgaatctgagaccatgtactatgacagcaatccttggtgtgcgacgaccattga

SEQ ID NO: 3392 - DNA, 2189 bp, Zea mays
  Clone ID: MRT4577_103094C.1
ttagaatatgagttcagaatgccaaatccgcctttccagattgattttgaacggatgttgatgatttcatcttcatgtgctttttcgttggcaacgattttcttccgcatatgccaacactagagatcagggagggagctatcaatctattaatggctgtgtacaagaaagaatttccttcgatgggtggctatttaacagattcttgcacgccggatctgaatagagtcgaacacttcattcaagcagttggctcttatgaggataaaatatttcagaaaagggcgcgtttgcatcagcgtcaagcagaaagaataaaacgggaaaaggcccaagcaaagcgcggggatgatctggatccccatgtcagagatgatcttattgtacctgtttcaaatttccgagggtcccgccttgcatctggagcagtaccttcaccatatgaacagaatggatctcagagagaaaggtacaaccaaactcggaaagctccaagagtatcatcatcaggttccagcattgctgctgctatcgttgaggctgaacaagatcttgaagcacaggagcgtgaaaataaagaagagttgaagtctatgcttaaggatgctcttcgtgagaaatcagatgtcttcaattctgaaaattcagaggaggacaaggtaaagcttggagaaccaggatggagggataggtactatgaagagaagtttggggcaaggacacctgaacggatggaagaaatacggagggatgttgctctcaaatatactgaaggattgtgttgggttatgcactattactatgaaggggtgtgctcatggcaatggttttatccttatcattatgctccttttgcttcggatttaacgagtctgagtcagctcaatataactttcgaacttgggtcaccattcaagccatttgatcagctaatgggggttttccctgctgcaagtgcccatgcacttcctttaaagtatcggcaactgatgactgatccaaattcaccaataattgatttttatccaactgattttgaagtagatatgaatgggaaaagattctcttggcaggggatagcaaaactgccctttatagaagaagatcggttgctggctgagattaaaaaagttgaggatactttgacgcctgaagaagcaaggagaaacagtaccatgtgcaatatgctttttgtgaatggcgcccattcactttctccctatatctactctctcaacagtaaattcgggcatctgccagacaaagaccgtggtgcaatcaaagaaaaacttgatccttcagctagtggaggaatgaatggttacattgcactctgtggtggggacccgtcccctcctgtcttcagatctcctgtagatgggcttgaggacatcatggataatcaagtgatatgctcaatctacaagcttccagatccacacaagcacatcgctcgtccaccagctggtgttatcatacccaagaagagtgtagaagccggtgatctgaaaccaccaccagtgctgtggcatgaagacagcggtaggaggcctcatgataacaaccaccggaggccttatgataacagcaacaggcaaaacccatcaggagctctatctggccgccaactcggggaagctgcccatcgacttgttgtaaacagcttgaatgttcggggtggtgggcaaaataattccccatctatgccatatcagacaatgatgagtggtatgaactatccaaatggaaggcatcatgtgggtaaccatggagtgcctccgagaatggaacagcctgctggtcgttctggctggcatgtttctgatgataacatgaccaatggtcaagcagcttatggtcagtatcagcctgaaaggttgggaccttcccggcatgaacgaggtaaccatggaaggcaacagtataacccatatgcaagagataaccaccatgattctagtggaagagttcagccacctggataccatcaaaaccgtggcaacccacagtctgctgctccatcagcaggtcctggactgtatgggccataccccccagcatatgctggtggttattctgggggataccagcctgtaccatatgggggtcaacaatggcagcagcgaccttatggaggcgggacaccccccacaagacctaactcacaccaatcacaaaaccgttatggt

SEQ ID NO: 3393 - DNA, 281 bp, Zea mays
  unsure (1)..(281): unsure at all n locations
  Clone ID: MRT4577_103095C.1
ggaaaaggagtattctcttctattatttcctcaccccaagggccaaggctgngaaaaaatagtacgntcaaattattctggcaaggaaaagatggtacatacagattggcgttagacagatattgcatattgatgtgccacatctcaattcctcgtgatagttcttgggcacaacatcacaacaaatgcatcctggagatgcgtctctctgtctgctgagcgagtatgctgtatgcttctgtatagaagtacattgacttcagggtggggggggggggggg

SEQ ID NO: 3394 - DNA, 780 bp, Zea mays
  Clone ID: MRT4577_103096C.1
cccacgcgtccgcccacgcgtccgcgggcgcgtgggaaaaaagtaaactacaattattaatttataatgcgatttatattgttaattgctcaaaacaatcaataaataacatctctcaagaacttcgaatacaaatatgttcatacaagtttatgcataaatttgacataatttgactattatgtatcaaactttatgacttgtagttccactaattttgactatgcataaaagctgatttgcgggcaaccaatttttatccgagaggaaggcttccattcatgatataactttataacaactcaacatttctcatgaattaatggctctcttaaacaatatagtgttagagcatttttttctgtatatatcttttatgcctactgaaccactatgcattgtagttcatgatctaaattatctaaaacaaaacccatactgcatgagttgaaccataattagttactttagttacgataaaaaatgatcagatacttcagggaatgttctaaccaaaaccaacacccaagtatgatcgtctgaattataattactagggaaaggtagattgcaagaactaattttgcctacatgtttaacttaaaacgcatttttgtgccagctgtagggtttggcatactctcatggtgctttctcatcaggtgtaagttgcaattcgaggcttctgagtcatagttctatcaacttccatagtttcatcctttatttcttcatttgtccaccatgtgttctgaaatgttgttatgcttgactttccct

SEQ ID NO: 3395 - DNA, 730 bp, Zea mays
  unsure (1)..(730): unsure at all n locations
  Clone ID: MRT4577_103097C.1
ggatggaagaatacggagggatgttgctctcaatatactgaaggattgtgttgggttatgcactactactatgaaggggtgtgctcatggcaatggttttatccttatcattatgctccttttgcttcggatttaacgagtctgagtcagctcaatataactttcgaacttgggtcaccattcaagccatttgatcagctaatgggggttttccctgctgcaagtgcccatgcacttcctttaaagtatcggcaactgatgactgatccaaattcaccaataattgatttttatccaactgattttgaagtagatatgaatgggaaaagattctcttggcaggtacttaacagagcataatttgataattatgtcatacatgagcccttctaagtaaatgtcctaggagaacatatttacttattgcatatttgtataccggtcatgactaagagcagtgcatacttcacaggggatagcaaaactgccctttatagaagaagatcggttgctggctgagattanaaaagttgaggatactttgacgcctgaagaagcaaggagaaacagtaccatgtgcaatatgcttttttgtgaatggcgcccattcactttctccctatatctactctctcaacagtaaattcgggcatctgccagacanaagaccgtggtgcaatcaaagaaaaacttgatccttcagctagtggaaggaatgaatggttacatt

SEQ ID NO: 3396 - DNA, 960 bp, Zea mays
  Clone ID: MRT4577_103098C.1
ggccgcttttttttttttttttttgtgaaaatcacatcccgaattcatctcaagaaacaaatacatgatggtgggtatatccatcatcaactaactgtatacatgtttgttacatacactatcacaaccgtttcaaaacttttcaatcacctatatagaatggtccatgaatgagaaacacaaatgaagggatagccgatgccaccatctggcaacaacatgctaaagaaacaacatttgcttcttggagttattgataaatcgaccaagaagcttgtagtaggtcacaaacgacaaaggagccatgacatagaaatcacgctttactgtcatctcaagaaacaaatacatgatggtggatatatccatcatcaactaactgtatacatgtttgttacatacactatcaccacagttcaaaacttttcaatcacctatataaccaacccccatgaatgagaaacacaaatgaaagaacagccgatgccaccatctggcagcaaagctaatatttaacaacatttgctccttggagttcttgataaatcgaccaagaagcttgtagtaggtcactggctaaggtgacatcattcatgatacctgataatttttactaacaggaacaggactataacagtaaggggttgtttgtactaaggcattgtttggtgattactaacaaggatagggccacaacagtaaggggttttgtttggatgaaggcattgcttagtgatttgtcaaggatttggattatatttcccctttactcaataagggcctatgcatttagggattagtattggccatgacctgaggacctcttgttagaacttctgtctaaggtaccataacggttttgtgattggtgtgagttaggtcttgtggggggtgtcccgcctccataaggtcgctgctgccattgttgaccaccatatggtacaggctggtatcccccag

SEQ ID NO: 3397 - DNA, 848 bp, Zea mays
  unsure (1)..(848): unsure at all n locations
  Clone ID: MRT4577_103099C.1
ctcatgtcttgcttccaagtgagagtgatggatttaagtacgaccaatatttttcttgcaaaatacataatcttccatttagagataaattcaagaaatccacgagatgatggagtgagagggaggtagagcttaaaatttaggatggttgattatataggagccttaaatattcacctcatgtaagatgaaattaaaggttagggattgggttggcatttgggaaagcaacgaaaaggggattccttgagctcacctaaggatgaagaaaggaagtgatgatctgcgtcttctctttgagatggtggtgcttgattttttgattgatcttcttctcctcctttcccttgttcttctccttttattccttatctcctttatcttgcttcttcttcctttctccaccttggagagagagagtaggagggaggattagaggagntgagttggagctaataaggggtaggnggaaagagaaggcaaaggaggacaacccatctaaattggtatgttataataagtgttctagtagacagtctgttagatcaatcagaaggaccattagaacatgaaatttgaggatcttggaatttgagaggagagtttggaattgaggcctagaaatctcttgagctttagagatcaattcttgagtgatgatcttgagaatattggctaaatttttatatgacacatgccctttttcaaacattttatctaaaattaaagaagacagcccaaaggctagttgcctgggatgataagcaggtgggacatgtaaggtcccagttggcattggctaaagaaaacttcacagactggaaattgcataggatgaaataccctta

SEQ ID NO: 3398 - DNA, 339 bp, Zea mays
  Clone ID: MRT4577_10309C.1
cgcagcgcggggcgacgagcacgctcctcctttcgcgcagggccagctccaccccgtaccgtggctttatatacacccctcgtggcaaccctaccgaatcatcactaccacgcgtctctcttactttcgcgcatctgtcaacgcctgaagctgacctaacctcccctactcagcgcagatcccacactactctggcagaaaatggctgacactgaagatatgcagcccctcgtctgcgacaacagaactggcatggtcaaggctggtttctgcggcgacgacgctccaagggccgtatctccagcatcgttggtcgcccgcgccacaccgatgctgatg

SEQ ID NO: 3399 - DNA, 836 bp, Zea mays
  Clone ID: MRT4577_1030C.1
ggccggccggggaagatttcatcgtcgttactaacccacagctccccgacaacaccacgagcaaaatcagtcaagatgggaattgatctcgaccgccaccatgttcgagacgggcaccgcaaggtccctaagtcgtccaacccctacgttaagctgttggttcgtctgtacaagttccttgcccgccgcaccgatgcgcccttcaacaaggttgtcctccgccgtcttatgatgtccaagatcaaccgccccccggtctccctctccaagatcgtcgctaccgccgccaacaaggccaacgcgaagaacaacgagggcaagaccattgtcattgttggcaccgtcaccgatgacaaccgtctcctcgagctccccaagctctccgtcgctgccatgcgcttcaccgcctcggcccgcgcccgcatcgagaaggctggtggtgagactctcaccatcgacgaggttgccacccgtttccccaccggtgccaacaccgtcctcctccgtggacccaagaactcccgtgagtctgtcaagcacttcggcttcggtccccactccaacaagaagccctacgtcgagtccaagggccgcaagttcgagcgcgctcgtggccgcagaaggtccaggggtttcaaggtctaagcgattgcttgagcttgaggtggaacgtttattccgggttgctggcgtggtcacggtcatgggaactgatttacgaagcgtgcatcacggctggtatgagcccttggctggttctcaaaaatatactcaatgtccgtatatgcaatggacgcacaccaatgagcactcgaggctcatggtattttctccag

SEQ ID NO: 3400 - DNA, 615 bp, Zea mays
  Clone ID: MRT4577_103100C.1
caaagtatagcatcatcacatgcatgcaaaaccgttcaagggagcaagcaagaggccatgttgaaccccttgagcatctcatctcacaacgagcatgctcttcgacaacaaaggaatcatgattcaactgttagaaatttacccaactctaagtttcctgtcgaaactgcaccatggaagcaacaagaaaggattgtccttactcgcaaactgccaaagggatcaaaaggagcccacggaagagaacaacctgctgcatcagtcatcagtgacatagagaagcggctcaaggatcttgattttcgacaatcgtacaaggaccttagagcgcttaaacatattttggattccatgcaagcaaaaggactattggaaaacaagaatagggaggaaatatctatgccaaagttatctgatggaaaccacaatggccaagagatagccagtgtgaacatgagagtgagcagtaacaccaacaacgtgtgtatgcctgaagagagcaacgctgaaagctctttcaaatcacctattgtgatcatgaaaccttcaaatgtgcataccttttcaacgaagttgattcttctgtcgtccccttagggggtcatctgaccccca

SEQ ID NO: 3401 - DNA, 2675 bp, Zea mays
  unsure (1)..(2675): unsure at all n locations
  Clone ID: MRT4577_103101C.1
ttgggaccctcgaggccggccggngaaccaattgaaccgatggcagctccccttctctcccccttgctgctgctgcttctgctgctgctatcgtcctctactcctcttcaagctcaacataacttcacccaaggttcctccttgacgccccaagggcctaccacctcttggctctccccgtctggcgacttcgcgtttggcttccagcccatcgagggtaacacctctttctacctgctcgccgtctggttcaacaagatcggcaaccttacagtgacttggtatgccaagaccagcgacccggatccagcgccggtgcaagctccatccggttcacgcctccagctcaactccaatggggcgctctcgctccaggactccgccggcacagaggtatggaatccccaagtcgtgggcgcatcctacgctgccatgctcgattctggaaactttgtgctggctgctgcagatggctcctctaccctatgggagagcttcaaataccctacagataccatcctgcccactcagatgctcaccactggaatgagcctccgcagtcggatcatccccacagactattccaatggccggttcctcctcggcctgcaaagtactggtgcgtctctttataccgttgctgtgccctctggttacgaatatgatccgtactggtccatggatgtgaacaccaccaatctggtgttcgatgcgtctggcgtgatatatatcggcaacagaagtgaaatcacatcttgggtggtcagctccatagcagactactaccttcgtgccacacttgaccccgatggcgttttccgacagtatatgtacccaaagaagaacagcaaccagagtaatcaggcatggtcagtagtggacttcaagcccccaaatatctgtggagcacagctaacaaacgttggaagcggtatttgcggttttaacagctattgcacatggaatggcgcaaacaaccagagtacctgcaagtgccccgagcagtactcatttattgatgatgagaggaagtacaaaggctgcaagccagacttccagccacaaagttgcgacttggatgaagcagcggccctgatgcagtttaaggtcataccgatgagccatgttgactggccactgtctgactatgagcagtatagccccataactaaggatcagtgtcagcaactctgtctgacagattgtttctgtgcccttgctgtgttccatgatgaagacaatacatgttggaagaagaagatgcctttgtcaaacggccaaatgggcggatggtgcccagaggacagtctatatcaaggtacgaaaggacaacggcacgcagtcggagatcgtcgattccaacaaatggaagaaagacaagaagaactggatcattggaagttcattgttcttgggaagctctgtcttggtcaaccttctgctgatctccataatactctttggtacttactgtaccatcacgataaaggaagtcccagctatgcagtcatcaaacagtataggattgcccctgaaagccttcacttatgctgagcttgagaaggcaaccggtggtttccagaaagtgattggcactggtgcttctggtattgtgtacaagggccagctacaagatgatctcagtacccacattgctgtcaaaaagatcgacaagcttgagcatgaaacagaaaaggagttcaccattgaggtccaaactattggacggacacaccacaagaacttggtcaggttgctaggattctgcaacgaaggaaaagaaagactgttagtgtatgaattcatgaccaatgggtcactcaacagatttctatttggtgatgccaagcttcagtggaatattcgagcccagcttgctcttggggtggcaagggggctgctatacttacatgaggaatgcagcacacagattatccactgtgacataaagtcccagaacatccttctcgatggcaacttcacagcaaagatctctgacttcggcttagccaaactgctccgaaccaaccagacacaaacaaatacaggtattcggggtacacgaggatatgttgctcctgagtggtttaagaacatcggtatcactgccaaggtggatgtttacagctttggggtcatcctgttggagcttgtttgttgtcggcggaatgttgaattggaggccacagatgaggatcaaaaaatactgactgactgggcaaacgactgttataggtgtggcagaattgattttctggtggagggtgatgaagaagcaatttctgatttgaagaacgtggaaaggtttgttgcagtggcattgtggtgtcttcaggaggacccaactatgagacctacaatgctgaaggtgacacaaatgcttgatgaagcagctgcagtccccagccctcctgaacctacttcctttgtcagtgcacttgcatagcatcacacctgcatattgtcatattagtatatgtatgaacatgcgtgttcgaggaaaaaaaaagtatatgtatgaaccaacaaaatggtgtgggaaattaggtatagctatctactgaaaattacctatgctgatattgtagtgtgttcatatgtactgtaaagagcacagcattactgtctgcagccataacgtactgtagtaaatattaggaagtcttcattttccc

SEQ ID NO: 3402 - DNA, 699 bp, Zea mays
  Clone ID: MRT4577_103102C.1
ggccgcttttttttttttttttttcctttttttttttttttttttttttttttttttttttttttttttttttttttttttttttgcagcaaaaagctaatcccagggcccaaattagcgaggggatctgccacagaggggaggaagagtggaaacaaaagggcaaaacatgtccagactcagcatgaacctggggacccgcccatccacatttattttggggatacacaagcagcaaccatccatgaaaaggagggggaaaacccctctactgggtcttgaacatgggggggatcagggcgaccacccgggtgctggacccccacttggtggcgtaccacgaaacaagcttgacgaagggggcgttcaaagcgaacccggccttggggtcaaaaatgcccaacctggtggcaccaaggaaggggggaaaaaccaaatccccccccacataacccatgatacccttggggggaccctcggaagcagccttaaaagctttcttgatatccccaaaggaggcccccttttcgattctgacggggggggcaacaaccgagacatccacaggaggaacgcggaaggacataccagggggcttgcccttcaaatcagggggaactttaccaacagccttggaaacaccggggctgctcggaatgatgttaaaggtggaagccctgccacctttccagtccttgg

SEQ ID NO: 3403 - DNA, 641 bp, Zea mays
  unsure (1)..(641): unsure at all n locations
  Clone ID: MRT4577_103103C.1
ccggccgggaacgacactgcccgtaacagtatcaacaaacttttcagcagcatcgtctttatcaaggcaacttagtgttacccgttttagttccaggtcccgttttacggcctgcgcaaaaccaccccgcactcgcacatttgcgacctcacgacccctcaacgctttcaaactgcaaaagtcgcagaagcgcaccaaagacacaatgacttccagcgcgacaaccctcaagggccagccccttgacaaggctgttctcgaatccatcctccgacgacgcatgttctataccccctccttcgagatctacggcggtgttggtggtctgttcgactatggtcctcccggttgtgcgctccaagcggccgtcattgaccaatggaggaaacacttcatcctcgaggaggaatgctcgaggttgactgttctgtcctgactcctcacgaggttctcaagaccagtggtcacgtcgacaagtttgccgactggatgtgcaaggaccccaagaacggcgagattctccgagccgaccacttcgtcgaggccattctcgaagcccgcctanacggtgacaaggaggcccgtgggcagaaggtgaggaaaaaggagaggaccccaaaaaaaaaaaaaaaaccgcggnc

SEQ ID NO: 3404 - DNA, 257 bp, Zea mays
  Clone ID: MRT4577_103104C.1
acacgggggaacccttgaaattgaaaaaaaatggccctaaaaaaccacccgaacccgccccggggggagacccgggaaatccggacacggacctggagggggaccagggttccccaaagggaaacccaataaagctcgggggaaacaagggcaaaacctgattccggggggaaaaaggaaaccggaacaaatccacacaaaaatcgagccgggagaaaaaaggggaaagcccggggggcccaaagaggggggaaccc

SEQ ID NO: 3405 - DNA, 307 bp, Zea mays
  Clone ID: MRT4577_103105C.1
aaaaaaaaatagcacaaaaaatgataaaacactttaaaaaaaaaacagtacatacaagaagagccgagccgaagtgacagtggggtggtgtcctgcgcctacttgctctacattggcctccagtggacgccatctagcttgccggcggtgccttcgtacgctgtggagcttggtcagctgtaccgtctgtttttgacttccaacacctttatacggtaggctgtctttgcccttttttatacctgtgccatatgagccatatttttttcgtcaacgggctgtcttaggccgacatgatcgtcctttc

SEQ ID NO: 3406 - DNA, 313 bp, Zea mays
  Clone ID: MRT4577_103106C.1
tgttttttttggtcagcagaaaaggttgcgggtttgacacgcaaattatattgaccctttcaagcaatacttatagcgcttggatactcatagatgcaccaccatcctgaaacataataccgccgggaccaaatatttgatcgtccaaaaacatatccttaacaagagtttaaattcaataaaacctggctgccgaaacctagcagccttcacaaatgagcatactcagaacaccctgtgtggctctcccatggaggttcttgacgtacagggatattcacattccgccaagtgttctttagaagggaaacac

SEQ ID NO: 3407 - DNA, 1930 bp, Zea mays
  Clone ID: MRT4577_103107C.1
atggggacgtacaagtgctgcatcttcttcacgcgcaggttcgcgctcggcgacacctccacgccggaggatgtccgcgcgctcttttccctctacgccggcggctcgccgtacatgcttgccgacgacctccgccgctacctcgccgcctggggaggtgctgacggcgaggtcccggagcagatcatcgaccgtatcctgcaggatcgcagccgcaccccgcggttcgggaggccggcgctcaccgttgacgacttcttacacttcctcttctccgaggacctcaacccgcccctccgctactccaaggtccatcaggacatgaacgcgccgctatcgcactattttatatacactggacacaactcgtatctgaccggtaatcaactcagcagtgactgcagtgatgttcccatcatcaaggcacttcaattaggtgttcgtgtaattgaattggacatatggccaaattcttgtaaagatgacattgatgttctccatggaaggacactcactgccccagtatcacttatcaaatgcttgagatccatcaaagaatatgcttttgttgcatctccctatcctgttattataactctagaagaccaccttacacctgatcttcaggagagagtagctaagatggtccttgaagtgtttggagacatcctgtattaccctgaatcgaaacatcttcaagaatttccttcacctgaagctctaaaggggcgtgtcatgctgtcaacaaaacccccaaaggagtatctcgaagcaaagggtgacaccatgaaggagaaagaaattgaggcccggattaaaaggggagaaagggaagcagcagcatggggagtagaagttccagatattcaggatgagatgcaagtcgccgacaaggatgaagatgagctattataccgcgaaagaggtgcagatggcgatgatgggaaggaaacaaagcatgttgcagcagagtacaaacacctcatcactatcaaggcaggaaagccaaagggtcctctcgtggatgccataaagaacgatccagacaaagttaggcgactcagtttgagcgagcaagagcttgcaaaagttgcagcacatcatggtcccaacattgtgagtttcacgcatagaaatatgctgagaatatacccaaagggaacccgcttcaattcatccaactataatccatttcttggctgggtgcatggtgctcaaatggtggcattcaatatgcagggatatggaagagcactttggttaatgcatggtttttataaagccaatggcggttgcggttacgtgaaaaaaccagatttcttgatgcaaacttgtccagatggaaaggtgtttgattcgaaggcagatttgccggtgaaggcaacattgaaggtcaaggtgtacatgggggaaggttggcaaaaggacttcaagcagacacatttcgactcatactcacctccagatttttatgtaaaggttggcatcgccggagttccattagactcggtgatgagaaagacgaaagccgtggaggacagctgggtgccggtgtgggaggaagagttcgccttcccgctgaccgtacctgagatcgcggtactccgcgtggaggtgcacgagcaggacgtgaacgaagacgacttcggcgggcagacggcgctgcctgtggcggagctgcggccagggatccgcgccgtgccgctgttcgatcacaaggggctcaagttcaagagcgtcaaggtcctcatgagcttcgaattcgcttagcgtcccgcagcgtaaatcgattatgctgccatgtgcgtcgatcgatgtttgtttgcaataggaatcgacttttttttccctctgttattaggagtcccatgccgggtttttttttttgtacagatgcatttccgctaactatgtacaaacgggtcacctg

SEQ ID NO: 3408 - DNA, 1716 bp, Zea mays
  Clone ID: MRT4577_103108C.1
atggtgattggtaacggcatcaaagcaaagttctggcaccatagctggctagatggggaggctccacgcaacctggcacctcacctcttcaagctggtcagaaggaagaataaatctgtggcccaagaactgactaacagtgcttggattcagtctctgcgagggaaaatcacaaccaccacgcaacttgaggaatttgtctacctctggactaggatccgacaggtccatcaggacatgaacgcgccgctatcgcactattttatatacactggacacaactcgtatctgaccggtaatcaactcagcagtgactgcagtgatgttcccatcatcaaggcacttcaattaggtgttcgtgtaattgaattggacatatggccaaattcttgtaaagatgacattgatgttctccatggaaggacactcactgccccagtatcacttatcaaatgcttgagatccatcaaagaatatgcttttgttgcatctccctatcctgttattataactctagaagaccaccttacacctgatcttcaggagagagtagctaagatggtccttgaagtgtttggagacatcctgtattaccctgaatcgaaacatcttcaagaatttccttcacctgaagctctaaaggggcgtgtcatgctgtcaacaaaacccccaaaggagtatctcgaagcaaagggtgacaccatgaaggagaaagaaattgaggcccggattaaaaggggagaaagggaagcagcagcatggggagtagaagttccagatattcaggatgagatgcaagtcgccgacaaggcatggatcttaaattgtgctgcattttacgatgaagatgagctattataccgcgaaagaggtgcagatggcgatgatgggaaggaaacaaagcatgttgcagcagagtacaaacacctcatcactatcaaggcaggaaagccaaagggtcctctcgtggatgccataaagaacgatccagacaaagttaggcgactcagtttgagcgagcaagagcttgcaaaagttgcagcacatcatggtcccaacattgtgagtttcacgcatagaaatatgctgagaatatacccaaagggaacccgcttcaattcatccaactataatccatttcttggctgggtgcatggtgctcaaatggtggcattcaatatgcagggatatggaagagcactttggttaatgcatggtttttataaagccaatggcggttgcggttacgtgaaaaaaccagatttcttgatgcaaacttgtccagatggaaaggtgtttgattcgaaggcagatttgccggtgaaggcaacattgaaggtcaaggtgtacatgggggaaggttggcaaaaggacttcaagcagacacatttcgactcatactcacctccagatttttatgtaaaggttggcatcgccggagttccattagactcggtgatgagaaagacgaaagccgtggaggacagctgggtgccggtgtgggaggaagagttcgccttcccgctgaccgtacctgagatcgcggtactccgcgtggaggtgcacgagcaggacgtgaacgaagacgacttcggcgggcagacggcgctgcctgtggcggagctgcggccagggatccgcgccgtgccgctgttcgaccacaaggggctcaagttcaagagcgtcaaggtcctcatgagcttcgagttcgcgtag

SEQ ID NO: 3409 - DNA, 935 bp, Zea mays
  Clone ID: MRT4577_103109C.1
tccgttgggatcaagctcacagctgggggaactgaaaaagcccccttgaaaacttcctcccgggatgcctcccctatctgcaccacctacagtggttgaaaagtctggaacaaaacctggcctccccaatgcagtaaaagcctcaaatgggcctataggtgctccgatggttcagggtgctcccatggctcaaggtactcctggggcacaaggaatccccatgaatcaagttactccatcacagggcagcgacgaggcaaagccattagaagctacagtggttgatgcagctcccaccacttcagaaggcactgcagctcccgcagctgcagaaggcacagcagctcccagcagtgaggaagctaaagcagcacctggcagtgagggaggcacatcgcatccaatcaacgaggaagccacagcagttgcagtttcagatgcaccaggcagccctgatgctgcggctgcggctgctcttgctcctgcagctgataccagtagctcggatgcacctgctgttactcccagtgaagtaaccgtctctcccccttcaaccgacgcacccgagttgaccgataagccatcaccaacagaggcatcgttgccgcctccacctagtgtttctggtgtatagaacatttcagattatttttgcagtgtgccatttttttttgtatgctgccgcgttcgttccactgtaatttttaacccatacatactggtataggcatttgctgccccatggttcaggtatcgcagacgccaggcagtatgtgagtagccctgtacatctgctgtctgcgtctcgcgagaacttgctgccattgtgtcagttgtgtgggcatagcttatgttgtttgtgatcaatccgtaggaccacagtttaattttttgcttgatcagctgcatcaccgataaaaaaaaaaaaaaaaaaa

SEQ ID NO: 3410 - DNA, 875 bp, Zea mays
  Clone ID: MRT4577_10310C.1
ttcccaagactggcctgaggtgacaaagtatgctggtctagtttctgctcagtctcataggcaagagctgatagaggatctctacaacgtcacacacgatcctcagaaaggaaccgtttgtggtggcatggtcagggagcttcttatatccttcaaaaaatcaactggtcaaaagcctcagaggatactattctacagggatggtgtgagtgaagggcagttctaccaagttctactgcatgaactggatgctatccgaaaggcgtgtgcatcgctggaagcaaactaccaaccgcaggtgactttcatcgtcgtccagaaacgccaccataccaggttgttcgcgcacaaccacaacgaccagaattcggtcgacaggagcggcaacatacttcctggaactgtcgtggactcgaagatctgccaccctacagagttcgacttcttcctgtgcagccatgctggcatcaagggcaccagccgtcctgctcactaccatgtcttgtgggacgagaacaacttcacagccgacgcactgcagaccctcaccaacaacctttgctacacctacgcgaggtgcacgcgctctgtgtccattgtcccgccggcgtactacgctcacctggccgcattccgcgcccggttctacatggagcctgacagctcagacagcgggtcgctggcgagtggcgcccgtggaggcggagcgccctccagctcgtcaacgtcccgcagcacccgcgccaccgccggcggagccgttagacccctccccgcgctcaaggacagcgtcaagaaggtcatgttctactgctgatgaaccggagcatgaagatagtaggcagccctgcctgaaatctgatccgcttggtgct

SEQ ID NO: 3411 - DNA, 634 bp, Zea mays
  Clone ID: MRT4577_103110C.1
cccacgcgtccgcccacgcgtccgcccacgcgtccgcccacgcgtccgcccacgcgtccgcaataaccggcagcagcaatccgataccaatcacagatatacagtaagccacatctactagctcgcgggtaggcatgcacagggcgcgggcgtcgtgctttgccgtctcggtgatgcgcagccgccagccgcgcaggccgggccataggcgagtggatcggcatcgagccgtcgacggcggactctaggcggcccggtggagcggcgaacgcacaggcggcccggtggaggtagactggcggtggcggcggactggttcttgtccgcttgggcgacctgcggcggcgaccgctagggttgttggattgacgatggagacttggagcctggagccttggccgcttggacttgaggtcggctgtgacacgagaaatttgtcattatggaagtcctcactcacggcttcgacgaattggaggcgtaggagatggattcgctgttataaaaaattaggggacaacccacactccaaaatggacatgaccacaccattacaaggtaacatcgatgattaaaccagtgatactcatgtcgtctctacatctgttacccttctccctattctcgctaccag

SEQ ID NO: 3412 - DNA, 493 bp, Zea mays
  unsure (1)..(493): unsure at all n locations
  Clone ID: MRT4577_103111C.1
nttttttttttttttttttttttttttttttttttttttttttttttttttttttttttttttttttttttgttttattttttacaattcctttggccctgggaaacccaaatggggagataaaagcccggccaaaaaaaaacccaattggaaaaaaaaaatcaaaagccgggtggcacccccaaccccaaaggccaaaaannnaccgaccaaacctgggcaaaatcggaaccataagggaagggaccaaaccctggcccggaacttggggggtaacttccccccaattcttgaaaagggccggaaaaggccccggggaaaatttaaccggccgggtaataagcctcctaaacgggaccccggggaaaactcgcacccggaaaaaagcatgggggggggggataaaaccccaaaaaaaaaagacaaggggcccggtcccattgaaggggcccaagaaatttgggagggcctttccaaaattccgggggtttgg

SEQ ID NO: 3413 - DNA, 1605 bp, Zea mays
  Clone ID: MRT4577_103112C.1
atgtcggggggactaagaaacgaaagtgcttctaagcttgaaaaagttgaggttgcctcgacttcatcttttggtgcagatgttgatcctagggcaatagatcttgccatgaaaatcgccgaaaggatgttcctcaaaatgaaggaagatgaggcgaagaacaagattgaagaagaagaaaatgatcgatggagaccaaacgacgaatccacctcttcacaaggttcgtctttcaaatccacttctcatatgtgctttattgctaatgggagtgacagtgaaagcgaaagtgaggatgaggaggagcaagaaagtgatagtgaagatgaggatgatcttcaacaattcttcgctcagctaagcaagaaacatcggatgagcttgcttaaactcatgaaaagagcggaagaacaaaaagaaatgcttcataagcaagaagacttcctcatcagaaaaattgaagacttagagaagttgaccaaagagcatgagaagctaaagtgctctcatgatgatgtggtccaaaggtatgaagacatttcaattgagaaaattaaagctattaatcattcatcatatattgctcaattagaaaataaaaatgctatgctcaagaacacagtagaaaagctaaacattgaaaatatagctttacaagaaaaacatgatatgcttgtatgctctcataataaatttatggattcacatatcatgttagaaatggctcatgaggttgtgttaactaatttgaaatcataccaacctcacatgtgcacatgtgttgaaattgaaactatattaccatgtgctaacaattgttgttatcaagcaagccaatcttccattgagctagaaatttcaggaattagtgatatttctatcacacaagaaaataaagagctcaaggaagaagttggaatgctaagaaggagcttaactcgtttgaagggaaagtgtcatgctcaaccttctccagataaccatgataatatggtgaaaaagcttgagaaggggacaaccgtagcatgcacaaaaccccttcaaaagaataccaagctttccaagaaagtcatgagcaaacatcaagataagaaatccaaagctcatgacaagtgcctcaaccacgtctccacatgctccacacaaggtaacaaacaagccactcttccaaataagagaatatgcactagaaagtgttatcaatgtcatgagaagggacatgagattaagtcatgtccctacataaaagatagtggcttaactttagaaagaaagaggctcactaaccatgtagcaaacaagaagcaaggcaagaaggagtcttgcaaaattaaaaatcagatttgctacacttgccgaagaaagggacacctatgcaaggattgtcccatgagtaagtatcctaagtctaccatgtcaattcattcatattcgcttaggagacccaaaaatgacatttgtgctagaaagggaataaggattaacctttgtgggaatcaagcaaaaggcctacaaccaagtgatatccaaaggatgccacatagaaaaaatgaagctcttgagaatgaacttaaaagattttaccttgctttggaaaggatctaa

SEQ ID NO: 3414 - DNA, 1650 bp, Zea mays
  Clone ID: MRT4577_103113C.1
atggatgctcaatttgatgtgactcaagaatggcttgatagggtgaagatagcaaggaaagggcttcgaggaactaagcgaagtctgcaagtcagactggcaaacaggtcgccagaggtgtcaggggaggctcaaccgccctgggggggcggttcaaccgccctagtcaaccctgaccagtctgcagatgttgatcctagggcaatagatcttgccatgagaatcgccgaaaggatgttcctcaaaatgaaggaagatgaggcgaagaacaaaattgaagaagaaaatgatcgatggagaccaaacgacgaatccacctcttcacaaggttcgtctttcaaatccacttctcatatgtgctttattgctaatgggagtgacagtgaaagcgaaagtgaggatgaggaggagcaagaaagtgatagtgaagatgaggatgatcttcaacaattcttcgctcagctaagcaagaaacatcggatgagcttgctcaaactcatgaaaagagcggaagaacaaaaagaaatgcttcataagcaagaagacttcctcatcagaaaaatcgaagacttagagaagttgaccaaagagcatgagaagctaaagtgctctcatgatgatttggtccaaaggtatgaagacatttcaattgagcaaattaaagttgttaatcattcatcatatattgctcaattagaaaataaaaatgctatgttcaagaacacgatagaaaggctaaatattgaaaatctagctttgcaagaaaaacatgatatgcttgtgtgctctcataataaatttatggattcacatatcatgttagaaatggctcatgaggttgtgttaactaatttgaaatcataccaacctcacatatgcacatgtactcaagtagaaactatattatcatgtgctaacaaatgttgctctcaagaaagccaatcttccattgagctagaaatttcaggaattagtgatatttctatcacacaagaaaataaagagctcaaggaagaagttggaaggctaagaaggagcttaactcttttgaagggaaagtgtcatgctcaaccttctcaagataaccgtgataatatggtgaaaaagcttgagaaggggacaaccgtagcatgcacaaaaccccttcaaaagaataccaagctttccaagaagggcatgagcaaaattcatggtgagaaaattaatgctcatattatttgctctaacaatgtacctatgtgcttcaacaaagaaagatcaaagagaagcgataggaggtgctatggatgcaaggagaagggtcatgaaattggttcatgcccccacatgaagaaccaagaccttgcacgatcaagaaagatgaccatcaagaaggatgaaagcaaaaggcaaatgcattgcaaggacaagcaccgcatttgctacaattgccgtgaaagaggtcatctattcaaggtttgtccaaagggtaaaactcctaagcctaacctgtcaatacattcaaatatgcttaggagacccaaatttgactcttgtgctagaaaggtgatgagttcaccacattctaggaccaaggctatttgggtgcctaagtccttattggctaaccttgatggacccatcatgagatgggtaccaaaatgtacttaa

SEQ ID NO: 3415 - DNA, 1419 bp, Zea mays
  Clone ID: MRT4577_103114C.1
atgtcggggggactaagaaacgaaagtgcttctaagcttgaaaaagttgaggttgcctcgactttatcttttggtgcagatattgatcctagggcaatagatcttgccatgagaatcgccgaaaggatgttcctcaaaatgaaggaagatgaggcgaagaacattattgaagaagaagaaaatgatcgatggagaccaaacgatgaatccacctcttcacaaggttcgtctttcaaatccacttctcatatgtgctttgttgctaatgagagtgacagtgaaagcgaaagtgaggatgaggaggagcacgaaagtgacagtgaagatgaggatgatcttcaaaaattcttcgctcaactaagtaagaagaaccggatgagcttgctcaaacttatgaaaagagcggaagaacaaaaggaaatgcttcataagcaagaagatatcctcatcgaaaaaatcaaagacttggagaagttgaccaaagagcatgagaagctaaagtgctctcatgatgatttggtccaaaggtatgaaaagatttcaattgagcaaactagtacttcaaatgctttatcttgcgttgctcaattagaaaaagaaaatactatgctcaagaacacgatagaaaggctaaatattgaaaatctagctttgcaagaaaaacatgatatgcttgtgtgctctcataataaatttatggattcacatatcatgttagaaatggctcatgaggttgtgttaactaatttgaaatcataccaacctcacatatgcacatgtactcaagtagaaactatattatcatgtgctaacaaatgttgctctcaagaaagccaatcttccattgagctagaaatttcaggaattagtgatatttctatcacacaagaaaataaagagctcaaggaagaagttggaatgctaagaaggagcttaactcgtttgaagggaaagtgtcatgctcaaccttctcaagataaccgtgataatatggtgaaaaagcttgagaaggggacaaccgtagcatgcacaaaaccccttcaaaagaaaaccaagctttccaagaagggcatgagaaaaatccatggtgagaaaattaatgctcatatgatttgctctaacaatgtacctatgtgcttcaacaaagaaagatcaaagagaagcgataggaggtgctatggatgcaaggagaagggccatgaaattgattcatgcccccacatgaagaatcaagaccttgcacgatcaagaaagatgaccatcaaaaaggatgaaagcaaaaggcaaatgcattgcaaggacaagcatcgcatttgctacaattgccgtgaaaaaggtcatctattcaagccacataggaaaaatgaagcacttgagaatgaacttaaaagattttaccttgctttggaaacgatctaa

SEQ ID NO: 3416 - DNA, 1545 bp, Zea mays
  Clone ID: MRT4577_103115C.1
atgtcggggggaaaaagaaacgaaagtgcttctaagcttgaaaaagttgaggttgcctcgactttatcttttggtgcagatgttgatcctagggcaatagatcttgccatgagaatcgccgaaaggatgttcctcaaaatgaaggaagatgaggcgaagaacattattgaagaagaagaaaatgatcgatggagaccaaacgatgaatccacctcttcacaaggttcgtctttcaaatccacttctcatatgtgctttattgctaatgggagtgacagtgaaagcgaaagtgaggataaggaggagcaagaaagtgatagtgaagatgaggatgatcttcaacaattcttcgctcagctaagcaagaaacatcggatgagcttgcttaaactcatgaaaagagcggaagaacaaaaagaaatgcttcataagcaagaagacttcctcatcagaaaaattgaagacttagagaagttgaccaaagagcatgagaagctaaagtgctctcatgatgatttggtccaaaggtatgaagacatttcaattgagcaaattaaagttgttaatcattcatcatatattgctcaattagaaaataaaaatgctatgttcaagaacacgatagaaaggctaaatattgaaaatctagctttccaagaaaaacatgatatgcttgtgtgctctcataataaatttatggattcacatatcatgttagaaatggctcatgaggttgtgttaactaatttgaaatcataccaacctcacatgtgcacatgtgttgaaattgaaactatattaccatgtgctaacaaatgttgctctcaagaaagccaatcttccattgagctagacatttcaagaattagtgatatttctatcacacaagaaaataaagagctcaaggaagaagttggaatgctaagaaggagcttaactcgtttgaagggaaagtgtcatgctcaacctcctcaagataaccatgataatgtggtgaaaaagcttgagaaggggacaaccgtagcatgcacaaaaccccttcaaaagaataccaagctttccaagaagggcatgagcaaaatccatggtgagaaaattaatgctcatatgatttgctctaacaatgtacctatgtgcttcaacaaagaaagatcaaagagaagcgataggagatgctatggatgcaaggagaagggccatgaaattgattcatgcccccacatgaagaatcaagaccttgcacgatcaagaaagatgaccatcaaaaaggatgaaagcaaaaggcaaaagcattgcaaggacaagcatcgcatttgctacaattgccgtgaaaaaggtcatctattcaaggtttgtccaaagggtaaaactcctaagcctaacttgtcaatacacttaaatatgctttggagacccaaatttgactcttgtgctagaaaggtgatgagttcaccacattctaggaccaaggctatttgggtgcctaagtccttattggctaaccttgatggacctatcatgagatgggtaccaaaatgtacttaa

SEQ ID NO: 3417 - DNA, 2237 bp, Zea mays
  Clone ID: MRT4577_103116C.1
atggcctcagggcggacgccgctgcaacaatgccctcgcccacatctacgctcgaggggcgaggacaagtacaaagagccggaggtccggagcgcggatggtggcggtgatcccgccagggacccaacagtgccagccaggcgcatcggtcacgggccagtcagcctcgggagaaggcgcgatggtcgatgcggccaaaaatgggccggcagtaatggcggtggcaggcgggcggaagcagcggtcacgtcgtcagccaagctcacgtccccacatgggacggatgtgactcaagaatggcttgatagggtgaagatagcaaggaaagggcttcgaggaactaagcgaaggttcaaccggttttttgcactgttcacctttttgaaaatactggttcagccggacactcaaccggacactcaaccggtttttgtctggtggaaacagctttggtactacatcgagttctttgtggattcattactcttggagcttctagctcctagacgactaggtgtcgcttatgttgatcctagggcaatagatcttgccatgagaatcgccgaaagggtgttcctcaaaatgaaggaagatgaggcaaagaacaaaattgaagaagaaaatgatcgatggagaccaaacgacgaatccacctcttcacaaggttcgtctttcaaatccacttctcatatgtgctttattgctaatgggagtgacagtgaaagcgaaagtgaggatgaggaggagcaagaaagtgatagtgaagatgaggatgatcttcaacaattcttcgctcagctaagcaagaaacatcggatgagcttgctcaaactcatgaaaagagaggaagaacaaaaagaaatgcttcataagcaagaagacttcctcatcagaaaaattgaagacttagagaagttgaccaaagagcatgagaagctaaagtgctctcatgatgatttggtccaaaggtatgaagacatttcaattgagcaaattaaagctgttaatcattcatcatatattgctcaattagaaagtaaaaatgctatgctcaagaacacaatagaaaagctaaatattgaaaatcttgctttgcaagaaaaacatgatatgcttgtgtgctctcataataaattgatggattcacatatcatgttagaaatggctcatgaggttgtgttaactaatttgaaatcataccaacctcacatatgcacatgtactcaagtagaaactatattatcatgtgctaacaaatgttgctctcaagaaagccaatcttccattgagctagaaatttcaggaattagtgatatttctatgacacaagaaaataaagagctcaaggaagaagttggaaggctaagaaggagcttaactcttttgaagggaaagtgtcatgctcaaccttctcaaggtaactgtgataatatggtgaaaaagcttgagaaggggacaaccgtagcatgcacaaaaccccttcaaaagaataccaagctttccaagaagggcatgagcaaaattcatggtaagaaaattaatgctcatactatttgctctaacaatgtacctatgtgcttcaacaaagaaagatcaaagagaagcgatagaaggtgctatggatgcaaggagaagggtcatgaaattgattcatgcccccacatgaagaaccaagatcttgcacgatcaagaaagatgaccatcaaaaaggatgaaaacaaaaggcaaatgcattgcaaggataagcaccgcatttgctacaattgccgtgaaaaaggtcatctattcaagccacataggaaaaatgaagcacttgagaatgaacttaagaaattttaccttgctttggaaaggatctaaaatgattctctcaatggatgctcaatgtgatgttactcaaaaatggcttgatagggtgaaaatagcaaggaaagggcttcgaggaactaagcgaaggtgaaggccaaacgccggcttgtagaccgaggtcccatggttaaggtgaaaaaaaaagtacttgccctaagtcgatgaactaatcagctatgaagagttataacatgttgatgcatcagtaaggtgacttgaaaccaagatttgaactcatatatggtgatatgggacaagtcccagggtttgatttgtgtttgcttcaaaaggtgagccaaaaaaaaaaaaaaaaaaaaaaaaaaaaaaaaaaaaaaaaaaaaaaaaaaaaaaaaaaaactcgaggaggg

SEQ ID NO: 3418 - DNA, 1296 bp, Zea mays
  Clone ID: MRT4577_103117C.1
gccggccgtttcgggattcccgacccccatttcccacctccgcacccctgctcgctgtccacgaagtctccacgtcgatcgccgctgtttaccatctcaggagccctctgctccgtcccagtcgctggtgggtagctccgagaagcctgcgtcctcctctacaattcccctactttgcctgctgctgttcgcaccgctcgccgttgtcgtgtcgtcgagccgccggcattcgcgactcgctggagcatcgtttgtcgcagactttctgcccttgtgccgtcttcagcgcggaacatcgctagagcacctcgccggagctgtactgccatgtgccatcggaagaagctgctggacgtcgttcgattccatcaccgcaccggtcctgctgcttcatcgtgtcgctgcccgtgttcgttggttcagctcgccgaagctatcgccctcgtcatcaaactaagtggttgatctagtagttaagaatcaagatctattcagatccgtggaagagtctcaagaagtttgcagatgaagatatgatgctgaactccatggatgctagtctagtgatacccccggtcatcttcctgtggatggatgtccttgctcgctgtactttgatgaataaaggttaagacattatgtctgtttgaagtgtaatatgttaatataatcgttatttacgctttaaaaaaaaaaaaaaaaaaaaaaaaaaaaaaaaaaaaaggccggccgggaaatcaaccgagcactgttctttgtcccttagttacgaagctaacggctcactagccaccctattctgtccaccatcatcggagatcatcggatttccctgggatcggtctcttctgccgccgtgaaggacctcttcgtgggcagcccttctcggaaaacaaagaagagatagaagttgaagaagcaaggactacaccaccaccacctgaagaaccacaggtcgggaactgcttttactttgacatctgtggagcagagcctgactcgcctataacacaaggtgaggaagcagcaaatttttgttgcttttgttccaaggtggtgcctaaggaagaaaatcaaggctgaagcctcgggaggaagtgtcctccttttaaaaaaacttttactgttaatcgggaggggttttgcctcccaaaatatgtaataatattactccagcactcttatattttactggtctgtaataatactactctttctatactttaatataaaataaagttgttgtaaccgcttaaaaaaaaaaaaaaaaaaaagcggccaaaaaaaggggcggcc

SEQ ID NO: 3419 - DNA, 417 bp, Zea mays
  Clone ID: MRT4577_103118C.1
tttgaagaaagatcctatatggctacggctggggtagctatcactagtggcagggctcgcatccacggaggccattatcttgatctggttggctaagaccaaaaacatgctgaacaaagcgctatctgcaatgaagtggtggaatctacggcattccatgataaggtaactcgaggtcaaactgaagaaatggaagaacataagaacattcctcaaccttatgaacttcacgataatcatggaactaacgatccgggtccgacatttgatttttttcagaacaaccaacgcgctgtctacaatcaagtgggataatcagtggtatcccatgaaaaggcaacacacggggatactgaacaaatggaagaacacaagaacatccctctacattatgatgttcaggataataatgagaca

SEQ ID NO: 3420 - DNA, 258 bp, Zea mays
  Clone ID: MRT4577_103119C.1
acccttggccgcaaccatagcaacacggctgcgctgtgtcgactccttctcgcccggcaacatcgatcgcggatgtggcaacagcagaaacttatcagccatggggaagtcggcgtcggggatggtcgtcaccaactagtggatgctcactttccaggagctcaaggcgaagctcaccatccggttcatcacattctccatcaacgatgacatcgaccaagtcgtcgtcgacacgatgtggcaacccggcgacgtcta

SEQ ID NO: 3421 - DNA, 330 bp, Zea mays
  Clone ID: MRT4577_10311C.1
atgaaggccctttttaaaatatatatatacaatcaaaccatatcatcacccaccaataaaaatttctttacagcaaacccaatctaatcaaccaacatacacgaaaacacacacacattaccacaaacactctccccaaacatccatacaacaacaaacaactcaaaaactctttttatttttttctcacacacacaccaaacaaatcctatttatggcatccctctcgacctctcttattattgttcaaccaccaccacaagctactattacaatacatatatccattgtcaatcatcaactttaacaacatattcaggtgtcacactt

SEQ ID NO: 3422 - DNA, 370 bp, Zea mays
  Clone ID: MRT4577_103120C.1
cccacgcgtccgctctccttggccccggctagcgaacccttatcagtcgctctcgttggctcggagcagcgatgcgcaccgcctgcctccgccccaaccccgccattggtataaaagcctcccctccgcctccctccttccgccactgctaggtccagccacacccgcgctcgccccggccaccgccgccgcgctctcacggtcccacctctccgtggcatgagaagatggccgcgtgctccaggggactcgcgtggccgccgttcgatctgatcacggcgaggggggcggcgtcctggccgcgccggcgtgccgcgatccggtgctgctgcgccggagcagacgcacagccgcagaggcgactctcgag

SEQ ID NO: 3423 - DNA, 460 bp, Zea mays
  Clone ID: MRT4577_103121C.1
gtcgacccaggcctctgctctttctcagataatcttggtccacattctcgtgccctgtcctttctcacatcccgagccttctccccatccgcaaacactcgctttcactcgcactgcgtggaacactcacgcatcctcaggtaccacgagtgatcacacagttcccacgttctcgccacttggtggccccaaccatagtctaccatgaacgaagtcggagccggtgtcgcgacggtctcgtcgctcgtatcctccatcatcagcagctcgaaccgtgtgcgggtgaacaagatccagtgccaggagttggcaagagagtgcaactggctccgcgatcgcctggaatctggcaatctaagcgctgctgatggtcccactgtcgaggctatcaacgaccttctggtgcagtgcgacaaggacatgaagaagtttgcaggaatcggcttttccatgcgcacca

SEQ ID NO: 3424 - DNA, 537 bp, Zea mays
  unsure (1)..(537): unsure at all n locations
  Clone ID: MRT4577_103122C.1
cggccggatcaagcatgcatgtggaggagggctttagcgatggtgctgttcatggctggcgccgcgctgctcgccggggccgccggcgccagcgcgcatcagggcgtgtggagcatcatcacccggcccatgttccagagcatgctgagccaccgcgccgacaccgcatgccagggcacctcctacacctacgacgccggcatgaagaccgcaacccgggcccctcgtaccggagcagcgaacgccagcaaccgcggagggaggcaaaggtccgacgccgaactcgccgacaaggccgccccgggaggcctttcgacaacgggccctggcccaggatgaaggtttttttttttcccccccccccccccaggtncgcggaactgaccgacgagcacgtgggaggagctggaacaagctggacaaggtggacgccggcaactcgttcgccgtgggcaaggcggcgaaaaatcccgggcgccgcgcacctgctggtctactacgccggcgccgccgacaaggcgtacggagcgacgctca

SEQ ID NO: 3425 - DNA, 232 bp, Zea mays
  Clone ID: MRT4577_103123C.1
aacaaaaatggcctgaaacacaggttgactggccacggaaacttacagactacaagcaaattttcacgcgataaaaagctcgatcgagggagaaaacaaaggcagcgggaggaacatacaaccagccccgggcataccgatggcaccagtaggactaggaaccgatcacctcctgtttgtgctgctccccatcagccgggaaatgtagaataggatgcggaagaggaacccc

SEQ ID NO: 3426 - DNA, 179 bp, Zea mays
  Clone ID: MRT4577_103124C.1
cataaatgaggaaaaaccggataagacatgaaccaggatcagactctaatggtatagcaccacgaaaagtccgaaggtacacatgaaaatacgaagtacgggtagctcaacgtcctcaagggaatcaggggcatgacaaaccagcctcactttatggcaaaacgtatcccaagcctgta

SEQ ID NO: 3427 - DNA, 347 bp, Zea mays
  Clone ID: MRT4577_103125C.1
gataacaattgctcacccatatggcatcatttatttgggaacgttaaacatggcaggatagagttccaaaactatttggttttaagagactcgccggccttggcaagctcctccccttccttgtccgtgagtgctcccgtgtccagccccagctctgggcgcgctacgatatgggtgtggagagatgcctgagcttgggtggcctgacgggagcactcatggactaagagctggaggagcttgccaaggccggcgagtctcttaaaaccaaatagttgtggatctctatcctgcgctgtttaacgttcccaagtaggtgttgccatgtgggtgagcacttgttattc

SEQ ID NO: 3428 - DNA, 410 bp, Zea mays
  unsure (1)..(410): unsure at all n locations
  Clone ID: MRT4577_103126C.1
aacnnaagggaagtttttttatttttttggtaggggaaaaaataggttcaaaaaaaactacaattgggggggggaaccaaaaacacccttctttttataaggagcgctgtttcaaagttcccaaaaaaaaggaaacaaattacccttggacatcaacaggtttagcctttacacgcgtggagatcagcgaagggcctgcatatttgattggtcttaaacccaaaagcccggtgccccggggccttttaatttgatcgacgggcgggccccccttcccagaagtcaacaccgccggcgaacgcccccattataccattgagccttatgccgagaggaccacaaggtggcgggtccgcaaatgccataaacccactgatgcacataaccggggccggttgctccagcttaac

SEQ ID NO: 3429 - DNA, 797 bp, Zea mays
  Clone ID: MRT4577_103127C.1
gggggggtaccctcaggttcggcctcgctctgtacatcgcattcttctccccgggcatggggcccgtgccgtgggccgtgaactcggagatctaccccgaggcgtaccgtgggacgtgcggcggcatgtcggccaccgtgaactgggtctctaacctcgtcgtggcacagacgttcctgtcgatcgtggggctggtcgggaccggcccgacgttcctgatcgtcgccgggatcgcggtgctggccttcgtcttcgtggccacgtacgtgccggagacgaagggcctgacttttgagcaggtggagcagatgtggagggagagagcgtgggggaacagcggcggcaactgcgagagccttttggcgggtactgctgctgcgccgtaggctacccgttgccagcactggtcaagcgcgtcagttttagtatggccgctctgggcttgatcggctccgtcctggcattagttggaagaaagtaaaaacagattggagatgcagatgcaaactgttgtatgtggtggtgcttatattgctatcctgttgcctgattgtacgtgttgtcgtcgtggcaaatgttcagtgggtgtaaaatatgaggtcgtaccgtgacgtcaaactaaggcaaaaggccagttgtatgaccccagatgggtgattataattatttgtacagtttccggcataaaaaaaaaaaaaaaaaaaaaaaaaaagaaaaaaaaaaaaaaaaaagcggcccggaggctgccatatacaatggcatgaaccatttgcgagaacgtcgccgatttttaagga

SEQ ID NO: 3430 - DNA, 371 bp, Zea mays
  Clone ID: MRT4577_103128C.1
accacgcgtccgaaaaaaaaaaaaaaaaaaaaaaaaaaataaaaaaaaaaaaaaaaaaaaaaaaaaaaaaaaaaaaaaaaaaaaaaaaaaaaaaaaaaaaaaaaaaaaaaaaaaaaaaaaaaaaaaaaaaaaaacaaaaaaaaaaaaaaagggggggccccccaaagggttcaagcttaacttacccgtaaatgaaacttaaaacccttccaaagggtcccccaaatttaatttcaggggcgttcttttaaaaacttcgtaatgggaaaaccccggggttacccaatttaaacccctttgaaaaaaacccccttttcgcaaatgggcttaaaacgaaaagggcccgacccattccctcttccaaaaatttg

SEQ ID NO: 3431 - DNA, 561 bp, Zea mays
  Clone ID: MRT4577_103129C.1
cccgggggaggaaacagcagtcagcaggcggagcagagggtcggacggcgagagagagagagagaaggaaacctaggcagctttccgtttcgggaaattcccgggcgccccgtccgcgctgccccgctgctcccgccgccggtggccaagcccccgcagggccctgcgcggctcgctcccgccaatcgcacgcgggatcgtcgctctcgggagggggtcgggggctcgtggcggcgctgcgctgtgcgcgaggatgcgccgcgcgggcggctcgctgctggtctgttgcgcgcgcccgccgcgagggtaggtttggtgccatggaagggacggcggcggaggtgggcggcgctggcgctgacgcggccggggatgtgcagattaagggtgccaaggagaatgcgcagcccacggcggcgcagcagcagcagccgtccggcagcgaggcgctggagatgccggccacgccactccagcgggacatagactggtccgagcatttctccttcttcacctcgctgggtgggtttcgggggcagctcggacggcgcgatggggcct

SEQ ID NO: 3432 - DNA, 222 bp, Zea mays
  Clone ID: MRT4577_10312C.1
cgacggatgcagctaccgtcattcaggctccagtgccaccccgtgccatcgggctgcgtccgctatctaccgagcgttcgtgcatggaccagagcgtgggacggagcaatggatgttgagatggaggcagtcgaaggagagatggctacggacttgttatggtcttacactgacgagccgtacgcgttgcgccagcggaagatcatggctatgtacagttaa

SEQ ID NO: 3433 - DNA, 393 bp, Zea mays
  Clone ID: MRT4577_103130C.1
tgactgatggcgatccaacagggttttgtttacatactctatcaattcttgtgaatgatgtccgtggagttctcaatcttggaacaggtgtattctccagaaggggctacaatattcagagtcttgctgttggcccagctgaaaaagaaggaacttctcgcatcactactgttgttcctggaactgatgaatccattgccaagctagtacatcaactgtacaagctcattgatgtttatgaagttcaggattttacccacttaccatttgctgctagagagttaatgatcataaaggtcgcggcaaatgctacagctcgaagggatgtcttagatattgctcagatttttgaggcacagaaagttgacatatcagaccacacaattacactac

SEQ ID NO: 3434 - DNA, 688 bp, Zea mays
  unsure (1)..(688): unsure at all n locations
  Clone ID: MRT4577_103131C.1
tattcggcacgaggcttgtttggtcattccagtcattccatccttcagaagctatgatgtctgacattgatgtgtaggcaaagatgacccgagaatatggtctccatgctcgtccaagccatatggaaccggtgccacctatgctacaattgacaaatgagtagccagtgttgtcatcttctgattcccgggcatgtgcagtgactgaaccagtaattgatctttgccctgaaggcactggatctgcaatggatatcaatctgcaattctggagggcaaaaaggtaaaagagcagttggtaacttcaatacattattttgcaatcctttcaagtatttattttcactcacttcatagagtgacctagcatctccaaagataaagtcaatggagccctggatgaaacattccttgaagtaatgtcggcctctgtcgtcatggagtgtgtcttgcgctccaaagaagccacaaccccagaatgctgcttggtcaccattgatcctgattgccactgcctgtgcatcgacagcaccgggcctcggaatcggtgctacattctgggtgcaaacgatcaggaaaagtattaatgtaacccatggtgaaagcctgcacctagctgaaatatgtgtgcagcatcgaggcaggtacaatgaagcttatgntcttgccgatgaatcctgatgcgaaa

SEQ ID NO: 3435 - DNA, 438 bp, Zea mays
  Clone ID: MRT4577_103132C.1
atggcgcacttttgcagcgataaacgccactttgaacaggcaactgcgccgcaggggcgtaggcgaccttgcaggctgcgggcagtcgaccgaccccgaccggactccagagcttggatgactactgggcgacctggacatcatcacctggacgatgcagctagggaccccattcctgatgcactaaaacattgccaagggacatctcagaccacacctcctgaaccatcaaagtcaaaattaacgtccctaggcctaagaccttcatatttgaaaacttttgactacaacataaggatttccccgcccttctccaagatgcttggtcccagcctctgcatcaaatccggcaaaggagctgatgacaaaattcaaaaaagccaggaaagctttaaaggaatggcacaagaaaatacccaagctatcgaatacaattga

SEQ ID NO: 3436 - DNA, 1657 bp, Zea mays
  Clone ID: MRT4577_103133C.1
cattgggctcgctcgaggccggccggcacggagccgccggtcctagcctggaaccaaccacctcatccgtctgcgtgtgcgcgctgactcccccctctcccaaaacccccacactcccccttcggcatctccgatatccgttcagcaatgaccatgaacgctgcgatcgcctcccgactcggcctcgccgtctccaggtgtggggctgggtcccgagtggacagccggccgctgacgccggcagtgggtttcacggcggggccgagggcgcgctcagtagccgtcaccgccgcctcctcttctccggcgaccggtggcgtgacgccggtgccaccccgctcgaatcgctcggttatgaagcgtcacacgctatcagtttttgttggtgatgaaagtgggatgatcaatcgaattgctggggtttttgctagaagaggatataacatcgagtcattggctgttgggttgaacaaggataaagcattatttacaatagtagtgtcaggaacagacaaaatattaaaccaggtcgtagagcaactaaacaagcttgttaatgtcataaaggttgatgatttatcaatggaaccacaagttgaaagagaacttatgcttataaaagtaaatgcagagcgagaaaagttacctgagataatgggtttggttcgcattttcaaagcagaagtggttgatctttcagactacacactaactattgaggtaactggagatcctggaaagatggttgcaatacagaagactctgagcaaatatgggatcagagaaattgctagaactggcaagatagctttgcgccgtgaaaaaatgggagaaactgctccattttggaggttctctgcagcttcttatccggatctcgaagtggcaataccttcaaatttccagcaaaacactggtgtgaaggcaatcaatcagaatccggaagaatcttcagggggtgatgtttatccagtggaatcttatgaaagcttctcatcaacaagtcaaattctggatgctcattggggtgttatgactgatggcgatgtacggtcttgtgttctaatgactttgaactgttttgtgctagctagagatgatccacatctaattgtactcatttcactagaagtagtgtgttgtgaaaagtaaagaaggcatggttgcatgagtacccagaatccaaattcgagagtagcttatatataaccaagttatggttcacaatgaagaatctaaaatacaattactgcaactaaatgcacctatttatgaactaaactagcaatttcttgttgcttcagccaacagggttttgttcacatactctatcaattcttgtgaatgatgtccctggagttctcaatcttgtaacaggtgtattctccagaaggggctacaatattcaggttgttcaaagcaatttaatattttatgctccctttattatggtaactgcataatccagtccttgctaaacattaaccttcacattcagagtcttgctgttggcccagctgaaaaagaaggaacttctcgcatcacttactgttgttcctggaactgatgaatccattgccaagctagtacatcaactgtacaagctcattgatgtttattgaagttcaaggattttacccacttaccatttgctgct

SEQ ID NO: 3437 - DNA, 277 bp, Zea mays
  Clone ID: MRT4577_103134C.1
ttgcgatcctgatctaagcccggcatgaacagctgctcagagcgtttgatgctcctgctcctgctgctgctgcgatcgacgtcgcaactgtccgccgtggctgccgcgcatcagacttgccccgccgacctcgacagaaaatgcaacgaaaatgttcctgatgactgtaaggaggaatatcttcccagacgttccgacaatcaagtatgaggatacaacaagcaataaccctcttgtttataagagtgataaccaggaggaaatcatcctcgtaaag

SEQ ID NO: 3438 - DNA, 307 bp, Zea mays
  Clone ID: MRT4577_103135C.1
agccccctttccccacccaggctccgccttgcggggcctcgcgaacgagctccaccaggtcctaaccaagctcagcctcgcgcacccttacccaggtgggtatagaatgctgtgcctgcgacgactaccagaacctgcgtgcactcttacgacccgaaggaaaccccaggagcctcggagatgacgtgcaggctgccgagcaccacgactatgaggacatgctcgcctgcgtacgtgccaccaaaacctgcacgccgaagcacaggaccaatgcctgcagagagcgttcggcccctgctcgatacac

SEQ ID NO: 3439 - DNA, 358 bp, Zea mays
  Clone ID: MRT4577_103136C.1
gcctgcagtctacttagagatccttgtgaatgttttgatttacaagagttggggcagcgtgtgctatatgaatggtaattatctgatttattattatgcctatcctgaagccaaacgagatgagatcggaattcatcatggaactgcaattgcacatcttcaagaaataaggaggcgtaaacgtacatatatgaatcggaaattatgcgttctcttattaggcctatcctgatgccatcggaaatgagatcggcatgactacgagaattccaattccacattctgaagacattatgatgcaggactgttcatatatgaatcgaaattactagttctctcattacgcctatcctgaagc

SEQ ID NO: 3440 - DNA, 146 bp, Zea mays
  unsure (1)..(146): unsure at all n locations
  Clone ID: MRT4577_103137C.1
ctcnatttgtaagctttgcttaatggagggggcccctttttttgggaactaaatttcgaagaacattttacatataggatgggttttttagaacaaacagggaacccctgaaaagtccaagaacttattatttggtgacccaaaaa

SEQ ID NO: 3441 - DNA, 188 bp, Zea mays
  Clone ID: MRT4577_103138C.1
cgctacttcgattagcagttgcccgcatccacgctgaaggggaagccggccgagtcgtcgtcgacgtcgtggactgcgctgttcggtttcggttgcatcagctcttcccatgtcgaccgtactggtgacggcccgggcaatgtggcctccgtcagtgtccaggctcccgcgtgaccatcaccggtgct

SEQ ID NO: 3442 - DNA, 377 bp, Zea mays
  Clone ID: MRT4577_103139C.1
caatgtactatcacaataagacgaagatgccaccaccaccttgctcttgcttctctgctgtctctgttcccttctcctccttcaaaaccataacaatgctcctcctcctcctcctcatccttcagcaactgtctgcggcagctccatcgtagccatccaggagaggaggtacgcggacgccaagacgtccatgagcgccgcggtggatgcgcccgtcacctgcgaggatgagttcaaggagcagggcttggagccacccatgagagcggagaccaaacgcctgtttcaacaggcggtcatctccctcgcaatcatctccctgctatgactatgggtgtgtttgggtttgctttttgctttggctttttgcccctaaa

SEQ ID NO: 3443 - DNA, 503 bp, Zea mays
  Clone ID: MRT4577_10313C.1
ccggccgggacatcatgtattgctcttcctctacctgatttctctttctgatccttctcctacgaactgatacgtagcccgacgaggatatgccatgaaataagtcttaggaaaaccacttccgatcatttgcctccctggcgatctaccgaaactgcacgtgccacgatggcaacgtccatacagaccgcatcgtaccgcatcgacaaccgccactgctgggtggtgcaattctctacctccgagactgataacaatggtcgactcaaataccacttcttctccatacatgtcttccctgcaaaaaagcttggagtagatagccccttcataacataactgcgacattccccatgcttaccgcactgcactatcacaatgaaagctctttctgacaatgcccttcccagactacctacatcagaaggtcacactaaggatccctcttaaactcccaaccgatcagactattacgcgccacagtatgcaaggatcctttagcg

SEQ ID NO: 3444 - DNA, 173 bp, Zea mays
  Clone ID: MRT4577_103140C.1
acgcccacgcgtccgcttaattcatctgatagagttccaagagcagccatcatttgtgttagggtactcactggtgtcattgtcttaatttttctggggggttatctgaaaccgaggctatttagaaacagacccttggctcttgtacctgttagcaaaggcaaaggttccat

SEQ ID NO: 3445 - DNA, 284 bp, Zea mays
  Clone ID: MRT4577_103141C.1
gtatttataagttaaatgacatccagaggttgagcaagtacagctcagatgggacaggaccgtggcttagcctccagtctctgctggcactcctctgtaccccacagattcctggagttctgtaaagaaaacggagggtataccgggtgtcccttccctgccaaactggacctgcaacagggacagaatttactgcaaggtctgagcaagctcagcccctctacctcagggccccacagtcatgactacctcccccaggagcgggagggtgaagggggcctgtc

SEQ ID NO: 3446 - DNA, 290 bp, Zea mays
  Clone ID: MRT4577_103142C.1
cgtcgtagcttggatacttacagcgcgccgccttaacccgggcgctagctcttctgggggggagcaaacgaccacggggctggatataatactcttagtgcatactatatatacgacggtgcaaacccctgactctgaaatgtagcaacgcgttcgcgccctataacatggaaagggaccggttcaaacacacaacacataatacgtagttctgtttatcagaaagaacaaggtaccctcatatgcctccccaggctgtaacttgtgccaagagcaccaactaggccttg

SEQ ID NO: 3447 - DNA, 206 bp, Zea mays
  Clone ID: MRT4577_103143C.1
gtccagatcattccgacgctcagagacctcggattattggaccgttgctgaatcttcttcatgaaagggaaccacatgtgtctcgacaggcagcaatttccctgaccaagtttgcgtgcacagataattacctgcacgttgaccattaccaagcagatcatcattgcaggtggagcgacacacctagttcaggtggtcgccccccg

SEQ ID NO: 3448 - DNA, 266 bp, Zea mays
  Clone ID: MRT4577_103144C.1
atatgtgattttaattttatttttttgttttttttattattttcacatttattttttggcaaaaaaaaaaaaacaagggggtaaaccccctgggttggcccatggaatgaacctttttccttcccccttataagcctactaaccaaaacccgggaaatgaagagtgcgtaaactccaaaagattgctctcgttgaggaccccgtaaaaaccgaaaaagggaggtcccgtaacaggtccctttttgatttccagccaatccccacat

SEQ ID NO: 3449 - DNA, 476 bp, Zea mays
  Clone ID: MRT4577_103145C.1
cccacgccgttttcgaccttatcgatctcctgtcacctgacgcggggacctatacccttcgatccactcaatggttcatgatcggtggtgatggagggaaggctagcatcactgacctctcaagctgtgcactgcggggaagttcgcctagaatcatggcggctcctactacaaggagctcatggagaagaacacgcagtgcgcaaagcaagcaccgaccatcggcaaatgcacaggagctctgcaagctgctcttatacacctacctcggatgcctaccaggtcagtatgagtcatagtacaaggagcttgatgtttacaatcaggtatggaagaacacgaaggacctgaaggttgacgacctcgtgatagcgactatatgttacactcgacctttatgcatggttctgcgtaagcgaaattgctggcacaggtttgaccttaaccggctataaggtctagttgatgtgcagtga

SEQ ID NO: 3450 - DNA, 261 bp, Zea mays
  unsure (1)..(261): unsure at all n locations
  Clone ID: MRT4577_103146C.1
ccaggcacgcgcacgaagctcggaaccggcttagggagaggagagagcggagaggacaggngggnccgggcaccatggcaccgaagaagcagcacggggcggagacagcgaggaacgcgacgaggagcgcaacggcgccggaggaggccggcgccgaccacgagaacgcgcccaacaacggcgcctttgccgagcgcgttgagccccgagcaccccgaccgcaacccagaagggcaggacccagaccccgcaggacggaga

SEQ ID NO: 3451 - DNA, 143 bp, Zea mays
  unsure (1)..(143): unsure at all n locations
  Clone ID: MRT4577_103147C.1
attcgtgtgtngcattctctcatgcgtgatcgcataattcggctctagggtatagggtcataataagtcatatgttcatgaatacaacatgtagtgcgaacatatagtccatgtgcttactccactctctagtctcggtctca

SEQ ID NO: 3452 - DNA, 576 bp, Zea mays
  Clone ID: MRT4577_103149C.1
attgggacctcgagccggcgggcttctgtagattctatcatgcctctgcggtgcttcgttgaatttcatgtcctccccgatccccacaatcgaatgctagctgaaaccctaacctctcccttctcgatgtcggtcgtcgcaccgtcccaacccgtgtggtgttcccgctatggcgccccctccgtctcacctatcctcctccacgatctccgcctccgtgttcgcatcacattatctaaaggaccagctctatgggcgcctcatgtcactccattgccacatgtacttcggccagatacagaatgagtacgtgtatctatgaccagaagaacctcgagcgcgaactcctccgtgcgcatgaggagtcctagcgtctctcagacgtacgcgttgcgcttcatcctctgatgaagatgtccgaagctgacgaactaataatgtcctgtactacattcagcagatactatgtgttgatgctcagcaccatcatgccgtctatgctgctcgagacgtactcatctgtcacgttgatttttcattccaaagatttagtcgacgagctgacgtcctaggacg

SEQ ID NO: 3453 - DNA, 651 bp, Zea mays
  Clone ID: MRT4577_10314C.1
cgaaccatgaacatatgaagaagcggttaacacctgcttattatcctggctgctgctgctcggcactctcacactggcagcacgtcctgacgcaggcggcggcctcgatgcagccacggtagccgcgcaggagctcgaccgcgtcctgtcgctgcccgggcagccgagctactcatccgcgtcgcccaagcagtactccgggtacgtcacgaccgacgagcacctaggcaaggcactgttctactggttcttcgaggccacggagacgcctgacgagaagccactggtgctgtggctcaacggagggcctggctgttcttccattgggttcgggcagtcgcaagaactcgggccgttcctggtgaagaaagatgtccctgagctcgagctcaacccgtatgcttggaaccaagctgccaatctgctgttcctggactccccagcgggcgtcgggttttcctacacaaacacatccttcgaaaaggatccaccgggagacaattccacaggtatggagtatgtatacatgtctgtcggatagatagatatagatacgagacgtctactactcactgtaaaaacaaaagcaagtgcatgccgtaagaaacatgcatgatgacgaataaacgatggctgccgtctgcacccgcg

SEQ ID NO: 3454 - DNA, 123 bp, Zea mays
  Clone ID: MRT4577_103150C.1
tcggccaagttcgtgttcgagtcgtacgtggcgatgaagatgttcggcaacgtgggcaccgccgctacttcaacttcagctttctgggcgagcgggagttctacgagcggcggcgcttttttc

SEQ ID NO: 3455 - DNA, 393 bp, Zea mays
  Clone ID: MRT4577_103151C.1
cccggtcgacccagcgtccgctgagaaggaggctaatggcgcagactcggacgcctcaagtgaggcctccttctacagtggaactgactctccgaaacatgaggacggtgaacacagcatcgcaaagaagagcggctgagctaaactgctttgattgctcaaattgagggagctgaggaatggaataggtcaacatatctagcttgaacgattgtcaggaccgatggcgatgagccgatgacagattacaagctggttagataacgttgccgggtctaggcggaatgtatatttgctgctcatgatattagagtatatgtaagagtttggaccatcaacgctgaattggtgatgcgttatacatctttggaataagtttaacttctccgcggt

SEQ ID NO: 3456 - DNA, 426 bp, Zea mays
  unsure (1)..(426): unsure at all n locations
  Clone ID: MRT4577_103152C.1
aaacaaagtgctctatttaaaggcttcatacagctttgacagcattttgtatgtaatgtattacttcgcatgtttgtcatgccgtgttggagttgtacttagatagttcatgatagatatttttggaatgaaatgtacanccgggagggcctcactgtgaattcatgatagattagcaagcaggatgaacatttgctgaagtttttttttttttttgctgaattcatgatatagattagcaagcaagatgcaattcattcatggggttgtcatcttgaacatgaaaccttaccttaaattaaatcatgccgcagtagacatatctcttcctttaacaaggaaacccaatgttccattacctgttaagcataaaaatatttattttagtattagatcagaaggttgggatatgttttttacttaaaa

SEQ ID NO: 3457 - DNA, 715 bp, Zea mays
  Clone ID: MRT4577_103153C.1
ctatttggaaagactctgtgtttttgaaggtttcaatgtacatataacttttgaacaaaccccaaactcttcccataaattatcttttcttctgtatctctgttacaagcgtagtgtgataataccagataataaggaaaacactcataaatatacaaaactttttcagtgtggagtacatttttccaatcacaggaacttcaactgttgtgagaaatgtttatttttgtggcactgtatatgttaagaaattttattttaaaaaatataaaggttaacgtccataataaatacttctctttgaagctaccttatcaagaacgaaaaatcgtatgggaagaatcccctatttatcactgctatattaaaatatatatattttaattatatttgacaggttttgcatctaaattgacctatttattcattcttgattaaatgcactgaaaagtaaagggtctgtttgtgtcatgttcatgaaaatgcggttagagaggtgctattcaagtgattctgaaggcaccccaaggtatatctgtaatttaaagattactgcaaatatctttactttactgtgggtttttagtacatctgttaatttagtgtttctttgtgtgttttgtagactagtgttcttccatccttcaactgagctcaaagtaggttttgttgtaacattgtgattaggatttaaactaattcagagaattgtatc

SEQ ID NO: 3458 - DNA, 145 bp, Zea mays
  Clone ID: MRT4577_103154C.1
gttgacacaagaccacctttattgacgtgaacgcacatacgactgctccggacgacagaggtagttacaagaccagatcatagtggatgtcgcaagtgaacaccgagcaggacccaccagcctgctgcccaggggtccataaaac

SEQ ID NO: 3459 - DNA, 299 bp, Zea mays
  Clone ID: MRT4577_103155C.1
gtgcctgccgcttgtcgtgctgcgggcgggcactgctgcaagtactagaggaggacgtgcggtgtccattagtgcgcgtgcggagggtcggaggaaccagtagcggagggttcgggtttcggcgggcgcgatgggtttcccgggatggctcggaggggcgcgtcgtcgctcgtctcccggtgcgtcctggcgagggcccctgccggcgcgccgccggtgccccctctgcggcgcgcaggacagtgcctgcagatggggtgcacaggctggtgccaggtgtccttcagaggttcagcagt

SEQ ID NO: 3460 - DNA, 833 bp, Zea mays
  Clone ID: MRT4577_103157C.1
aatcccctcatctccactccgccgccgccgcactccagctaccacgccgtcgacccaaccctcaacgctgccccagcagcatcggtcgcggccgtcgtcgtaccagctcgccgctccacctgctcgcctactgtcccttcatcctcaatggtggagcgacccacgccgtgtcctcgtcggcgcctgtgtgcgtccgcctcacagcacgctcgagcgccccctccttgagtcgtcgccacctgggaaagcagcgacgatctgcctcaccaagatgacgacggctgcctcaagttgggggacacatctagttggtgatagaccaggggagacgttgctccatgaacaggggagtacaaacaggagcaggtggataaactctccacgaagctcaccagaataaaaatagggaaagaaactgaatctggggaagacgttgttaatatcatcaggttgttatgcttaagtacagatacagttagatgtgaagctccaaaacagggtttataatcgctcggccatttctgtttctttattaacttatcatgataagaccatatacagttagatatgaagctgcttgtttgtcgccctttatgttaatgtgatattcagcagggtagttctttaatttatatttttctttctcttaggcagcaatgatgctccttatattgatgtgatattctaccatgttttatcctatacattacaatgccattctgtatttagtatgctcaggatcatttgatctgtcttgcacttgtgttttctttggtggttcagccttaatggtacttatccttatagttacttgggatttttgtctatcatac

SEQ ID NO: 3461 - DNA, 313 bp, Zea mays
  Clone ID: MRT4577_103158C.1
tacgccagcttgccatcctctagagcggccgccctatcctgattactcgtcttctttttctcatttttctcatcgagaagcgtaaaaatgagtatctgggggtaatcctatttccccattcccagcaaaggctattgtctgacacttgactcctgaatcttaatgaaccgttctttcgctcaaacaaggtcagcctgcaacttgccggacgggttatctccctcaagactaaccttttgcattgccttcagctcgatcaacctgtcctccatcttcaggtggctggagacatgaaaccttgatctgccctatc

SEQ ID NO: 3462 - DNA, 601 bp, Zea mays
  Clone ID: MRT4577_103159C.1
gatccagcacagctccacctcatcccggcctgggaaaaaaccttgtctcgacgacgagcagaggcggcggcggctagggcacagagaaggcggcggcggctagggcacagagaaggcggcgacgacatctacactggctgaccggcgacattccgtcggtgtccgcttctcgctgattatccctgcaccagttcgagatggagaagacgaacttccaccgtcttgggaccctataccctctcctttaggtcatgtgtgacctgcttggtgtggttgctcgacactctcctcaaatggtgatattttcttttggagcccaagttcttcgtctaaggcatgattggacatggcattttggcgacatcagaatagcacatgttgctagtgttgtttgatattagagacactttttgatttgcttgcatgttttattttcagtttgaggggcatgagtggtcagacttgtttcaatttcagaaaactagagacacttcttttagtttcagaattgagagaagtgtattttagtttcaggatttataatgatagggacacttcactcagcatctgttcggttgtgattaaaaccatggttgtggac

SEQ ID NO: 3463 - DNA, 848 bp, Zea mays
  unsure (1)..(848): unsure at all n locations
  Clone ID: MRT4577_10315C.1
ggccggccggggcggcacccaaaaccactcgatcatcgagcatacgatcgagagatcatcaaccacagatctttagctgttctgtgtgtctttggccatcgtcattattgctagctcaggggccggtcgggcatggctcctcggccttggtggtcaccactggctttgcctcttggtcccatcgtcgccttgttggtgcttgcttgttgcgttgctgaagcttcggtcgtggagcacaccttcaatgtcggaaacctttccgtgagccagctttgccagccgccgcgggtcatcacggcggtgaacgggcagctcccaggcccggccatccatgcccgcgagggagacactgtggtcgtccacctcgtcaaccagtcaccctacaacatcacaatccactggcacggcatattccagcgcggcacgccgtgggcggacggtccggcgatggtgacgcagcgtccggtcaagccgggcggcaactacacgtaccgcttcaacgcgacggcgcaggaggggacgctgtggtggcacgcccacatctccttcctccgcgccaccgtgtacggcgcgctggtcctccgcccccgcgccggcgccgacgcctacccgttccccaagccgcacgccgaggagaccgtcnctcctcggcgagtggtggaacgacaacgtctacgacctccagcagatggcgttcctcaccgggcgcccggcgcgcagcgccgacgcgtacaccatcaacggcaagcctggagacctgtacaactgctccgacggggaaccagacgtaccggggtcaggtgcgnagcaacgagacgtacctgctgcggatcatcaacgccgcgctc

SEQ ID NO: 3464 - DNA, 418 bp, Zea mays
  Clone ID: MRT4577_103160C.1
aacgggggaaaggggggggcctttacaacccccgaaagggaaaaaaaaggggggggggggtttttagcctcccgaaagaaaaaagctttgggggcggggcacatttttttgaccccgggggccttgtaacagggggcccccctaaatcaaatcggggggggggcgggatcgcgacccccttggccatgtttattttcttggggaccaccccttccggggggtttcaggggaagggaaacaacaacccccggggggggggcttaatgggggccagcccgaacgccatggcgggggaaattcttctttccgccccggagggggggaacccaaaaaccatgcccttgaaggtttggccacttttcttgaaccttttcggggcaaaattctccggggggtcccaaaagggtggggccctggc

SEQ ID NO: 3465 - DNA, 456 bp, Zea mays
  Clone ID: MRT4577_103161C.1
cggggcttcctcctacacaacgttaacaaagcagctcacttgagttcaattcagccatgaggagccaggtcgcagcagtagccatgtttttgctcctcctggccttgggtgctgaggccgacctctgcgtcacgcgtagcaggaccttcaaagggtggtgccaccagagcgagaactgcatcaccgtctgcaagagcgagggcaataccggcgggttctgcaagctcggggcttgcatgtgcaccaaagagtgtgtccgaagtactgacgctgctggtgctaataaagccccacagcagcatttgagttgatgagtagtaatgaagaacgcttttgttatgccagcgcaagctctagaatttgaggccgagatgaccaaaaataaatgattttgttactctataaaaaaaaaaaaaaaaaaaaaaaaaaaaagtactctgcgttgttaccactgct

SEQ ID NO: 3466 - DNA, 566 bp, Zea mays
  unsure (1)..(566): unsure at all n locations
  Clone ID: MRT4577_103162C.1
cggacgcttgggtgatcgccgtgggaccggatggccgaggaggcaaggtcaagatcctgagggaccttggccgaccccaggatagcaagtcccaagcgctgtggcccaaggcgcagaaggttggaggcagaggtggccagtcccagatccatcagttctttggcaagagatgatcctgctactgaatgaatatgttgtgtcgcttggagcctggttagctgaacctaaatcctgcatgcagctgtgtcgttgtagagcacacctctggctcagcttggacgtagccctggtttcatcacatggcagctggatgcagcagaagagggaaacaagtttgttgaagagtctgatggtaggttctgggaggtggtgtgggcttgggagagcctacctacactacacgtcagctgtgttggatctaactctccaatcataacaggacaccgggcatgtatggcgcttctagtttgnttggttgtgaggtagtgcaagtgttgagcttctctggagtccctgaaaaggatgtttagtggacagctacacgcctacaccagctttcgtctttt

SEQ ID NO: 3467 - DNA, 278 bp, Zea mays
  Clone ID: MRT4577_103163C.1
gtcggactaccgttggtttccgcaacttcctggattatcctcgccaaggactttgcactatatttttccgccttttctggaaggatttcgctgcttcccgaaggtctgtggacgagcgctctagctctgtgggaaggttttgggctctctggctcggattttgcaatttctccctggggactgccgtggagccgcatccactgtggattataattgcaccatgacgctggaagagctcgtggcgtgcgacaacgcggcgcagaagatgcagacggtga

SEQ ID NO: 3468 - DNA, 838 bp, Zea mays
  Clone ID: MRT4577_103164C.1
cattgggtacctcgaggccggccggggacattctaaatcatctacaatgggttcttcaaagagtctccagccgcttcgctctgctacaaagacattgaatgcactgcccgcagcctatgctggtgcgcaggttgcttcacgacgatatgcggggacgcttgcaaacttcaagattccgactgttaacaacgagccaaaccaacactatgccaaaggctcagtcgaccgacagaagcttcaggatgcggttgcacgtatgaagaagcggggcccagtagaggtccctcttgccgtaggaggagaatacatcaaaacctcgtccatcctcactcagaacaacccctcctcccacgccgacgtcattgccaagtactccaatgccagcccagcggacgtcaagaaggccatcgatgccgcattggcagcgaagccagcatgggaagcgcttccctttgctgatcgcgcttcagtatttctcaaggcggcagaccccatttccacaaagtaccgatatgagatcatggcagcgacaatggtgggacagggaaagaatgcatggcaagccgagattgatgcagcagcggagctgtgtgactttctcaggttcaatgtcaagtacgcggaagagacatatggccaccagccagtacacaactcgcctggtgtatggaaccgcgttgaataccgaccactcgaaggttttgtctacgccgtatcccctttcaacttcacagctattggcggtaacctccccgcagccccagctctgatgggcaacgttgtcgtgtgggagccatcgccatctgcaattgcctctaactggcttctctaccagatc

SEQ ID NO: 3469 - DNA, 2423 bp, Zea mays
  Clone ID: MRT4577_103165C.1
tgggtacctcgaggccggccggggaggggccagccactccccgtcggatgccgccgccgccatgaccgtcacggccgccgcatggccggtatgcaccatctgctacgaggacctccgcccgctctccgaccagcacctccactgcctccccgcctgcggccacgtcttccacgccctctgcctggagcaatggctggagtactgccctgggggcaagaagaagcgcacctgccccgtctgcaagcagccctgcggcgccgcgcacccgccgacccgcctctacttcagctccaccggcacgtgcccgacccaggcctgctcctccccgggaagcgcctccgggagcgcggacccggaggcgctcgccgccgaggtcgcccggttggagcagaaggcggcgtcgctcggcaaggtggtcgaggagcagcgccagagcatcaacgatctcaagtctgaggctgcctggttgagggagcaggcggaggcgggagactttatgctgcaagccgcgaagaaggacaaagaatctgtccagatacttctgaatgcgaaaacagaggagttgtcgaggaagacatcagagtgcgggaggttgcaggagaagagccttgcattagccaaagagcttgcggcgctgaagctgtccgcagacatgaaccttcaggaggaagaaatcatgaagtttgcttcacttggtaaccagggaaacctgcagaatgctgttgatgttttaaagagatcacttgctattcggaacaagagctacaaggaattgatggtccagtgtaatgttttgggaagatcagagtctcgcatgcagcagaagcttgaaaaggccaaagaaattttaaagaagttaaaggcaagggtacaggaacttgagaaggaattagaagataaagaaaatggtctgttaagggacttgaagtcttcaaagaaatttaaagcagaccatataaaatctgggaatgccacagctaatagtgctttcactagttcaagtcctggatatgaaaatcaaacaaacaagctcgatgaggtgatgcaagatccgtgcaacgacaagactcactttgaccggtcaaaatctgaagctgggagtgttctgaatgcccaagacaacctggacaacaaggatgtagatgtgatagacctagaagccaatgattctgtttttggatatgaacagaaggctcagttttccgccaagccattcgggaccgaagatagcacaccgaattccgagaacaagtctagcctttgccaaaatgatgaccgacagtccgtggcatctgaatgcacaaccgcacacgcaacaaatggaggacccttcctcaaacacagagaagcaactgtaaaatcaacctttatggcgaacattagggccaaactgcatattcctcgggagagtccttccgtgagaactaacgcgacaagttcaacgctggagagtgaaacattgacaattgatggcatctccaaacaagcaacgagattggcatctggcactggacctcagcagatccacaacttcaactctttttctgatgatttccaagcgccaggaattcctggcacggatggagcaaggagaagcattggcaaatggtaagggcccagcagatcccagttctgcgagtgggagcagaggcaacctgatcgccgtgggaccggatggccgaggaggcaaggtcaagatcctgagggaccttggccgaccccaggatagcaagtcccaagcgctgtggcccaaggcgcagaaggttggaggcagaggtggccagtcccagatccatcagttctttggcaagagatgatcctgctactgaatgaatatgttgtgccgcatggagcctggttagctgaacctaaatcctgcatgcagctgtgtcggtatgcaatgcgtgctgtcgaacaactgaacgtgtatctctgttgtgcttgagctgatctacgtgtggatagttgtagagcacacctctggctcagcttggacgtagccctggtttcatcacatggcagctggatgcagcagaagagggaaacaagtttgttgaagagtctgatggtaggttctgggaggtggtgtgggcttgggagagcctacctacactacacgtcagctgtgttggatctaactctccaatcataacaggacaccgggcatgtatggcgcttctagtttgtttgtttgtgaggtagtgcaagtgttgagcttctctggagtccctgaaaaggatgtttagtggacagctacacgcctacaccagcttccgtctttttcctcaaagattttagctgcgataattgatgtacttgttttgtatagtaatccttttctatttaaatatagacataaaaatcaagaactaaaaaaaaaaaaaaaaaaaaaaaaaaaacccacgcgtccggttctagatcgc

SEQ ID NO: 3470 - DNA, 545 bp, Zea mays
  Clone ID: MRT4577_103166C.1
tctttgtttacgttcgtcccttgcacgcggtctccacgccttgctctcgctcagccctcaagcctcagccagagagcgctatcacaactccctgctcatcggtccccgtgcaaatcacacacgcagcgacaccgcaggacgatcgttcacaccactgtacactctgcgatgatagtacagagtgactacatgtctagcttaacctctacgtagctgtggaagcaataaattacgttatgtcgcttccacacagcaccggcggttacttttttatatcccgcggatgggcctgcctctggatcgtggaccgtctcacaaattgtgacatgatgattcgggatcagagccagagaagataagaactgtgtcctgatccggacgcttaagttctctctctctctctttcgctagctgcaccgatgaaatgcacatccagtggagcggcgacgagagcatcgctagcgctgcccgcggagattccaccgctgattgtccaagttcggcaccgacgatgtagccggtgaatatctcacctctgcagatgc

SEQ ID NO: 3471 - DNA, 305 bp, Zea mays
  Clone ID: MRT4577_103167C.1
gggacgcgccagcgcgacccgtactatatacagacgatcccgtgtttttccctgtcgacccaaccaagacacgcaacatgcaccgggcttgaactttgaaaagtactccctcctacatccataaacagctctgctcgactaacatctatcactgtacgctcgaggacgcattgtcaagatatggagaatgatttagctaaaaaacatcctcatcacacgtcgactccacaaaataagtacataaactattcactatctcataacaaaaacactactctgaacattacatacttgcacatgctggg

SEQ ID NO: 3472 - DNA, 169 bp, Zea mays
  Clone ID: MRT4577_103168C.1
atggggggtttgcataaacaaggaggtaagggcctcattaacttctgttcaggtgtgctgcaaaatgcattgcataccctatacattggagcatgcataaactcgaaaggggccaaaatcggcaattggaaacattcccccacctaaaattggccgattttaacctttt

SEQ ID NO: 3473 - DNA, 747 bp, Zea mays
  Clone ID: MRT4577_103169C.1
ccggccgggacttctgcttctgcccaacccccctccatccatccaaacagctttgcctagcttattccttaccgacaaacaaaactgacacggatccgcacagagcgcaacgaactcgcccagtccggctgctgctgctgcacaacggactcgatctcacggccccgccggctcgcagccatgcagacgcagtcccgcctggccatgagcggcggcggcggcacgggcggcagcagcagcagctcggcctcggaggacgagcacgaggcggtgatccgcgagctgacgcgggggcacgagctgacggcgcagctgcgggccgaggccctgcgcgcgctgcgcgggcagggccaggccgaggccaccgcggcattcatcctgcaggaggtgtcccgcgccttcaccgtctgcctctccatcatgagctcgcccgcccgcgccccgccgccgacgatggaaatgcccgcgcctgccctggccccgcgacggggccgggacgacagcatcccaagagagcaacggaggacgtcctcgccgcacagcgacgggtaccagtggaggaagtacggccagaagaggatcactaagtcgccgtttccgaggtgctactacaagtgcagcttccaccgcgagcgcagctgccgggccaccaagcaggtgcagcagtgcagcgacggcgacggccacccgccccagtacgtcgtcatgtacttcaacgagcacacgtgcgacacggcgggctgggag

SEQ ID NO: 3474 - DNA, 241 bp, Zea mays
  Clone ID: MRT4577_10316C.1
aaaattcatacaacatttattcatgaataaaccatatgcggtttcacaatagttgggcgtaactataacacaacttatccattaaaccacctcattcaccacttacgacacaaaccatacaaattcttttaaagacatcaccatccattgtctaattcatatacactagataacccatttacacacagtatcttcaactactgatgtcttaataaccacctttaatacttatcaccaagtt

SEQ ID NO: 3475 - DNA, 242 bp, Zea mays
  Clone ID: MRT4577_103170C.1
cagcttgttagttcatgttgtaaggcactgaagaagaaagcatatttgagtggcactgagaaaccatttgagtcgaggtggttgagctctttgtaacatgctactcttaataaataagtatcttcagaaaaaaaaaaaaaaaaaaaaaaaaaaaaaaaaaaaaaaaaaaaaaaaaaaaggagggaggggggaaaaaaaaaaaaaaataaagaacgcatgacatgcaacgacatggggtctat

SEQ ID NO: 3476 - DNA, 303 bp, Zea mays
  Clone ID: MRT4577_103171C.1
caaagctgctggctcatcaggaatcagtccactgtcaaggccacagactcaatcatcatttcttgggaggatggcattccgctcttcaaacatcacggctgatatggaccttgtgcgccaaatcgaggcgaagtatcctgcttttctttttaagcagcaacttacagcatttgtggatggcttatatggtatgatacgtgacaatgtgaagaatgatctgtcttcattgttggcatatgctattcaggtcccaagaactgtgatagctagtatggtgagaggccgttcttttgggtcatcaag

SEQ ID NO: 3477 - DNA, 422 bp, Zea mays
  Clone ID: MRT4577_103172C.1
cgacaccgtgaatggtgctgatcgttggccttgctctcctggctcgtcggtgccagcgccgtctccaggacctggcccctgctgggggtgcagacaccagcgggtatttaccgcctccggtctatatgcacgctccgctctatctggcgccgcaacaggaggcgcatgcatggcactacccgactcaacgcaccggaggtaagcctgcgacagcaggtgggatcctgcgagggccatggagacggcagtccgttcctgggccaccgcgaggagatgctgatgcaccagcgcaacccggcggcgacagccctacgggtcgacacagcgccaggcgctggacgatcagcgctgccaccagatcaggcaggcggagccgatgcaccggcaccaggcgcatacggagtggacctgcagaacttcct

SEQ ID NO: 3478 - DNA, 317 bp, Zea mays
  Clone ID: MRT4577_103173C.1
ctctctcttgctggaactctcggagatcaaacagaaccgcaaaaggcggggacactaacacggttaaagcgctgtatcaaacatagcactggccgatcgactcggataacactgacatcaattatattcagggcaagccacttttgagaatggaggtgtcactaaagatcactcctttgccaaagatgcatctccagatgaccgagctactgtcagcggggatgagcacctgaagggcatatatcttgaggtgacgaagacgaatgcgacaggtataggtgttgctaacaaggaaaagatcactatagaatcagatg

SEQ ID NO: 3479 - DNA, 284 bp, Zea mays
  Clone ID: MRT4577_103174C.1
ctgagactcatctctcacacggccgtcgcacttatcatcgtgcgtacaatgcgtacagattatgaacttatcttctctatagtatgcctctcggcgctcggcagcgaagtgtgcatccacgtcgacgccgtcatcggcgtcgactaacgcagtagaggagtgcgtggacgagtcgctggtgcacttcccgcaggatacatccgcgtctggagggactaaggacaacgacagcgactatctaatcaaagaagtagacgggctcaacgagcacaacgtcgtcgtca

SEQ ID NO: 3480 - DNA, 277 bp, Zea mays
  Clone ID: MRT4577_103175C.1
tgaacctaccataatgaaaatgttcttgaatcttcactttgactttcagtttatggggggggtagatcattcatgtgatatataagcagctatcaagtgggcaaaaacattgctgtgaatagcactgtttaggctaacattgtaaaaattgtaatgttataattattatttatttggagaattaacttccccctctaaagttatttattattgatgcttataccatgattgcaccttagccttttacatactaaaaacatgacttgttagttgtatt

SEQ ID NO: 3481 - DNA, 566 bp, Zea mays
  unsure (1)..(566): unsure at all n locations
  Clone ID: MRT4577_103176C.1
caaacatgcatgccgaaaataacccttcagttattgacacctgataactcagtaagcaactctaataagatgggtcacccaccaactgactggtgttgtttgcgtagaacaactgcgtgggtcttgtcaacagcaagcctggttttgaatgggaggggggggggggcagcntgtattaggtgtgccatgcgttagtgcatatgcgtgcaggtcagaacggcaacatatctgttgttgtgtccacgactgcaccacggttctcattagctggctggctgactggtaccatttggtctggttgctgctgggnaccgtgctcccttcttgacacagccgcagttgctgcctttctaccatccgtttgcggttggccccgcatccctcttacacctacaacaattgttgccctttgcccntcttgctttggctgacccggcggccttctacctcctgcacatcattggtggtgccctcttttagattgctgattgcttgttattcggtacttcggtgtgtgggttgttgggtgtggccctccgtgcttccgaggttacattgccagattc

SEQ ID NO: 3482 - DNA, 530 bp, Zea mays
  unsure (1)..(530): unsure at all n locations
  Clone ID: MRT4577_103178C.1
agcggannngnnnacagagggagnaggaagggaaacaaaagggcaaaacagggccagacccagcaggaacccggcgacccagaggcacgcgccagccagaggggggcgcggcnnacacaagccgcaaccanccaggagaagcaggggggaaaaacccccaccgggncnngaacanggggcggancagggcgacgacgcgggggccggagccccacccgngggcgnaccacgagacgagccngacgaagngggcgnncagagcgancccggcccnggcgncgaagaagcccgacccgccggcaccaaggaaggcgggagaaaccaganccccnnccacanaacccanganacccnngagnggacccncggaagcagccnnaanagccnnccnggaanccncaaaggaggccccccncncganncggacggggagggcaacaaccgagacanccacaggnggaacacgggaggacaaaccagggagcnggccanncaggacaggaagaacnnnaccaacagccnnggcagca

SEQ ID NO: 3483 - DNA, 1815 bp, Zea mays
  Clone ID: MRT4577_103179C.1
ccgggtcgaccatgcgtccgctcggctttgctcaacaagccacgcaaccttccgccgtcgagactcgtgaggcgtcgtcgcccctgccctctctgccgacaggggacagggtggagagttgcccgggctcgggttgactcgtgtgggcgcctctttcacgcgttcgtttcgttgtttcagaaagttgtgtgctattcattgattgccatgtcaacacgtagggaggttgtcttgtatcacccattgcctgcaccaggagtgacaaacaacctcaaggatgggatccagtcaaaagttatggaaacggttggcaatgcaatcaactcattcgatccaaatgcgttgcctcggcatatagaaggggcattgggaacagctggaaacctcattaactcatttgagccaaaatggtctgggaaaaatgagtttgatttaaatggggaagctgatttccttgatggatatgaatgccctgatgaatattggggctctgcacctgtgaaggcgcacaaaccagttaacattaagaacctgctgggtggcgttattgcgataatcggtcgcacccacgcgtccgctgaagctgaacagccaaaggacactaagaccagtgtctcattccttgggtcggctgatgatggtaacacattcttgcattcctcagtctacatgccaagtgctccaccagtacttgatgaagaagccttaaattacaacatttatagggctgtactggaagcagagccaccagaatggcttcctgacagttatgctagtgcgtgtatgcagtgcgctgctctttttactgcccttacacgtggaaggcatcattgtcgattctgtggagggatattttgcagggcatgctcaaagggacgatcgctgttgcctgccaagttccgtgagcggaatccgcaaagagtctgtgatgcttgttatgataggcttgatccattgcagaacttattgattaattctgtcagcaatgcctcacaaactgcaaagcatgatgtcatggattggacttgtgcaagagggtggttaaattttcccattggattaacaatggagcatgagatatacaaggcagcgaataccttgacaagttacagccaggtggcaagaataaaccctgagaagtctattccccatgcagttcttagtggagcaagtgggcttgccatattgacagttgtaaaagctggtgctattcttacttacaaacttggaactggcctagtagttgctcgaagatctgatggatcatggtctgcaccatctgctatactttctgctggttttggatggggagcacaggttggtggtgagcttatggatttcatcatagtgcttcgtggcccagaagctgtccaaactttctgcagtcgaatgcatttttcacttggggcaggtgtaagtgctgcagcaggacctgtgggcagagtagcagaagcagacctgagagctggtgataaaggatcaggagtttgctatacatacagctgcagcaaaggtgcatttattggtgtctcattagaagggaatctagttgccacacggatggatgctaatctgcggttttatggtgacccatatctaacaaccagcgacattctcacggggaatgtggaacagccaaatgctgccaaatttctttacactgcactggataatctatactcagggctggattggtagtgtacatatgtactttgaattttttttcgattgtaaaagttgtatatatccacaaaatgctttcgtttgttcggcgtggcaaaataattaatgaaatgctctgtattaatgaacttc

SEQ ID NO: 3484 - DNA, 271 bp, Zea mays
  Clone ID: MRT4577_10317C.1
ctagtgtaacggttaaggcttccgagtagcacctcaaggtcctaggttcgatcccctcgggggcgaatttctggcttggttaaaaaaaattcctcgttgtgtcctgtccggcatccgctcccgggttacgtcctgcgtgcacccttcgggtgggctgtttgagagttagcggttacggccagggttcggggattttctcgaccgggatcatgtttcggtctcttcttaatataatatcgagagggcggtctttccctcccctgtcgagttt

SEQ ID NO: 3485 - DNA, 160 bp, Zea mays
  Clone ID: MRT4577_103180C.1
gggggcggatagcctcctgtcctgctgcacaccctgttaaccaccgctcgttcttctatccgcacaggagaaaagggagagagaggcgaggctcgctggccgtccaagctgctgtgccctgtacgcagcagtatacgaactcctaagtctcactcaggag

SEQ ID NO: 3486 - DNA, 1359 bp, Zea mays
  Clone ID: MRT4577_103181C.1
cagaaacacagatgggcgacggggctccgccgccaggggctctatactccttcggaacgccgtggccggagctcaatcaaggcctcacctacaccgacacgttccgttgcgctgatgcggacgccgctaccaccttgattgagttctactctactaaccacaagagctcggcgccattgccagggtggatcaagaggattcgtaatgggcagataaccgttgatggtgaagttgtcactgatccagatatgactctggagccatttgcgccgtatttgctggaagtgctctacgaggatgatgacatggttgcccttaataagccttctggcttgcaagttctgcctaaaggactgtttcagcagcgaactgttttagcacagcttcaattgaaagactggaagatggcctcatcttgccggttcaagagaaaagatgtgcagtcacatccagtacctgttcatcgtttagggaggggaacatcaggcctcctgctttgtgccaagacaaaagttgccaaagttcgacttgcatcttattttgctgaaggtgctataaatgctgcaaagaaaagggataaatcagagttcagtgaagagcgaaaaatttcaaaattttatcgagccttagtgactggcatacttgatgatgatgaggttgttgttacgcaacctatagggttagttcattatcctggagttgcagagggactttatgcagcatgttcctcaggaaagccagcaatgagcaaagtatgtgttcttgagagacttgcacaccaaaatcacacactggtccaggttgaaattcattcaggacgacctcaccaaataaggatacaccttgcatacattgggcacccacttgtagatgaccctctctatggtattggtgggcaccccaattttgttgagccagaatctactggcacagatagttcttttgcatctgatgggggttatgagagacctttgcaacctgttcctggagactgtgggtatcacctgcatgcacattggctggttctttgccacccaacaaccaataagatggtaaaaattaccgctcctcttccacaaattctacagacacgggaggaacgccgcgctgcagctgagcaaaccggtggttgaacatgtagaatcttgaaaatgtatatttcttgaagttagcaagcagcaggttctcacagacgttagagttagacactcagacctctgctcctctgtcaactgtacaacggcgagctatggttccgcttgatgcagcgccgtctcatgtgacgtttaggccaggctaccgagatggagaaataacattaggtatttaaaaataaatagagtactagctaatgagctc

SEQ ID NO: 3487 - DNA, 1707 bp, Zea mays
  Clone ID: MRT4577_103182C.1
ggaccctcgaggccggccgggatgcataacagaagtttcgaaccatgggatgtagagtggaatctcttccctcgcaggataaggtgcctcggccgtaaacagagtggttgttccgcttcgtcccagcctctagttcttcctttcctccagagtgatggccaaatgctactcagattggcccccgattccgcctttccatccatcgcgaagaacgccgccgcaatcccacgcctccccgatcacgatcaggcggcagctcgcgtccttcgtgctccactgctccagatcctgcgctcccctcctcgagcccaagaacctgcccgatgagttcgaggccgtaccggcgacgacgacgccgccgctgccggacgccgccatctactcctccgtccttcgcgctctggccgccgctccagagccggcgccggccgaggacctgtacaacgaggcccgggacagtacgaggccgtgccggcgacgacggttcttcagccggacgacgccgcacggcgagggtggtctggtaaagtcatcgatggaggctgccgcgaccctgaggcagatcggcctgagggtcacggactgcatcctctctaccatcgtcaacggcttcgtgaagaggagaggcctgaaaccggccatcagagcgtatgacaagctggtcctcatagggtgcgagcctggccaggtcacctacgcatcagtcatcaacgtgtactgccggctcgggcgcagcgacagagcagaggccatcttctccgagatgatcgagcgaggcttcgacaggtgcgtggttgcctatggcaacatgatctcgatgtacggcaagatcaggagggcgtcggaggccacgaggctgctggccctgatgaagcagaaggggtgcgagcccaacgtgctggtgtacaactccctgctcgacatgcacggcaggctggggaactcgaagcaggccgagaagatctggaaggagatggtgcggcgcaaggtccggcccgaccggatcagctacacggccatcatcctggcgaacaaccgggcgggggagctggaccgctgcatggagctctaccaggagttcagggagaccggaaggaaggtggacatggtcatggctggcctcatggttggggtgctctccaagaccagccgcttcaacgagctcatcgagctgctcaaggaaatgaacgggacaaagctggaccggaggctgtacatgagtgtcctgagaagcctccgcgatgccgggctggaggttcatgtgaagtggctccagagtaacttcaccttcatggaagagaaaacttgatgccaggtgcaggtacttgttcctgtgcacgcatattcagcacccaagtatatcgggcgcctgaagaaaaccttgctctgtacatggaaaccgaaaaaaaaggtaaatatttgcttgcctcagtgctccattccgaagcttgtacgctattgctgcacaattccggcattcattggctcaagtgaatagcgatgtaaatgtattttaagggaagccaactttgtaccagtaacgatctgattccgaaattatcgaacagattgccaagttcagtaactctgcatgtaagatttgctgaaactgttgtaccatagccactaggggcaattgtaactttgtatctataatgaaaaaaaatcatattattttggtaccaaaaaaaaaaaaaaaaagcggcc

SEQ ID NO: 3488 - DNA, 1531 bp, Zea mays
  Clone ID: MRT4577_103183C.1
cagaaacacagatgggcgacggggctccgccgccaggggctctatactccttcggaacgccgtggccggagctcaatcaaggcctcacctacaccgacacgttccgttgcgctgatgcggacgccgctaccaccttgattgagttctactctactaaccacaagagctcggcgccattgccagggtggatcaagaggattcgtaacgggcagataaccgttgatggtgaagttgtcactgatccagatatgactctgggggatgggtctaagttggtatatcatcgttttccttggcaggagccatttgcgccgtatttgctggaagtgctctacgaggatgatgacatggttgcccttaataagccttctggcttgcaagttctgcctaaaggactgtttcagcagcgaactgttttagcacagcttcaattgaaagactggaagatggcctcatcttgccggttcaagagaaaagatgtgcagtcacatccagtacctgttcatcgtttagggaggggaacatcaggcctcctgctttgtgccaagacaaaagttgccaaagttcgacttgcatcttattttgctgaaggtgctataaatgctgcaaagaaaagggataaatcagagttcagtgaagagcgaaaaatttcaaaattttatcgagccttagtgactggcatacttgatgatgatgaggttgttgttacgcaacctatagggttagttcattatcctggagttgcagagggactttatgcagcatgttcctcaggaaagccagcaatgagcaaagtatgtgttcttgagagacttgcacaccaaaatcacacactggtccaggttgaaattcattcaggacgacctcaccaaataaggatacaccttgcatacattgggcaccctcttgtagatgaccctctctatggtattggtgggcaccccaattttgttgagccagaatctactggcacagatagttcttttgcatctgatgggggttatgagagacctttgcaacctgttcctggagactgtgggtatcacctgcatgcacattggctggttctttgccacccaacaaccaataagatggtaaaaattaccgctcctcttccacaaattctacagacacgggaggaacgccgcgctgcagctgagcaaaccggtggttgaacatgtagaatcttgaaaatgtatatttcttgaagttagcaagcagcaggttctcacagacgttagagttagacactcagacatctgctcctctgtcaactgtacaacggcgagctctggttccgcttgacgcagcgccgtctcatgtgacgtttaggccaggctaccgagatggagagataacatcaggttaaataaaaataaatagagtactagctaatgggctctgtgactgtccctgaatcttgttcagtctattcgaagcgcaattcgctggaaaaattgttttttcgctcacacaaatgatttggtttgaaatggagggaggtgataattgtagaagaagatttcccatg

SEQ ID NO: 3489 - DNA, 239 bp, Zea mays
  Clone ID: MRT4577_103184C.1
cgcccacctccggctcttctcgaaccaatcaagagcggaaagaaaaagattttgtcaaataatgaagaggtccttaccgtttgaattatcctcctttaaatggattgctctaatcttccctactttccttaatgactgcaacgattttctccttttgcgaattccattttatttgaagtatattactatcatatacattatctaaatcgatccactttaaataaatagaaaaatcgaag

SEQ ID NO: 3490 - DNA, 207 bp, Zea mays
  Clone ID: MRT4577_103185C.1
atccccctgacacgcgtgcgtcctcttggatcctactttaccttgacgcccgagatgctcaaatgcagacatagacaacagcttcatcggtatttactgtagagagaataaaacctgccataagataaaatctattttttttgggcgcaaaaataaattaatgtgatcatggaaacacacaaaattagttagcaagagcacattttt

SEQ ID NO: 3491 - DNA, 1580 bp, Zea mays
  Clone ID: MRT4577_103186C.1
ttgtcggcacgagggcaaaataagaaccaagagttgatgaagcaaattgaaatttgccaggaggaaaataagatcttggataggctgcaccgccaaaaagttgcggaagtggaaaagctgagtcaaactgtgagagagttggaagaggatgttctgcaaggtggtgcagctgccaatgtcgttagggattaccaacgaaaagttcaagaaatgaatgaagaaaagaaaattcgtgaccgtgaacttgctcgagctaaagttactgcaaatagggttgctgttgtggtcgcaaacgagtggaaagatgctaatgacaaagtaatgcctgttaaacagtggctggaagagcgaaggttcctgcagggtgagatgcagcagcttcgtgacaaacttgctattgcagagagaactgctcgatcggaagctcaattaaaggaaaagtatcagttgcgcttaaaagttttagaagatggcttgaggggcactccaagtggatcttgtcgtcctcccatggaaggaaaatgtataagtaatggacctccccgtcgactttcactaggtggtgctgatagtatatccaaaatctctccaaacggtgtgttaatgaggaggtctccatctttcaattcaagatcctccctctctaccagcagttgtttggtcctgaagcatgcaggaagaacttcaaagtcatttgatggcggtaccaggtcattagaccagggaaaagttctggggagtggacctcattcactcaatagatctacggatgcagttagagattgtgagacagctgatagttggaaggctaatgcagaagaaaaaagtaatgaaaccgcaaacaatgattcagctgacatggtctctggtgtactctatgacgtgttgcaaaaggaggtggtttccttgagaaaggcatgccatgagaaagaccaaactctaaaggacaaagaagatgcaatggagatgctagcaaagaaagtagatacattacataaagcaaaggaagtggaggctaaaaagaagaggcaagagatagctgctttggagaaaaaatttgccgcggtgtgccttgaacaagaacggcttggtaatttgagaggacctggaacttctcagacggtttcgggaagaactgcatcacgaggtggattgacgcgcaacctccaatagcatacatctaacttcaggcaggcatggaattcgtccataggcttcatttccattgtatttgttcccgtgttcttattcgttttgtgatcaaatagcacagatgaccctgcgatacctagatgaggggaaagagtaggttttcatctgacatgacttgcttgtagtgaaggtaaatccttcggtcggtgaggtttaaccttgcgccccgccctcattttgtggaggcagtgctgtagtggctgtataggttggacgagcctgtgcctttctatatgtagggtgaggtactgtgtttgtgttgcatcttgcatgttcgggttgtgaatatatcattgtattctgctgtggtttctcctttctactcaaaacataagcctttggttgttgagctggtaactcgagagggg

SEQ ID NO: 3492 - DNA, 515 bp, Zea mays
  unsure (1)..(515): unsure at all n locations
  Clone ID: MRT4577_103187C.1
cgtcccgggccggaattcccgggccgacccacgcgtccgataaagccaagatacaggagcgatcggctccgcggcgttcgtcgctgtaaaatccattgttcatcgtctccctcaccggcgtttgtgttcatgatctccttgccgttgccgtcgccttcggcggcgacctgagcggaggcggaggcgtcgcagccgtcgtcggcgccgccggagttgtaccacctcgcgcagagcaggtagcagaagaagttgatcacgctgagcacggcgagcatccagtagaagaggtccagcctgtccttgtccaggtcgttgtcgccgagccacccgccatggccgccgccgncgcggctcgccgggacacggntcacgagcgacacgagcaccgagctgaggtagaagccgaaggcgtaggagcagtaggggagcgccgtgaggaaagactggatgcccgggccgcgcgcctgcttggngaaaaactcgatgagccccacgggggggaaaattttcgacac

SEQ ID NO: 3493 - DNA, 745 bp, Zea mays
  unsure (1)..(745): unsure at all n locations
  Clone ID: MRT4577_103188C.1
ccctcggagtcggccgggnagaaaaaacacgccggccagccttccttcttctccttgccgcgtcgctctctctctcttccctaagcgccgaagcttcctctgctcgcccttctgccggcctgccccatctccccgcgcggctctcctccaagcttctccctccctgcgcgcgcctgctcctatgctacgcgcttcctccctgctcggccagaccatcggtctccctctgcttggagctcgccaccatggccgttgccttctccctgctcggatcccagctcgcggagctccctcctctcagcgcgcgcgtctgctccctcagctcgtacccgacttcagctcactggacctcccggccccgagctcgcccccatggcgcccggtcgagctcctccctcgccatgccgcgcggacccttctcttccctgcttcccagcttgccaaatcgcgtccttgctcctccctgctgagctccagccatggttaccgagccctgctcgcccccttgcttctccctccctcctcccaatcttccatggccgagcgccgctgttctccctgcgcgcagccgcgctccctgccaagcccctccatggtcgtgcccctcttctcgctcgcgctcgtctccctgagttccgtgcgcgggcaccctgacccagctcggatcctcgtcgacgcgcccagcccggattgcagcgccccttcgggctctggttttctctctttgcgtgcatgttcaagcgcc

SEQ ID NO: 3494 - DNA, 443 bp, Zea mays
  Clone ID: MRT4577_103189C.1
ttgagctggggggtgcctattatgccgaggatggctacggggtagggatctttccgactaaacattgaatggatgaggtcctacggaaccgggcggtgaacaagagggggaaaactggccaagatgcatagggctaacctaattttgctggagaggactaccagaatcctggtgtactgaaggtgactatgtcatgacttggcttgatcaagacatgttcatgagggtgtgacaggcccacaaactggttcctctgtatagaggcaactactacagggctcgcaagacctgtgctaaatgcgcatgggagggaacacacctgtatctacagtcgagtgtgcggttaatggactgtacctattcgtcgtgggaatcattctggttatgcaaccccagataccgcgggcagtatggtgtttaacatctatggggactgtacaatg

SEQ ID NO: 3495 - DNA, 180 bp, Zea mays
  Clone ID: MRT4577_10318C.1
cctcgttcgattattcctattatatatggattggatgagattagaaaaaatttagaaaaatttaaaagaactttaacttgtttgtgatttaaactcatctaatcccactcaatccatatgaattgaaagctaaccgaacaaggcttaagggttagtttatgaactctattctaatttttt

SEQ ID NO: 3496 - DNA, 422 bp, Zea mays
  unsure (1)..(422): unsure at all n locations
  Clone ID: MRT4577_103190C.1
caccgtcgtaagctcggatcctttattgacccacgcgggcggcgggccagaaaaacnccacgangacgggcagaaacaacccaggncggacaccaagggccacaccggaaccgaacagggcgacaaagcgcgagggaaacaaacaancagacccacccgaacgcacacacggcgtttttttatcaagagggtgttgcggacctgttatggcccagaattgttttcacccgaagctagagataagaaaagattccaagggtgtcgttaccgccgaaaatgtcacacgtgccgagcatgttaagaattgaggaactgagggctatactccccagaagtctctgacaggaggcccactgccggaaaccaacatgaatgatgacagttcaccggccttccccatgcctctcaatcatgatacgaaa

SEQ ID NO: 3497 - DNA, 302 bp, Zea mays
  Clone ID: MRT4577_103191C.1
gaggagtagtcagcgtgatgccaaaacgcgtcttcttaatccaattctaattctgaatgtttcgtgtgggcttaataccatgtctattaatatatagcctcgatgatgagagggttacaaagaacaaaactccagacacaaacctccaaatttttcagcagaagcactctgcgtcgctgagctgaggtcggctctgcgatccatacgtggccgcacccacacagcacgtgctgtgacgatggctgaacggaaagtgtacactgttcctgaatattgaaataaaacaataaacttttaatggt

SEQ ID NO: 3498 - DNA, 340 bp, Zea mays
  Clone ID: MRT4577_103192C.1
gcagtggtaacaacgcagagtactttttttttttttttttttttttttttttttggttttttttttttttttttttttttttttttttttttttttttttttttttttaaaaaaaaaaagggaggcggggtactacccaataaagctcttaaaaatttaaaaaaaggccctacgggggggacataaatattggaaaaaagaccaaaagatacagggggcggatggttaatacttataaacgcggagctaatagaaggaggtttttttttgaaaaaaacacatttcaaacccatctcccctgcatatttacagatgattaaggacacaaaccagtataatg

SEQ ID NO: 3499 - DNA, 357 bp, Zea mays
  Clone ID: MRT4577_103193C.1
ccaatatcaggtgagcatgaatctcggggtaacaccacacccatggggcttaaatatacgtagtatgtcagacaaaacttttgaattgcatcgacagattgagaacgtggaagcaagaggcagatagcaaaagagaaaaacactggagagagtagacaagacatgacacaaggatggatgggaggatgatggggggtctaagccggtatcaggcgtgctatcgtgtctcttacgcagcaatcttgttgtagtccaccgccaaatacaccttcattagaacctcctaggtggccgctcctttgcgacgttcacccttagggcacgcccctccaagctttgtccatcgagggcagcgat

SEQ ID NO: 3500 - DNA, 386 bp, Zea mays
  unsure (1)..(386): unsure at all n locations
  Clone ID: MRT4577_103194C.1
cccacacagccgcgcggcagaagacccagacaccggcgaccgggacaggggcaaagccaggagcagangcgacgcgacagagcgcggcacaggggaggaaacagagacgggcgggcgaagcgacaggggaccaagcaagggaggaaggggccctgccgccaacggggccgacacccnagaagagacaccggccagaaacagcccccgcggagaagaaggcgggaagccaccacgggagcaagagacgggcaaaaacaagggacaaacacccgcacgaaaggacaaacgcaggagcagccgagcagaggagaacagggatacgagaggggatcaaacagcacaaggggagccaacctgggaaaccgggcacgacagaagacgaaccc

SEQ ID NO: 3501 - DNA, 2047 bp, Zea mays
  unsure (1)..(2047): unsure at all n locations
  Clone ID: MRT4577_103196C.1
gtacctcgaggccggccgggctctcgaacgcgtgccctaccccaccgctggccattcctacagaaggacacctcgccgacctccattccccccgaaccgcaaagcggagtccggattgcagttgcttcggcccatccggccgtcacatcagccacacgccgccgcgccgccagtcgccgcacgagggggcccgtgatgccgaagaagatgggcgtgaactccaaggcggaggcggcccgcgaccgccgctccgccgcggaggccgaccgccgcgaccgccaggagcgcgccaaggaggagcagtactgggccgaggctgagggccccaagtcccgcgctgcgcgccgccgggaggaggacgccgagaagcgcgccgaggccgcggctcgcaaggccgagaaccgccgcctcgccgaggcagaggccgccgccgtcgccgcttccgcatcggcgccgtccaaggccgccgcgcgcaaggcgtcccgcgttgccgctccgccccccaaggttaccgaggccgagctcgtgcgcctccgcgaggaggagcggctccgcctcgagcgggaggcagaggccgccaagaagcgcgccgcgcgggtcgccgaggaggaggagtacgagcgcgtagtcctcgtcgaaaacactaacagggatgattccctcatcgaggccaggtcggttgaggaggctatcgcgcggatgtcggtcgtggatccgcaggcgtccctgcccgctgacaagcatcctgagcgtcgcctcaagtcgacctttaaggcatttgaagaggcagagctccctaagctgaaggaagaaaagccaggtctaacgctgcaccaatacaaagacatgatatggaaactgtggaagaagtccccagacaaccctcttaaccaggctgctgactgaattttgcaaccctactgaatcttatgtgtaattaaaggccaaccttcaaacagcactggattggtgaattgtgttggtacctttttcttggagtggatgcgcactaaaccttgaatcagaaaggtgttccagtctcggctaataatttccaaatcgctggagtgtatactgtgggaggtgctcttgtttagactcgactagtcgaggttccttttttgtgttaagtatgatggttgggcacgtgctggtaccgaacgtgcttcactcattatagtattttgattcttgaacaaatcgtgtgttgggctaaaccatgacattttgattctacttatgccggatttcgtggccctgtttggtttctttagtcactagactaaattttagtgactaaagtttagtcgctaaagtaccatgtttggttccagtgactaaaccagactaaagagcattaattgctatgaataatgactgttttacccctattaattaatggatgtttgctataagaagaaagtagagagggtaaataagataaaaatactactttagtcctttttagtcacccctttggtgactaaagaactaaagtttagtcaccccaatttagtcaccatgtttgcttctttagagactaaaagtgactaaactttagtcactaaactttagtcatcccaaaccaaacgaggcctaatatatatacttattaatatagcaaacatcatacattaattttattgaattcattcagtagtaatacccgcaatgaagaaacgttgtgtaattaccgatgacacattcggttattaatgacgagatgttcagttatttactaacgaaacacttggttattactgatgaacgttcggttattactgacggaacgttcggttgttactgaaaaaaagtttggttgttactaatgaaacgtttgattattactgacgcaacgttcaattatttactgatgaaactttaggtttttactgacgaaacgttcgattattaccgatgaaaagttcggttgctacaacaactgatgaaacgttcgccgatgaaacgttcaattattaccaacgaaacgttcggttattaccgatgaaacgttcgcttattaccaacgaaatgtttgcccggncaa

SEQ ID NO: 3502 - DNA, 1105 bp, Zea mays
  Clone ID: MRT4577_103197C.1
cggccgcgtgggttttgagaaatatcttgataaaaataacaacaaatactacacaacgccagtacaggccaacccttctacattgagtagaaacattcgataggtacaattgaaatacagtgacgagaccacacttgtgatggccgcatagtacatgcgtgcagcaagtggtttcagcatctgatttgcagaatgctatcagatagtttccccaaggccggtcgtcatcctccactccaagctgcacttcggtcttctgctcctgccaagtaccgacaccagcgctgctccttcttttctctgtcttggccagccacctctgctccatcttccagcgtcgcccacgaccggcagcgctcagcccgacctcctctcagctcgccagccatcgccatgaccgccgttcccagtgtcggcttctccagtccgccccgcctcggtcatcgtcgttgatactgcgcttaccggtggccgaagctcgcgtcgccctctccctcaccggattcagtgtccgagctctcactagagctcgtgacctcgccgcctccctagagctcgcgctaacctgctcgaccacacctcaccagcttgctccaaacatgatctcatcgtcgttccgcgtgtcagcaagaaatcccaagacgaagctagcagcgcgatattttccaagcgctcgacaaattacttggatcggaaaatcactaccgatctcgcggattcgtgtcagctgtggaaacggtgcgataattaatcacgtgatacggaagatgactcaagtcgaccccaagcgcgggctactccgcatggagatgctgatgaacgaacctgtctgatcaagtgttacgacaaggatgatcgtcaagtggatgtcgtctaacaaacactaacatagtgttacccaggagaagaacaggtggtagaagaggagcagcctaacactgaggctttcgacttgatctaggtagcgtttccccagttgacttttgcgccaacgatgatccttagtttgttttatatttatcttttattttataataagacttcctctatgtaataaatactctgatgttattgtgacatttatctctatacactctgttattat

SEQ ID NO: 3503 - DNA, 446 bp, Zea mays
  Clone ID: MRT4577_103198C.1
gttagaatgaacaacattgtttctgttgtacactggagacaatttacaatggtgtgaaaggcacaattcccctcactgaacataacggaatatataggggggggaaagtctgtacacaaataaacggacttaaggtatttcaacgaaggcctgacacttctgaaactagagggggcgctaagatgaccacaattgtacgagcccttaagaatgctgaatgggggacgacaaagttagaatctatgtgaacccctacagtgatagaacctgacaagacctttacaaactgggacattgtgggccattgttggcaatcattctggatccaccagattgcgagcctttgcaacccaattgctccatgctcctgtgcgagactgtgactaactctgaacatatcaatcaaatttagcaagcgatccctactgaacttttcctggaacatg

SEQ ID NO: 3504 - DNA, 169 bp, Zea mays
  Clone ID: MRT4577_103199C.1
gcaaatccctgcagttgcccaaataaataagatgcccgcacataccccttttcccaacagttgtaaaacctaaatggccaatgccactcgccctttccaacagcattaaaccctgaatgggtaatggtaccccccctgtagacccttataatggccagcggcttagggg

SEQ ID NO: 3505 - DNA, 358 bp, Zea mays
  Clone ID: MRT4577_10319C.1
tcggagacagatgtgcactccatgtagatgatagtccccggatgccgaggtagccgaagtcgaggtggtcgaagtttgagcatcaacggttggcggggtgacacaaaaatggacaacaacagcctcgtggacccttttgattctttccgtgaccggtcatcgaggatcctcgacaaggaagccggcgcagcgcatgcgtctgcgctcgctagaggggccgcaccggccttcgaccagtggaggcggcggtggatccggtcgggaaagctacgacagcgacggatccagccatgacgacggcggaatttgagtgcttgtgcctttgaatgggcatcatattgcttttttacatgaaacg

SEQ ID NO: 3506 - DNA, 237 bp, Zea mays
  unsure (1)..(237): unsure at all n locations
  Clone ID: MRT4577_1031C.1
gccattgtgaacnaaagggaccangctatacnccccctctcctccaatccaatctccacgaggacctgtgtctgagnctttggancagcttaggtanattnaagcctaagaggcgnnaagcaagtcctttttgganttttcnggttncgggaaggcaangcgtnaccggnantacccnnaatgcccanantccccanagntaagncagttgtngtcagatnnggcanacgccagtng

SEQ ID NO: 3507 - DNA, 399 bp, Zea mays
  Clone ID: MRT4577_103200C.1
ctaaaatattcattacgcccgcctgcgtatagggatcttaacggaagaccgatggcgcccatgggcgggacgaactccgccaataacacgccccttgaggacgagcccgccgtcgcgtagactaccgccggcaagaagcccaaggcgcagaatgctatcccggatggcaagtccgacgccatggatgacggtgagggcaagcgtggcttgaagaaagtcacgattagcgtggagacgtacacgatctacatcttataagcgctgaatctggtgctcccgtacatcagtatctcctccaaggccatgtccatcatgaactccttcatcatcaacatgttctagaagctggtcagcgaggccatcaagctcgcgcgctacaacaagtagcccaccatcacc

SEQ ID NO: 3508 - DNA, 145 bp, Zea mays
  Clone ID: MRT4577_103201C.1
cggacgcgtgggcggattcgtgggcggactcgtgggtttacctgataaaacaaacactagccgactagttcattcaggctggctgagctaagacaggatgaataacggctggttgagctcatgcatgacatttatttgggttgat

SEQ ID NO: 3509 - DNA, 280 bp, Zea mays
  Clone ID: MRT4577_103202C.1
cccacgcgtccgcctacgcgtccgaaataaaataaaaagataccatttccaacaaaaaaaaaaaacaacaagagcagctttaaaagaccaaaaggagccacagcactaggaacaagcaacccaaccacactccgagaaactgatcaagaagtcccaaatgcctcttgtgacgaaaaaggcggactaaaaaaagtcaacagggaactacacgaataaagtgcaaaaaaccgcggaacaaccagagaactcagcgaaccatgacacgactactcacaaagga

SEQ ID NO: 3510 - DNA, 182 bp, Zea mays
  Clone ID: MRT4577_103203C.1
aacccttcaatacaccacatgccatttgcttagtacacactttgtcaatgcagatacaatgtaattagatatacaaggaagtccttagggactttctgttggattggcacgacatagatgctgcatagaaaaaagggtctagaacagaggcaagttgtggataaataagtaaggggtatccg

SEQ ID NO: 3511 - DNA, 103 bp, Zea mays
  Clone ID: MRT4577_103204C.1
gaagttcaaagaacatactacagaagggtacaagcctttataatggaaacggggtgtgggcataaatcacctgacacagcaccgccagtagcccacctaaacc

SEQ ID NO: 3512 - DNA, 729 bp, Zea mays
  Clone ID: MRT4577_103205C.1
ggtccatctcccatccatcccagctagctagcgtacagacgaataatctcttcttcacctcactagataacacctgctaggagctcgatcgctctgtgctgcagtaatggccgctcgttcctcctcccagcagctgcggctgctggcgtccctggcagcgacactgctgctgctggcgatgcgggccgctcacagcatgcggcggcgcggagctgaagggaggtgacgtcctcggtggggccgtgcctctcgtactcgatgggcagcaacgcggacgccctaccgcggtcgtcgctgcatgggcctgagctcgctcaacacccgcgcgtcgccggagacgtaccaccacgccacctgcaactgcctcaagaggatgaccgtccgcttcgaccgcgacgaccgcatgaccaacctagacaacatcaccgtgaagtgatctgtccccctcgtggcggacatcaggcacaccgtagactgctccaaaaccggatgttcatatggaaccacattggaggaaccatccctctctgagatgggccagtagaagaacataataagcatgcgacttgtacaagaaccacatatggccgaaaaaaccgcctgccctggtaaaactgaagcatcttgaatacgtgcatcatgctgccaatcatgagagtggggccaaccgaagggaccgtcatggaatatctagtctcaaagtagctgatgtttcaagttatgatttgt

SEQ ID NO: 3513 - DNA, 615 bp, Zea mays
  Clone ID: MRT4577_103206C.1
ggacattaaaccttttacttgacccaaaaattccccggaaaattcccctccaatggggggggaacggaaatttcggcccctactaaagatttttggtaagcccaacaaaataacctggggggaaatgctgggttttaataaacagattacttcaacttcaacaacaaaaggggggtagtaatccacaagcgggttgcaatccccaactacccggatgcttagggcacaaacaacggatgaacttgaaacaacatcaaactgaacttggtggggaatcacaggacccccaaagctggaaatccggccagtttttgtggtaaccgtcccccctcgccttgctttgaagaacacaaaagggcaaaaaccaccggcgccgccgcttaaaaaattaacactggtttacatatttttttttccttgaaaattttccgctccctaaaaaaccccaaaaaaaatcccccccttagaataaaccctccacccaaccagccaaaaattttcacagggcgatagatttttttgtccagggtaattagcggatttttttggaaccaagggggaacatttttttatgccatccttttttgttacggtttaccagttaccaccaccttt

SEQ ID NO: 3514 - DNA, 232 bp, Zea mays
  Clone ID: MRT4577_103207C.1
ctactacgtttcttctttgggggcgatgatttttgctcttcgtgcgctttttggcgttgtgtgagcgccccttaagcgttttttttttctttttgctcacgcgctcctagtgccattattcctctgttgggggcagcagctactgtgttgggcttcgaacggggagctgtgggggattgcatgcaccagccgcggcccgcgggggggtggtacaacaactttttgcccaatt

SEQ ID NO: 3515 - DNA, 343 bp, Zea mays
  unsure (1)..(343): unsure at all n locations
  Clone ID: MRT4577_103208C.1
aaaaacatcaggaaaaagaacagttgggggaacagtgaccgagaacagctgaacagatcttaatcttacatatcccactcttgnngggtggacaaaaaaacaatgtacttaaaaagagctnactgactagcgaacgtgagaatagagtgggctttgttccattgaagatccaagtcgggaagttgtgcagttggcgattggcttctggacaatgctacactgttttttacttgaagtacagttcaagctacttcttgaggggnncnaacacgcttgtgaatgggttaagtgcgaccggtgcctatagcttgaggtctgggaactgattcgtcaaggcctcatt

SEQ ID NO: 3516 - DNA, 664 bp, Zea mays
  unsure (1)..(664): unsure at all n locations
  Clone ID: MRT4577_103209C.1
aggttcctaactcgctacgcacgctactgatctgctccggccatagccatcccctctcctcgctacgcttctcttcctcggcgccgattcctcctcctcctcctcctccctcgtccgtccccttccgccgcacgagctcgcccaagatgacgaacgccagatcacctgcccctgtgaatgatgaccgcatgctgaaatttgctgagctgcctccgaaaaggctgcaccgcttcataactttcatgatggacgacaagttacaggagatagatgtggaccatgtcgaggatcgctctaccagctacgatgacttcacaacagcctccctgataatcgactgccgatacgctgatctatgatttcaactttgttactgcacaggatggcctgaaaagcaggatcttctatatgctatggtccccattctccgccaaggagaatagcaagatgctttacgctagctgcgaccagatctgctcgagtggcctcaatggcattcaggttgaactccaggccacagatgcgagtgaaatcaacctcgatgagatcaaggatcgggcacgctaggcgcaccgccatcgcgagnttcatgatcacgcatcatggactcgcctactactngtggatttgtatgccattatagacttggtgctgcgaaagactg

SEQ ID NO: 3517 - DNA, 1523 bp, Zea mays
  Clone ID: MRT4577_10320C.1
cattggggccctcgaggccggccggtccttaatttcttatcccctcgtcctctgcgtcttgttgcacttgaagcttcctccgcggcgtcccgtcgagcaaccatggcggcggcggtaaccctcctccgccttcctctcgcccgactctcctaccacctccgctccgtaccttcctctcgtctcccgtccccgcgcctccgtatctttgcctcccatcgccttttctcctccctggaccatggctccgcctctgcttccgcctccgcggccgtggccgaggttgtaggcgtgccggacgcggaggaggagtcggtagaggaggaatctgcggccgaggccgaggcggaggcgcccaggtcgttcgtgctcccacggctgccgcggccgaagctgagcgtgaaggagcggaaggagctggcctcgtacgctcacggcctcggcaaaaagctcaagtcgcaacaggtcggtaagagcggcgtcacaccgaaccttgtctccgccttcagtgacaacctcgagtccaacgagctcctaaagctaaaaattcatgggaactgccctatggagctacctgatgtgatactgcaacttgaggagtcaacaggatccatcgctgttgaccaaattggtcgctctgttattctgtataggcctagcaccagcaagatgaaaaagaagcaacaggttgatgaaaatgctaggaggttttcaagaactgaagaaggaaacgctaggcggtttgcgaaatccgaagaatcgtttgaagaacgccctagaaacagaccaggcagaagatctgttggacctggatccacatttaagggggctcaacagaagagaagaccgatggcatccaaggggtcttcttcatatggccgaggatagcagtggcataaaacactatatgcttgtttttttttccgtgttgtctgtgctccggaccctggagcgttcatgtaaagttctcgacgaactggttggagcacatggcagtgtttagttctagttttgacaagtaagttgtggttccaggtctcatcaactgcacaatgaaataggcccaagatactttatgtgtcagctacgtgcaattttgtgcaagactagcacaggaacatggagttttttcagtgttgtccgtagacctcttccatctggtccttgaaatcacagcagaggaccatccattggactgtcatgtttttgcgacttcgttgagcagctgtctgttgatgtttcactgagagtctcaggctggtgcagagccaagtgcttaacatccatattgcccctgtgatgagttataaccatggttccaagaaccatctcagcaatattgctatagttctactagaagtgtggtggagcttcttagcaacaatgtgaacttttatttttttttaagccggcgagccggttagctccaaagcagtctagacggatgtggtgcgcacatgtgctttcttcgactgatgtcattagctccattcctgatagtcaataaatgtccagatatttggttt

SEQ ID NO: 3518 - DNA, 168 bp, Zea mays
  Clone ID: MRT4577_103210C.1
gccacactttccagatcccacaccatccgataaagactcggcgcacatttggtcagtgcgccgccttgccggcgcctgttgcaacctaggaaggcggatcggccacatatagaacctgacctccttgcaggaggtggatctgatgggcacggaggcgtgttggcgcgc

SEQ ID NO: 3519 - DNA, 844 bp, Zea mays
  unsure (1)..(844): unsure at all n locations
  Clone ID: MRT4577_103211C.1
attgggtacctcgaggccggccgggacgcctcacgacaagcgagttcgacaaccaaagtgtgctttgtcttcaccaccagtgtggataaacacgcttaagctcttcgaatcctcactgacttttctcccccgaaaggtttgcgagttcgagagtttccagagctcccaacttcacatgaacgttgcgtcacactaacctgtccactctttacgagaaacacccccccccctctcgcttcagtcgctcgcttcatcatgttcggcaagcgttctttggctagttcaaaggacaaggaccgttcaggcaagatcaccaagcagccaaagagatcgtttcgcgatgcctccaagcaaaaggccatggccgagaagctggatgcacgcaaggacagccccatgatggacggaggttcaccgcagctgacctctgccattgtgacagtcatcgttggttccgaccagcgactgttcgcggcccacgaagatgtactgtgtcattctccgtactttgctgaactgctgcggagccagttcttcgagtcaactaaccgccgcatcgatctgcccacggaagagcctgaaatcttcagttgcatcctcgagtatctgtacaagggagactactacccccgccttgtccacgacaagcggcgccagacctggatgctcgaaggtgcaattgcctcacccgaccccaacaaaaccggcgaccgcgctgccgcagtcgagccaacctttttccacaccgngcgtgggagacgttcttctccgtgacactgctgtgtactgcgctgccgatcgttacggncttgaggagctcaagaagctctccctggcgcagcag

SEQ ID NO: 3520 - DNA, 127 bp, Zea mays
  unsure (1)..(127): unsure at all n locations
  Clone ID: MRT4577_103212C.1
ggcgtgagnntgacagggacgatactgccgtagagccgtagtgcatcccggcagcgagagccgagagcacacgatgccgccacnnctgcgaccgcgaancgtgtggctcggagactcgctcctcttc

SEQ ID NO: 3521 - DNA, 462 bp, Zea mays
  Clone ID: MRT4577_103213C.1
aggctgggagactgtcagacattagattagagtatttattctaccgtggcttaatgaggaacttcgtaaatatgcttaaatattattgcatcataataatcaatagactaacattaaaatcttcggtatcctgacattatgctattcatagactagcattacactagtattttttcaagatagctgtgtcgtgtttgtggttcagtgcacatgttgtacttattcattgttctgttgtacatttgatgcattgtactttgatagtaatatcaagatatgtgtaaattttagatttatttcagctatcttctaggtgttaatttgatgtgatttaattctaatatctgtaatattatatttattttactttattttactgaaattaatcagtagccaaaaaatgttgagctctggttagtatgcgcttcttataagttgcacgttacattctaagtgttcagg

SEQ ID NO: 3522 - DNA, 490 bp, Zea mays
  unsure (1)..(490): unsure at all n locations
  Clone ID: MRT4577_103214C.1
ccggacccaccccacccacccacccgcccctaccgcggtgcccgataccanagccagacccctttcttcacctccttcccattgcaatcgcaagccctcggctccggcgctcggcggtcggccaggttcgggagatcacttccccgcggggaggagggagggggtcgccgttagcgcgcggcacttggatgagaagggcagcggtggaggaggatgcggtaggcgtacagggacttcatcaaggtgctcgaagctgacatccagtacgccatcaccctgtcctccgagtttccccgggactatgatggtgcgtgcctgcagatgcggttgttgtacagttccgaagctgatatattcctcttgctggtgctgggggcggactgcaccctcgtaggggctcttggtctgctgctaatcctcatatcccaggtttatgtggatggtcacactatccctgtcggtttcatgagaggaaagccaccctttgaag

SEQ ID NO: 3523 - DNA, 251 bp, Zea mays
  Clone ID: MRT4577_103215C.1
cgtacatcatcacgctagatgaggtcgcgtgtgcgaacgacacgtcgagatcgctgaacagtggccaatcctataatctggataagtctaggcagaattagtatctcaagatacagcaccttgtacaattgacctgcttagacttcgagtatatgtcattgagctagagaccactgtgaagcatctaacaatcatgagactactgaattgtgtctcgcctaagtgatgtctgggatcactggaagaaaggg

SEQ ID NO: 3524 - DNA, 723 bp, Zea mays
  Clone ID: MRT4577_103216C.1
atccagcaatggcaagagcatccatgttctaaacctagctagagcggctataaatacggaccggcgcccctaagttggattcaacaaagctagctgaccgatctgcctgtgcagccatgaagagatgcattgctgccgttctgctggtgctttcactcgaggccctcgccgccgggcgcctctcggctaccgtcgccgacgaccatgtggacaccattcgtctcccgagcaacgatcttgccgatgaagtagcgacggcggctacggagatcggcgccgagaagacgaggccgtggaagtgctgcgaccgcccgttgtgcagcaggtcgatcccgccgcggtgccgctgcatggacgcggtggagcagtgcgacgaggcctgcacccgctgcgaagcgtcccagtccgacccttccaagcgcatctgcaacgaccggtaccacggctggcccgggcccagctgcaccaaccccgacgccgacgacatcgcaactggtccgggagtttctggtccgccggtcgcggtggcaacggaggaagaagttgttagcgaggagagcgccgtcgtcggcacggagaagccgaggccatggaagtgctgcgacgacaccctgtgcaccaggtctgccccgccgacctgcgcctgcaacgacaaggtgaagaagtgcgccaagacctgcaagaagtgcgacaaggacgagtcggacgcttcccgcttcgtgt

SEQ ID NO: 3525 - DNA, 390 bp, Zea mays
  Clone ID: MRT4577_103217C.1
ataaagaacttgaagaccaaccgaaagcgattagttctaaagcttagtgacgtcatatagtatcgatgaattaattgagccctgatattatatgcctagatccacgcgtgaattctcaaatactttatactagcacaaaagaaccaaatccctgaatattatgatctgtaagaaatcctgcgttgccaataatgagggattgcatcaccctcaaatgaaaccaggcatctgatgttgcgtgcccatgaatacaccgtttaagcggaacattacagaaacattggcacctgcttaacactggcgcgtactttatgggacatgacgtatttcagttggagtgcctagatgaccgcctcaggggatatatgcttatgttacggtgaccggtgc

SEQ ID NO: 3526 - DNA, 477 bp, Zea mays
  unsure (1)..(477): unsure at all n locations
  Clone ID: MRT4577_103218C.1
cnaaacccagaaaagggggggcgattttttataaataaacacccctacccatatcttatatactaccgaacaccgaagatatccaattttcttataaaggttcaaattacactaaaaccacaagaattagcctgcctgcctgctaaatacaatatctatttaccatgtcgggtacaacacaatgactagaaaatacaacaaccggcctgcaccccggttctgctgcttgacggaaagaagttgcaggggaagccgttttcccccctttcaccaattcctaacgattctaaaacatgtcaaccgggaccctcccgtggtcattctcggctccttttgctgctggaaccagggcacttgtactggttgatgcgctctgccttcggaggggtgatcccaacgcacttgccatggaaccccttctcgcagacgtggcaacaaaaccaaaactcaccgttcgcgtaagtttttccccaagcc

SEQ ID NO: 3527 - DNA, 206 bp, Zea mays
  Clone ID: MRT4577_103219C.1
atttagaaacagcttacaaccccatgccggacgggaagtttgccacagagaaaataaccatgcgcacaaaacaatttcccggggtcacccatgaaagggaaagggtaggggcgcgctaattagacataacacggcggctctcaagatatacccttatttgcttggccccctagaacgaagctcggtgggccggattttatcttttt

SEQ ID NO: 3528 - DNA, 330 bp, Zea mays
  Clone ID: MRT4577_10321C.1
aagataaattgtatcatacatttctcattatatattttatgaagagaacaccgttgaaaaaagtcttaaaaatccagtattggttattggacaaaaacggcaacttttttttgaattgggttccaaatcgggattttacttttggcacttcttaagggccccctttggaaaaatgggccaggatgtaaaaaaaaccttccaacaaaaaaatgcaaatcgattacctgaggaggcccacccccggggttattggaaccatttggtttttttggaactttttcccaggtagaatcttcacgatgacgggccccacttttgttttgagctcgt

SEQ ID NO: 3529 - DNA, 641 bp, Zea mays
  Clone ID: MRT4577_103220C.1
aattcggcacgaggcggaggaaccagacgacacaagggaaagtggagacaccggagcgaaccatcaccttcccttctgccggcgatctccagccacggcacacatgacatggccgtctgcgaagctgctctacattggggggggtgacgaagacgcctcctccttccgatacactgcgcgtccgctcctccagcagcacgcgctccagtcgtgatgagggatgcagagcgacagccactctcttccagatcagtcgtatggtgtaaggtgttcgatgtcactccggcgtgaccaacagggcctcggcgacacggccacctacggccgggtgcggaggtacgaggtctgcgaagcaaccccgaccacaagttcccgtcagttccagttcgagctatacaagcgccggaccaccgtcctcctccccagggacctcttcctcgacctcgttctggaactcgacgccctcgccctctaaagttagtcgcccccaaccatcgcaccgatctcatgctcgcctgctggattcgtgaacgaaaggaatctatcacagttctttgaggaactagaggcaagtctactctctctatgctgctggagaatgtcctgacccagcaccacttgctgaagcagaagctaggagt

SEQ ID NO: 3530 - DNA, 1059 bp, Zea mays
  Clone ID: MRT4577_103221C.1
cattgggtacctcgaggccggccggaattcggcacgcgagagaaaggggtcgaatcggcggctgatttgacccggctcgctattagagctgcgaaagtgatccgagcagtcacggtttcggaagcggcgcgtcggccggaggagaaacgcaaccagctgtcgaggagctatgagcagcggtggcggaggcagagtgccggcggcggcggcggcgcagtcgcaggagctgcagctaccgccggggttccggttccacccgacggatgaggagctggtggtgcactacctctgccggcgctgcgccgggctgcccatctccgtgcccatcatcgccgaggtcgacctatacaagcacgatccctggcagctcccaaggatggcgctgtacggcgagaaggagtggtacttcttctccccgcgggaccgcaagtacccgaacgggtcgcggccgaaccgcgccgccggcgccgggtactggaaggccaccggcgcagacaagccggtgggcacgccgaagccggtggccatcaagaaggctctcgtcttctacgccggcaaggcgcccaagggcgacaagaccaactggatcatgcatgagtaccgcctcgccgacgtcgaccgcaccgcccgcaagaagaacaacagcctcagggtacgttgcgatcgatcgagttccggccggcgcgtccaccagaatatctcattcgtttctgtgcagaaaattatctcttgctcgtatatattattatttgttaataatatatatctcctgtcactgccgtatcaacaaagaaaaagttgagataagaacgtaacgtatggatcacaaagaataattattagcagtcggattttcactagctagctagtcgccgataaaaaggacggcgagacccatttctctccggtgtgaaccctggagatgctgcgccgtgcgtcatctccttcaaccgccaattatttcttgcgcttttgcgagctacgacagcgatccgatacggtcgaaagcgacgcatcaatagtgcctatacatttcatcgcactagttctagatcgcga

SEQ ID NO: 3531 - DNA, 580 bp, Zea mays
  Clone ID: MRT4577_103222C.1
ttttttttttttttttttttttttttttttttttttttttttttttttttttttttttttttttttttttttttttttccagggaagcccagcacgggaaaacacgacaaaatcgggggggggctggggcccaacacttaaggaggggcggaaaaaaggtatcggggcttaaaaattggggagggcccaaaccacgactatcaaaagaaatttcaacggggggaagggcccttttaagaacaaaattggccaaacaaggggggggcttggaacttaatcgggcacgggaggacgggcaaagggttaaggactggcaaagaaggcaaaataggaccggggggggctctaaaaaggaaaaacccctcgtcttcaaaaagcagggggatggacaccggcttggggagcagggaggaccccaatggcttcccagaagttggggacattaagcacttttatgccaaactgggcggggagaaaaaaaaagcacggtctaattttccggcacggaaaggaaaaagggctggtcctttctggcagctcgagcaaaacaagggacccatcccctccaaggagtcctggg

SEQ ID NO: 3532 - DNA, 247 bp, Zea mays
  Clone ID: MRT4577_103223C.1
gcaggccccgccgcagtttccgggtctacccacacgcgcttgtatctcatgctggtgcgttgaccaccaggggatctgggctctcgagctgggaatcactcaaggcagtgatgtcaagagagcagctattgctgaagcgcacctctgtcatgtatattttcaaggtaacccaggtgatcattcttgcactcatggacatgactgaggttctcagaatacagatgccccatgggcagattgctgattg

SEQ ID NO: 3533 - DNA, 401 bp, Zea mays
  Clone ID: MRT4577_103224C.1
aaaggggggaacagtatgataacatttttccatcggcccattaaacgggacccccgaagttaaaccgaacaattttggaacaaccccataatgggaacggaaaaaacaaatcctaggggggccccaaagaaaaaacggctaatttttaaagcgctataggataaaccaaacccaaaaggtttgggcctaggaaaaaaaaggggaaaaaacgggccctaaaaaaaaaaataaaacccgggtgggcaaaacatccaactaaagggtcttcaccaaagagaaacccccccttttttggaaaaaaaaaacccgagcggggaacttgatcccccccgaggttttgccagggaaaaaagcacccttaaaaaaaaaatttttggggcccactggcaattagggggggg

SEQ ID NO: 3534 - DNA, 901 bp, Zea mays
  Clone ID: MRT4577_103225C.1
agtacagacaccaggaacggttgaacaagcgtgggtgggagctgggaagcagaggcggccagtgggggcaccgggaggtggagccgttgtgccaaccgagagttggtggcgcggcgcctgccgccgggcagggactggtggtgctgccttctcggagtgtggcagcggcggcggcggcggcggagcagtgccagatctgcgactccgacggcgcaatccaccattccctggccagtgggggcaccgggaggtggagccgttgttccagcaaccgagagttggtggcgcggcgccggccgccgggcagggattggtggtgctgccttctcggagtgcggcggcggcggagcagtgccagatctgcgaccccgacggcgcaatccaccattccctggcctccgcattgcatcaggatctaacaatcaacaagcaagcttgtccagtctcataagtaacagctatctggtgtagaagggttgctgctatctgcctgtcttcaccttctggtaatgtctagcaagttgtaaaagatgtctgtcactgcctgatgatctctgctgtgagtctcacacgtctgctgaacttgacgggtgcagaaggaaacaagagaggagcaagaaaggccggattcttgcagcttcctctagtacattggctgcaatttctctttcagtttctaccatgcctcgcaacttggaatgcccagtgcagacccagatggcagtctcagccttggaccgaactcttagcagtgagtatcctactaaaagcaaaagcgagaccaaggttggtggatggaaacgtgttttttgtccaaaccgacactgggttgtgtcctggctattcaattgatttgtggtgacaatgcacatacggtcaaaagaaagctgcaggtggccct

SEQ ID NO: 3535 - DNA, 171 bp, Zea mays
  Clone ID: MRT4577_103226C.1
atgggatgatgaccaaaatgattgatattggcttaatttttactgtaggtgaaggctgtatttgtagtagtactcaagaatcacctgatgttttcttattctccttaaattaagagttattttgtgtttgtattcttggctggatgttataataaacatattgttactgtc

SEQ ID NO: 3536 - DNA, 444 bp, Zea mays
  Clone ID: MRT4577_103227C.1
gggggggggggcaaaaccccaaaagaaaggggggagggattcaggggaacacaggaaattcactctgggcccaacaaaaaagggccggggggccggggacccccaacaaagcaaaaaaaaaggggccggggggcccgggctcccccaggggggcccggggaatttctggccccccagcttggttcccagggccccctcgaggcggccaaagaacgggggggggggaaaggccttgcccgaccaaaaccccgggaacaccggggggttctaaaggaacaactgagcaaggggggccgggggaaaactttaaaggagcccgggggggaggaaaattttcttcagggcactgggaacccccccaggggggagggtctttgggccaacccaaaggcccctggggttgagggaagggcccctggacccccccttgttaaaaccaagggg

SEQ ID NO: 3537 - DNA, 710 bp, Zea mays
  unsure (1)..(710): unsure at all n locations
  Clone ID: MRT4577_103228C.1
tgggaccctcgaagccggccgggaaccagttacccacaacagcgccactgtccacgtgcacgcgtcaaggttgcttagctagccgcatggcctccctcgccgcgtctcctgagcccgggacatcaggagtctcgacggcagctccatctccggaatgaagctcgccgactgcaggtcggcggccctgtccatcctcgggccccgcgcaaacgacgtgaagatcaactaccttgaccacaacgactactttgacatcacaccacatccacatagaccaccgaacagtgggacctctacggctctgacacgccgtacgccctacaacccgctacagagcaagttcttcaagacgttcgcgggtccgatcaccaagagaggtctgatgctcaagctcctgctgatggactgactacctcacttctgatctacgntcagcacgtcggcgtcaccggacctcctgacgatcaagacgagacctcaggagacgctcgcatgccgttccctgcgcatgaatatctaagctcagcttctccatttgtatggtctaataacttgctttgcactgataccgccgcacaatacgacgtaatcgacatgcatcatctctctatcttgatgatacgctgttcataatttgacatatttgacattccggtattgcgcactcttaggcatacgtacaataattaaaatgacgatgcgtgactctc

SEQ ID NO: 3538 - DNA, 257 bp, Zea mays
  unsure (1)..(257): unsure at all n locations
  Clone ID: MRT4577_103229C.1
aggggggggtngaacatgaaagctccgaacctgtacacatttgacataattacgggccggatctctgcaagatcttgattagagcgaaattgatctacacccgttagggcaaaaggaaacacggggccttatatgtggtagacaagacttatcgcctccattcgtgggtgattgaatgccaacggtcgtgcaaaatgaataatcgtttttagcgtggcttagtttgggttcttcactacagcaattcgtgttccaaa

SEQ ID NO: 3539 - DNA, 214 bp, Zea mays
  Clone ID: MRT4577_10322C.1
aaaaaattaacatttttttttatttatttgtctgttttttttaattttggcagccccaagaaccaccttttttttcttaggataaactaaaaacaaaccctgacagggggaaaaccattcatcgttccccaccccatgtcgtaatggcaccatgggcttgttggacccccagatgaaacatgctcttacgggtgcctggggtatacactgaaat

SEQ ID NO: 3540 - DNA, 497 bp, Zea mays
  Clone ID: MRT4577_103230C.1
ccgagcactgctcgttcgatctgcgcatgatatctgaggtccttggcggaccgcgagcaagctcgatcgagtgtatggcgctcgtattgaatagtgagactggaacaatgatgcctgctgagcactaagtgctgctgaatacagcgatatcatggtagagttgaccaaggattttgagatgagtgctttcaacaagacccctgagtttcttatgatgaacccacttgggagggctcctggtctggagactcctgatggccctgtcttgatgacagtaatgctatcggacgctatgttgctcgattgaccgatgactaccctcttttaagctcttcccgtatacgctaagcccacttcagacaccggatggattctaccgccgcagaagaagatcctgctgctgcttggtactcggatccagagatcgcgcacctcccttatgacacctcatctgaagactcatatattctttcatgtgatacggcgctggtggctct

SEQ ID NO: 3541 - DNA, 447 bp, Zea mays
  Clone ID: MRT4577_103231C.1
gtgtggtgttttttttttttttttttttttttttttttttttttttttttttttttttttttttttttttttttttttttttttttttttttttaacccaagggcataaaaaaaaaaatagcccaaaaaaaaaatcgaggacagggaggggggggggggaaacaaattatgagggcaaaccaccccaaaccgttggacaaagccaaaaaaaatgggaataacgttaggttttcctaaaaaaaaaaagggtatgtttgaccagggttaagccgacaagaaaaacccccccgggttaaaaggggaaaccttgtccttgggggggctaacgtcaagggttttgcccctggggggggggggggggtcgcccccaatgtgaagcgcgttccggttgacaacggggaaaatttgggggagcacctgggaaaagggccggcccacgtggggggg

SEQ ID NO: 3542 - DNA, 787 bp, Zea mays
  Clone ID: MRT4577_103232C.1
ataggccggtggcccgtggcgcagtctcttctccgaagtttgtactagtggtcgggtcgttttgaatgagtggtgtactgatcagcaatgtctcaaaccatgtcaacctctttgttgtcatcaatggaaatcactacttatgtgtgctaaaaaaaaaaaaaaaatggcacgcacgcacccgctggcccagaaagctactagcgtgcacacaccacacaagttcagttcatgtccgtggcagcaagtaggagtatattatacaggtagcgttgcactgccctccgagctggtctggttttgtttcgtttcgttttggttgggttttcacaggcaccgcgcgccggcgaccgagatggccgactggggtcccgtggtggtggcggtggtgctgttcgtgctgctgtcgccgggcctgctgctgcagctgccggccaagggcgggcgcttcgtggagttcggcaacttccagaccagcggcgcctccatcttcgtccacgccatcatcttcttcgccctcgccgccgtcttcctcatcgccatcggagtgcacatcaccacggactagccgtctagccatagccggcgggaccgggatctttcttcgttacagtctgcctgtatatacatacatgctcagtacgtacgctttaccgccgtctttgtatcagcacccctgctgtgtgcatacctagcaagtgtttatatgggctgtgtgggctgttatcattcagtggcgcagcaagaaacccgatcgtttgcttccaaaaaaaaaaaaaaaaaagcggcc

SEQ ID NO: 3543 - DNA, 963 bp, Zea mays
  Clone ID: MRT4577_103233C.1
cctcgcggcccggccgggaatgtcactggcacgcacgcacccgctggcccagaaagctactagcgtgcccacacaagttcatgcatgtccgtggcagcaagcaggagtatagacatgtagcgttgcacttgcactgccctcccagctggtttggtttggtttcgttttggttttggttgggttttcacaggcaccgcgcgcgcgccggcgatcgagatggccgactggggccccgtggtggtggcggtggtgctgttcgtgctgctgtcgccgggcctgctgctgcagctgccggccaagggcgggcgcttcgtggagttcggcaacttccagaccagcggcgcctccatcttcgtccacgccatcatcttcttcgccctcgccgccgtcttcctcatcgccatcggggtgcacatcaccacggactagccgtctagccccatagccgggaccgggatctttcttcgttacagtctgcctgtatatacatatatacatacatgctcagtacgtacgctttaccactctgtcagtgagtatctctttgtatcagcacccctgctgtgtgcgtacctagcaagtgtttatatgggctctggtctgggctgttatcattcagcggcgcagcaagaaacccgatcgtttgcttccaaaaaaaaaaaaaaaaaagggcccgtggccatccatcgacgatccatctcactaatttaagacagaaaaaaaaaaacacaactccacagctcacctcgagatccttcgatttcgtctctcacacgaccggtgggtgccccccgtctctcttgcaattgggtccgcatgtctccacctcacacccatatttccaggcaacaaggtcgccctgaaacagtttttatttcttctgaagaatatagataagtaggttcttatgaaattttttctctctcatcttcaacgtagatagaatctcaaaacttgaaatcg

SEQ ID NO: 3544 - DNA, 292 bp, Zea mays
  Clone ID: MRT4577_103234C.1
cccacattctgggcaaaaacggaacagggtgttgctcaggcaatcattcgatctgtcattgatttcaagagatatccatggccaaaggtgtctgataatggcaaagagcttgtcagaggaatgctggatccggactcaaaacgacgactgacagctcaccaagtgcttggtcagccatggttgcagaacattaaggaggctccaaatgtcaatttgggtggaactgtataaggccagactccaacaattctctgagatgaacaagttcaagaagcatgcacttagggttata

SEQ ID NO: 3545 - DNA, 556 bp, Zea mays
  Clone ID: MRT4577_103235C.1
gtgtggtgttttttttttttttttttttttttttttttttttttttttttttttttttttttttttttttttttttttttttttttttttttaccttcataacagccaaattggtttgccaagaacatcggtccccgattggggggcaagggggggggggggccctcgcctagttcaaacctttcagaaacagggggacagggcggcaatcagggcctttcgcccctgatgcggggcgcgagctggatgtccttgggcatgagggggacccttttgggggggggggggcaaaggggggggtcctaaaagagacccaccaaataccccttggggggctccttcaacggggggacagggggggactggaacccaagggggggtttgaaggcttgggcgaactcacccaccaaccggtgggaggggagcttccggaggagcagctcccggctcttttggggcttggggatctcccggaaaggaaccgggcccggggggaacctttgcgggtttttcacccccccggggggcggagcccacttgcgcccccccttggggg

SEQ ID NO: 3546 - DNA, 653 bp, Zea mays
  Clone ID: MRT4577_103236C.1
ctctcgtcgctgtcgcactttattattttctctattccggcgttgcctctctgccttcctgcctgcttgcctccctctgagagatacccgatcgcaccgccatggcgcacctgctcacccacgaaaagatcatctagttctaggaggtcttcaacctcatcaatcatgacatctacgtctgcatcactaccaacgaacttgagactgtgatgacctcattggcgaagaaccctactgaggctgagcttactgacgtgatgattgatgatgatgctgatgccatgtagccatcagactttcctgaatttctcatcctcgatgtcgtccaagatgatggacaccgcactccgagataccagctcgatgataccttcccagtgatcaacaaggaccaaaaaggattcatctccactgctgaacttcggcatgtcatgaccaatctagactcaaacctgacgaaagaagaatcgacacgacatgatccgtagtaccgatgtgcacgaagatgcccacatcctctacgatgaattcgagtacgtgaagatgtccgagtgacatatggccatcgtccttaagctagttcctctcctgatgatagaactagccaagtatggaagactgactgcttgtgatgtgtgcaactgctatccttg

SEQ ID NO: 3547 - DNA, 288 bp, Zea mays
  Clone ID: MRT4577_103237C.1
cccacgcgtacgcggacacctaggcttgatacgttgctggatgcaccatgaatacgaggggggtctctgcatggtaaacggggcatgtgacgacatgaaccgctctcagctatacaagttatgctgctatgatctcgcatgccacctgcttgagctataccaacacaagcacaagcggactaagatgctcgaggcactcggcgtcctccgtgacatgcaccataatgtcgccaacgtgatcctaccaggacatgctgaaacgtacacggttcatacgaatatgactgt

SEQ ID NO: 3548 - DNA, 152 bp, Zea mays
  Clone ID: MRT4577_103238C.1
gtgctcaggacaacaatttttgtgctaaaagtaacaaaaaacgagtaccagacctaacaagcattgtagttactaagatgccaacagggaacgggctaaaggaagggagagctggctgacagaggaggagagttcgcgttacgcaaaaactg

SEQ ID NO: 3549 - DNA, 357 bp, Zea mays
  Clone ID: MRT4577_103239C.1
acagatcgcgcaagcaatctatagctcgaggagcatcaccatggattggcgcacaacgaacttatataggggccggtcggccgaccgccattgatgtcaaaaatgttccgcgtgggcaacaacaaccaccctcactacactgctggaggagcaaccacgagcacgtaccagctcgcctatccatagcctgatcatggtgaagaagttggacaggatctaggcgaacatcttgatcagcaagcactactaccgggccacctaggtgaccaccaacctgaccgtcagcgttgtccccttcctggacgtcgacgaaaaccccgacacacagccacatctatatttgtctaggtgcctatt

SEQ ID NO: 3550 - DNA, 151 bp, Zea mays
  Clone ID: MRT4577_10323C.1
acaggaacaaccattttgcctttttcgtcgactcagatctaagcctggaattttaagactgatcattgttggctctatgactgtcttagatactagacctttaaatataaaggctaaaaaaaataaatctttgaaattatctacctgatta

SEQ ID NO: 3551 - DNA, 289 bp, Zea mays
  Clone ID: MRT4577_103240C.1
ggagatggtttccagacaggtttacaccttggaaatcacttgacgttgatgtctacaactctcctgagtataaggaaccatggccaccacccgcacagtttgtgatattgggtgctcgtgcctggctcacggttatttggcagctacttgaattggtgacaccaacctacgctggacagctgaagtttggtgaactcgcacggtttgattcttactctctatttcatgtgtttggcatccgtggttggggactacttgcagagatgagaactgtcagctctatggcgct

SEQ ID NO: 3552 - DNA, 536 bp, Zea mays
  Clone ID: MRT4577_103241C.1
ggtaccctcgggctcggccggggtttccaagctgtgctccagcgagcttctctgtagttcttccccaatcgctcgctctcagcctgtgagtgtcctgctccctcccgccaaagcagctcggccccctgcacccgccgtcgattctgcttatgtcctatcgtcttcaacttccagtctctgctcgtccttgcctagcagcaccggtgctctcgttgtcgctgagctcttggcgcgccgtgacatcatcgccgttttctcgccggccgcgcttgacccacagctccttctcgtcgtcgtcttggacaacccgcagcctctgctccgacctcgtcgcactcgcgctcctcacacccgacaagccgtcgtgctcggcgtgttttctccgtgcggccttacgggttcctctcgcttcatcggcttgtcgcgtgttagagcagaacaccaagaagaagaattgatctttgtaaaggaggaacctgctccagtgctgttgatccagtgatggactccatctaactgcttatcagagtagaagg

SEQ ID NO: 3553 - DNA, 141 bp, Zea mays
  Clone ID: MRT4577_103242C.1
gacacgcggacgaccaccttcagaggttgagcaccaaatttccgacggagatgggggtggttgaggcgaggtcagggatgaggtacatgttctacgattctgccttcgcgccccataaggcgcccagagcgcgccccaggg

SEQ ID NO: 3554 - DNA, 520 bp, Zea mays
  Clone ID: MRT4577_103243C.1
attcggctcgagagcgacggcatcattggcgccgggtcatcggggacggtgtaccgcgcgaagatgccgaacggggaggtcatcgcggtgaagaagctgtggcaaccgtcggcgcagaaggagggaggagctcaggcgccggaggagccaccaaagcggaaggacgaggcagacgcggacgacggcaacaggagcatgctcgccgaggtggaggtgctgggtcacctccggcaccgcaacatcgtccggctgctggggtggtgcaccgacggcgaggcgacgctgctgctctacgagtacatgccgaacggcagcctggacgagctcctgcacggcgccgtgtgcaggggcaagcaggcggggctggactgggacgcgcgccaccggatcgccgtgggcgtcgcgcagggcatgagctaccttcaccacgactgcgtgccggccgtggcgcaccgcgacctcaagcctagcaacatcctgctcgacgcagacatggaggcgcgcgtggcggacttcggcg

SEQ ID NO: 3555 - DNA, 582 bp, Zea mays
  Clone ID: MRT4577_103244C.1
ggaccctgcttttcctctgctcttctctcagttgccgtacgccagagctcccccttccgtggccaaccatatcgggtgaggttttatgccctctattccatgttttctagccccggcagccaccctgtacttgctcgtttccaagctgtgttccagcgagcttctctgtagttcttcgctctcagcctgtccggtcctgcgtacttcagcaccgttctccagccgtccaagctccacctcgtcgtcgtcctgctgtttcagcgtcgtatccctcgacctcatcgcagcagcaccggtgctcttgtcgtcgctgagctcttggcgtgtcgtgacatcatcgtcgctttctcgccgaccgcgctcgacccacagctcctttgcgtcgtcgtcttcgacaacccacagcccctgcttcgacctcgtcgtacttgcgctcctcacacccggcaagccgtcgtgctcggcgtgttttctctgtgcggccttacggttgctctcgtttcatcggcttgtcacgtgttagagcagatatggttcggatatatgtgtaaactcaagagaaagtccaaaagaattggttct

SEQ ID NO: 3556 - DNA, 138 bp, Zea mays
  Clone ID: MRT4577_103245C.1
atggacagattcactgaaggttcaatgggatcttcatcattttttcacccacttagaatctcaacatggaaagtggagccattggatgcatccagcttcacctcctatggttttaggattgccttcaggttttggtaa

SEQ ID NO: 3557 - DNA, 885 bp, Zea mays
  Clone ID: MRT4577_103246C.1
gtgggaccctgcttttcctctgctcttctctcagttgccgtacgccagagctcccccttccgtggccaaccatatcgggtgaggttttatgccctctattccatgttttctagccccggcagccaccctgtacttgctcgtttccaagctgtgctccagcgagcttctctgtagttcttccccaatcgctcgctctcagcctgtgagtgtcctgctccctcccgccaaagcagctcggccctctgcacccgccgtcgattctgcttatgtcctatcgtcttcaacttccagtctctgctcgtctttgcctaggtccggtcctgcgtacttcaacacctttctccagccgtccgagctccacctcgtcgtcgtcctgctgtttcagcgtcgtatccctctacctcatcgcagcagcaccggtgctctcgttgtcgctgagctcttggcgcgccgtgacatcatcgccgttttctcgccggccgcgcttgacccacagctccttctcgtcgtcgtcttggacaacccgcagcctctgctccgacctcgtcgcactcgcgctcctcacacccgacaagccgtcgtgctcggcgtgttttctccgtgcggccttacgggttcctctcgcttcatcggcttgtcgcgtgttagagcagaacaccaagaagaagaattgatctttgtaaaggaggaacctgctccagtgctgttgatccagtgatggactccatctaactgcttatcagagtagaagggttttagatcctctcctgcaataaggcaagcccctattcatttgtcaccttcctagttacttcaaattttatcacttatatgctgcattaggttataggagctgaaagattaaacacttgatgcattaccacc

SEQ ID NO: 3558 - DNA, 1304 bp, Zea mays
  Clone ID: MRT4577_103247C.1
gagaattcctcacgtcacctgcaactccaactgttgctcggcttcaccacgttcaactcccaggaaaacccccggccgatgccccagcgttcgctctccatgtttcttagccccggcatccaccctgtacttgctcgtttccaagctgtgctccagcgagcttctctgtagttcttccccaatcgctcgctctcagcctgtccggtcctgcgtacttcaacacctttctccagccgtccgagctccacctcgtcgtcgtcctgctgtttcagcgtcgtatccctctacctcatcgcagcagcaccggtgctctcgtcgtcgctgagctcttggcgcgccgtgacatcatcgtcgttttctcgccggccgcgcttgacccacagctccttcgcgtcgtcgtcttggacaacccgcagtctctgctccgacctcgtcgcactcgcgctcctcacacccgacaagccgtcgtgctcggcgtgttttctccgtgcggccttacgggttcctctcgcttcatcggcttgtcgcgtgttagagcagaacaccaagaagaagaattgatctttgtaaaggaggaacctgctccagtgctgttgatccagtgatggactccatctaactgcttatcagagtagaagggttttagatcttctcctgcaataaggagaagttttattcccttatctttgggttagttacttcatgtggaggacttgaagcttagaatgtttttatatatctcttatggaaaggcttcacccttccaattattgtaataagttatgcacttcgagtactatcatgacttgtaataaatacatctctttctacaatgtaaaacttgagttctggaatgtaaagtgtactttgtaaaagtcttccgctctatctccaatgtgtgtgtatcaaatgtgattactgtaatatacctgttatgtgggagatccttgggatgatgagttccagttagcgaactcgatagccttgttaagttacccggtgcacgtgcacaaccatctgaggccagtaaggcaaggattggtgcatgtgggcctgataacttgggagggctgtcacacggcacgacgcgtagcgtcctgtcgtgggtgacgtgctcgtctacccctggacgtgcatgtctaccccccgtgtattttatgcgcattgatcatgttatttatattaatgaaatggaaactcaactcagaaattgattacgttagttatttcatgtagttaatcattgactttgtttaatgtcaaccaattggaaatagttataactctagtagcacatgttatta

SEQ ID NO: 3559 - DNA, 654 bp, Zea mays
  Clone ID: MRT4577_103248C.1
gaggctcggccggaataacaactagagatatactataaaagaacaaaaaaaactgaaaaaaagagcgaggccgaactcccccacgagtccactctccgaccgtacgctccgcgacgcgatggccgcgctccgcctggcctccttaaccctccgccccgccgacgactcttacggcgcgacctcatcagttcccggggccgcctccttatccagcgcggggcgggggctccactccctccgcctggccccgccccgtcgacgccggggagacctcgccaggccccgcgccgagaacaaggccgtggtggaaagctacacgtccgccctgacggaggaggccgtcaagaacggcaccctggaccagacggtctccgacctgcagaagctggagaagatcttcgccaacgaggccgtccacgagttcttcaacaaccacaccgtcccgagcgaggagaaggcccacctcatcggcgagatctgcaagttgttcgagcatgcagccgcacggcgaaaactgcctgaacgtcgtgggggacacctaccgcgcgtccatcgtgccggagaccggcgtgaagttcaaaaacgagtacaaatggttaacctgaaccgaggacgtcaccgtgacctacgatatgcaattcgagtcgcaggacc

SEQ ID NO: 3560 - DNA, 175 bp, Zea mays
  Clone ID: MRT4577_103249C.1
actgctgccttatggatgggtgatctggattaccccttaccctctagatgatgatcagaagaaaacctgactaaagaaacatcaagcgcttggggacacaagtctccacagaacctagagagacacggtcgcagcccaatctctattattgcgacaggctgccgctgattgttgg

SEQ ID NO: 3561 - DNA, 1904 bp, Zea mays
  Clone ID: MRT4577_10324C.1
gtcgctggagccaagaaaagcaaggcaaactgcagagccactccctttcctgctcggcctctggcttcctcccctcccgacttctcctccaaatcgctgcctttttgttagtttttttttctattttgcttcctctcagttcttggaaggaaaggcggctgcaatgggaggtagcggaacgctgatctcggtgtaccccgaggagctcaccttcctgtttcttgcgcgtagttgttgaggagaagccgtgctattgcaatctcaaggtggtgaacaacagcgagcatcatgtcgcattcaaggtcaaaacaacatcgccgaggaagtatttcgtccggccgaacgcgagcatcgtccagccatgggattcttgcacaataacgagtaagcacctgtttctccatggaccatggctatgtttagcatcctccgtttggatttcgatgtgtgagtgtttgtgtctccctgccttctctcccatctggggggtacagttacgctgcaggcacagaaagattacccaccagacatgcaatgcaaggataaattcttgattcagagcacgaaggtggccgccagtaccgacatggatgagatcccccctgatacgttcaacaaggaaggctgataaggtaatcgaggaaatgaagttcaaggttgtctacacattacctagctacggaggttcaaatgactctagcgtatcatttttaggaagccggagcttcaaagcagcgtctgacgatctgatgatgctgaagaatgcaagccttgaagaggtaatacgctctatgccaacaattcttaccattttttttactttgggacttcactgaaaacaagtgaattcatcacttttctctgacgaattcatagaacgaatagttttgctaacttgaatgttatatgcttgaagctttttatcatgatttaacatcgtgtggcacatgaacaatctgtttctttacacattgattgtgcattgagagaacagctacttctttcacgttggattcttaaagctatattgggataatgtcatggtggcattgattatgtggagcgtgtcaagtgcaagtctaaagaaataggaagatgttgaagcaacatgatttgacagttgaaaagtcataaagttgatcatgggggaaaggtacctataattgggaggtcataattgagggagggagggatgcccagaagcccatgagcatgtttcccttagttatgctctgcggacaaaatttggatctttttctccccttcctattgtccattccaaccagagtacctagctccctttaaaccgatggacatgttccaggtttctaactgaaaattcagagaacaatcgtgggttatccaaaggtattgtttcatgaaggaatctcattgcaacaggaagtttgtgcattagcactgatcaagactgtatgaacgagtaaacatcctttgggacaacttggtcatttttttctcacgaagttgtccccttttatcttactcagatccagacaattcagcggttgaaagaagaaagagacaacatgcttcagcaaaatcagcaaatgcaacgtgaattggatgtgcttcggaggcgcaggagccgcaaaggcgatgcaggtttctccctgacgttcgccgcgtttgctgggctaataggtctcatggtggggctcctgatgagcctcatcttctcgtccgcgccggctgatgcgtagtaagatgcaagaaaaggttgcagccaacggaagcgttgttgagttgagaccgacgtgggggaaaaggctcgctcgggggaagaagatgaaatttctgctctagtctccatttttctttcttttgctgtttgcatcctagttattattatacgaaatggcaacggggtgcagatctttccttcc

SEQ ID NO: 3562 - DNA, 428 bp, Zea mays
  Clone ID: MRT4577_103250C.1
cgggactcctcactcgacaaaaacaaatctccctattttagtatgaaggcccaggtggtagcagcaactgtcttggacctgctcctgctaatatttgctgaggaggctcgaacgtgcatgttgtgaagacaggaacagaaaggaaggtgctttcacgatacggattgtgccgacgactgcgtaaaacaaagtttaaccggtaggcttatgcggggggcgaacggcgttcaagcagtgcttatggactaagccatgcaagagagagagagctgatgctacactgacggcgggaggcctgtgatcatgtggagctggatccgtatgacagggcgactctgagttgggtgcctaggggggtggggatgaaataaataaacggaatagaaaatgacagtgggggggtgtatgaaaaaaaaaaaaggaaaagg

SEQ ID NO: 3563 - DNA, 432 bp, Zea mays
  Clone ID: MRT4577_103251C.1
ggagcaaataaaataaaatttataaaaaaatatatatgataatttaaggtagttccaactcggccaatatatatataactcatttcaacataggtttatttgtagcaagttcaagactactaccacacctgcaaaaaaaagttcgagattaccggggatcaacatttcccttaaaagaaaaaagaaactgcaggaatcaacacggccatggatactgaaataggcaaaggacttcaggtcgcaccaatcctctatggcttggtatcctccttggcaggggggaactttttgaagaatgggttctttttgatgaacggcaggagctttttgaagagctgagggtccgtcttcgggacttgcaccatcttatggtcagcaagagggtggtagatcggtgtcgggtgcgtgtacaccggctttggcggattgtgc

SEQ ID NO: 3564 - DNA, 482 bp, Zea mays
  Clone ID: MRT4577_103252C.1
caagaaaaggggccccaggccccctacttttttttttaagggggaaccaccccttccagaaaaaaaggggggccccccccctgatggcacccaccccaccaccacaaaggttccttttaaaccgacccaccgaaacctaaaaacggttttttaacctacaaaaaaagccccccccggttaaaggggggaacaagcccttgacagggggggaaaattaacctttggaagaaaaaggaagaaacaacccccccccccttaaaaaaagcaacttttttttttcccccccgggagggaaaaaaaaaaaaaaatgggcagggaaaaaaacacaaccctcggggggccccctttcgttcatggaccgaccaggttgggggccgccgtcgcccataatttgggggggggttttccctccccggccaggggccggggcctcccctggggggggtcctggagcgcgtccggtttttcagggccccgcgggt

SEQ ID NO: 3565 - DNA, 189 bp, Zea mays
  Clone ID: MRT4577_103253C.1
aggtagatgggcaacaactgaaccgcaggttagctaaatgtcccttctggtgctgaccatctaaaaccgtttgacggttgggctcacttccccaccctattagcttttctcggttaattcttccaatggcactgcaaaccacaatttgtctggcggcattaaacttttttacaggatttgggaccacct

SEQ ID NO: 3566 - DNA, 1769 bp, Zea mays
  Clone ID: MRT4577_103254C.1
gactagctgagcgtgccgccttgccgtgtcggggagctgagctgagcctagagacgccaaacggaatggcgaaagcgaccggccgcgcggcgggcagcaggagctgcatcgagaggctgcctgcgccccgcgcccaatcctcttcctaaatcctaatcccctccgcctcatccccttcaaccccacgtctctctcgccgaaggctccggcctcgtcgggatccggtgctggattgacgcaatggcgccgctccacgccgcgctgccgccgccctcctccgccgccgctcaccaccacgcggcagccccgcatgtcttccttgcccgctcgctgtaccacccccgcagggcggcggcctcctgcccgctcgccgtcgccgccgctccctcgtcgagaaaagcgttcttgtcgtgcccgctgctgggccactggaccacggccgcgccgccgcgcgccatcccctcctcgtcgtcgtcgtcgaccccggcgctcatcgcgtccgtgcaggacctgtatgacttcatctgctgcggcccgctggtggacaggatcggctacaccagtgagaagatcgccgagtccatcgaccgctggcttctcgccggggctagggtggcgcgcctcttccgcctcaacgagctccagctgtcggacgccgagaaggcccggatataccacttctacatccccgtcttcctctggtgcgaggacgaggtcatggtgcacagagccaggtacaacgacggcgatgacatcccgccattggtgatcggggtcagcgctccccaaggaagtgggaagacgactcttgtgttcgcacttgattatctttttcgggttgctggtaggaattctgccacattgtctatagacgacttctatctgacagcaaaagaacagaatgaattgagggacagaaatcctgcaaatgctcttttagagttccgcgggaatgctggaagccacgatctccaactctcagtggaaacactcgagtcactgatcaagctaacgaaggaaggtatgaagatgaaggttccacggtatgacaagtctgcgtttgggggaaggggtgaccgggctgatccttctgtatggccagaggttgaagggcccttagaggttgttctgttcgaaggatggatgcttggatttaaacctcttccaaatgaagttgtgaaagaagtggatccacagctggaggtggttaacaagaaccttgaagcatactctgatgcttgggacaggttcatccagtcatggattgttattaaaataagagaacccggtagcgtttaccagtggagactgcaggcagaggtcgctatgagagcagatggaaagcctggaatgtctgatgaggaggttatggattttgtatcacgctacctaccggcataccatgcatatctgccaacactgtacaaagaggggccgaatggttcgaatccagatcatctgctggtcatcgacatagacgaaaataggaaccctatctgtggtggatcatgggacatctcatgtttgtgaaactacttttatgatgggccgtcaaacaccactggcctcttgttgccctacactctggtagtgtaaatctgtgaattccatgtaaatatgaatttcgcttcttaaggcactttttaatctggcatggtctttagcttgaacatcgaaaaaagggaaatagggtcaaaccttttcctaattgattttggtggttgaattgctcaacacaaataattggactaactagtttgttcaagatt

SEQ ID NO: 3567 - DNA, 128 bp, Zea mays
  Clone ID: MRT4577_103255C.1
tttcttactcctcgtccgtccgtcccccatacgggcacgcctttgagtctacagagctgccatggacggtggaagagagcattatgctccttcagtgtttcattcaagtataaagtaccattatatac

SEQ ID NO: 3568 - DNA, 289 bp, Zea mays
  Clone ID: MRT4577_103256C.1
gtagaaggccaactgatcatgtgtttgttgacgaactaaacattgtcaaattcggcgatattatcttccctaataaagtattacatgtcattgatgcttccttatgtgatgactttaacagtgcccaaattaacattgttacctagcctgagacctacccatgcttgatttctctactgcaagtttcactttcttgcacacgtgagattcctggttaaccaacgaccattgaagaagcagctcgcagaattggttcaatccagaccacatatgctagaagaattgaaaa

SEQ ID NO: 3569 - DNA, 525 bp, Zea mays
  unsure (1)..(525): unsure at all n locations
  Clone ID: MRT4577_103257C.1
tcttcactctcggagtggagcgtccattcactatcgnccacgtcatagccaagtaccaggacaaggagggcattaccccaaaccagcaccggctcatatttgatgaggaaagcagattgaggacaggcgcacgcttgtcgactacaacatgcagaacgagagcaccctccacttgctgctgggcctacatgggaggcatgccaaaacatcaccgaacaccctcaagcggcaagactatcaccatcgtagtcggagtcttcacacaccatattacaatggtcaagagccgaagatccacaaacaacagaaggcatcactaccgtgaccatgcagcgtgtgatcttcaatagcaagccactgggggatggttactacccttaacagattacaacatccacaatgagagcaccctccaccttgggctccgtcttgagggaggaatgcatgactttcagaaaacactcactgacgatgaaataacccttgctgtggagcttgtttatgccatcaacaatgataatgcca

SEQ ID NO: 3570 - DNA, 354 bp, Zea mays
  Clone ID: MRT4577_103259C.1
tttttgtttttatcattttattataatgactaactgcattcacatacaaatttcatggtacaaacatcataatgtctggctcttgattggttaacaccgttttatgagtttaacgggttggtagacacacttcttgaattgcaaacaccactcatgtcatagatgctgcatgggttattttggtagtatgagtggtacaagccacacatcgatggcgggccttgtgctgctgacaagattgccaccgctctttgagtagcttgttgagatccacataactcacatggtcgttggccgatggttcccgggattatggatagaaccatgctgtcgattgcttggagaatgtattgt

SEQ ID NO: 3571 - DNA, 158 bp, Zea mays
  Clone ID: MRT4577_10325C.1
cgcgtcgaaacattggatcatgcgatttgactcaaaagtctggtgggggagcaatgtagaagctagctgcactaaacctatcgaacgctctcatggctacgcacagatctcactgaccctgaagactggccgttaacagaactcacggatctacccat

SEQ ID NO: 3572 - DNA, 291 bp, Zea mays
  Clone ID: MRT4577_103260C.1
attcgaaacaggttgtgcttgtgactgcatcacaggtcagtgcctccatgtgcgttcagttttggcttctgcccaaaatgtataggaggaagacgcagggaaccaaatgcggagaacgtctctcctggaccatactgaacgaactgataatttgtcttaaggggggctcacatctttgcatggtgaaatgacacgttcattcatatcactgatatgagagggagggaaactcttgttttgatcagcggatgaataaatatgaaggctgaccgctgatacacttcagcttac

SEQ ID NO: 3573 - DNA, 224 bp, Zea mays
  Clone ID: MRT4577_103261C.1
taagtatcggggcaccagacacagaaatatgttgtgagggtgagcctattaagagggaggacgaggaaagactcgatgaggttgtctatgacgatgttggtggagccagaaagcacatggcccaaataagggaactggacgaacttccatcgcgagatccccagctctccaagtctataggcgcgaaaccaccaaagggcaccatcgctgctgggcccccctgg

SEQ ID NO: 3574 - DNA, 376 bp, Zea mays
  unsure (1)..(376): unsure at all n locations
  Clone ID: MRT4577_103262C.1
gttgcaattagatccaataataataataatatcaacgggtcactgaccaagtgaccagccgccgaaatgtttgtctaccggcccactccgcaaggcccagcctatcagacagatttgatgctagcgtaggcccaacaaaagggagggcaaacagagaagaagggaaggaaccagagaattacagtatgtattatcacattaccccatacaactattcatgcactgtgtcatcatcgtgaaaagagaggtggtggtggnggaaacacaacaccaccgttacatcaggcatgtacagaaaaggccagatggtgcaattccagcactcacgtncaggttttccaacgaatgaatcgtacatcaacaataccatgccatg

SEQ ID NO: 3575 - DNA, 135 bp, Zea mays
  Clone ID: MRT4577_103263C.1
gacctggagggcggaccttacagcaattatttacagactcgcggggtgtatagtcgtagcttatagcgttctgactctggcctttactttgtatgagtggtgcggtgcaccgaacacagatgaactgattgggat

SEQ ID NO: 3576 - DNA, 321 bp, Zea mays
  Clone ID: MRT4577_103264C.1
atcaatcagaatcaaacgtgctgttacccttttgcttcacaccacatttgtgtcctcggggagctcatcttatgacacctgctttatcttttaacagatgtgccagcctaaccaaactgcccaccttacaatgtcttccgcacggatcggcccagcaaggccagaccttggatccaaaatgagggacggcgccctgcttccgacccacggaatctgtaatataacgttgaaactagaggtgttctacttgcgcccggatgctaccacttatcctacacctgtcatgtcatttcacaaacttggactagaggacagctcaac

SEQ ID NO: 3577 - DNA, 433 bp, Zea mays
  Clone ID: MRT4577_103265C.1
cgacacaacacgggctcttaataataaaggagatataattggcgcttacccacgatggtttgtcggctaaaaactgtaggaaacagcacttgtagatgataaaaaaagccaaaacttgcggaagtttgacaaaaacacccctttagtacttcgaagaggctgaaacccatttactggtgcggctcctattaaggctccggagtcttatcttcttccttgggagcaggtgcaaggccagagtccccaaaataaaccggggaggtaacagcaaatttgtttgggaccttgagaaactccttgatcttgccagcacgtgggtatgagtaggctgttttgacggcaaataaaagcacatttttgttcccattggtgaacatgtggggcacaactgcatgggttgggaacgagctccccggttaccgggaagaaacca

SEQ ID NO: 3578 - DNA, 321 bp, Zea mays
  Clone ID: MRT4577_103266C.1
cggccgctcgatatactaactagatccacccccctgcctgaatgaatcccgaacgcaggaagagggaagagcacaaggacctttggcgcccgttcaggatccacatctttccaagcgagttcttggttgacctcttcctcttccgaccacatccaaggatctcggtgcagctactcactctcaccccacaagctctcatgtctgatcccgaaattagagaggcgacctgctttctcatcccttcagtgccgccaatgctggcgactctgccgcgcaatagggccaaaggactactcccacctgcgcattcagccacccaac

SEQ ID NO: 3579 - DNA, 154 bp, Zea mays
  unsure (1)..(154): unsure at all n locations
  Clone ID: MRT4577_103267C.1
gttgaagngtgttatgttgtactgtgttcatgcgttctgcttctgtgtttctccacagtgtagcttatttattcccatggcaacaaataagctacactgtggagaaacacagaagcagaacgcatgaacacagttcatcatatcactttttaac

SEQ ID NO: 3580 - DNA, 175 bp, Zea mays
  Clone ID: MRT4577_103268C.1
attctttttttttttttacttcggacccaaaccaaaatggtttatgagaaacgaaggtgcacggtccgtgacaagagcatatgatctttatcacattacagcacatgatgctatcctggaggaaacagtaaaccctttttccggaactcacaactacttgttcccggaacaccct

SEQ ID NO: 3581 - DNA, 270 bp, Zea mays
  Clone ID: MRT4577_103269C.1
attgggctcgagctaagaccgtgcgggcagtagcctatttataattaatttgatatacctactacggaccacggaccagatagatgtatattaaccagccggctcgccaccgtatatggcgtgagaggcatgggatatcgttggaaggatactggaaggttagcacttgtactgtactctagcctagaattaccagactagaacagcagataacataggccgtgcatgtatgatatggacctctaatgtgcacatgaaatctgagggatt

SEQ ID NO: 3582 - DNA, 256 bp, Zea mays
  Clone ID: MRT4577_103270C.1
tggaattcggcacgaggctcgatccatctcactctccgctggtcgctcactcttgcagctccacccttgactcagtcttagtctgttattagctgtaggctctagctagccgcgccactccttggtgtgggcatgaggcttgtggatcggcaccagtggggcactgccgaggtccagaccccgaccgaggaggtggtcggggaagcgcggcggggggggaccccgggggcgggcggggggcccgaggggcccgccc

SEQ ID NO: 3583 - DNA, 404 bp, Zea mays
  unsure (1)..(404): unsure at all n locations
  Clone ID: MRT4577_103271C.1
ggggcttagagccttcttgttttgggaaaggggaaattgccgggtgggccccctttaattgataaaagtgcccatgcttcccggtctcttcggttggcacggtaaccgcttctttcacaaacaaaacttggggtggtgaaaacttggttttgttaaagcaggcgccggatcgcatcatttttttttggcggccgccttggtcaccttggcgccgggcgggtcctttttttccacacttttggttactccaaccgcaaccgtctgcctcttgttccgggccgcttaccttcccaggggggggttccctgtgaacgtctccaccaccatgggcttggtgagtnttattttccccataccagcctcaccgttcttcaggaactttggctccttctcaagctccttgc

SEQ ID NO: 3584 - DNA, 246 bp, Zea mays
  Clone ID: MRT4577_103272C.1
acaagctttttttttttttgtacaagcagttgttcattttccgttccatccccattaaaaccaaaccttttttttgaccatgcatattttattgggaataccacaaaagataatgtgtgcagccttactgctttattacttttatagttcgggaggagaggacaaaggagatttcccgaattaacgaataaatattcagggggaatggaaagggagaccccccatgggttggtgcggtaactggga

SEQ ID NO: 3585 - DNA, 414 bp, Zea mays
  Clone ID: MRT4577_103273C.1
ggccgcttttttttttttttttttcttttttttttttttttttttttttttctttttctttttttttttttttgtttatttttttttctttttattttacgtttatatagtgtttttaccacacgtttttacagagttttccacccatagtaaaataatttagccccaaaaaaaaaaaaatagatcgggggcgcagcggagaaggggacgagtggaagcaaaaaaccacacaacacccatagggcaacggggctggacaccaaaaggtgaggacttgaaaaccaaaagggaagaccattaacacctggcagggaagtgaatttagaaaaacaaaacgcgggaaatagcatttgtacgggaaaaaccagatagagggcaaaaaagaagcattttgaagaggacgggcaggaccac

SEQ ID NO: 3586 - DNA, 209 bp, Zea mays
  Clone ID: MRT4577_103274C.1
aaggagagtgcgatcaccaacagctagtgctagtaccccttccttccatccatgcatggcatgcgtcagcaccttgcagagctgccccatcgccagaagagcaaagatcaacacgaggtccatgggctgcagcagtagcgtggcaaatgggtcaccaccaccagacttccagttccagtgcagggccgtcgactttcgcagcggacacc

SEQ ID NO: 3587 - DNA, 678 bp, Zea mays
  Clone ID: MRT4577_103275C.1
ccccccgccacgtcctcgggggatcagcagatggtcacggtcgcggagaggttcccacgggaggtgagctcggaggcggtgttccggtgcgtgcgcctggggccggtcgaccaggccgaggcggaggtcgcgtaccagaccaccgtcagcatcggcggccacgtgttcaagggcatccttcacgatgttggccctacagcttgcctgccgctggagtcggaggcggcgccatcgagtaccacttccgccacgccggggacggattgccgccgagcacggcagccactggcgaagcaggcggcggtggcgtggggagtgtcgtcgtgtcatcggctgtggtgatggacccgtacccgacgcccggaccctacgccgccttccccgccggcgcgccgttcttccacggccacccgagacagtgaccgccggctcgctcgccagcagccgtcccgctgtgtaacgacatcacgactcccatctctggctcgctcgatctgtcaatttcgttagcttcctaatttcttagcctcttgttgagatgcataaattcatgttccttctagagcctagctagctagcttaggcgccggttagacttgtttgcttcttgagatcaattcatgaggtgagtagcaatatactcagtggctgcaagtggctaaaaatctgacattaata

SEQ ID NO: 3588 - DNA, 333 bp, Zea mays
  Clone ID: MRT4577_103276C.1
cccacgcgtccgcgactcatgcatagaatactaaaaaacgcacaaaaaaaactcaggaggggaaattaaaaaaaccacataaaacaaaaaaaaaaacaaataaaaataaaaagaaccaacaaaaaaaaaccaattgctctaagcaaaataaatgctatgcacccatatatttcatccagctagcttgcacatatggtaatctaaattgtctactgagaccgttctcctgaccaacctagcctagacaaaacttattgtcacccaaccgacaaacttggactgcaattccccttgtagcacttgctgaattacttaccagacaacaccctatgg

SEQ ID NO: 3589 - DNA, 542 bp, Zea mays
  Clone ID: MRT4577_103277C.1
gtcggccgccccactgccaggctccaccactagctcctcgccgccagtccacaccgccgctaggccgctccttcaccagctcctcgtcgcgattccacccagccgccagctcctcgtcgccctgccgccagctcccagagacctccacggcttcatggccaccgagacgccaacgcctcgtcgaggtcctctcctcgcccagagatctccctgcggcgcgccccgtcgagctcctctccgcttgtggttgcggccaccgcctctcacgtcatcttgcttggatcgctgcagcacattcccggtcatcgcgtgttgagtttgtgatccaaattctgcatatggagatcgtgttggccgagaagcttgggccagagcatagcgatattagtaaccctaattagggtttgccatgtgtcgtcatttactcctcttgtaagttgccgtctactgacgacgttctgtaaacactcgtgcttctaccgtattctgtaggtgttatgcttaacagatgtgatggagtggtaccatactaaattgtttct

SEQ ID NO: 3590 - DNA, 638 bp, Zea mays
  Clone ID: MRT4577_103278C.1
gggccgggaaacccaccacacgagcggctgccgcgcgggagaccaggacgcatggtgactgcctcctccttcactgccatcttcttcagaagtgccttcgtcgcctgcttcgcggagcccaactgctgctggtggagggacactagccacaataacgtgcatcgccagagaggaaggggttgccacgctctagaagggcatcatccttggcccccactgtcagttcctctatgatggcctccacatcggcctgtgaaggctttcttcgtcagaggtgctgttgtgggtgatgtcagtttactaagcaagattcttgctgcgcttgccacaggtgtgatagctattgttgtggcaaatccaactgatctcgttaatgttaggttgcaagttgatggaaaggctaacactgtcaagaggagttattctagagcccttaatgtatatgctataataatcagacatgttactttaaccatcatgggcagtaagtgtacaagactatttcttttttcgttgtccttaaaatctttcatgtttccaagaaggtattggagctttgtggactggccttggcccaaatgtcgcacgcaatgtcataattaacgctgccgagttggacaactatgattagttcaagc

SEQ ID NO: 3591 - DNA, 691 bp, Zea mays
  Clone ID: MRT4577_103279C.1
aagtgtcttcccagttaactccgttgtacgtctctctccctttactagctccgatcttctgctagctcctccgaaccacttgtcgacacgatcgatcgtcgtcgtacgcctgcttggcgtacatactgctactaatggagacggcgctgcagcagagtgctgctactactgctggcggcggcatgaggcccggcgcggcgacgacggtgaagaaggcgaggcaagagctggagcaggagttgcggtttccgcaggcggcgcccgcggatcagggcggccttgacgaggagctccggcgcgggccgtggacggtggacgaggacctcacgctcatcaactacatcgccgactacggcgagggccgctggaacgcgctcgctcgcgccgccgggctgaagcggacggggaagagctgccgcctgcggtggctcaactacctgcggccggacgtgaagcgcggcgacttcaccgccgacgagcagctcctcatcctcgacctccactcccgctggggcaaccggtggtccaagatcgcggcgcacctgccaggccggacggacaacgagatcaagaactactggcggacgcgggtgcagaagcacgccaagcagctcaactgcgacgtgaacagcaagcgcttcaaggacgccatgcgcttcctctggatgccgcgcctggccgagcgcgccgc

SEQ ID NO: 3592 - DNA, 451 bp, Zea mays
  Clone ID: MRT4577_10327C.1
cccgaggttaatatgtttaacgaaaaaccacaaatacaatacacaaattcaagaacgttcttatactaaaaatttccacaggacttgtatatttgggtaaagcttcatcgataagaggcaaaaaacaagaaggcgtttttttatacagaaggagatctggtttttttttctttttttttccgggaattacttttactcttttccaaaaatgtgatattaatagaaaagaaaaaaactctcttctccatcttcacaggcgcaggaaaaaatctcgatccgctcactttgtataatcaaactaaccggatggggttagcaatgatgaaatgaggaatgaggagtgtgtgtgtgaaaggaccaacaaaaggcttcatgcttccagagatttaagtcattttttgttgaagcaaaaaacaatgggtcacgagaactttttttttgttaatttccc

SEQ ID NO: 3593 - DNA, 157 bp, Zea mays
  Clone ID: MRT4577_103280C.1
ccaggccatcgccacagccatttacgaaatgaagaacaccaacaaccacgaggtgacacgcaacattgcaacgggcaagcgagcactcaacacagacaacacagctacgtgcactggagactaaccgaccacaagagaagaatgcattctaccagac

SEQ ID NO: 3594 - DNA, 406 bp, Zea mays
  unsure (1)..(406): unsure at all n locations
  Clone ID: MRT4577_103281C.1
ggcgcacagagcccccgacgagatatccagagcgtctgaggggcggtcagtatatgccacatcttaatgcacgcgccgacaagatcttggatgcggtgatgctcggtgtgctcttcggacacgggaaccagagcaactagtaggcgcgcgcggcgctctagatgcctgctccgagactcgcaagtggaggacctggcgcggcccacgcggtgggtggtgaaggttccctacaccgccacgctgaggcacacagccaacgcgctgctggtagcgcgcgtctctaccctgggcgtggctgctacaccgggccactggatcggcgctggctgctccatgatcctcgagtgctactcgggctccggtgcctnacggaagcactacatcttgatggagaacatgctaaaca

SEQ ID NO: 3595 - DNA, 449 bp, Zea mays
  unsure (1)..(449): unsure at all n locations
  Clone ID: MRT4577_103282C.1
gntattgatacagcaattacttttgcgccaatgttttttcatgttctgcatggaagtaagtggcactgtgctggcaggaatgcagggtatacccatgcttattgaacttttgcttgttacatgagtcataatgaactgtcgatgtgaaactacaatgcatattgtgaatttatcatacttggcccgttgagtagtttgatacttgggtaccttgatcatctcctgctattgtaattgttttctttcttgagttatcttaaatgcaaaagttgtggatgtactaccagatgttttcacattgcatattgtggttagttaggtctaatatacatccatgcaatacccattgttgttacctgcagagcatgcgctattactactttctataatatgccataatagacattaacatgatgttaggattaatatttntcaacacctgattctac

SEQ ID NO: 3596 - DNA, 1548 bp, Zea mays
  unsure (1)..(1548): unsure at all n locations
  Clone ID: MRT4577_103283C.1
gccggccgggtccgtctggtcttctcggtgtccaacggtccacagcccaaccctctcgagtctcgtcttctcccccggactccgagatcttgccgatctgcaccgacgccgcggtccgcggccatggcggtgccctctcccgccccgcggtccccgcgccgaccggatgccattgtggccccggacccctcgtccgctgacgtgccaccatccctcgatttcggcgacccggcttccctcgccgcgctccgagtcctcaccgacgcgggtgccgccacccgcctcctccacgagtgcgtggcctaccagcgcgcgctcgacgcccgtctcgacgctctcctcgcccgccgtgctgacctcgaccgcgccgctgcttcgctcctccgctctgccccgcctctgctctcgctcgcggcttccgacgccgccgcgcttaaggaatcctccaccaccaccgcggcgctcgccgacgcgctctcgtcccgcgtgcgccatctcgacgcggcgcactccagggcggacgctgcgctggcacgtgccgaggccgcgctcgatcgttctcgcgcgctcgaagccgcgcggcgggccttggccgccgacgacctcgccgccgccgccaccgctgtgcacgaattcctcgctatcgacgctcggttccccaccgacgacgatctccgccgcgatctgcttgacatgaaacgtcgcctcgaggggctcgcgcgtcggaggctagcggcggtcgttgatgcacaggaccatcctgctgtgcttcgcctcgtccgcctattcccactgctcggactcgctgatgaaggactccaggtctacgtcgcctacctgaagaaggttgtcgctctgcgtgcccgcgcagactttgagcacctcgcggagctgacctccgcgacccagccgacctctgagcggncggattttgttggctgcctcacccgtctctttaaggacattgtgctcgctgttgaggagaatgatgctgtgcttcgtgagctcaaaaaaaaaaaaaaacaaaaagtcgctctgcgtgcccgcgcagactttgagcacctcgcggagctgacctccgcgacccagccgacctctgagcggccggattttgttggctgcctcacccgtctctttaaggacattgtgctcgctgttgaggagaatgatgctgtgcttcgtgagctcaaaaaaaaaaaaaaacaaaaagtcgctctgcgtgcccgcgcagactttgagcacctcgcggagctgacctccgcgacccagccgacctctgagcggccggattttgttggctgcctcacccgtctctttaaggacattgtgctcgctgttgaggagaatgatgctgtgcttcgtgagctcaaaaaaaaaaaaaaacaaaaagtcgctctgcgtgcccgcgcagactttgagcacctcgcggagctgacctccgcgacccagccgacctctgagcggccggattttgttggctgcctcacccgtctctttaaggacattgtgctcgctgttgaggagaatgatgctgtgctttctgagctc

SEQ ID NO: 3597 - DNA, 202 bp, Zea mays
  Clone ID: MRT4577_103284C.1
tcagatagcgggcgggaagaaagatgcgccatggcgcccacctagctgcactcgacggacgaggaggaacgattccaagctcctcagagacaccgcatgcaaacgatgcctatataccgagcagatgcggcggcttaatccaactgcagcttcgggagcatgttctcctcggtgtgctacgagagccatggccatggtgtca

SEQ ID NO: 3598 - DNA, 296 bp, Zea mays
  unsure (1)..(296): unsure at all n locations
  Clone ID: MRT4577_103285C.1
ctccttttttttttttngaccacacaacacacagggggggggggcaaataccgaggagagagcaccatctaacagccggggggacgacagcagaacagcacaacgcaagaggaccaccacaccagaagcgcggaacactgagaccaccaagaataaagtacccaccgcgaggcgtacatgcccaaaggggcagaactgcccaggcgcaacgggcacataaagattgcaggctgcctaaacacgggggcacactggagggaacagcccatgaacgagcctgttgaaccaaacagggc

SEQ ID NO: 3599 - DNA, 114 bp, Zea mays
  Clone ID: MRT4577_103286C.1
tcggccttttcttatgtaattgctgaagtggctctctagccttttgaagctgaaaaggtacgttgtgcagaacaatcttggaatttgttccaagatagagtgatgggctcccca

SEQ ID NO: 3600 - DNA, 314 bp, Zea mays
  Clone ID: MRT4577_103287C.1
ggggagggaagaaaacaaacagtggccctccacacgggggagcattggccctgaccgtattcagagcggcaaggtacgaaccatggatcaaagcaccattggtgcctgtaaactatatacaacgcgccagttatccacctagcgaaatgacttaacagccagacggtccaaaaactaggatggtccatccactatataaccgctataacccaacaaaacacacagaggctccagggggcatccagtggtcataatctcaaccggccgcgcgggccgatccgaaaaatacgcaccgaagcctgtaggcgaaccag

SEQ ID NO: 3601 - DNA, 649 bp, Zea mays
  unsure (1)..(649): unsure at all n locations
  Clone ID: MRT4577_103288C.1
ttgggaccctcgaggccggccgganaaaaaaattacgacgaacgaaaaaagaaaaaagaaaaaaaaaaaaaaaaaaaaaaaaaaaaaaaaaaaaaaaaaaaaaaaaaaaaaaaaaaaaaaaaaaaaaaaaaaaaaaaaaaacccgggaagccccccggtttggtcaaaatttaaaacccttccctttggggccggggaaattggggaaatttaaaaagggatcccccccaattttggggggggggtggaaaacccccccaggggggagaaaatggcccaaaaaaaacttgggaaaaaaccccatggggaaaagggggggcaaaaaggatggctggacaccggggggggggggtttggggggttaaaaaactggggggggtgccctaggggaccttggggggggtggaaatcctggttgggggggatggggccccctttttggggaaaaggggccattgggaaacccccccccccaaaaaaagggtgtactttattgccccccccgaaaaaaaggaataagggccggttgaaggaacttttgggggggggggcccccccaatttttttttggtgtgaaaaatggtttaaaattttgaaaagcctggaaaatgggtggatgttttttgggacaaagaacccttttattggg

SEQ ID NO: 3602 - DNA, 375 bp, Zea mays
  Clone ID: MRT4577_103289C.1
cggacgcgtgggaaaaaaaaaaaaaatataaaacaaaaaaaaaaaaagaaagatgctataagggatactaaaataaagggtggtgctttcaacgattgcaatcttactataccattacttgccttgagttaactgtgctatagggttataacaactgcaactaattaaaccttgttttacaccaacttaattgcctagtcccatattaccacttaattaaaactgttttatacctataatgctttctcgcaattgcccttccaaacattaggactggcttaatcgccaatgagaatcactacgcacccataatgtatattctgacgcacctttaatcactcccttaataacctcttgatttgacgatactctata

SEQ ID NO: 3603 - DNA, 448 bp, Zea mays
  unsure (1)..(448): unsure at all n locations
  Clone ID: MRT4577_10328C.1
aatanttttctttttttttttttttttttttggggttttttttaggtttttttggttttttttttttttttgaaagccaaggaagtaactaacattaagcaaaaacatgggggggggctgacaaaaaaacataagttagcccctaagcccatagagcaaaaatttttcgggaacgacaacaagcggccggaaaaactccttgatctagggctaggggggggaaaagacatattatatccttcacaacaaaattagacccccccaaccatttgtccaaaacactggaattccaggcaacgggaaaacttagggcgccctttttgggcaacaccttaccaataccggacacaatccaaaacccccagcacattaatttgccccctccagagcataaagccccaaccccactggctccttaataagggccatcccacccagctggtgcctg

SEQ ID NO: 3604 - DNA, 550 bp, Zea mays
  Clone ID: MRT4577_103290C.1
cacgggattacctattcgccggccggcgcgcgacgatgccagtttgctcaagatttgcaacctgaacaagtgcggtggaagtggagcatgtgttcatctgccacagacccggcagccgtcgcgcgaccaatcgcacgcgtctgcacgacgcgtactgcgctgcactctgacccccaccgacgcgacgccgacgacgacgacgccatagcgcgtccccactggtgacggcgctggttggcacaccggagaccgtgctgtatgtataccgccacgcgacagataatgcgactgccccgccgcgtcgcgctgcctgagacgctaggaccgctccaccatcaagtgttccatgtgtgaccactccgtgcccgcgtgccggttctctcgctacggcccgatcttctgctcgatatgttcaacgctgtgcacacccttgacgagtgacagctgatcattaatggcctggacaagggcatgcctctcaagtgtcgcgtgtgcggacgtgtcggagcttactgctcgcgactagccaagcgaggtgactattggactc

SEQ ID NO: 3605 - DNA, 321 bp, Zea mays
  Clone ID: MRT4577_103291C.1
gccggccggtccggggtcacgctgcctcaacgtcatgtctctcttcgcctcccccacgccgatcggcgtggccgccatccgccgccgcgtcgcccacggttcctctcctccctgctggcggtcgagccgcgctgaacgtggccctcgtgaggcgcggcggggtctcgactcgaaggtagcggcgcctctgataacgaggaggcaagaacgcgacgcgatggcgccgaggaaacagatatgaacaagaatacgccacacgcgaaagcgacccccacgcaagggaacccacgctggtgctcggtgactagggacgccatgctc

SEQ ID NO: 3606 - DNA, 220 bp, Zea mays
  Clone ID: MRT4577_103292C.1
atgtggggtgtgtgtgtgcctgtgtgggggaactgctggggatggagagcgagatggcggacgcgcacgcagcggcgatcaccgccgccgcagccgaaaagctcgcggcggtggcagaggaaggggaaggggaagcagagggggaggagcacgcagaggcagcggtggggtcaaacatcaccatggagcgcgtcgacgccgcgaagaacttcatcgagaa

SEQ ID NO: 3607 - DNA, 136 bp, Zea mays
  Clone ID: MRT4577_103293C.1
ccagaactcaccctgctcgccagccttttgtcctccatccagtttcccctgcccccggctggccggcatactagatcgtagatactaccctctctcggtgtctcggttccccgtcctatcgagtgcgctctgtgga

SEQ ID NO: 3608 - DNA, 301 bp, Zea mays
  Clone ID: MRT4577_103294C.1
ttaattcctggaggacccactcgtccgattcaaagtctagtagaattcccttctattcatcccgctgtgcctcatcaaggtagatcaattcaaaagtatttgctgcccatactcctatttcatctccgtctaacaataccacaactatctcttctattactaaaccccctaatttatatcatatatctactcatcagttccactaatcaacttatcttttaattacaacaatctattccgactcattcttaacacttacacatctttcctcacttatcaaatctactccgtccaatttttt

SEQ ID NO: 3609 - DNA, 426 bp, Zea mays
  Clone ID: MRT4577_103295C.1
taagctcggaattcggctcgagaccaactacacggccattttaccatgtatactccctcaggaactcgaggtgcttttgttagcggccgaggggttcgcccacacgatcctcacctcctacctacaccactccacagggtcgggtcgatttgacccacgctctattggcccttgatcacaggcgaagattgcaccactacgtgctacttccagaggtacctatgacagacggtcgtggccagactgaagctctgatccttgatctgactggagtgtccgcctatatgctcaagtcctgcatcaagctttacgaacctatttagttacattcccaatgcctgacgccaacacgaagtataccctggaacgtgccagaacgcaagtatttgagctcaaatgatacctaacgaatgtctacattcaccc

SEQ ID NO: 3610 - DNA, 397 bp, Zea mays
  Clone ID: MRT4577_103296C.1
ctaaagaaaacaccccgcaaaaaaaaaacccaggccccctgggccaactgttggccatacaacggtagggggaacagccccaccgcccacagggggcacgaaatataaaatgaggagctaacccacccgggcgggctccccactaaataagatgtttttagtttaacgcccaccggggggggcttttttcgcaaaacgaatttaaacccggggggcccgttgacacctttgccactggatatggaataccaaaaaaccgggggggggtcccccgcccaaactccgttgcacatttttacgagatgtagcccccggaaaacgttaaagagaaaaccgctcgggcggaaccaactccctgttttaaccccttcgagacttttcccgagatctctcaaag

SEQ ID NO: 3611 - DNA, 255 bp, Zea mays
  unsure (1)..(255): unsure at all n locations
  Clone ID: MRT4577_103297C.1
attcccgctggagccactcatccgaggatgacagaaaagaaactttatagttcgatgaatgggcagtttgccgtggttttntgataatttgtacttcgtctgttttcgcttctgttgtcgtaccattgtcttaatcgatttgtggattttgaagtctccttttaaaaaaaaaaaaaaaaaaaaaaaaaaaaaaaaaaaaaaaaaaaaaaaaaaaaaaaaaaaaaaaaaaaaaaaaaaaaataaaactttctaaat

SEQ ID NO: 3612 - DNA, 2074 bp, Zea mays
  Clone ID: MRT4577_103298C.1
cgcgccgtggtcccacaccaccgcatcgttcgcatctagagttcgtcgtatccacaccgcatctagctagcttgtggccaagtgttcgagatagcattgccggccggggggagcaagagatatgggtagcttgggagaggtcggtgatggcaaggagatattccatggccatggccattctgaccctgtcgtcgacgagctcaaccgtctgcagaatctcctcagagaaaaggaaagagagctaggacatgcatacagtgaaatcaaaggcttgaaggtgacggaagctctcaaggacaaggctattgctgagctgagcaaggaactaaagagacaggacgagaggatgagaagtatggagaaacaacttgagcagaagaatctagaagtgaaaagactacataacgagcgcaaagaagcattgtccgcacagttcgctgcagaggcaacacttagaaggatccactcttctaaaaaagatgaggaatcagttccattcgacgccatcatagcgcccttggagtcagacataagaaaatacagacatgagattgcagtgctacaagatgacaagaaggcactagaacgacatctaaagttgaaggaggtggcgcttgttgaagcaggcaacattttgcacaccgcgcttgaaagggcactcatagtagaggatgttcagaatcagaacattgaattgaagaagcatatggagatataccatgaagagaataaattgttagagaaggctaacagacagaaggtgctagaggttgagaagctcacacaaacaattaatgagcttgaagagtccattctcgcaaccggtgaggttgccaatgtggtccacttctaccagaatcaagctacaaagttgaatgaggaaaagaggacccttgagagggagctagctcgagcaaaggtttatgtcaatcgtgttgcatccacagcagcaaatgaatggaaagatgactctgacaagctcatgccagtcaagagatggctagaagaacgaaggctcctgcagggagaaatacagcgattgcgtgacaggataacagtagcagagaaatctgcaaagattgaagcccaacttaatgataaactcaaaaggaggctcaagtcgcttgaagaggatatgagaaataaaacatccaattcgtctacaaaagaaattaataaacaagccactcctaaaagatcattgtctcaaccaaaacaacctaaaacaatgagagtgttacctcaactatattcacctgaagtcgttgacaagagaaggcctatatctcaaccaagggcatcaatggtagggaaagtattgaagcaacctaattcagaaatcgagcctacaaagaaaagtacagttgttaagcgatttgatagccctggaaggagaacaatttctagtaaagaagagtgtcccatgaaaaatcaactatgggcatcaaaaaccaaaacagatgttattgttgggaaagagaacaaagtacaaaagccaaattccaaggcacgtttaaatgcttcacattcacaaggccatgtggacacaaaagtatttgatggaaatgatgaatatggacttcaaaatagtgaacatcatgaagccatggcaaatgagagaaatgggaatagctcgagtgatgaaagtagcccttagaacaacaagacaagttggagtgttggggtttacttttgcatgaagacacaaaatggaagcacaaataacattattatgtacagatgtagcatgacttattttaaaggaagcgtgtgcccatctacatctattttattctgcccgggagattgcttgaacaacaaaactagttgtggtgtcatcattttgttttgtctctttgttctctcatgtacatacaaactatacctcaaactttacaaatgtaattttgtgcgactattgaaaaaatcaatatgtgcttttttgaggaattggttactttataaaataaaaaggtgtctaatgtaatagaagcaacagagaaaaaagtgaagggtgtgaatcaataaaaccatggatgttgaatgttgatgttaaaaaaaaaaaaaaaaaaaa

SEQ ID NO: 3613 - DNA, 452 bp, Zea mays
  unsure (1)..(452): unsure at all n locations
  Clone ID: MRT4577_103299C.1
gccagctatcacattcgctagatcacaccaatgataaggaacaggtcaagccctacaagggctacatncacaacgttccgaggggactacacgcacattcacaacgccgcagctaatacagcaccaataccattcccgcgacaacaaccatcggctggaaccgacacctaagcctcgtactgtcgtgacccgacgatgaccaccctgaacctacccgactacccgaatcaatgaccgactccaactgcgacacactaccgtgcacgccttacgtgacacaacgaccacgcgagtaccatcgtgtgtcgccaaatgagactcatggactgcaacgcactatcggctcccatacagctcggacctcaccataggccatcgtcacacgacgcaaccgtgcatctacacgatcgaactaaaagacagccacgatgaggacatatactcactagtgc

SEQ ID NO: 3614 - DNA, 311 bp, Zea mays
  Clone ID: MRT4577_10329C.1
gtgtttcgtagctccccgggtgttttccctgtgcagccgagcttgggaaactgccatgctttttggatgtcaaggcgctgttggaggctgggtgtgacagcacagagccaggttgtcttgtggaaaccacagccacgggtttgccactggctcagcatggcctcactgccagtcccagcctggctgagggacaagatggtttctcttgggagttcctgagtggagcacccttccaggctttttgaaagccagctgatctgtggagccttgttaagggactcaatacggtgtttggatattgatgtttttcc

SEQ ID NO: 3615 - DNA, 375 bp, Zea mays
  Clone ID: MRT4577_1032C.1
gcggaggggcgcgagtacaggtacaccagcagtcgagcgccagctgccaggaagacgcgaggaggaagaactttgagaagatcgcgcccctatgcgtatctctcgggtcgagatagctccctccgcgcctctgtgtgacatgcacgtcgcttttcccagcggaccgagccctccgctacacgaattttgtgcgcgaaatcctcgtgtatttgatctccacgcctggcgcctgttcggtcttcccacagctccccgacgttgctccaatcctcgtactgcccccgcgagctcgcccttagctcgacggacttcctggcctctagcttgaccccccgcccccccgcccttctatgacaactaatagcgccgaatctg

SEQ ID NO: 3616 - DNA, 619 bp, Zea mays
  Clone ID: MRT4577_103300C.1
gttctagatcgcgagcggcctcccttttttttttttttttttttttttttttttttttttttcctcaaaaaagccatattgattttttcaatagtcgcacaaaattacatttgtaaagtttgaggtatagtttgtatgtccatgagagaacaaagagacaaaacaaaatgatgaccccacaactagttttgttgttcaagcaatctcccgggcagaataaaatagatgtagatgggcacacccttcctttaaaataagtcatgctacatctgtacataataatgttatttgggcttccattttgggtcttcatgcaaaagtaaaccccaacactccaacttgtcttgttgttctaagggctactttcatcactcgagctattcccatttctctcatttgccatggcttcatgatgttcactattttgaagtccatattcatcatttccatcaaatacttttgtgtccacatggccttgtgaatgtgaagcatttaaacgtgccttggaatttggcttttgtactttgttctctttcccacaataacatctgttttggtttttgatgcccatagttgatttttcatgggacactcttctttactagaaattgttctcctt

SEQ ID NO: 3617 - DNA, 462 bp, Zea mays
  Clone ID: MRT4577_103301C.1
cggacgcgtgggttgcacaccgcgcttgaaagggcactcatagtagaggatgttcagaatcagaacattgaattgaagaagcatatggagatataccatgtaaatacactcattacctgattttttgtgtgtgcttttgtaaagttgtggaactaattcttttttattataatgtgtatgtaggaagagaataaattgttagagaaggctaacagacagaaggtgctagaggttgagaagctcacacaaacaattaatgagcttgaagagtccattctcgcaaccggtgaggttgccaatgtggtccacttctaccagaatcaagctacaaagttgaatgtacatgccatacttgtgctcaagtcatttaaatgttggattccatgaattctacttatttataagacctttaccaattttaggaggaaaagaggacccttgacagggagctagcccacgcaa

SEQ ID NO: 3618 - DNA, 178 bp, Zea mays
  Clone ID: MRT4577_103302C.1
tgcacgtatgcgcgaccatcgacgtgtgactcagatgtaggggactctgcaaccggggcaagctcgttggaactttggtttactcgatcaataaccacgtgaacacgctgagtctcgcagcatacactagccggtccgtgagctggtcaccgtgcaggtagaacttctaacacgccgt

SEQ ID NO: 3619 - DNA, 1069 bp, Zea mays
  unsure (1)..(1069): unsure at all n locations
  Clone ID: MRT4577_103303C.1
ccctcgagtttggccggggaggacgttcgccgccatgaaggactaccagctagatgggaacaaggagatggtagcacttgggacgatgaacatcgtaggctcaatgacgtcttgctacatcgcaacaggctctttctctcgctcggcggtcaacttcatggccgggtgccggacgccagtgtccaacgtggtcatgtccacggttgtgctcctcaccttgctgctcatcacgccgctgttcaagtacaccccgaacgcgatcctgggctcgatcatcatctctgccgtcatcggcctcgtcgactacgaggcggcgatcctcatctggaaagtcgacaagatggacttcgtcgcctgcatgggggccttcttcggcgtggttttcaagtctgtcgagataggcctcttgattgctgtgtcaatctcgtttgccaaaatacttgtccaagtaacaagacccaggactgtgctgctgggaaaccttccaggcaccacgatctacaggaacacggagcagtatccgcatgcgaggcatgttcctggggtggtcatagtcagggtggattctgccatttacttctccaactccaactatgtccgagagcgaatccttaggtggttgacggacgaagaagatagagtcagcgcagaggggctgcctagaatcagtttcttggtagtagagatgtcacctgttatagatatcgatacgagtggtatccatgcccttgaagacctgtacaagaatctccaaaagcgaggcattcagcttctcttatcaaaccctggctctgccgtgattgaaaagctccagtcgtccaaactcaccgagcacatcggaaatggtcatatcttcctcacggtcgcagacgccgtgcgtttctgcacttccaagtcgatgcaggagccttgaactgaaatggatttgtttgcgtccacattctgttctctaatctctactgtatacgttatgtatcatgtattcatgtaatcagaataatatacatatgcaagtttacgaatgacaggaatagtttcgaaaaaaaaaaaaaaaaaagcggccnnnnng

SEQ ID NO: 3620 - DNA, 567 bp, Zea mays
  unsure (1)..(567): unsure at all n locations
  Clone ID: MRT4577_103304C.1
gggctctctctctgtccctctgcattggggtcccccttctctttctatggcggcggcaggcggcgtcgacgccgcatggagaggcagagcgttgggaataccctgcactggactactatgaggcactggaagggctaccttcggccgccatggccaaccgtcaagtccagattcagtacaaggcagggcaggctcccagaccacaagagagtgaagattggtggcaaacagaacgaggacaggtgcacgcttgctgactacaacatcaaaaaggagagcaccctccaccttgtgctccagtctaggggaggcatgcaaatctttgtataaaaccctgaccggcaagactatcacccttaaggtggagtnctntgacaccatcgacaacgtnaaggccaagatccaggacaaggagggcattcctccagaccagcagcggttcatctttgctgggaagcagtttgaggacgggcgcacgcttgccgactacaacattcagaaggagagcactctccacttggagctgngccttaggggaggcatgcagatttttgtgaagaccctgac

SEQ ID NO: 3621 - DNA, 276 bp, Zea mays
  Clone ID: MRT4577_103305C.1
aacagcgggacaatttcttacatagtgcttattcatattccatcaaaaactcaattttgcatttgtaattaaccaagccattgacccgggacatggaacaggaacttggaacacggaacggatctaccttatacgattatctaaaccatacatcagtgcatataaaaagcagccccatcatgccccaagaaccaacatcgccagccttccccgagatcttgaaaacctccagaccccacttgccaacattttctggcttactctgccacataaaag

SEQ ID NO: 3622 - DNA, 288 bp, Zea mays
  unsure (1)..(288): unsure at all n locations
  Clone ID: MRT4577_103306C.1
tatgcaatcgttgtgtaagtgagttctgatcataacacgtacatggttcgcaaaagagacgggtttnttgaacaaaaaataaaataaaaaaaaaaaaaaaaaaaaaaaaataaaaataacaaaaaaaacatacacatacattatcccttattctccgttcccgcttcttattttcctttcattcgctcgcctcctttctacttcatcctcacttacttacccttgcgtgcccccttttttaagcttctattttttcatctccccttcattccaactttccctttcttt

SEQ ID NO: 3623 - DNA, 249 bp, Zea mays
  Clone ID: MRT4577_103307C.1
cgagaactactgcctggccgtccgcgacggcgccgtcgtgctggccccggtcaaccccaaggacgaccaccagcactggtactaggacatgcgcttcagcacccaggtcaaggacgagaacggcatgccggcgttcgcgctcgcaacaaggcaatcgactcagccatcaagcactccctcggccagtcccacccggtcaagctcgagccttacaacccggaccatgaggacgagtcggtgctgtggacc

SEQ ID NO: 3624 - DNA, 128 bp, Zea mays
  Clone ID: MRT4577_103308C.1
tgaacatactcaacgatatgtcgcttgtaatgagcagagcatcactaagagcagtcgggagaggcggccagctgtcacacgactaccgcagatagcaatagtggcaataacgttgtgatctctgcgcc

SEQ ID NO: 3625 - DNA, 458 bp, Zea mays
  Clone ID: MRT4577_103309C.1
ccacgacttcaccgagggtcgccagggccacctcctcgacatcaacccatgggtgcatgcattcgtctctctcatcatgttcccatgctttttagttcctcacatggttcatgctcgtcgattgattcactgttcttgcctctctgatgccataggaggacgaggaggtggctgacaggctttgattggcggatggcgcgccgaatcagagcagtcgagcgagctttgccggatggcgcgccagatcctcgccctgccccgcgttgtcagcccgtccccggcgtgcacgccggagacaacaccgtgattgcctcccccggccgccaccatcacctcccctgatttgtgcccaatcctccgatgcagagctctgcaagtacgcacgctctatgttgcttctccttggttgtaccgccgcaactggccctcaagggcgcgcttgtcgccgctcgcaagga

SEQ ID NO: 3626 - DNA, 282 bp, Zea mays
  Clone ID: MRT4577_103310C.1
ccctgggctagccgttccaaaaacagtagacctttgctctatacacagcatgtgggggttgtttctcacacacactgatggcgagagccagacagatccatgtgcagatgacgacgagtgtttatctagtctgcccgggtagctattaccatgaacatgggacggcatggcaaggcatccccacacgttaaagacatctccctaggtggggtttgactaactaggtggctaggaaaaacaaaaaattaaggctacctctctttctcacgaaaatgtgtctat

SEQ ID NO: 3627 - DNA, 410 bp, Zea mays
  Clone ID: MRT4577_103311C.1
caaaccccaacattcccctgatgctactaccatgtaaaccagccctccatgtgttgggttccaccggtcggggggggaccacctctaaaactacatcctctgctatctccgacggtcgtgcgtgccctaatgacgatcgtgtacgctgcccgcgaccaccttaccaacgttcgatccgccatgtccctcaactatacatctttgccccgtctgcaaatcttcatcatcctccccacgagagaagattgcaatccagtcccttactatatatttgtatgcccactgcgcacgcacgccgctctcgtccactcacacatgacatgcactatcatgtattcactatatgagttacaacacaaacactacgagattattaacacactgttcatcgactaccttcaactgatcca

SEQ ID NO: 3628 - DNA, 887 bp, Zea mays
  Clone ID: MRT4577_103312C.1
ggccgccctttttttttttttttttttatttttttttttttttttttttttttttttgaaatcaaactccataccatgaaaatctcatacgagtatgatcgatgacaagtaaaaagatggttgaaagtccctactctatagggctattttgggaactgtattttcctaagggaaaacgggaaaataaaaataacttgggaaaatggaatttccaaactagcccttagttttaggcattttacataaagatgcaataacatgccctaaacaagcgagacttaattatttacctctttaaacttttaagtggaaaccaagtcgataattagcacgtatattcaatgtcagcacaagcagtaaaacttcatacaagtcagcgcaccactgtacctagatcataataagtagacagcgtaagattctaacagcaagatcagcgtaaaacatcagttctctagtactactgtgcatggcataatgtaccgaccaaaaggtagaaacgctgaacaactgctgacttctctgcatggaatctggcttcattagcttatgatccatccatctccacaacgacaggagcaaactcgtcatcttcatcaataaggttcactgcgtcgtcctcaagatcccacccaaacgtagtctccagaagcgattttagtttcctagcccatgacagaaggtctccatccacgactggggcttcaaatacaactgtaaagaaatcctttgaaagacggtacaggaatatgtctcttgaaaaccatgtttcatccaaacacagagaattgcccatatccccacttttggaatcttgggtatgttgaaaaccatgcttgagttgatagtataatgtccttataaactttataaaccggacgcgtggg

SEQ ID NO: 3629 - DNA, 181 bp, Zea mays
  Clone ID: MRT4577_103313C.1
aacgcctgtaccacctacggcgaggtcctggcgtccacgatcatcctcgatcggtagacgcacaggtccagaggtttccgatgtcgtcatcttctccagggacgatgcgatgcggaacgccatgtagggcatgagcgagaaggagctggaccggctagcatcaccagctactaggcccagt

SEQ ID NO: 3630 - DNA, 128 bp, Zea mays
  Clone ID: MRT4577_103314C.1
gagtttgagcttggacggtctttaagggtgtcattcccataaaaggcatgaaatatactgaagtcttaatcatggactctacatacattaattcaatacaacttacaaagggggaaagatggaaaccc

SEQ ID NO: 3631 - DNA, 331 bp, Zea mays
  Clone ID: MRT4577_103315C.1
acgcgtgcgcgtccggcttcttatggcggcaccttcctggtgggatcactcgccatcgccgccggccgcatccatcgtctggatgctgctcctgtcgagggcgatccggaggcggcttctttcgtccgcctaggccgcgtcgactgctgctgtgaggacggtgcagaacccgttcgaggtgttctttgaggtttagcggagcaccgaggagggcaagccttcttctcactactgtcgcagttggaaggcttccgtaccgcgactaaaatctagggatgaccttgagaaatcgtggtatggccttctaaggaaaagaacatgctcatgactc

SEQ ID NO: 3632 - DNA, 1035 bp, Zea mays
  Clone ID: MRT4577_103316C.1
ccggccgggaattctcacccatagggagctagagctacgagagggggaaaggggggacgggaataggcgtcgtcggccatgtcgtcgtcgtggaactcggtgggtctggcgatcctgtaccaggtgctgggctgggtcgccttcgccgcgtggtccttcagcttctacccgcaggtcctcctcaactacaagcgcaagagtgttgtgggcctgaatttcgattttctggtgttgaacttgacaaagcactcgtcctacctcatatacaatgctgccctcttcttcagcccattcatccagcaacagtatcatgacaaatatggtgacaaagagatgattccagttgctgcaaatgatgttgctttttcactgcatgctgtagcattgacagcctttaccgtttttcaagtattcgtatatgaggccatcatgaacttcaggcggaagagcacaattggctggagcgttggcaatatattacttgatctcacaggaggggtgctgaatttttgtcagatgggtgtgcagtctatggatcaacatactttggtgaatttctatggaaacattgggaaaacccttctttcattggagacggttttctttgatgtcctgttcattatccaacactacgtgttgtaccctgtcaagaaggacgagaatggtaaggcaatcatttctgaaagggtagccccccttatcaggccttcggacaagcctgaagaagataacgtatgatctagctgtagttatattgcgcgcattgcattcacgcgctgtttgcacacaggccacacacgcatgcgaattatttgttcaaaaggaattgctggcgcgtcttgattatattactgcttataacttttactacttggtgcactggtgagagatgtctcataccaggttgcgggtttcaagtggccccgtttttattatcgtgatttgtgaaggttattagatatcatctccgccaacatttacgatcaatgctcatgtaaatattttggttgcaaaaaaaaaaaaaaaaaagcggcc

SEQ ID NO: 3633 - DNA, 185 bp, Zea mays
  Clone ID: MRT4577_103317C.1
tgctcatcaacagccgcagcaggttcgtcaactgctccgccgccagggcctgcgacgccacacacccagagtgcgccacgccatcggtcaccgtcattctcatctactactgcttacacataatccaccccaaatattattacataaataaaattcttaacattttcccccaccaaaaatatttt

SEQ ID NO: 3634 - DNA, 1077 bp, Zea mays
  Clone ID: MRT4577_103318C.1
ctgcactcaactccacaggaggaggggggcgatagaagcaacgggccgccggcgatgtcgtcgtcgtggaactcggtggggctggaggtgctctaccaggtcatcgggtggatcgccttcgtggcctggtccttcagcttctacccgcaggtcgtcctcaactacaggcgcaagagtgtcgtcggtttgaacttcgattttctggtgctgaatttcacaaagcactcttcctacctcatatacaatgctgctctattcttcagccccttcatccagaaacagtatcatgacaagtttggtgataaagagatgattcctgttgctgcaaatgatgttgctttctctctacatgcagtggccttgacatcttttaccctttaccaagtttttatttatgagcgtggaaatcagaaagtctccaaagtgtgcatatcaatctctgctgttgtctggtcagccgctattgtttgcctcattgtagcttggccaaaaagtaactggctatggcttatcgatgtattcaattcaatacaggttgcgatgacaacagtcaagtacatccctcaggctgtgatgaacttcaggcggaagagtacagttggttggagtattggcaatattttacttgatcttacaggaggggtgctgaatttttgtcagatgggtgtgcaatctattgatcagcatactttggtgaatttctatggaaacattgggaaaacccttctttcattggagacggttttctttgatgtcctgttcattatccaacactacgtgttgtaccctgtcaagaaggacgagaatggtaaggcaatcatttttgaaagggtagccccccttatcaggccttcggacaagcctgaagaagataacgtatgatctagctgtagttatattgcgcccattgcattcacgcgctgtttgcacacaggccacacacgcatgcgaattatttgttcaaaaggaattgctagcgcgtcttgattatattgctacttataacttttactacttggtgcccgggcaaaaaaaaaaaaaaaaaaaaaaaaaaaaaaaaaaaaaactcgaggaagg

SEQ ID NO: 3635 - DNA, 1439 bp, Zea mays
  Clone ID: MRT4577_103319C.1
gttccatatagaaatagcaagttaacacaagtgctgcaggatgccttaggtgggctagcaaaaacattgatgtttgtgcatgtgaaccctgaaacagactcttttagtgaaacaatgagcactctcaaattcgctgagcgtgtagctacaatagaacttggtgccgcccgtgcaaacaaggaagcaggccaggtcaaagacctaaaggaagagatcgccaagcttaaattggcattagatgaaaaggaaaatgaagtggcacagtttaaagatcttgctaaccgtgtgacttctgagatgagaaatgcaagaacaagatcacctttaaccgccagcatgtccttgaaacctgaagtcagtcaagaatccagtgtagacacctgtacaagtgagataagaagttcatcatctggcaagcaaagaaggttccgttcaccgttgtcagtgagagagctagacgataagtcacctgtcatcagcagggaactgtacctgagtgcgcgaaagtacaagactccctctcctccggttagaagctcactctctgtcgagagaggcagctttgccaaaatcgtggagaacactggaagcatcgactgcacaccgatatccaaggtcgaagtgcctccaaaagtgtggtccagctccagcaactcgaagaccacaccttcatctgtcctgacagctcagaacctacggaaattccgggactccgaggagaacagaaccaaaattccgcctgtccggcagagcatggtgaagaacaggtctgagagtacgccaaagactcacaatgaagagaaaccggcgaacaggcactcgggtaccaaagcgaggtctgaggccaggaacacgagggactcgtccgaaatcgagaacgagtttgcgggcgatgaacctactttccacttcaaccgaactgcgaagaagttaccgacaaaggtgatgtcaagacagtcccagaacatagatgtcagtgtcagggcctctgtccggggggagatggagcctctgaccgaaggaaggcaacgccggaactggagcaagccgccgcacgccgagaggaccaatatgccgttgccggacatccggcgcagtgtctccctgccgcgcgggaagaaccctcttgtgtgaatctagctcgtttcgccaaccaggcattctttcattggttgtttgtttctttatcctgcggttcgatccgaatgtaggctctacggctgtgtagaacacttcatccggatgcataacacaaagtctgtcgagttgcttccaccaggctcccatgaaaacgcaaagttcacgctcttatgcgcgatgtaaaaatgtatgggttaatgttgcactgcaggctgcagcatctcgttccagtggtgattccgtaccaattttgttcttatattattatatagaccaaaaaaaaaaaaaaaaaagcggcc

SEQ ID NO: 3636 - DNA, 435 bp, Zea mays
  unsure (1)..(435): unsure at all n locations
  Clone ID: MRT4577_10331C.1
ccagatttggccgccgccgtcgctcacccaagttgtcttgatggcgggcggtgtacaatgcgggggggagacaggcaccttccataatgttcctgccttgaacggaaggatactgtcatccatgttcaggagagctggtgctgcacacccttgncatgagctggagatagggcctaggcctccaaccatattcatctggctaaggccaccctgacatgcttgactggtcctcttgtgatacgatcatgttaacagcatgatgtcttttggcctattggacaataaaatatgcncctgggctctaaaatgagtgcgctggaacacatgaactgattgtgtgagccatgttcctcttattcttggcactttgggatgcatgctcaagtgcttcagaaagactcttattagcgacttctatttctatgccatgtcatt

SEQ ID NO: 3637 - DNA, 1328 bp, Zea mays
  Clone ID: MRT4577_103320C.1
gcgattgggtacctcgaggccggccgggaccccagcgtagcggagccggcagccaagcagaaaaatacgagtatcgcacgcgcaaggcgattccgtccccattctccacccaatagggagctagagctacgagagggggaaacggggggacgggaataggcgtcgtcggccatgtcgtcgtcgtggaactcggtgggtctggcgatcctgtaccaggtgctgggctgggtcgccttcgccgcgtggtccttcagcttctacccgcaggtcctcctcaactacaagcgcaagagtgttgtgggcctgaatttcgattttctggtgttgaacttgacaaagcactcgtcctacctcatatacaatgctgctctcttcttcagcccattcatccagcaacagtatcatgacaaatatggtgacaaagagatgattcctgttgctgcaaatgatgttgctttttcactgcatgctgtagcattgacagcctttaccgtttttcaagtattcatatatgagcgaggaacacagaaagtctccaaagtttgcatatcaatttctgctattgtctggatcgcggctcttgtttgcctcattattgcttggccaaaaagtgactggctttggcttattgatgtattcaattcaatacaagttggcatgacagcaatcaagtacatccctcaggccatcatgaacttcaggcggaagagcacaattggttggagcgttggcaatatattacttgatctcacaggaggggtgctgaatttttgtcagatgggtgtgcagtctatagatcaacatactttggtgaatttctatggaaacattgggaaaacccttctttcattggagacggttttctttgatgtcctgttcattatccaacactacgtgttgtaccctgtcaagaaggacgagaatggtaaggcaatcatttctgaaagggtagccccccttatcaggccttcggacaagcctgaagaagataacgtatgatctagctgtagttatattgcgcacattgcattcacgcgctgtttgcacacaggccacacacgcatgcgaattatttgttcaaaaggaattgctagcgcgtcttgattatattgctacttataacttttactacttggtgcactggcgagagatgtctcatataccaggttgcgggtttcaagtggccccgtttttattatcgtgatttgtgaaggttattagatatcatctcggccaacatttacgatcaatgctcatgtaaatatttggttgcattacatttctatggtttcataaaaaaaaaaaagcggccaaaaaacacacacccc

SEQ ID NO: 3638 - DNA, 342 bp, Zea mays
  unsure (1)..(342): unsure at all n locations
  Clone ID: MRT4577_103321C.1
aggttgttatcacacgcccaagagcaagccacacaagaggctccacacaacaactcaacgacacggtcacgaagatnacaacaacgaagagagtgaaagccccacgaggcaccgcaagggcctacacaagggagagaaaaacccgcgaataagaggacgacgcgcagcccgtggggcgagatacaaggacgggaagaacgaatggacctgcgcaacagccgcgcggacggagcgggaactgggacgcaccgggtagcagcccacaaaggaacgcaggtgcacgcgcgacacacaaaggagccaccacactgaaaccacggatgccgaacccgcaaccgccgc

SEQ ID NO: 3639 - DNA, 502 bp, Zea mays
  Clone ID: MRT4577_103322C.1
cccatccccgcgcccggcttccctcctgtgcgcccagctgctgccatcaccttcctctgcccactcccctcaccggcctcccttcttgtcgcctgcaccgggggagtgctctccctcttctccacctccgaacccctccggtgcctccgccgccattccctcccgctctgggtcggttcaccctgcctcatcgtcttgctcccgtccatcacctcctccaaccctcgagtcacgatcctatgccacgctcccgacgacggccaccgacacgtttaaccactcctagacgtcatacacacgcaccctctccgtcactatacaccgtcttccatgggattctctcgggcggtactccaaatgctatccctgttagtgacctgcggctgatgactccaggacagcgttgatgttcgtctgacgcgcagggtcgactgcacacaatgcccgttgccgaagacgcggatgtcaaagtgaacccacccaggcgtctcatcgcgagctc

SEQ ID NO: 3640 - DNA, 320 bp, Zea mays
  Clone ID: MRT4577_103323C.1
ctcgaggccggccgggacgttttcttaccggccttgaccttacagcctcgtcacatagcagcgccataaacagaatgagacgtcatgatcagcatcaccatggctgtctcctccactgcacttcgacgacaaggtcgtgaacgtgccgtcggctcccgccttcgctcagggccatgttgacatgcgcaatacggcgggaaaggtcctgccagcggcggggtccggtagcccctgtgaccaccccgatcgtcttctgcgcctgggccccctgtcccgcgatccaccaaattatctgccagatcagttccctcacgactacc

SEQ ID NO: 3641 - DNA, 374 bp, Zea mays
  Clone ID: MRT4577_103324C.1
cttcataaactttacatgggacatgatgataattctttgaatagaagaaaatttcaaactggttttcattttcgcgcgcatgtaacacactacctctgtgtgtgaaggctacaaatattgacgctgaatctgcgtacctgttcgcttgaaaaacgtcatttggaacatgttaactgccctttacattaaacattttaggggccacaaacccatagtgatagtccctgtgatggccgccacaattaaacttggaaagatgggcctaattttgacccctgtcaacaaacaaaaaattcttctggttccagacgggaatggccaacctgttaccctctccatttgggccaactgtccgccacctgaacattgggcct

SEQ ID NO: 3642 - DNA, 764 bp, Zea mays
  Clone ID: MRT4577_103325C.1
ccgtgccgggatacaccaacaccgcccatacacaagtacacaaactgtgtatattctctgctcatcaggcacacgcgttactcatcctcgtgaccttttgtcctcacacgccccccgccgccgtagtgccaccaccagaacaacgttgtctagcttgccaatcaacagctggcatttacccacgatttttttctcgacagctgcgagacggaacagcatcgaacccatacagaacccccgcaaatcgctcctgtcttgtcttgtcatgagaacataggccctgactgcttccgactcaagctgccctccatcacttctctcctcctcgctccctcaaacgactcctccaccgccgaaccccttcgaatctcgagattgtcccggaagaagtgcctgccatgtcagctccagacgatgacgctggccctgtgccccccaagtcccactcagagccccagctaggagtctctgccctctcagcacgtccactgcctggcgactctactcacgcaggtgctgctttcctcgacgacactgcgccctcatccgtaaaccagccaacttctagccccggcctctcccgcactgcatccttctccaatagctcctaccatgacgagtccgaccctgaagatgcctccttcttcccgcctgtcgagaagctcaccatgtttgactttgtcgagaaccttgctctcgcccagcgcattgagaagatacagagctccatctctaaccagacggagcgcatcaggaaccaggca

SEQ ID NO: 3643 - DNA, 452 bp, Zea mays
  unsure (1)..(452): unsure at all n locations
  Clone ID: MRT4577_103326C.1
cccacgcgtccggttccattccatccgcacgaagaagagcagcggcggatgaccccgttgatgtcatcgccacgcacgtcgcctcgcccttcttgacgacgtgcgccggtcggccggataccatgccgggcaagcaggaggagggcggccaaggcccggcgggcagcagcgtgtgcttgtggctggtgacggcgctgctcctgctatctgtgctcgtcggcggcgcgtgcctcgcggcctacgtcctgctgccgccgcaggagacgccggcctggctacccgccgtcgggctagcgctcgtcgcgctaccaggggcgttctggatcctcacttgcgcgtaccggtgcgccgccgcgcgggccgtggagcgcacgacgatggccgtggcgccgtctnctggtagcatgtgctcgcgctacggatcgtgagcagtgacctatttaaggatcgct

SEQ ID NO: 3644 - DNA, 305 bp, Zea mays
  Clone ID: MRT4577_103327C.1
gcacgaggaccagtgctatggcatgcttgcggcttatggaatgagatcgatgtctggtgggagaatgctgttgccactaaatgcgacagctgatgcacccatctatgtgaatccgaagcagtacgaaggcatcctccgccgtcgccgtgctcgcgccaaggcggagagcgaccactttctgcctttggcgagcctgttctcgctctccgccttggcgcgagcacggcgacggcggaggatgccttcgtactgcttcggactatcattgtctgtctcggtatggattctctgttgtcacagtgtct

SEQ ID NO: 3645 - DNA, 309 bp, Zea mays
  Clone ID: MRT4577_103328C.1
attcttggacgggtgtcctcgggggggtgttgcaatcaaagcgccgtagggtaccacactaaacacaaggccgcatgtggtactggttcgcagatctactagacgaccctgtgaacgaaagcgggcatacgagaccaccggggccactgagtgatgaaccacagacacaatacggcgtggggtgtaaaggaatctatttgagcagagatctctcacgcgacagcaaaaactatggtaacagatgattcagtgcacattattagcgcggatacacgctggcgacgcccataacataaggcaatatcggcg

SEQ ID NO: 3646 - DNA, 524 bp, Zea mays
  Clone ID: MRT4577_103329C.1
ccacgcgtccgcgcactttgcctcgcccttcttgacgacgcgcgccggccggccggataccatgccgggcaagcaggaggagggcggccaaggcccgccgggcagcagcgtgtgcttgtggctggtgacggtgctgctcctcctctccctgctcgccggcggcgcgtgcctcgcggcctacgtcctgctgccgccgcaggagacgccggcctggctccccgccgtcggcctggcgctcgtcgcgctcccgtgggcgttctggatcctcacttgcgcgtaccggtgcgccgccgcgcgggccgccgagcgcaggacgatggccgtggcgccgtctcctggtagcatgtgctcgcgctccggctcgtgagcagtaaccgtaagacacttagccgtgcgaattcactttcaggtcaattgttacatgatggttctatacacgtcattgcattaagaaatcaagatcatatacatgctggtatccgtccgtccttaacagtatttaacgatcgctgaagctgcacaac

SEQ ID NO: 3647 - DNA, 902 bp, Zea mays
  Clone ID: MRT4577_10332C.1
tctgatcctgttttaagcgagatgggacaaacattctccgcacgcgtggggtttcttacatcgacgcaatccttgggacaaccgtcaaagtccccactgtcgatggaatggttgacctcaagataccttcagggactcagccaggcacaactctggtgatggccaagaaaggtgttccgcttcttgggaagtcgaatgctcgcggagaccagcttgtgcgcgtacaggttgagatcccgaaacggctgagcagcgacgagaagaagctagttgaggagcttgcaaacctgaacaaggctcagacagccaatagcaggagttgatttattgagcaaatctttttaggacaccatgcttgtggtcacaggcaattttgatgcaaattgcagtgatgaaaagagttggtagtggttcaacacttctacgaactaaagaggtacactggagcgaagcgtgtcatgctcatgccatatctgtggcctcgtttctaagctattggaaaccaagtcggtgaccactggacgtcttgcaatagcttaacatatacgactttattagccattttttgttacacggctttttgtattcttgagagccttaggcaaaatctctggtagtggaatcaggcttagacttttacatttcttgcagaaatgctgcaccattgatggaatatgtaagctgcaccatggaaatgtgactgcagttttatggtttgtgatgcgtcgggggtttattgtttagctcttcaagttcgttatctaaccaatacatttatttgcccctggcaggggcagctgttgatttgaagctgcctctgcgcagagcaggtgcatttttgtggtctaggcagctgttgacatgaagctggttgttctgtgtttgcaactacttgggactct

SEQ ID NO: 3648 - DNA, 615 bp, Zea mays
  Clone ID: MRT4577_103330C.1
atggcccaagggcacatttccctttcatgcatgagtcaggacaaagtgcgcacaaaagactcatgttggtctgtggaggtagtctatggtcctagagggatgccaagactagttactcttgacttctctactcagaccatcggagttaggagtgttcaggcaacagtgtcacctgtgtgcccagcattgtctactccttcagtgacagtgtctgttccagctctattctctactcctgctctagctcacgtgcctcagactgagccttcagctacctcagagtcaacacttgctctagcttctaccatagatccaagatcatattatgactttgactttgatgctgagtttgtgttaactcctcaccctcgcactaatgcgcctactgcacgcctctggatccttaggttagggcgtatattttggggcttgacgctaaagggggcaataggaaagtgtatgagagttaggggagctagagagagatggaaagttcacttgaactgggagcatagatctggatgttgcctagagggggtgaataggcgaacaaaaattaacactaaaaacttagaacttcttactctactcaaagcagtgtacgaagtgaaatga

SEQ ID NO: 3649 - DNA, 586 bp, Zea mays
  Clone ID: MRT4577_103331C.1
tcgagtttttttttttttttttttttttttttttttttttttttttttttttttttttttttttttttttttttttttttttttttccccccccaatccgggaaatatttttttattttaaaaaaaggggaaatttaaggggatctaaaaaaaaaaaaaaaaggggggcccacccaaattgggggacccccctaaaaaaacccgtttttgacccccggggggggaaaaaaaaaaaaactccttgggaaaaaaaatttgggtgggggggtttgaaaatgttccccaaaaggggggtaaccccttgtcgttggaagtaaaaaccccccccctccaagggggtgttttaccttggccaccccagggtaaaatttttggaaagacccccgtggggcacctccccttttaatttggggggaacccctaaaggctggggggggggttcgaaaattataagacccaaacccccccccttggggggaagccccggccggggggttctgggttatgtttggccccccattaggggaaaaaccaccctttggccggccctgattttttgggaaaggaaaaccctcccttttttgtg

SEQ ID NO: 3650 - DNA, 231 bp, Zea mays
  unsure (1)..(231): unsure at all n locations
  Clone ID: MRT4577_103332C.1
aaaannggaaaanccggacgacccacgcatccggagcattcataaacacatttagcgtatcgcactagcaacgacctaacgacaagggttaccaatatattagccctccttgctcttcttgccctttttgagagctcatcaaattgcttcattcttacacaatgctcacttgctccttatgccattatttcacattttctcctaccaagatacttttaatggcttttgaac

SEQ ID NO: 3651 - DNA, 169 bp, Zea mays
  Clone ID: MRT4577_103333C.1
ccaacaacaccaattttatttatcaaagttccgaacagagttacacaaggcttctactacagtctgggtggtaccatacataattaacacccagtttccaggttccttaccagttaaaatagaaaggcagttgtctaagatgagacttgctttactcatcacacaatcc

SEQ ID NO: 3652 - DNA, 170 bp, Zea mays
  Clone ID: MRT4577_103334C.1
tggtcctgatgaccttccagctacaagaggtggtgtgctcggagtacgcgtccgccgtcatcgtcaacagcttcgacgtgctggagtggtttgtgctcgacgtcatgcgtgccaccatcctggccgtatacaccatcggtccgctcgcttccgtcatggtgcaggtcgtc

SEQ ID NO: 3653 - DNA, 274 bp, Zea mays
  unsure (1)..(274): unsure at all n locations
  Clone ID: MRT4577_103335C.1
ggggaagtgaaattgattttttgttgggattccaaaccaaccaactctacangttttttgcaaaaaaacctcttaccattcaccatcatcttactgttcctcttctttaccacttacttaccctcctctccatcttttgcctcacccatagcatcttctgcaacattgcccacagctatcaacctctccttcttttccgcgaccgtcaccggcttatcttatttttgccccccggtcaacctagcaagcaacactaatgacaccccaccaagca

SEQ ID NO: 3654 - DNA, 269 bp, Zea mays
  Clone ID: MRT4577_103336C.1
tcgacccacgcgtgacgctttctgccacaccgaaaaccctatccttcttcaccttatcaacctgccaagtaagcactatcatcgagccctcctccgccaggaagcgcaatccccgcgtcactatctcccacctgaagtaccacatggcgcactttaccgcccctccctccgtccgccaccttctcatgtccatattgctgtcgactgaactccaacacaattacaacttgcgctccattccgatcccaaatgacgacaaggtgcatgtc

SEQ ID NO: 3655 - DNA, 318 bp, Zea mays
  Clone ID: MRT4577_103337C.1
tttttttttttttttttttggggaaaaccttggggggaaatttattcccccccattgaaaagggggaccccaagggtccaaagcccccaaggccgggggccctcccggggaaaactttttcaggtggacagggttctttttgccccttggaaaaaataactccggcccccttttttatatcccctttccgggaaacggggccctttgggggggctataaaaggttttccccccctaagggctgttttacttgtaaaaggggaaacccaaaattttttttggggcccaaaaatggaagtgtttattaaaccccgggggg

SEQ ID NO: 3656 - DNA, 125 bp, Zea mays
  Clone ID: MRT4577_103338C.1
gtaatgaggatgaagattcaccaaataagctatatactttggttacctatgtacctgttaccactttcaaaaatctacagacagtcaatgtggatgagaactaatcgctgatcgtcagatcagat

SEQ ID NO: 3657 - DNA, 1177 bp, Zea mays
  Clone ID: MRT4577_103339C.1
gcgagggggaggaggggagccccgtgaagctgtccaagccggagcaggccggcagcgacagctccgtcgaggacggcggcgcgcagaaccagaagccgccgccgccggggaaggggaagaatgccaagccggtggagcctcccagggactacgtccatgtccgggccaggagagggcaggctaccgacagccacagcctcgcagagagggtgagaagggagaggatcagccagaggatgaaggtccttcaggacctggtgccaggatgcaacaaggtgatcggcaaggcgctcatgctcgacgagatcataaactacgtgcagtcgctgcaacggcaggtcgagttcctctccatgaagctcgcaaccgtcaacccactggacctgagcaacctgcccacgctcctacaaaaagatatgttccaggcctgcggcgcttcggcaagctcggtcttctcgctggagagctgcagcccggggttcccgttcggcgggcaaggggacgtgttccagtccttcgtcccgaacggcctggagaacccgtgcggcggcctgaacccgctggacctggctctgtcccaggctaccggcgggcagttcggtttccaggacggaacggccggcacaaacctgcagcaaaggaactactgggaggaggaggaggaggacctgcagagcgtgttccacatcgacgacaacgggcagagccaggagcacggggcctcagcttcagcacaaagcttccatggtcagcttcaaccacaagagggccacatgaagatggagttcttctgatcgggcctcgacacccagccgccgacggccgagggagcgacctgtacatagcgaagactcgaggtacaagtacaaaagcaccagcggcggtggcggcggcggggacggaagctctgaagctatagctaacagcaagtccgtacatgtaggcccttccttgcccttggagaggcgagttcttcgctcgccgtagcgtgaaccagggggtgggcgatcgtgtgatttctttgaacgttttcgatccggcgattaatttgattgattaacacagccaccccgacgatagcgtacgtagcaatcacccgaacagtgaagctgtcacttttgtgtataagataatgcatatggtgcagatattagtatcaaaagcgcttctctctttt

SEQ ID NO: 3658 - DNA, 825 bp, Zea mays
  Clone ID: MRT4577_10333C.1
atggctaatattcctcgaagggttattctcttcgcgcttgagtctgattttgataattttgtcaccctgccggcggcagagagtgctggttgcttggcgacatcgctttgggtattctctgagttcacaaagttgattcctatagtgtggctaattaatgagcttgggctgaaagacatccctcttttgggtcgcaagtacacctggactaatggtcagattgatcctactttggatgtagtgacaaaggcatgcaatttggttccgcggggtaattgcccctttgagtctttggctaaaaaattcagagctacctccaaagcacttcagagttggagtcagaagtgtaatgggcacatggagttccagcttggtctagcaatggaaatctggttgcgaaatcacctcaagacacaccttctggctttgtcttctctcaagcgtaccattgcaaggagtcgatctcgaatctggtggcttgaggaaggggatgcaaatactgctctgtttcatgctcatgcccgataccgcaagcaaaggaactttattggtagtctggtggaaggggatctcattctcacaaatcatgaggagaaagagaaggctattcatgatttctatttcaacctcctaggtactaatctgtccagggagtatacaatcaaccttgaggaactggagattatctcacatgacttggctgatctggacagatcgattcccgttgaagaagtgtggcaaacaatatatcagctgccttctgataaagctcctgcaccgatgggtttactaggcacttttacaagttctgttggtcgatcataa

SEQ ID NO: 3659 - DNA, 478 bp, Zea mays
  unsure (1)..(478): unsure at all n locations
  Clone ID: MRT4577_103340C.1
gggtacctcgaggccggcncgggactcgtcctctccacagaacagcctaggcgccgtcagcgaatcggcctcccaggtaagcaggtacgtacagcccgcagcggccttgaaaggcaatccccgcgtgacgagctcctgctggaagtgctgcaaggcgtactttacaggcccgtcctccgtccggcgggctctcatgtcggggggcctgtcgacggagaatccgccacaagtacaacgtgcgctccatcccgatccgcaaggacgacgaggtgcttgccgtgcacggcacctacaatggccgtgagggcaaagtggtgcaggtgtaccgccgccgctgggtcatccacgtcgagcggatctcccgcgagaaggtgaacggctccaccgtgaacgtgggtatccacccctccgaggtgatcgtcaccaagctacagctcgaccaggaacgtcaggcagctcctcgaccgaatggaccggg

SEQ ID NO: 3660 - DNA, 262 bp, Zea mays
  Clone ID: MRT4577_103341C.1
catgctcccggccgccatggccgtgggattatgcgtggtcgcggccgatgtctttacatattgatagacagacagattaacaaatagcttacggggagggaattgtatagaacctgttacaaccatatcctttttcaaacatattttctgattataggtgtcttcacatgttctacattcacagagcctgttttgaatggcttggccactttcctgatatacaaattcggtgtttataacaacttcttgcaaattatcttct

SEQ ID NO: 3661 - DNA, 164 bp, Zea mays
  Clone ID: MRT4577_103342C.1
cgccagcagccatccccggagggattaggagtagcaacggctgggcgggcaccgagcgctgttgtgtcggtgccccagcagagaaccatcgccggagggcaagagaagcccggcgcctcccttggctggcacttggcacgccagccgcaacccctacccgtttc

SEQ ID NO: 3662 - DNA, 426 bp, Zea mays
  Clone ID: MRT4577_103343C.1
ccggccgggaaacccgtccgagaggcagtcatcccgccgcgatgagggccaaggatgtagtgcttgtgatcattttggagatgaagaggagcaattgatgcttcattctaattcgatccatgaaactccacaatgacagcttgttggaagaagaagcggatgaggcggcttaagaggaagcgccgaaagatgaggcagaggtccaagtaggcagattcatggagtgtccccgcctggagtctctgcgttcggttgttgtttactgagtaattttagtttttttttactaagacagtctgttatggatcagaaattccctgcgtttgttcgtggtctaaatattgcatcaagtgttctgcactttattctttagttgttagttgatgcgagtgcttgtccaaaaaaaaaaaaaaaaaaggggcggcc

SEQ ID NO: 3663 - DNA, 880 bp, Zea mays
  Clone ID: MRT4577_103344C.1
aagaataaagtgcagaacacttgatgcaatatttagaccacgaacaaacgcaaggaatttctgatccataacagactgtcttagtaaaaaaaactaaaattactcagtaaacaacaaccgaacgcagagactccaggcggggacactccatgaatctgcctacttggacctctgcctcatctttcggcgcttcctcttaagccgcctcatccgcttcttcttccactgcacatccgcttcttctgaaccttgggagatggcgtcagggaaaccacaaaatgaatacaaggaccgaaagatccctgagaagccattagtgttgaactggaccaaaattaagacaaagcagctctcgacgtggccctagatacgggagccaggctgttattgtggagtttcatggatcgaattagaatgaagcatcaattgctcctcttcatctccaaaatgatcacaagcactacatcccatcgcgcttgccagattatgacaaatcacaaaaattgagaatgagtaggaggtatttctactcacttagatcagaccagacaacaaatatttctttcctcatcacgccaatcagttacatacaaaagggcgagaaaacagaaactaattaataataaagaatcaagagttctctcagacaaatgcctcgattgtccccatggtttaatggaatggattagatcggaatcgtcatctttgttgtctcatcacagagaactgtacaagaccacaaaacaaatgcagatttcaaactaacacaaacaaagccatggcccatgtgactgagatgctggggctcaattacgttgttgtgcagtcatcccttcattgctttacccctaggctatcacgtagctggtggcgaattcct

SEQ ID NO: 3664 - DNA, 575 bp, Zea mays
  unsure (1)..(575): unsure at all n locations
  Clone ID: MRT4577_103345C.1
gctaacgagtgtccctatatatgcatgtcagtccctgtatatgcatgtttagcagtttcgaagtccacaaccatagacaagcactcgcatcaactaacaactaaagaataaagtgcagaacacttgatgcaatatttagaccacgaacaaacgcaaggaatttctgatccataacagactgtcttagtaaaaaaaactaaaattactcagtaaacaacaaccgaacgcagagagactccaggcggggacactccgtgaatctgcctacttggacctctgcctcatctttcggcgcttccccttaagccgcctcatccgcttcttcttccacttggccctcatcgcggcgggatgactgcctctcggacgggtttgggggaagaccggaaggcgggaagagaggcttgtgatgcgacagcggcggcggcggcggtgcgagctctcgccgcgcttctatataggagagccagtggattaaccctagcagggataacagtcttgggccagatcttaagttatcatgggcctcaattattagacaaaaggcncagtggattaaccctagccccggccgg

SEQ ID NO: 3665 - DNA, 256 bp, Zea mays
  Clone ID: MRT4577_103346C.1
aagacccgcaccctgtcccctggctcccatccctcatcattgatccttgtgtttgttcagcgggggtgtcctgttaccctgtccctgttcttctcgttcctgcctcttgcagaattttggaaacaggttgtggcgttcaagcctgtaaagctcccccttttccgatccacatcatctctgcattttgggaaacaggttgtttgcatttcataatcagagcccacccatttccagcggagtaatccttccttgtttt

SEQ ID NO: 3666 - DNA, 388 bp, Zea mays
  Clone ID: MRT4577_103347C.1
acttaaagcgccaggatacttataggtggtaccaccattctcgaacatagtagcgccaggacgcaatacagagatcgcccaaaatcatactctgaacaaagcattaatcctgtaaaacctcggagccagaacctagcagacgggagaaaagacatacttaataacaccggtgtatggcttccctatggatgctcttgacgtacatgcatctcacattgtgacacatcttgttaagaagggaaacaaggaacttgacgctcatctggcaatacagctggatctgcttcttctacgtcctcaacttgccaacggcaacacccatgcaaataagcttattagaaatgtaacttgacggttgcctaactttcgttaacctagcacttcatgg

SEQ ID NO: 3667 - DNA, 249 bp, Zea mays
  Clone ID: MRT4577_103348C.1
gcctgcagttccggtccggaattgccgggtcgactcactctttcgctagcattcgcagtttcccctctccttgatacgcatcttttttctaggagtaagtttgttcttttattgatatggcgaggtaggagaatgtctacatggccatgctggcatatttgtccgaaaggtatgaatagatggttgagtatatggagaatgtgtctaatactgtatatgtggaagtgctcactgttgaggagcgtaact

SEQ ID NO: 3668 - DNA, 168 bp, Zea mays
  Clone ID: MRT4577_103349C.1
gtcacacacactctcacaaacaagttttttccaaagccaagtctatctactaccaggcagctatctcacgcgggaggaagctgccatcatctccgaccataaccaccaccacttcttcaaccaccacatcaatgacctgcatcataccgccgtccagctcctctactc

SEQ ID NO: 3669 - DNA, 303 bp, Zea mays
  Clone ID: MRT4577_10334C.1
gctgctaggatgttacaataaacgctatccacagtaggcatacatgacagtctgagggatgtggatttcttgagtgcttagctcatgcatcatacatagaaagctctgtaaaattttactggtcaagtgatgcctaacactgaccggccatttaaattgaactggtcatcgtatagcatgtttgaaacgcgatctgaactggctactgatcactcgatatttgatgcccatctagctgctgatgtcactgatcaaatgctgcaggagctcttcttgagcaagtaccgatcggtgaaaggagct

SEQ ID NO: 3670 - DNA, 217 bp, Zea mays
  unsure (1)..(217): unsure at all n locations
  Clone ID: MRT4577_103350C.1
gctgaaggatgatgcttggtacaggaatacccatgagccgcatcaatgtctaggtcttagcctctctctctgtaactgtagtgactgcgttatgtctgctatgttgccgatgtcgaatccttcagctaatctcatatagcttatcaattttctangtgtttgatcattatgtgtgtatgactcgttgccattattaaatgctcaggcaatcatgctt

SEQ ID NO: 3671 - DNA, 366 bp, Zea mays
  Clone ID: MRT4577_103351C.1
tacagcttaccctacccaagaaaacatcaaagagcaaattgctgccgtatggaaacgttacggcctcgacaagaagacagtcttcgatactcccatcacttccgtgaaaaagaactcggccgggagatggattatcaacgacaatgaagcagagtatggcacatttgacggcattattgcagcagtcggctcatgcggagaccctcaaatgccccatctccctgaccacgaaaagttcagcggtccaactttccactcctcggagttagatggtaaagacgtcaaggggaagaaagtcctcatcattggtggcggggcaagtgcagtcgaagctttggagtttgcagttcgcaacaacgctgctga

SEQ ID NO: 3672 - DNA, 642 bp, Zea mays
  Clone ID: MRT4577_103352C.1
cctcgaggccggccgggccgggccatgcttccagcgcgagagggatccatctccgttgagtcgaggcggctccaactccggctcgtggcctcgcggaccaacatggccgccccttcgccctcgccggtggaggctaccctaccgcctgaggccgcggccgccgccgaggaagaccagtgggataatgatgtggctgagcctagtgtccccaaagaaaaagatcctgagcctctacaggcaaacgatgagaaaatatatctgggacctcatggagctccaccatctcaagcaaagcagcaggagctgaacaccgttggccgcaagcagcggttccggaacaagctgaaggaagcagataggaaattccccggcaatgctcaggagaacaaggtggagaacctaagggagctgatgggtgctagaggtggtaccagcctgcctaagagctctcctcgtgattggctcgatccgcactgccatgaatctgaattcgacagaaaaccaactagatgaccggcaaacgatgcagcgtgcgtttacctgaaggttgattacgctgtagcactggtgcgaggtgttattcgccaataacagatacttatgggtgactaatagatgaagcaaagcaaaagggtttcttgt

SEQ ID NO: 3673 - DNA, 1032 bp, Zea mays
  Clone ID: MRT4577_103353C.1
gggatacccaccacacgccacacaaatatctccgtccttgtcccccatctctctcgcccgccgccgccggttgaatcgacggagggaggcgttgatggattgctcgattcctggtgggaattgattgatttcagctgccgctgtgcctgtgcctgtgctgctcaatcgaattcgaatccgaattggattaggcaggtgggttgggtaggtgcgggatccagcgagcggaggatgggcgaggaggcggtggacgactacgagctccacatggtgtgctacggcagcgacaggacagcgcggaggagtgtgagtcttcctgctctccctcaacctgtgttccatcgtgcacctgtgcccggagccgtacccggaggagaacgcgcggttcctgcgcacgaacgggatccggcttcaccagttcgccgtcgaagggagcaagagtggtccgacagtgctggataccatgtcggcgcaggaaccattcgtccacatccccgaagaaacgatccgagaggcgctcaaagttgttcttgacgcaagaaaccagccggtgctcatccactgcaagagaggcaagcatcggactggctgcgtcgtcgggtgcctgaggaagctgcagaagtggtgcctgtcttcagtgttcgacgagtacctgcacttcgcggcggcgaaggcgaggagcactgaccagaggttcatggagctgttcgacgcgtcgagcttcacgcacctggcggcctcacagtcacagtattgagcgctgaccagagcgagtggctcccgaccggtcccgatcctgcaaccatgctgcatcaagcaagcgattttcccctgctgtttccgaagcaactcggccgagaataatgctgctggaaccatgagtgtgtccgcgagaattgataggcaatggccttaggttttgttgtgtgagtgctgtggttgcttcgtgtgcaactgatttcagattctgaattggtgatggctgtgattggtgatggctgaactctgaactgaagatgtttcgacgccctg

SEQ ID NO: 3674 - DNA, 808 bp, Zea mays
  unsure (1)..(808): unsure at all n locations
  Clone ID: MRT4577_103354C.1
gtggncagttgtactcgggccgttagtgatgtgggccaaggttcagaggttttctcagccaggaccagtggtttgggtcctttagtattataccacaagagcggtcattcccttcccggccgttttttttgcagtgagcctctccttccatttcttttgatgtaattgatagcctcaacaaacgaaggagtcataatggggaggttttatgttgtgattcccagttcaaacgatgttgaagcttctctaactgatgagagctcagatgggaacactcaaattttctatggtctatatgaaacccttttcgagcttgaccagggacttgtttgctcctcatcatgcaatattggaaagatgaaaattggaactcttcagtgttactacctactatcttcttgaacaatctgaaaaaggaccagtgctccccctgtcagggacggatctagcggtgggtgggcggggctcgagtctccctaccgtttcggatcccatgaagccccactacagtctcctctaatctaaaatgtatacaatataatgtagaatgagcttttatactgcagcaatttagttcagtccctcctaaacttttttctggctctgtccctgcccctgttctattttgatttgtgatgtagtgagagacatattttttatttttgtgaaatgtatatttcaccgcttgtagtaagtagcctaaaaccatattggattggattcctaccgctgaataactatctttgtcataatgcttgtacttcagatgcttataagttgccagaatagaaagtattccctccgtcct

SEQ ID NO: 3675 - DNA, 981 bp, Zea mays
  Clone ID: MRT4577_103355C.1
ccggccgggatatatctcccatcaacgctagactacgagccctcagggaaaaatccgaccaaacgcaaccctaggaagctacaggacctctctgcttctgcggtttcggcattcagcattgggatatagcccctaccagacggcatcgattcccatccaggcttccagcgcgagagggatccatctccgttgagtcgaggcggctccaactccggctcgtggcctcgcggaccaacatggccgccccttcgccctcgccggtggaggctaccctaccgcctgaggccgcggctgccgccgaggaagaccagtgggatgctgacggatatgttattcctaatttgcccactcaagataatgatgtggctgagcctagtgtccccaaagaaaaagatcctgagcctctacaggcaagcgatgagaaaatatatctgggacctcatggagctccaccatctcaagcaaagcagcaggagctgaacaccgttggccgcaagcagcggttccggaacaaactgaaggaagcagataggaaattctccggcaatgctcaggagaacaagatggagagcctaagggagctgctgggtgctagaggtggtactggtaccagcctgccaaagagttctcctcgtgattggctcgaccctcactgccatgaatctgaattcgacagaaaaccaactagatgaccggcaaacgatgcagcgtgcgtttacctgaaggttgattacgctgtagcactggtgcgaggtgttattcgccaataacagatacttatggttgactaatagatgaaacaaagcaaaagggtttcctgtggtgtaatttatcggagctctactgttctccatgtcgcgtaaatactcttaattcttggttgtacgcgtgtgtcgttgcatttgctatttacattggaaaaatatatggaaacaagttgctgttgcgtaactagtcaaaaaaaaaaaaaaaaaagcggcc

SEQ ID NO: 3676 - DNA, 729 bp, Zea mays
  Clone ID: MRT4577_103356C.1
cctcgaggccggccgggccgggattcccgagcacaccctcgaaactgaacatcacttcctgtgctcactgcgctacgtgatcacaccggacgaataaatgtccatctaccaccaatgaataacccggctgcgatcatccttggcctgagcctcctgctggctgccaccccccatggctgaaaaacccaatggtctggaacagcctccccaacgccaacagtcgcgccaactacggcgtcgacacagacacggaacaataatcgaaagaagccctcgaacacctacaggatctacatcgtgccaggtgctcgaacaaggtccacccaccccatcacgatctctgcctggccatgctgaacatgaagtccttcctcaacgacatcttgtgcaactgcaccggcaacgatgccaaggttgtcgcgcataccaccacaacgcgaccatcacctctcagtacattctcaccaactgtccgccttagtcttcccgaggacttcacttcgcccaactaactccgaggacccatgggcgctccatctctcgcatcaacttacgattatggcagtatctagtgatatgagctaatagctgtgtctcaacaagtctgctactagtacagcgacgagtagacatggtgaggagttatagtggcaagaattgtgatcaactggaaatatgcgtgaaattgattttgatgaatgaagaatatatgaatcattcggtcctaag

SEQ ID NO: 3677 - DNA, 774 bp, Zea mays
  Clone ID: MRT4577_103357C.1
tgagcgagcggcgagcgagtactggcgctgtcggtgcaccgcctcccctcgcttgcgcgcatgccgctgcccctgagaccctccgctcaacgctcaccagctgtaggaggcggcggcagcagccagcaccctctgctgctcatttccctctccgaccaaccctttctagaagcctccaaaccgtatcgtaggaggaagaggagctaggaggagctaacgtctactcggaaggttcatgctcttcatttggaacgaacatatcaggaattctgaaggcggtcggaggtactatgcaatagttgttttgatgaaatagagctagaggagcatgactacaacctcatacaatcagtaattgagaatcttcagacttggcttcataaagcaagcaagggaggtggccacgaggcattcaggttctcccagctcatatctgcctggcagttgctcaagacatccatcactaggtgattcagttgaactatacccatgattcagttccttggcaatttttcctcaacagcaaggttaagttgcaagcctgtggttggtatcaataggtcttgcttttttcaggcaaaaatttcatacttttccggatgaaataaagtagatcttggtagaatggtcgttttggcgcatggtcgttgtctattgaaattgttttgaagttgctatgtaaagtggctttaaaagggaaatttgcccaatgttcatgtctgcccaatcaacatagattggcctctccagaattgccaaggtctgctggtcccc

SEQ ID NO: 3678 - DNA, 393 bp, Zea mays
  Clone ID: MRT4577_103358C.1
agcctacgcctagccacgcgcagcggatcctagccatttgagcctgtcagagaacgctccggggcgctgcagagggcctatccgtatagacggatgtacactgggcgaggcggcctacccgctgcacactcgacggaatcatacaaccccctcgtcactgaacccacacacacctaagcctgcagcgcactgaccgtgaatgagctcacgacggaccgatagccatagatggaatggaggatgttttggctcaagcacctcgctgcacggtgggggtgcagtacctaacgtacgtgcccacatgcgacacccgtgcggaccgacacatggccagtaggcgcccaagtgggcggcgggcccacacgcacatacgttctgcaatcgcgctccatg

SEQ ID NO: 3679 - DNA, 339 bp, Zea mays
  Clone ID: MRT4577_103359C.1
gttacttatattgggttgggttttttttttgttgttttttttttttttttttttttttttttttttttaaaccccaaacccttcggggtagttattattacaccacaaaccaaattggtggggggtggttttttcacaatttgggggggggggcccccgaaaaaaaaggtagaaacacgcgtgcctccacttggttataccaaacctattcctgggggcgtgccattttttttttttatttatcccattagagcttagcattgtcctgtttatgggtcccacatgggcggaaataaaatacgttgaccatggaacccaacatattttaactttgccctc

SEQ ID NO: 3680 - DNA, 540 bp, Zea mays
  Clone ID: MRT4577_10335C.1
ggggggggggtgctacacccctattgattgcccaaatgtaatgagtaattaatggacaccttagggcatgttcggttaagaaaattgaaggggattaattaaatctcttcctattcctagtcaaagttgaatataaaggaatttaatgcaactaaacaaagcctcaagagtgtgtttgagagcaagtaaattagagcagattgaagaggctaaaatctctttattattcatttgttaacagcaacagaattttagaccttttcaatccattccttctaaactagccctaatccgcgatagcgccgcctaagactgtgtccagtagacaggatgaaataggggccgcggaactgtagatgatgacactgtttacagagtaagcttgaaatatgatataaaatagaggatgtgataagggatctactcaagatagcctaaaggagggagcgcctctcatccatgtaagatgtaaacttcgttagcatctcccttattttaatgaaatgctagataataagcccaatattccaaaaaaaacaa

SEQ ID NO: 3681 - DNA, 611 bp, Zea mays
  Clone ID: MRT4577_103360C.1
tttttaattcttttttttttttttttttttggctttttccaataattcccgatttgctagcggaggccggtaatattacaaaacctgggtgtcataaatatgaggactgtgcttgttcaacggggaatttgctcaccagaagtttttccagacaacgactacggttattaataaaaacctttaatggccctactttgcattcaaccagagctgatgttgatcctccagagcatcaaatcgcatcacacgcaacttgttacgtgtcgctttaactcccagggggcctaacctggtttgggtacgtctagctatacaaaacctcctccaaagtccattagcctcccaccataaatgggatgcatgcttcctccccctatgtcctttgtcccatcacaaacctcgcactttacgcctacagcggaaaacacttttgcgtatccctaagtttcactttagttgaccctttcagcgttggcgtataattctccatcaatgtgaaagccaatatctatttcttcttttccccgatttcaaccatgagtgtcttgatcgactttttcacgatattcagctcttccttgactaactgcaagacgtacaaccttttcttc

SEQ ID NO: 3682 - DNA, 236 bp, Zea mays
  unsure (1)..(236): unsure at all n locations
  Clone ID: MRT4577_103361C.1
aattcggcacgaggaaaaaaaaaaaaaaaaaaaaaaaaaaaaagaaaaaaaaagaaaaaaaaaaaaaaaaaaaaaaaaaaaactaaaaagaaaaaacatttccggggggggccgggtcccaatttccccttttggggtttggtgttacgcgttttaattggccgtggttggaaaacgtagggcgtggaaaaccntaggcgtttcccaatttatcccctttgcnacaattgcccttt

SEQ ID NO: 3683 - DNA, 335 bp, Zea mays
  Clone ID: MRT4577_103362C.1
gcccagactgaaagtggcccagtcccaatacctccgagacagctgtcagtccatttaagttcctaccaatcggatgaaaaatgagaaacacctctggctatgcgcctaagcgcagagagacaagctgtgcagagagttgacttagccaaagacactgtcagacttggaaaaaagctactaactacctcttatcttgtgggcaaatcgatattagtatggtagcattgttctttttcattgaaacaatttgacttggctatggctcatacttttatgccatacaattattatcatacagtggtatatctggtccatatatctatggtggcttgctt

SEQ ID NO: 3684 - DNA, 416 bp, Zea mays
  Clone ID: MRT4577_103364C.1
attccagggcggaccacacgcgtccgccacacgcgtccgcaaggacaaggagggtttctcctcggaccagcagcggttgatcttcgccgggaggcacttgaaggatggtggaaccttgcctgactccaaaatccaaaaggggagcaccctcaatttggtgctccgcctaaggggcggtttgcaaacctttggaaaaaccttgactggcaagaccataaccctggaggttggaagctttaacaccatcaacaccgtgaaggctaaaatccaggacagggaggggtttccccaaaaccagcagcgtttaatttttgccggcaagcacttgaagaatggtcgaacccttgcagactacaatatccaaaaggaaagcaccctccacctggggctccggcttggagggggttttaaaacca

SEQ ID NO: 3685 - DNA, 175 bp, Zea mays
  Clone ID: MRT4577_103365C.1
tgtttgtccaccaggcacctttaaagggggaatccggtggcaccattggggcgccatgggggcccaaaaaattttccctccttttggcccttggcttttttacaagggggggtaacccgaaaattttccctcaatgtttacaaggttctttagtttccctttttcccccaaacct

SEQ ID NO: 3686 - DNA, 878 bp, Zea mays
  unsure (1)..(878): unsure at all n locations
  Clone ID: MRT4577_103366C.1
gggtacccctccgaggggccggcccgcgggggaagtcatcctcgcccagtcgccccaccaccgcctccgtcgacgtcgtcctcgcctccgccgcgctcgcctcaccgccaccgccaccacggccttcctcgtctcatctccgccgtggcctcgccctcgatacgctactgacggggtgcccctcgccgtcgacacgtgacctccgtcatttgcatctcagctccaagatctactccagctgctggcctgtagctggcagtggtgactggcaggctgatctggttggacatggagagcgggctgctcttggcaccaggattggcaccatcaccggcacgcttgtctccaatctccatcgatataattgactgcattcggcttgggtgaagacaagaagtgacccagcaatttccattttcttgttcaggatggcaatggccacatcatcatcttaccctccaccacctcccttttaccgactgtacaaaaattttgagcaggatccttcatccgcaccagaacctccaccaccaattgatggaccattcaaagctttgggtgttgattacacaggagatgttgtgattccaagcttggagagtcataatgtccgtcagctttatccaaagggccccaatattgatcatggaggaatgcaggatatggtggtgggctgatgcttcaaatctgcaagattttattatttggtcgttgtccaggacgtgatgatcttcaccaaattagtttgcctttgccttatcttttggtcatgttttagaaatggtttgtacagttagggtgctgtgtgagtgggtgtgggtcttgtaagtctggccttagctggacanatttgtctctttccttatgaaattcacaca

SEQ ID NO: 3687 - DNA, 243 bp, Zea mays
  Clone ID: MRT4577_103368C.1
gctttttgatgcgaggtgtgtagggcccaacgttctcttaattgcttttgtgacatggggatgccaacaaaagagagatgttgaaaacttggggagatgcggacagtatgcggggacgctgacttggaatatgaaaggatccacagtgaactgatacaaaatctggacatttggtaaattaaggtgacatgaccacatcagctggtgcaggcttaaatgactaatgatggagctcgaagtcta

SEQ ID NO: 3688 - DNA, 604 bp, Zea mays
  Clone ID: MRT4577_103369C.1
tttttttttttttttttttttttttttttttttttttttttttttttttttttttttttttttttttttttttttttttttttttttttttttttttttttttttttttttttttttttttggggggaaaaaaataatgggcccacggaaaaacctataacccggaaaaaaagccccccggggagaaaaaacaaagggaaaaaacccggaaaaagagcctttcccccccctttttttaaagccaagggtttcggaaaaaaaaatccaaccagggtaaaacccacccgtttataaaaaaaacaaaaaaactggtgccaaaaaccccattcccctttgaaaaaacaaacccaaaccaaagctttttcaaaagggagctacagtttatctaaaaaaaaaaaccaggcaatgttttcccttgttaaaaaaaaagggccaaaggtttgggatctggaccaccaaaaatttcctttgggtctcccaaaattttccggaaaagtttgggggtttttttaaagctaacactaaaaaaaaaaggggcctgtttggttccccccctgggtttttaaaactttttttggggttaaccaaaacccgggaacttttt

SEQ ID NO: 3689 - DNA, 1287 bp, Zea mays
  unsure (1)..(1287): unsure at all n locations
  Clone ID: MRT4577_10336C.1
aattcggcacgaggggcgagcaaggcaaagcacgccaagcgcgagtccgtccacaaacagcccatcactcactcgccgcggcgaccatccccgcagttctcactccagtctccacacacctctcacgagcgcgcgcgcgcgcgtccgccatggcgccgtctaagcctttattccccgtcgccgtccccgcccccgacccgtccgacgaggtcgtgcgcgagttcggcccactgctccggatctacaagagcggccgcatcgagcggcccctggtggccccgcccgtggagcctggccacgacgccgccacgggcgtccagtccaaggacgtccacctcggctcctactccgcgcggctctacctgcccccaagcgccggcgccggcgccaagctagccgtcgtcgtgtacgtcctcggcggcggcttcgtggccgagtccgccgcctcgcccaactaccacctcttcctcaacaggctcgccgccgcctgccccgcgctcgccgtctccgtcgactaccgcctggcgcccgagcaccctctgccggcgggctacgacgactgcctcgccgcgctcaagtgggtgctctccgccgccgacccatgggtcgccgcccacggggacctcgcccgcgtcttcgtcgccggggacagcgccggcggcaacgtctgccaccacctcgccatccacccggacgtcgtccaggcccagcgcgcgcgacaggccggcgcgccgccgctcaagggcgccgtgctcatccacccctggttctggggctccgaggccgtgggcgaggagcccagggaccccgccgcgcgcgccatgggcgtcggactctggctcttcgcgtgccccgagaccaacggtctggacgacccgcggatgaaccccttggcgcccgccgcgccgggactccacacgctggcgtgcgagcgcgtgatggtgtgcgccgcggagggcgacttccttaggtggccggcccgccgtacgccgaggcggtggcggcggcnaggggcggtgacntcggggaggcngctggcgtcgagntgttggagaccatgggagagggcnacgtcntcttcctcntcaaacccgagctgctacgaggctaaggagatgatgcaccaagatggtcgncncttacatcaacgcgcgcacnctgaggcgtgaggtgcttgtgttcgcgtctcagaatcatcgttggcgtggctaggtatgncagcacacncngtagtcagacatnttatcngtgacagcgtgcaaaataaaggccttggatccgtgagaa

SEQ ID NO: 3690 - DNA, 2531 bp, Zea mays
  Clone ID: MRT4577_103370C.1
cattgggtacctcgaggccggccgggaatagatagactgcagagagacaacaggcgtagctagcaccacactcaagctactacgcacgcacgccgccgctcccccagttcaaacccaccaccccttccggccttcccccttcgtcttccattcccagctgtgcacgcgctttccgatcgcttcatctacctagccaccgcgcttccgcccagccccagtcaccagtccaccgcgcccgcgcccccgatccagcgatatggctggctccgtagctccccacgctgtggtcctcggtcttctcctgctcgcggggctcgcggcggcgcagagggcgacgacgccggctgcggcggcccccgcgcccgaccccggctgcaacggcatccagctgacctacaacttcgtggaccgcaccaagatccggcccttcgtcagcgacaagaacaagcagccctacgccttccgcgccaatgtcaccgtgctcaactccggcacccgcccgctcaagtcctgggtggcactcgtcacattcggctacggcgagatcctcgtcggcgtcgacggcgccgtgctcacgggcggcggcgacctgccgtacaacaccacggaggacgccggcaacgccacctcgttctccgggtacccgcatacagacctcctcacgcccatcgccaccgccggggacctgtcgcagatccaggcctccgtcggcatcgtcggcacgctcttcgccgggcccggcccgttcgtgccgctccccaccgcgctgtcgctggacgacccggcctacgcgtgcccggcggcggccaacgtcactgctcgggtgctgtccacgtgctgcgtcctcacgccggaggccgaggccaacgccactgccatcgacgccaacaccaccgacccgaccaaggatttcctgccgcgcggcaccggcgacctcgtcatcacctacgatgtgctccaggactacccctccagctaccttgcgctcgtcacgctcgagaacaacgccaagcaccggccgcctcgacaactggcggctgtcggccaagtggcggcgtggggagttcatctactcaatgaaaggagcccacccatcagaggtggacacctcgggctgtatctatggggcgcctgggcagtactaccagagccttgatttttctaattacctggttaagcagactaacatgagcgggtccgactaccttgtgcctggcaagcaacagtcagtccttgggaagattgacaattgctgcaggaatgggacaatcttgcccaagtccatggacgaggcacagtcgaaatctgcgttccagatgcaagttttcaagatgccaccagacctgaaccggactaagctgttcccccctgctaatttcaagatcgtgggtgcatcatcgctgaacccggactatgcctgtggccagccggtgcctgtcagcccaaccgcgttcccagacccgagcgggcttgactcgacgacgcttgctgtggcaacatggcaggtggtgtgcaacattaccacgacaaagggggccaagcccaagtgttgtgtgaccttctcggcgtactacaacgactcagtgatcccctgcagcacctgcgcttgtgggtgccctgcaaacaggcgagggccaacgtgcagcaccaccgcacaatccatgctgctgccaccggaggcgctgcttgtgccattcgacaaccggtcacagaaggcgttggcgtgggctgagctgaagcattacaatgtgccccggccgatgccttgcggtgacttttgtggcgtgagcatcaattggcatgtctcaacggactacaacaagggctggagcgctcgggtgacattgttcaactgggaggatgtcgacatggccaattggtttgctgccatcgtcatggacaaggcgtatgacggctttgagaaggcttactcgttcaacggcactgcagtgggcaagaacacgatctttatgcagggtctggaggggcttaattacctggtgaagcagaccaacatgagcgggtccgactaccttgttcctggcaagcaacagtcagtcctctcattcaccaagaagctgaccccggggttaaatgtcgttgctggagatggcttcccaacaaaggtcttcttcaatggcgacgaatgcgctatgccacagagaattccgatcagcactggattcagcacccgtctcagcagtggccttgctctggttccgttccttgttgcttcggctttcctattgctccagcaatgatccacgggactccaattctttgattctttcaggtggtttggtcgatgccatttgtaagaaagcctttttttttgtttctgtgattgctttagtagattctacttagctgctgtatgttagtcagatgaagcagcagctgtgaaacagtatgaatacttggatagtgagagaaaaagtgaggaagcctttgttgcgggtttgcaacattggttcctcgttctaatggcatttacgaattgtctcaggaaaaaaaaaaaaaaaaaagcggcc

SEQ ID NO: 3691 - DNA, 837 bp, Zea mays
  Clone ID: MRT4577_103371C.1
agctacagctccagctccactccctcactccagtcttctccccctccttctcttttgcgcgctggcccctgccgtttcggacccgccgcgctccggtccccgctccgccgccgccgcccgtccccgtcgaccccctcctccgccccttcagaggaagctgcggactggcatgagctagggggccatggaagaggcagacaaggaccgcaattcctgcaagcgcctgcgagcggtaggcggcggcggcgactcggcggatgcgtggcggactttccgggtggcgcgtgctgcggcgggcggcaaggaccggcacagcaaggtggtgacctcgcgcggcctccgcgaccgccgcatccggctctcggtgcagacggccattcagttctatgacatccaggaccgcctgggcgtcgaccagcccagcaaggccatcgaatggctcatccaagccgccgccaccgccatcgatggtctcccgtcgctggactgctccttcgccctccctgtcgcttccccagcagcagaagacgccgcggaggtcagcacctcggagaccagcaagggctctgtgctctcgctcgccaacggccctgccgacaatgacaatgccactcaccaagccaatgcatacaacgggggcagtgccaatggcacgttcgccgagctcctgcactgctccaacgctgccgacaagccaatgcagcatcagcatcagcagccgacgcttgcctactacgcccgctccgggttcacacatcgcacccatgtccttcgagatgattccccgctccccctctcccaggacaacaaaacgccacacccacacaacatgcctct

SEQ ID NO: 3692 - DNA, 1204 bp, Zea mays
  Clone ID: MRT4577_103372C.1
cgtttccgcatcggcgtatctcccggcggcaaaggcgctctcctcccgacctccctgcggtgccggtacgacagtcgacaggatggcaatggccacatcagcatcgtaccctccacctcctccattttaccgattgtacaaaaaatttgagcaagatccctcatctgcaccagaacctccaccaccaattgatgaaccattcaaagccttgggtgttgattacacaggagatgttgtgattccaagcttggagagtcataatgtccgtcagctttatccaaagggtcccaatattggtgtgttgattcttgaaaaatagatatgtttatctgcgtatgcatacatgctcaattctttgtgattgataaacgttaaaactgtttagacactagctgaaagttttatatgccaaataagttgttgtactgttacttttgaggactcaataagttatttaatttaatgagctgactctttggaaaatttgttaaattttagacttcaagaaggagcttaggaccctcaacagagagcttcaattgcatattttggagctggcagatatattagttgagagaccatctcaatatgctcgtagggtagaagatattacgctcatattcaagaacttacatcatcttctcaattccttacgacctcatcaggcaagggccacattgattcacatgcttgagagccaaattcggcaccgcaaggaagcaattgaagatataaagcatttcctatttgcttgtatccaccttccatcaactagcactacatcgtctgtaaaaaacatacactaggggatatatcattgtgatctcatccatcaccaaggcaaaaaggaggagggaggaagcgcaaaaaatgcttggggaatcactgcttatcttggatggaagtcaaactaactaggctgacgccgtcaagttagttggttcaagaccgattcttctatgagttaaagagtgttagtagaagacaagatgtgtctggattgttgtggtatcatctgttgtggcttgtggtatttccagctttgataactgaattttcttacttctatggtctatgttagcaaagttggattactttcttacttccattggtactcaactgcatcatgggttactttcttgtggaagtgtatattgtgagattgattcctcgtggccagcttaattgaaaggttgttatatgc

SEQ ID NO: 3693 - DNA, 495 bp, Zea mays
  Clone ID: MRT4577_103373C.1
attccaaaagagagccacgcactagtcgcctgcctatctatctacgcgagagagagaggaaagctagctagctagtatgcagtgcggaagcaagaaggcagcaggcgccgtgatggagctgctgcttctccagctggagttagctccgacgactggccaccgcccgcctcctgcaggcgaatacctccaccgtgcttgcgctgcactcatcgcgaggcatattgaccatccagcgagagacatcctctgagtggaaacctgtgccttcctaccgtgctatactcctctcatgtgatgccaatgcattggccagatctgcatgatgcgctatctgtactaccgctattcgaaatttgtgttgtaataaacacaaggacgatacgctgttgtacaacttattgcatgaccatggagatctactaagctgagtataatagctcttccaacgtacggcgtcagtaaaactgaacaaagcatttcccgaactgcctcaag

SEQ ID NO: 3694 - DNA, 545 bp, Zea mays
  Clone ID: MRT4577_103374C.1
ctccctcgagtttttttttttttttttttttttttttttttttttttttggccccgaaaggaacctatggaggatttattaaccaacccccccaaggtacctttccttgcctggcccaaacgtgggcccgcccacaaataataaccataaacaataggaatccttaacttaaaccaggggattaaacgggcaggccatttccttgggtggaaaatttaataaggctggaatgggattggtttaaaaggttttttggaagggaaaaagacaattttttttttttttttgcaccaaatggaccaaaaaccttccccacccggaccctggcccaattccccaaaccaacccggattgaccgacctggagcgaaaataaggttcaaaaggggttgaagccaaagaaggtttgaacttgggaccaagggggggccaggttaagggaagcaggaccaaccctttttaaccctaacaaggattgcccattggtggaaaagggtttggaacggaaaattggtttattccaaccggggccggacctctggcgga

SEQ ID NO: 3695 - DNA, 267 bp, Zea mays
  Clone ID: MRT4577_103375C.1
tctttcagcgaaccggaggcttgccgaggctgggttgctgtctaccgagaaggggggtccccccggctgactaccggattgaactctctgcatacaacgtggacgcctgcgtggtccaacggatgctgggcggctgccacctctaggcaggcatgcaggatgacctgcatttgtgaattcgagctccaccttggcgttccctaagacatgctctgacctcccgatgacacctctgtcacaggcagcgtcgagaggatctaactggtc

SEQ ID NO: 3696 - DNA, 261 bp, Zea mays
  Clone ID: MRT4577_103376C.1
tgaggaatttggcacgagggggcaacccgcaacgggagggcgttcgggatggcgccgcacgcgcacctggccatttacaaagtgtgcacgcggagccggtgcttcatcttggacatcgtcgccggcctggacgccgccgtcagggacggcgtggacgtgctctccttctccatcggcgccaccgagggggcgcagttcaactacgacctcatcgccatcgccacgttcaaggccatggagcgcggcatcttcgtcagcgcc

SEQ ID NO: 3697 - DNA, 298 bp, Zea mays
  Clone ID: MRT4577_103377C.1
attattaaagttaggtttttttatggtaatataacatttttaacaaccataatacaaatgaatttcttttttgttatgataacattaatttttccaccaaaaaaaaaccaaggggttttattttgggaaccttaaaaagactagtctgccccccatacaaaaaatattacctttgtgccaaatattttagagaaaaaattattctctttaatggctttgaaaggggcctccttctttttataaaaagaagccccaaaaaaaaactgttgttactaaaacaccaaaaccctcatgttac

SEQ ID NO: 3698 - DNA, 269 bp, Zea mays
  Clone ID: MRT4577_103378C.1
ggaaaagatatcacctcaatgatctcccttcccgtatggatttttgagccgatgtctttccttcaaattatttgtgaaccaatgcaatttgaagaattgctacgacaggcaagcaccaacgaagactccgctctccgtcttgcttatttggcttcctttgcgattgccggatataattgtgccattagaacaaaaaaaccattcaatccactacttggagaaacatttgaatttttgtcacctgaaggaaaatataaatattttgcaga

SEQ ID NO: 3699 - DNA, 345 bp, Zea mays
  Clone ID: MRT4577_103379C.1
caaaaaaggcgtaatattttatatggtggtgtcagtaccattaatccatctcgttccaaagaccaatccaggcatccaaacattactctccctgaacccacgaaacctaacctagaatctatgctggctttaaattacaccctctagataatgcacgcatttgcattacccatatactagtgatctctataacctttaattatatactgatacactcaaacgctatcccaagcaacctattagtcctgtactcttattgtactttacattcatataacaaaattcacagacatgtttttcgacacattgacacacacactacatcatatatgtgactacaaacac

SEQ ID NO: 3700 - DNA, 219 bp, Zea mays
  Clone ID: MRT4577_10337C.1
cgcggccgcgacgggtctatgcttcactctctgttcctatccttagactctgactctcccctatgctcgtcaaacatgtgaggcagtactctcgcgtaccaaaaccagacacggagagcgctgagtgcgcgcgcagatagcagttgagtgctgcgcccttttaactagtcgaattcatgagatgtagattaagacagcaatgatatgcactggctgcgt

SEQ ID NO: 3701 - DNA, 358 bp, Zea mays
  Clone ID: MRT4577_103380C.1
cccacgcgttcgcccacgcgtccgcagatgcttcgacgacagcagtggccttcaagcatggcgtcctcatgcgagtaagcatgggcagccttcgtcctagctggcataggcagactcctcctcgcacctgaagcgaatccagagtcactgcctgggctctgtaccaatgggcgaaattatacggcccatatacacgccaagagacggcaagctctccaccgcctgaagcccgggcctacggcagagaggaccttccatgcgggaacaggaggcttcagcccgcagtaaacatgacacagtgtccgtatggagatctacgtcgttcgaggactgagagagctacttctgcatatccctc

SEQ ID NO: 3702 - DNA, 358 bp, Zea mays
  Clone ID: MRT4577_103381C.1
cacgtctctctctctatatgtgtccgtccctgatgggttatgtctcaggtttcaattagatgatggtatacggtatgataatggacgtattaccgatgactggatgactttactgaagtgtagaaaacttgttcaaacaactagttgctgaaaatgcacaaaaacatacaagaagcgctgatacctgtaaggttatgttcatagaagaaagggtttctgcaagaacatgaagtgtccctacaaaatcaatgttagatgtggacgatggggcccatttgcaagctttgaacaatttgcaaagctcatcaatgagagtgggaagatttgttagatagaatagtgtgaggcattagggaag

SEQ ID NO: 3703 - DNA, 490 bp, Zea mays
  Clone ID: MRT4577_103382C.1
cattgggtacctcgaggccggccgggactatagctccccagctgctatatgcagaccagcatgcgcgtcacactcctaagctatgctatcacgtatgcaagggagccaggatgagctcagagctcccagtccagcgccgacgccaccaccgcagctgctcgctggccaccatgagcaaggagaagcaccaccgacactggatcctccggtgctgctgccgatccatcgcgcccatggatcatagacgcatcgcgctgtgcgctgattcgtcgcgccatgtccctccacgtagaagatctctgtagaacacctgaacccccacttgaagcccggagtgtccccgctctcccatatcaccaccctaaccgacgctttctattgtctgcaccagatgcatggccgacacctggctcccccagataatcgagatagccatcaaagacaatgacatcgtaaaacacgtcccctactacagtgcacgagggtgcat

SEQ ID NO: 3704 - DNA, 1242 bp, Zea mays
  unsure (1)..(1242): unsure at all n locations
  Clone ID: MRT4577_103383C.1
cctcgaggccggccgggcccttttttctctcaacgacccttcccttaccttcctatcccccatttcctcaaggaccccgcccgcgatttcactccttctctcccccgcgcgcgcggcctccccgtgcccgtgcgtgcgccaacaccgcgcagccacgccacgcccgtcgaaagccccaagcacccggccagcacgcgcagtaggccgctgaggcacagagccggcggccggcgcctcggccatgcggcgatcagagtgggaggaccggtgcaagcggcacccggagcaccggacgtccaagggcgtgtgcccctactgcctccgcgaccgcctcgcgcacctctccgcgtcctcctcggcgaccaccaccacgcgcgcgtcctcgtcctcggcgcccacgtccccgtgctcctccggcggctcgtccccgccgccccagtaccgcgccgcgctctccgcggacgtcagctccgtccacgtcgtcgttgccgggtcctccttcgccgacgtcgccgccttctcccagccgctcatgccgacctccgccaacaagaagccgccgcccgcgagccaggacgagccggccagggggaagggcgaggcgaagaggaggaagagcggcaagaagaagaagatcgggaggttcctgtccaggctcgtcggcgcggagaggcggcggcacaccggggacggggacggcgacggcgacggcgccgagctcttccactccaaaaccatgaaggagaagacggcgtccaagtgggtgttcttctgaatcccctcgtcagatcagatgccagcaccatgctgcacacacacgcgcgcttgagggccggtttcctcgatcggtcggtatggagttttttcccccccacttcaagtactcctgtgcttcaatccgctgcagttagttagcatggtttctctttccgactgtgtatgtacacgagacaagccaaaactatggatcattttgagttatttagcaaagttttggcttgtctcgtagatagaagatagtcggaaagagataccaaggattattctgaactatttgggattttttttaaatgttatttgagaaatattgtacgcttatattgtaatattagaagaagtgaaaaaaaaagaaaacagctacgaagtgtatattgtgtggctgctagttctatttccagtatccaccagtgtttagtttgtattttgcaaactactaatagacaaagaaagaaagaacgagtn

SEQ ID NO: 3705 - DNA, 156 bp, Zea mays
  Clone ID: MRT4577_103384C.1
ctcctctcagacgttagggatccaccatccaggggagaagtaacagggcagccccacatggcacagaggacgagaaaaaggcgacggaaagcccgagaaacaaaccatgacaacaaacagaaaggcacgggaccccggccgagcacaagaccgcac

SEQ ID NO: 3706 - DNA, 598 bp, Zea mays
  Clone ID: MRT4577_103385C.1
cccgcccgcgagccagaacgaaccggccaggggaaagggcgagccgaaaaggaggaaaagcgggaaaaagaagaagatcgggaggttcctgtccaggctcgttggcgcgaaaagcctgcggcacaccggggacggcggcggcgacggcgacggcgccaagcttttccactccagaaccattaaggagaagacggcgtccaaatgggtgtttttttgaatcccctcgtcagatcaaatgccagccccatgctgcacacacacgcgcgcttgagggccggtttcctcgatcggtcggtatggagttttttcccccccacttcaagtactcctgtgcttcaatccgctgcagttagttagcatggtttctctttccgactgtgtacacgagacaagccaaaactatggatcattataaggttatttgagaaatattgtatggcttatttgtaaaattagaagaaggaaaaaaaaagaacagctacgaagtgtatattgtgtggatggtagttctatttccagtatccaacagtgtttagtttgtacatatggcttgtgtgccatggtaatttctttggattggcgacgaaccctttttttc

SEQ ID NO: 3707 - DNA, 457 bp, Zea mays
  Clone ID: MRT4577_103386C.1
ggagaaaaatttttttggttttttttcctcccttaaaaaggaaaaatcccggggggaacctggcccacctaaaaacctcgtttggggtttcccgacccttaaataccccctaaaaaacctctttttttaacgcaatggttttaattgttggggcaataaatttcgggcatggggaaaggagtcccttggaaaatcaggtcggcctttttttagaggcccatctcatttcattggtggggaaccggaatacctgcatgagggcccattttggggttcaaaacgtggggtagtaaaactttgaccccagggggaatctggggggccgcgccccggaaggaagggaggggtttttgatttcttgggggacatcgggggccctggcctaacttgggtggagcgaaaattttcttcctgggtggcaaaagcaactttaggggggccccgggggtttcctccg

SEQ ID NO: 3708 - DNA, 544 bp, Zea mays
  Clone ID: MRT4577_103387C.1
ggccgcttttttttttttttttttgctctgttttttttttttttttttttttttttttttttgggtttttttttttttttcctttttttttttgttaaaaaaaaacattcacccccacggaagcctggagctccctccccgggcagaccaacatgggggccctctcaacaagcgggagctccccgaaagggggggggcggcccaaaaaacctcccccaaaagttttcattaacagcaccccaggcccccccaacgggaccccctaaaaaaatccctctcctaactcaccatcatggctcaccggacaggggcccccccaccggtgggcccagaccaaaaaaaggccgaggccgggccacccccccgggctaagaagcctccaaaggtcctccaagacgctacccgagctgggggggctcactcacccaaaccttttattaaccggccggccttggtacatccctctatgggcagggaaggtgatgcaccctccccaacagcaaagacgctcaaagtgcccccctgttttccccttcaaaagtta

SEQ ID NO: 3709 - DNA, 379 bp, Zea mays
  Clone ID: MRT4577_103388C.1
tttttttggggtggtttttataatctcaactttagctgtccataaaaacctgaaacttttgtacataatacccctgcaattctaggggagaactacgttgcatactagcacctacagattctatcttccgaaagatcgtgtgtgtgtgtatgttcgttgaatagcaatttgtgcatacgcacggtttcatcgatttcagatcgtcgccttccaggctccaactacctaagtcagatcagcacaaacaaaaaacgtgtcttgaagaagaacgccgccggcccgtcttacaccggcgacatggaggacggccgtgacaaggacggcccttcggaggtgtagctcctgccgcccatggacccgtcgagtcgcccctcgtgcc

SEQ ID NO: 3710 - DNA, 479 bp, Zea mays
  Clone ID: MRT4577_103389C.1
gattaccagtgcaccacagggtagctcactaggccatgtagcgggctatgactcatatggccagggagctcgtagtgcttgctctggttttcgcgatcgccgcagaggcgcatggcgccggggagtgcggaagagcctccgcccacagggtggctctaaggatggcgccatgcctgtcagctagccagacgacccgcactccaccgccgaccagcagatgctgctcctggtgcgcgcaccatcgggcatatccccagctgtgcatgtagcgccgtcctgtctgtctcggagactcgctcagggtactggcagggaatcaatgcccagatgtatagccttaccatccccaagcgctacaacatggtcgaccgagcgcgaggctacaagagcagagatattacacgctgaagtatctgatgaagacgtcattaacatgaccgtgcgagtaaacctgcatgatctatatgccatctatgcca

SEQ ID NO: 3711 - DNA, 425 bp, Zea mays
  Clone ID: MRT4577_10338C.1
ggggcaacaaaaaaggggtttgaaatttcagggggggccaaaagcggggggggcagcccccgcccagcatggggccgggaaaaaaaagccgcaggttacaaatcctttttttacagggccgggggcataccccaaccggggcccaaacacttttgtccaggggggcactgtttgttcagggttatccgggggggattattctgccactatgagcaggcctttcctccaaaaagtttcacatgggggggaaatgctactttaaaatcatcatctccaggtttggggggaaaaggaaaaaagtttttttttgccccccacaaaaggggctaaaaaaataatttacccctttttgggcccccaagagaaaatgggggcaaccctgggggggttaattatccttaacaaggtccgggggggctcaaacc

SEQ ID NO: 3712 - DNA, 390 bp, Zea mays
  Clone ID: MRT4577_103390C.1
attcggggagaaaattgtacacccattatttatagacctcccttccccaaaaaacacccgcttggtagaggaaaacctagggaaaaacctttccaacaggggcgcacttgagttttgaaaaaccttacaatgacaaaagcgggagcgaaaagaaactccctaaaaagacgggggcccaaccgttccacaatttgggaatttttggggggataaagagggttacccgtaggaaaaattttatttggaatcagaaggttcccgaggggaaacaaaagagtgggcctccacattggaggaggggggctctcacaccgtggagatctgcctcagggggcccatggcccagcccgggggcttgaccccccactccccggggcccttgtgggggtt

SEQ ID NO: 3713 - DNA, 448 bp, Zea mays
  Clone ID: MRT4577_103391C.1
tttctcacgagcccaaatcatgggaccaaccggttttcaacgaggagctgtttttcccgtcgcatcctggttatgaaggccttcatgcgtccaagagaaccatggatatgtacctcttcatgaacagcaaggtcctcttcaagacggtgaggaaagatgctaatctgcggacgttgaagccggtgatcgtgcatttgaactcccatcctgataagtcggatcgcatgaaagccgtgattgaattttatgttgacgggaaacaaaatgcccttgaacgcttccctgatggatcagaatgatagacaccagcttttgtaggacaggaaaaaaaatgccaacttctagtttctagtcgtctcgaaagtaagcacgggttgacttcttacataatgcattgtcgttattaaaacccaaaaaaaaaaaaaataaaaaaaaaaaaacaaaaccc

SEQ ID NO: 3714 - DNA, 838 bp, Zea mays
  Clone ID: MRT4577_103392C.1
cggccgcgtgggtctagtaccaataaaaccttctaacttgtttaagttaaaagctatgtaaatggttcttgatccatacttcttatagacctctctcaaatcgccaggagctaaatacacctaacgttcaccacattagactctctaaacttatatagatcaagcatcaaggtactagttcataccagtttgtaaaatgttgcgcctgctccagattttttcatgctcatgcaacggtaaagcatggccgcaatacaattgcgttgctctcggatgacagtggctcaatcttttcagagcatgatcttaaagctaacctgctttggaatgttttcaaatgtcgcttgggatcttctgattttgtggaaaatgtctttgatctccctagcttgctgctcttccacagtgacttgcattggttagatgagcctttttcaaagcaagaaatgtatagtattgttgcggcccttccttctgacaaatccccgggacctgatgggtttaataccaactttatcaaaaaatgttggccgattatttctcaggacttctatgacttatgtgaccaattttaccatggggatgtttgtcttcgaagcatcaatggttcttatattgtcctgattccgaagaaggataatgctagtttagtgggtgatttccgaccaatttcgcttctgaataatagtatgaaaatcatcactaagctgctggccaatcggttacagacagtgatgacttcccttgttcacaaaaatcaatatggcttcatcaaaggaagaaccattcaggactgcttggcctgggcatttgaatatattcatctttgtcatatttc

SEQ ID NO: 3715 - DNA, 582 bp, Zea mays
  Clone ID: MRT4577_103393C.1
gccggccggtccgggcccccgagccgcgaccccgggcatgtttccccatggacggggcatccgaccgcgacgacctcccgccgccaccgcgacgaatctctggcctcccactgccgccgcgacgtccagctttgctctactccaaggtccagctctggcttgccgtcctccgcccgtactccacgctactggatctctagcttgctcgtacgggatctctacgggatctttgtactccacgctactggcttgagagggttttcttgaatggaatgaggttcaagcagactgctcccattcaaatagcgattggcatctcgccactggagatataccgtggtgaaaactgagaaggcagttcttgagtcggataatcataactttgaagcattatgacaaaagtctatttgaatagataccgtactagcaaacttgcccgtgctgaaagaagatgtgttataatcattcttttcagttgcatgtctattgctttgctatgagagttcagacgatgtaatgtacaaaatatgcactatgcagtttacatggtaactcgtaaaaaaaaaaaaaaaaaggccccta

SEQ ID NO: 3716 - DNA, 633 bp, Zea mays
  Clone ID: MRT4577_103394C.1
cctcgaggccggccgggcaccggtcacttttgtccgtcgaaccaaatcaccggcagctcgtgcgcggtcccgtcaaccgaccatgtctcgccgcgtctccatgcgggccttctcgccgcgggcgccgcgctcgccgtcctcgtcgcggcgctcgccgtcttcgtcgtccgcgacatcaagaggcggaagcggcggctcgcgctggccgaggagccctggaagctcaccgctttccagcccgtggacttcggcgaggcctccgtgctgcgcgggctcgccgacgagaacctcatcggcaagggcggcttggggcgcgcgtcacgtacaccagccggagcagcggagcagcggcgaagcggcgggcaccgtggccgtgaagcgcatctgggcccggggccggtcctgacactttaggggcctaagcgaaaatctatatagaggccctatataaaaggttgattttgctatttttccactatggtatataaaaaatccaagaaattggtgatttacacatttctttcaaaataatatgactagagactggtacaatattttatgaggtggaaaattatacctattatataatataactctacatttgctttgaaaaaaaaaaaaaaaaaagcgggc

SEQ ID NO: 3717 - DNA, 666 bp, Zea mays
  unsure (1)..(666): unsure at all n locations
  Clone ID: MRT4577_103395C.1
actttcggcacgaggcaccgctctcgtcctcgccgctcgccccaaggtaagcgagaccgatgctctggaaagctcccgaaagtcccggccgcgtggcaaaagcgaccacgccacgttcttttgctttgtttctcctcctcgtgccccaactttttcgggtggggggaccgccgttctgatttccgttttgcgtcgcttcccttgggtttgctaatcgcggtcgcagctgcggctcgccactttcgccattcccccgtgatccttgtcaccaaatcagccaaaactgtttgattaccgtcgggtgtgtcggtggagctgcggcaataaaaaaaaagggaggacctattcgcgtcctatatctgcaaagggaattgctggaaaagtttcgctgctgcctgctcttctttttctgctgagtacaagaaacagtctttgctcgcgtcgtgggttcttcccctgttcgattcaccgcgaggtctgcgacggaggttttgcgtgcctccgattgctgcatccgtngctgatcgagggtaccttgntggttgttgtagccctgcctttcttatctgattcttgnntgggtgctttccaatttccgacgtatagttgctgattgcaccgnttccttttcccttcctttttttctttgcatacttcattatataa

SEQ ID NO: 3718 - DNA, 230 bp, Zea mays
  Clone ID: MRT4577_103396C.1
ccgacgcgtggtcaatcgccgtgctattgtttgcgccttggactgactaggggtggaggtccctatacgagagacgggagcatcatttcgatggacgacaacggaagcgttcatacacccaacggcgaggccttcctttagtacctccttctgaacggacgaggggcccccgctgcggaagtgatagacctggtgcacacatacgtgccgcggagcaagcgcgggcaagg

SEQ ID NO: 3719 - DNA, 632 bp, Zea mays
  unsure (1)..(632): unsure at all n locations
  Clone ID: MRT4577_103397C.1
ctcggccgggagttgtttgcacctgtggcctctctctctctctctctctctctctctctctactccctctctcacacccgtcctgcagtcctgctcagcaaggaaggagatagggatcaccgccaactcgtttgtgcgtgcaactcggctcctgcttttccaagacccctgccgcagtctcacaatagaatcaccgccatttccgaatcccttccagagctcagctgccaagtgccggtcacagatgaagaggcaatccaagaggcccaccgccagccgtgactccccagaaacgggtacagtggacaagcagctggcgctcgcggagtccctaacggcgcggaagacggagcccgacgagctgggggagaagaagcggcgcctggcgccggaccaggtgcgcgcgctggagcgctgcttcgaggcggacaacaggctggacccggaccgcaaggcccgcgtcgcgcgcgacctcgcgctgaacccgcgccaggtcgccgtctggttccagaaccgccgcgcgcgctggaaggccaaggccctccaccgcgacttcgcggcgctgcgcgcgcgccacgacgcgctccgncgngacaaggacgccctcgccgccgagataagggagctgaggc

SEQ ID NO: 3720 - DNA, 405 bp, Zea mays
  Clone ID: MRT4577_103398C.1
attcggctcgagctccaccggtggtgcttgggtaggaagcagctcgcaccggggcggctattcatgccgatttttgctcacctacaccttgagaagacgccgagccactcggggatgcgccgactgggggtgtgacacggcccggggatttctatgaccatggggtggcgacgcgcgtcggtcgtgtcctccgccgacagagccagggcctgtttaacggagcacgagcagacgttctgcaaccgctcttgctgtgcgtccatgaccgtggtgaccttcaacggcgggatgctctcggcgtccagctacgaggccctactggcccaccgtggtccgcgtcagggacctgcaggtgctgtccacgcacggcgtgaatggcatgccccccaccatttgcgcccaggg

SEQ ID NO: 3721 - DNA, 423 bp, Zea mays
  Clone ID: MRT4577_103399C.1
attgattacaatgtttcctttcccttacaaactccatttcaggtgacaataattttggggatgaccgactattatatgcacatggccagctttggctccagcaacaccacattatggggcgtgcggtggggtgagttcaccttatatagcacgcatctgtcttttcccccactgagaagcagttcagctgaccttatgtttccaatgacaacagctaccttccatatgttggctgggttacaattatcatgactgagaaaccatttattaaggtatgctcattcttgtctaaatattgattggcttgttcgtaatgaaacactgtcaaaacaagagccacacaaaccaatatcagtgacaaacacaatgaagagcatagtcccattggtctgaaaatatttctgtcattatgtggatgaaact

SEQ ID NO: 3722 - DNA, 305 bp, Zea mays
  Clone ID: MRT4577_10339C.1
acaccccctgcttcctatccctatcttcatcttcctcctaggtcttccatcactccatcagtagtactgtagtaataggtctagctagactcttatcaatcaatctatcgcttgactcagtcaatctatctatctctctgtctgtgaaaaattaatccatcctctctctctctctctctcttttagttttttcgggcaagttagtagtagtagtagcaatagcgaatccattcaatcatgtgatgtacttgttcagctgtgtaatgtggtataatgccgttatgcaatgcaatgtttacctgact

SEQ ID NO: 3723 - DNA, 203 bp, Zea mays
  Clone ID: MRT4577_1033C.1
catcctatcttgaaatatttcatctcatctcaatctgatctagatcccacctaatctaacatttaaccttcataatgctttccacattaaattcattataccataatactattaacatatcttaccctaaataaatacctttttactaacccagtccataaacatctatccaaacctaacatcatttgtcatctttatctcat

SEQ ID NO: 3724 - DNA, 286 bp, Zea mays
  unsure (1)..(286): unsure at all n locations
  Clone ID: MRT4577_103400C.1
tcttttttattaaacacactcctacncaatacgtgcggctgaattaaaagacgtgggggggtccacagagtctaactacctctgcatctacttcgacgaccgtaccatacgcatatgggacaatcagcccgtactcaccgttggcgcccaggcagtcgtcgttttcaacgcaaactgttacattcgcgtgctcaaggggctcaccaacttcgactatagcgctaacttcaaccctcataccatctcgcagatcgctttcggaggattttattgttccgtgcgcata

SEQ ID NO: 3725 - DNA, 389 bp, Zea mays
  unsure (1)..(389): unsure at all n locations
  Clone ID: MRT4577_103401C.1
actcatttctttctacaatcccaaattctttttggccatagccacnccatccccgaagattttttttaaattaacatccaccccctcctccnncncatctnaaccccatattaaacccataccaatacctccacctctatcacaatatctacctcctccattccccccactccaatccatcatcaacaatcatctctcacacttccccacattctcaccacctaaactntctacaaatcattccaaaatctcttncactactaaccctctcatataacttacttcaacttacaccatccttacacaccacactcaactctcttctatattactctataataaatcttantcaaaacttactctatcaaaaaaaaacccactccttcttc

SEQ ID NO: 3726 - DNA, 730 bp, Zea mays
  Clone ID: MRT4577_103402C.1
ccggccgggacttccccaccctcaactcttcttttcccctctccctcccctcgccgtcgctgtcgtcgccgtccgtgctagccatggatctaggcgctcccgcccgacggcgcctaccgatccgcctcttgctggtgtcgctcaccgtcctcgtggtttgtgcaattctgcgtcccctggtgtaaacactgcaagaaccttggaacactatgggaggacctgggaaaggttatggaaggtgcggatgaaattgagattgggcaagttgactgtggtgtcagcaaaccagtatgctcaaaggtcgatatacactcctacccaacattcaaggtgttttatgaaggcgaagaagtagtaaaatataaaggacctagggatgtggaatcgctgaagaacttcgtgttgaatgaagctgagaaagcaggcgaggcaaagcttgaagctgattgaggcaggggagtttcagcaagcatgtggcgagtggcgtagacaaggaacaatgctttgcaacattgtcttctatcctgtcatttacaaagccagtttacaggaaagaaatgaccttatgagctcgtatcagagtattcctcttccaaagtaactccgaatcagttcatagaagctgtactccattccatagtttttatcacattgacaaactctccgaatcagttaatagaagctgtactccattccacaaaaaaataaaaaaaaaaaaaaaaaagcggcc

SEQ ID NO: 3727 - DNA, 550 bp, Zea mays
  Clone ID: MRT4577_103403C.1
cctcgaggccggccgggccggtgtgctccctgctttgctcacactacagaggccttcctcttgtgaccgtgctagtgctgtacttgaacgggatctcctccatattacagatcaggatgtataaacctcccacgtgtatcaagacatgtcctactacgatcatgtgcacaagcgccatgatgagaaagcctgcctatatgcatgcctgatcactgcatgctgctgcttctgctgcttcgagacctgctgatgctgcctcaaagccatctgctgctgctgctagttctgcttgcatggcatgggctccatcatcatgaacatgtggtcatgacaccacacccaccgaccgaatacaatgcgtgtacttatatgcacccacgccagaaatgcattagcgactgtccgatgcgaccttgagcgtgagagcacgcgcgcatcttcatttgcactggaacacgcttatatactttgcgcacggctgtaaatctgctgtatgtatctctgacagatgaactctattattgtgatctgaccccaccgaaaaccggtc

SEQ ID NO: 3728 - DNA, 364 bp, Zea mays
  Clone ID: MRT4577_103404C.1
agccttccgggccaggtaagttccccggcaagggccgggctgctttggccacaatgaaccaccgattggggcccttcttgttggtcgaagccacactgttggcgcaggccggggcctgcccttacggccggacgccgaagccgcggccgcttccgccgccgtggtggtggtcaacgcggtgccttccccggccttattggcggtggcggtcaacgcggccggttaagtgcccggtgaccacgctaaagctgttcgggtgcgtggccgcgctaaacggcttggggcacgccgtaatgggaaccaaggccagcgacacttgttgccggttgttttccgggttggccgacctggacgccgggctttg

SEQ ID NO: 3729 - DNA, 513 bp, Zea mays
  unsure (1)..(513): unsure at all n locations
  Clone ID: MRT4577_103405C.1
gcgcgctccagtgccgaagtcatcaccctcaccgaagagaccttctccgacaagataaaggagaaggacacggtgtggtttgtgcaattctgcgtcccctggtgtaaacactgcaagaaccttggaacactatgggaggacctgggaaaggttatggaaggtgcggatgaaattgagattgggcaagttgactgtggtgtcagcaaaccagtatgctcaaaggtcgatatacactcctacccaacattcaaggtgttttatgaaggcgaagaagtagtaaaatataaaggtatacattgtttcaccagttcaccatactttttaggcgaatgttccaactgaaaaccatgtttgttcttctagttttggcccacacccccttatgagcatctatggattatactcggagtgggagtggggtctcaaagtgtaaagtaaatttaatttaaattcgaatttgatatttaaaccatttgtatatcagacaagtgctcacttttgtgtacangagga

SEQ ID NO: 3730 - DNA, 225 bp, Zea mays
  Clone ID: MRT4577_103406C.1
gaaaaaagttggagcttcccccggggggggcggcctttcttttttttttttttcaagatagattgagtataatccatttaacacatgactggctactcatacaatcatgcgtatacaagttacaaaaactcacgtttagcaatgatgggaagaccgacttataagatcttattaattgcaacgtccgaacatggatacatagatatgcctattttaccaaatgct

SEQ ID NO: 3731 - DNA, 1019 bp, Zea mays
  Clone ID: MRT4577_103407C.1
cccacgcttccgcccacgcgtccgcccacgcgtccgcccacgcgtccgcacgggcagccccgtcgtggacaacggcatccagtacaccaacgtgttcgacgccaacttcgacacgctcgtgtccgcgctggccgcggcgggcgtcggcggcctccccgtcgtggtcggcgaggtcgggtggccgaccgacgccgacaagcacgccacggccgcgttcgcgcagaagttctacgcgggcctgctgcggaagctggcggccagcgccggcacgccgctgcgcccgggccagtacatcgaggtctacctgttcagcctcatcgacgaggacgccaagagcgtggcgccgggcaacttcgagcgccactggggcatcatgcgctacgacggccagcccaagtacgccatggacctgtctgggcagggccggaacacggcgctcgtggcggcgcggggggtccagtacctgccccgccagtggtgcgtcgtcaaccccaacgcgcaggacacgagcaagatcggcgacagcgtcacctacgcctgcaccttctccgactgcacctcgctcggctacggctcctcgtgcaacggcctggacgccgccggcaacgcgtcctacgccttcaacatgtacttccaggtgcagaaccaggtggagggcagctgctacttccagggcctcgccgtgcccacggcgcagaacccgtccacggacgcctgcaacttcaccatacagatcactccgtcggcagcggggagacgacgcgccgccgccgcgacagctctgctcctcgtggttcttcttactgccgtgcatgtcgcgccatgactgagcccgtgactcggctcttgttgttaccaattattaggacttagaaaagaaagacccttttctaaattttcggaagacatcatgggaatttaggagcccgatgtttatggaaatttagaagcccgacgctgtaaaaaaacaaacaatccggaatgaaatgatttttttgttagtgtttggagaaggtcat

SEQ ID NO: 3732 - DNA, 221 bp, Zea mays
  Clone ID: MRT4577_103408C.1
cggacacgtactccgacacaacagccacatccactgatactcctagttaagaccagctggtgcagcagattcattctgcttgagtcacatgtctcttactactactatctcaagctcacttttcactagcataactaactttctcaaccagacctcaccagacacaattcatcatgatgcattatgaataccaatactctttgagagcactacgaagacct

SEQ ID NO: 3733 - DNA, 1400 bp, Zea mays
  Clone ID: MRT4577_103409C.1
cctcgaggccggccgggagacttgatcgccatcagtgtctactcttctaatgtttgaacgcagagcatcttccgcgaaccagtaaaaaaatgtggtttcatctcaattgtggacgagtttacatgcaacatttcgattcacataaagtctagcgtaccaggacgtcttgaatttcttccaaaatattccaaaatgggctatcagcatccgaaggcacgatgaatttgggagctggaactacagttcgtcaccctgttcattcagaaaagtgcggtggtttctcgtgaacgagcaacccagaaaaagtacacctgtcgcgtaagcgtcctcaggcagcagctccccggtcgcggtctctgtctctctgaagggaaagctctgtttccccttcccggtgccggagtcggggaaggtccgaaggtcaccgcgggcgcggggcgatggacagcaacaacctcctggcggcgtggccggtcctgggaccgggcgtcgccggcgccgtattcggcgcaggctggtggttctgggtcgacgccgtcgtctgcagcgccgccgccgtgccattcctccactacctcccagggttcttcgcctcgttcgccgcgctcatgttcaactgcgtcaaccgggaggacatcggcgatggctactactcaccgtacgacgactccgagtggagggtgaagctctggcttttcatttcgtacgtggtgtcttttgtttcgctggccggggcagtgggtttcttggttcaagatgcgcttacggatacggggccatctgcgtggactggcactgctggcatcctgcagtgcgtgtttgtgttagtgagtgggttgatctactggacgtgccactctgaagattgacttaagaagtataggtatatatggccaaggaggaggaggatggaggctgcttttctcagaagcgattgcttttccgtagtacgtttctggaggcacctttggaccgtgctttccgaaacgggtggaataaagagccattttctagttgtttcaagagagatgtagataagttgtactactattttacacgtgtttatagtcgtgtatcatgttgcttaaaactactttgtgaggtgttgttttggagcaaaaaacttataggggtgctaagtactcgctctgtttctttttagctgtcgccggatagttcaattttgcactatacagcgacaactaaaatgaaatgaatggagtagtcaggaaacatcgttacatttttccctgttggcgaatttctcgtgcaaggtttgacaactctagtctgctcctgtacctcccgaggaagtttggtgttgccaacattttgtagacgcctagtcatgttgtgtctggttggttggaggcctgccaggcaacaacacatcttggccc

SEQ ID NO: 3734 - DNA, 241 bp, Zea mays
  Clone ID: MRT4577_10340C.1
aaagttcaggcttgctcttatttggcccaactgttttcacaaggtttgaccctcctgagggaactgcccaaatgaagtctacggattgactgacaccatgggaaatgcccccttgggtacttaccaggagactggaaaggtaacaaagggaatccggccccgtaaataaccttgggggcccagcaatggtggggtattgttgggccactgcatacccgatgataatcaccacccctggggg

SEQ ID NO: 3735 - DNA, 1150 bp, Zea mays
  Clone ID: MRT4577_103410C.1
cattgggtgccaagccctcgcggtcgacttcacttccccaccccctcttcttctcgggccctctccctcccctcgccgtcgctgtcgtcgccgtccgtgctagccatggatctaggcgctcccgcccgacggcgcctaccgatccgcctcttgctggtgtcgctcaccgtcctcgtggtcctcaccgcgcgctccagtgccgaagtcatcaccctcaccgaagagaccttctccgacaagataaaggagaaggacacggtgtggtttgtgcaattctgcgtcccctggtgtaaacactgcaagaaccttggaacactatgggaggacctgggaaaggttatggaaggtgcggatgaaattgagattgggcaagttgactgtggtgtcagcaaaccagtatgctcaaaggtcgatatacactcctacccaacattcaaggtgttttatgaaggcgaagaagtagtaaaatataaaggacctagggatgtggaatcgctgaagaacttcgtgttgaatgaagctgagaaagcaggcgaggcaaagcttgaagctgattgaggcaggggagtttcagcaagcatgtggcgagtggcgtagacaaggaacaatgctttgcaacattgtcttctatcctgtcatttacaaagccaatttacaggaaagaaatgaccttatgagctcgtatcagagtattcctcttcgaaagtaactccgaatcagttcatagaagctgtactccattccatagtttttatcacattgacaaactctccgaatcagttaatagaagctgtactccattccacacattgacaaactgaagtaacgattggaacgcaaccatacaaaggcctgtttatgtcacttgcgcagttgcgcgtcttgcaacgatacaaaaaaaaaaaaaaaaaaaaaaaaaaaaaaaaaaaaagctaatacattgtttcaccagttcaccatactttttaggcgaatgtttcaactgaaaaccatgtgtgttcttctagttttggcccacacccccttatgagcatctatggattaaactcgtagtaggagtggggtctcatagtgtaaagtaaatttaattttaatggggctttgatatttaaaccataagtagaccagacaagtgctcgcttttgtgaac

SEQ ID NO: 3736 - DNA, 660 bp, Zea mays
  Clone ID: MRT4577_103411C.1
attggtacctcgaggcggccgggattcccgtctagccgctcttgcatcctcaagctgagcccttgagaggtacaggacaccaggggagtgagcgatgtggtgcactatgctacacagacggagcgacccgctagggctaactttcctgcgggcattcgaggagatcacggcgaacaccccaccccagtgctcttcctccccctggctggactacatctacctattcgttgctccccttatcactgtgtcccaatgcacaggctagtctgcaggctcgagaatgctatgcactgagagctagtcctccttcacctgtgcaacactatatcagttctgacgtgcatgcgtgccattgagtgcgtaccttacagccattattacagattcatgatatgtaaaaatatactactagaacagatccaattacctcccagcacatcgcctttcttcctggaatgtacaacctccatactgctccatggattgccactctgcctcactcaatacatcatcagttttcggctctctggattacaaaccagaagagcggccctcactcgccatataatcaccccatgagccaccgataattgcctcctcgcaacgatcgagactatatgatgatacccgtgagaaaatgctatacaatgctcctcctat

SEQ ID NO: 3737 - DNA, 853 bp, Zea mays
  Clone ID: MRT4577_103412C.1
cgagggcccggcccggggactttactttccccaccctcaactcttcttttcccctctccctcccctcgccgtcgctgtcgtcgccgtccgtgctagccatggatctaggcgctcccgctcgacggcgcttaccgatccgcctcttgctggtgtcgctcgccgtcctcatggtcctcaccgcgcgttccagtgccgaagtcatcaccctcaccgaagagaccttctccgacaagataaaggagaaggacacggtgtggtttgtgcagttctgcgtcccctggtgtaaacactgcaagaaccttggaacactatgggaggacctgggaaaggttatggaaggtgcggatgaaattgagattgggcaagttgactgtggtgtcagcaaaccagtatgctcaaaggtcgatatacattcctacccaacattcaaggtgttttatgaaggcgaagaagtagtaaaatataaaggacttagggatgtggaatcgctgaagaacttcgtgttgaatgaagctgagaaagcaggtgaggcaaagcttcaagctgattgaggcaggggagtttcagcaagcatgtggcgtagacaaggaacaatgctttgcaacattgtcttctatcctgtcatttacaaagccaatttagggcttgttcggttagctctcaatccatgtggattgagtgggattgaatgggtttgaaacccaaacaagtcaaacttctttttaatttttttccaattacattcaatccatgtgtattgggaataaccgaacaagccttacaggaaagaaatgaccttatgaccccgtatcagagtattcctcttcgaaagtaactccgaatcagttcatgg

SEQ ID NO: 3738 - DNA, 330 bp, Zea mays
  Clone ID: MRT4577_103413C.1
cggaatagacctacccttccggctatccttaaggtctgcaacgtcccgtttttttccttttttttaaggggctccaacttttcttcaacaattaacccttccttaacaagggcaatggccaacaccatgttaaaggcaatttcctggtccgacaccaaggggggttcttcccaaagggtcgcgaacttcgttaccatttgccccaaccagtgaaagtgaagcgttgcattgaaatagcactttgaaactcctaaccctccaaagggttttggaatcaaccccaaaatgactaactttcggggaaaataataatatttttttattattttt

SEQ ID NO: 3739 - DNA, 432 bp, Zea mays
  Clone ID: MRT4577_103414C.1
ggactatgactcgagcatgccatgctgtggcgatgacatatacaaatcgacgcacaagattgtcatatgtgacatcgagccacctgcattgatccgagagaactgtgggtgcgcattatggttgacgccacctgaatagatgtgtggcatgatggtcgatggcagtcaatgattgactgaacctgagaaaggttattgggctacaatctatgcagagctagatgtacttatgcccaatggaatgaagtgaatggcttcgtcgctagcaccttgttggcaaatgtacgaagatgttgatcatatacaccatggcaaatgtaacacgatacggtaagtgcttatggcatgcctggactaacctagtgtcgatccacctatagtgaagtagatgtgcaccgcatagcgctactgctttgcttattgactgcattc

SEQ ID NO: 3740 - DNA, 409 bp, Zea mays
  Clone ID: MRT4577_103415C.1
actccccagatttctcgcaacctcgctagaacctacgtcgatcattatgttcatgcgctcactgctcctaacgctcaccctcccgatcgtccgacgccacttgtagcgacgtcaccgtgtaggactttgcgattatccatgaagctactcacctcatcgcgcctgcgtacgacaaccgatctgtacagctgtggccatacccaatgcaatatgatgtagtcattgccgtgtcggaatactcgatcggctgactcgtatccgctaaggaacctgtcgttcatcgagaccactgccaacggtgtggagtatatttttttatacaacctcatccacgagcactgtgtctacctatcctaccgatctaatccgcgaggacgacgacgacctcagccgggcgtacttcgtctcc

SEQ ID NO: 3741 - DNA, 483 bp, Zea mays
  Clone ID: MRT4577_103416C.1
ccaagctgagagagaaacggaaacaaagacagagggagaggagacttgcagaggagaggagacgggaggagcaagttgcggaggaggcagcggcaagggaggaggggtcgccggaagggggacatgctccctccacatctcacatctcgcagcttgaactgagagcaagagtagaagcccatgagatgagacgcaagcaaaatatgcatgaaaatggcacaatcatgattcagtttggtcagcaagtgcctaactgcgagtcctcagctagcgattctcctcaagaggtgtccggaatgagcgaaggaagctttaatgagcagaatgatcaatctggtaaccgcgatggctacacgaagagtgatgaaggcaagatgacgtcagctttgtctctgggcaattcagaaacagcatacacaccgccaaaacctgaccgcactcatccctttgccatatcatacccatatgctgatccttactatg

SEQ ID NO: 3742 - DNA, 134 bp, Zea mays
  Clone ID: MRT4577_103417C.1
cccaccagcatagcactagggggggggcaggagcctcatcaccgaccgctcttggcttgctagctccccgctcccaccgtagataaagctcgctaggaggctgttacctcccccatggcctcgcccaatcattc

SEQ ID NO: 3743 - DNA, 588 bp, Zea mays
  Clone ID: MRT4577_103418C.1
cattgggtacctcgaggccggccggggtcccttgtgtacgcaattagaaaacgaatctccgcctcatgcggctccctcgaacttcatcacccaccctagacagtcgttactaaagcgcacagcctcccgtcatcacatggctcccgctcgctacagtgccgcaaggccttgttctgggccgccccttccggacgccatgcgctctagtcttctgcgctttccacggagttccgcaacaagtgcaatgtcgcgttacatcaccaatccgaggagccacctgcctcttgcatccgcacgggaactacaaggggccactgcaggcacaagtgatgcacatatagcgtcgtggctgctgatcgcacgcatatatgatcacgctcgagaaccggaacgggtccaaatggatccccttcatgcacccttcatactactgggttacgaagctgaaacttgagaatcgaccgtgaggagtctcctctgaccgcaagtgccctacacccgcgagcggcgacaacggctatgacgaagttaactggcgatcgagcttcactaccgctagcgtggtgtgtgccatccgccactgtactt

SEQ ID NO: 3744 - DNA, 327 bp, Zea mays
  Clone ID: MRT4577_103419C.1
tagcccagctagtagatcattggacacatatcgaaacagctctctagctagcgcgctcgtcgtctaacctggcttccggcatggcttccaagcagatcggagtcttgacctgcttcattgccatcaccgatctcgccttccgtccctgcacacccgtcgtagctaggtcctgcggacgacgcgatggctggcgccgcacctccacgtccccaccgaactcccgctcacgcagactgagagcaagcgccgtaccaggccaacaacgacccaccgcccttgtcgtgaatgtacccccccccgagatgtagcaacctgctgctgcccccg

SEQ ID NO: 3745 - DNA, 333 bp, Zea mays
  unsure (1)..(333): unsure at all n locations
  Clone ID: MRT4577_10341C.1
gcgacanggggnncaagaggcagggcaaacaggcctttttttcaatgacgttatcggattccccgnagcaagcacatgccatgnggggtggatacacgaggacgnnctgggggggggggggtacaaagccgactcanaaaangganagcaaagggacggggggggggggtgtgcccccagccagcaagctagcattnnaggnagggaaaatgggtnactcggagggacccaatcttcgnagntttacacactcgncatnttgaggctggggcccttntgctgcgggctcacgagtaggctggcaaagctcttgtggaaggagggcacgccttc

SEQ ID NO: 3746 - DNA, 332 bp, Zea mays
  Clone ID: MRT4577_103420C.1
aaaaaaaaaaaaaaaaaaaaaaaaaaaaaaaaaaaaaaaaaaaaaaaaaaaaggaaaaagggagaaaaaaaaagggggggggggccccctttttagggtcccaactttcggcccccctctttcgacgtcctattttttttttcgggccccctaattcttatttacctggggggggtttttcaccttgtttactgtggaaaccctttcgtttcccccctttttggctttcccgggcttccccctttttcccggtgtggtattatataaaagttccccccctttcgccttttccaacaagggcccaccctttatggcgaatgggcccccccctt

SEQ ID NO: 3747 - DNA, 302 bp, Zea mays
  Clone ID: MRT4577_103421C.1
ctccctccgctcgctccttccacggccgcgtggtgcggtgcagcaaggccacgcatcgggcctccgccacgctcatctccgccgcgcgccgcctcatcgccgccgcgctgctcgacgacccggccaaccgcttcttcgcgcagctaccccattcctgcgtctcgctacgcccttttcccgctctccaccgcgcgctcgccgccgaccccaatcaccgcagcttcatcgaggtcctcggcgccgcgcccacgctgcgcgaccggtacagcgcgtgcggcgacggcgccatggtccccgaggtt

SEQ ID NO: 3748 - DNA, 285 bp, Zea mays
  Clone ID: MRT4577_103422C.1
cccacgcgttcgaggatgaggatggcagttcttacgttttatgagatgagatggtgctgtcaacttacgtaaaggcaatacgatgcatagaatagtgcccaagttgtgttatgtatttcgttcattccttgatcttgcatcaaagattcaaggctaagtcagcctgctgcaaaggttttggttgaatccttgtatactgccagataaagtgttacgatggtgcaatcttggattagcctttggcctacgaatacatcacgaacgggcaggcgatgctgaagatcc

SEQ ID NO: 3749 - DNA, 591 bp, Zea mays
  unsure (1)..(591): unsure at all n locations
  Clone ID: MRT4577_103423C.1
cacttgcactgggcaaattgaacttgngaagcagattcattcattaagcataaaaaaggattcgaatctgatatgtatgttagtggtgtcttgatagatatgtattctaaatacggatgtcttgataaagctcgaaaaatctggaaatgcttgaaaaaagaatgtggtttcttggacctcaatgattgctggatatgtgcagcatgacttttgtgaagaggctcttgcaacattcaaagaaatgcaggactgtggagtttggccagataacataggactggctagtgctgcaagtgcttgtgctgggatcaaagcaatgcgccagggcctgcagattcatgctcgggtttatgtctctggttatgcagctgatatttcaatttggaacacgttggtaaacctgtatgcaagatgtggaagaagtgaagaagctttctctttgtttcgggaaattgaacacaaggatgagatcacatggaatggattgatatcaggttttggacaaagtcgtctttatgaacaagctctcatggtattcatgaagatgggtcaagcaggtgccaagtacaatgtgttcacatttatttccgc

SEQ ID NO: 3750 - DNA, 741 bp, Zea mays
  Clone ID: MRT4577_103424C.1
tcgaggccggccgggccgggtaccgtagcttatcgtagctattctcgtgtccctctcccagactcccaccaccacacaaactgccctcgcggcctcgccgccccgtcgcccctctcgatcacttctctcccgacactcactcggtcactcccgtgtcgtgtctagcgccgacggcgttgctaccggagccgggcatcggccacgatgcctacaatgcacgcgctccgcctatgcccgctgctctccaccatccgatccacaccaccgcgggccactgccgcagcccgccagggcgcgctcttcgtcgcccgctgctcctccgccgggacgccgtcagccgcccaggcgctcaaggtgaaagtgttccagcaggagaactaccttgctaattggattcaggctctattcaattccttgccccctgaagattatgtgggtgcaacccttgtacttgggggtgatggccggtactttaacaaggaggctgctcagatcatcattaagattgcagctggaaatggagttcagaagatcatagttggcaggaatggtctactgtcaacacctgctgtatctgctgtaattcgtaaaagaaaagccaatggcggctttatcatgagtgcaagccataatccaggtggaccagacaatgactggggtattaagtttaactacagcagtggacagccagcaccggagacgattactgatcaaatttatgggaacacactatcaatttct

SEQ ID NO: 3751 - DNA, 2411 bp, Zea mays
  Clone ID: MRT4577_103425C.1
ccctcgaggccggccgggacctgactcccaccacccacaaactgccctcgcggcctcgccgccccgtcgcccctctcgatcacttctctcccgacactcactcggtcactcccgtgtcgtgtctagcgccgacggcgttgctaccggagccggccagcggccacgatgcctacaatgcacgcgctccgcctatgcccgctgctctccaccatccgatccacaccaccgcgggccactgccgcagcccgccagggcgcgctcttcgtcgcccgctgctcctccgccgggacgccgtcagccgcccaggcgctcaagatcagttcgatcccgaccaagccagttgaggggcagaagactgggactagtggcctgaggaaaaaggtgaaagtgttccagcaggagaactaccttgctaattggattcaggctctattcaattccttgccccctgaagattatgtgggtgcaacccttgtacttgggggtgatggccggtactttaacaaggaggctgctcagatcatcattaagattgcagctggaaatggagttcagaagatcatagttggcaggaatggtctactgtcaacacctgctgtatctgctgtaattcgtaaaagaaaagccaatggcggctttatcatgagtgcaagccataatccaggtggaccagacaatgactggggtattaagtttaactacagcagtggacagccagcaccggagacgattactgatcaaatttatgggaacacactatcaatttctgaaataaaacagcaggacattcctgatactgatttgtcctctgttggagttgtaagctatggtgatttcgccatagaagtgatagatcctgtttcagattaccttgaactaatggagaatgtgtttgacttccaacttatcaaggatttgctttctcggcctgatttcaggttcatatttgatgcaatgcatgcaattactggtgcgtatgccggacccatttttgttgagaaacttggagctgatccggactgcatattaaatggggtgcctcttgaagattttggaaatggccatccagatccaaatctaacttacgctaaggagcttgtttttactatgtttggaacccatgcacctgactttggtgcagcaagtgatggtgatggtgatcggaacatgattcttgggaaaaggttctttattaccccatcagactctgttgcaataattgcagccaatgcacagacagcaattccttatttccagtttggtacaaaaggactcgcgagatcaatgccaaccagtggtgctcttgatcgtgttgccgagaaattgaatgttccattctttgaggttccaacaggctggaaattttttggcaacctaatggatgcaggaaaattgtctatttgtggagaggaaagttttgggactggatctgatcacatcagagagaaggatggcatctgggctgttctggcttggctttccatacttgcacaccggaacaaggataagaaggtcggagagagattagtgtcagttgaagatattgctatggagcactggaaaacctatggcaggaatttcttttctagatacgattatgaggcgtgtgaatcacacagtgcaaaccagatgatggatcaccttagagatgttatggcaaatagcaagcctggagagaaatacggaaattacaccctccaatttgctgatgatttcagctatactgatcctgtagacggtagtacggtatcaaaacaaggacttcgatttgttttcactgatggatctaggattatcttccggctttcgggaaccggatctgctggagctactatccgcctctacatagaacaatttgaatctgatatctcgaagcatagtctcgatgctcaaacagctttgaagcctttaatagacctggctttgtctgtttcgaagctcaaggacttcacaggaagagagaaacctactgtcataacataatatttagatgttgttgtcctcggccataccaactgagcagcatgggccaagaattgaactgatggaaaatatgtatcattaggacaaattccgccagaataagttgttcctcggaagtgttttgagcacctccagcatcttccaaatatatctccaataagatattagtgggataacatatggcagatgttatcaaataatgtaaatatagatcgaacacgagacatgttttacgtggagaactcttgtatgaaaaaaaaatcatggatgctaaaaaaaaaaaaaaaatgtagtcactatactagtatcgttataatatttagatgttgttgtcctcggccataccaactgagcagcatgggccaagaattgaactgatggaaaatatgtatcattaggacaaattccgccagaataagttgttcctc

SEQ ID NO: 3752 - DNA, 218 bp, Zea mays
  Clone ID: MRT4577_103426C.1
ggaaacaagcccccccaatacaggggcttttttagattccttgacaatcccaaacataagaggcggtccaattcaggtttgatcgacttaacagggttcaaatttagtttgaaaagcccaaagtaaacaaaaccccttccccagtccaagcctttaaaaaaagggtcgatgaggcccatcaccctgaagggtcttcggcaaatcaaataaaaagcttc

SEQ ID NO: 3753 - DNA, 342 bp, Zea mays
  Clone ID: MRT4577_103427C.1
atcggccgtagagcgagcagtatcccaagtccacccagtctctaatcacattactctcgaacgacaggttccttgcaccactatatccaggaccgacgaagtgatccagccgacagtcatggagacgaagaaggtgctatgggcactgctagtaccagccgtctcggtcacagtcgcgctgagctggctcgcctacgaggcaccatccgaggcgctcatcgtctcggccggcggtgcggctggctcctagcgatagcggagcgggctgcaacgtcgtgctatccaccagagcacttacaacttcatcactaactgctacgtggatatgacgaaggctctcta

SEQ ID NO: 3754 - DNA, 1328 bp, Zea mays
  Clone ID: MRT4577_103428C.1
cattgggtacctcgaggccggccggggcgcctgccctgccctcctgcagcgcccgtcgcctccctttccccttccctccctctccccgcgagccgccagaggcaatttctccctcgattcgaccccgattcgtccgcccgcgaccgggattccctccgccaagcgcggatctgaacgctgcgctccgtgtcgccgctcgaatccgccatgaaggggggcaaatccaatgcagcaggcaggagcttaggagaggagacgccgacggaagattgcggggcggacaccatgcagcggaagcttatggatttgccaggtcccagatggaagaagggcaaggactgcaagggctttgcagcactggcagcagccaatcccatgtccagcatagttgcggagctccaggcttcactgcgggactcggaagccgtggcgattctagccgcgcacgccagggacgcgatcctcgaggtcggcccacgccaagccgcgcttctgaacggcgctgccttcggcagggccgtggagggtgcaggtgcagagagccagtggttccagctgggccccgaggaagtgttcttcctttgccatgccctgaagtgcctcagggttgagtcgaataacaagacgcggattggtgcgcccgagctgtggggtctcttggcctccggctcagagcaattcccggagatgtacagggcgtatcaatacctcaggctgaagaactgggttgtaaggtcgggactgcagtacggggcagactttgttgcttaccgtcatcatccggcacttgtgcactcggagttcacggtggttgtggctccagaagggaaagcattcggcaccaggtgtgcccgcatggaggtctggtctgaagtactctgtgcgcttcgggcctctggaagtgtggccaagacgttacttgttcttaccatcagcaccaagagctgcgagctgggatccttggattgtttggagcagatgattgttcatgagaggacgatcacgagatggataccacagcagtgcagtgagcaacaagacaaaccatgtagagaagaaaccaacagggatggacaaagacaaaaatcttgcatagaagtatcaagcaacgaagaacaagagcatacaagtgggggtgtagtgtttagctattggcccgtagtgctaagctatacaattcttttcagtgtacttgtctacaagctgaaatcttaactgaagagcttcctatttctgtatgctcatgttgattagcgtgaataatgcaattctatggtacgaatttgttgtgattctcattgaagtttctacatatctttgataacatc

SEQ ID NO: 3755 - DNA, 216 bp, Zea mays
  Clone ID: MRT4577_103429C.1
ccataacgccacagctacacgtaaaccctccgcctcctcgcctccctcccttccatccaatcctcggaacgagcgcgcgggcgaggaggacccccgacggaggatggaggcggcggctagggttttacgcgggtcgctcttcctgatgtccacggcggcgggcgctcaaggcgtcggcagacgagattgagttcaaggtggctacggcggcgacgg

SEQ ID NO: 3756 - DNA, 410 bp, Zea mays
  Clone ID: MRT4577_10342C.1
cggagcagccttctcccttccaagaacacacaacgcgggggtggccttgtgcccggacggagaaggtgggagtgaacggttctaggcggagggggcgcctggtcaccagagcggcgcgggaactgtggctgagaggacattgtggcgagaaaagacccatacggggacctcgactacaggggaatgctatttgtgtagcaagagactacattgaggatgcattgcttctaaaggacgattgaggtaagcttgtcatcactggataggccatcaccatctgccaggagcgagatcccgccgggatgaggagaggcgaagctggcgctacgtgcggtgtggcgaccagtggtgccctaacgaccacggagaacgccgggggacagtcgaagggaggggcaaagagggggaga

SEQ ID NO: 3757 - DNA, 153 bp, Zea mays
  Clone ID: MRT4577_103430C.1
tgggacctcgagccggcggggtcagttcgacccgaaagcagacgactactaccatgcaccaccatttccaggcacgaaacaaggagcctccctgtcctctgcacctcggatcgtatctctcggacacggacacttctcccatgcgggctcgat

SEQ ID NO: 3758 - DNA, 411 bp, Zea mays
  unsure (1)..(411): unsure at all n locations
  Clone ID: MRT4577_103431C.1
accatgcacgccgcgtagctggcttcctctctgatcggccgccctcctntttttttttttttttttatttttggcaaactgtgcgccttaactaaaccggcatgcttttggctgagttgaaaccgtgttttttgtcctacttggaacgctcctggtgttgacaaaacgtttcccaaaaactctcagaggtctctgggtgtacagcttacctgcttaaataactaaaccctgtttggtttgatgcccatttaaattgccttaagggtatgctgctgctaccatagcttatggtgcaggtacattttttcattctcccacttcattttttgtatctacgtgtccttctttctgttgaactttgaaccctttgaaatgggctttggtccgtcgtcaactgtttgatgattttat

SEQ ID NO: 3759 - DNA, 181 bp, Zea mays
  unsure (1)..(181): unsure at all n locations
  Clone ID: MRT4577_103432C.1
tccgggcacgcgtccgcggacgcgtgggcggacgcgtgggtggtccttttagttgtaggcgagctggggaagacgcagcgtnacgtgtgttgcgcgcgaggggtcgtcgtactaccgacaaggacgagcggtataggcgcgtgcatggggctcacgaactttatcctcacagaggtggggg

SEQ ID NO: 3760 - DNA, 598 bp, Zea mays
  Clone ID: MRT4577_103433C.1
ttgggaccctcgaggccggccgggccgccgatttaagttcgtgcacgtacgcacgcaccgggacaccagcaaccccctgctgcgccactggccagtgcgcgcgtgatgcttgcttagctagacgccatggacttcctcgggccggctcttgaagccaaggcataagggtcggcgcagtccgtctccggaagaactcgcgcacaggcgcagccgtaatccataggcccccgacgccgccgtggtgggcaagaacggaagacaagagacgtctactttgacctcgacgacatcggtaacaccaccggacagtgggacctctacaggtctgacgcttcgtcgccgctacaacccggtacagagcaaggtcttccagacgctcgcgactccgtgcaccaagacatgactgctgatcaaggtcctgctgctgggcggccgatcacttctggcctacgtcagggcgtcaggggtcacccccacgtcctggcgatcaagaacggacctcacgagtcgccgcatccgggaccgcgcggtgagatctaagctcagctgctccatttgcatggactagtacctagctttgtactgctagcgccggccg

SEQ ID NO: 3761 - DNA, 391 bp, Zea mays
  Clone ID: MRT4577_103434C.1
ggattaagaaccaaattctgcaattttccaatactttctattttgctgttcattaattttatagcagtgatttcttgtgtttaaacaatctatttatactgttccattggctgtgttttccagagagatacttttatacctgttgataattccttactttttgttttacttttttttatatttcttaatcaaaattttttttttaattttttttaaattttttttaacaaattttattgaaataattttttcagtatattttttgtatatttttttcattatttttttttgttttattattttctcttatcatttattttttcataatatattttatactgtaattttttttttttgatatttatttttattattacttattttttataaa

SEQ ID NO: 3762 - DNA, 194 bp, Zea mays
  Clone ID: MRT4577_103435C.1
cggaaccggagattccccgggtctcgtattctccccattccgccgtgcttcccgtcttcaccaagagggggggccacgatggcgcgcctgctcatcccggggcggttcgccgccgcctctgcctcatcgctccacctcgccgtctcccgccttcctctcgccgcggtctccgccgcgcgtcgcgagtgtctttt

SEQ ID NO: 3763 - DNA, 404 bp, Zea mays
  Clone ID: MRT4577_103436C.1
gccttctctttatttttttttttttacatcactggggagatttgtttaaagatccatgtgattccatcttcattcgtatacagattgctcttgttaagactgcatttttgcatcaatctctccaaggtacggggggggggtccctatgattctatcttttactatttcttgccaagtggaacaaatggatggggggaacatgctaatacaccccttatcttttattgggtgcttcgtgctgtttccaaaccctaacttcacttaaacccactttcaaatttcataatctaggagcctctttgcccttaagaaaacccttgacaaacactaaccctcgctttggctgtcaatttgtcacctaatggccagcttccctcacgtttaccaagcttgggttgtcctta

SEQ ID NO: 3764 - DNA, 2161 bp, Zea mays
  Clone ID: MRT4577_103437C.1
cggccgcgtgggcgggagtcagggccgtataaaaaactacgcgcccccaatccggccggcaccgcacccagaggaggcaaggagcccatccacatccacctggtcctgctctcaccacaccgccgcgccaatggcggctcgccggcagcaccgccgcggcttcccgctggtcccgctcctgctctccctcctggccgccgccgcgtacggccgcctcatctccgacggcggcccgtccgcgcagctcctctcggtgatccgcctctcggggtcctcgccggccgcgggggcggccaacaaggccgaggagaagtgcgagcagtcctacgggttcctcccctgcaccaccaccgtgctcggcaacctcttcctcgtgctgacgtacggctacctcatgtacaaggcggccacgtacctgtcggcggggagcgagctgctgctcgagatcatggggcccggcctcgtcggcggcctcctcctccccatcctcggcgccctccccgacgcgctcctcgtgctcgtatctggcctgtccgggagtaaagaggaggcacagagtcaggtactgatcggaatggggctgcttgctggttccaccgtcttcctcctcaccctgctttgggggacctgtgtcgttgttggcaaatgtgaccttgggccaagccgtgaggcagttgatgtaacagacaccaagggcttcagcttgactggcactggtattacaaccgacgtgcagaccagctatgcagcgcggatcatggggctatctgttatccccttcatcatcgctcagttccccaagatgttgaagacccaccacgggcagcgtctagctatgctgctggccctcattgtgtcattcttgctcgtgcttgcctactgtctgtatcaggttttccagccttggattcagaggaggaagctcgcatacgcgaagcacaagcacgtgatctctgggatactgaggcacgcccagatgcagtcgctcggccgcctgctgaacgacgacggcacgcccaatgaacacgtcatcagaaagctgttccgcaagatcgacatggacgagagccggtccctgtcccgcgccgagctccacgccctcatcgtcggcatcaacttcgaggaggtcgacttcgacaggacggacgcggtggacaaggtcatggacgacttcgacacgtcccgcaacgacgtcgtcgaggaggaggagttcgtgcaggggatgaggaagtggctggacgaggccaggcgcagcgtgcccgtgggcggcgccttctccagcaagttcatccacgagtaccacgagaggacgaggcaggagcacgacgagctggtcgacaggtccgacgaggcggtggagagcgtggagaaccccgggtggtgcatagccaaggccgtggcgctgctgctgctgggctccgccgccgccgccgcgttcgccgacccgctcgtggacgccgtccacggcttctccaacgccacgcgcatcccgtccttcttcatctccttcatcgccctcccgctcgccaccaactccagcgaggccgtctccgccatcatcttcgccagcaggaagaagcagaggacctgctccctcaccttctccgaggtgtacggcggcgtgacgatgaacaacacgctgtgcctcggcgtgttcctggcgctcatctacttcaggaacctgacgtgggacttctcgtcggaggtgctcatcatcctgctggtctgcgtcgtcatggccctcttcaccagcttccggaccacgttcccgctctggacctgcctcgtcgcctacatgctctacccgctctcgctgatcatcgtctacatcctcgactatgtcttcggctggtcatagacctgattggctcaagtgaacacctggttttcagacagccgccggtgtttctgtttgacctccttgtaattttaactatatgtccagactttttctcatgtgatgctgtgatcatgttctactttctctaatccaaagcacgcacgtacttcgtcaaacagcagctgcatgttttcaaaaaaaaaaaaaaaaaaaaaaaaaaaaggccaggctatatacaagaactaaatttacgtccccgtacatgccagggatgaccatttggattggatcacccaaatagagctcactggctgggattga

SEQ ID NO: 3765 - DNA, 2238 bp, Zea mays
  unsure (1)..(2238): unsure at all n locations
  Clone ID: MRT4577_103438C.1
atcaaaaaaagaaccatctctttcacgttctcgcctccccatgtccatcgccacgatacctaaaaaaagatctacgcagcgaaaagggccgcggaaaaaacgagttgtacgcgtcggctccgcttcttgatcccaacaccgccacgataatataatactaaatctatcgtccggccacgcgtccgaggaggagcctgcccgcgcctgcgcctggttgtaattgtagctcacgctcacccttcagttgaccaccgctgcggcagcaatggcggcgagtcgccggcagcaccgccgcggcttcccgctggtcccgctgctgctgtcgctcctggcggccgccgcgtacggccgcctcatctccgacggcggcccgcccgcgccgctcctcccggtcatccgcctcgcggcgccgccggccgaggccgagtgcgagcagacctacggcttcctcccctgcaccaccaccgtgctcggcaacctcttcctggtgctggcctacggcttcctcatgttcaaggcggccacgttcctgtcggcgggcagcgagctgctgctagagatcatggggcccggcctcgtcggcggcctcctcctccccatcctcggcgccctccccgacgcgctcctcgtcctagtgtccggcctctccgggagcaaagaggaggcgcagagccaggtgctgatcgggatggggctgctcgccggttccaccgtcttcctcctcaccctgctctggggaacctgtgtcgtcgttggcaagtgtgacctcgggccaggccgtgaggcagtagatgtgacagacactaagggcttcagcttgactggcactggtgttacgaccgacgtgcagaccagctacgcggcacggatcatggggctatctgtcatccccttcatcatcgctcagttccccaagatgttgaagacacaccacgggcagcgcctcgccatgctgctggcccttgtcgtgtcgttcgcgctcgtgcttgcctactgcctgtatcaggttttccagccttggattcagaggaggaagctcgcgtacgcgaagcacaagcacgtgatctccgggatactgaggcacgcccagatgcagtcgctcggccgcctgctgaacgacgacggcacgcccaatgaacaagtcatcagaaagctgttccgcaagatcgacatggacgagagccggtccctgtcccgcgccgagctccacgccctcatcgtcggcatcaacttcgaggaggtcgacttcgacaggacggacgcggtggacaaggtcatggacgacttcgacacgtcccgcaacgacgtcgtcgaggaggaggagttcgtgcaggggatgaggaagtggctggacgaggccaggcgcagcgtgcccgtgggcggcgccttctccagcaagttcatccacgaggcccgcggggcggcgcgccggcagcacgacgagctggtcgacaggtccgacgaggcggtggagagcgtggagaaccccgggtggtgcatcgccaaggccgtggcgctgctgctgctgggcgccgccgccgcggccgcgttcgcggacccgctcgtggacgccgtccacaacttctccaacgccacgcacatcccgtccttcttcatctccttcatcgcccttccgctcgcgaccaactccagcgaggccgtctccgccatcatcttcgccagcaggaagaagcagcggacctgctccctcacattctccgaggtgtatggcggcgtgacgatgaacaacacgctgtgcctcggcgtgttcctggcgctcatctacttcaggaacctgacatgggacttctcgtcggaggtgctcatcatcctgctcgtctgcgtcgtcatggccctcttcaccagcttccggaccacgttcccgctctggacctgcctcgtcgcctacatgctctacccgttctcgctggtcctcgtctacatcctcgactacgtctttggctggtcataggctctcatcggcgcctcgagtgaacacgaccctgattggagcacctgggttttaacagccgccggtgtttctgcttgaccttgtaattttgactcatgtgaagctatctgtccagacttcttatatttctttgtgtatccaaagcacgcacgtacttcgtcaaacagcagctgcatgttttcagctcccttgtctgtacgtacatattgattttattttacctcaattgttagagttgtttgttatnggncnnannnaagcngggc

SEQ ID NO: 3766 - DNA, 228 bp, Zea mays
  unsure (1)..(228): unsure at all n locations
  Clone ID: MRT4577_103439C.1
atgaaacagagaatctttngtttctcggaatttagttagaggaggcgggagctatcaggatattgcagttgcttaacaaactcacccaccgccaaagcgtcattcaacgaaggcatgcccttcagcatcagtcggtacctatgattgtcagcgagggataaagcctgtaccattcccttccctcgaacatatcgggcggggcggacagactccatcctaacagaagcg

SEQ ID NO: 3767 - DNA, 357 bp, Zea mays
  Clone ID: MRT4577_10343C.1
aaccgtttagcccaatcaatcgaatcggatcgaaacagaccgtgtattcaatctgctactagggaagggggaagcgcgagcgtgcttgcgtgcgtgcgttccttcgttcgtgacaaggcggcccggccggccggccgatcgatcggcgatggcgccgccgtcgagggactactggctgggcttcttccgcggcgcaggggacaacgtgttcgacgccatcgacgcggccatcacggtcgccgcgtccgaccacccggccgccctccgggagcgccgcgacggcatcgccgagcgcctcttcaccgcgctcctggtgaccggcgccgcgggggcgggggcggcggcggtccagggagg

SEQ ID NO: 3768 - DNA, 230 bp, Zea mays
  Clone ID: MRT4577_103440C.1
cgtaattcggctcgagctgttgcgcacacgttttttgcaagggctggcgcgcccactgagcggggggctttttagaacacttgacgtaaggccccaccactcggaggaagccgatctggatgagctggtacaaacacaccatatatatgccacctaaatgggaagagatgtttcatcttcgcaaaaggggatgagcgactctcaatggcgcacaaaggtgccgacccctg

SEQ ID NO: 3769 - DNA, 373 bp, Zea mays
  Clone ID: MRT4577_103441C.1
ccaccaccttttaagggaaaaggggcccctttttacccccagctcccaaaaacgtaaggctggggcccatttaattaaaccgggaccacgttggggaccttgtccaaaaaatgttacaggggggattttttggttaaaattttctgggggccctcaaggggaaaaatttgggggtggaaaaaaacattttcccaggttttggccaaaaaaaaaacactttgctccccccccttttagaggggttccccagggccccgaaatttggcccctggtaaaaaagaaatagccccaagtttttttttaaatctaaaaaagttgtttttttttttggaagaacccttttttttggggggggccccaatttttatttgcc

SEQ ID NO: 3770 - DNA, 461 bp, Zea mays
  Clone ID: MRT4577_103442C.1
ctctgtgcgttacacccgaccccgtcgttgtgatgaggccggcgcttgttaagttcagggacgaactcctccgtcgcatgcaaagggacggctcctcggccaacccagagcggatagtgtccgtgctggaaacttctgccggtgtcaagcacagcgtctacctaataatgaagctcacctcgctcttatacttaatttacttctatgatatcgacgggacctaaggcgtaacgcccaacgtgggccacttctactcccacatcgtggtgacggggcccatgttgtactaccaactcggggaggcgctctaaccctacgaggttatgcttatacacgtccggatgctggggaagaccagtgtgactacggaccacctcttttacaagggggccgtcttccaaaggtgctctgcactgtcatccacttcactgcacaatgttgttgccaatatgaacaccaac

SEQ ID NO: 3771 - DNA, 1007 bp, Zea mays
  unsure (1)..(1007): unsure at all n locations
  Clone ID: MRT4577_103443C.1
aatgccatgctgcaatggatgtcacataatcagnagaggtaccttctgtcggattcgaaaagattaaaagtgctgcaggctttcataatgagctctcctccggatattgctcagttcattctcaaagctgttgctcaaaattgtacaagacttgcatatcaaccagatggactgagcctactgcaaaattgcctagagcgtgtcagccggaagcaaaaggatgatatttttacccaactctcttatcagagtcttttccttgctcaaaattccagaggaaactggatcgttcaggacgttctgcggaagggagatccttctcacgttgaaataattgcttcctgccttagaaatcattatgtgacactcgcgaaaaataagtatagcagcaatgtcgttgagtggtgtttaagggtattccacgaaggagagagatcagttattatatgtgaattcattaactatcctcacttcagagatctggtgacagatgagtttgctaattttgcactctctactgctcttcagacatgtgagattcctctccgaaacgttctggcaaatgccatcctttcccaaaatatcaccgtacggaatcaacactgtatgaagatctttagcacattagccaaatatgggtttatgtaacagaatcttttgaggggattttgaagtagcacattgcaattgagcagatgattttctactactctggtccttttcttttgggcgtctgcagatgttgtgaagacgtgaagtaggtaccaggtgtacgttcgaaccattttgtgcttgtggattttgtggattgtggcatgtgttatctttgtggttagctacatgttgttaaagtgtcatatgtgtaagtgattattcagttatgttgctagttgtgattatcttaatgctttattttaagagattgatgcctcgagatcttgttagaaatttctgtcgctgatgcaatcaagaacatttcattaatttaactttttttttcagcaata

SEQ ID NO: 3772 - DNA, 365 bp, Zea mays
  Clone ID: MRT4577_103444C.1
aaaaacgagggcaagagcgccagcataaaaaattggcccacgcatcatttttaatttataaacagggaaacaaacagtaggcacgacagccattccaggtggtatggtagggtaactgttgaaacacacaccctccaaatactagatagttcatggactccgggaacgcgacagttttaaggaaaaaacctaccctaaagagttcaccataagaaatttttgaaacccaccagggctgtaccgcagtggcacaaccgtcttattatttacaaatatatacttaaatcgcccacgatctttactgggccttgttttccctggcaatgagctccatcacagctcgtttgatgcttccccggacactg

SEQ ID NO: 3773 - DNA, 514 bp, Zea mays
  unsure (1)..(514): unsure at all n locations
  Clone ID: MRT4577_103445C.1
gtgtttttttttttttttttttttttttttttttttttttttttttttttttttttttttttttttnttttattttttttttttttttttttttttttttactttgcaacggctaaattaaccctctgataaaaaaacccaaaaaacccgggggggggggggggttacaacccaatggggtccccaaaccctgaaaacccgttgaaaaaaaaaaaaaaaagggggccccccctttttttttttttttttttgggcccaaactatacccccctccctacccataaaatgccgaccggagtttttattcaatctggaaattaatcagtccatataccaacaaaacggtttgctaaccaacttttttttcgtccaaaaacgactaggtacatttgctccccccccggagcgaaaaattataatccaaagaaccgccccctagctaggagccccacaccccgggcattacaaactaccaacaccttttgttaactagccggcccaaaacaaacccgaa

SEQ ID NO: 3774 - DNA, 618 bp, Zea mays
  Clone ID: MRT4577_103446C.1
aaagacccaaaattccccccctttggcgggttttttaggaaggaatttccttaaaacttagggggccttggccccctaaaagggaacccttgggggaaaaatttacaaatcgcccttcggggaaaaaaaaacccgcccaaccccctgggtttttaaaagccccggaaaggaaaaacttttggaaggttaaacccccccgggggggaaaaaaccgggttccttttccaatttcccatttataccttataaaccccccaaaacttggggggggttaacctgccccacccttttcgttttaaaaaagtgggggaaaactttttgcccttggccaactttgtaaagaacacctttggttcccttaatccgccaatgaaatttttttttccaaaagggaaatttttgtttaacccccggaacttcatttttgggtttaaggtaagggcccccttcccaaaatttaccttaaataagaaattgggggtattaaaaaaaacccgggttccgtggttaaatttttttgcccaaggggttaagacccttaggcccacttttattttacggccaccaaggggggggaccaggttaaaacccgtggtggactggggggtcccattggtt

SEQ ID NO: 3775 - DNA, 284 bp, Zea mays
  Clone ID: MRT4577_103447C.1
gcctaggtcctggagatgagcactctctctctggcctttagggagtcccctcttaggacaggcactgcccagcagcaagggcagcagagttgggtgctaagatcctgaggagctcgaggtttcgagctggctttagacattggtgggaccaaggatgttttgcaggatgccctgatcctaagaagggggcctgggggtgcgtgcagcctgtcggggagacccactctgacagtgggcacacggcagcctgcaaagcacagggctaccgccacagcccggcagag

SEQ ID NO: 3776 - DNA, 2615 bp, Zea mays
  Clone ID: MRT4577_103448C.1
acttggtgtcctctcgaccggccggatcctatcttcagtctcctcaccgcgcgctctctaccgcttgtccgtttcttcctcttccgaggtagcaacgtggtgagtgaggcagccgctgctgtgctgcactgctgctgcggaggcccaagccgaccggcggagagcacccgtccttgggcggcggagggtggaagaataaggccgggcttgcggatgccggggtgcggagtagcggggagaggtggtgtgggggtatcgtcggccgcgcgccgcactccgccacaagggaagagccgcccctgcctctggatgactatcgctcgcggctacgggaggcaacatgagctcaaatattgcacatcgccacaaagcaaatctgtgttactagaagcaagatttggtcgacatgttactaggagcactgcttatctgctccaaaattcccggagcactgcaatgacaagactacagaagtctgggaagtttctgcaacctgtcttggactcctcaagaaattatttgactagtacattctacaatgcaagcttgaagaggagagttctgtcgagggttgagtgctttgtgtcttcagatccaataaacaatggttggttgaaaccaaggaggtcagagaacttcactagtttggagagcgcatgtgttcagccagaatacaaactaccagtcaggacacgtgctgactgtaaagcagagcagtatgaaataacaggctcacctttgagcccttctgatgttcctgctgatgccgttatgattggagatacaaacgagatttctccctggtggcaggagtttccaaagcgctggacggtcgttctcctctgcttctttgcgtttcttctttgcaatatggaccgtgtcaatatgagcattgcaatccttccaatgtcgtcagagttcagctggaatccagcaaccgttggtctaatccaatcatctttcttttggggttaccttctcacacagattcttggaggtatttgggctgacaggtttggtggtaaggtagtactaggatttggggttgtatggtggtcatttgctacagttcttacaccccttgctgccaagattggtcttccatgcttactcaccatgcgtgccttcatggggataggcgagggcgttgccatgcctgctatgaacaacatcctttccaaatggatcccagtctcagagagaagcagatctcttgccttggtgtacagtggaatgtaccttggatcagtcaccggcctgtctttgtcacctctgttgattagcagatttggctggccttctgtcttttatgcatttggatctcttggaaccgtttggtttgcactgtggcaaagcaaagcacacagctctccagatgatgatccggagctaagtaaagctgaaaagaggcatatactgggtggcagtgccttaaaggagcctgtcacttccataccatggaggctaattctatcaaaggctccagtgtgggctctcataatatcacatttttgccataactggggaacattcattcttctaacatggatgcccacatactacaatcaggttttgaagttcaatctaactgagtcggggcttctctgtgtcttgccatggctgacaatggctgtttttgcgaatattggtggatggattgctgatactctagttcagagaggggtctctgtaacaaacgttcgtaagatcatgcaatcgattggtttccttggaccagccttgttcttgacactgctgagcaaagttcggactccagccatggctgtgttatgtatggcatgcagtcagggtagcgatgctttttcacagtctggcctgtattcaaatcaccaagacataggaccacgttatgcgggggtacttctcggactgtcaaacactgctggcgttctggcaggagtttttggtactgctgccactggctacattcttcagaaaggttcttgggatagtgtgtttaaggtgtctgttgtgttgtacatagtaggaacggtggtttggaatgtcttttcaactggagagaaaattctcgaataagctgtggacattcctatatgccactatacggaactgtgtgattttgatgatgtcattttggcaaacaaaataaattttagaagagatacatctggaagaaaactccattttatgcaagaggtgtacctgaatctgatgtttgggctatcggaagaaccagatcaaattagggtactgtgtgaggtcaagaaggtacacttggaacttgggaaaattcttgtacacaaagcaaccgcaccaagggcacgtcagatttttgcagttgtttcttgagaagtccaggcttctgtcaagatcaccaatccacatctttttgttttaaaatgattgacagttaaatcgtgtatcaccttgcctttgcttaaggcgctacaggtactgccaaactaatgtatgtgcttttcttatcgaaaaacctaaatgtatgtgcttcagatatcttgaacatctctgctgtttgcgtcgttgctattatcgttttgtgtatgctgcataatgatattgcatggtgatggtgtcatttttttggcaaaaaaaaaaaaaaaagcggccgatat

SEQ ID NO: 3777 - DNA, 777 bp, Zea mays
  Clone ID: MRT4577_103449C.1
ttgggaccctcgggccggccgggatcctatcttagtctcctaccgcgcgctctctaccgcttgtccgtttcttcctcttccgaggtagcaacgtggtgagtgaggcagccgctgctgtgctgcactgctgctgcggaggcccaagccgaccggcggagagcacccgccttatacccccgcgttttatccttcttctagcttcttcattcacctgttccagaataaggccgggcttgcggatgccggggtgcggagtagcggggagaggtggtgtgggggtatcgtcggccgcgcgccgcactccgccacaagggaagagccgcccctgcctctggatgactatcgctcgcggctacgggaggcaacatgagctcaaatattgcacatcgccacaaagcaaatctctgttactagaagcaagatttggtcgacatgttactaggagcactgcttatctgctccaaaattcccggagcactgcaatgacaagactacagaagtctgggaagtttctgcaacctgtcttggactcctcaagaaattatttgactagtacattctacaatgcaagcttgaagaggagagttctgtcgagggttgagtgctttgtgtcttcagatccaataaacaatggttggttgaaaccaaggaggtcagagaacttcactagtttggagagcgcatgtgttcagccagaatacaaactaccagtcaggacacgtgctgactgtaaagcagagcagtatgaaaatacaggctcacctttgagcccttctg

SEQ ID NO: 3778 - DNA, 559 bp, Zea mays
  Clone ID: MRT4577_10344C.1
gggggggggggtttttttttttttttttttttttttttttttttttttttttttttttttttttttttttcaggtcaaaaacccccaataaatccccccttccagggggaaaaaaaaaaaacccaaaaagggcccccttttccggcccccgggggggggggaaccgggaaattcaggttgggggctggcgggccccctggggaggggccttccccgggggggaaaccccccccccaaaaattttttgggggcaagggccccccgggggactaattttcctacagaaaggggggctttcaaccaaaatttgggctttccgggtaaggaagtttttttgggtttagggtcccaagggggggggggccggtcaaccagggggggaggcttttggcatgggggtttccgactccgggcccggcttaataaagggttcgccgggggccgcccccacattgggggaaccccctttaaatctaaaggcttggaaagccccaaccgcccccggcttgggggggggggcctaatggcaggggtcccaaacttttgggtggcggggggg

SEQ ID NO: 3779 - DNA, 703 bp, Zea mays
  Clone ID: MRT4577_103450C.1
ggaccctcgggtcgccggaccgtcttttaccagaccgagtttgtggcgaggactgaactgcttgggggctggacagcccgcggaggtggatggttacgactaacagagatgcgcctctttgacaaggtgcggcacgacaccgtccgaggccctggctcggacaccggtgttggccggctgcgcaaggagcctgtgcgtgctgccggcgtcaagatacgtgatccgtccgttgacgctgaggcgtttgagccgccctgcccgggttacgatagcataggagacccccgcgaaggtgacgcgcagcatcatgatcaagcgccacgaggtgtacccgcggtctgccgaggagcgcgatatgcacgcaggcggacttgacactggggactaacacgtacatctcgacgcttgccggggccggaggctacttcatatagtgatagtcgtatgacggatacgagagggcgacccaagaaaggacgaactgacaaagtcttgctttcgatcgagtgaacatgaccgcattatcgtgctggtttctgctccgttctaagcctaatttaccgtatatacgtgggaccggctacgacatcaagaggggaacggggctgatctactcgaggtttgtcttacctttacgtggatatattatacggccggtatatctgtgtggatccgtgctttgtcacagataggatcacgccgt

SEQ ID NO: 3780 - DNA, 440 bp, Zea mays
  unsure (1)..(440): unsure at all n locations
  Clone ID: MRT4577_103451C.1
cttccccacagcatagctgctgcagtatatgtgactcccgtccatggaaagaaacaggccctaagaaaaccaaagtatgtctgcttgcttcgctgagaggattggggcagatgaactccaagccttgggtatggtaaatcaggcgcccaggctgcttggatgttgtgctcaggctgcacgctgcaggctctttggtcagtcaggctgccacccccaatgaggcttggggcacagcttgccttgccgcttgatcaggccagtgccgccctggccgtttgggctggtgctgcctatgccactcgggttgccactgtcaatctgatccactgtgcatgcttcccttcgacctcaactggatatgaatgacctattgactatagtttanggacggaggggcacgggagagggaacaacagagaggatagaaggcgtttgagctt

SEQ ID NO: 3781 - DNA, 237 bp, Zea mays
  unsure (1)..(237): unsure at all n locations
  Clone ID: MRT4577_103452C.1
attctacgcatttttaatccttaagctcgatctcttttgttgtttccttttcatatataaagcaacagtttctatgttttccaaggttccatcatcattgattttcgaaaaaaatccttgttcacctagaaccctagatcatatgaacaccaagttcaaccacaccagcaccctgcttcactcgcccgtcgaccatcntgggcttcatggncacctgncgcccccccccccccnccc

SEQ ID NO: 3782 - DNA, 895 bp, Zea mays
  Clone ID: MRT4577_103453C.1
ccggccgggttgttttattctgtgaacgtccattgggctcctcgaggccgggccgggatcctatcttcagtctcctcaccgcgcgctctctaccgcttgtccgtttcttcctcttccgaggtagcaacgtggtgagtgaggcagccgctgctgtgctgcactgctgctgcggaggcccaagccgaccggcggagagcacccgtccttgggcggcggagggtggaaggtggatgctctaagcccccgcctctctctgccgccttatacccccgcgttttatccttcttctagcttcttcattcacctgttccagaataaggccgggcttgcggatgccggggtgcggagtagcggggagaggtggtgtgggggtatcgtcggccgcgcgccgcactccgccacaagggaagagccgcccctgcctctggatgactatcgctcgcggctacgggaggcaacatgagctcaaatattgcacatcgccacaaagcaaatctctgttactagaagcaagatttggtcgacatgttactaggagcactgcttatctgctccaaaattcccggagcactgcaatgacaagactacagaagtctgggaagtttctgcaacctgtcttggactcctcaagaaattatttgactagtacattctacaatgcaagcttgaagaggagagttctgtcgagggttgagtgctttgtgtcttcagatccaataaacaatggttggttgaaaccaaggaggtcagagaacttcactagtttggagagcgcatgtgttcagccagaatacaaactaccagtcaggacacgtgctgactgtaaagcagagcagtatgaaataacaggctcacctttgagcccttctgatgtccctgctgatggccgtatgat

SEQ ID NO: 3783 - DNA, 819 bp, Zea mays
  Clone ID: MRT4577_103454C.1
gtgcggcgctcgaggcggccgggattgctgatcagttcagagagggggtaaacgttaagatcatgcaatcgattgtttccttggaccagccttgttcttgacactgctgagcaaagttcggactccagccatggctgtgttatgtatggcatgcagtcagggtagcgatgctttttcacagtctggcctgtattcaaatcaccaagacataggaccacgttatgcgggggtacttctcggactgtcaaacactgctggcgttctggcaggagtttttggtactgctgccactggctacattcttcagaaaggttcttgggatagtgtgtttaaggtgtctgttgtgttgtacatagtaggaacggtggtttggaatgtcttttcaactggagagaagattctcgaataagctgtggacattcctatatgccactatacggaactgtgtgattttgatgatgtcattttggcaaacaaaataaattttagaagagatacatctggaagaaaactccattttatgcaagaggtgtacctgaatctgatgtttgggctatcggaagaaccagatcaaattagggtactgtgtgaggtcaagaaggtacacttggaacttgggaaaattcttgtacacaaagcaaccgcaccaagggcacgtcagatttttgcagttgtttcttgagaagtccaggcttctgttaagatcaccaatccacatctttttgttttaaaatgattgacagttaaatcgtgtatcaccttgcctttgcttacgctacaggtactgcaaaaaaaaaaaaaaaaaaggcccctagggcc

SEQ ID NO: 3784 - DNA, 1150 bp, Zea mays
  unsure (1)..(1150): unsure at all n locations
  Clone ID: MRT4577_103455C.1
caaatccttttacccaggttnctgaattcaatctaaccgagtccgggcttctctgtgtcttgccatggctgacaatggctgtcttcgcgaatattggtggatggattgctgatactcttgttcaaagagggatctcagttacaaacgttcgtaagatcatgcaatcaattggtttccttggaccagccttgttcttaacactgctgagcaaagttcgtactccagccatggctgtattatgtatggcatgcagtcaggtttgatgcactccaaaaaataacactcatatggatttataagtagcttctgacatgactacaattggttactattgtgttataaaagtttgctagtttcgctgtccatttctcaggttagcgatgctttttcacagactggcctgtattcaaatcaccaaggacattggaccacgttatgcgggggtatctcggattgtcactgctgatagtgcttgcaggagtttttggtactgcagccactggctacattcttcagaaaggttcttgggatagtgtgtttaaggtgtctgttgtgctgtacatagtaggaacggtggtgtggaatgtctttgcaactggagagaaagttctcgaataagctgtggacattcctatatgccaatatacgaaaattgtatgattttggtatacaaaggtaaatttaagaagagatacagctggaagaaaactccattttgtgcaagagatataccttcatctaatgtttgggctatcggaagaatgaaatcaaattagagtatcgtgtgaggtcaagaaggtactcatggaactggagaaacttcttgtacagaaagcaactgcaccaatggcacgtcagattttgcagctgtttcttgagaagtacaggcttctaccaagatcatcaatccacatatttttgttttgtttttaaaatacatggtagttaaatcgtgtttcaacttgcccttgattaaggcgctacagctactgccaactaaatgtagtattatgtgagctctttttcatcgagaattcctaattgtacctgcttcccataccttaaacgtctctgttcctagcgtcgttgctattatcgttttgtgtatgctgcataatgatattgcatggtgatggtgtctttttttggc

SEQ ID NO: 3785 - DNA, 415 bp, Zea mays
  Clone ID: MRT4577_103456C.1
agaagatgcacacctacacgatatcatccatcacgttgatcatgacaatgatggtcggatctactacaactattttgtgacaatgacgcagaaaggaaatatcccactagggaacttggggcactgccagatgagctttggtcttagataagcactgaaacttggctaagtagaatgatcaatccagtgtgtagtgccattcggcttcatatgccaactttagctgctgagactaagtccgtcaaattgggacgccgatacctacagtggttcatatgcgcggtacgacaacctttgggagaccaactaatcagtcagcatgcaggatcacattggagatccatcgtcgtaaacctcacatgtacatggcttatttgaggtaggataggaatcactgttgtgtttcacatagtca

SEQ ID NO: 3786 - DNA, 199 bp, Zea mays
  Clone ID: MRT4577_103457C.1
gttgccagcatttgctgatttctagtgtatactttgtagtctcagtcggtgttgattccattccgtggaaataaaagtatgttgtacatactgcccaagaatctccctgcaagttaaggctccccctttactataagaatataaataaagacttattttatccttaaaaaaaaaaagaaaagaaaaaaaaaaaaaatag

SEQ ID NO: 3787 - DNA, 428 bp, Zea mays
  unsure (1)..(428): unsure at all n locations
  Clone ID: MRT4577_103458C.1
aaacaccacgccgaagataaaggggagatagagtacacggttatcagaccagtgcagagagcaatagatgctgtggtggggtgccgatcctcgtccgagtctcatctccgatccacgctcggctgcgtccgnggctggtcgcgtgcgtggtcccgtccggcacagtgtcaagcggtcggaagtgcgaacgatcttcgagggccgccgttccgggagtgtcgacgaggacctccgaggagtgaggaggaggacgacgtagggggtggttggagagcaagcccgccttcgtcgtccgcgcctcgtccgcggcgacgcatcccagggcgcgccatgagcagcggagccggcgccgggcgcccgaccagcagtacatgggcgttcggcgccgcccgtggggcaagtgggccggcgagatccgcgaccccgtc

SEQ ID NO: 3788 - DNA, 496 bp, Zea mays
  unsure (1)..(496): unsure at all n locations
  Clone ID: MRT4577_103459C.1
cacgcccgtccggcctccgaccggctggcgctcgcagctctgctgccccctgccgcttcccttctcttacgactatggcgctggccaaggaatggaagctcgtcgagattcccttatgaatgctaaacaantgagagcggtcagccagtcgagcttcaagtaaccggaaccgagtttgtccagcggctacccatcacgcggttgtgtgaccataatgctatgaaccacctcnnatctgaagaccagtnngaagcttaccacnttgaaaggtgatagaaccctgtaancgcttcgacgcacctcagtcgtgctgagggaaaccaacatccgcgtattacccattcttcctgaccagcttaaactctggagacctttgttaggtaggaggaaaccccctatgggtgcaagcctaagaaggccaactacanggaatagcctttggnggcgtgggcgccggccgtggtcgtggacgtggtcggggccgggggccgccacg

SEQ ID NO: 3789 - DNA, 176 bp, Zea mays
  Clone ID: MRT4577_10345C.1
ttcagtcggcggcggcggccagcccaggctgggcagccatggcgcggtgggagtggctcccctggcggcgcggtgtgagcggctccacaggcggagtgggcgcgaccggccccgaccccccggaactggtcgctggcgcggctactgcgtcctcccggccccatactcaacccacg

SEQ ID NO: 3790 - DNA, 224 bp, Zea mays
  unsure (1)..(224): unsure at all n locations
  Clone ID: MRT4577_103460C.1
cggtccgagatcccggtcgaccccgcgtccgccccgcgttcgnncagctttcggggagcgcgtgggcggacgcgttgtcggacgcgtggggttgcccgtgtcttatgtaccggtgcctgccggcgttctagcggtttatatggtgcgtcgtgtttctgttaataaggtcgcttacggcggtccttgttataggcctctatttcgggggggggggggggtctttt

SEQ ID NO: 3791 - DNA, 231 bp, Zea mays
  Clone ID: MRT4577_103461C.1
ttctataatctcttaatccgcaaacaccatcgacttgggcatatcatacatgggacggggcacaaccatccacacctacttcgatcaggatcccttagaccaaatcctactttaacacataattctctcaagcgatacagacttactttgcctcttctctacttgagcatttatatttaaatatcgtttaagttatccacttcttcatctacttacctctctttatactca

SEQ ID NO: 3792 - DNA, 215 bp, Zea mays
  Clone ID: MRT4577_103462C.1
ggggccgggccggcgggcactttgatgatctgtgaagggcgctctgacagcatgcaagactctgctgcagtgacctatcccggatcggcactatatgagggggccccacctgggagggcgggcggaaaaaacgcgcggggcctgtcaaaaggcgtggtgtctatggcgcgggggcgggagcagataagagggggcgccagtgagaggcacagcgc

SEQ ID NO: 3793 - DNA, 490 bp, Zea mays
  Clone ID: MRT4577_103463C.1
acagagcggaagaaaatctgttgcgcagtaatgattctagttgaacaatacgatagcccatacatcggcttcagctgagtcttaaaatgcagcttaaaccgttcaaaaccactcgctaactacttactatcctagacatcttgatgaactacttaatccgagcggggcttctgctgtggactcccacatgacccagtttggtttcgtgaatatttgagggctcgcatgattatttggagcatgtaagcgctattgatgcggcaccacacggagaaatttccaatgattgtttcctactaaattgtcgagccaaaaaacatgccaccctgaaatgctaaacgggggacgaacggcttgcgttctcttgaaccaaagctgcaaacagagtaggactctcgatcaaatttgcaggccggtcaaactcctttgctggccctggagctataatcaggaccctgttggagcgcatcaccgaaggtattatgggcgc

SEQ ID NO: 3794 - DNA, 256 bp, Zea mays
  Clone ID: MRT4577_103464C.1
gtgtactttttttttttttactttttttttttttattgttctttctcttcttatggttcctgtgccagaggccagagaacccattcaaaaatgtcctttgccctcaaggggtccggtggctcacagggggtaaaaatcatgccacaccttatttgattggggtacgggccccattttaaactgtcgctgcatgatccccagctataatatggggttaataaaaaacaaaccggagggggcaaatccccgcataagg

SEQ ID NO: 3795 - DNA, 126 bp, Zea mays
  Clone ID: MRT4577_103465C.1
ctcgagccgcggctacctcttctcctagcgcaggtggtgtgtggaaccgcggcgcaagaatctgctcgatgcttacagctcgtaccgtgatcctggggtgtgtctgtgcaggtgctgcggacatga

SEQ ID NO: 3796 - DNA, 442 bp, Zea mays
  Clone ID: MRT4577_103466C.1
tttcctatgtgaggaggattgcagaacggcattggggcagtttaaaagattggcatggtgagactcgcaacttgcaacagatgatttcagtgagtaaaatggtcttgcacaagggggctctgggaaagtatataaaggagcacttccatatggtactaaaattgctggaaaacgggtaactgatcactaaagtccaggtggagaggatggtttcttgcgtgaggttgagctaattagtgctgcagttcaccggaattttttaagagcgattgcgctctgttcaacacaaacagagcggctacttgcttatccttccatgcaaaatcttagtgtggtctaccgactcccagaatctaaaccctgggagccaatattagactggacttcaaggaagcgagtggctataggcacaacttgcagacttgggtatttgcacgagcac

SEQ ID NO: 3797 - DNA, 1385 bp, Zea mays
  Clone ID: MRT4577_103467C.1
aaggaaggcaatgcatcaaagggttccaagcaacttctataaacctaatgcacatttcactagatttaaagtgcggaaaaattatttaaaaacacaaggaaggggttgcatgcaccggggcttgactgggataaacactacgttagtgtttgttagacgacgatcacttgacgaccatcctttgtcccgatacttgcttcatctgtccatctccagttccgttcatcagcaccatcttgtggtcgactcagttctggtcctccgcatcgcgtggttaattctcgtaccatttccacagctgacacgaatccgcgagatcggtagcgattttccgatctaggcaatttgtcgagcgcttggggaatatcgcgctgctagcttcgtcttcacccgatttttttggatttcttgatggcgcaaaaaacgatgacgagatcgtgtttggagcgagctggtgaggtgggggtcgaacaaaggatgatgggttcgacgacttgacggtaaacgcgagcacaacaaaacgtggatgatgtgcagggctggtagggttttcgcgacaacgggagcgcagatgtaaagcgaagttattggcagagacaaaatcgacgacggccgagattaggcaaggtcgacgacgacgagttgggatgagagcacatggaactgcggaacggcgacaaacagccatgtccaggagccatgtgtgggagcaggtaccgacgagcagagggttggtaatggcttgcatgctggcgagcctcggtagggaccaaggcgagggtcggcgctgctgtgcaggatcgcgacatagccacgcaaagtattgaacacccggcaggcgtcaacggcgttgcacacgactcggcgatcaactcagacattttgtcggacaccctgcaagcagcgaaatggagcaagaaagtaactagggatgggtagtgactttgcgagctcgaccaggtaggacttaggagacgaacacaacaggaaggaagatttagaactcaagccgagagcaggaagtcaagatccgagctggggctggaactggagcgctgcgatggacgagatggagcacggccagcgcgcgtccaccagaaggactcgcgcgcacaggagatgaacgccggcagcgaagagagctccgcgagcttaggcgaaatccgaacagggaggccgctgggggcgagcagggcacaacgactcgtgcacaggggcgagcgccatgagagagaagctcggttcgacagccatggaggaaagagagccatgggagttgagggagaaacgagcagggagaaggagaggcaggggctggacgcaccatggaggggagctggaaggaagtcgaccgcgcgggctggctttcccggccgaactcgagg

SEQ ID NO: 3798 - DNA, 245 bp, Zea mays
  Clone ID: MRT4577_103468C.1
tctcattgttggaattatactttcattccgtgctggtcaataccgagcagattaatgggggggcattcttcgattaccgtactgtttattatactattctaaaagaattgaaactcttatcccctgtctagataatatttgttaccatttataattgaaacaatttgtaagtgaaggaagggtacacttccaccccgattggttttgggggggtaaaaaaaaggattttttttttttaaaggggg

SEQ ID NO: 3799 - DNA, 468 bp, Zea mays
  Clone ID: MRT4577_103469C.1
agtaacttataatgaaacgagactaaattggcgcaagagtataactctaatgtccataacacgcagatccaactatagaatctaaagcataatcatacaaggtgaaaacttagtcagcagaagaaaccacagccctaaaacgagtcgaacatagtctcataacatctgtgagtgacggcgcgaccactacgcaaccacctgcgatcggtgggaaacctagacacgggcacggaagagaccttcatacttgcggcgggcctaggcagcgacactggagacctgagcctggagctctacgcccggtagatcgggcatgccgagtgccgagagcatgtccatggtctcctaggcgacgctgatctcttagacctcaaacgctgacttatcctgaacaaagtccatacagagctgcacatggtcaccctgcaccttgatctatatgccactgacagggccccgatggatgcg

SEQ ID NO: 3800 - DNA, 276 bp, Zea mays
  Clone ID: MRT4577_10346C.1
cccagggcaaatctgaattttttttatccgggttttccatggcaaagggctttatcacccaccaagggggcaattcgcatccttttactaaaaaaccccgaatttaaacatcccccattggctttggggctgaaaaaaaaatggtccttttggggctaaacaccccaaaggtccaccccttgcaacgcaataaatttaaaagcttggggggggcccccgttgagtttccccaaaaacaccggattaaattaaggccaggagattaattttaaacca

SEQ ID NO: 3801 - DNA, 317 bp, Zea mays
  Clone ID: MRT4577_103470C.1
gcatgttggtggaagtcccaacggaggggttgatactcttctcattgattgaaaactcctactctccgtcatcaataccgacattgttgcatcaattaatgcttcaaaaccttctaatggttcgactgtggctgttttctgtttaggagccgatggtcttgccaaggtgcaaggattgctctagcgtcaaggatcatttgtgtttgacctgaaccccatctcattcttagtatcttggaagtttcggttgcactgaattttttgaacctctaagaccacaatatgtcatttctatgagttacttgctttatatgacc

SEQ ID NO: 3802 - DNA, 549 bp, Zea mays
  Clone ID: MRT4577_103471C.1
gtggacgcctgcggttccggtccggaattcccgggtcgacccacgcgtccgagaaagccgcggaagcggcgtcgccggaaccatgggcaccggaccgctcacctctggtgtccgtgctggtggcgggaacaccgggtggctctggatgagctcctgcaacctaggttcgccagtcctgcctatttcctttcttttttggctgttgctggccgcgcctggcgctcgggccgcgggttacaagacatgtcccccaacgaagccaggcatgctcaatgtgcacctgctgcctcatacacacgatgatgtaggctggctgaagacagtggaccaatactattacggcatggaccttgacttcctgaacttcatgcccacagtcctgagtgatgttcaacacgcgtctgttcagtacatcctagactcagtagtctcctctctactggagaaacccacccgtcgcttcatctatgtggaaatggctttcttctcccgttggtggaagcagcagaccagtgcaacccaggacgctgtacggaacctggtgcgcca

SEQ ID NO: 3803 - DNA, 855 bp, Zea mays
  Clone ID: MRT4577_103472C.1
cattgggaccctcgaggccggccgggatatccgcgcggcgcctatctggcatcggtgaagagcgggcgctagagcagagtgagcgtgcggttcttggtcatggagcgcggtgccgtcgtccttccgctccagggcgccggggttgggcgcgtcctcctccccgtgcaggtgcgggtacggtcgttcttgaggagcaggagggcgacggagcggcggcgccggctcgcgagtaccgcggcgccggcgaggtgcagcaagatgtacgttcccggctttggggagggttcaccggagcggaaggcggcgatcaacctccagcacttctttaactacatcgctgtcagcattgtcctagcacagcctgagagttacaatagggaagcgtacttggagctgaaggagttcatcagccgcacctctctgaatgacgccgagattttctgcgaaaaactgatgcgcgagtctccaaggctcaagggactaggtccgatctgcatatgtgaagaacgagttcgagtgggacaatttgaagaaattatccttcaagatggttgatgaggccaacacaaagctcatgagggattacgtcgtcgaggtcagccacattgaagacgaaaactaaaacatcaagtggtttctctttgaactactatattttataggcgaacgataacatcaaatgctttctcttgaaccttgcctacaacattttataggaggcttgcatgtatatatatagaagatgtataggttatgaagcgcactagcttgatcctgaaactttgtatgtagcagaggtactaaacatagtaagcgcattagcagggtcattgtacgtagatggttagcattact

SEQ ID NO: 3804 - DNA, 115 bp, Zea mays
  Clone ID: MRT4577_103473C.1
tcttccctgtcacggccactgttggccttactttcttgcctttatttactagccgggacattagaagatgctctgtggtcttattatgtgtgcttcttattgtttgcccctgttc

SEQ ID NO: 3805 - DNA, 118 bp, Zea mays
  unsure (1)..(118): unsure at all n locations
  Clone ID: MRT4577_103474C.1
cgccaagcgtgccttcgtgcactgatatgtttgcngctgctatagaagtggtggctactgaggtggctgcagctactgaggtggtggctattgtggtagcagccaaagctatgatgct

SEQ ID NO: 3806 - DNA, 1281 bp, Zea mays
  Clone ID: MRT4577_103475C.1
gcgggccggccgggatatatccgcgcggcgcctatctggcatcggtgaagagcgggcgctagagcagagtgagcgtgcggttcttggtcatggagcgcggtgccgtcgtccttccgctccagggcgccggggttgggcgcgtcctcctccccgtgcaggtgcgggtacggtcgttcttgaggagcaggagggcgatggagcggcggcgcaggctcgcgagtaccgcggcgccggcgaggtgcagcaagatgtacgttcccggtaggtagccgttcgtctctcgaccgactctccatctgcatccactctagcgactgcactgcatagtcgccccgcgcttactatggctgtgcggctggtgacgattcaggctttggggagggttcaccggagcggaaggcggcgatcaacctccagcacttctttaactacatcgctgtcagcattgtcctagcacagcttgaggttggccttgtcgccttctggacgagactggctgttcctttttgttcaacagcacttagatagttcgatatcctgagtgatcgccaaagggactcgaaacggttatcagattttgattgcttttttttattcttttgtttggatcatcgataaaaaaaaagagttacaatagggaagcgtacttggagctgaaggagttcatcagccgcacctctctgaatgacgccgagattttctgcgaaaagctgatgcgcgagtctccaaggctcaagggactaggcaagtctagttcttttttaaccacacactgttttacttgcttgatcctttgatgaaacagtgtatgaaattactgaggcatgtgtggtttcgtctcttggaaacaaacagccttgaggattctggaggtccgatctgcatatgtgaagaacgagttcgagtgggacaatttgaaggaattatccttcaagatggttgatgaggccaacacaaagctcatgagggattacgtcgtcgaggtcagccacattgaagacgaaaactaaaacatcaagtggtttctctttgaactactatattttataggcgaacgataacatcaaatgctttctcttgaaccttgcctacagcattttataagaggcttgcatgtatatatagaagatgtataggttatgaagcgcctagcttgatcctgaaactttgtatgtagcataggtactaaacatagtaagcgcattagcagtgatacaccgtagatgtttagcattacttgaataaaactcggcacgcatacaccgtgttactttcttgatc

SEQ ID NO: 3807 - DNA, 670 bp, Zea mays
  unsure (1)..(670): unsure at all n locations
  Clone ID: MRT4577_103476C.1
tattcctcatacgtactacaatcgcctcgccttcccttctcccatcacgccccgtctctctctctctctctctctgcctctctctcccagacgcgtccatctcgcagcaacatacaagagcgaccaaatgccgcctctaccataccatctcagctgatgccgcgccggcgtccaacaacctgctggtgtccttcctagagatgctgatcgacttcggccccatacgtgatcggtctgtcgctggccgagtctggcggattcgctcaggcacccggtgttgctgccaccaacttcacctgcaccatcacccagctcggtggatcctccgccttcttatctgagatcggtcaccacgatgtcactgacatgctgcataacatcctgaatacataatacgcgaactcgaaggctcgcctgttnctaccatcacgtatcagacggagcatggtcttcatgacactcacgcacagactggtgagcgcgacgtctcatgttctacatgaaccccactgcggtcatgtctgctgacagatgcggagctgagacactgctactggtgcggcgcaccaggtgttccagctacagctgcatctcgatcatctccgagacgtgccgctcggcacacatgttcacatgctctcactcaaggacacgttcgtgctctgctcct

SEQ ID NO: 3808 - DNA, 437 bp, Zea mays
  Clone ID: MRT4577_103477C.1
gggtggggggggggttttttttatttttttttttctttttttttttttttttttttttttttttttttttttgggacctaaaatatagatctctaatcttttattactgggaaggtgcccatatcagtttgggaactttatttttaccgtttaaagggggggggaatctaaaagatggcccccccaatggggggctgctgcaataaggggggggggttcgtcaaagcaaggtgggtaaatgggggcaattgttgttgttgtaagaaggggacattgtttgccacatcctgggggtagaatgggagcaactgttgctgttgcaagaaggcgttaatgtttcccccaacctggggggaaaatggcggcaattgttgttgtggttgcaagaaaacagcaatgtttgccacaacttgtaaatggaatggaagcaactgttg

SEQ ID NO: 3809 - DNA, 333 bp, Zea mays
  Clone ID: MRT4577_103478C.1
ggacaagctttaacggccttccattttttttcaaacgatacgcccctggggtggattgcccaaaaaccttagccggattcacatttggttcaaccatctttggggacccaaaaagggacttttgtttttcccaaacccattgggctttaaaagacatgccccctaactgggggctaaacctaggaaacaagacgggggcgaatgccctttccaggggggagcctcagggggcattgctatcaccggggggagccttggaccagccacccttcttggggggggggggcctgtggtttttgtggctcaccccccctcttcgcatggggggccccc

SEQ ID NO: 3810 - DNA, 495 bp, Zea mays
  Clone ID: MRT4577_103479C.1
cgccatcctctgcagtaataccatgtctgttgcgcactggcggacctccgctaccacatgggcgctgtcctcttccgcacgtgcctgcctcctgccatagtacatggctcttggctacggcgcgatgttcaccccgcgcgaccacgcccccggacgggacaatcggcggtaggtaatgaaagacgaacgggggaacccacgcggcggagtactgggggcgcactcagcacgctctaaaacgatcagagactggactaggtatcccgcgggaatgacgggagcggcagaagcgcgccactttagactctcctattagggccgcccaatcgcaccatgaacaacagaaacggagctaaggaggcgcggtgttttactagccttgcgcactgggtaatggagcccatgttgtatgtacaactctcctttgctagccgcataataatacttagcgatgtatgtttgtcccactacttcaccttcccgtcgctcgtgggc

SEQ ID NO: 3811 - DNA, 167 bp, Zea mays
  Clone ID: MRT4577_10347C.1
gcgacgacttggtgctcgcgtcgggggcccactacgggagtaagctcgccgggctgggtcggtatgacaccagccaggaagttcagataaatccccgctgtaggtggaaccttgaccggtccgatggcctcctgctaaaagcttgggaagacgccggaagggaacaa

SEQ ID NO: 3812 - DNA, 578 bp, Zea mays
  Clone ID: MRT4577_103480C.1
ccatcccgggttcgacgatgtttttgatcgaattccctatggcgctgtaggcttgatgaagaatcccttgcagaagatgtcgacggaggagaaggcctagaatacaaccattgtgaagaagagcgtgcacgtgcaagtagggcgtattgaagaaggtgaagtataaggccaagaacagtggagagatgtacaagatctacatcttcaaggtgctcaaggaggtgcacccggacattggtatctcgtgcatggtcatgtccatcatgaactctttcagtaacgatatcttcgagaagctggctgccgaggccgtcaagctcgctcgctacaacaagaagcccagcataacctcccgggagatccagacttctgttgtgcctcgtccttcccggcgagctcgccaagcactccgtttacgaggacaccaaggttgctacctagttcacttcctcttagattgtcgctccactggtgcgaggtgttctgtttcctttcctcgcaacttaggtgaatgctactaggttcgccccaggaaaaattgctgtgtgtgaattctctaacctattcctacttgtgct

SEQ ID NO: 3813 - DNA, 325 bp, Zea mays
  Clone ID: MRT4577_103481C.1
aaacaagggggtacaagtaccctcagggatgtccatggacgaccaggaacaccgtcatttaagctttcacttattcaccaaaccgctacataaatggggggggctggttgatcactggggcttcccggggttgagaaaggggcaagctagcggcggggggacagcacctgacgccgacacggaagcggcctcgcgggggtcctcctcggaggaagccaccttgggccccttgagaaggcctcccaaaagctcgcccgggtcgtagtatacctccacgttttccgcccgcagctcatcgtccacctatacttgcacaatacacaaa

SEQ ID NO: 3814 - DNA, 404 bp, Zea mays
  unsure (1)..(404): unsure at all n locations
  Clone ID: MRT4577_103482C.1
acgctccggaagtgaatctacggccatgacaagggcatcaaagcacgtggtccccaccgtgacaaatactgttcgatgctcttgtcatggccgtagattctccggaagtgaagaaggctttactgcaaaaaggttacagtaatcttctcattcaaatgggccgaggaacatatgttccatccaaggtctcaggagatgctacccttcaagttgaccatttcacattttcaccaagcatcgctgacaatatgagaacagcttccttagttatcagccatgcaggttcgtgatgctcaaaatgatcagcaagctttaaagccagaccgaccttgcgatcgacaaagtcttttgtttgaaatatcttgngtgtctattctatntattgttttgtttctcaaggtttg

SEQ ID NO: 3815 - DNA, 207 bp, Zea mays
  Clone ID: MRT4577_103483C.1
gggctcctgctcctgccctcgggttcgaatcagcgaacatgggaacccgcggcgtggccctgctgctactcgcgaaggtgctggtcctacagacgcaactccccgcgaagacgaagggactgaggcggggcgagctggagaagctggccggagaacaaaacggacggaaaagcagacagctgtgcagcggaggagggggagaaggtc

SEQ ID NO: 3816 - DNA, 289 bp, Zea mays
  unsure (1)..(289): unsure at all n locations
  Clone ID: MRT4577_103484C.1
ctctagggggnatgcgcggttttttcctttcaagcggggaaagggaccgcttacacaatacagttactttcttacataaaagacatcaaccgggcccaaaaagcaaacacagtgggaactaccaccgcggctacacagctaaccgttctactttggtactactgcaagaagaggagactagtgcacgtcacattgtttggcttggagctggtgaacttggtgacggctttggcgccctcggagaccgctggcttggctagctcgccgggtaggtcaaggcggacggggg

SEQ ID NO: 3817 - DNA, 566 bp, Zea mays
  Clone ID: MRT4577_103485C.1
tccaccgcggtggcggccgcccttttttttttttttttttttaagaaacatgtttttttctatatccattaggggtgacataaagaaacttgggcgaaaaaggtacactagccaattacaattggccgtttacagacctacacatgcacaacactatatcctacttgaaaccctctgccttgtaggagaggaacttgaagaacttcttgggcgacttggttctacttgctcccacccgtggacgccttctccgacgttttcttgggcaaaataaccgagtggatgttgggcaacacgccgcccagggccacgggaacactggtcacaagattcccgagctgctcggcattgtggatagcaaagaccacgtgccccgagacgatgctcgccttgttggtgctcttggcagaaaagctggtgagctgcatgacctagcgggcaggttctacatgacggacgttaagcagacggaggtaccggtgccgacgcactgagcgtaccggcttttcttgacgtagcaccccatgcgggcgaaaaaaaactggagcccggtcttcacggacctc

SEQ ID NO: 3818 - DNA, 508 bp, Zea mays
  Clone ID: MRT4577_103486C.1
ccaaaccaaaaaaaaagcaatgctgaacttcaaggggatggcatttcataaccaccaaaccaaacagaaatgcgaagcaaaaatggactcgacttgttctttgacagtttaattaaccaagaaaagaaaacttcatggacgggacggcccttccatgccaaaaaaaaaaacaagctaacccggggaaaatcatttctttttcccaatgccatgagacatgaagtaaaccccccgcccaaaaaagaacatgcgggaggcagcaagggcaaaagggatggcaagggaggagatcacatcgccccgccctttaagggaggtgggcctggtcatggacaggaaatgatgtttcaaatagaaaagcctctcacggaaaagaaaggggggttatgccatcctgcatggcaaggaagcgatgccctgcccgggggcagatcaggaagccaaaccggaaagggaggctgacctaacccaaaccaaaacccctccttacctgggaccacaccacggt

SEQ ID NO: 3819 - DNA, 672 bp, Zea mays
  Clone ID: MRT4577_103487C.1
agcagtggtaacaacgcagagtacgcggggtccagggatcatcagtgcttaactgacggctagcactgcgatagatataaacaagtcgtagcagaaacgccctgcagcacacgtacattggcagcccagcaagtacgcgagagggagggctgaagctagctaccatcgcgtagcagtcccaagtggagtagcttgtggggggaggggggggaagagagtgtagtttaaaacccttcaattcaaggccatgctgtggttcttgcaatggcaacaaatgaacagaaccaccccggcccgagttgggttctgctgctgcagcatggccgtcagctttatgtacaagcatccaaaccacacttttggcggtgcagatcaagtgtaaattattgatacaccgcccgtacaagtaataaaagtagtttggcccaaactcttgccgaatgtcagctagctcagacatggggggtcctcgtttgggaatttgaccacggttaccgataaacctgctgctagtggtggtagcgtaaccatgaaccactagggataaaagaaaccgcaccaggtgccgacgaggcttggtttcagtaactactctttctgattaggccgaagactctttgctgcgttgcgtaataagcgcgatgggcgtggttaattacgcagataaaactc

SEQ ID NO: 3820 - DNA, 198 bp, Zea mays
  unsure (1)..(198): unsure at all n locations
  Clone ID: MRT4577_103488C.1
cggacgcgtgggctggcaaagcgattttgngtcggtggcgcccctcgggtaatcggggggtgccttcgaacatttggaaaggatcatgttgacgttgcaggcactagcaagggagctgaatcaaaattgtgaacctttgcaaataccctgaatcgtacaacagaatggtggctgaggtaaagaactatgtaaaaaaca

SEQ ID NO: 3821 - DNA, 391 bp, Zea mays
  Clone ID: MRT4577_103489C.1
gagaagtacccaaagccaagttggatgtggagcaagaagcagggcgcggggcgagagctagacgcggcaaccaccgctgcactgcactgcacccctcgatgctccgagctcagcagcagcagcagcagcgactcgctcgaggcatgacgccatccatgtcaggaaagatatacctggtcggccgaacgagctactgtgcttatccgaagcactgacactccagcggatgcgctgcctgacagccacttaggacgacagattcagacgcgggcgatcaagatggcgcacgagcccatcctggactatgcggactacttataggcggttgcggcagatgtcgccacgacaatggacgaccacatcctagcgccggagctctatagcctgcatg

SEQ ID NO: 3822 - DNA, 757 bp, Zea mays
  unsure (1)..(757): unsure at all n locations
  Clone ID: MRT4577_10348C.1
cattgggaccctcgaggccggccgggggacaatgccaccggccgctaccccctctctactagcgccgccatagagttgcgtcatgccggaggtcccaattggcgttgcagtggccaccacctgagatccgtctcaccttccctcccactcctcaaacgcacccctcccctggttagcgtcgtgccacgccggaggcatcgtgaagcttccaattgcatccccctctaatggaggtcgtgacgacatcgaaggtgtcgttccggctcgctcggagcctggttgctgcagcacattgttataggcgtgttcgtcgcactcctcgctggaactctcatctccacctgctggatgtgtgtcagcgctagagtaaggtcccctacaacacctacctgtttttttgtctttcttcgatgccacagtctcttgtgtcgcgtgaccgagtagtagttgggtaatctgtttcaatttcaaccatatgcttgcttagccgcttcctgcatcctcctgtcgtctgctcccctgcatgcgcaccacgtacagacgctgcagtggtacagttacagcggagaggagtgctcggtggtggccaactgcgtgctcccctctcttgtgcgtatgangcgtgngtattggtcattctccaatttgtaagggcagtaacaaatattgcttgtatgatctccggagtagtagtttgtgtttagtgttgttatagaatatttaaatttagagatgcgcaaaatgcttgtgtaggatg

SEQ ID NO: 3823 - DNA, 400 bp, Zea mays
  unsure (1)..(400): unsure at all n locations
  Clone ID: MRT4577_103490C.1
tctctctcccccaaagnttccgtctccgtggccgggtctcgttcaagttccgtgtggccgcgacgtcaataacccctcaacacttcccacgccggcgtcgactcgactcgcatcgcatggtgtgggtcgggccactggctaccccccgcgcctcgagatctcattgtggctcgccagcagcactcggtgccccgtcgggctgcggaaccctcatcgccaagtggcgcggcgcgtcaagcggtaatcagcacctctataactttctgaccaagaccatgcactcgggatggccattagcgtggaaaaacaggacccagcaaccacggcctctgaacaaggtactctgcatgtctgttcaacaagcaagcataagcaaggttgctgtcatgcccgtcgagtt

SEQ ID NO: 3824 - DNA, 607 bp, Zea mays
  unsure (1)..(607): unsure at all n locations
  Clone ID: MRT4577_103491C.1
agggaggagcagagaccgaactctgccgtctcttcctcctccctctgcacccccacgagctccatggccgccaccgccatgattgggattaccaacctacgttgccgccacgacccgctctcctcccttccccgggctacgtcgtcggccgcccggtcctgtacgctgcttcctcctcgatgccgccgccattcttcttgctgctccccttcctcctccgtctctccgtgccgggcccgggtccgaccaacagcagcactgaagcgcatccctgccgccgacaccggcttcatgggtccagccaacaatgaggccaccacgcttaaacgatcatcgtcggccgaccttcgccgccgccttatcgtccccagctccaccgctggcaccggacacgccgccagtgcttccacaggagtgctgcccgccattatcggggtggcgcatctgctcgtgtcgtctcgtgctcgtagtcttcgaacattcgtgcctcctctcgcgaaggcgttcattggcttctttgagcccgccacgctgttcatccagaggtggctgtccttgntctacgtcccgacactggtcgtgctgccgctcgccgtcggggatattc

SEQ ID NO: 3825 - DNA, 963 bp, Zea mays
  Clone ID: MRT4577_103492C.1
atttctagccacacttccatcgctcgctctcgttcagtagctcctatcccatcccgacgaatggagtctccgtcaccacctcgcctgctagcctcctccgtctgctcaagacgagggaggagcagagaccgaactctgccgtctcttcctcctccctctgcacccccacgagctccatggccgccaccgccatgattgggattaccaacctacgttgccgccacgacccgctctcctcccttccccgggctacgtcgtcggccgcccggtcctgtacgctgcttcctcctcgatgccgccgccattcttcttgctgctccccttcctcctccgtctctccgtgccgggcccgggtccgaccaacagcagcactgaagcgcatccctgccgccgacaccggcttcatgggtccagccaacaatgaggccaccacgcttaaacgatcatcgtcggccgaccttcgccgccgccttatcgtccccagctccaccgctggcaccggacacgccgccagtgcttccacaggagtgctgcccgccattatcggggtggcgcatctgctcgtatcgctgggcattctgctcgccatggacaagttcctcaagcaggcattcgtcgccgcgtccatcaagttcccgagcgcccttttcggcatgttctgtgtcttctcggtgctcgtagtcttcgacacattcgtgcctcctctcgcgaaggcgttcattggcttctttgagcccgccacgctgttcatccagaggtggctgtccttgttctacgtcccgacactggtcgtgctgccgctcgccgtcggggatattccagcggcctcaggaatcaagatccttgcaatcacttttggtggctggtttgctaccctgacggtggcaggatatacagtgttagccatgcgaaaactcgtgaagacagagcttcttgcaccatcggagcccacgaagaagccgt

SEQ ID NO: 3826 - DNA, 152 bp, Zea mays
  Clone ID: MRT4577_103493C.1
agcagattttttagaaaaggagagcagcacttgatcactgtgatgggttcaaaggcatgcttgcaaaaaagggtggggctatcaaccaagagctcaccaagttggagaaagcacccacggcggaatggggatatgttataggacggcatgtt

SEQ ID NO: 3827 - DNA, 359 bp, Zea mays
  Clone ID: MRT4577_103494C.1
tttttatattttttttttttttttttttttttttgttttttttttttggaaaaaaattgccatcatttgccatagcctgctatttcaatccatgctgctcagcaacaacgttagtttaagaaagctcctgaaacataacctagctcagatggatacattcaaatccaggttacaatagcattgccgtgcaacaagcactacaattttataattttgacgggcatacttgcagtggaacctagatgcacaccgagataggagtacttcgtactccgtaggtcactaagaacagtccgcttcgatggcgagtgttttggtgactccagggcataaaatcctttccaaagctctcgtttgtc

SEQ ID NO: 3828 - DNA, 133 bp, Zea mays
  Clone ID: MRT4577_103495C.1
cacgcctatataatcagtcgtagtaacggcgtcacgctctgccgccgcgtcaagtcacaacgagatcaatattaccgaccacaatagactctgcgttcctgccgccacggctgtctggcccccggtacggcaa

SEQ ID NO: 3829 - DNA, 407 bp, Zea mays
  Clone ID: MRT4577_103496C.1
ctgttaattcactgataaattatagtactcaaatcacactacaaatacaggagggggggggggggacaaactagtactagagcaaccacaattacagcacgcacgaggccactgcaagggaccaaacggcgaaataccaatcaacacatggaaaggatgtgtcgaaaaaaaaaggaataatgcccagcaatgcagcagccactgtgtctgtgtgacgacggcggactgacaagggttattataataatcggctaatccggacgtgcttgatttgctagtgattaattaaggctagcaacccaatggcgacggcgacccgaactgtcgcattcgcagctgtgtagtgtggctgtgatggacggttttgttcaggaggtggcaatgcagtagggctccaggatgaagag

SEQ ID NO: 3830 - DNA, 220 bp, Zea mays
  Clone ID: MRT4577_103497C.1
gacactcttacccccacgcatttttcatcctaagtttcccataaaaaaatggcagacactcaactaggtcatgatgtcaatgtctcctactaaaatcacctttcactacttgcatcatgccctcaaatcaaaaatgctcgcgccaaatcttgtgatttgtgcgcataaccctagcaagaaacaatatcttctctagttgttcgccactatccataggctt

SEQ ID NO: 3831 - DNA, 403 bp, Zea mays
  Clone ID: MRT4577_103498C.1
ccctctcgtccgcgcatctagcggaccagtgtagcccaagcggcagccggcaggcgcccagcagcagcattgcaggttgcagcaaagcgagcgagatgagatcttggtagtggggaaggaagatgaggggagagtaagtgtctgcatccccccgaggaatgcactgctgctaatgcgctgccggtcagacccagtttgcatggttgctcttgccacccgcttctgggggtcttcaactgcagctaccatggatcaggcggacagtgaggtggactgggtgcctcatcgacattgagggagatgaagagaaggaagtggaggctgtggctgagccattggagtgcaaagatggagctctctgttgagctggatctgccgaagacttgaattgtgaaaagtgcgc

SEQ ID NO: 3832 - DNA, 174 bp, Zea mays
  unsure (1)..(174): unsure at all n locations
  Clone ID: MRT4577_103499C.1
ntgaacatatcatgagaggtcagttgtgtgttaatgaccatgctacagcctacagctcttgtagtgggtgatttttttttttcatatttttaactggtttgtgtattttttactgtcgtttaagtgttaccttgcttctgcctcccccctcgaagaggtgttggcgagtttcgt

SEQ ID NO: 3833 - DNA, 261 bp, Zea mays
  Clone ID: MRT4577_10349C.1
aaaataacccaattcaattatgcagttccaaaaggtacacaagggtgattcaaataaatgactactctttgcacatacccaagagatgaatttatacaaactatccaatggaactttaatactaaaattagatttttaaaattgcaaatactttaaaaaatcaacagctatcattacttcaagtattcatttttttttaaagttaaaacactttttatattaataatttacatttttaatttttttattccatacaattta

SEQ ID NO: 3834 - DNA, 321 bp, Zea mays
  Clone ID: MRT4577_1034C.1
catactctaacaggatacagatttgtgtaaaaacgtaaaattcacccggctttattcaaacgttagctgaagatcacgaccataaacaaccgttaaaacaactgggaagcacataactcttttttgcggtgagaggagaaactctatggacaagaatacttcactacgcttaacctggcctaagagttaaccccaacctgaggctgatgctcaggggcctgaacatggactcactacctgggtttacatacactggttgacaccatccaggtcctttacatagacttataacgacctggagctcttgctagttcctgcgcc

SEQ ID NO: 3835 - DNA, 139 bp, Zea mays
  Clone ID: MRT4577_103500C.1
ggctgggaaccccagttttataaaattctcaaacccaccttattgggtaaaagggccacagttttttttaccgtttcttaccccaaatcaaaaaatggttttcaccccaccaattaccggggaccttcccaaaggaaaa

SEQ ID NO: 3836 - DNA, 265 bp, Zea mays
  Clone ID: MRT4577_103501C.1
ttgattgtgcgttgagctgaggctcgcatgctgtgtctaagagttcgcctcgaggaagaagcttccaacttcagatctaactttggctacaacattccactaaaacatcttgcatacagagtgctcatgtatgtgcatgcatatacactctacagagctgctagaccttttggctgctggttcatgttagggccttacagtgtgaatgacggagcgcaactctacatgattgacccatcaggagtttcatacggatattgtggct

SEQ ID NO: 3837 - DNA, 124 bp, Zea mays
  unsure (1)..(124): unsure at all n locations
  Clone ID: MRT4577_103502C.1
ttctttaccccccccggataaaataccccgagcagagcagcacnccggaacgagggagggagttttagagaggaattcacacactgatttcagccataagaagggaaacataaatggaaattac

SEQ ID NO: 3838 - DNA, 141 bp, Zea mays
  Clone ID: MRT4577_103503C.1
gggaaagagcagcggctacgcgatagaagctggccagcggccgacctttaggtagaacacgaccaaaatcggggattagataagaggaatacggccccacaaaaagcaaactgtcaaaaacacgggggggaacgccctttt

SEQ ID NO: 3839 - DNA, 483 bp, Zea mays
  Clone ID: MRT4577_103504C.1
gggagaaaaaccagtagaactgggttgactagggctacaagcttttccaaacgagccccacttgcaaggaactggttaaagcctttttagacaattcgtttcattaaccaaacaaaagctggggacctgcaattgcttgcaatccaacagcattgtccgcatgccccgcccccgttttaaaagtaaaaaaaacccacccccggtttgcccccccgagagggaacatattttcatgttagcgtacatgaagaactggagctccttgacccaatccttcatgggcgggcgggcggggcttttaaaacaaacccaacgcgcggggagcgcggggaacatggacccccactccagcgtgtaggaacccctgggcatgtcccgggccaccaccttgcgcaactttttgcgggcccccaccacctggtggatgcccaccatgaggttttgttcctgcggcccctggctcaaggcgatgggccccccccc

SEQ ID NO: 3840 - DNA, 262 bp, Zea mays
  Clone ID: MRT4577_103505C.1
ctcctgagttaggatcacagcatgatttacagcgccctactcagagtggacagttacagtgtggtgcagttgatgggtccatctgcaggtgcacataagcctgtaagatctctctggctgtagcccagccacacaggtgtcttgtttttcccagatcctacatacaatgcgcacatggttattctctgtggctggaaacaaaggcaggggcactggacagaatcagataaagagataagcacaaaagaaagaaaagaaagag

SEQ ID NO: 3841 - DNA, 740 bp, Zea mays
  unsure (1)..(740): unsure at all n locations
  Clone ID: MRT4577_103506C.1
tttcagaaccataccaattagctaatttcttctagctctagctacggctcgtctcggtgaagaaggtaacagtaacagaggggatgtacgcgaaggaagacgacacccgcctgagcgccaacgacctctcgcagcgccagtgcatcctgacggggaagcacgtcacgcacgacaagaactacaaggagcccccgtcgtggacattcttcaagaccgcccagatgaagatatggacgttctagcgggtcgaaatggacgagttagtggccacgttcctcttcctctacatctctcatcacttcagcgatgtgggcgtctccaaaggcaactccaagagcagtacaccgtcgnatatcgcagagcaatcatactggaccatcctcgtgatgatgtgcgtcctcgtatactgcaccgccgagatctccgaacgatcacagcaaaccagggacgatatgccacatggttctggtaagaaaatggaccctcaccagatgcagggttttacagcattgtgcacagcccgattagaagtctgcggctggtgaaaagcatgggatggtacagtgcaggatcgctcggagcaaaaggaatactgaggatccctgtgtggagaggcaatgggtagacgcgaaccctgaccaaactctgctgagggaagatcaccagatgactgagatctcatttatcaccggaatcagcttccaactatgtcaatctgatcaaggtgcatgcctgccgag

SEQ ID NO: 3842 - DNA, 611 bp, Zea mays
  unsure (1)..(611): unsure at all n locations
  Clone ID: MRT4577_103507C.1
acctcgagccggccgggactattttccaaaagggggctcgntgctccactttgctcttgccgccgcctctgttctcgattctcccgcctcgtgctcgccgttccgcgcttcttccctacccagtcctacatcacctccccgtccgcctttggcccgcaaccggcggccctcgccgctgatggactcccactcctccccctcggcggcaccgccggcagctgctgaaaaggcgcggtacacatacagcccgaggctgcggtggcagccggaagttgaggagtacttcaacacggcgtacgggcgcgaccactttgcccgcatctctgaggccctggagcatccgtcttgttattcttgtatccgtgtcaatactctgaagtcttccactgatgctgtcatgcataaactgctggatttagtatgcaaaaatgagctctctgctgtaatcaatggattggaggttgttgagctgaatggtggagaccaatcacaagaagggtgctctctggtccacaagtgcccctatgcgggccttgaaaatgtttgtttgttcagggatcaggaccccatgtgctgcattaatgcagccaaccagatcaagttgttaagga

SEQ ID NO: 3843 - DNA, 332 bp, Zea mays
  Clone ID: MRT4577_103508C.1
tccttcacccactaatgaccccaatctacctatttatttacacagcgccactccacttacatggagggctcttactcctggggggtgggctccaacaccaccatcctttacctcctccaaccattttactggattaataaaactttcttccacaaaccttaaccataatcattagtctccacgcagaaaaaaactacaaatattcaactttagtacaccacttttgtccctaattatacctcataataactcatcaaataatattacaccccctcttctttcccttccttattttattcatatctacacattcctcttacaaataatattca

SEQ ID NO: 3844 - DNA, 194 bp, Zea mays
  Clone ID: MRT4577_103509C.1
caaaacagacagatcctatattttatttatttgtaataaaaaataatttccgtataactttttaaatccatttatctagggatcccatctatctatctatagttataagacggatagcatacccaattcagacaattgattggatctggatcgtttgaacaatccactgatacatacggaaacttgtaatttaa

SEQ ID NO: 3845 - DNA, 381 bp, Zea mays
  Clone ID: MRT4577_10350C.1
ctcccttttatttttcctttttcttattaaagagacagagccctctatcttttttataaggccccacaaccccgaaaaacccccacgctacataattccctcataaaccacatcttcctatgaccggactgtcccaactgaacccacaacctcatccaactgacaagatacaaaagctacaacagcttccacaagctacactttaccagaaacacaaaaagctcttgaaagcttgaaaaatgtacaaggcacatcatgatttaatgaaagaaccaaccactcccagagctgctaactcatctctccaacatacagccaacctatgtgaccacattcccgacagactagccaaaactcctcatcagaaagagatccaacacc

SEQ ID NO: 3846 - DNA, 1295 bp, Zea mays
  Clone ID: MRT4577_103510C.1
ccacgacctctccgtccgatccctaggcggcggatccttcctccaccaaacccgcacctgccgcaactgaatcgggtcagatcgggccatcggggaggcgagggagctcacgcggcgccatggacgaggaggagcacgaggtttacggccaggaaatcccggaggacggcgacatggacggcgctgacgttgatatggctgcctccggggatgacgcggcgaagctgcaggagctcgacgagatgaagcgcaggctgaaggagatggaggaggaagccgccgccctccgcgatatgcaggccaaggtcgccaaggagatgcaaggaggtgaccctagtgcatctacagctgaggcaaaggagcaggtggatgcccgttctgtgtatgttggaaatgtggattatgcttgcaccccagaagaagtgcaacagcatttccaagcttgtggaactgtcaacagggtgacaatcttgactgacaagtttggacagccaaaaggttttgcttatgttgaatttctggaacaggaaggtgttcaggaagctcttaacttgaatgaatctgaattgcatggtcgccagattaaggtcgccccaaagaggactaatgttcctgggatgaagcagcgtccaccacgtgggtataatccataccatggctacccttatagatcatacggggcaccgtatttccccccatatggttatgggagggctcctagattccgccgccctatgcgctacagaccttacttctgaagtacggggtagggtaatgaagttcaatgcaaaaccagcccatggtcactggtcagtcccgggaataatcaactgtatcgtttgcactgttgcggctcaatgctcctgtatcagctgccttttctgacctttgtttcaagtgccgccataagcgacggacatgttgtattggcttgtaatacaggacgtagtaagtgcacacactttctgtaagcgtgctttcccacttcccagggttactactgtttgcaatttctgtagttctttgggtcggtcggttaggacatgggagtggatcgttctatgcccatttgaggtagattagttatatgaagagaaagcttcgcatgcggggctgtcttgtttgcagattgccactacctcagtacggttccaggttcctcaaggtatccgctgagcatctgttctggtgtcggattccgagttcaggtcttgtaactaataaaaaacggaaattataatgtctctctttaccagactgttttaccgcgggcaaatttgatccgctgttactgc

SEQ ID NO: 3847 - DNA, 525 bp, Zea mays
  unsure (1)..(525): unsure at all n locations
  Clone ID: MRT4577_103511C.1
cccccgacccccgcccaccaaaccccaaccccaccccttgaccgcgcaaccaggggggcggggggagaaggaaccaagaccccgaggaagaccgcacccccgccgcggacaaacagcaaccgccaaccgcaccaagaccgagcgcccgagccccagccccgcnacccacccgccccgncaacccacgagcccgacaaggnncagcganacgagcgagggggngaccncanngnaccacaannnanaccnnnnnnnnnnnccncncaancanccaangnaacncannnccanaanncacanancncnnanacanacaanncacnnnnngaaangaaacagncngagacacggaaancaagngaggaagccacaccaaaaggngnggcgnncagnccgcnagaagcagccagcgcnaaacccagaaggaggccccagacaagcgagaggnccgaagnaaggcgaagcagagaagcaacccaagacaccacaaacaggaacccagcccagcaaacagccgccaagaac

SEQ ID NO: 3848 - DNA, 265 bp, Zea mays
  Clone ID: MRT4577_103512C.1
ctgtggtaacttttcttacacctctatctataaactcctaacgtctaaatgatcctatagtccactcttttactgttctttttttttctttaaatcataatcaaactagcttttaccctattgtttcacacgagattatttttcttcttgaacttatattatgacaccttttttatctttttaacactattttctttcctaatcaaacttcttaccttacaatttttttcaaccgtatctattaaataatattttttactttttt

SEQ ID NO: 3849 - DNA, 2175 bp, Zea mays
  Clone ID: MRT4577_103513C.1
tttcccacaacaaatccgacacctgcctcaactaatcgggtcagatcaggtcatcgggaaggccgccatggacgacgaggagcacgaggtttacggccaggagatccctgaggacggcgatatggacggcgctgacgttgatatggccgccgccggggacgacgcggcgaagcttcaggagcttgacgagatgaagcgcaagctgaaggagatggaggaggaggccgccgccctccgcgatatgcaggccaaggtcgccaaggagatgcaaggaggtgaccctagtatatctacagctgaggcgaaggagcaggtggatgcccggtctgtgtatgttggaaatgttgattatgcttgcaccccagaagaagtgcagcagcatttccaagcttgtggaactgtcaacagggtgacaatcttgactgacaagtttgggcagccaaaaggttttgcttatgttgaatttctggaacaagaagctgtccaggaagctctgaacttgaatgaatcggaattgcatggtcgacagattaaggttgcgccgaagaggactaatgtccctgggatgaagcagcgtccaccacgcgggtataatccctaccatggctacccttatagatcatatggagcaccgtacttccccccatacggttatgggagggctcctagattccgccgccctatgcgctacagaccttacttctgaagtacgtgcggggtaataatgttcaatgcaaaaccagccatggttagtggtcagtctcgggaataattaaacctactgctgtatcgtttgcgctgttcaatagttgacatcgttgcggttcaatgcacctttaacaaatcctttttcatgcccactttttctgaccatttgttgtacagtcccagccataagcgacgggacatgttgtattggcttgtaatacaggacgtagtaagtgcacacactttctgtaagcgtgctttcccacttcccagggttactactgtttgcaatttctgtagttctttgggtcggtcggttagaacatgggagtggatcgttctatgcccatttgaggtagattagttatatgaagagaaagcttcgcatgcggggctgtcttgtttgcagattgccactacctcagtacggttccaggttcctcaaggtatccgctgagcatctgttctggtgtcggattccgagttcaggtcttgtaactaataaaaaacggaaattataatgtctctaaaaaacacctccgaaggtagcggaagcccctgtgccactgatttagccaataagtctgcatgctcattttctccccttgggatgttctttacaaagaaaccttcaaaagaagcttccaaccttcggactgcatctagatatttttcaagcttcggatctcttgccttgctacttttgtccacatgacctgatataacttgtgaatcagtcttgaaaactgcccttcttatactcattgccttaagttttcgaagccccaagaggagggcttcgtactctacaatattatttgtgcagctaaaatccaattgtactgcataacgagttctaactttggatggtgctactaggacaacagttgcccctgcaccgaaggttccccaggacccatcacaaaataccatccaagcttcgatatcatttattctatcttcatcctgagccccgcagtatgagaaacaaccacgtatagaagcaatggggttcctttgagccccccttttcgaatttggcggctctatccgaaggatagcttcgattttgcttaggttagcttcaataccctttgttgacaccaagcagccaagaaacttgtcattctttactccgaagacacatttctctggatttaacttaagaccagcttgtctgaaattggcaaatgtctcttgcaaatcagcaacatggttctcttgttttgtgctttttactatgatgtcatcgacatatgttagcatatttttgccaatttgagagtgaagaactttggcagtcattctgctgaagcttcctccagcattcttgagcccctcaggcatccttctatgtgcttccttcttctgtttcttgttggctggttcagaacttgagccgcctgtgattggaaacactagcttcgtggccaaagatgctacaacttggttgctttgcgaagccat

SEQ ID NO: 3850 - DNA, 1250 bp, Zea mays
  Clone ID: MRT4577_103514C.1
attgggtccctcgaggccggccggggacctgcggcaactgaatcgggtcagatcgggccatcggggaagcgagggagctcacgcggcgccatggacgaggaggagcacgaggtttacggccaggaaatcccggaggacggcgacatggacggcgctgacgttgatatggctgcctccggggatgacgcggcgaagctgcaggagctcgacgagatgaagcgcaggctgaaggagatggaggaggaagccgccgccctccgcgatatgcaggccaaggtcgccaaggagatgcaaggaggtgaccctagtgcatctacagctgaggcaaaggagcaggtggatgcccgttctgtgtatgttggaaatgtggattatgcttgcaccccagaagaagtgcaacagcatttccaagcttgtggaactgtcaacagggtcacaatcttgactgacaagtttggacagccaaaaggttttgcttatgttgaatttctggaacaggaaggtgttcaggaagctcttaacttgaatgaatctgaattgcatggtcgccagattaaggtcgcgccaaagaggactaatgttcctgggatgaagcagcgtccaccacgtggatataatccataccatggctacccttatagatcatacggggcaccgtatttccccccatatggttatgggagggctcctagattccggcgccctatgcgctacagaccttacttctgaagtacggggtaatgaagttcaatgcaaaaccagcccatggtcactggtcagtcccgggaataattaactgtatcgtttgcactgttgcggctcaatgctcctgtatcagctgccttttctgacctttgtttcaagtgccgccataagcgacggacatgttgtattggcttgtaatacaggacgtagtaagtgcacacactttctgtaagcgtgctttcccacttcccagggttactactgtttgcattttctgtagttctttgggtcggtcggttaggacatgggagtggatcgttctatgctcatttgaggtagattagttatatgaagagaaagcatcgcatgcggggctgtcttgtttgcagattgccactacctcagttcggttccaggtttctcaaggtatccgccgagcatctgttctggtgtcggattccgagttcaggtcttgtaactgatcaaaaaccgaactaataatgtctctctttaccagactgttttaccgcgggctaatcttatcc

SEQ ID NO: 3851 - DNA, 283 bp, Zea mays
  unsure (1)..(283): unsure at all n locations
  Clone ID: MRT4577_103515C.1
tcgctggacgttncagcctagcaattagtctcatcttgactccacgatnntggagaaccctcgaccagccatgannaggtgctganntcgttgcccttgctttctcctggcnngctcgctgcgaggcnngccgcctcctagtacaagggcggcggcttgtgggctgcctagacactcnnaccgtttcaatctacccgccnnntccgttctatttatgccgccnnntccgttctaatttctgccgccnnngcagcagcaagccccgcagccccatgttgcaata

SEQ ID NO: 3852 - DNA, 1666 bp, Zea mays
  Clone ID: MRT4577_103516C.1
cccgctgtcccggccgcttgtttgttgtttacttatattttttttgcccgtcagcagccccaccgcaaccgacgcctccagtcctactcctccacccagctcgctgcttccggaatccggagagctcgcgtcgcgcgtgcgcgggcgtgggtgcgtgcggcggcgaagcaccagcaccaccctctcgcgtcgcgcgcgcgcgcgcgtctcgatggccgacggcgagccttccctcacgcgctggaccttcgaggatttcgtggtccactacgaggcgcgcttcggcctccggcgcgaggccgacggcgacggcgacggcgatggcgacgatgcacccccgccgcgcggatccgatcatggggccagccgccccgccactgcccgcgccaacggcggcgcggacctcgccgtcttcgagcagttcgagcggatggagaggaaggtggagataagcaatggagcaatagaggatggtccactgcagaaatctctacttccttcatttgaatctgcagaaatgcgcaacttagctgagacattgttaagggatataattcgtggaagtccagatgttaaatgggaaagcataaaaggtctggagaatgcaaagcgtcttctcaaagaagcagttgtaatgccaattaaatatcccaaatacttcacaggtctattatcaccttggaaaggcatattactgtttggtccacctggaacaggaaagacaatgctagctaaagctgtggctactgagtgcaaaacaacttttttcaatatttctgcctcgtcgattgtaagcaagtggcgcggtgactcggagaaactagtgaaagtgttattcgaacttgcaaggcatcatgcaccatctactattttccttgatgagattgatgctatcattagtcaacgtggtgaagctcgtagtgaacatgaagctagccggcgattgaaaactgagctattaatacagatggatgggttgactaagacagatgagcttgtttttgttctagcagcaacaaatttaccatgggaattggatgcagcaatgctgcgtcggctggagaagcgtattcttgttccattgccagagccggatgctagacatgctatgtttgaagagctcctgccatatacacctggcacaatggagattccctatgatgttcttgtggagaaaactgaagggtattctggctctgatattcgcctggtatgcaaggaagcagcaatgcagcccctaagacgggtaatggcagttcttgaaggcaggaaagaagaggtccctgagggtgagttgcctgaagttggcccagtaactacagaagatattgaacttgctttgaggaatacaagaccgtctgcacatcttcatgcacatagatacgaaaagttcaaccaagattatggcagtcatgtacatggctaaaggggagaagcttgttgtagggtttaatttgtatgctcatgcgtgggccaataggtgactactgaattcatcgacatgctgaggtatccttgtaaacactatgcttatccttgtatgctgtacactatcattcatttgatgagcaataagctgtttggtaactcagtctcacctggataaggagaaactacgattttccctgcatttggctcgatttatctattcctctggtgtcactct

SEQ ID NO: 3853 - DNA, 1192 bp, Zea mays
  unsure (1)..(1192): unsure at all n locations
  Clone ID: MRT4577_103517C.1
tgcctcaactgaatcgggtcagatcgggccatcggggaagcgagggagctcacgcggcgccatggacgaggaggagcacgaggtttacggccaggaaatcccggaggacggcgacatggacggcgctgacgttgatatggctgcctccggggatgacgcggcgaagctgcaggagctcgacgagatgaagcgcaggctgaaggagatggaggaggaagccgccgccctccgcgatatgcaggccaaggtcgccaaggagatgcaaggaggtgaccctagtacatctacagctgaggcgaaggagcaggtggatgcccgttctgtgtatgttggaaatgttgattatgcttgcaccccagaagaagtgcaacagcatttccaagcttgtggaactgtcaacagggtgacaatcttgactgacaagtttgggcagccaaaaggttttgcttatgttgaatttctggaacaagaagctgtccaggaagctctgaacttgaatgaatcggaattgcatggtcgacagattaaggttgcgccgaagaggactaatgtccctgggatgaagcagcgtccaccacgcgggtataatccctaccatggctacccttatagatcatatggagcaccgtacttnnnnnnatacggttatgggagggctcctagattccgccgccctatgcgctacagaccttacttctgaagtacgtgcggggtaataatgttcaatgcaaaaccagccatggttagtggtcagtctcgggaataattaaacctactgctgtatcgtttgcgctgttcaatagttnngctcgtttatcagctgccttttctgacctttgtttcaagtgccgccataagcgacggacatgttgtattggcttgtaatacaggacgtagtaagtgcacacactttctgtaagcgtgctttcccacttcccagtgttactactgtttgcattttctgtagttctttgggtcggtcggttaggacatgggagtggatcgttctatgctcatttgaggtagattagttatatgaagagaaagcatcgcatgcggggctgtcttgtttgcagattgccactacctcagttcggttccaggtttctcaaggtatccgccgagcatctgttctggtgtcggattccgagttcaggtcttgtaactgatcnnnnnccgaactaataatgtc

SEQ ID NO: 3854 - DNA, 300 bp, Zea mays
  Clone ID: MRT4577_103518C.1
atattaattgttttttactctcactttaatttactttttttttttctttatataaaaacaccgtttttcctatcattacacctaaaccatgacaggaaatgggacccaaacactgacgcatccatgaggataggtaacatattacagaagtgcaaaaagattatcgggcctaaattccacactttcaaagatccaaaacaaagaaccgcagtgatgcacaagacacccccccaagggtgaatggggaaatttcgtacccttctatacatttcagtgggtggaacacaaagccttacaaaa

SEQ ID NO: 3855 - DNA, 830 bp, Zea mays
  Clone ID: MRT4577_103519C.1
tcatacgtaacaagtcatgcatgtagatcttttgatgactgatctggttacagtggcaaagttcagggactcagtaatagagtattatatatagggtatattaagccctcaaagttacgctaattaggtcagtaactgcaaacatctagctagctagctagctagtgacatgataccagcagtacctgactacctgagatcgattgtgagattacgagaagggatgattttttttgagggatacgagaagagagggatcatatcacgaacatgtagctagctgctagcgcctagagagatgatgagatgcatgtacagcgaggccgggatgaagcagctagcagtagcaggtgagtttattagcgatgctggggatagaaattgatagaatagctcggccggccggcctgcgagtagatagacggtggttcattctggcacacatccatcttggcatcttcctacctactaatcggacatgtcgttctggcatgatcacgctatgtatgggcatctctctctctctctctctctctctctctctctctctctctctctctctctccattatattaatttcaattagccctaataaacttggtccactaatgaatgagcaaacctgctgatgttaattaagctatgtatgtgctcctgtaggagacttttatcttgttaaagaaaagaagaaaaaccatgcttggttaatcgggtttatttcaaattttcaagaacccgaaaaagaaagctcgttgtcggtaaaaaaaaaaaaaaagatgaagaaaaactggtttgggtacgtacggtgacgaataatgaatcacatcgca

SEQ ID NO: 3856 - DNA, 455 bp, Zea mays
  Clone ID: MRT4577_10351C.1
gttctagatcgcgagcgccgccctttttttttttttttagtttccaagttccaaccaagaatgccattgaacatcacttgcaaattcaatacttttattgaggagcacaactttctaaggcttataaatagcccaaaaaattctcctcttctgctgtatcaggcattcagagtttcagactcacaatatgcacccttccattcagatatacgccgttgtcctctgcatcgtacccagcttcctcagctgcaatgcagaagatgccagagcaccccagacccagagcagcctggttcttggccttagccatgtcagatccctgtacaccccatcactgacactagtgaactccacaggatacgacttcttggacatcgttgagccagtgacagcatacacagacggctacctgctgtccctgaacctcggcacgcccccgcaggtgttccaggtgt

SEQ ID NO: 3857 - DNA, 584 bp, Zea mays
  Clone ID: MRT4577_103520C.1
gcaatgcaattgattttatgttgacgactgataatgccgaaccttacccaactgataattctctcatatgacatatggactgccctatgagtaaatccgttgaataactgcttctgtcccaccatttctttgcatgccctaagcaactctcataatggccaggacatgcattaacgacggatcagtattggccacaacttggacttgaacatcgaactgcattcatacttattaattttcactgatactgttgctgttaaacacaagctttactcagcatcacggggcactgccgcattttataggaactgcacttattgatactgatcacagagggaaaggtgcccacgggaggcttctcccaactcagcacgtgtgataactgctggatggcaaacagcatactctggatgttcaggtgcacaaactttatggatacgctgtttgtagccaaactactattattaccaatgcgatggacgtaagtctctaactgggtggtgagaacattcatgctgaccacggacacctgctgaagataaatgccaagagcaatcttgacatgcttgatgatgacacgatac

SEQ ID NO: 3858 - DNA, 362 bp, Zea mays
  unsure (1)..(362): unsure at all n locations
  Clone ID: MRT4577_103521C.1
gagccccactctactcagtcagcagaacccgaggggcgggcggcacaagcagggggggggggcagaacgaggaaggatgcgggccatctgccagaagcagggggcgcacgcgccgcaggagcggaacagcccccgcgccggcgcgggggccagcaagccccggaaccccgacgagatcctgcgnnannnttacgccgagcacccggccggcggcttctccggctccttcggcggcggagccgcgctcgcctgcggcggaccgtgctccggcggcaccggcacctaccagcggatggtgtgcgggcgggaccacatatactgagaataactggggcggctggacaaccggagcgggcggagcc

SEQ ID NO: 3859 - DNA, 1164 bp, Zea mays
  Clone ID: MRT4577_103522C.1
ctcgatccggtcgtctgtgagtgcatgcgaggcctccggttgatccggctctctctcggtgcagttcgtccgggagggggagataagcgaggtggagtggtgtggtcctaagccaagccaactagatcgagtcgtcaagaaggttggagaggagagagagatggggaagcaggcggcggtggtgctggccgtgaacggcaagcggtacgaggccgccggcgtggacccgtcgatgacgctgctagagtacctgcgcaccgagacgcccgtcaggggccccaagctcggctgcggcgaaggtacgtgcccgccgtacgtcaccatggaatggatatagatagatgtgcatgcactcttgtatacctcgtgccttcgtctccccagctagctagtggattcgcggctgagcttctatagcttggttgttcctcaacgtcaggagagaagaccgccaagcacacagatgcctgtctttgtagtagaggggaatataatagggcaataggcggggagggaatccgcgtacaccgtacacgtacgtacgtgtaggcttcaccgtatatatgttcttcgtcggcccctttgcgttcccgctcctggcctgcctgccttcagttttctcgtttcccctcctccccgattttcttgtgaggtcagccgtctgtctcactgacgcgccaagaagctgagagccatagaaaggcacaggtgacaggacatcccatcccgtcccactatcccagtacaagattcgtaaaagcccaggtgtcccagatacaccctctctgatcgaagaaaattcagacacgatatattattaccatcttcaattaacaaagcaacaacagcgagatcacagttttcgccagaaaagacagctcccagtcccaggctaggcatctagcctgctttcgtgccaaaacacccaggaacagacgaagagactaaataaacatacatgcatgcacagcagcacccaggttgaagaccactctgttctcggtttcggcaggcaactgctaatccaattcctgctcttcaggtcttcttcgtcatactagctgaatgcccgtgcgttgcaacgggaatatataataccagtatactacgataacttgtatacaaaatgtgtgttataccgttataagaaaatgtttcataatc

SEQ ID NO: 3860 - DNA, 879 bp, Zea mays
  unsure (1)..(879): unsure at all n locations
  Clone ID: MRT4577_103523C.1
ttgggtacctcgaggccggccgggcagaccttcgtcatcatcaactgtggcgcgctcccagccctgctgtcgctcctgagctccaccaaggatggtatccgtaaggaggcttgctggaccatctccaacatcaccgccggcaactctacccaaattcaggctgtcattgacgccaacatcattcctcccctgatccatctcctccagaacggcgacttcaagacacgaaaggaggcatgctgggccatttccaacgccacaagcggtggtctgcagaagcctgcccagatccgttacctcgtccagagcggctgcatcaagcccctgtgtgacctgctcgcgtgccccgacaacaagattatccaagtcgcccttgacggtctagagaacattctcaaggtcggagagatggacaaggaggccggcgagggtggtgctggcggcgagcccatcaaccgctacgccctcttcattgaggaggttggtggtatggagaagatccacgagtgccagaacaatgccaacgaggagatttacatgaaggcgtacaacatcatcgaaaagtacttttccgacgatgagggagaggcggagaacatggccgaaggcggaccccaggtcaaccaggagggtcactttggctttggagctgctggtcagcagcaacaacaaaacttcaactttgccaacggaggcgactcaatggacatgtaagcggatgatttattcgcgactattgccaatgagttgagaggnggcatggtcagccatgcagcgctccctcgatgaccctagccagccacgagaggggcgactagaggggtttgccagtggcccctggaaggggttttgagatcatacacgatatgatacgtgacc

SEQ ID NO: 3861 - DNA, 478 bp, Zea mays
  Clone ID: MRT4577_103524C.1
ggggctattagtcggcggccgcccaaccatcatttcggcccgctccagcttcccacccgcgcagcccacacctgaagctcgcgccgacgtgtgggtcccgcttgtcagccgcttttacttcgcgcgcgcgctgggtgactctctgtctggcgggcccggggcgccagactcttcgtccacctccgtaacaaacgcgtgagaatcgaccgcgcctgagcaccgtaatctccggaattcggttgcgattggacctagtctcgcggggaaagtgggggcataagaagacccggcgtactccatcctgtggcctcgctaatcttctcaaaatcgcacgcgcacagaaaacccatagcctcgcccatgctcgagtccgccgtcgccggcttgtgcttgcaacgccacttgatgtccgggaggtagttagggagctgcgcgagcccactacgaaggcatagcaatccctatttggtggtcggga

SEQ ID NO: 3862 - DNA, 1376 bp, Zea mays
  Clone ID: MRT4577_103525C.1
cattgggtcccttgaggccggccggggccggccggggacccatctcagcaatagagctcgatcggcgatctgtagtagcagcactagcactagctacgtagtacattgcatcgtcgtctctttgctagtagtagctatctcctggccgccatggcgtcttcctcggtctcatcctgcctgctgcttctcctgtgcttggcggcggtggcgtccgcgcagctctcgccgacgttctacgactcgtcgtgccccaacgcgctgtccaccatcaagagcgccgtgaacgccgccgtgcagaaggagaaccgcatgggggcctccttgctcaggctgcacttccatgactgctttgtccaggggtgcgacgcgtcggtgctgcttgccgacaacgccgccacgggcttcaccggcgagcagggtgctgcgcccaacgccgggtcgctgaggggcttcgacgtcatcgccaacatcaaggcacaggtggaggcagtctgcaagcagaccgtctcctgcgccgacatcctcgccgtcgccgcccgtgattccgtcgtcgcgttgggcgggccgtcatggacggttcctctggggcggagggactcgacgacggcgagcctgtccctggcgaacagcgacctgccgcctcccttcttcaacctcggccagctcataacagcgttcggcaacaagggtttcaccgcgaccgagatggccacgctctccggcgcgcacaccatcgggcaggcgcagtgcaagaacttcagggaccacatctacaacgacaccaacatcaaccagggcttcgcgagctcgctcaaggccaactgcccccggcccaccggctccggcgacggcaacctggcgccgctcgacaccaccacgccgtacagcttcgacaacgcctactacagcaacctgctgagccagaaggggctcctgcactcggaccaggagctcttcaacggcggcagcaccgacaacaccgtcaggaacttcgcgtccaactcggccgccttcagcagcgccttcgccgcggccatggtgaagatgggcaacctcagcccgctcaccggatctcagggccagatcaggcttacctgctccacagtgaactaagattaataataatcaccatacgcaaaaaagagtggtatattcacatgcgaataataaggctaagccaccatgtgactagctagtggtatattcaacgaatcgtttgaaagggacgagtgcgactttaattttagatactagctgcaaaagcggcatatatgtatcagcccgatcaattgctcaaagaaaagatgcacgtcatacatttcaaaaaaaaaaaaaaaaaaaaaaaaacccggctgaaaaaaaaaaaaaaaaaaaaa

SEQ ID NO: 3863 - DNA, 1827 bp, Zea mays
  Clone ID: MRT4577_103526C.1
atggccagagtgcgatcaactgcaagggtgtctcatgagggggaagaaatcgaggccactgaaacagcaccaatttcagaagtaatggaacgattaggtctagttgtgatagagcgagttgttgacgaaggtgctcctaatgccgaagctgagcaaactattgttgaagaagaaaatgttgatgagagtgaagaagattacagtattttgatcccaacaaagcccagtcatctagattttgagaaatctactgtgtccgaagacgacatgccaatgatgatgagactggactattttggagaagctgaaagcaaacttgttcgatttgtcgaagaagaaactaccccagagccgaagaaggatgaagttgtgtaccagggacctagtgcagaaatatttggccaaccggacgtatccaacgtcaagtggctaggaatgccgaagatgaaagaaacgaagaagaagcatgaacttgttcgactagcttatcgtttcaagtttgaaaaacaattcaagaagccttgcaaggaatggctggacatgactgaaaccatgtgcaacgaaatacttgggaattataccaagaaagaagatcaattgatgacaatatccttcaacacccggccaaaacgaaggttaaaccgggtaatggatgctttaaaatttgaatatcctaattatgaaaagcttgacggaggtgccgaaggggttaaaaggaaaagaattgttagcattctgagcaggcaagatgctagaatgctactaagtcctctagggctagaactgacgaaacttttattgaagaaggacgagccttcggctacaaagaagaaggctgatgggcagaaaaaacgaagaattgttactgtcatgcaagccattgaacggacaccaccgttggcctcgacatccaaaataacacccattgcaagcgccgaggccgttgccgaagctgatacctctaccgaagctgccaaccttgagagtacaatgtctgggattgataaaatgctctcggatatgactgcggaagaaacagctgcggctacagagaagccaggagctatgctctttggtggaatcgacgaaggggccttaggatgtattcgagaccgcgccggggcaaacataatcggcactctatcaaagagtgtcggtttcccgaagcttgaagctgatatcagcggctaccggcaacaacatatcgtcggcagtctgttttactccaatttcaagagcatgctgatgagtaaagcgttaaggatgcaacaagacctcgaggacaagaaaaatgaaatcataatcgagggcttggaaaataaaattaaagattacgaagcttctcttgagaagaaagacttcctgcttcaggcaacggagggttccctcgtggagcttcaaactaaaaatgccagattaaacgaggagcttctccaggctcaagtaactttaaagaaaaattcagaacacttcgagcaagagaagcaagaactgcaagcaaaatgcaaagtcgaagctgataataatacgaggctgcaggagtctttgaaggagcttcagaataagtgtttggaattcggtagtcgttgcgtgcaacggttgaaaaaggtcttcaactcggttggggccagcttcgaagatattaccccttcggctgaagacatatcaaacacttttgatcatattgaaaatgaagttgatgctcttgatgaagtgatagccgggcacagtgatttttgtgccttgctagcttctcgcggcacggctgcagcatttttgaaggctggttgcacgcacgcgaagacggatggtggtgccgaaggttga

SEQ ID NO: 3864 - DNA, 315 bp, Zea mays
  unsure (1)..(315): unsure at all n locations
  Clone ID: MRT4577_103527C.1
ccggggcgacgcacgcgnccggggccgcaccgcnggccgacccngagcncngngaagggcncgagnnggagcacgccgggcgggacccgaaagaaggagaaccangcccgagcggggcgaagccagaggaaacacaggaggaggcacgaagcgacaccgacgagcaaancgnacgccggacgngggcacaggggcgaaagaccaaacgaaccaacgagnaccagggcccccccgaagggacccgcaggagagcgggagcccacacgagancaagcggagaaagccaacagacagaggcagcgggggcgcaacgcc

SEQ ID NO: 3865 - DNA, 261 bp, Zea mays
  Clone ID: MRT4577_103528C.1
cttctaagtaggaaagggccaggttggacgggggtgttttgaaaatggagccatgtctggagaggaaaatgtcaaccacgcaatattgaatgctgctgaaaacgggatgcttgctgggcaggtgccatcaatacctaatggtatgggaacttcaccagtagatgagagtaccatacggtgtaggttctcagccatgaactcaatgccgagcttagactggggtggtactacatagactattggtgagaatgccagcgggta

SEQ ID NO: 3866 - DNA, 489 bp, Zea mays
  Clone ID: MRT4577_103529C.1
gcttgctcacagcgcacacaaaagcctgtttactgctgggaatggtggctggcactattaagcgtctccggctcttgagtgatctccaaggtaagcagcccgccactcccttggaagaatgggaaatagataggaatgtcttgttttctcggctggaggagcaaggaattaaccactccacatccctccgcgatttctgaagcttatggctagaaaatctatgaggttgctcggaatgaacaaaatagtccttccttctatctgatcattcaaattgctctcttcgcttcgcttctatctggatttgcttgcctcagtctagttgcaagatctgtattcggtttgacttgggttcttgtcagtttgtttgatgtgagtagattggcgcacgaaatgaagtattaacctgactgaactgcggcagtttggtcatgttggtagccgaagcattcattcttgagtagtcactcttcggaatggattatcagt

SEQ ID NO: 3867 - DNA, 565 bp, Zea mays
  unsure (1)..(565): unsure at all n locations
  Clone ID: MRT4577_10352C.1
ccacgcgtccggggcatgagctgccaggttttttctttatccacacgctgatggagttgattattacttggccggtatgattggtccaaaactgcaatcatttgatccttgtcctgcgagcttaagcatgttgttttctggggttaacttagcagcactctccggtctagagtttagactatgttcacggggcttactttattgtttcgttcaagcaactcttgaaccatgtgatttgctcgtttctaggggaccactttattttattttattttttgtttagacatgcttgtggtaatcataatttggtgttccattcaagaaagctattcatgatgtgatatgctctctttgaggcaagggttgtgctttagctcctgtctcatattgtctcctctttatatgcttttatggatgcctttcggctntagatgttggccctaccattttaacaatttttggcctttaaatttcattgctttcttaccgcaacttctagccgntctttggaaatagaatccttgntccctgtgntgactagctatggttttttttattcccatga

SEQ ID NO: 3868 - DNA, 331 bp, Zea mays
  unsure (1)..(331): unsure at all n locations
  Clone ID: MRT4577_103530C.1
ggggccgacgacgcgtccgaatggctcttttccagtgtacttttgagattttctgccangnnctgctcgagctcnacgaggacaatttcaatgcaatgtgcagctccttctgctacctacaatagtggccgtacctgggtgccgccatgtgcggcgccaatctcgccgtgccgcctgccgtgccgacaccaagcgccagcgacggcaacgactcctcctcttgcagcgtcagcggcgcgttgagaaacaccatgcctgactcatacctaaacgcctaatgccaatcaaaccacatgaccataatacccataacaagcaccagccatctgtc

SEQ ID NO: 3869 - DNA, 491 bp, Zea mays
  unsure (1)..(491): unsure at all n locations
  Clone ID: MRT4577_103531C.1
ctgtgtgttttttttttttttttttttttttttttttttttttttttacataagcatattccatttggcaaatattatatcttatacattttttcgagggcaaatggactggtcataatcatataaattaaatttcaggcatggggagctacaggggggggggtccataacatggggcaggctgatcttcatggaaacctttgacgatgatcagaccggagcactaaaccctttcaatttagcatcacagggtcacagggacgatccaccaaaaacagggcgtaaaattgccggtcgccacccntgcctncaaacattccggtcatctccttccgtcccctctgtttctttgggggctgcgggccgcccttgccacccttctgtttaggcctttggggggggggggccttgcttatgggctggccattcctggtggggggcagggcgctgctcgcccctgtgtttggggttttgggggcctggttgtggcc

SEQ ID NO: 3870 - DNA, 539 bp, Zea mays
  Clone ID: MRT4577_103532C.1
ccggccgggaagcaacactccttaaatatatgcatatcagttggccggccgtggcaccacatgcatgatggacggcggcctcggcaaccatgaacatgaactgccgtacactgccggcttcctgcgccacgggagcatggtaatgggacaacgcgctgggtgttcaccggccccggcgccggcctgctactagaccctgcagcgcttctcctgaatacacctccacaacagatagaaagacaaaaaaagagcgaggacactccgacaagcgcaaggacagacacctcgacgtacatcacagaccggacagaatacgaggagaataataacaacatgaccacgtgcctctgccttcccaacaaaaaggaggatgcatggaatgataagcgaccacatatacccccacctcgtcactccttcataaccagaacgactccaaacctccacctcctccctccaaaggttcctccaagggtatggaccccaccatcgaatggtagaagagcgatttccagaagctcaagaccgacgtctatgac

SEQ ID NO: 3871 - DNA, 475 bp, Zea mays
  Clone ID: MRT4577_103533C.1
agcaggggtaacaacgcagagtattttttttttttttttttttttttttttggtttttttttttttttttttttttttttttttttttttttttttttttttttttggcggcccgaccaaagctacgtgggcccaggggggagcaaaggacaccggcctgacaaaaggggggggggggcaaaggacacaccggcgtgacaaaaaagcctttccatctcacaacaggctccagccaatccggggggggccacctccgggatttccaaaacttcccttacgggggggggggggccccccccttccccgcccctttttttgcccttgcccctggcccaccccccggggttcggggcccggtcccgggcccctcccgggcgggttacttcttctgggggtgccccgccccgcccgcggcccctgggggggtccccccggttaagggcgagaccgccgccccccgggggccggttccggc

SEQ ID NO: 3872 - DNA, 468 bp, Zea mays
  Clone ID: MRT4577_103534C.1
acttaagctttttaaatttgttttctttgatgcttctgctgtaaagagacaaatcctgctctctacaaccagaattaatttctaaggggcacgaattaaaccggggacgtccacttgacaccctccaaataaaggagacactcccgcatgccgaggggaattaacataactaataaaatgaaagcctggacacaacacatcaacttttgttccatttgaagggtgcagaagtatgaaacaacttttgggcggggacccataaaactcaccagataacttgatctaaggttatgcttggcttgaacctcatgtcttattgcaacttctgctcttggaaaatttgtaacctggggagaatgttgccttctcactaacttcaattaatatgctattctcttgcttgagcaaacccgtgccgggtaccagagccgagtgggctttcctgtatcttggatagggtgatctttg

SEQ ID NO: 3873 - DNA, 435 bp, Zea mays
  Clone ID: MRT4577_103535C.1
tttccacgcgtccgcgcgtcgcgccccctgccattaaggccagatcctagcccgccattaatgccgctactagcccgagctccacgagatcagagaggcggcggctgggctgaggccccgtgttcgcgccaggccaggcgtggccaccgtgacacgcgccgacgccgtttataaaagcgcaccgacgccgtccgccctcgcctggggttctgcatgctctgcgcctcactctatgtcaccgcgcgtccgtgtccgtcaccagaccttggcggccgcgtagcgtaggatgctcacgtgcatcgcgtgctccaagcagcagttttccggcggcgggaccgacactgcacgagccggcggaggacgacgatgtcgttgggaaagcctcctgctacagttcctgatgacaagaaatgggctgagtggactgcagagagg

SEQ ID NO: 3874 - DNA, 470 bp, Zea mays
  Clone ID: MRT4577_103536C.1
gtttggttgctggaaagggagtggacttttacaacttctcatgtccctattgttgggagggttcggagtccggatcgggatttgccacaaccagattgttcaacactcggaaggctcaccaaatcgtcctacgcttctgcttcctcctccacgaggtgaggaaaccctagcgactgaccatggcgttgctcccgcgcaccgcacggttggccttcctctctaccccgcggtcgtactccgccgccgccgctgcgggcgcctccccgacctccccagcgccatacgggggcgcgcccccaccggcgatgtcgaagacggccgagttcgtggtctccaaggtttatgaccaaatgcctgagcctagatgggttatttcaatgggcagctgtgccaacggtggtggatactaccattactcctactctgttgtacgtggatgtgaccgtatagtccccgtggacatctacgtc

SEQ ID NO: 3875 - DNA, 1840 bp, Zea mays
  Clone ID: MRT4577_103537C.1
gagccggcgggaacctgcacccatccaaccagacagcaagtatcccccgatggctcatcgcgttctcctcctcctctctctcgcgtcggccgccgcggttgccgccgccgtcgacgcggaggacccgctgatccggcaggtggttcccggtggagatgacaacgatctggagctgaacgcggagtcccacttcctgagcttcgtgcagcggttcggcaagtcctacaaggacgccgacgagcacgcgtaccggctgtccgttttcaaggccaacctgcgccgctctaagcgccagccagcgtcgcgacagagtgagctagtgagtagcacgacaacaacaatggcttccctgaaggccgcgaagcccagcggagttgcggcgcagggcaaggagccggcgcccaagctcagcgagacggcgacgaagccgtcagccgcgaagagcggcggcgttaagaaggctgagcagaagccccgggaaaccaaagggaaggtgaagagcagcaaacaggcggcggcggccaaaaagtgacgtacagtacgtgtggagtgtaatggagcttccatgcatgagtgaatccatgccatgttatgaatctagtccttcctttcttgtatcttccatgtgacgcggcgtgtgcgtcccctcatgtgtgatgatgccagatgaatactacaaataagacgttgttgtgaaaaaaaaaaaaaaaaaaaaaaaaaaaaaaaaaaaaaaaaaaaaaaaattagggtcctagttttgtgcgggaattcggattttttaggaacatccatcggaaggctcaccaaatcgtcctacgcttctgcctcctcctccacgaggtgaggaaaccctagcgactgaccatggcgttgctcccgcgcaccgcacggttggccttcctctctaccccgcggtcgtactccgccgccgccgctgcgggcgcctccccgacctccccagcgccatacgggggcgcgcccccaccggcgatgtcgaagacggccgagttcgtggtctccaaggttgatgacctgatgaactgggcgcgtaagggctcgatttggcccatgaccttcgggctcgcctgctgcgcggtcgagatgatgcacgccggcgcgtcccgctacgacttcgaccggttcggcgtcatcttccgtccctcgccgcgccagtccgattgcatgatcgtcgccggcacgctcaccaacaaaatggctccagccctccgcaaggtttatgaccaaatgcctgagcctagatgggttatttcaatgggcagctgtgccaacggtggtggatactaccattactcctactctgttgtacgtggatgtgaccgtatagtccccgtggacatctacgtccctgggtgcccaccaactgctgaggcactgctgtacggtgttcttcagctccaaaagaagatcaacaggcgtaaggatttccttcactggtggaccaagtgaagcatgcttctgctgttgctcgcttgctacgtttctttgcactcgacctacctgtcttatctgaaataaggacggactttgctcggattcacaaatttgttgtgcctggaaggatgtatgcccaggttgtgacgaacatataacttgtgtacttggagtcagttcgcctgtaatggacaccagacctgctgtgaatctgtttttaagcttccattgtaatacagcaatacaccatatacttatatgttaatacaccatatacttgtatgttaatgggtatcttccccggttccccctaccattgggttgaccggttgagatacaggcttacaaaaaaaaaatataaaagtaaaataaaatacttaaaaaaaag

SEQ ID NO: 3876 - DNA, 359 bp, Zea mays
  Clone ID: MRT4577_103538C.1
cagggctcacttgctcccagcgccagtattccacaggtgatcccaccagttacgtcaggatcctcgaacatccagccgcgcaagcctacaagctacaactagcgcttgcatgcagcgcctctacatctaccaattgcccaattgcaacaacaatcattggcacatgtaaccctacataccatcgcaacgcatcaacaacatcagctgtatctgccatcactgagccacctaaccgcggtgaaccctgtgacctactagcaacagcaggtgctagcatccaacccacttgctctggcgaacgtagctgcataccagcttcaacaacagctgcaacagtttatgccactgctcagtcaact

SEQ ID NO: 3877 - DNA, 1394 bp, Zea mays
  Clone ID: MRT4577_103539C.1
gtttggttgctggaaagggagtggacttttacaacttctcatgtccctattgttgggagggttcggagtccggatcgggatttgccacaaccagattgttcaacactcggaaggctcaccaaatcgtcttcccgggcccaaccactgcctcgaggccggccggggtatcccacccctctcttttgaccttgggcccctagaagccatccccaaatcggcctacgcccacggttccacctcctcgtccacgaggtgaggaaaccctagcgaccgaccatggcgttgctcccgcgcaccgcgcggctggccctcctttccaccccgcgggcgtactccgctgccgctgctgcgggcgcctccccgacgtccccagcgccatacgggggcgcccccccaccggcgatgtcgaagacggccgagttcgtggtctctaaggtggacgacctgatgaactgggcgcgtaagggctcgatctggcccatgaccttcgggctcgcctgctgcgcggtggagatgatgcacgccggcgcgtcccgctacgacttcgaccggttcggcgtcatcttccgtccgtcgccgcgccagtccgattgcatgatcgtcgccggcacgctcaccaacaagatggctccggccctccgcaaggtttatgaccaaatgcctgagcctaggtgggttatttcaatgggcagctgtgccaacggtggtggatactaccattactcctactctgttgtacgtggatgtgaccgtatagtccctgtggacatctacgtccctgggtgcccaccaactgctgaggcactgctgtacggcgttcttcagctccaaaagaagatcaacaggcgtaaggatttccttcactggtggaccaagtgaagcatgctcctgctatttctcggtcgctatgttttctttgcatttgacctgcttgtcacatctgaaataaggacacactttgctcggatttgcaagttctcttttttttttcttggtgtgtctggaaggatgtatgtccaggttgtttgatgaacgtataactcgtgtaccagcagacttgctgtgaatctatatttttcgagcttccagtcttccactgtaatacagcaaatacaccatctccttgtctactaagatacaggcttacaagtcttgtcttttattatcactaactaatgaatggtactgcatatttttcgtccaaaaaaaaaaaaaaaaagcggctttcgagctaaaaaaaaaaaaaaaaaaaaaaaaaaaaaaaaaaaaagggcggccgccaccgcggttgattttaatacaccatatacttctatcttaaaaaaaaaaaaaatattcttctatatctccaactttctttttatattatccaaacttactaacactttcttcct

SEQ ID NO: 3878 - DNA, 228 bp, Zea mays
  Clone ID: MRT4577_10353C.1
ttttgtttttttttttttttttttttgtggtttgttttgttttctttggtctcttgcttttttttttatttaatcgttttctttctctgtggaagaagtacaagcgtttaactctattgaggaattgcttgtcgccggctcgacccggagcggaaaacagatgatgtttttcattacaaagcggaaaagacggtttgatcaaaaaccacaacgcccccccgggggggg

SEQ ID NO: 3879 - DNA, 299 bp, Zea mays
  Clone ID: MRT4577_103540C.1
cggacgcgtggcgtgacgcgtgggctcggcacggtccctcggctagggctcgtcgacctctcgcgcaaccggctcaccggcgccgtgccggacacgcactccaacctcaatcagctccgcgagctcgtgctgagtcacaaccgcctctccggcgccataccgccgagccttgcgcgatgcgtggacctgcagaattttgatctctcgcacaacgctctgcagggcgagaatccggcggacttgtccgcgctcagtggcttgctctacatgaacctctccggcaaccaactggaagggac

SEQ ID NO: 3880 - DNA, 611 bp, Zea mays
  Clone ID: MRT4577_103541C.1
atctcgccggcatttcctcccactcgcggttgcagcggcggcggcggcggccaccgcccaccggctgtgaaggcgagatgtcgtacatgcgaggcgacctgctgacgaagacgaggaaactggtgaaggggctggccaagcccgcccctgcctggctcaaggccatggagcaggcacctccagtcacattccctagaactgatggtaaaatcgagaagatagaactgccagaggatgtctatgtcaagaggttcttcaggaggcatcctgattcactctaccatgatgcaataaagataagcgggtttgatccaccgccagcaagagtttttgcttggcgtgtcttagagttgaaagaacagggagtcaatgaagatgatgcaatggctgtagcagatatggagtatggagcagagaaaaaagcaaagaagctagcatacaaggaactgaaacaaattgcacgcagagaaggaaagccaccacctccaaatccatatccaagcgctatcaaagaaatacaggcagaggaaaagaagtatgttagggaccgtttccataacccaaaggtactcgagatcgtgaataagatgaaagaggacagacagatgttt

SEQ ID NO: 3881 - DNA, 361 bp, Zea mays
  Clone ID: MRT4577_103542C.1
ggcggcctatgcgcagcagctcccgcggctgctggcaacggcggcggcggcggcggcggtggcagctgcgccgctcccggcgctggcggagcagatggagaaggccgaactggtggacttcaacctgacgctcccggaatcgagacccaccgctggagtcatggtggcgctggacaagctctacttcacgtccattgggatgcccagagatgagcgggacgccaatatccgcggtgagctcggccatgagaagggcccctccgccgaggccacagcaactggaggaccaggcggcggccatcatgaaagccgcgcgcgccgagatcgtcccggtgcttaacaagacaaacaacgagaccag

SEQ ID NO: 3882 - DNA, 223 bp, Zea mays
  Clone ID: MRT4577_103543C.1
actacgtcgcgactcatcacgagtcatccaagagcctagcgagcaaaccaccggaactccagggctacggcggcgcggataaacgcgagagaacgagtacttcgaaatcgacatggagctatgatcacgagcttccagagcctgagattaaggaaactgccgtccctgagcctgactcatacgccgatgcatctgctgttgtcttacgagccatctgcgaagg

SEQ ID NO: 3883 - DNA, 224 bp, Zea mays
  Clone ID: MRT4577_103544C.1
agctcggaattcggctggaggctcggcccgggtttctagacgactgcctccctagtgagctcccccacgggggttttgtcaagcagtcgagcgtgtggatgggccacagtagacgttgatggtgtgtcctaacgcagtaggagcacgtggcaacaccgctaacgactacagtggggacggcgaccgggatccacattctgcaggcatggagcctactgtcaaag

SEQ ID NO: 3884 - DNA, 771 bp, Zea mays
  Clone ID: MRT4577_103545C.1
ggccgctttttttttttttttttggacaactttcatacaattgaatcgcatctctatatgaaaggaaactcccaatcgttatcatccgcatgcgtagccatggaagattgctgcagatccccccacgtatgcatacgtcgacaacttgcagcagctcctcgaggacataggaaagtaacatgaaattgcagaagaagacccatccgtcaactaagcatcgtaagtctatcatatgcagacattcttttagggaaatcattgcgcacatgagagaccaacgccaagatgccgcgatgtaaggacggctgctcgtcccaccccgaaccacttttgaaccagaccaaacagagagcgccacctggccttgcaggcgtgctcgaattagaagactaccgtctctacaccgttacgccacctggaccgcaggaggggtagggagagacggtaggatgaatgcagtataggaacagcttcttagatgaggtcagccacgttcatgggcatctcctcgatctgtgtgctgtagaactgctcaatttcgcgcatcatgcggacatcgtcggcagtgacgaagttgatggcaacacccttacgtccgaaacgtccaccacgaccgatgcggtggatgcagttctcacggttggcgggaaggtcgtagttgatgacaagggagacctgctggacatcgataccacgggcaagaaggtcagtggcaatgaggacacgggaagatccggaacggaactccttcatgatgacatcacgctgggc

SEQ ID NO: 3885 - DNA, 355 bp, Zea mays
  Clone ID: MRT4577_103546C.1
gacccgtgtaagacttgcacttttaattttcatcgttttgctcagtatcacttttaacatggcggactcacgtcctttagttgaagttaacaaacgaggtgatgaccgtgtcgttggcgtcaatttgccctggatttacactatggatttgttaacaggcaaaaaaggaaccggccttggcatcaacgttttaagtggatttgtgcgagtcgatgtggacactcgcaacaagtcaactgatggtcgtcgtcctgtacgagtatctttgcttggcagtaaaatttacgattcgtttccggccgaggagcacccagatgaaccggaacagccagatgcttcagagccgcctaagaaa

SEQ ID NO: 3886 - DNA, 407 bp, Zea mays
  Clone ID: MRT4577_103547C.1
ggaacgaatgcatcaatcctgattaaaattgggccagccctacaaccatacattgggacaacatgcgtagggcgggtccaatttacatttccatatacccatttcctttaacaggggtcccgccaaatttggttgtacccacgtccgccggactgggtttaaaaaaaacggcaactgggggaatgaccggggtttgaacaatatacgtttcatttttgggtcggatccatggaatccaatggaaacaaaacgagcatgcaatgcaatcaggggcaaatggggcacatcatgaggccgtttttgttgcacttggggcacctttctggggggggggggggggtccctccggccgggggggccaccagcaccctgaaagtgccgccgcactcccaaaacggaacaaaccg

SEQ ID NO: 3887 - DNA, 472 bp, Zea mays
  Clone ID: MRT4577_103548C.1
gtcacgcggggggttagtgcgtagcgattcgtcccgccgtcaccgccgcagggttgatgtttgtaggcttcgttttccttcatctaattgtcgtcgtagtcgtcgtcgtcgacggtgctgtcttgttcgtatgtgctggatggatctgtctgttgtaagctaaactagggaggctgagtgctgtgttggtcggttcattattaagctgctaatttggatgtgtacaatatattagtggatgatgctgatgttcgtgatgttgatttagaaaaatgaagatcaaaaagctgaaagaatacggcatgctttgctgatttttttttttgccgaggccggaacttgcgggctatgtgtataatcctatagctttgtttacggctgagctgtttttccctatggggccacatcgttatggcttgctttccgattttatactccattatgtgcgccctaatgggcagatggcaccatg

SEQ ID NO: 3888 - DNA, 382 bp, Zea mays
  Clone ID: MRT4577_103549C.1
gccgcggcttgacggacgctgctgcatggggttagtgcgtagcgattcgtcccgccgccaccgccgcagggttgatgtttgtaggcttcgttttccttcatctaattgtcgtcgtagtcgtcgtcgtcgcgcaattaattaatggagtaagtaggaggatttgatgtgctgtgttcggttcagttcagctcacggtgctgtcttgttcgtatgtgctggatggatctgtctgttgtaagctaaactagggaggctgagtgctgtgttggtcggttcattattaagctgctaatttggatgtgtacaatacattagtggatgatgctgatgttcgtgatgttgatttgagggtttcatgaaaaaaaaaaaaaaaaagggcggg

SEQ ID NO: 3889 - DNA, 131 bp, Zea mays
  Clone ID: MRT4577_10354C.1
attcggctcgagactggttgtagatcagtattattatgtggaatagagcactcccactaaaactggtgaacggacccatgaggcaccccttcattcaggccaaccagcttcattccttaacacaaaaatgg

SEQ ID NO: 3890 - DNA, 1953 bp, Zea mays
  Clone ID: MRT4577_103550C.1
acggccgggtggacggtggagaatcgaggaggaaaggtgcggggcttgctgagtaatgcttgcatgggaagagatggaaaggaaggtgggattttggtggtctcctgacagcaagcaccttgcatttactgaagtgccttgcagagagattccaccgtgttgttttaggcatgagggcaggagtactgctcgtccagatgctcaagaagacactgcgtacccttttgcaggagctgctaccgttaaagtgcggcttggtgttgttcattcccatggaggggaagtagcttggatggatctcctttgtggagatccaaatggtccccatagtgatgaagaatatttagctagagtcaactggatgcataatagtgctcttgctgttcaagttctcaacaggtcacatacgaaacttaaattacttaagtttgatattagtacaggtgaaagagaagtcttactagaagagcagcatgatgtatggatcacattgcatgattgcttcactccactagacaaaggagtgaataataaacatccaggtggctttatttgggccagtgaaaaaacaggattcaggcatttatatgttcatggcaatgatggagcatgcttaggacctctcacacaaggtgattggatggttgagcacattgctggtatcaatgagagtaatggacttatatatttcactggaacattggatggaccattggagacaaatctctaccacaccaatctctttccagattggagccttcccttgcaaacccctaaaagggctgactcgtggaactggccggcattcagtaattctcgaccatcagttgctgaagtttattgatgtgtatgacacagcaaaatctccacctgtgatcttgctgtgctctttgcttgatggaagtgtaattatacccctgtttgagcagccactgactattccgccacttaaaaagttccagcagttgtctccagagatagttgaaattacagcgaaggatgggaccaatttatatggcgctctctaccttcctgacgagagaaaatatgggccacctccctacaaaacactggttaatgtttatggtggccccagtgtccagcttgttagtgattcatggatgtgtacagttgacatgagagctcaatatctacggagcaagggtatattagtttggaagatggataatcgaggatcggcaaggcgagggctgcattttgagggacaactgaagtacaacattggtcgtgttgatgctgaagatcaattagaaggggctgagtggttaataaagaagggccttgcaaaacctggccatattggtatctatggctggagctacggaggatttctctcagcaatgtgcctcgcaaggtttccagacacattctgttgtgcggtgtctggtgctccggtaacagcatgggatggttacgacaccttttacacagagaagtacttgggtctgcccgcggagcatccggatgcttacgagtacgggtcaataatgtaccacgccaagaacctgaaagggaagctgctcctcatccatgggatgattgacgagaacgtgcatttcaggcacacggcaaggctcatcaactcgctaatggcagagggcaagccctatgaaatcctccttttccctgacgagaggcacatgccacgacgccttggtgatcggatctacatggaggagaggatctttggttttttcgagaggagcctttgagagggcgtttgtataaatttgttgcccacatctgggctgtgattgggatgtttttggcatatggattcaggttttctcattcacacctgtatttatcactagcgcagttatctttgattcttttgccagtcttggatggttatcagctgtttggctgcgtttacaggtttcagaataagcaaaaacttcatatcaaaaaaaaaaaaaaaaaagaacccta

SEQ ID NO: 3891 - DNA, 2079 bp, Zea mays
  Clone ID: MRT4577_103551C.1
gagtcacaatagaagagcccggcacgggacaagctcgctcgactatggcgtccctcctgccgcttgtggtgctgtttctggccgtggccgcgaccgcggcgggcggcttgtgcccggcgagttgcggcatgatcgacatctcgtacccttttggcgttggcccggcgtgctccctgccggggttcaacctcacctgtaagtccaacacgtacaacgaccagctctggctcggcagccccaacgtgagcgtggacatgactagagatggcaacgggtacaaacccgctgggttttgccgtcccaaacccgtacccgtgaaaaatatctatgcccattaaaaaacccgtacccgtgacgggtttgagattttgcccaaacccgtacccatcgggttaacgggtacctatgggttacccgcgggtttcatctccaatataattatcttctcataatcaataagtatcgtaatgattaatgatatcatgatccaaaatttatgtaatgaacaacgagttcatgatttggtataaaaattattagtagagagaatgaaatacaaataataagttgtataattaagtgaccttgcactaagttatccatccaccatatatataacgctagtaaaaactataataacaagcaagcaacactctcaccgattactgatacattcaccaattgttaaaaattatgaagtaaataaggaataacaagtttgttgttcgtttataaaataaaatgacaatatgcactaggtttggtcgggtttaaaaaacccacgggttcacgggtttgggtactataggaacaaacccgtacccataaacccgctgggtacagatttatgcccattaacaaacccatgggtatgaaaattgacccaaacccgtaccctaatggggtaaaaacccatcgggtttcgggtttcgggtacccattgccatctctacacctacctggacctcagtcgaaataaccattaatagccgaatactcaactacctgaacctgtcccggaaccaccttggtggagaaatatcggcaaccattgctgcaatgcagagccttacgaccatagacttctcctacaataacctgtctgggctcgtgctagcgactgggccatgatgcacacacctacgatggcatgtccaataccttcaagttgctaattgtccttggcttgcttgtctgctccattgcgtttgttgcatggcaatcttgaaggcccgattactaaagaaggccagcgaggcacacagttggagactcactgcgttccagcgcctaaacagtctgaaggaggagaggagctaggattgtgtacaagatgacgacaatgctggatggtgagcatgttgcagacttgcagtgaagcggctttcgtcgatgagtcgtggctcgtcgcatgaccatgggttctctgcagagaaacaaactcttgggaggatccggtggtagcgcatcttcacgcccgaccagtgctcacggctgtgctgccgctctacgttgccatgatgctggaccgtgagccagccgtgggccgcgcggcggaggctcggctccgcgccgcggaggcagagctggagcgcgcccgccgccgcggcgcggatctggaggagcggctccggcagctggccggggagggccaggcgtggctgggagtcgccaggagccacgaggccgtcgccgctggcctccgcgccacgctcgacaaggtgctccagcagcccgccgtcgccgccgccggcggaggagaatgcggcgtggcggaggacgcgcaatcctgctgcttcgtggcatccccgtcggggctcgtcgccggcgacgcggtgtcgacgggttcgtcgccgtcgtgcaaggcctgcggcgtcgttttgctcatcatcatcgcatgcggaagcgacggccgcgaggtgggcctgctcgagcgctcccatggcggtagatgcacccatctcagaaacgagattagatctcgattgatcccttggcgacttcgcgagccagtcagcagcttggggaggagagagagagtgcgtacaggagagatgggggagaggagatggatggaaa

SEQ ID NO: 3892 - DNA, 265 bp, Zea mays
  Clone ID: MRT4577_103552C.1
ggacaaattgtagtcggtccttcctgcagtgcctgcgggccgggggactagcaggacctacagcaccacgtcctcgaattctcagacgacacctggagactgtcccgacacagcgacgctcccctgagagcttctggggcccgctgcgtgccatcactcaaccataacacttgatgccgtttctttcaatatttatttccagagtccggaggcagcagacacgccctcttagtagggacttaatgggccggtcggtgagggggag

SEQ ID NO: 3893 - DNA, 159 bp, Zea mays
  Clone ID: MRT4577_103553C.1
atgacgtggggtgaaccctcttcttcgtggactggtttgcttcgaagtcatcgtcgagtttgtagtcatcgtctaagggagtcggagctgctcgtctcttattttgagctcgacaatgatgatttaggatgtttttggaccctatttttcttaatttag

SEQ ID NO: 3894 - DNA, 139 bp, Zea mays
  Clone ID: MRT4577_103554C.1
tggatcctcatcatatgcatgcttatctacatacgattgtgatgtttatcgttcagatgttctttcatagcttattgtatatcatagatcatatcatcgttctccatatcttattccttgagttacttcttgtctttct

SEQ ID NO: 3895 - DNA, 506 bp, Zea mays
  Clone ID: MRT4577_103555C.1
ataaaaaaaaaaaaaaaaaaaaaaaaaaaaaaaaaaaaaaaaaaaaaaaaaacttagaaaaaaaaaacactctaacgtaaaatgctgcacctttgggggcgactgcccttggggcgaatttccctgttgggcgtctccttcggccgtctattgggcctgctttcaattggcccgacttgcctttaaatgaattggactgcaattacctgggcgttgctttacaaaaaccgtgttggggaaaaccctggttttccccaatttaatcccctttaagacaaccccccttttcgcccttggcctcattcgcaaaggcccttccccaatggcccccccctcattgtggcccgtccaccccgtgaatggacgccttttttcccggggctttccgtggcactggccatggggcttaccccccttgctaccgctttatttgcccgctctttagctcccttccctttcttttccctcccttcttttatttgcccctccctgttttttcccggggg

SEQ ID NO: 3896 - DNA, 261 bp, Zea mays
  Clone ID: MRT4577_103556C.1
cgcgtacggactcgggtcaaaccctaaacacggagttgatttatccgatgcagccacgaggtaggtgcactctgcgtggtggcaggatgccatataccagattgttggggatgccaatgcgaagaatatgaagttcactgagactgttgaacttcatatcgttctgaagaattatgattcacacaatgacaagcgtttcaattgcttctgttaaagttccccatatccctagtcccaagatgaatgtgttcattcttggtg

SEQ ID NO: 3897 - DNA, 852 bp, Zea mays
  Clone ID: MRT4577_103557C.1
gttcctgttaggttcggccatggagctcgccacgacacccgctgttctgcctacttgtgctcggcccagcactcgtgcttgccatcggcttgcattggcactcgcgtgcctgctcgtcgtcaccgctgcgcgctcgctcttcgtccatcgggtttcgcgtgtgctcgcgtttgcgttgagtcgtcgaacccatcatcccctgctcgactgtcaagcaaaccccctgatccgcgtcctgctcgccgtcaactctcggctcacaagctcattttcccttgtgcacatctccacagactctgtctcatcacgcgtgtgcgttatcgaactcgtcgtcgactttatctcccggagactgatcctggatttggatgaaaaggtgagacaagttcgtctagcatctgctaggggctcgaccaaatgtctaaattggacaaccgtcatcgtcctcgcggttatcgaatcaattcggttttgaggaaaagagccaagttgacctcaagatggtgcaaggagtggtcttcttcgcacgacaatttcgttagtcggaccaacctgaagaaggttaaatcaagcaagtgctcagctgagggatactcgtcaagcagacgtcatctaacaaacactaacataatgtttattccaggttataactttgtgctggtgttgatggtgttaagtgccggtgggctcagccttcttataagtctaagaaacttttctatacttcttattgaggatggtcacttgagctagcatatatttcaaacttataattaatttataacatttcaaagtttatttctttgaatcactattgtaatcactccaataaacataaaataaatttgatgt

SEQ ID NO: 3898 - DNA, 2758 bp, Zea mays
  Clone ID: MRT4577_103558C.1
ctactgcaacggaacaagaacagaaccaccatcactcctccgctcttcaccatcagctgccgcttcctctcttttctccccccagtagccagcagtctccgtcactctctcacacacacaaaagcagcgacttgctcacagtagtgctccacggacagaatgaccaaagacgacgagttcaagctggtcaagatccagaaccatgtgctcaaggtgaacatacactgcgacgggtgcaagcacaaggtcaagaagctccttcagaagatcgaaggtacttcttctttctttctttctttcttgacactcacttcactgcccatatcttagactggctgcccggccaccaaaaagcacaccgccctgctgtgtcttgctaacatgcgttgcgttgacacgacaaagagatcccggcttctcatgtaaaaagaaaacagaagataaaaagaaccggtaaaacttcgtttcatgatgcgaatttttaactgtgctatggtaaagagggcggcccagactttcaccccctagggtgaggtgaaatttcctgccgttctttcggatggatgggcacagcacagccccccactcactgcacaagcccccacatctcgtgcttgtgacatgcagtcgccagtactacatggtaattactagttaccgtggctcacgagcagcctgtgatctccctctctctctctgctgctggctgctgctgcatctcatggatggcaggcgtgtactcggtggccattgatgtggacaaccacaaggtgtcggtgacaggcgacgtggactcggagaccttgatcaggaagctcaccaggggcggcaagcacgcggagctgtggtcgcagcccaagggcggcggcaaccagggccacaagggcaataatggccagcagcagaaacagcagcagccgcagaaccagaaccagaaccaccagcagaagcagaagcaaggtgccaatctcagcaaggatgggcacagcaagagcagcaacaacaacggcggccagaaaaaggaccaggggaagcaaggaggaggaggaggggttggtggggggccctcgtgcagggccccaaggcgttcaagaaccagcacggcggcaacaagcagcaccaccagctccctgagctcctcagctcggaggatgatgacggcatgttcgaagacgatgtcgacggcgagttcgacgacgactacgaggaggagctccggtttcctcggggacaagatgagccagctcgggctccacggcaacggcaacggcaacaaccagcaccaccatcagaacaagaacgggaacaacgtcgtcgctgtcaacagtaaccacagcaacggaaatggcaagaagggtaacggaggtggtggagccaacaatcatcaccagaacaacaaccaccaccaccaccagaaccagaagaacgtaaacgtgatcaacatggcagcagcaaatgccaacaagatgggcggcggcggcggaggaggagtccagaaccaccagaagaacgctgctgcgatcaacatggcggcggcggcggcggcggcggcgaacgccaagatgggtaatggcgcccagaggaacgctggcgccatgggtggcattggcatgctgggcctaagccatggcctgggagccggcggcgctgctgctcctgctcctcctcctcctcctcctcctggcttccaaggctacgcaggcttcaaccacccgccctatgccgctgctgccggctatggaggaggtctccagcaacagcatctccagcagcagcagcatctccagcaccaccagcagcagcagagtaacagcctcatggcgagcatgcaggggtaccatcatcaccagtaccctgccgcgacggccgccgtggtgaacaacttgaggggcctgaacggcaacatggtgatgatgcatcagcaccagccgcagccgcagccgcaggcccagatgatgtaccactcgtctccccagatcagcagcccttacaccggctactacaacccttacaattactactaccaccaccacccccatcccggcagcgctgggtaccctgccaccgccagcaacggggatgtggagagcatgttcagcgacgagaacaccaagggctgtgttgtcatgtagggcggggcggggtgtgcagctacagtcctgtcaatctagaggttgtaatggtggcgtggtgatgcaatcctgctggtaccttattttccttttctttctttctttctttctttttttttcctttcattattttactgctattttatggttttttttcgcatgtatcaagaagagtgaatcatggtgttgactttagatgtgttgttgaaagtagggggggcaacttgagagaaggtgatcagacagttgtaatgtaataccttttaggcttttactgcctagtgcttttcctgactagactgggctcatgcctaaggttcccaaagcaagaagtcttgccctgacttgctttctataatttgtatattatataatctgggtgtttgtggcttaaaaaaaaaaaaaccaagggctgtgttgtcatgtagggcgggacgagaacaccattcctgctacctttctttctctctttcgtttctttttcattattttactgctcttatggttttcgcctgtatcaagagtgaatcatggtgttgacttagatgtgttgttgaaagtaggggcaacttgagaggggtgaccaaacagtggaatgtacaataggagtgccttttaggctttta

SEQ ID NO: 3899 - DNA, 447 bp, Zea mays
  Clone ID: MRT4577_103559C.1
gtaaaaaaaaaagcgggggcccgtgcatgaaaaggcgcccgggggaaaacggaactctataacccaacaggggttgggggaacaaaaagctgggggctttttaaaaaaccaggtttacccccaatccaaggggtaggggtttttaatcccgtggggggggcccctttaaaggaccaaaaacctgggacccccgcccggggggccggtaaaaggggcaaatcccaaccccgggggggccgtgacaaggggacccccccggggaaccaagttgggcgaaaacagggccaaacggggttcccggggggaaattgaaatccccaaaccaggccccccaaaagaggggccgaacgcaaaaagggtaagcccggggggcccccaggggggggctccccaaccttgtggggggggggccaacggcccgttttccaacggggaaaccgggggggc

SEQ ID NO: 3900 - DNA, 375 bp, Zea mays
  Clone ID: MRT4577_10355C.1
caacaagaaagaaattatattttttattgagtaaaaaaatctaaaatataaaaagcaaaaacacacggaaactgcacatattgtacagcaaaatatagctaccggaatagcacaacataatctgaagcacatatgatagtatcattgtaccagaagtcatttaggaagtacaatagtacaattccgggggatacgatgtatgctttcgatagttaatatgcatgtactgggatcagaaatcgatgtatatgaatataaaaaaaagaagaaggggaaaaactatgataaatatgtaactttcatattaaaagaaattatgacctatttgatcaaccatgtaacattcacatgtattaacaaaagagggcaggaaca

SEQ ID NO: 3901 - DNA, 207 bp, Zea mays
  unsure (1)..(207): unsure at all n locations
  Clone ID: MRT4577_103560C.1
cgggcccgactcctcacacaccttcgttgacttctcacactcctcagacgcccggatcgacgtcgagaggaggtgcagagggagcgacattccggggagatcagctactgcggccggcaggcaacggcaatgggcggtggcagggggacttcngccgactcgagattgagctggccgaggtcgaaatgcccgtcctcatgacaaccc

SEQ ID NO: 3902 - DNA, 280 bp, Zea mays
  Clone ID: MRT4577_103561C.1
ccgggcttccatttattccccacctactttctcaacctttccagcattactgataccccggctcgcacgtcaagtcgaggcaagctctcgactcacaagcaccaccgctcccctgtccgtctccgcacacctactgtgctcactgcctgcctgcctaccacatcaatcagtgtgaccatccagcacattcccatgacgtgccacgccagcctgatgctgccggcgatcgccgacgttatgctctgctgacccctagcgcaatgcgggcagcagaactaca

SEQ ID NO: 3903 - DNA, 312 bp, Zea mays
  Clone ID: MRT4577_103562C.1
ctcagcccattgcggcggcggcaagtcagcaacccgttacccgtccccacgaacggctcgccagcaccgccacctccgattcgcgtgcggcgaccgtcgatggcgaacccgaggcgagccatcgcgctgcacatccagacgcagccgccgcctctccccagcaccgccgccgcccttccacctcacactctggcgtcgtcgctgctccacttcctgaagcggccggcgtccttccctttccttctctcactcttcgtcctcctcacctggctctcgctccgcttccaccacccctcgccgccaccgtcgctc

SEQ ID NO: 3904 - DNA, 134 bp, Zea mays
  Clone ID: MRT4577_103563C.1
ttcctgagttcgctaggttcgtcgacaacagtgtccttaagctcgacgccgggggccaccttaggctttctgtgaaagagctccagccggccgtcgctgacatctgtgccgtcatctttctgccggccagaggg

SEQ ID NO: 3905 - DNA, 453 bp, Zea mays
  Clone ID: MRT4577_103564C.1
ggttctaaataccacatgcaaaatttgttttgggtggccttgtattgtaccaagtgtgtacataatggtcctcgaatcaaacagtctacatgtttgttgcttgaactaaactgttattatggcacgcctttgctgcaatatttgtttgggatacacaatgtttttgagggtgttcaaatgtgcaaccgttcctcccatccatatagtgagcaagtaggggtggtgcaagaattacactgacctacctaacatttgaggttctaatcaaaggcatcgcttcatttggagattggcgttttgcacacgcaaagcctgcttgacttgcacacgctatagctatggctgtatgggggcgaagtgtcaccattcattacgggggttcctgccttccatatggaggcctcttacggaactcttggttttggacctatccaaagatccttgctcttggac

SEQ ID NO: 3906 - DNA, 441 bp, Zea mays
  Clone ID: MRT4577_103565C.1
cccgggtcgaccagcgttctgttcgccctccgtgcctgaattggagcggggtgcgcggcccttgcccactgcttcggtgcgtgcctcgggtcccccaagcccacgggagctccggttacagcgggtcgcctcggctgccggaccccgtaggcgcgtcgagcccgagtgccctcggtgactgccccgtcggtggggggggggcggcaccgctgctggctctggtgcctccctgcgtcggccagcgccaccccagccgttgcgtgacgggatgccgtgcttgccgacgcgaggctgtggtatggccgccatacctggcgatgttcggcgggcgaattcacacgctgcgggtcggtgggggccgacatccccggacctcgcggtcgctctccactctgacggacgcgaacgcgcggccgctggtagccacgcgggatgcgcacc

SEQ ID NO: 3907 - DNA, 559 bp, Zea mays
  unsure (1)..(559): unsure at all n locations
  Clone ID: MRT4577_103566C.1
gggggggggggggggacgcaaagaaaaaaaagaggggggagngaccggnncacaaccacggnacannnagaaaacagggcacgaagggagaaacncaaacaaangccacanaagnncaggcagacnaaacncnggngnaacacacagagcgcnnaggggggggggggggagccagagccaacaganaanacncaaacaaaacncnnggnnnccaaggaagcaggcaaggcanccaagcncaacggcncaagccncgnaganccagggangaagggggcgcngccacggggccacaccnncagggaaccagagagcgagcggccnncgncccgggcnccacggagggcgcnnccaaggagggaccaanccggccgacngccacggcgagagnccccacgaagggnaccgggggacagccacccaagggcccggaggccccaaaggaaccagcggccaggcaacacggaccggccggccccgcccacaccaagcggcaccacgggggccggaaaagagggacanccaccaacccggggaaagaaagggcaagacgggaaag

SEQ ID NO: 3908 - DNA, 398 bp, Zea mays
  unsure (1)..(398): unsure at all n locations
  Clone ID: MRT4577_103567C.1
atgtggaaaaacctcctgtgaaacctcactgttttcagaatatctatgttgaccatctgtctcaaataaagagagttcttcaagaacaaccaagtctaagccttgaagtctaaaattgacaacggcttgatgcaactataaatgtcatctcaggtaagccatccatccttgaatacctaattattctctgcatttggacactgcacaatatcttttagactcataaaactagtagcaatctgccaacataaaagtctttttctgctaaaactatttaccttccatccagtacatctgtaccccttttcgtataaagcagtctgtcgtctctctttgagctttaggtaaagagaaaaccatagaacctgacttgtttttaaatggacctataactctnt

SEQ ID NO: 3909 - DNA, 438 bp, Zea mays
  unsure (1)..(438): unsure at all n locations
  Clone ID: MRT4577_103568C.1
gggtctaaaaaaaccccgaactatactcccgtgggctggaatcctggcattgaacatctgcacgtttttgggctggtctgggcatgtgggccagtcacaaacaccctgcctatttgcctcccctacactcgcacgctattgtgtgactgtgtgtgcgattgaactatcaagtatcgacacataatgacggatgctcacatgttatacaatcaaacaccagagagactgaacggtagggcaaagaagcgaagaacatgggtaaaggcgctactctctaacggcaaaacgtaaatgctcacactcgctgngtatcatctgatccgatggtcccagtggtggtggtgttcccgcttgctgactctcccttgctccctggagccgtatatgtctgaaccatggggacgaacggatgtaccgggcttcttatcatcttaggag

SEQ ID NO: 3910 - DNA, 1399 bp, Zea mays
  Clone ID: MRT4577_103569C.1
aaaagtagctccacatgacatgactaacaacagcaactatggcatgacaaagtcccatcatgatggccaaaaaattatataaataaatagaatggaaaaaatatatttggggctttattgcttggcatatgaaaaagtagagtgatgagctgcactgcactgcactgcatttgcatgcatgtgtgaagtgtaacgtagggctgtaccactgacatgccacgaaagacgtccattgattccgtccatctcggcagtagcggtcgtacctctgcatggatttcagggagcattcattgcactctgcctgtctgtcgtccactgttatgggccggcgtgcagccattcccagtactccgtattcgtagctgtagagttaatggccatcacatgctggtgtggttaacggcgtcgtcgtcgactaacgctaatgcgtgcatgcatggtaaccaagtgcagtgtcggagctgggtcccgaggactcggggcgcaacatcgtggagatcatcttcaagtcgagctggcagaagcgggaccgccccatctgccacatcgaccgcatcctcaaggtgcacaacgccccgcgcaccgtcgcccgcttcgagacctaccgcgacgccgtgcgctcccgctgccgcgccgtcgtcgccgcccgggcggcggccgacggcaacgagctgctcaggttccactccgcgccgctcgcgtgcgcgctcggcctcggcggcgccaccgccctctgctgcgccgccgccgacgccgacgcgcccgcgccgccctgcggcgtgtgcacggccatccggcacggcttcgcgccgtggctgggcgcgcacccgctcggcgtgcgcaccacggccagcagcgctcgcgcgcacgactgcggctgctcggcttctccatcgtcggtgcagcagacccagcagccggcgaacgacgctgctgcctgccgcgccatgctggtgtgccgcgtcatcgccggccgggtccgtcgcggcggcggcggcggtgccacgtcgaacgctgccgatgaggatcaggaaggcccgttcgactcggtggccgttgaggacgccgtcagcagcagcatgtacgggaacctcgaggagctcttcgtggccaaccccagggccatcctgccctgcttcgtcgtcatctaccgcgtccttgattcttgatagaaagctggagcctgtgcacgtcttcgttctcatatataatactacgtacatctgtatctatatgaaacgaatacccacgaccaaggtggtcactcatgccgtcgttaattttcttctcttctaattttcttgtcaaacagctaattaaaactcatatatataatgtcatgtgcgtaacatttcttgttaaaaaaaaaaaaaaaagggcggcccggacgcgtggg

SEQ ID NO: 3911 - DNA, 326 bp, Zea mays
  Clone ID: MRT4577_10356C.1
tccctcggtcccttccatctcctagccgccgccgccgccgccgtcgccgctggccaaaaccctacctaccctcttctccccctcactctcctttcatatccattctaatggcggcccaacccgtccgtccaagctgctaaacatagcaagtactatcttcatgagccacttccaagaacgaacatcaacatgtacgagggaacccttcagggggggggtaacacaccactgaatcatgagctactggccctctggtcatattggcaaaagcgacgggcccaaactacctagaaattgtaaacacctcgacttgcagatcgcaccaa

SEQ ID NO: 3912 - DNA, 365 bp, Zea mays
  Clone ID: MRT4577_103570C.1
ggacgcatcgaaaggggcaaggatacttttcaaaggaaaaatgcaaaaaataaataggtccagggggcaacaattaaatcaatttatcccgggggcaaacaaaacgaaaagctgggtacagagaccacttatgatgagggttcaggcccacgattacccctgaaatctaggcgcagtttacgggcccacgcgggacgggaggtttgggtccccatgaaatgacaacgggtgttcccgattcaaaaaaagcctgcggcgacaggggggggggatagcttggggaggggaataagttgccaccaaacaggtatcccagggaaaagccaccgccaggagcggcggggcccttggcccaaggacggccc

SEQ ID NO: 3913 - DNA, 189 bp, Zea mays
  Clone ID: MRT4577_103571C.1
cgcgccgctagatgtagggggaaagtcatacgtgtggatggtaggtatgtatatagatatcgggaggacatgggggtacgttactgtatgaaaagcacataggggagggaagggagggagaacaacgtcccttggacttaccaaataggcgtggaggttataggttttactataacaaagatgtgatct

SEQ ID NO: 3914 - DNA, 735 bp, Zea mays
  Clone ID: MRT4577_103572C.1
ccatttcccctttttcccatttttaataatctgcatattgggttgttcattttttagaacgaggctgagtattgatgttaatgttctgtagccattgtcatttcagttgcttagatcagtaaaacttgataaataaatgtttgatgcagatccaacaattagataggttaatggtctaaatttaggagatttcgtagaccttcatatgtaaaggccataacttacataacgatcttaacaaatttcattaatagcaatgacgatgttcaaaagacatttcagtaatactgttgtttgtcgatcttaacaaatttcattcaggaaccaggccatgacgatgttcaaaagagttgtcagcagttcatgacatctggtagcacgacaactagcaatgtatggatgaattgaaggaaataaagaaggcatacaatcttatagaaactctgcatcttgaaactaccatgattgacaaagaagttggatgcatcctttgcattggtgtcttcttatcaccaagcagtcatgtgaagcaagttcatttgttgactaagaacggttgaacacaaattagtgaagagtttgttgcactagagatggaggatggaaaggtggtagatttcaatatggctttgatgttattccccccttacaatcttgtacggaacaaacagtgtatgtggatactattgtaattcaagaatttatttctaaataataaacatatttgtttaacgg

SEQ ID NO: 3915 - DNA, 2636 bp, Zea mays
  Clone ID: MRT4577_103573C.1
cgcctccattacccccgccccctgctgccacgtccaccaccacggcaccaccgccgcccccagcgcgcgcggcccaccactaacagccagcttgggtggccgctccttccctcccttgcctcaaaggacttcttcccacgcgatgttaggagcagacatgaggcggcgagagtccagcatcggagatctccgccgccatgtaggcactgcccagcaccttgcggcccgaaaaccgtcgatctaatgccctgccctccttctccgatgccttcgccctcgcctcaggcagggtccctctcccgccttgcctggctctacgtggtcggtcggttgtggcgggatgtgcagacaggacgatcgtgtccggcctcctcgagaagagctccagcaacatctagaaggtgctcttgatggaggacaagcttaggaaccttggatgcaaggtgattggaaagaaaactattgaggtggagatggacctgaccaaggccaagagcgagaggtacctatgggggaacaacactgcagctatgaactccgacaagaagcagcagtttacactgggtttggctccagtctcaaaagaaacgtctgtttcagtaagctgatggtcggtcacccaaaggacccattatctatttttattaatgttaatatattaaaaactggttagagtaaacatacatattatgctatcatgtacatatatgcctctatgagacataaatatatgtgtcatgtttcaactttcatgaatttttttcctcaacgagtaacatactagtgataataacaaaattatttaaaataataaccattatatataacttataaattatcatgatagatttggttatatattttaacttaaatatttgacatatggtataactataagttcataagtgcatatataaattctttgacatgaaaaacaagaaatattgatacatggggggcaattggtgtcgattgcagatggctacatctttctagaattcatatttctttgtagcaaatagtcattataataacaagtattaatatcctctccaggttagcaatactaaccattatagatctctgtttatttatattgtcccttcatacatattaatgtacatacacatcctttctttctcgttattccaatccctcctggacatagatacaacaaatatgatttgttccgtagaatcacaaactcttttgtacaggttgcaacttttaccagatcaggtatgatttcccacaaaaaatgaaccctgcttttttatagtccttgtcaatgcactcaacttaatagtttttcccatagcgccccttaattgggcagagaaaaagtagaatccatcactatgttttattaaacactatgtacgtatccatgtatgttgttgtgtaaacatttgcatatgtatataaccatacacacagacataatgtgttagtacacataatgcatgcacatggatcttattagttgtctcctagcctgcagcatcgcataatatgacttcaaattattttcattgcatttcaattaatagtatacttcattatcatttttccctttttcacatttttaataatctgtatattgggttgttcattttctagaaccaggctgagtattgatgttaatgttctctagacattgtcatttcagttgcttagatcagtaaaacttgataaataaatgtttgatgcaaatccaacaattagattgtttagtggtctaaatttaggagatttcatagacctacatctgtaaaggccataacttacatagaagattatctccataagatgtagcaagcactatccaaactaaacaaacctgtgcatgggtaaaacataatgctcgaatcagtggtcgaatgccttttctaaaaaatcattctttgtctgagaatggcattacttctatccaaatttactatagacttacatgtatatgtttatgtatgtattagaatttgtaggtgcctcgaagaagccaatcaaagtactaattactaaaggtcacttgcaggatagcaaactcatacagtaatactgttgtttgtcgatcttaacaaatttcattcaagaatcaggccatgatgatgttcaaaagagttgtcagcagttcatgacatctggtatttattatatcttcttttgtagagggcttgtgtgttctgcttagcagtaggtaattttgctattgaaagattaatctattactgtaagcttggttctatgtgaatggatacatataattactcaggtagcacgacaactagcaatgtatggatgaattgaaggaaataaagaaggcagacaatcttatagaaactctgcatcttgaaactaccatggtttagaaagaagctggatgcatcctttatgttggtgtcttcttatcaccaagcagtaatgtgaagcaaggtcatttgttgactaagaacggttgaacacaaattagtgaagagttcattgcactagagatggaggatggaaaggtggtagatttcaatatggctttgatactatttccccccttacaatcttgtacggaacaaacaatgtatgtggatactattgtaattcaagaatttatttctaaataataaacatatttgtttatagtt

SEQ ID NO: 3916 - DNA, 456 bp, Zea mays
  Clone ID: MRT4577_103574C.1
gcaggcctccgcttgccgctcgccgcccgccgcccgccgatcggcctccgctcgccgctcccccgaggtttcaaccgttagcaacctcaagatggctgccaatgttggggaatcagcggcagtcggtggcagcagcagtgatgcagctggagggagcttcgagtgcaatatttgctttgagttgccacaggagccaatagtaactctctgcggtcacctattctgctggccgtgcctctacagatggctgcacatgcacgcaaacacaccagagtgccctgtgtgcaaggccattgttgaagaagacaagcttgtcccccttatggccgtggcaaggaccgcgtcgacccaaggtcaaagaacactcctggagtcgacattcctcaacgcccagctggccagaggcctgcgacagcccaacaagctgatcctaacaacaatttcggcaacgcccat

SEQ ID NO: 3917 - DNA, 2690 bp, Zea mays
  Clone ID: MRT4577_103575C.1
taggagcagacatgaggcggcgagagtccagcatcggagatctccgccgccatgtaggcactgcccagcaccttgcggcccgaaaaccgtcgatctaatgccctgccctccttctccgatgccttcgccctcgcctcaggcagggtccctctcccgccttgcctggctctacgtggtcggtcggttgtggcgggatgtgcagacaggacgatcgtgtccggcctcctcgagaagagctccagcaacatctagaaggtgctcttgatggaggacaagcttaggaaccttggatgcaaggtgattggaaagaaaactattgaggtggagatggacctgaccaaggccaagagcgagaggtacctatgggggaacaacactgcagctatgaactccgacaagaagcagcagtttacactgggtttggctccagtctcaaaagaaacgtctgtttcagtaagctgatggtcggtcacccaaaggacccattatctatttttattaatgttaatatattaaaaactggttagagtaaacatacatattatgctatcatgtacatatatgcctctatgagacataaatatatgtgtcatgtttcaactttcatgaatttttttcctcaacgagtaacatactagtgataataacaaaattatttaaaataataaccattatatataacttataaattatcatgatagatttggttatatattttaacttaaatatttgacatatggtataactataagttcataagtgcatatataaattctttgacatgaaaaacaagaaatattgatacatggggggcaattggtgtcgattgcagatggctacatctttctagaattcatatttctttgtagcaaatagtcattataataacaagtattaatatcctctccaggttagcaatactaaccattatagatctctgtttatttatattgtcccttcatacatattaatgtacatacacatcctttctttctcgttattccaatccctcctggacatagatacaacaaatatgatttgttccgtagaatcacaaactcttttgtacaggttgcaacttttaccagatcaggtatgatttcccacaaaaaatgaaccctgcttttttatagtccttgtcaatgcactcaacttaatagtttttcccatagcgccccttaattgggcagagaaaaagtagaatccatcactatgttttattaaacactatgtacgtatccatgtatgttgttgtgtaaacatttgcatatgtatataaccatacacacagacataatgtgttagtacacataatgcatgcacatggatcttattagttgtctcctagcctgcagcatcgcataatatgacttcaaattattttcattgcatttcaattaatagtatacttcattatcatttttccctttttcacatttttaataatctgtatattgggttgttcattttctagaaccaggctgagtattgatgttaatgttctctagacattgtcatttcagttgcttagatcagtaaaacttgataaataaatgtttgatgcaaatccaacaattagattgtttagtggtctaaatttaggagatttcatagacctacatctgtaaaggccataacttacatagaagattatctccataagatgtagcaagcactatccaaactaaacaaacctgtgcatgggtaaaacataatgctcgaatcagtggtcgaatgccttttctaaaaaatcattctttgtctgagaatggcattacttctatccaaatttactatagacttacatgtatatgtttatgtatgtattagaatttgtaggtgcctcgaagaagccaatcaaagtactaattactaaaggtaatagtatcctacaatgttctttttctatcttcttaatttcccatttttgaatgaagactggtttagtggtaatctaaatttctgattaatgcacatcaaaatgtcatataatagtgccaagtaactcataggatttgtcttttctttacaagtgaggatattgtgcggttcaataaagaactaacctatgatctatgggccaggtcacttgcaggatagcaaactcatacagtaatactgttgtttgtcgatcttaacaaatttcattcaagaatcaggccatgatgatgttcaaaagagttgtcagcagttcatgacatctggtatttattatatcttcttttgtagagggcttgtgtgttctgcttagcagtaggtaattttgctattgaaagattaatctattactgtaagcttggttctatgtgaatggatacatataattactcaggtagcacgacaactagcaatgtatggatgaattgaaggaaataaagaaggcagacaatcttatagaaactctgcatcttgaaactaccatggtttagaaagaagctggatgcatcctttatgttggtgtcttcttatcaccaagcagtaatgtgaagcaaggtcatttgttgactaagaacggttgaacacaaattagtgaagagttcattgcactagagatggaggatggaaaggtggtagatttcaatatggctttgatactatttccccccttacaatcttgtacggaacaaacaatgtatgtggatactattgtaattcaagaatttatttctaaataataaacatatttgttt

SEQ ID NO: 3918 - DNA, 1412 bp, Zea mays
  Clone ID: MRT4577_103576C.1
ccggggtccaccaccacggcaccaccaccgcccccagcgcgcgcggcccagcactaacagccggcttaggtggctgctccttccctcccttgcctcaaaggactccttcccgcgcgacgttaggagcagacaggagacggcgagagtccagcatcggagatctccgccgccatgtaggcactagccagcaccttgcggcccgaaaatcgtcgatctaatgccccaccctcgcctcaggcagggtccctctcccggctcgcctggttctacgtggtcggttgtggtgggatgcgatcgtgtccagcctcctcgagaagagctccagcagtgtgcaaatctatccagaaggtgctcttggtggaggacaagcttagggaccttggatgcaaggtgattggaaagaaaattgttaaggtggagatggacctgaccaaggccaagagcgaggggtacctgtggggaacagcattgcagctgtgaactccgacaagaagcagcaacctttcgtcgtcattggagtttacactgggtttggctcccgtctcaaagaaacgtctgtttcagtaagctgatggtcagtcacccaaaggacccattatctatttttattaatgttaatatattaaaatctggttatagtaaatatacataatatgctgtcatctagatcaatacacatatatgcctttgagacataaatatgtgtcatgattcaactttcatgaatagtttttctcaacgactcgcatactaatgatattagcaaattatttaaaataataaccatgatatacaacttatataaattattatgttatatttgtacattttagctaaactatttgacatctaatataattgtaagttcataagcgtagatatattttctagatatgagcttagcggtaggtaattttgcttatctattaccgtaataagcttgatgactgaggtagacatctgatttatatttaatctaactgtttctctatgtgaatggatacatatattaactcaggtagcactacaactagcaatgtatggatgaattgaaggaagtaaaagaaggcagacaatcttatagaaactctgcatattgaaaccgccatgattggcaaagaagttggatgcatctttgcattggtgtgttcttatcaccaagcagtaatgtgaagcaagttcatttgttgactaagaacggatcaacacaaattagtgaagattttgttcacaagagatgcaggatggagaggtggtagatttcaatatggctttgatactattttttccacttacaatattttgtatggaacaagaaaaaacaatgtatgtggttactattgtaattcaagaatttatttctaaataataaatatatttgtttatttttgtgtaaaaaaaaaaaaaaaaaa

SEQ ID NO: 3919 - DNA, 403 bp, Zea mays
  Clone ID: MRT4577_103577C.1
ggcaagccaaacgaagggggggtatgttatcagggctcaaatatacaggacggcccccccccacatataactcgctttcaaaaaaccacaagggattcgtttggaaaaaaaaacccacgcccgcacgcagaatgttaaaaccctcttaactggtgtatgcctgggacccttttaagcgcttaagggacaagctcaattaaaatccgagcagcttactttggattgagtaagggcccaagccccccaaacttggcttgggaccgggaaagaaacaaaccctaacaagggagaacaatgctcaaaaggggtgcttatcctcccacctcggataaaaccgctgaaaccgggcgacctggaaaccatttaggctgcccttaaaaagggtttggggggggggcccaac

SEQ ID NO: 3920 - DNA, 501 bp, Zea mays
  Clone ID: MRT4577_103578C.1
cgcctacggcagctcggaattcggctcgagcttattttcacgagttcaccacaagagaactagtgaaaatgagtgaaccaaacaagttagtaccacaaggacaagaagaatatgattcaaactgggatgaagtgatcgacaaattcgacgacatgaatctgagagaggagctgttgcgtggcatctacgcatatggtttcgagaagccctctttgattcaacaaagagccatcgttcccttggccagaagatacgacatcatcgcacaagctcaatccggaactggcaagaccgctacttttactattggtatcctccaacaaatcgatgtgactctccttgaatgccaagctctcatcctctccccaacccgtgaactggcccaacaaatcaacaaggttgtcggacacattggcgagtacatgaacattagatgccacgcttgtgtcggaggaaccagagttgctgatgaccgtaccgagttacaaaggggagtttaca

SEQ ID NO: 3921 - DNA, 1206 bp, Zea mays
  Clone ID: MRT4577_103579C.1
ctgatcaaaaaggtcaactgcacaaaattttattaggctgtgaaatctgttgtggtgcagagtaaaggcaactacgatgaaattttacacaatcatacactcggcagtatatacagaaataaagtaatcgagaacagttaagatatttgacgttaaaccaacgaggggctccaatggagttcagcagcatcaattactgctgcaattgcagcatcttcatcttgcactactgtggaggaacatgactttgagcttgagtcagtaaccaccgacttgcaaggtacagaacattcttcagtgactttccgcctaggagacaaaacaatcttctctgacagttgcccgggaatgaaaattctgcggaccaacacagttgtgttctgtggtatggatgctctttcatctgcatattcttcgccagtttgggcgttggagatgacaatatcctctgtggcacgaccgcgggttcgaccacggccgtgcctaccgctcgtcacgataagctgcttgagttcagacacagaaataaaagcatggggcacgggcatagaacagatttccttttcactcttatattggtaatagacaacacccatgatggatggcgagtcctgtttctttttctccgcctatgaaggcctctctatctcgagatggcccgaatacttttttcagatctcagatgaaatacaacgaatatcagaacactgaacagattcgatctacgaagaggcgatcgacgatcgacgacggcacggatccttcgagttgtcgatgcaggcttggtggagacgtagcctgtggagcaaacgattcctcgtgacgacggctgggggagatcgagggcgtagaagtcgggtagaggacgccgggtagccgagatgccggaacgcggcaaccggtggtaggagcgagcgattccgccggataagggcgccggatctgaaggcgtcgccggggctagggttctgacttctgaggcgcgggcggagactggcggtgggattgggggcattttggcgacgagggcggtggcttttatgagagagaggcggcccacgaacgcgtggtgcggacgaatcgcctgagcggcgcacgcgccgattcttctgtatactgcgtatttagattagtgctcctctcgctataactagttaacaactaccatccctatcctgcatatttaacaagttatagcgagaggag

SEQ ID NO: 3922 - DNA, 663 bp, Zea mays
  Clone ID: MRT4577_10357C.1
atggcggagggggagacattggtggaggcaaagaggaggcgaacggggccaccagaggcacatgagttggaggagtgtttggactctctcagggacaaaattgcgaccgcaaggattgtcgctggcagccgattcggtgaggagcagcgacagtccttgttgcgggagtggttgcgcctcgcatctgccaagttggatctagatctctcaggcatgagcgagttggaccgatcgacagaggcgttgccttggttgatgccgccggaggaggcagacaagaggacgacgcacacgattctcgccaaagaggagcttggagcagcagccgacgagttcctgctctgcttgacgatgcgtcaacgggccttgacgcgcgagtactcgcgccttaccaacctgaagaggccttcggatctctccggtatgaccgaggccgaccgggcggcagaggcggagaggctgagggaggagaggctgcagaaggcgcgtcaactccaggaccagggggacatgagcggcgcccgtgagtgtgaaggtctggcacgcatcatcgacttcgatgtcaagcagggtggtagatacctcaactgtatctgctatgtcgatgacatctacaccttcgaccaaacagaggagtgtaagttcctcaggcagtcacaataa

SEQ ID NO: 3923 - DNA, 498 bp, Zea mays
  Clone ID: MRT4577_103580C.1
ccgagcccagagagcagccccgggccaggaggaagattgttcttttaacaaatatctagggaagaaaatgcgccagaaccgacccatcctctactggatccgcatgcggactgacaataccatcaggtacaacgccaatcgtagggactggcgatggatgaatctggctttttgacgcgcaagctctagtccatggagccctgatacagggccagggataggattgactacagcatgatcatatacccagatgacaaaggcatgattactccaggcgtgagtgttctgatttaaccaactatgcgcaacacaggtattggactgacctttatagctggtgccaagggctacaaatttacactcacaatgactgcctccatgatcatgaagagcaggatcatattgaaagcttttgctcctgaacttgatcttactgacccactcctgccaaagaaaggaactgccaagaaagcgttagagttgcgagaaattacaccc

SEQ ID NO: 3924 - DNA, 336 bp, Zea mays
  Clone ID: MRT4577_103581C.1
tggcttcgaacctttgggctgatttatgtgcatggtcttgcgacttctgctcatattgatcctcttcctgttgatgttaagaggcatgttagggatgcgcacgccttgacctctgtttggctccttaactcggcccgttgcgccttctgcttattcggttcttacttgcactattggtattggtgctactcttgtgtggcgttcccgtgttgttgcgacccatacttagtactacgttcgtgtcgattatcgcactcctcggactggtattcctactggtctcctgtcggtcgttactcattattaggcgactacttgggtaactttgcctaagag

SEQ ID NO: 3925 - DNA, 206 bp, Zea mays
  Clone ID: MRT4577_103582C.1
aattggcgctgctgcacgcgttgtagtcttcgagcatgacacttccaaggccttaaggtcatctccgtcaactgggccaccgatctctcagcagcactacgcagcagccggtgtatcgacagcatcgtcaagggcagcaccccgggctcgtgcctcgactgaggccggcacatgattggctgctacgactcgatgtcctcggactg

SEQ ID NO: 3926 - DNA, 322 bp, Zea mays
  Clone ID: MRT4577_103583C.1
cgggcggcggcgtagctatcgatagacagttatcagcaacaacttcaggcttaggagaaagaagaagggcatagcagcgggcagaggtatgggcaccagccccgagatccctgcgacgatgctctgcgacgctcttcttggggctgagtgctagagcgccaccgccggcaggctcagccacgcccgccacaccgacgccgacgacgcgattcgtatccccagcagctgcaggcgctgggggccgaccgcgtaattgcggagagtccgctatcaaggacgcctccctgacggtgagatgctgggaggacgtgcctggacaagt

SEQ ID NO: 3927 - DNA, 713 bp, Zea mays
  unsure (1)..(713): unsure at all n locations
  Clone ID: MRT4577_103584C.1
cggacgcgtgggcggacgcgtgggcggggccatgcccgaacctcggttttcggcccgtgcgccatggcgaaccccttgttttcagcccaggcgcaaggccgaacggccctgccgcccgtcgccgcgcgcctnctgccgttttccctgcgttccaccttgtccttcactcaagacatgcactttaggttcggtgtctttccacacgcttggacttagcttattttcgagttcgtgcccgagcctccgttttcggcccgtgcgccatggcgaacccctcgttttcagcccagacgcaaggccgaacggccctaccgcccgtcgtcgcgtgcctccgtgtcgttttcccttcgttccaccgtgcccttcacccaagacttacacattagcttcggtgtctttccacacgcttggacttagcttatttccgaggccgtggccgaaccgttgttttcggcccgcgcgccatggcgaacgcctcgttttcagcccaaacgcaaggccgaacagccctgccgcccgtcgtcgcgcgcctccgtgcccgagcctccgttcgtcgcgtgcctccgtgttgttttccctccgttcctctgtgcccttcaccaaagacatacacattatgttcggtgtctttccacatgcttggacttagcttattttcgagttcgtgcccgagcctccgttttcgtcccgtgcgccatggcgaacacctcgtt

SEQ ID NO: 3928 - DNA, 1320 bp, Zea mays
  Clone ID: MRT4577_103585C.1
ggtgcccggatggtcgggcctatctggtgcggtgcggcgcggctggcgggggcccgacgattccgatcccctcccgtcccgtccatcccgtctcgtctcgcctcgccctccacgccggcgaccggagaaggggccgtgcagcgcaggcgacgcccacaacgaatccgtccccccgcgccggcttcgcccagccccgcggcgacgcaccaggattgaaggaggcatgagaaggtggacatcattgctatagcgatttgattactggagatggtgttggtggtaaagcagcaccgctgcacacactctgcgagctgcgtttgcatcaagggccacctcagtgaggatgctctgttcctcgtcttccgccacatgaactggaacccgaggctgattgctatcttgtcgtgtgtgtgcaagtggtttgacgaggttgccaagcaggtgctgtggaaggagttctgtcatgcaagggctccaaagatgatgctggatttgcattcaggtggcagccacattgttgatgggaactggaaggcattggggaagctgctcatctattgcaatggctgcacaaaaggggggctgtttaataacattcacgttccaggccattttgtgttcaggacacgcttttctaggactgcgggcaggagtttcctgcctctgccgtgtaagtctgatgtcctgtatgtgtcagatccatgcgagcatcttgatcagggggaagaaggcgacataggtttcttccgaggcatctttatgtcatttgccacttcaagggtaaagaagatgttgattgagaagcgggcgaggtttcatccaagggagttgtgcccttattgtaaggccaagctatggaacatgtgttcatgaaaatatgatcccaaggagtgcttccgcaagactgggtgcctatgatgactctgtgtgatattctggatgcctaaatggatttggtagagtactcggtacgcttcgagaaatggtactgaatcttggttgtgactagcagataatgacattggttctgcaaactgttgcacgacaggaacctgtgatgggatctgcatcgaactgcagctgtgttcttcagggggtgccttgcatcagattgaaaaaaagagctactttatagtgcctctcctttatttattgatatgtcattacttgtttttgtaactccaatcaagatactgggacgctacccgcttgcctgtttagacatgttcacatcatgtgtagtgaggtgttttatttaacgagatgttaaatttgtgctcataaaaaaaaaaaaaaaaataaaaaattatgtcggccgcc

SEQ ID NO: 3929 - DNA, 866 bp, Zea mays
  unsure (1)..(866): unsure at all n locations
  Clone ID: MRT4577_103586C.1
tgggtaccctnccgggccggccggggattccgatccactcccgtcccgtccatcccgtctcgtctcgcctcgccctccacgccggcgaccggagaaggggccgtgcagcgcaggcgacgcccacaacgaatccgtccccccgcgccggcttcgcccagccccgcggcgacgcaccagctggtacatgcagtctgcccctctaggttctcataggcgacattgggggttcacctaggaagcatttcgtgctcttggttcgagctttacaagtgatggtggaatgctggttttcaagatttataaatgacaaaggaaggattttttttcccggcgtgattgaaggaggcatgagaaggtggacatcattgctatagcgatttgattactggagatggtgttggtggtaaagatgcaccgctgcacacactctgcgagctgcgtttgcatcaagggccacctcagtgaggatgctctgttcctcgtcttccgccacatgaactggaacccgaggctgattgctatcttgtcgtgtgtgtgcaagtggtttgacgaggttgccaagcaggtgctgtggaaggagttctgtcatgcaagggctccaaagatggtgctggatttgcattcaggtggcagccacattgttgatgggaactggaaggcattgnggaagctgctcatctattgcaatggctgcacaaaaggggggctgtttaataacattcacgttccaggccatttttgtgttcaggacacgcttttctaggactgcgggcaggagtttcctgcctctgccgtgtaagtctgatgtcctgtatgtgtcagatccatgcgagcatcttggatcagggggaagaaagcgacatagg

SEQ ID NO: 3930 - DNA, 1504 bp, Zea mays
  Clone ID: MRT4577_103587C.1
cattgggtacctcgaggccggccgggccgacgattccgatcccttcgcgtccaccatcccgtctcgctctcggtctcgcgctccacgccggcgaccggagaaggggccgcgcatgtgacgcccacggcgacggagacggcgaatccctcccctcccctcccctccggtgccgccttcagccgacccgcggcgacgtgccaggattgaaggggggatgagaaggtggacatcgttgctctagtgatttgatcaccagagatggtgttggtggtgaagcagcatcgctgcacgcactctgtgagctgtgtttgcatcaagggccatctcagtgaggatgctctgttcctcgtcttccgccacatgaactggaacccaaggctgattgctatcctgtcatgtgtgtgcaagtggtttgacgaggttgccaagcaggtgctgtggaaggagttctgtcatgcaagggcttcaaagatgatgctggatttgcattcaggtggtagccacattgttgatgggaactggaaagcgctggggaagctgctcatctattgcaatggctgcacaaaaggggggctctttaataacatccatgttccaggccattttgtgttcaggacacgcttttctaggactgcgggcaggagtttcctgcctctgccatgcaagtcggacgtcttgtatgtgtcagatccatgcgagcatcttgatcagggggaagaaggcgacataggtttcttccgaggcatctttatgtcatttgccacttcaagggtaaagaagatgttgattgagaagcgggcgaggtttcatccaagggagttgtgcccttattgtaaggccaagctatggaacatgtttcaggaaaatatgatcccaaggagtgcttccgcaaggctgggtgcctatgatgactctgtggagtattttgtatgcctgaatggacatgttattggactcggtaccctactaccactctcagactcagaggaggcagcagatgagtgatcatcaagaacatgaatcaggtttagaagattgaagcccagggcttgtgaaatggtactgaatcttggttgtgactagcagataatgacattggttctgcaaactgttgcacgacaggaacctgtgatgggatctgcatcgaactgcagctgtgttcttcagggggtgccttgcatcagattgaaaaaaagagctactttatagtgcctctcctttatttattgatatgtcattacttgtttttgtaactgcaatcaagatactgggacgctacccgcttgcctgtttagacatgttcacatcatgtgtagtgaggtgttttatttaacgagatgttaaatttgtgctcatgatattcatgtgctgttatctttaaaaaaaaaagcggccaaaaaaaaaaaaaaaaaaaaaaaagcggcctggatatgttgtctctaatctagcagcaggtcttgagttcgagattttatttttgaaaaaaaaaaaaaaaaaagcggcc

SEQ ID NO: 3931 - DNA, 571 bp, Zea mays
  unsure (1)..(571): unsure at all n locations
  Clone ID: MRT4577_103588C.1
cgccctttggccgcgtcagccgccgccacttcccanatcccgatgtcccgcgcccagattccactcccttgttgcatcgctactctgttcccagctcggggcctctgacgaggcccgaggcgcaggcgccaacctcccggcccgccctagggtttggggctgatcgatccggctaggtcttggcgggagctgctccaatgggggatcgggaggaggacgaggagctccagatggcgctccgcatgagcctccagggctccccgccggcgcagcctgagcccaagcgcagcaagcccccgccccccgctgcggagtctccggaggcagaggcgcgccggaagcagcgcgagctcatggccgccgccgccgagaagcgccgccgcggtgcagcctcaccggcctccgtctcggtggcgcggtctcctctgcagccagtggtggtggagccagcccccgccccggaggtcaccaanagagcaggtggaggtgtttcaaaggcggtcttggcgcagtggagtaatcagggcataaggtttagctctgatccagaaacaactatgggacttgtaca

SEQ ID NO: 3932 - DNA, 1274 bp, Zea mays
  Clone ID: MRT4577_103589C.1
gggggctatatttcatactcctatttaaaagttaaacgcttaatgggacccgggctaaactttagtccacagaaccaaacaccccgttactttaataaaactcacaccgaaaattgcctccaaacacgaaaaacacggaggtcgggtactagcggttggagagcgcagtccccggacctgaccggtcgtcggtcgagtccttcggccttcccaaaacgcggaggtcgggtactagcggttggagcgcaggctgcgcagtccccggacctgaccggtcgagtccttcggccttcccaaatcgcatctctgacactgcttccgttccgtcgcctcgccgccgcgacgagacgaccccgcccctacaaatacaccgccactttggccgcgtcagccgccgccacttcccagatcccgatgtcccgcgcccagattccactcccttgttgcatcgctactctgttcccagctcggggcctctgacgaggcccgaggcgcaggcgccaacctcccggcccgccctagggtttggggctgatcgatccggctaggtcttggcgggagctgctccaatgggggatcgggaggaggacgaggagctccagatggcgctccgcatgagcctccagggctccccgccggcgcagcctgagcccaagcgcagcaagcccccgccccccgctgcggagtctccggaggcagaggcgcgccggaagcagcgcgagctcatggccgccgccgccgagaagcgccgccgcggtgcagcctcaccggcctccgtctcggtggcgcggtctcctctgcagccagtggtggtggagccagcccccgccccggaggtcaccaaagagcaggtggaggagccggaacaagctggcgtatctatggaagaagcgaaggaggtggtggaggaggaagaagaagaaaagagggaggagttgcctccagatgtcgctgagaatctatgggcaatggtgtttgggagaggtgtttcaaaggcggtcttggcgcagtggagtaatcagggcataaggtttagctctgatccagaaacaactatgggacttgtacaacatgaaggaggaccttgtggtgtcttagcaaccgtgcaggcttatgtccttaaatatcttctgtttttttctgatgacttgagtaatccagagatcagtaacccgctgtatactctgggacaaagacgcttttatcagagttcttttgctgcaggggatgatttttcatcccttaccaatgctcttgtctttccgacagcaacg

SEQ ID NO: 3933 - DNA, 257 bp, Zea mays
  Clone ID: MRT4577_10358C.1
tagatattgcaaagcatacccgtcctgcactatatatttacgccacgaaagagaggagctgagttatcctccttaccctgcgacggcggcatctacgaaatcagctcgacgtcgtgtgtgtcgctgctgtcctctcccgcgcggtgctcagctctcgaccagcggcgacgcgcactgtctcctgtgaggggaataccgtccaccgaggagtgcgcctggcacatcatcgacgagggagttttgatcatccagtgcag

SEQ ID NO: 3934 - DNA, 285 bp, Zea mays
  Clone ID: MRT4577_103590C.1
gcgctgcacagggctgccgcccgaggacacctgcttgccgtccagttgctggtcacccagggggccgaggtggatacgcgggacaccctgggcctcacacccctgcatcacgcctctcgggaaggccacgtggaggttgccggctgcctgctggacaggggtgcccaggtggatgctaccggctggctccgctagacccccctacacctggctgcagagcgagggcctgcggcgtaccgtggggcttctgctgagccgaggggccagccccaccctgcggacgca

SEQ ID NO: 3935 - DNA, 269 bp, Zea mays
  Clone ID: MRT4577_103591C.1
gcacacagctcgcacctaaagcagcgatctcttgatttttacaatccaacctaacgaccaggtcccgtaccattttcaaatatcactagagctaactaccttgacatatctatcttacaactcctaatttctaaaagatccataagacagactttcactgcttctattcccacttcaaatcaaaatcaaacgaacttttaccctcaagttccacactatatttctcttcctcttgatctcattttaccacaccttctttatcttttaac

SEQ ID NO: 3936 - DNA, 184 bp, Zea mays
  Clone ID: MRT4577_103592C.1
gcgatcctgttcgctaccgtgatgtttaccctattccagatggtttatcttgcgtcatgtcgcggatggtgttgcccatctgaggctttgattgcaaagtcacttctgtgtcaattgttaaaaaaaaaaaaaatataaaaaaatggtcgtcgctttatatgttccaagcttacttactctttca

SEQ ID NO: 3937 - DNA, 268 bp, Zea mays
  Clone ID: MRT4577_103593C.1
gtcgagcggtccgacaaaatctaaaactaataaatagatcaaaagcaaaaaatatagaggggccaatctaaaaaacgggtgcatacaaacaaaatggccagcctatattgtcaattcaagcttacatactcgtacttgcaacttcttagatctcatttggtgtaccctaaattaaattcacttgccgcctttttacaactatccgactgggaaaactctggcgttaccaaacttaatcgcttcgaataacataccccttttacgagct

SEQ ID NO: 3938 - DNA, 433 bp, Zea mays
  Clone ID: MRT4577_103594C.1
gtcattattgtctggtcaaagaaagctaggcatggcggtaaagtagctactggatgaggtaggagaacccctttcagcacactaccagaataacctcaaatgacttatgaacgaattggcaggcggatcctgcgagggaaacgacgctatcctggatgcattggcttaattgggtgcgttgctgccatgtcactataactgaataagactccaattcgccaagggctatactaaatattgtctgcgctgcatgtacgcggaaatcaaagttgtacctataaacatgtttctcgtgttgactcaaagtgattacagctttcagagatccatgattagacaatagtgtgatctcaatgctgctccgaggtttgtaaccaatgtgtgatttctaagacaaagggttctgctgaactagatgaaagagaaggggctt

SEQ ID NO: 3939 - DNA, 145 bp, Zea mays
  Clone ID: MRT4577_103595C.1
tttcgtccacgcgttcggccacgctttcggagggttttttgtgtgggcccatcctggctttcgccgagttatgttatctatctataggatcggggtaccgtttcgctttgtcaccgtgttagtggccgttctacccttggattaa

SEQ ID NO: 3940 - DNA, 249 bp, Zea mays
  Clone ID: MRT4577_103596C.1
gagctcactagtcggcgcacggcctttgatttggtggtttgtttactgtttctcctgaagaacaacatttcagggaatttttgctttgctgaaaactggtaatcttttaaaaaagacggagtagatgttgatccagcagacaaataagggctggacccggtggacgttatggttgtaagtttccctttaaagacaccatcaaaagaacaaaaggggagcattaaagcggaactactgggccatgacgat

SEQ ID NO: 3941 - DNA, 344 bp, Zea mays
  unsure (1)..(344): unsure at all n locations
  Clone ID: MRT4577_103597C.1
acgcatcgngtctcccaccctccagtaaccctagcgacagcctcggctcgtttgatcccgcggggagctgtagatctgcaagcgggcggtccgggtcggtcggcagcgaaatgacggaatctggtgcggaacaagccgggatggcagcataagagatgccggggtgcaggacggccgccgcccggggtttccgcccgtgcctcgcccgcggatcccactccgggcccagcgccaccgccatcttcctaccccttcggtgccttcggtatggcatgtccaggtcgggcaggggaacatggtccgccgggcctcggtggagaaaaattgctgctcncgtgctttct

SEQ ID NO: 3942 - DNA, 926 bp, Zea mays
  Clone ID: MRT4577_103598C.1
ccggccgggatcagttttctcatctcagctcagctagctttcccctcccttgcaactgcaagcttgcccaacccaataagctaagcaagcacgcaccatacacactctctagtagctagctaagctacccggccgcccctcctcgcacgcgtgcgcgcaccagcatctatcatcagagctagccactcgaaacggatcggagcagcagatctcgatcggcggcccagatgggggatcacgctgagatgttgcatgccgctccggccatgtacaacggcgctggcgctgcccctcatggcgggtggtggaatacggcggtgcccgcgacgacgtgctcgacgacggagctggctgggttaccacgtggtcgtccgccctggctgctagctacgacctggcggccgaggggacaaaggccaagagcgccgccgcctcgtcggagtcgcccgggaacaacagctccgtgaccttccaagaaccggccggcgtcacggatcctcccggcgtcggaaccgccgtggtgcaagtgcaacagcctcttgccaccggttacgccgactggacacatccctatatgagcaggggcgctactactttgcatgggtttctgcaagacggtcaccagcaggacatgagctcagcaactgagcagagctccatgaccgcatcaagcctgatgaacccttcatccaataacctagccctggcgctgcaaggtcaccaccaccaccaccaggagcatgagcaccagcagcagatgctgtccagcttcggatccgagctgctcttgtcgccgacgacctcaccctacgggttccagtcctctctgctacgaagcctcatggagccggccgcggcgacgaagcatgcttttgccgggtaccagcagcagcagtatgatcagtaccagcagcagatgggcatgg

SEQ ID NO: 3943 - DNA, 830 bp, Zea mays
  Clone ID: MRT4577_103599C.1
ggccgtgtttttattttttttcctgggaatttatgtcaataccggctaccgctaatatccaatctgaaccatctcataatgacttcatacgttttcatagctctcaaactgcattgtcagacgcatagttcgctgaagagtacggcacgggacgccgcggcaccgataggactccctccgctggcgtgtctgggtgcgacgtcctctggtcgtcttctggtacgtacgagtacatgggagtcttgtccgtccccagggtggtatttggctgaccgttcgatccaaaagtgatcgagtctcccgagcgatccctagcctccatgtccgccttccttgtttccttcttgtccctgctcgcagccagccagccgctgacgtggttcgtggcgaggattaggatgtacgcgaacagcaacgtcggaagaatccacggagtgaactggtagttcatcaagtattcgtcattctgggacacggcagcgacgaggctgatgccaagagcgagcaggaagatggccaagtggtatgtggtcgcgctccacgtccacctcttggtcctggagatgatggagagcaggttcgcgagacccaggaagaagcctgcgcaggcaaaggtgtactggaacacaacgcggaagcgaccgtagcttctgttgttgatggtcatttgcaggacgtctagctgaccgtcatcagtcagtccctcggaattcacaacgtcttcagtgtagtcgatgccgtatttgttgtagagggtgttgtccaacgtcagaatgatgctctcgagagcgccataaagctctttgtagcccttgtccttctcaatctcg

SEQ ID NO: 3944 - DNA, 667 bp, Zea mays
  unsure (1)..(667): unsure at all n locations
  Clone ID: MRT4577_10359C.1
cttgcattgtggtacggtgcttgatatgttcagaatgatctctgggtcaagnatcgtcaagggcattgcaaacaattcagtaaggggatcgtgaggatcccaggcacagcaaatcaagtgtttgacaaatgtgagcctgaaacagtatctcttgctaccaggctcagtactgtggatgtgacatatgacgttgtggaatgtgcggtggaggcaactgttgcagctgaagttacacagggggaattctttggagcaatgactgcccacaccactagaagcaagaggaggattgtgctgtttgatagccaagtaggaggtgataaatgtcatggcattgaagttactcctagatggaatggtggacacgaatttgtactcactttaggtgacgctacgatttgtgtgaaggttacttggtcgatggtagatccacggctttaaatgggttcgcctgttcgttgttaagcatcatcggtggaagtgtagtagtgctcttgctctggtttgttgtctgaggctgttggagtctagataagtataacagtgttcacactatcatgcccgtcctgttatttagtgaaccttaatttgtctaatgttgctactcttgttatttattgaaccttagtttattctagttgcattggaagggtttattctactctat

SEQ ID NO: 3945 - DNA, 1774 bp, Zea mays
  Clone ID: MRT4577_1035C.1
cacattcagccggccgcaccaagcgaccaagccacaaagggagccggatctgagtcaagcgtcttcccatttcatcgcctggaaaaaggcgagaaaccccgaagtgaaggaacagcagcacgagtgctagcagcagcagcgattccttcgccataccgttcgccgcgctcgctcactcggatcgaaccctccctagggtttcgcatcgtcctcccgccaactcctatccctcccccctccctccgccgcgcgcgcgcggggagctaccaaaccctaggacggcaaatccggtgcgatcgcccacggtggaggcctcgtcggccgccgagaggagccgctcggggctcgggtcagggttccggtacttcgccggcgccgcctctgggtggtgggaccggtggatggtcatgggagccagcggctccaagcttgagaaggccctcggagaccagttcccggaaggcgagcgctacttcggcctcgagaacttcggcaacacttgctactgcaacagtgtccttcaggcactttatttttgcattccattcagggagcagttactggaatattatgcaaataacaaaactccaggtgacgttgaggaaaatcttttgacttgtttggccgacctttttatgcagataagccaagcaaagaaaaagaccggtgttattgctccaaaacgttttgttcagagagtgaagaaacagaatgagttgtttcgcagctacatgcaccaggatgcacacgagttcttaaatttccttttgaatgaacttgttgatattctggaaaaagagtcaagtgctgctaaggactcaccccaatcatcatctccagaaaaagctccaaatggcccagttcaacctttagccaatggagttaaaaaagaaccaccagttactctggtccataaaaatttccagggcatattgaccaatgaaacaagatgcctaagatgtgaaacagtaactgcaagggatgaaacgtttcttgatcttagtgttgacattgaacaaaatagttctatcacaagctgcctgaaaaatttctgttctacagagactttaaacgcagaggataaattcttctgtgacaaatgctgcagtttgcaagaagcacagaagagaatgaagatcaagaaggctccccacatactggtgatccatctaaagcgtttcaagtacattgagcagcttggccggtataagaagctttcataccgggttgtattccccatggaactgaagctcagtaatacatctgacgatgtagacactgagtattccctctttgctgtcgtggtccatgttggaagtggccccaaccatgggcactatgtaagccttgtcaaaagccacaaccactggttgttcttcgatgacgaaaacgtcgagatggttgaagagcagaccctacaaacattcttcggttcctcacatgaatactcaggcaacacagaccatgggtatatcttgttttatgaggggcttggtgggaagagttagatgggtttattcatcttccttgtttcttttctccttttctctttggagcttgcaaattcactcttgtgcctacacagctactatttcattacctccatgggaaacgggtcaatcgaaggggtgttgtatgaggtgaggacgccagattttgggtggtttcagtgtacaggggataatggaatctagctccaacgatgaaataaggtgtatttttttaacttctcagggctaaagagttggactttactattgagcacaacgtacat

SEQ ID NO: 3946 - DNA, 383 bp, Zea mays
  Clone ID: MRT4577_103600C.1
cgaagctcgaattcggctcggctgaaatccatcgccattctctgagaagagctgcgcctgcgcctgcgcctgcgggatagggagaacatgccggggaagcacgaggggcgttatctccccgcaaggaccatctcgctaggctcgtggaggagcgcgaggtgaggggagtggacctctccattccgccacctcctggccagttggccgaacaaggaccttcaggtggggaaggctcccaaagtgcacactcccgtaagggatacacatatcagattatggctcctcgagaaacccacgctctcactcgaagaccctgccgttactataagactggtatcgcgggcccttactcccggatcttttggaggcataaggtaccgact

SEQ ID NO: 3947 - DNA, 161 bp, Zea mays
  Clone ID: MRT4577_103601C.1
ctctcgtactacatactcaatcaactaacccttctcatcaaccatcatcacacgcgcaaccgatcccaacacgctcgacgagcactccccatcttacgccgacatctccacaccccatgtcgctcccgacgccactccaatctcccttgacgtcgccgatc

SEQ ID NO: 3948 - DNA, 428 bp, Zea mays
  Clone ID: MRT4577_103602C.1
gaaaaactggcaacctttgtcttattttcacttaaagcgagagttattttttttttatatgagcacaaccattttgcagcaccaagaagcaccatttttttccttaggattaacttataacaaatcctgacaggagtaacagcatccatcgatccacaggccatgctggttgatgcatgggggtgctgaagccaaggatgaacacagggctaacaactgaacaaagagggaccttgcaatcaaaaacacagatgggcaacatccccctacacaaacgaggattggcggtctggactagggtccacatcccggtggggaacaggataacttggccgtgcgggccccacccctcaccccctcctgttcaagaaaagaattgccaaatccttggcacaaaaattacccccttatacaacaccaccaccacc

SEQ ID NO: 3949 - DNA, 314 bp, Zea mays
  Clone ID: MRT4577_103603C.1
gggcaaagggggggatttgggtaaagccagtggtggtgattgtgtcatccgttctcttcttaataactcccatctcccgaggcctagcttcgtattattttcttcattcaaagcaacccattacttttgctactactaccactagtctagctgttgtctatttgcaaccatataatttttctaagagtacatgagatcgtattgtattttgggtttgcactagcgataaggtaaatcaaaattctggctgggggctggtttgagagaagtttgctactccggcagccttccaatgaccttaatgaaacgggacg

SEQ ID NO: 3950 - DNA, 447 bp, Zea mays
  Clone ID: MRT4577_103604C.1
cgcagtccttcgaggacgcgttggagtacgccttcggccagatctgccgctaccctgaagaggggcctggtactcacaatgcgtgatcactgggacatgtgtctacctctgatccatcctgaagtaccttgctgcatacgttatggagttggcagggaacgcggcgagagacaacatgaagacgctcatcattccgcgccacgtgcttgtgacgatccgcatcgactatgagctcggctagctgctggcaagtgtcaccatctttcacaggggcgtactgggcaacatccagtgcgtgctaatgtccaagaatgcggcggaaaaagcggtcagcgccgtcagcaaggagcccaaatgccccaagaagggcgccatttccaacaagaaggcttacaaagtagggactgtatttgcactgtgtgctgtagcatgctcgcgtctagatct

SEQ ID NO: 3951 - DNA, 323 bp, Zea mays
  Clone ID: MRT4577_103605C.1
gaagaactcggatctcaaaagcttttttggcgttgactggatccggattcataacacgaaatttgagctggaagcgatgagatgtgcgagggcatgatggaatcatgttatcgcttacctcaacgctgaaggcttgtgtgctgctggagatactgattctcgcacaaccatcatggagaagataaagcatgtcaatccgtcctttgtagaagcctaccgtgttcagacagcatgtgcatggccgagatgaccaacttcgcgacgacgtccggatttcaatatcactgcaagctattcaggcctataggaccttcgcgggaaga

SEQ ID NO: 3952 - DNA, 521 bp, Zea mays
  Clone ID: MRT4577_103606C.1
gttcacaagcgaaagcattgctgcatcactggtaggatcattttttacgaaccaccaagcacgagagttagctataggaactgacgagatctccattaacaaaggatcgaactgggcatcctctatctaccactcatacacaaaacgagtaccacgcacgaagggctgatgccatccgcagcctacataaagaatcgaacgtgatcaatccaagaacacggtccggcctatggacggggcgtaccaacgaaggattcaagaggaccctccataacgtggcgaaaatggcagaggagagcggctcgctcaagtgggtggaccattctttgaccggtcacttgtccgaggcggccgtctgcaccgagaacccgtggaacgcgaacatggtgaagtgctcgtgcttgatctccgtcaggtggaagcactgcttcttatcacggtcggacgacatgccaagcggttcgaatgaagatccgccggcgtacaacctcatctacgggtcgagctctgcgatgcgctgg

SEQ ID NO: 3953 - DNA, 606 bp, Zea mays
  Clone ID: MRT4577_103607C.1
cacgaaagggccggccgggcgggacaaagtggcacctgttccaggttcaaggaaatgcgcgagcgtagttccagactgccttcgaggttttgcaccgtgcaagcgcacgcctcagagcaagatgctgctgcagtcagaggcacctggggaggcagatagagagatgacaaggctgtgcctgtaaaatttttgcgccctcgccagccaccgctgctctggatatatatatttttttgctgatattgaagacgtatgactgtacagtacagcagtgctgatgttttgcaggacggccattcaggcgttctgctgttacttatgagaggcagattgacactggtgaagcagccttccacaaaagggatggaggtgactgactggctgtggttcctgtctgtcatttgtatagttcaagacaatgcagcaagcagtgtaatagttgtagtaggagaccatattgtatgacctatatatgtaaattacgaatgttgttttgtaaaacaatgaaatgacaacagctacacgaccgaaaacaaaacaatttataaacaaaaataaaaaacaaattatcaaaagaataaaaaaaaaaaaaaggcccctagggcc

SEQ ID NO: 3954 - DNA, 361 bp, Zea mays
  Clone ID: MRT4577_103608C.1
tttttagcgtttatccaatacttcaaaaatactttgcgtccaaatgtggccttatttggtagctggtactacagatcaaataaataacttgtacaaccatcgaaccatcataattccacaggccacagctaatagaatatacatacaggacaaaatcagtgaatatgcaagttgctaccaacggataagctgtacaaaaaatcctcaaaaacgaaaaagagaagaaaaaaaaacataccatctcaacagacaacactcaccgcccacaacacttacatgagatgagcaataacaatctcaatctataaacagagcacagggcactgcataattccagccaacgcatttaccagcgccaatc

SEQ ID NO: 3955 - DNA, 239 bp, Zea mays
  Clone ID: MRT4577_103609C.1
ggtataaaaaatcaaacaatgcccatatgatttatataggtggcctataggatcatagtatagcgagacgtgcaaacacaagatggctctgtcaccaaacgcacgcaaccacataaggtatgctgagcagttcaaaagtaacagattttacacatcgtacaccaaataggctgacacgaaacaaatactgatatgtattgacacaagcacaacgctgaataaacttattggaattaata

SEQ ID NO: 3956 - DNA, 368 bp, Zea mays
  Clone ID: MRT4577_10360C.1
ggcacgcaaacgcaacccaccgccgcgccggcgccgccgccggccctacttccttacccttccctggccgtctcccgaagttcgctgtctccgctttaaccatccgtggtcccgttcttctgcagtaagcgggtgtttctgtgcccacgcactggcgtcacgcggaccccactgtttgtagggttacaaggacgataccccaggccatcacagtcgcattattcaggaacaggaaagatgtctacacgttaccagcacacatgtaaagcatgttaactgcatttcagtttcagagaaagtctaccccagacaaccaccatgttacaaaggaacgaaatggagtgctgttcgaaaacgaagtgacacct

SEQ ID NO: 3957 - DNA, 191 bp, Zea mays
  Clone ID: MRT4577_103610C.1
aaacacaatccacagaggctccgcgaagtctaaccgaagtaagactaactctgaacgagtcctcacatcttccatgtataaacctaacaactctcactatactcaacacatcgcacgcctctatatgagaccagacgaattactcttaatattacttggatcctactacctaatagaacataactccggaa

SEQ ID NO: 3958 - DNA, 450 bp, Zea mays
  Clone ID: MRT4577_103611C.1
gttacaggggccggaaggtcagctagtcttggacaacaaaggcgtttcatcccctcgtgcgactgtctttcagcaaccacacaggacggtggctggcggcagagacccgcgggagcccccagcgatgtcgcgcctgttcctcgcctgcctgctggccatcttcccagtggtctccatgaagagtcccatcttcggtcccgaggaggtgagcagcgtggaaggccgctcagtgtccatcaagtgctactacccgcccacctccgtcaaccggcacacgcgcaagtactggtgccggcagggagcccagggccgctgcacgaccctcatctcctcggagggctacgtctccgacgactacgtgggcagagccaacctcaccaacttcccggagagcggcacgtttgtggtggacatcagccgtctcacccataaagactcggggcactacaa

SEQ ID NO: 3959 - DNA, 3269 bp, Zea mays
  Clone ID: MRT4577_103612C.1
ggcatctgtaccgccactgccaccacgtgctgcatgggtgttttgtgatgattgccaaaagtggcggtgcatacctgctgaacttgcagatgtgattggagaaacaaattgcagatggacttgtaaggacaatggagacaagacgttcgctgactgttctattccacaagagaaatcaaacgctgagattaatgcagaactcgatctttcagatgcttcagctgatgaagcagacaatggtggatctaactccaaagcttgcaaaccaccgtcatggactcttgttaggtcaaacttgtttctgcatcgaaaccgcaggacacaatccattgatgagagcatggtgtgcaactgcaagccaccccaagatggccgaatgggttgtagagatggatgtttgaacaggatgctcaacattgaatgtgtcaagcggacatgtccatgtggagaacaatgctctaatcagaagttccagcggcgtagctatgcaaaactgagatggttccattctggcaagaaaggctatggattgcagttgcaagaagacgttactgaaggaagatttcttattgaatatgttggagaggtccttgacataacatcctatgaatcccgccaaagatattatgcttgcaaaggccagaaacatttctatttcatggctctaaatggtggtgaggtaattgatgcttgcactaagggaaacttgggccgattcatcaatcatagctgcagccctaactgttgcacagagaagtggatggtcaatggggaagtctgcattggaatatttgctttgaggagcatcaagaagggtgaagaattgacatttgattacaattatgttcgtgtatctggtgctgctcctcaaaaatgcttctgtggtactgccaaatgtcggggttacctgggtggagacatatcaattgtcgataccatcatcacccaagatgatacagaagcagatcattttgaacaaatggttgttgacaaagactccaaggagttgctgggtccaaatgagtctgattctgatggtagccacccaaatatttcagaacctgaattttctatccaaggggaagatttacatgattgctcagctgcaaaagtagaattagatctgcttgaaggaactagaggaacctcattagaaactagtgagcctgaacatcccttggaagcatggagcccaccagaagatgaagatgtcattcgtacgcctgtgcatgtgtcacggacatttgaaagttctctgcagaagttctcagtacatgacactcagtcatcagatcttttgcgtaagactgcaaattcaatggaaggatcaaaggctccaaatataacaaacggatcgacacttggttctgatttcaggggcaatctggtgcctactttcagacctgctgagagaaaaaaacttaaaacaacataaaaatcagaaacgacaaccgtcttctccaattgacaatgaacatattttgggagttgaagggacactgaacagcctactggatgtggacggtggtatcagcaagcgaaaggatgctacaaagggatacttgaagctgctcgttgtgactgcagcagaagatggtagtgctgggggcacatccaaaagtctgagggatctttcgttgattcttgaggcacttctaaaaacaaaatcacattcggttctgttggatatcatcaataagaacggactgcaaatgcttcataatatattgaagcagagtagaggcatcttccaccggagacctattatacggaagcttctgaaggtacttgaatttctagctcagaaaggaattttgacatctgaacatataaatggaggtcctcggtttgctggagtcgaaagcttcagagacttgatgctgagtttaacaagacattcagacattcaggttcaacagattgctcggagcttccgtgatagatggatcccccctaataatgcaaggagtgaaccaacagaatatccacatacatcaacatttgtgcatgatatccagggaaccaatacagtctggagttctgctaggaggaaacgcaagagccgctgggactatcaacctgacgagcattataagatgccgggactaaaaatccaaaaagtttgttctggacatggtgaatttgatgttcagtttggctttatgaaaaataagttaaagaggaatcagggcgcaaacaactatcataatgatgttcttggcatggggagttcaacagagggtgaagatgatgaagcccctcctcctgggtttgagtcccagctggaccgtcggcctgcacaactttcaataggcagcgaggttgctccaggactttgcatggagaggtaccaatctagcttgagtatttcatatggggttcctgtaactcttgttcagcactttggaacccctgaatctgaaggaggccaatgccataaaaaatggaaagttgcacctggcgtgccttttagtccttttccaccattgcctccctatccgcgagggaatccttgcccctccacttcgtcttcccagatgtttcagcatgatggaacaccccaagttaaacataacaattctggacaacggggaaggatcatgggccgagatgggagagtgcataggtcatggagaaatgagtcaagaacaaaatggcaataccatcatcaaggaaggagattttcgagcactcatcatagatttgaaagatccgaacctgcaagacctcaatagtgattaagggttcagggcagtgattggtaccaaccttgcagtttttgaacctcaagtagtggtggtatacatggtaattcctgcttgtcagaagtgtaacagaaactgtgtcaggctttaacgatgtttaaagagtgtaaatttcagttcattgggggtagagcgtatgctgcacataggccattttccagtgcagtgttactaattaatttggtcattgtttttctctctcccaatgagtatttttcataggaacattttttatttgatttaatcctttttacaggtgataaggataaccaagtttagcgacaatcctctgtagtctcgtttggttctttgccttttttccccttttgctttctcagtaaagcttcaaaaaaaaaaaaataaaaaaaaatccatctgcaatggtgaagtgttgttactgttgtctactattactatccatgagatctgtttggaatatgcatcggacttgtggtgaacatgaatgactttggtcattctgagataatattagctacttacaca

SEQ ID NO: 3960 - DNA, 241 bp, Zea mays
  Clone ID: MRT4577_103613C.1
gcgattgtttctaactagcatatcggttaatggagcgttcgttcacagactgggggattaacaatgtttacacgaatgtcagggtagctgccaccgagctattgtacgtacaggacaaatagcactagctaagtatgctcgcatagcatgcactaaatcttgcctgtttttatgtaaattaattaaaaaggatgctttatgtactcggcaagctaccgcaaggtagcccgggccgccaatt

SEQ ID NO: 3961 - DNA, 343 bp, Zea mays
  Clone ID: MRT4577_103614C.1
ctgacgcgtcgaccgtgtgacacagctagtggcttgcgagcgatcgggtttggacttgggtggcattatggaagcctacttcttgggggacagcgtagagggcgtacgagttctcgtacgcggcgtaggaggacgacattggctcgccttgggattccgaaccgtgatactcgtacacgagcagggagtacgtgggctcctgaggcatagttcgacaactactacagctactacggcttcagctcctgctcggaccgcttccagaacttcgtactcatgaccgagttcccttattttcagcggggcctgtccaggttgttccacgtgcagttgcagatcttcg

SEQ ID NO: 3962 - DNA, 1087 bp, Zea mays
  Clone ID: MRT4577_103615C.1
ccggccggctctccaaacgaacgaacaaaaagaaagaactcccctcggccctctgcccctctcctccttgtgcttctgcttccccaccgagtctcctcaaccccaggcactcgccctctgtcccctcgcctcggcccgcgactccgatgccgccgccgccgctcctcgagccgcgcgactacctcggcgccggtgccacctcgtcgtgctgctcgtcgtcctgctcctccggccgcgagggcgcggggccccacctcgcgctgcggctcgggcttccggggtccgacgactcccccggccgcggcgcggacacggagcacgcccgcgcccacgtcgacgccgcgctcaccctcggccccggccccggccccgcgcctcccaggggcagcgccaagcgcgggttcgccgactccctcgaccggtccgcgaagctggacggcgttgccgcggatgacgctgctgggggcgtcacgcgggtagctggagctgctgccggagctccgcccgctgccaaggcacaagttgttggatggccgcctgttaggagctaccggaagaataccctagctgccagtgccacaaagacaaatgggggagatgaaggtaggagtgaggcgggatgctgttatgtcaaggtcagcatggatggagccccatacctaaggaaggtggacctcaagacctattcaagctatgaggatctctcgcttggtctggagaaaatgttcagttgcttcatcactggtcaaaacagttcatgcaagacttcaagaagggataggcttactgatggttctagggttgatgcccttcaggaccaagaatatgtccttacttacgaagataaagatgctgactggatgctcgttggtgatctgccctgggagtgagtcctaacttagtgtggtttgcaatatctatccaaatgataatgttccttctcggtttgtcccttccctagaccactcgtgttggagcatccggcaccgggtctgacctatagtgttccttttctgtttatatgcaaatgatagtgttctttttctcgaaaccaatggaaatcgatatgattttgatgcagcagtct

SEQ ID NO: 3963 - DNA, 1796 bp, Zea mays
  Clone ID: MRT4577_103616C.1
ccccaaaaaatagagggaaaggaggaaggagggggagatttttttttacaagcccacagtgagaccccccccaaaaggagggccccccacccctcccaaactaggggacccccccttggttgaaaaaaatgtcaggttttttaccggggcaaaaaagttttgaaaattttcaaaagaaaagggcctacaaggtttaaagggtatacccccccagggcccaaaaaatttgcccctcttacaaaaaaaaaaaccccacggaaaacccttttgggaaatcccccgggaacttgttaggccggccgggattgccatccacggaccatggtgtgccctctacttatcctcctctcggctacctccaccacgcctccgcccgctcgaacggaaaactcccctcggccctctcctcttgtgcttctgcttccccaccgagtctcctcaaccccaggcactcgccctctgtcggtctgtcccctcccttcctcgcctccgatgccgccgccgccgccgctcctcgagccgcgcgactacctcggcgccggcgccacctcgtcgtgctgctcgtcgtcctgctcctccggccgcgagggcgcggggccccacctcgcgctgcggctcgggcttccggggtccgacgactcccccggccgcagcgcggacgcggagcacgccggcgcccacgtcgacgccgcgctcaccctcggccccggccccgcccccgcgcctcccaggggcagcgccaagcgcgggttcgccgactccctcgaccggtccgcgaagcgggacggcgttgccgcggatgacgctgctgggggcgtcacgcgggtagctggagctgctgccggagctccgcccgctgccaaagaccttttcatgatagcttttagtgccatggacagggcacaagttgttggatggccgcctgttaggagctaccggaagaataccctagctgccagtgccacaaagacaaatgggggagatgaaggtaggagtgaggcgggatgctgttatgtcaaggtcagcatggatggagccccatacctaaggaaggtggacctcaagacctattcgagctatgaggacctctcgcttgctctggagaaaatgttcacctgcttcatcactggtcaaagcggttcgtgcaagacttcaagaagggagaggctcactgatggttctagggctgatgcccttcaggaccaagaatatgtccttacttacgaagataaagatgctgactggatgctcgttggtgatctcccctgggacttgttcaccacaatttgtgggaaacttagaatcatgagaggctctgatgctgctggcatggctccaagatcaccggagcagatagttgggaccagaataaggaacgttgcccggcatgcagagtcgtgaactgaaaggaaaggacagagtttacatggcgctgaagggagcggtgtttttacgtgaagtgctccggttaagtctctctcttcttttttttttgtaacccccacatgtgcaatgagatgtgtgtgcctactgtaagacaccccattttgcccacgaggttgtcacgtgttattgtagatggtcgcctttgtgttatgaacgatcaaactcggcagtagcctgcttgctgcttcctctatgatactttcctccgtatttggaagctcgtacttcatatggtagaagtaagaaaaaaaatgcccatgttgcccattaaaaaaaaaaaaaaggtttctttccccgtgctgtgtctgcgagtcaaactaacttttgagcgatatgagcatgcattggcc

SEQ ID NO: 3964 - DNA, 288 bp, Zea mays
  unsure (1)..(288): unsure at all n locations
  Clone ID: MRT4577_103617C.1
cccacgcgtccgacggcgtggtgggtctagagctggctggcgggcgtgctcctgctggtgtggggtttgtggcgtgtgggctggatctgcactcagcagctggcgctggcggccggtggcgggtgcatccatggcaggttgggggctcgtgcatgtgctgtggcacggggctctcttctttgccaccccttccctaccttaacggcctggctactggtaatggcgggcatcaccgtgcagccgtgaggagcgaaggatctggctnctcaatgggtggtgtgtggccgt

SEQ ID NO: 3965 - DNA, 743 bp, Zea mays
  Clone ID: MRT4577_103618C.1
gccggccgggctggggtacctcgaggccggccgggccgggcctcgctcagctcgaacgatcgaaaagaaaaaggactcacctcggccctctcctcttgtgcttctgcttccccaccgagtctcctcaaccccaggcactcgccctctgtcccctcccttcctcgcctccgatgccgccgccgccgccgctcctcgagccgcgcgactacctcggcgccggcgccacctcgtcgtgctgctcgtcgtcctgctcctccggccgcgagggcgcggggccccacctcgcgctgcggctcgggcttccggggtccgacgactcccccggccgcggcgcggacgcggagcacgcccgcgcccacgtcgacgccgcgctcaccctcggccccgcccccgcccccgcgcctcccaggggcagcgccaagcgcgggttcgccgactccctcgaccggtccgcgaagctggacggcgttgccgcggatgacgctgctgggggcgtcacgcgggtagctggagctgctgccggagctccgcccgctgccaatgccatggacagggcacaagttgttggatggccgcctgttaggagctaccggaagaataccctagctgccagtgccacaaagacaaatgggggagatgaaggtacgagtgaggcgggatgctgttatgtcaaggcagcatggatggagccccatacctaaggaaggtggacctccagacctattccagctatgaggatctct

SEQ ID NO: 3966 - DNA, 401 bp, Zea mays
  unsure (1)..(401): unsure at all n locations
  Clone ID: MRT4577_103619C.1
aaanncccgggccgaccaaggggncggngaacccccggnccgccccaaaccagnnaaattccatcttgaaaaaccgaacccctaaggggaacgggttgaaggcggcttgggacaggctcgccttaattttaatcgcttcctccccaatcgccaaaggtcttttgccggaaaattccaccccgaaaagtcctcttaaaggccttcaaggccggttttccaccccaaatttcttaacaaacttccagccactaataaaccgaataaaggaaatcggagaaagttccggaaggacttaaacccaggtgggcctaaactgcttgttttcccagggcaacgtgttgccaatcccggcccccaaaaacccctaccagccccggaagttccttggcccttttgggtga

SEQ ID NO: 3967 - DNA, 2227 bp, Zea mays
  unsure (1)..(2227): unsure at all n locations
  Clone ID: MRT4577_10361C.1
gcaggccgggccgcggtgccggccgccctgtccccattcccggatccctgtcgccgtgtccctaatccggctccgacaatcccacgcccagcagtccagctccagcaccaccagcgccgccctgccccacgcggccacacccaggacccagcggccagcactactgccaggctggcagcgcgcggaggtccagcgccagccgccagcaccaggcttccaggtctctagtgactcgatctcaaggtactcagcgcgctggcagccgatctaggtctctatgtgtcctttgagtcttctctccgtataaattcatcataaaagctcaagacctagatcggcttttcccccttgttcagcaaaggcgtttcgggatgtttatcatggatcgatcgatcatggcggatggggagacatcggcggaggaaaagaggaggtggacggggccaccagaggcgcaggagttggaggagacaaagaggaggcggacggggccaccagaggcgcaggagttggaggagcgcctggactctctcagggacaaaattgcggccgcaagtcttgtcgctggcagccgattcggcgaggagcagcgacggtccttgttgcaggagtggttgcgcctcgcatctgccaagttggatctggatctctcaggcataagcgagtttgacctatcagcagaggcgttgccttggttgatgccgccggaggaggcagacaagaggacgacgcacacgcggcaagaggcgcaggagttggaggagcgcatgacctgtctgcggttgctattcgaggacgcagcagatgacagaattctcgccagaagggagcttggagcagcagccgacgagttcctgctccgcttgacgacgcgtcaacaggccttgacgcgcgagtactcgcgcctcgccaacctgaagaggcctctggatctctccggcatgactgaggccgaccgggcggcggaggcggagaggctgagggaggagaagctgcagaaggcgcgtcaactccaggaccagggggacatgagcggcgcccgcgagtgtgaaggtctggcacgcatcatcgacttcgatgtcaagcagggcggcgaatacctcaacagtatctgctgtgtcggcaacatctacaccttcgaccacacagaggagtcgcccgttggtccgatgagatttaccaacagaccctggcaagacaagatgtgtgtgaattgtgcgtcgataaacatcctatctgtcaagattgcatgctcggatatcgacttccccatccaagtctatggcaccgttgttgccagggactgcatcgactacaagtgtgtttacctcttccgccgagataatgaccattgccaactcatcagctctaatgaagaatcattgatcttgactggcccaaaacggggacttgcattgtggtacggtgctgattatgttcagactgatctctgggtcaaggatcgtcaagggcattgcaaacaattcagtaaggggatcgtgaggatcccaggcacagcaatcaagtgtttgacaaatgtgagcctgaaacagtatctcttgctaccaggctcagtactgtggatgtgacatatgacgttgtggaatgtgcggtggaggcaactgttgcagctgaagttacacagggggaattctatggagcaatgactgcccacaccactagaagcaagaggaggattgtgctgtttgatagccaagtaggaggtgataaatgtcatggtatgattcaattgatgcgacctgttgtatcggtctctgtgatggacaagctgaaaattttcgtaacgaccgctgctggtgtctctacaggcattgaagttactcctagatggaatggtggacacgaatttgtactcactttaggtgacgctacgatttgtgtgaaggttacttggtcgatggtagatccacggctttaaatgggttcgcctgttcgttgttaagcatcatcggtggaagtgtagtagtgttgcattggaagggtttattctactcttgttatttgtctaaatgcatcattttttttgtgtggtggtggtggggttgtgttgctgggttctcaggtaatattttaaataaaacctgaaaatccaggcagagctcaccttttggtgcggccatggtggtcttcaccttttgctgggttctcatgcttgtttgaggcgnnnttttttgttgcaaaaacacataaatttaaccgnncccgg

SEQ ID NO: 3968 - DNA, 206 bp, Zea mays
  unsure (1)..(206): unsure at all n locations
  Clone ID: MRT4577_103620C.1
gacccacgcttcctcttactctttttcntactctttctcatactctttttcccacacatccaccgnttaaatctagtcttccattcccacactccttcctattaaccacaaacctaactcttatcttctctttccgccctccatactaaatactcataccttccttccatcgtctccgcatccatccaccatgtcccttttcaact

SEQ ID NO: 3969 - DNA, 401 bp, Zea mays
  Clone ID: MRT4577_103621C.1
atgaaaggaaaaagggttaaagtttgaatgttatctcataggaatgtgaggcataaggtaacttgcaatcagaaaacaaacacaacattggtgccaacgattatagagcacctgaggcctcaatgttgtttgttctgtcaaggccggctccagtgttgtagttggtcctatagaaaggatggttgttgattgaaccatttgggctgggtggtcattataattatagacgattggtaacacaatcatgaagtggtagaaatatctcacattactgactagggggattggatcccttttgtttatgacggggctcaaattgccgaagatcctcaaaaccttttgttttcagaatgagaaagtgtgttcaggaacaatatgaagcatagaggaagccatccttc

SEQ ID NO: 3970 - DNA, 2231 bp, Zea mays
  Clone ID: MRT4577_103622C.1
agcaattggtcaacgcctacctgatgtggatctgttcgcggggttacgacctatccaaagattggaaagcgctttcgtcaattagttgtcctgtgatctgggagcatgcgtctaaggaaaatgaaaaggctgccccatctgctcgtggcgcacccgccgagggggaacttagtacaattcaaatctgtcaatctctttagtggttgaactatccgattgagtttcacgtgttgagagcgcttgacttgcggtcttataaacgtgtaaatcaaatgcatagactacgttagcatctatggagaggttaaagcctagtctaggatcacataccccaacgataagatctattgccgaacctttcacgattttgagcatgcaaatttacttcggtgaaggtttccctccagggccttctactccagctgatagcactctagttgtttatctaataggtttccatttggaaacatggtagcaaatggtaacgagtcagttacatggttactcagatgacttaattagcagtggaggttttttagtttagcaagtcatttagttccatccaagtgtaactgaacattgcttcatttcaatggtcaaacgtctttacagaaggatgatgaaattcaagttccgctacataggttgccagagtttacctgttttgctagttggttttagggctgtggtagtgtggtgccctgagctgttttagttgttagccatgtctaggtgcagtggagttgctagttgggtcatttttcgaccaagtgcaagtggttattggttgtcggtaattgtaccgaagtcgtagaagttactatctctgttctcgaatatttgtcgtccgttagtttatttttgaactaaatcgcgacaaataaaaaagaacggagggagtatttcgttggacaaaagtagcggcaaagctttttttccttcgtctgatgcttttcttttgtcatttttcatggaaaaagttcagtgtcaaaattcttgtttcaatctgcagatcaggatttcagggaactcgtgcagaaggtccctgaaggttgcctattcaccatcgtctctgactcatgccatagtggtggcctgctggacagtgctaaggagcagataggtaatagcaccaagcagaataagacccagtcccgtgaacctgatgagcctcgtcattctggttctggcagcggcttccggtcatttctcaaagagactgtccgcgatgtgttcgagtctgaggggattcacatccctcatagtcgtcgccatggggatgatgaccaggacgacggttacgcacagccaactggaaatggccgcaccaaaaaccgctccctgccactctcgaccctgatagagatgctcaaggaacaaactggaaaggatgacattgatgtgggttctatccggatgacgctgttcaacatctttggtgatgatgccagcccaaagattaagaagttcatgaaggtcatgctcggaaagttccaccagggccagtcaggtgagcaaggcagtggtggtggtggtgtctttggcatggttggtgcccttgctcaggagttcttgaaggctaagcttgaagggaaggaggaagaggctttcaaacctgcattagagcaagaggttcacagtgttgacgaggtgtacgccgggagtaaggcctgggcaccaaacaatggcattctgatcagtgggtgccagactaaccaaacatcagcggatgcaactacaccgcagggtgtctcctttggtgctctgagcaatgctatccaaaccattcttgcagacaagcacgggaaggtgacgaataaggatctcgtgatgaaagcacgtgagctgctgtccaagcaagggtacactcaacagcctggactatactgcagcgatgagcatgttcatgtcgctttcatatgctaaaacttggattgttacagcgattgctttcctccatccttttgtgttgatcggtgcaccagaggttgatgtttttcttcccatgtatgttacagctatattgtatcagtgtttgttgcttgaggatatgtttcaatggactatgtcaatattgaaataacttttgagaaatgtttctatatatgaataatatacacacttgtatcatgatctgtaccaacctgtaagctacactaaacatatcagttttcctaaaaaaaaaaaaaaaaaaaaaaagggccggctcgagctcgagccgaattccgagc

SEQ ID NO: 3971 - DNA, 316 bp, Zea mays
  Clone ID: MRT4577_103623C.1
aggtccttcgtccgtcttcctcctctgccgactgccctcatcgactccactcccaagtcgacacgacggcacaaggagtctctcaactgcggctcaggcgacgattcggatcggctcggctccagcagtagaaagtgcaacaggcagtgcagaccgtcaagtcagacggcaatgtgctcaagtagggtgttctacaacagatcatcgcgcgcaaccgagcaatgcttcctgctgccttttctcgtatcacgtcacttacatctgcgagtctacaagataggcgagttaaaactgacacagtaccacatctcatgaa

SEQ ID NO: 3972 - DNA, 336 bp, Zea mays
  unsure (1)..(336): unsure at all n locations
  Clone ID: MRT4577_103624C.1
gaagctcggaattcggctcgaggtcgaccagagctggtactcacgctagagcggacacataggggcactttacaacggttgtcgcgttacccctccncgacacgaaactcgccgaagagctacacggcgtcccccagggtccagccaatctgccaccaaaaggaagaagggcatgaacacccaccctgaggaggccatgcaggcggagaggcagaagctgccaaacaccgagaaggggttggagaacaagaggaaggacatggtgaaggcgcccatcatgagcccacaacagcccatgggcaatcgctgaggcctgggtgcgcaaccccaaaaggg

SEQ ID NO: 3973 - DNA, 1272 bp, Zea mays
  Clone ID: MRT4577_103625C.1
atggtcaacatactagatgtactggagacgataaagagttcaagctctactccagggaaaactgccgaagcttcaaaaacgcaggctaagacaaagctaactgaagccgatgctacaaagagccaggccgagactaaagctgatccttcaaaacctgccaaggagaaatccttggaaaccggagaaaaagaaatggaaaaagaagctgcaaaacaaattctgcttgaaagaactgtcacttcaactcccgaagcatcttccgaagtacttgattatattgtacgacatgcttcgggaaaaagcagagaagaagattccttgtattgtctcctagacagcaaggagatttctgtctgccgggagatgggcaaaagcttcggattcccgacactagaagatgggctttcggtgctattgaaagatgaactggcggacatcttagcatataatagtttaaagggcctgattcttagtaatgccctcatggctcagaaaaatgctgaagacaaaggatgtactatagctctgaacaaccttcgttccgaactggttgaagcaaaattgaaatgctctatcgctgaagctgatcgagacgccagtgactactggaaaaattactgggaaacaacagttgtagagcttcgctcttcaaaagaaagatgctatgaaaaatctgtagcatgtgtaaaaaagataaaaactagcttcgctaatgttggcgcatatttaaatgaagacaacttcgtactgggcgatcccgaaggtccaattgaatggatcagcagcgaggctgacgcctttgaggagattttgaatggtcgaggggacgtctgtgccttttctggtgcaagaggagtcgcagctattttggagaaagcggagtgcgaacatgtgaaaattctagcccaagccgaagctgctttctttattgatgacacgaaggatccctcggccgaagcaagtttagttggtggaaaattctttactaacatatgggaaaatggcggccgagggacaactcacgaaataataaagaaaagcgaaaaagacactcacgatgctagggaagcaacgaaggcagctgaaaaagctgcagaactcgaaaggcggatagccgaattatctcctcccccggagcccttcgagccactggccgaagcagaggcaaaagaatcatcagagattattagcatggctgaaaccattatggacgaagttgttacacaactactgaccgaagctgcagacaaggttttgagagaagaagaatag

SEQ ID NO: 3974 - DNA, 408 bp, Zea mays
  Clone ID: MRT4577_103626C.1
cccacaccaaagttgaaagatcagggaaaaaaaattacgggtccttttgcccccccaatttaaggggggccttatccgggggtaaaaagaatgaattgggaaaaaaccccaaaaacattgtaacgaaaccaatccgggcccttaaataaaaccccaagacaaaaaaacaaaaacccgggggggggggggaaagagaaccggttccactaaaaaactgaccttttttttgtttgctcccccgagataaacccaacgcaccaggccctagggggggtcccccaaaaaccaatgttgggaacgaagggaaaaggtccaaagggctgaaaaaacccccccctggggattttcccggaaaaaggggggccccccacgcggaaaggcccgggggggattttaggcagggggggg

SEQ ID NO: 3975 - DNA, 383 bp, Zea mays
  Clone ID: MRT4577_103627C.1
cgccttctggcgttataaggggtcgggctatgctgtaaaaaaagtgatcttagtgctatggcatggaattgaagatctgatctagctagccaggtaactaactaaacttgtttaacataagtttcatcttcaaccttttttctcatttagttatgcatgagcatatatagctagtactatgatcttgtcaccttcacctgtgaatctttcagcttttttttgaagcatgtgtagttgtgttgatctcatagatcccatgtcacagcaaggacagtatggataaagccctcttagtttttttatcattttatcttttctgtttggtttcaatgtttttaatccttgtggaacataaaatacaagtcattataggtcttttatct

SEQ ID NO: 3976 - DNA, 269 bp, Zea mays
  Clone ID: MRT4577_103628C.1
gtgaagagattccagaaaacactacacgtggaagcagttgttccgagtgtaattgagccctcttttggcctgggcaggatcatgtataccatattggagcatacattccacgtccgggagggagatgagtctagaacgttcttcattttccctgctgtggttgctccattcaaatgttctgtccttccactgtgccagaaccaggagtttatgccatttgtcaaggaattatcggaagctcttactcgaaatggcgtgtctcataaagt

SEQ ID NO: 3977 - DNA, 397 bp, Zea mays
  unsure (1)..(397): unsure at all n locations
  Clone ID: MRT4577_103629C.1
cttgatacgcgcttcctgacccagtacggccggggagtgccgtgccgggagatcctgaaagggncacacaccacacaccacggttgcgcgcgagaagtccgagacatggacagggagcagatgaggatggccattttttttttaataacggatcttcagacaacaggtgcaggggggggaccggctgtaccacgcccagaagcagttgatgacgcaggagttgcagacggttcctgctccggcggtcgttgacgccgagcccagaccgagaccgtagctggatatctggtgcggtgagagggcgacagcaagttcttattagcatattatcagtttttatgaggtcgtagtacctgtgttggttaaggaatgtatncttgtgctgtttttggtgttt

SEQ ID NO: 3978 - DNA, 1110 bp, Zea mays
  unsure (1)..(1110): unsure at all n locations
  Clone ID: MRT4577_10362C.1
ccacgcgtccgccacgcgtccgcggacgcgtgggcgcaaaaggtggcggcgcccttagcgcggtcgcagcaacaaaaagtcctgttatattcattggaactggagagcacattgatgattttgaagtttttgatgtgaagccatttgttagtcgcctgttaggtatgggagattggtcaggctttatggacaaggccggggaagtgatacctacagatcaacagcctgaccttctgcagaaactgtctgaaggaagctttagtctcaggcttatgtatgagcagttccagaaccttcttaaaatgggtcctattggccaggtcttctctatgttgccagggtttagcgctgaactaatgccaaaaggacatgagaaggaaagccaggctaagattaagcgctacatgacaatgatggattccatgactgatgcagagcttgacagcacaaatcctaagttgatgactgaatcacggatcattcggattgcacgggggtctgggcggcctgtcagggatgtcatggacatgctggaagagtacaagcgacttgctaaaatctggggcaagatgaagggtctcaagctccaaaagaaaggggacatgagtgcactgacccgcaacatgaatgttcagcagatgagcaaggcccttcctccgcagatgcttaaacagattggtggcatgggcggtctgcagtctctgatgaaacagatgggatcgaaggagatgagcggaatgtttggaggcatgggtggttgacttgtttttggtggatcgtcgctgtgatgctaaattgagagcgtttaatgctgcggtctgatcaccatcagagcattccctgaagatcagcctgcgctatgttttggatcaggcttagcgtagctccccatgcctgcaaatttaacctatatgaacagtacgtttgtcctcttaaaaaacggtaaggtatatattacaaagcgaatatgcttatgtagatggttactccaaaaaaaaaaaaaaaaaaaaaccgagctcgtgctaaaaaaaaaataaataacaccccccaaccccagcggcgggcggtgtagaggcatnccaagcctagcgtcacggcgtgcatgcgacg

SEQ ID NO: 3979 - DNA, 849 bp, Zea mays
  unsure (1)..(849): unsure at all n locations
  Clone ID: MRT4577_103630C.1
gtagtcagaagccaaaattggattctttttcgatttctagggtttgctcatcctcatccccatcccctccgccgtcgccttccccgcctccgaccaaattcgtggtttttgattgctttccggacggaagatatgatccccaactccttcgacaccttcctctgatctcatctgtccccggatccagccaccaaaagaagccatactatggtgcgccgccgcccgtcaccgccgtcttcctcctcctcctcctcctcgtcgccgatgctccacaagaacctccgcgcgctcggccctggcctcaatccgtttgcccccttcggcatgggcaactactcccgctaatccctattccccccctccctcatcccctctgctcaatttctgatttgcttttctccggacccgatttgcttctcccccccttctcgttcttgattggattggattggattggattgctcctctctctgcttgcttggtcggcttcgtttggatctgcttgcgagattaggcaagggggccatggtgcagctccgcagctcgctcagcatgacccgggcgcgtacccgcagcgactcggacgacgccgacgaccgcggctggagccagctccacgtcgccgcccgcaagggcaacctcaaggaggtgagacgtctcctgaatgaaggcatgaatgtcaatgcacccacatggggaccaaagtctcctggcgctactccgctgcaccttgctgcccagggcgggcatgtgaaaatcatggatgaactantngnagcgcggtgcaaacattgatgcccgaaacaaaggagcttgcggctggactcccctgcacatttgctgcaagga

SEQ ID NO: 3980 - DNA, 187 bp, Zea mays
  Clone ID: MRT4577_103631C.1
gcctaaggaataacgtcatgatttttggagaccacaagggccataaattttggcaggtaattttaccccgggctattaagggggggtcatactcaagggaaagaacaacgaaacattaacaatgaacacgacagtgcaacgtgcatgggcatagcagtaaccaactttggcgctcttttggatttta

SEQ ID NO: 3981 - DNA, 524 bp, Zea mays
  unsure (1)..(524): unsure at all n locations
  Clone ID: MRT4577_103632C.1
cattggtacctcgaggcggccaggcgatactccggatcccacaccccctagagatctgctgtagcctccctctcacgcatccaatcacaggcatgaccagagtgcgagagctagactagaggcgccagacgaaaatagccgcagtacaatacgcatcgccctgcggagccaccaggaggcgtgcgacccgggcggcgtctaggtgggcggttctgctgagttcatctccancctcatcttcgtcttcgtcgggcagtgctccggaatgggcttcatcaagctagaccggatggcggcccgacgnacacccggcgagagctgatcgtggatgtgcagacagaacgtgcatcgtcacagatacacgatgagtggtgtgaggtgaatcaaaacccctggacgaaccggaagccggtggtgatgttccgggacaacataagaaggtgcaatgatgtgttacgcgcttacaatgacgggcacggctctgtgtggttagctaacaaacaagaattgctgggtatgcttat

SEQ ID NO: 3982 - DNA, 649 bp, Zea mays
  unsure (1)..(649): unsure at all n locations
  Clone ID: MRT4577_103633C.1
cggccggggctgccgtcccactcccaccttcttggagacaccgccaggcgctatcttccggccgctgcccgcctgctcccccaccccgggaggttgaactgtcttctggatacctctcctgttttcaggcgaatgtgcaggtagcttgacgtctgatgaacgctcagccatgctgctgatgctacacgaaactcttcctttcgtgaggccgagttcttgccgggacccaaaactctccgagaagagtgcctctgctctccacggtaaattgggatgcagtgcggtctgcagttcagcggaaggccatcgtgtacagaagccacacatcgttcacagctacaaagttagcttcactaggaccagccatcatctgtgtaaaagcttaaacgagagaactacaagcatcggttccatgttaatgcttcgcccgatgacgacgacttccgctcatcgcgtaacatctagggtgtacagatgaggggcttagaaaggaacttatggatattgaagattctggtctggagattgaggcttagggtccttgnngggcaccagcctcaaagtcnagtccactcctttgagatccgtgagtgcatcctgtggctcagtatagtggtcgtcacaatactgtgcacaccacaactaacag

SEQ ID NO: 3983 - DNA, 289 bp, Zea mays
  Clone ID: MRT4577_103634C.1
tgcactggacctcaatgaaaaggacttgattttgttcgcatctgtgcaggatcacaggatctgagtggttaggaaatatcaccatcttttttttgtgtgtgtgtggatggagttcatagctggagttgtcctgcgagattgaagcgaggtgttcctaggagccagaaggggcaccgcattggtttctgatgtacgcacactaacggtttctgaaatttgagctagtaatctgaatgaaatccaaaccgaataaccgatacagatttttgcttaaaacaaccacggtccg

SEQ ID NO: 3984 - DNA, 335 bp, Zea mays
  Clone ID: MRT4577_103635C.1
aggggcgggatatccctggtcttgaatatttggcatccggtaattcatgtttgaactaaaccgtgacaaaaaaaaaagaccgggaggggtgttattcaaacctttgtcgaggaaaaacattgtatttattaaaatcgaaacatcaaaataattgtcgattaggcagccgatcatatcctgtttggctcctataataatattggctaacccggtttggcgccgcaatggcacttctagtagtagtgcactcccatgtggtacctgcttgggtcaagacaaaatttattggttgatcttttccagagcggctgtgcctgaaaactgtggtcaaatgc

SEQ ID NO: 3985 - DNA, 1477 bp, Zea mays
  Clone ID: MRT4577_103636C.1
cagggggaccctcgaggccgcctgggacgtccccatctcggccgggccgctgccgcccactcccaccttcttggagacaccgccaggcgctatcttccggccgctgcccgcctgctcccccaccccgggaggcgaatgtgcaggtagcttgacgtctgatgaacgctcagccatgctgctgatgctacacgaaactcttcctttcgtgaggccgagttcttgccgggacccaaaactctccgagaagagtgcctctgctctccacggtaaattgggatgcagtgcggtctgcagttcagcggaaggccatcgtgtacagaagccacacatcgttcacagctacaaagttagcttcactaggaccagccatcatctgtgtaaaagcttaaacgagagaactacaaggcactgcctgcatcggttccatgttaatgcttcgcccgatgacgacgacttccgctcatcgcgtaacatagcgatcagtctattcaagcggtacaagaatgtcattgaccgaggaggtggagaaaacctaaatgagtttgtcagtgctggagtgaccgcttacgcactagggtgtacagatgaggggcttagaaaggaacttatggatattgaagattctggtctggagattgaaggcttagggtccttggggggcaccagcctcaagttcaaagtccactcctttgagatccgtgagtgcatcctgtggctcagtatagtgttcgtcacaatactgtgcacaccacaactaacagttatcaggtggtctccgaacccaccggtgtcagccgacgtcttgcatcagtggaaaggattctgtgctctaatcgcgaacgcttactatgtcaaaggaatggcatggtagtcagcccacagtggccaagagtgtgattagatgaaagcaataccatcaaacaaaggtctgcagttttattctgaccaaaagatatgcatgtccaagttggcaagttcaaacctctgtcatggcgcaaacagagatgaggctatgtccatttgaactcaaatgtctaataaaaatgctaatgtacttgttgtgaattatttgaaccctgtacatatactgcttctatcttgcatcaggagtaaaggattctgtgctctaatcgcgaacgcttactatgtcaaaggaatggcatggttgccagtgaaaaccttgcagctggaacagatggctgtcacaggaagttcagagaaaccatcagtagttgctagccgcatgcagttagttttcagcacattagaggtagtcagtccacagtggccaagagtgtgattaaatgaaagcaataccatcaaacaaaggtttgcagttttattgtgaccaaaagatatgtatgtccaatgttagcaagttcaaacctctgtcatggtgcaaacagatgatactatatccatttgaagtactaatgtcagaataaaaatgctaatgtacctgcccgggcggccgctc

SEQ ID NO: 3986 - DNA, 280 bp, Zea mays
  Clone ID: MRT4577_103637C.1
catgtttccaaatgcctgcctagttacaccaaggtgggtatgaagtagctgtgtgtgtgcctaggctagagttgtaagaaatctccgtcaagtgtaagtagaaaatgggaagttagtagccagaaagctggataactcccaaacttcatgtatgatagtatggcaatagctaaagaaatggctggccttctgtcaatcatgataattttccaaactcgtgcatctccatgaagaatgtcattctaacaagatttccaagagccagatagagatgcgtggg

SEQ ID NO: 3987 - DNA, 1335 bp, Zea mays
  Clone ID: MRT4577_103638C.1
cattgggtacctcgaggccggccggggccgtcccactcccaccttcttggagacaccgccaggcgctatcttccggccgctgcccgcctgcccccccgggaggtcgaactgccttctggagccctctcctgttttcaggcgaatgtgcaggtagcttgacgtctgatgaacgctcagccatgctgctgatgctacacgaaactcttcctttcgtgaggccgacgagttcttgccgggacccaaaactctccgagaagagtgcctctgctctccacggtaaattgggatgcagtgcggtctgcagttcagcggaaggccatcgtgtacagaagccacacattgttcacagctacaaagttagcttcactaggaccagccatcatctgtgtaaaagcttaaacgagagaactacaaggcactgcctgcatcggttccatgttaatgcttcgcccgatgacgacgacttccgctcgtcgcgtaacatagcgatcagtttgttcaagcggtacaagaatgtcattgaccgaggaggtggagaaaacctaaatgagtttgtcagtgctggagtgaccgcttacgcactagggtgtacagatgaggggcttagaaaggaacttatggatattgaagattctggtctggagattgaaggcttagggtccttggggggcaccagcctcaagttcaaagtccactcctttgagatccgtgagtgcatcctgtggctcagtatagtgttcgtcacaatactgtgcacaccacaactaacagttatcaggtggtctccgaacccaccggtgtcagccgacgtcttgcatcagtggaaaggattctgtgctctaatcgcgaacgcttactatgtcaaaggaatggcatggttgccagtgaaaaccttgcagctggaacagatggctgtcacaggaagttcagagaaaccatcagtagttgctagtcgcatgcagtagtcagcccacagtggccaagagtgtgattagatgaaagcaataccatcaaacaaaggtctgcagttttattctgaccaaaagatatgcatgtccaagttggcaagttcaaacctctgtcatggcgcaaacagatgatactatgtccatttgaactcaaatgtcaaataaaaatgctaatgtacttgttgtgaattatttgatttgatgtacatatactgcttctatcttgcatcaggagttctggcaagtgaacaagtatcccctactgctccaatagagataaaatggaaattgtgggtcactaattcgccccaacaaaaaaaaaaaaaaaaaaaaaaaaaaaaaaaaaaaaaaagggcggccctgcgac

SEQ ID NO: 3988 - DNA, 1552 bp, Zea mays
  unsure (1)..(1552): unsure at all n locations
  Clone ID: MRT4577_103639C.1
ttcggccgggaaaaagaaaaaaaaaaaaaaaaaaaaaaaaaaagctggccgtcccactcccactcttcttggagacaccgccaggcgctatcttccggccgctgcccgcctgctcccccaccccgggaggttgaactgtcttctggatacctctcctgttttcaggcgaatgtgcaggtagcttgacgtctgatgaacgctcagccatgctgctgatgctacacgaaactcttcctttcgtgaggccgagttcttgccgggacccaaaactctccgagaagagtgcctctgctctccacggtaaattgggatgcagtgcggtctgcagttcagcggaaggccatcgtgtacagaagccacacatcgttcacagctacaaagttagcttcactaggaccagccatcatctgtgtaaaagcttaaacgagagaactacaaggcactgcctgcatcggttccatgttaatgcttcgcccgatgacgacgacttccgctcatcgcgtaacatagcgatcagtctattcaagcggtacaagaatgtcattgaccgaggaggtggagaaaacctaaatgagtttgtcagtgctggagtgaccgcttacgcactagggtgtacagatgaggggcttagaaaggaacttatggatattgaagatctggtctggaggaaggcttagggtccttggggggcaccagctcaagttcaattctttgcagggatactcctttatgcagattcttgagtgcattctgtggctcattctactgttcgtcacattactgtgcacaccacaactaacggttatcaggtggtctccgaacccaccggtgtcagccgatgtcttgcatcagtgcgaaaggattctgtgctctaatcacaaacgcttactatgtcaaaggaatggcatggtgagagcagcttctgccagcaacgttgctcttcttctatctcataattctgatacacgtacctaaaactgacactgcaggttgccagagaaaaccttgcagctggaacagatggctgtcacaggaagttcagataaaccatcagtagttgctagccgcatgcagatagttttcagcacattataggtttatagcggcaccgtcaatatgtacgcgctaagtaagaaagatgatctgctcgctagtgattattttgttcgtttactctgcaggtagtcagcccacagtggccaagagtgtgactagatgaaagcaataccatcaaacaaaggtctgcaggtttattctgaccaaaagatatgcatgtccaagttagcaagtctacacctgtgtcatggggcaaacatatgatacgctgatactatatccattagaactcatatgtcaaataaaaatgctaatgtacttgttgtgaagtatttgatttgatgtacatatactgtttctatctgcatcaggagttctggcaaaaaaaggggggggggggggnaaaaaaaaaaaaaaaaaaaaaaanannnngngggggggggggggggggggggngnnnnnnnnnnnnnnnnnnnnnnnnnnanaaaaaaaaaaa

SEQ ID NO: 3989 - DNA, 460 bp, Zea mays
  Clone ID: MRT4577_10363C.1
taggggccttttttttttttttttttacttttttttttttttttttttttttttttttttttttttttttttcctttttttttttttttccccccccaggaacgaactaaattgggggaataaatgggggaacggggggggaaaacaagaaaaaaggggggcttctcccttcgagggggggagaacaaacaaatcaaaaggctggaaagggaaaccaaccttaagtggacggggatttggccaacaattccggcccttggggggggttccaaaaaaaacccgaagggccccgccacggggagggggacgaaaaaggcccccccgggcgcgttgaggaacccccccgggaaaatttgggaggggtaaaccccgttcggaacctcgttttcgcaaaaaaaaactttggggggaaacccgggtttgtccccggccgggcgggcctgaaggggccgaaaagggg

SEQ ID NO: 3990 - DNA, 570 bp, Zea mays
  Clone ID: MRT4577_103640C.1
ccggccgggaaagctagcctacaccaccaagcgcgtccggccacactacgcgtttctcaagaggcacaggagacatggaggctactgaagttcatctcacccatcgcactcgatcggccgcggcgttcgtcgcggctatggtatctccactgccagacccggggaccaagaaatgcgccggcggtgtcacgttcacggaggggatgtacacctacatggccctcaagggggtgaacaatgtgaacatgatacgattgcgtgcaagaccgccgactactccttcattcgaaggtggaggtgatcgcatcagctccacgagcatgtaatgcgagggggtactgcagttcgatctcccagatgaacagacgccggcgagatcttcaagatcgccgccaacatgaactgtcatcgagctctacagggtaacccacaggttcgtgctgctccggtgggcatgcgactgaaaggagtcctgacatggtgcgagagcctgacactgtaggctgtcatcgctctactcagtctgattcagaaaccgcggtatatatatgacctcacgtacgctttcga

SEQ ID NO: 3991 - DNA, 2152 bp, Zea mays
  Clone ID: MRT4577_103641C.1
cctcgaggccggccggcagacagaatgccagaaggaacagggaagggaggaagagcccagacggattccctccacgggccaggagcagccaaacaggcccatctcgggaggctcagcgacagctacagcgacaggccgagggctcccatcctcgcgctcgcgctttcctccgcgcgcctcgccagtcgtttttttattattgtgggcctcgaatttcatcttcgctcgcccaaatttttagccacttaacccctccatgtatctatatattcccacgtccctccctttcgggtgcggctgccgtcccactcccaccttcttggagacaccgccaggcgctatcttccggccgctgcccgcctgctcccccaccccgggaggtgaggcctgctctcgtcgcagttcgttgctcgcgttcggattgtttcagctcagtatctggtgatgggatctggacatatggtgcccgtaggcaggctgcttgttcgggctagtattcatgagccaggggatcttcagttttatttccttggcgaacttgttcggaaggggaatacagtttagttttcttcgatactgattcgtcgtcttcttcttcttcccatggaccatgacttccgtatttacgagatataaacgcgcagattttgtctcacgtcggtagtcaaacgagtgttaactgacatcaggtgtcctgtgtggaatgtgttggtcggttcattcagcaagggttgccattgctcatacttctaccttacgacacgatgcgtgagaaagagtactcatttcgcttggttttaatcttcggacgcatccctcatatgttgccaccaaacccgggagatcagcagaatgcttgttgtaaccgagcataatttaagcatgcacgatctgcggcgctcctacttcttcttcgcgaataattagaccatactctgttcgcaggttgaactgtcttctggatacctctcctgttttcaggcgaatgtgcaggtagcttgacgtctgatgaacgctcagccatgctgctgatgctacacgaaactcttcctttcgtgaggccgagttcttgccgggacccaaaactctccgagaagagtgcctctgctctccacggtaaattgggatgcagtgcggtctgcagttcagcggaaggccatcgtgtacagaagccacacatcgttcacagctacaaagttagcttcactaggaccagccatcatctgtgtaaaagcttaaacgagagaactacaaggcactgcctgcatcggttccatgttaatgcttcgcccgatgacgacgacttccgctcatcgcgtaacatagcgatcagtctattcaagcggtacaagaatgtcattgaccgaggaggtggagaaaacctaaatgagtttgtcagtgctggagtgaccgcttacgcactagggtgtacagatgaggggcttagaaaggaacttatggatattgaagattctggtctggagattgaaggcttagggtccttggggggcaccagcctcaagttcaaagtccactcctttgagatccgtgagtgcatcctgtggctcagtatagtgttcgtcacaatactgtgcacaccacaactaacagttatcaggtggtctccgaacccaccggtgtcagccgacgtcttgcatcagtggaaaggattctgtgctctaatcgcgaacgcttactatgtcaaaggaatggcatggttgccagtgaaaaccttgcagctggaacagatggctgtcacaggaagttcagagaaaccatcagtagttgctagtcgcatgcagttagttttcagcacattagaggtagtcagcccacagtggccaagagtgtgattagatgaaagcaataccatcaaacaaaggtctgcagttttattctgaccaaaagatatgcatgtccaagttggcaagttcaaacctctgtcatggcgcaaacagatgatactatgtccatttgaactcaaatgtcaaataaaaatgctaatgtacttgttgtgaattatttgatttgatgtacatatactgcttctatcttgcatcaggagttctggcaagtgaacaagtatcccctactgctccaatagagatcgaaaaaaaaaaaaaaaaaaaaaaaaaaaaaaaaaaaagcggcc

SEQ ID NO: 3992 - DNA, 428 bp, Zea mays
  Clone ID: MRT4577_103642C.1
actacactgccacaactcgagaaaccagccctacttttatcatcgagaagctgaatgggatactaggaacaggatttgctgaagcttctgtaagaagacccagtacaattagtcaggagcctgatacagcagaaactgggcgcagaggttgtcttatgtttctagcttaatcgtgaccctaatgcacattgtgcttgaggcaaacttgactacagggtgttgaccctaagcactacacaggggaccatacatatattcccgttacacgctgaggctactggaagtcagacacgccagatcataatatcggtggccactatactgttttctctactcgtagcttaactgctatggtggactcatgtacttgattgcttgctggtgcaactaccagtagggcctcaagtcaatcatgcacttgcggctga

SEQ ID NO: 3993 - DNA, 471 bp, Zea mays
  unsure (1)..(471): unsure at all n locations
  Clone ID: MRT4577_103643C.1
gggggttcggggcgagtgatttngaataaagcattgtttcttctccacttatggagcatttgcctccacatccgatcatggtgcaggggggtgttgtcancttcatcaacagttgccagaatcaatgattgagttaatttcacaagataatccgttgccagaaaagggtaagcttttgcaagcagtgatgaaagctggtcctttgcttcagacactgattcttgcatgaccacttgctcaatggagacaccctccaccccctgttgagtcctttgagattgcacctgtcaccattcttttaccaccaccacatcaacaacttcgtcaagagtccttcatcaccttcaacttgtggagagttagtgggagaagggttttctttgagggcactgattcttccactcagaacaaggttcataggatttgactccaatgacaactactactaaactgggactaaagtcaggttta

SEQ ID NO: 3994 - DNA, 571 bp, Zea mays
  Clone ID: MRT4577_103644C.1
ttggggaccctcgggccggccgggctctgctacatttatcccggatatcttgccaacgcgctctcctgctttctggagcggtgtgggtgccttaacctggcaccaacccggggactcccgtgctgttactggaagactccccggcccgcggacagccgcgttgccttcaaccaccgcccaggcaaggcgctcggcggcacatcccggacgcccataggtaagtagagaggccgctcgagctgacatattgagcatgggatagcaccacacaagacttgattacactatatgacagcataagagtatggacttctgatagagagcacattgctgcgacactgctgatacataagataacttagcttgccacatggaaggccgtggaggaacctaggtcgaagatatacttagagaaaccgctaagctccatgcacatggatgggagatacaacagcccatatgagcaccctttctttgccaaggaactgtctgagcctagagagccacctatgcgatacccaagagctttgcattccatggctgatgatatcaatgccaacaaatgcatgtg

SEQ ID NO: 3995 - DNA, 594 bp, Zea mays
  unsure (1)..(594): unsure at all n locations
  Clone ID: MRT4577_103645C.1
ctcgaggccnggcgggccggganttccatcctcgctttccagatcccccaagtccacccatccgagatctcccaaatccacccgaccaagccatggccggcggcgacgaggaggccacgacggcgctgctgccgccgccagcggggtcggcggaggcggagcgcccgcctcccccgccggccgaccggctcggggtcggctacctcatcttcttcacgctcggcgccgggttcctgctcccctggaacgcctacatcaccgccgtcgactacttctcctacctctacccgggcgcgcccgtcgaccgcgtcttctccgtctcctacatgctctcctgcctcctcccgctgctcctcatcgtgctcgtcttccccaagtccagcgccccggcccgcatcaacaccgggctcaccctcttcacgctcgcgctccttgtcgtccccgtcatggacgccgtctacgtcaagggcaccccgcgcctctacggcgccttcgacgtcactgtcgccgccaccgtcatgtgcggcgtcgccgacgcgctcgtgcagggcggggtcatcggcttcgccgtggaactccctcgagcgctacatg

SEQ ID NO: 3996 - DNA, 215 bp, Zea mays
  Clone ID: MRT4577_103646C.1
actcaataataaaagatatatttctcaaaaatccatactttctataaacttctaataacttcagtcaggggcaacacgtagttcgagagcttacaactccaccacctaattcacccacctcttcatggaatgccccaacacactttcctacccctttatattaaatgctaaccaaattctatttccattaattttaatcatatatcttaacttac

SEQ ID NO: 3997 - DNA, 101 bp, Zea mays
  Clone ID: MRT4577_103647C.1
cagcagacactcgctgagtttaccagagcgattgccaggtcattactccaggaaagcaacggaacggtcccatcatcgtagctcaaagtctgctgctgccc

SEQ ID NO: 3998 - DNA, 700 bp, Zea mays
  Clone ID: MRT4577_103648C.1
gaccacttttttttttttttttttggaccagcaaagaagccgaatgactcttttgaaaacatgagtggactggacctggcccatccattcacgaaaattacaatattatatagctcccattctgaaatatgatgataacgaaactgaggaaacacatcgcagtcgcagatgacagaagcctaatcaatgacttggcatgtcagacatgaacattatagctcaaccggaactcgtgacaaggacggctggttccaagagcttgagcacgacggggagccctttcgacggctgcagcgtgaggaagtcggccggcgcgtgcacgtactctggcgccacccggaacgtgaagcgccgcaggatgagcgccagcgtggccttggcctccagcatcgcgaagtcctgcccgatgcacgaccgcgggcccagggagaaggacagcagcgcgttcgggtgcgtcgcggccctgcccatgccgtcccggaaccggaacgggttgaacgcgccggcgtccgcgccccacacctcctcgtcgcggtggagcatcgcgatcgggatcaacaggagggtgcccttgggcaccttcacgccggagaggtccgcgcccgccgtcgcccggcttgcgatcagcggcaccgcgccgtatagccggagcgtctcgtacagcaccatggtcacgagcttgagcttgttgaggggcgtc

SEQ ID NO: 3999 - DNA, 243 bp, Zea mays
  Clone ID: MRT4577_103649C.1
gctctgatgattatcacggactatgagtgctaacctacaaggtatctatgctagacaagatcattactctctacatagctcttcaactccaaatgatggttatcaacatgagccgtgtaggctgagcgacagtcatctgcactctagttgccgtcattgtataagaggactactgatagtggatatggcacgagacacatcggaaatgggaacgccttctactgcaagaacggatgatgaggc

SEQ ID NO: 4000 - DNA, 551 bp, Zea mays
  Clone ID: MRT4577_10364C.1
ggactatcaaggtcgctgagcaccagctgttgagaagattagccggtgaggagccaaaggaggatgcctaggttgaccctttttttattcattcacccccgttttgccttcccgggatagatagcttcatcagacaacacagcctagctacacaatgtgcagacgacgcccaactaaaagctcaatcagacaacagagccacggctcccagagacgtcggcacgtcgcactagtcaagcagcgctaggatgttgtgcttaggcgcactcgcggaggggactgcaggccgtgacctagcaccgctgctgtcaggctcgagccgcagccctggcaagtccgtcctcaccctcgtgctctgctgactgaagacatacagcaaaaccaataagggaacagtagtctgctgttaaggaagggaatgtcgaacttcaggcatacagcaagactaggctgttagtcggcaaggtttgttgtttgcacaacattagattcttctattcaaggcagattgctaatatgatcaaaaaaaaaaaaaaaaaaaaaaactcttc

SEQ ID NO: 4001 - DNA, 293 bp, Zea mays
  Clone ID: MRT4577_103650C.1
agtgaacacagagctgcttctttgttgaggagcggaatagtgtcttttttgaccacgcaaccaacgagaagcttgcgaaaggagtactaggttatttgcacacaaacgcgcaagttgaatctagaattgacggaacggatcggggaaacgcgaacaggtagagataaaaccgtgcgtacttagatcaatcagccagggctgtgacggagatgctaattggaatgcccttggcaaagatggcggggggggcctcttgagggatggaggttgcgttgaagatgaccgggtagggg

SEQ ID NO: 4002 - DNA, 277 bp, Zea mays
  Clone ID: MRT4577_103651C.1
gccgcgtcgtaattttgtaccttagagcggcgcctttttttttttttttatgctgaccgggcctgtggggtttcttttctttttggtcgagtccgcacactgcttcatttcgttgtacgaggtttccgcgcgtacttcaattgcgtgccgtgtcatgcacgcttatatattggggggggggggcaaatcacaattttcctgcgtgtgcaattcactagcccatgcgaatgcagagcctattccggtcgatcacgggcagacggtgacttggtggttg

SEQ ID NO: 4003 - DNA, 777 bp, Zea mays
  Clone ID: MRT4577_103652C.1
ctcgaggccggccgggagccttcgccagcttgctaggccaagcgaatttcagcggggtgcgatcgcatgataactgtgactctactcctaactactctaaacccttaatctctagtcaatgccgcgcttcgatggcctatcttgacgatttaggcagcggcagaaagcgtaaacgttcgccagggaactactatgagaacatccgtgtcgacggcaacgccagggcccacctaggcgacacctatcacatcgggaccaataaccctcttcacgacctactgtacgccagagacgcgcactttaatgcgtacgaaaagcagcacgagctaacctgtctcaaaaacacacgcgtcgacttgttacacgagatatacagctgggcagatgggcaagacgagcggtgcatcttctggctcagcggcctagcaggcacaggcaagtcgacgatcgcgcggacagtggcacgcagctactactacgacaagcagcgtcttgcggccagcttcttcttctcgcgcggcagcggcgacgtaggccacgcaggcaaatttgtgacgagcctcgcagtacagattgcagacaatgtgctagcatctcagcagcatatgcacgacgcagttgtagagcgcagtaacattgccagccagtctctacgcaaccagtggcaccacctcgttctccgcccgctgtcgaagttgcacgagccagaagcagggcaaacatatatcatagtcgttgatgcgctcggcgaatgtgataacgacagcaacatccgca

SEQ ID NO: 4004 - DNA, 316 bp, Zea mays
  unsure (1)..(316): unsure at all n locations
  Clone ID: MRT4577_103653C.1
ccgnggacgcgngggcggacgcgngggcaaagattcactncngctctcaaaancaggaccacagagcatcccagccagcaagcaagaangggagcnggctnacttgatgaatggagttttgctagaggaacaagacttgttattagacaaaaagtttctacatttattccctttagaaaaagctttgaagtacaagcttcatggttgccaacttcacaaattgccagcagcgtatttaccttgggaaccgcagcggttcttccattctatactcttatggtttttgcttcgaaatctgaattgactaaaaagtcta

SEQ ID NO: 4005 - DNA, 2286 bp, Zea mays
  Clone ID: MRT4577_103654C.1
gggcattgcttacctcgaggccggccgggctcccttcttcgattgccgtcttctctggcttccattttcgcgaggaggcgaggtggacagagacgccgccgccgcttccgcttcgacctcgacctcggcttcggcttccacgagaattctagcaagtcttctggagaatataatccacatctgtttattttgctgcattttggtatggacgaatctgcctgtagatccactgccccagttgggtttcttagaagaggttcgggcatttccttgagaaatcaaagcaatgaggataggtcaaatcagtacaacaagcagccagggaagagttcaaatcccaatcctgtaaaattacggttcactgaaaataaagagaaaccaaggtattttcaagggacatttcattcatcaggctccagggcctcatctgtaagctcttcaaaagctcctgctagaaaatactgcgacgagagacagaaacagccctttttggcagagacagacattgctgaaagcagtaacagaagaactgaggttagacgcctacaaagtggcaagaaagcttctgtatttggtgatgggcatccatacacacagaagagtatctcagaagcttcatcatcctcaacaattactggaggcttgccagaagagcatgatcttggagctttatatgtttctggttcttcaggtagttctgcacatccagttaatcccaggaatgctgcattgaatgcttcggcacatatgcaaaaggataaagaagaaatgagttcaggtagacctcaaggtgctcccacttttgttcgtcggcatactttacctcaaagtttttccactggtgtcaagtcaccaactgcccctggcactggagcacagagacgtggcctcaaaaatcttggttgcacttcaatatctgatgttctgccttcaggatgctcttcatctgattctgctcgtgataggagaatcgaagttacaaagaagagaacttctggtgcaggaagttcttcaagatcaaggataagtgaacaatctaatttcagtcagccacgtgctagttatcctggcagtactggtcctagagctagagctgctgaacaatcagcttctcaacaaacagcaaggaccaatagccgaaatattccggatcatacagattcaataaggactagacgaccttttactctgcgtgccagggagaggatgatgccaggtgaaagggaggacagtgtatttgctctgcatgagactgttgcaagcattcatccagaatgcggacattttcacatggatggtactcccccagagagattaggaagacccttttatgcagaactacctcatgcaatttattcatctaatcgtcaaggatcaagtagtcagacagcaaggagaagatctacgtctcgtactgaagaaagccctcaacggatgtttcatggtatgttttgggagagagatggctacagggggataaacatggaaggaattgcacaggcgttgctagcattggataggattgaacatgatgttgaattgacttatgagcaactgcttctgctagaaactaatctgctcttaagtggccttgatttgcacgatcaacatgaagatatgagattggatatcgacaatatgtcttatgaggaactgcttgctttggaagagcatattggctcagtgactactgcccttactgaagagcaatttaccaagtgtgtaaaccaaagtgtgtatgaagcaagaaattcttatagagatgtaagcaagatcgcagcagatgatgtgaaatgtagcgtatgtcaggaggaatacgttgatggtgaagagattggtacaatgcaatgtgaacatcagtaccatgtgcgctgcattcacgaatggcttaagcagaagaattggtgtccaatatgcaaagcttcagctataccttcagagatgaccaagggagacgcatgaatcttggcccaaacttgtaaatagcgtggatttattattagacattgtagatgctgacgcagttcaccccaatatgtggatacgatagtctctcccgaacggtcgaacgcctggaaccttttgttactgcatcttttatcttcttagcacacccttgctgcttgacagcagtacgggtcagaaactcgaaaataaccgtggttctcaagaaatttttccagattctaaaaaaaaaaaaaaaaaaaaaaaaaaaaaaaaaaaaaaaaaaaaaaaaaaaaaaaaaaaaaaaaaaaaaaaggaagacaaaaaaaaaaaaacaaaaat

SEQ ID NO: 4006 - DNA, 402 bp, Zea mays
  Clone ID: MRT4577_103655C.1
tttttaaggattaattcaaaccggtaaacacccacatgaattcttttaaataatatttctaacaaaaaataacatttgatgatgcattaatgttagtttgagaaaataaacgaaggagaacatggtttcctttagtattgatggacatggtgaacaagtttggaattccatgcaagaaaatgaagcagctaatgaagaagagagtagtaaaatgggggggtaatagagttaattagaagatgcggagggaagatgaacgggatagttattgatggagtcatcccaggggttgccacgccagtgctttaagaatggcatgtccctaacggacttacagacggcgctgctacacttgaaacccgacccagaggcgatctgccagacccgatcccacttggagac

SEQ ID NO: 4007 - DNA, 297 bp, Zea mays
  Clone ID: MRT4577_103656C.1
gggggccaacaaaaactgaaaatttcctgcgaagttacttacaacccggggccttttttgaaaacatatataatctgatcatggctgtcaagggaaagtaacatgactagaccgatttgcattagaggcaccaatgatacttacttgaatttcatatttataatatatcccggaattttttttgaaaaaaaatatgccacaaacattgcatgattgctgactactaataatggcaccagtttggagagtctgcccgcaattgatgtggatatcttgctaacaaaaggggagcgcctt

SEQ ID NO: 4008 - DNA, 202 bp, Zea mays
  unsure (1)..(202): unsure at all n locations
  Clone ID: MRT4577_103657C.1
gagaacctgaaacngcgggccactgcctgcctcacccgacgccagaagaagaaccagctcctgacctccaatcctagctagctacctacccacaccccataccacaagacttctacaaaaacccacacacgacccccccaccagaccgatgccctctgccaccgcactaaaagactccttccttcccaanaaacccaaaagg

SEQ ID NO: 4009 - DNA, 267 bp, Zea mays
  Clone ID: MRT4577_103658C.1
cgaattttagcctcccttatttgacactgagattatctttcatgccttataatgacattcctattagctcttccatccaaaggatgttaagtgctatgttaaaggacagagttgcccctgctacaacatatcttgcttaaccacactatgtgtgggatgacatatagcctgcttccaacacagaggatgaggtgggacataaggtgcttccctagacgatggtggcttggtcatgtatgctgttaatgagcacgaaattaagaatca

SEQ ID NO: 4010 - DNA, 578 bp, Zea mays
  unsure (1)..(578): unsure at all n locations
  Clone ID: MRT4577_103659C.1
gtgcttcttcagtcctccatcgccagcaccgccgaccctagnattaccctccatagcacagatggaagcctccactggtgagggttccctgngaaaccgggcgtcaccccacgcacgtctaggagaatgcggagccgtcctccgacgtgggcacacgcggacatggtgcccaagcaatcggcaaaggaaacaccacaccagactatgacacagcgccgcgcggtgggaaggcgagaagcaattgaaacactttccactcatgtcaacatggacaggactagaagaaggctttgaaagacaggaactccgacgatgagcccggcgtcccacaaccctcacccagccaccatcgccaacgtgcaggggtctgggggcttttctgcgatcagcacctccttataaggacgactcgatccactgctaccccaaagaagcagcagatgaagtgtcaaggccttcgtcttcacaccatcgctgatacttcaagcgacatccaagaaaagcattagatgggtggtgggggaaggaggagaggaggctgacgacggggagcaagggtggtggncggcgaccttgga

SEQ ID NO: 4011 - DNA, 2024 bp, Zea mays
  Clone ID: MRT4577_10365C.1
ccggccgggatttttctcacccttcaccttgattcatcattcacgccagtacgccacgcctccgcgttccacgttccttctcggctctacgtcaccgtaacctcctccacccatccggccatcccccttctcacgcggctcgctcagggctcgagcgtctccccatcggaaccctaatcctctctttccctactcgcggaagccaactccaccggcaggggaagcggaagggaagcacctcggccccggcaagatggtgctcgcacagctgggcgggagcatctcccgcgccctggcgcagatgagcaacgccacggtgatcgatgagaaggtgctcaacgagtgcctcaacgagatctcgcgcgcgctcctacaggccgatgtccagttcaagatggtccgcgacatgcaggctaacatcaagcgcatcgtcaacctcgaggcgcttgccgcaggcaccaacaagcgccgcatcatgcagcaggctgtcttcacggaactctgcaccatgttagatcccgggaagccttctttcactcccaaaaagggcaagccaagcgtagtcatgttcgttggtctgcaaggttctggtaaaactactacttgtacaaaatatgcttattatcatcagaagaaaggattcaaaccagcactggtttgtgctgatacatttagggctggtgcttttgatcagttaaagcaaaatgcaacgaaggccaagattcccttttatggaagctacatggaatctgatccagtgaaaattgctgttgagggtgtggagaggttcaagaaagaaaactgtgatctcatcattgtggacacaagtggaaggcacaaacaagaagcagcactctttgaagaaatgcggcaagtttcggaagcaacaaaaccagacctggtgatttttgtgatggacagtagtattggtcaggctgcatttgatcaagcacaggcatttaaacaaagtgtttctgttggtgctgtgattattacaaaaatggatggtcacgcaaaaggcggtggtgcccttagcgcggtcgcagcaacaaaaagtcctgttatattcattggaactggcgagcacattgacgagtttgaagtttttgatgtgaagccatttgttagtcgcctgttaggaatgggagattgggcaggctttatggacaagattcatgaagtcgtacctacggatcaacagcctgagcttctgcagaaactgtctgaaggaagctttactctcaggcttatgtatgagcagttccaaaacattctgaaaatggggtcctattggacaggtcttctctatgttgcctgggtttagcgccgaactaatgccaaaaggacatgagaaggaaagccaggctaagattaagcgctacatgacaatgatggattccatgactgatgcagagcttgacagcacaaatcctaagctgatgactgaatcacggatcattcggattgcacgggggtctggtcgtcctgtcagggatgtcatcgacatgctggaagagtataagcggcttgctaaaatctggggcaagatgaagggtctcaagatcccaaagaaaggggagatgagtgcactgtcccgcaacatgaatgttcagcacatgagcaaggtccttcctccgcagatgcttaaacagattggtggcatgggcggtctgcagtctctgatgaaacagatgggatcgaaggagatgagcggaatgtttggaggcatgggtggcgagcggtaattttacgtcctgtttttggtggatcgtcgctgtgaacttgtgatgctaaattgagagggtttagtgctgcggtctgatcatcgtcagagactcagaggtttccatgaagatcagcctgcgccatgttatggaacaggcttactgtagctccccatgcctgaaaatttaatttatatgattatgaacagtacatttgtcctcgaaaaaatgtataagatataatatttgacaaatggaatatgcttatgtagtcttccaaaaaaaaaaaaaaaatcaaaa

SEQ ID NO: 4012 - DNA, 358 bp, Zea mays
  Clone ID: MRT4577_103660C.1
catataggtccatttaacccctatagcgagctgaaccacactgcatcagttcgaggatctacaactactaccatgtaaaaaccttgctgcaacacgccttacttgctttgtgacacatccacatttgctgacttgctaccataacgaagaggctaaccccgatcgccttttacaactacagcacatgctgacctttgaacggactgcttctgcagatgcagcattactcctaccaacaacacacgattgcgcgcgccctgatcgataacgcttacatagccgtatcgcacactacttgtcgctttggtatgatgtactttgtccaacacatacatacggaatgttacatgtcacagct

SEQ ID NO: 4013 - DNA, 495 bp, Zea mays
  unsure (1)..(495): unsure at all n locations
  Clone ID: MRT4577_103661C.1
cacacacccnacacagnacacaacacaacnncggcgcagcgagcgncncnggggggggggagcacgcaccgcgccaaggaagacagagagagagcgccgcnccnctncnctgcgacggaggngcggaagaccgcccaccnggagcgagagcncgcngcagncccncgagagcnggncacagagcaagccgacaagaaggngaagagggggggggggggngcnggcaangacggnggcccaaccagggcngncagngcccaaaagngcccagacaangaggangacgaagangacaacaccaagccccgcaangaggcagggaacagcgacacccncccgagcaacgagcccggccncgangaagangngaagcagngcaggggcaggaaccacaacnacagcacagaagaagagcaagcacgacgaccgaggccgacaacaagaaacgacccggcgaacacccccaccaagaccccggggcacggagccggcaag

SEQ ID NO: 4014 - DNA, 152 bp, Zea mays
  unsure (1)..(152): unsure at all n locations
  Clone ID: MRT4577_103662C.1
catcctgnaatcgnggagntcatctacagcgncgtcnngaactccgagcacaagttcgtcgctnaagganaagaagaagccgatcatcttctcgatngcgngtctcganngcgtgaagaacatgacaggcctggtcgnaatgtanggcaaga

SEQ ID NO: 4015 - DNA, 410 bp, Zea mays
  unsure (1)..(410): unsure at all n locations
  Clone ID: MRT4577_103663C.1
cgattgttgcagcgtagtagnctcgaatctgctcgacactgtagtcttgctggaatgagtactgacaactcggatcgagcagaaccttgttgtgaattgcacctgccgcattgccgactgccgcgcccagcccaccggagccttcattcgtgccatcgtctcctcgccagaggtcatctcaaagtatgagaaggcgctcatggtggctatgtggagagcttctccaacctgacgtngtgcaccaacccccagggctgcgaccgcatcctgtgccgccatggcctgggctgtgggactacctgctgcaagtgtggctgngcctcttgcttcaactgtagcttctctgatgcacactacgctgctagctgtggccatatgtctcagtgggtcgacgacgggtgctactatga

SEQ ID NO: 4016 - DNA, 1154 bp, Zea mays
  Clone ID: MRT4577_103664C.1
catcttctcttcctctcgcgcagcaccgcctctcaacctccgccgccgctcgcccggggcgtcagcgtcacccacccgcgcagaaggcccccgccgctcaaactaccggtgccctaaaccccgatattcttcttcgcccgaccttcagggttccgccgccatgccgcagggagaccacatcgagcttcaccagaagcgccatggcaagcgcctggaccacgatgaacgcaagcgcaagcgcgaggcgcgcgaggtgcacaggcgctcgaaggacgcccgcaatttgattggtgctaagggcaagaggttcgccaagaaacgctatgctgagaaggcgcagatgaagaagaccctgaaaatgcacgatgaatcaaataagcgacagaaggttgatgatgatgtccaagagggtgctcttcctccgtatctactcgatcgtgatcagacacagcgtgccaaggtcctcagcaacacaatcaagcaaaagaggaaggaaaaggctggcaaatgggatgttccgctgccaaaggtcagacctgtagctgaagaagaaatgttcaaggtgctacgaactggcaagcgaaaaaccaagcagtggaagagaatggttaccaaagccacttttgttggagctggatttacaaggaaaccaccgaagtatgagcggttcattcgaccaactggtctgcgtttcaccaaagctcatgtgactcacccagaactgaagtgcactttcaaccttgacataatttctgtgaagaaaaatccaaatggtccgatgtacacttctcttggtgttatgacaaggggaacaatcattgaggtaaatgtcagtgagcttggtctggtaactcccgctggaaaagttgtttgggggaaatatgctcaagttacaaacaacccggagaatgatggctgtatcaatgctgttttgctagtgtagaaccatagtgagattttgtttatggtggtgaatcgtcccatttgtatctgctcttgataagatgctcccttctgaccgatctcatggctaatcccaggagttgttttgctgcactgtggtccatgggcgagcattctatatccttgccatgtgcgacaaatgacttggctattatagcctgctataaagttgactaatacaaattagcagc

SEQ ID NO: 4017 - DNA, 466 bp, Zea mays
  Clone ID: MRT4577_103665C.1
cggcccggaacttcccgggtcgggtcgacgcgatgcgtccacgcgtgtgcatttgaacaacgacaacctgcacaccaaggggacgggggattttgacccatacgggagggacgttgggcaaccacgtctccaccgggagactctgccgggcaagctggcgaccgacatcaccggccacacgctggggggacactacccaccctgccgcgtaccttagcccacaggcgaaggggcaggacctcctgatcggcgccaactttccgaacgctgggcctgggaaaccacgaccacacggcacttaagtatcacgcgatcccgctgccccaccaggtggagtactccaaggagaaccacacgaagctggcggatgcggccgacgccggccaagcacgctccatcctcaacggcccgctgtacatagatcagagccggacccagtgacttcgcgccggaactactacataaa

SEQ ID NO: 4018 - DNA, 358 bp, Zea mays
  Clone ID: MRT4577_103666C.1
gaccaatttttgattttttagagggcagacagcacaacacagggcgggaaggagactgtcgttgcagatcataaggaaaccggcaaccacagaggacgaactatgcatgcgccatacattagtacacactggacaaacggcatgaccacggagtaagatgacacggagggagtgcagaacgaacgttatggaacgaacacgacacggattcagctctagaaccagactgaagaggagagctctgcactgaccactgagaacccgatggagcacatcatgcacgaaagatagaactccaggaggatgcatccgtagatgctaacattcgcgcacgaggcagggaggatcactgaacaga

SEQ ID NO: 4019 - DNA, 1506 bp, Zea mays
  Clone ID: MRT4577_103667C.1
cgggttaccaagaaaaggcacgaccaccaccgtctgtccgggaagcaagctcataccctaatcgccgtccgccggtgacgccagcacgatggcccgctacgaccgcgccatcaccgttttctcccccgacggccacctcttccaggtggagtacgctctcgaggccgtccgcaagggcaacgccgccgtgggcgtccgcgaaacggacaccgtcgtcctcggcggctagaagaagtacacacccaagctccacgcgtccggcacaacctagggcatcaggagtgggaatcctcttctccctcgcgcagcatcgcctcccaagtccacaaacccaacttacgccgccgctcgctccaccgcgcaagagtctgctgctgccgctcacccacccccgctcgcgcagaaggccgccgcagctctcactactggtgccctaaacgccgatatccctcttcgcctccctttccccacccaaaaccccggccttcagggttccggcaccatgccgcagggagatcacatcgagctgcaccagaagcgccatggcaagcgcctggaccacgaagagcgcaagcgcaagcgcgaggcccgcgaggtgcacaggcgctcgaaggatgcccgcaatttgattggtgctaagggcaagaggttcgccaagaaacgctatgctgagaaggcacagatgaagaagaccctgaaaatgcacgacgaatcaaataaacgacagaaggttgatgatgatgtccaagagggtgctcttcctccgtatctgctggatcgtgatcagacacagcgcgctaaggttctcagcaacacaataaagcaaaagaggaaggaaaaggctggcaaatgggatgttcctctgccaaaggtcaggcctgtagctgaagaagaaatgttcaaggttctacgaactggcaagcgaaaaaccaagcagtggaagagaatggttactaaagccacctttgttggagctggatttacaaggaaaccaccaaagtatgaacggttcattcggccaactggtctgcgtttcaccaaagctcatgtgactcacccagagctgaagtgcactttcaaccttgacataatttctgtgaagaaaaacccaaatggtccaatgtacacttctcttggtgttatgacaaggggaacgatcattgaggtaaatgtcagtgagcttggtctggtaactcccgctggaaaagttgtttgggggaaatatgctcaagttacaaacaacccggagaacgatggctgtatcaatgctgttttgctagtgtagagccatagtgagattttgttgatggtggtgaatcgtcccatttgtatctgctcctgataagatgctcccttttgaccgatctcatggctattcccaggagtttgttttgcaccgtggtccatgggcgagcattctatatccttgctatgtgcgacaagccgacaaatgacttggctattatagcctgctataaagttgactaatacaaattagcaacattt

SEQ ID NO: 4020 - DNA, 1720 bp, Zea mays
  Clone ID: MRT4577_103668C.1
cattgggaacctcgggggcgggcgagatctcaaaaagcccatcttctcttcctctctcgcagcaccgcctctcaacctccgccgccgctcgcccggggcgtcacccacccgcgcagaaggcccccgccgctcaaactaccggtgccctaaaccccgatattcttcttcgcctccctttcctcctcagcacccaaaccccgaccttcagggttccgccgccatgccgcagggagaccacatcgagcttcaccagaagcgccatggcaagcgcctggaccacgaggagcgcaagcgcaagcgcgaggcgcgcgaggtgcacaggcgctcgaaggacgcccgcaatttgattggtgctaagggcaagaggttcgccaagaaacgctatgctgagaaggcgcagatgaagaagaccctgaaaatgcacgatgaatcaaataagcgacagaaggttgatgatgatgtccaagagggtgctcttcctccgtatctactggatcgtgatcagacacagcgtgctaaggtactcagcaacacaatcaagcaaaagaggaaggaaaaggctggcaaatgggatgttccgctgccaaaggtcagacctgttgctgaagaagaaatgttcaaggtgctacgaactggcaagcgaaaaaccaagcagtggaagagaatggttaccaaagccacttttgttggagctggatttacaaggaaaccaccaaagtatgagcggttcattcgaccaactggtctgcgtttcaccaaagctcatgtgactcacccagaactgaagtgcactttcaaccttgacataatttctgtgaagaaaaacccaaatggtccgatgtacacttctcttggtgttatgacaaggggaacaatcattgaggtaaatgtcagtgagcttggtctggtaactcccgctggaaaagttgtttgggggaaatatgctcaagttacaaacaacccggagaatgatgggtgtatcaatgctgttttgctagtgtagaaccatagtgagattttgtttatggtgatgaatcgtcccatttgtatctgctcttgataagatgctcccttttgaccgatctcatggctattcccaggagtttgttttgcaccgtggtccatgggcgagcattctatatccttgctatgtgcgacaagccgacaaatgacttggctattatagcctgctataaagttgactaatacaaattagcaacatttttcttgagctaaaaaaaaaaaaaaaaagcggccaaaaaaaaaaaaaaaaaggcgcccccgaaaattgctgcttacaatggtcttctttcaggtaaatgtcagtgagcttggtctggtaactcccgctggaaaagttgtttgggggaaatatgctcaagttacaaacaacccggagaacgatggctgtatcaatgctgttttgctagtgtagagccatagtgagattttgttgatggtggtgaatcgtcccatttgtatctgctccgatatgctattttttgaccatgtcatggctaatcccagtagtttgttgtgcaccatgggcataatgagcattctgtattctcgctgtgtgctacaaacatatatggagtaatataaattagcagtatttttttttgagctacaaaaactccccccacttcctcaaaaccctagacagtccttacctggaaaatttccacatgtacaacccttaacaattgacctggtggaa

SEQ ID NO: 4021 - DNA, 336 bp, Zea mays
  unsure (1)..(336): unsure at all n locations
  Clone ID: MRT4577_103669C.1
ttgaaaacccgggccgacggacgcgtccgcagctaggaccgncgcctaccttttaaggttctactgcccctcctcaccccaggccccagcaggagcggaaggggccgcggccacgtcataccccacatcggcgagcggaggcggcaccgccggatgcaaaggcaagatgttcgggcgcgcgccgaataagagcgacaacaccaagtactacgagatcctcagggtgcccaagtcggcgtccaaagacgagctcaataaggcctaccgcaaggctgctataaagaattttttattttttttttttttaccccgagaagaacaaggagcncgcacaag

SEQ ID NO: 4022 - DNA, 322 bp, Zea mays
  Clone ID: MRT4577_103670C.1
ttgaagcccggcacgccgtcagttttccgtttcacttccagcccatgccatgcgggtcctggcccgcaacctcgagcgattcatgccagatccggccatgctcgacacatgatgacttacccgccggcgccgatggctgctctctcacgccaagcacaccagacaccatcgccgaccactaaggtgaaacctccgacactgtcactgtaactggatcacgctcgtcgacagctgccggactgaatgcaccgctcacggcctatctgatcgcgctgtttctcttcctcatcttctcgaagctctgcatgcagcccattcctcc

SEQ ID NO: 4023 - DNA, 398 bp, Zea mays
  Clone ID: MRT4577_103671C.1
tccggccgggacccatcagccatccccttttgctgcaaatctttctctgaattgtgggtctccgacaatggcggcgctcgctccatccaagattctagccacctagctcaacttcgagtgggcctgctcctctgccacctagccaccaccgcctacgcccaccatgaaagacatccacgtcctcggcagcggcgacgggtgcagcgacggctgcagccccgattccgatagccgcgttgtctacgcgggcatgaagctggctgatacggaatccgatgcgccggcgtcggcgccggggccgtcgtccgggtgaactggcaatcgtgcggccaggcaagcatggtcggtgaaaaccgagaactaattaagggttcgattgtatagtgccgggtgctact

SEQ ID NO: 4024 - DNA, 658 bp, Zea mays
  Clone ID: MRT4577_103672C.1
cattcgccggcccggcggcctgccaccacagaataatggagcggcagactcgattcgtcctgctcgtcttcgccatcggggctctcctcgccagctccgccgccgcggacttgtcggcggctgctggttccctgcacgcgctgccgctgcggcgcgtggaggacgacgacgcaagcagcttcgtggaggaggcggcgtacccgccgaggagggcgctgtacgggggcgggtccatcagctacggggcgctcaccgcgaacaaggccgtctgctacggctcgtgcgccgctcgtgggcaggcgtatacccgcggctgcctggccatctacgggtgccgaggtggccgttaattaaccagaagcagcgcgtagctagcagtcgatgtcagctcgctcggcctgttaattacatgtctgtttcttgtgctgcttctcgtttttcttctaatccccttctcttgcttcaaacaagccaagatccgatccatatatacatgttgtcgctcccaggttctgcattgtaattttccaccataataaatactctctctgtttctttttagatgtcgctggtccctttttagatgtcgctggatagtacaaaattaaactatccagcgacaactaaaaacaaataaaaagagtattgtattttctat

SEQ ID NO: 4025 - DNA, 485 bp, Zea mays
  Clone ID: MRT4577_103673C.1
cccacggcgtccgctcatagcgcagcatgatcgatcagatagaacaaaagggatgacagggggcgctcgcgcaattactcttagctccggccttggtgggggtgcccacctcctaaatggccattgtctagcgtgcaccgccaagggagagctttcctcaatcaacactgccggaccatctgttcgctacgcctcgactgatataacgatgtctgggctccttcccatatgcaatgccgccatcacttactgtctcgaccaactttcaaagaccatgtccggtagaaataggcgcatggatcgatgcttgtgacggagatatctgtgtacacagtcctaactccagcgcttcgtcccatgtcagactgatgcgctgtgctcggagtcgttcagctcatataatgtagtgatttaattattctgatagaactattgtttatggataaacgtccgttcctatcaggtgtcaacacattccgaaacgg

SEQ ID NO: 4026 - DNA, 378 bp, Zea mays
  unsure (1)..(378): unsure at all n locations
  Clone ID: MRT4577_103674C.1
ctgaattgccggggggagccacgcatcctacaacatcactgatgtcttacacaccgcaggtaaggacagcatgctcaanacggctaagggagatcacaagagggcgccacatattacaatctggttcacaccacctttacaaggatcggggggaacaccatttctggtgtcagggaggtgaacatcttcaatgccgattttcttatccagtttcataaccctaaagtgcaagcatccattccttcatatacattggtgggtaggggagtcccccatacaaaaagggttggatcaccttctagcataaattatcaaccacctccaccctgttgacctcaacaacgttaacaagctcactggaagcttctaccggccttt

SEQ ID NO: 4027 - DNA, 253 bp, Zea mays
  unsure (1)..(253): unsure at all n locations
  Clone ID: MRT4577_103675C.1
gcgtttttgtttttttaaaaaattttttttaaaagcgcgcgttctttttttcacataaaattcgaatgccaatcctgaacaaccaaggaagtagaagaaaaaaaattacaaacaaacagttactaccctcagcacggctatttgcagagcatctgtttgttantaataantattntccccccctaaacaccnttacaaaatttnnctcnnctcccnncactccacntcaccaccaccatctacaaccatctac

SEQ ID NO: 4028 - DNA, 201 bp, Zea mays
  Clone ID: MRT4577_103676C.1
gccacgcgtacgctcacgcgtgcggacgccgaggttgagcttatccatgccgcagacgatggtgcgcctgtctatacctcgcccggctttatctgccaggatctacacctggtgaagatgggtctactcatgtgtaccaactgagcctatgtgggctacaaggaccatcagtcgcatatgagcaaacttgcagacatttgc

SEQ ID NO: 4029 - DNA, 334 bp, Zea mays
  Clone ID: MRT4577_103677C.1
gctcctcatgtgggtcgacacggggctcgtcccggaggccgcggccagggggtttgggcccaagctatcgccggaagccggggcgcgggtgggggccgatgcgcgcctcgcgcctggcggcctggaacataagctgcacgtcgtggagcgcagggtccgccagcttgttggcggtgaggggatcgccaattgcagctcgcgagactccgtctggcgattccaccagaatgatcagcaagtgttccactggcgctgcacggagtacaaatacgcggcggaggaggtcagcgtctgggggagccctctccgcacctccagccttctccaagagcac

SEQ ID NO: 4030 - DNA, 663 bp, Zea mays
  Clone ID: MRT4577_103678C.1
gctcggaattcggctcgaggaccaggaatgctgtttcagggaatgtatatacatttacagctcttatcagtggtttctgcaaggatggaaatatggatgaagcaactaggttgtttcataaaatgatggagagttccctagtgccaaatgaagtgacttttaatgttatgatagaaggtattgccgtgtaggcaatattaggaaggcattccagttatatgatcagatgctagatagaggcctaacgcctgacaattacacttacaggtcactgataagtgtagtttgtttgacgctaggtgccatgaaagctaaggaatttgttgctgatctagaaaacaactgtgctgtgctaaatagttttagccttacagcacttatgcatggattctgcaaagaaggaaggttaactgaaacgtaccaagtttgggatgagatgagagcacgaggagtcaagcttgatcttatcaggtttactgtaattgcatatgcagctcagaaactgcatgactgggagaaaataagcattgtatttgggaaatgaaagcaaaaggtgtcaagccagacaatgtgtttcatacatgcatgattcatgtgcactcaaaggaagaaaatatagttcaagctttaaactgctgggataagatgatagatgacggatgc

SEQ ID NO: 4031 - DNA, 327 bp, Zea mays
  Clone ID: MRT4577_103679C.1
cggacgcgtgggctggggcgaccactgccgcgagtacaagccggagcggtgggtgccgggacggactcttcgtgggcgagtcctactacaacatcactgccttcaacggcgcccctgacctgtgccttgacaaggacttctcatactaccacatgaacttcaccgccgcttcaatacttacgcggttccgctttgcgcataatagaatgctacctcgtcagacccaaaatcgcactcactatgtacatgaaacactgcctacaggggacgctcaccaaaacaggcactgcccattaattcagctcttaaccgatggtcttccatcac

SEQ ID NO: 4032 - DNA, 383 bp, Zea mays
  Clone ID: MRT4577_10367C.1
aaaaaaaaaaaaaaaaaaaaaaaaaaaaaaaaaaaaaaaaaaaaaaaaaaaaaaaaaaaaaaaaaaaaattaaaaaaaaaaaaaaggggcgggccggttttaggaggatcacaagctttacgtcaccgcgtcgcatcgcaacgttcataagcttcttttttatagtggtacaccttaaaattacaatataactgggcccggtcggtctttacaaacgttcgtggacttgggaaaaaacccttggcggttcacccaactttaaatcgcctttgcgagaacaattccccttttcggccagcttggcggtaatacgcaaaaaggcccggaaccgaatcgccttttccaaacagttgccgcagccttgaatggcagaagtggaacgc

SEQ ID NO: 4033 - DNA, 349 bp, Zea mays
  Clone ID: MRT4577_103680C.1
ccaaacggcccttaaaacttagctcattctgtacaggacggcaggagataagtgtacaacacaaaaagacgaaatgtgcaaaacccacggatccagcggccaggggcacgcctcacattaattctcagcatagacacccaacaaacatggtgtgcgcaccaaaggccattgcgggcgaccctctatagggaggcagaaatatgtgtctctactgcaccttgaacatgtgtcggatcacgtccaccacgcggttgttgtagccccacttgttgtcctaccacgagaccagcttgatgaactgggcgttcaaggcaatcccggccttggcgtggaagatgctcgacctgat

SEQ ID NO: 4034 - DNA, 1006 bp, Zea mays
  Clone ID: MRT4577_103681C.1
ggccgcttttttttttttttttttggccatagggcattaattaataactacttgatcacatctcattggaacggcaaggtaatagaaggcagtcacaacgtctatgctagttagaactatcataacagaagcctacgccttcactgcagccataacttcacctacacccgcaactcgcatcaatattaccggaggggagcgagcacatatggacttcagtgtgtggactacaaacttgtttgcgcaagagcattgaagcaatgctattgaaagcggacagccgcgatggagggtgggccaagacaagcaaccataactgcaagagttgtctggttcaatagtctagatccagggtgtcgtccttttgcgcatccggcccattcgcctggtgccatgggtcccactcatcactctcgtcgtcactgtaatcactgcctggaccattgcgaccactccttcgtctcggcaggcccttttgcagcctaacttcttttctccttttcgcatatctgtctctcttcctcttagccttggctttgctcttcgcactggttgtagcccattgttgcttgtttgcttgccctggctcctttgactgagcctgctgcgaatcgtctaccacatgcgaagaactctcttgcgctgggctcgcaacatcgggagacggcttttcggaagtagatttacagtcagaagattcgccgttttctttctgtaatcgccgtttgcgaaggatggcttggatttccgagtgtcggaacatggcaatttgctcgtcagtcaaggtccgcttggtgccgtcaggatagtagccgagcccatcgtcctcttcgtcataatattcttcagccgtctctgcctcgtgatgtacaccgtagagaatatgttctggcgttgacgcgtgggggaaatgctgcgcgtggaaagcgaggagatcatcgaccgtgaccgttggaatttgcagcgccataactttttattatcttctcagagagttcccggccgg

SEQ ID NO: 4035 - DNA, 141 bp, Zea mays
  Clone ID: MRT4577_103682C.1
gagcacctccgtccaatgtccgtactcttgcgtgcccgtacaacgacgggctgggcttctttcgccacgagtgggataagcacgtcacctgctcagcctacttcttcgacgagcacggctacttacatgcctcgctatgcc

SEQ ID NO: 4036 - DNA, 204 bp, Zea mays
  Clone ID: MRT4577_103683C.1
attacaaataatccatttttactttcaatccatgctacactctctccaaaaagattactagcagcatcatccttattgacacctgcatatctttattacaacaagaatcataatacccgtcatttcttcatcaacgaactattactgcaaacacaaataaactaccctcacaatgttatagatatactatcatctcacttattc

SEQ ID NO: 4037 - DNA, 168 bp, Zea mays
  Clone ID: MRT4577_103684C.1
tctttctttccggatcaacaattattactaggcgcggctatacttaaaatcgggccagactaaacagtttaccaacactaaaacacagcgcctgtaatatccaactactactttcctaccaagctttccgaccaggcattttaattctaagcctattccacaatcaaa

SEQ ID NO: 4038 - DNA, 541 bp, Zea mays
  Clone ID: MRT4577_103685C.1
tccggcttcccggtcgacccacgctccggcctagacacacacacactcctactagctggaagcaaagacgctagcgtgcactctgatgcagctaatgggcacgggcgtaggcgccctcccgtcgtcggtaaaaccccaccactatgtgcacacccacagcatggacgagaactactaccccccgtaccaccggtactccgacaccgaggtgggcactctccaccgacaacggcgagtacgagatgaacatgatggtggagaacgagcacaagcacacacagcctgtaggtgaggaaggacccatcgtggttcgccccttaagactttaacagaaccctcatgcgaaaaatgagccacttctctcacacactgactaaagcaaaattgaggaccgtggagcacaggcccggtggtacaccgcaacctacagtatagaatgagcgccacgctaatactatagacctcacagaccatgaggatggcaccattgacaagaatcaccaacaggtcttaaagagaccgatggatcaaccgattactg

SEQ ID NO: 4039 - DNA, 561 bp, Zea mays
  Clone ID: MRT4577_103686C.1
aattcggcacgagggaacacatccatccctcgctctctctcgcgcgcgcgctcgtgctccttcgtgctgctcgccccgcccccgccgccctgccctccccaccgtcgtcaccggcgtggggggaacgacatgactacttccaggcgccttgcggacaggaagacagccaagttccagaagaacatcacgaggcggggttccgtgccggaaaccgccgtcaagaaggggaaggggaacggctacgctgccggccccgtagtgctcggcttcttcgtcttcgtcgtcattgggtcatcgttgttccagatcatcaggaccgcgaccagtggcggcatggcttgagaacccgtccccggtgcagagcagagagatctgtttgtcgtttgtacatgcatgcgtccagctagaatcgagtttaatttcgaactgaaccgtaatgcagaaccatgtatgtaaataaagtgctattaaatgggtaactggatatagtgctatatatatacagtgttggaatacaaatacctttttttccccttaaaaaaaaaaaaaaaaaaatgaggc

SEQ ID NO: 4040 - DNA, 141 bp, Zea mays
  Clone ID: MRT4577_103687C.1
tcggtgacattggatcatggctgacatcttcggcccacagatgtttctgctttggttgcctactcggatgcttgttgggccgggtgttctgacacccgtcggtcaacctgtgggtatgcggtttttcttggtgataacctc

SEQ ID NO: 4041 - DNA, 711 bp, Zea mays
  Clone ID: MRT4577_103688C.1
catccctcgctctctctcgcgcgcgcgctcgtgctccttcgtgctgctcgccccgcccccgccgccctgccctccccaccgtcgtcaccggcgtggggggaacgacatggtaagcgactccgacgtccgcggcgcgacccactactctccttcgcctagctcgccaatgattctggtagtagtactagtatccacacaagctagctgattctgtttggggggcagactacttccaggcgccttgcggacaggaagacagccaagttccagaagaacatcacgaggcggggttccgtgccggaaaccgccgtcaagaaggggaaggggaacggctacgctgccggccccgtagtgctcggcttcttcgtcttcgtcgtcattgggtcatgtacgtcattgggtcgttaattctctaaggccagagagatgaagaattgtactactaacacacttttgcctctctgcctctttcttctgcctgccttggcagcgttgttccagatcatcaggaccgcgaccagtggcggcatggcttgagaacccgtccccggtgcagagcagagagatctgtttgtcgtttgtacatgcatgcgtccagctagaatcgagtttaatttcgaactgaaccgtaatgcagaaccatgtatgtaaataaagtgctattaaatgggtaactggatatagtgctatatatatacagtgttggaatac

SEQ ID NO: 4042 - DNA, 758 bp, Zea mays
  Clone ID: MRT4577_103689C.1
cccgggcgaggatgaagataagagttctggtaaccctcagtctgggaaagctttgtatgacttcacagcaggcggtgatgatgagctgagtttaaactctggagaagaagtggagattgaatacgaggtcgatggttggtattatgtgaagaaaaggaggcctggaagggatggaaagatggcaggtctggttcctgttctgtatgtgagttcatgataacagccgtgtgtatcgtttcccacacttgtggaagctgtttggagttcatgggcttaacaaaaaggcacactggaatgctcccgagagatcttcgcataaactcgtgcccgtcgtataggcacgtggccttgtggaagcaggtcatatccagtcatcttggggttcgtatgatgctgcagtgctgttcctgggaaagatttacgtgttgatttgtctggacccacaccacgagtcattcaattgattgttttttgttgctaaggtggagactcttcagaggctaaccgttcatctgtgccattttgctgccgtctgtgttcaaaaaggcaatttcgtcgtctccagttcgtgttgtgcgatatatattttagtcaaattgtagaggcatcatttccccgtgatatattattttggtcgtgtatggtgtgattctggtggtaaaatagtgtcattaatcttgtgtatatttgtttccgggtggattatggagtatacaacacaacagtggattcacatgcaacattgttaaatttttatt

SEQ ID NO: 4043 - DNA, 124 bp, Zea mays
  Clone ID: MRT4577_10368C.1
ccatacagcggggggtgatgggaggcttggcgtttcctggctgtagtctggttgctgtgtgatactggagtctcgatcacaatgttacacaatatacaacctcgcatgcactaatgcgtaacac

SEQ ID NO: 4044 - DNA, 635 bp, Zea mays
  Clone ID: MRT4577_103690C.1
gggtacctcgaagccggccgggatcggaactccttcaggcttggagaaagaagaaaggcatacgcagcggcgcagcggcatgggcaccagccccgtcatccctgggacgatgctcttcgtcgctcttcttgccgctgtctgcttcggcgccaccgccgccagaaccaggcacacccgccacaccgacgccaacgaggcgattcatctccccagaagatttggcgctggtgcacgaccgcggaattgctgctactccgatatccaggacgcctccctgccggtgcgctgctgcaacgactatgagaacaagagctccggctactgcctaggcactgcgaggagacgacgggcggcgacagcgtccgcagcaacgacttcatcttaagcctgaccgagcccacggactgcacaacgaagtcgagcaactgctgtcacatcgcggcctgctcaagggactacgtccgcaactgtgtgagcctggaccaggggaagtcccgatcgagcaacggcaaacggagcgacgttctgtatctattcggatgcatctgctgttgaatgccgagacgtcttccacggatatcgtggtcccgagtgcgggacatgaatcagtacgagcaagtagctcagctcagcta

SEQ ID NO: 4045 - DNA, 807 bp, Zea mays
  unsure (1)..(807): unsure at all n locations
  Clone ID: MRT4577_103691C.1
gccggnaatatctagtgatactaatttggtgttataaatatcgatactcttttatattaagttattcaaacttaaaataatttaacttaagacaactctagaagttgacttaatttgaaacggagggaatatgatgcatgttttctcctttttttgttcttacatatgagatacaaggtgcaagcgtttcgtttcaattaaaatccaaagatacactttttatctaatgagttccaaggtttattggcatcctaggatggggacaaaggaaaaggagtccatactaaaactcccattacagagcatatagatgttctatttgctggagtgcacacggaaaaaacacacactaagtgtttgttcgttttgctctcaatccatgtagattgggtgggattggataagtttcaatcccaaacaagtcaaaatcttttataatgtttccaatctcattcaatccacatgggataggaataaccgaacaagccctaatttatctttccttttttttgtttccaatagaaaccaatgaagcatatcaagcaatccccatagtaattactgcatctttttttaagatcaagcatatcattggtgcgtttggttgcaatgacaggacgcgatgggatgagacgatccctcaaattaggttgtttggttctgagtcaagggttgagacaggactattctagtgttgtcccctaaaattggaggggcgagagaggacgataggggacgtccttgtcctagctgttccgcaaccaaacgcaagtgtatagttcggacttaagattcaagcattctgta

SEQ ID NO: 4046 - DNA, 364 bp, Zea mays
  unsure (1)..(364): unsure at all n locations
  Clone ID: MRT4577_103692C.1
tcgagccggccggggattgagtccaaaangccccaccagcncccctcccctctctttcttacttggaatccatggtgtaggcccagagagatctagctagagtttcctgcatccgcctccgccccccaccgcctccacctccgccccccaccgccccgccccacagcaggaaggagggaagccccgggcncccccaacgccnccncgccggaagccgcccccaagcgggccccacgccccccgccgcagcagcagcaggcacccnccgaggaaggagacgacaaggagaaaccaacacaaccgagacgaccagggagcaacacggcagcagggagcaccaggggcaagggaggaccaaccacca

SEQ ID NO: 4047 - DNA, 626 bp, Zea mays
  unsure (1)..(626): unsure at all n locations
  Clone ID: MRT4577_103693C.1
tgaacttattatcgtcgcctactgccttgttccttccactcgctgaaaatcagcgctgcgataaagagcaatgtcagaacactggtgcagttcggtgctttggtcacaagagccaggttttggctccaatcactaatgaagttacggcaaacaagagggtatgtcttatggatgagaataggaagagtacggatgctaagagaccatgcactgttcccttggtatcgaggaaaaattccattgctcctgctgatgagatcaataccgagcctgtcaacaagagctgttcctggtgctgcagctctgaagatgattcagctggtgcatgcgaggaacctattgttctgaaacaaagtaccagttcaagaggtcctactcgcttctcaaaggattcacagagcctctacgcaaagaggagaagggagaggatcaatgaaaaactaaggacgctacagcagctaattcctaatggcaccaaagtatgcttctttgtttcgtatgtggtcatcctcaacttcttcgctaccgaattgttgacatgagcactatgctggagggagcagttgagtacgtcaagtttctgcagctgcanataaagctcttgagctctgaagagacatggatgt

SEQ ID NO: 4048 - DNA, 515 bp, Zea mays
  unsure (1)..(515): unsure at all n locations
  Clone ID: MRT4577_103694C.1
gggggcccccgcgattgggtacctcgaggccggccgggagccattcctactcagtngctcgacacccctgtttccgctaccgccgctcctcatacctcctcgaacatagtgactgctgtgccccaccgcggcgccgacgggcacgacgctgccgctgtaccgccacctaccgcacgcacgcgaggacgggagatcacaccaccaccacccgctgccccgcctggccgccgcggctctgtgccgccgcgtctgcaccacaagcgccgggaccccaagcaccacagccagaaaggatcaggcgcccacccgcgagtaccacacaccgcagcgctgtagccgcactcctacagcaggtacgccttcacggcgtgggtcggcacgacgtcgaagacgctccccgtggtgctcgagaccgtaaggcacctgacgagagcgccatgcacctcgagatacgagagccgcaagtgctcctccccatcggggctccgcggtgccgaacgttccaccccaggaac

SEQ ID NO: 4049 - DNA, 602 bp, Zea mays
  Clone ID: MRT4577_103695C.1
gccggccggtcaaagagagctgtgcatctcagcagattaccagtgacaaactcgaagcttgccttcttgtttacaccctaaaactaaaactagagtcgtcggcggcaacaagcggtacgtacgtagaggatgaagagcaggagcagcactctgttggtgatcctagttctccaggcccttctgctctctgcggctgtggccaaaggaccggcgagtgcaccagctggtcgggcgtgtggacctgcgacgacctcctcaccaagtgcgccgccacctgcaagaactgcgtccccgtgtccacgggcaagggcgccaccaagtacaggtgccgcgacttcctccccgaaaactgcgggtgcaagatccactaaactcatccaattccaccatggccacagcagccgatggatccttcttccatatgcatgttctcctccgtccgtccgcctagctttgctacaagcaggcgctaataagcaagctgctgttgttgttttgcatgtttgattaggtgaccctttccactcgagatggaataaaataaacgtcaggcgcacgtactgacgtgttattacaaaaaaaaaaaaaaaaaaaggccccta

SEQ ID NO: 4050 - DNA, 102 bp, Zea mays
  Clone ID: MRT4577_103696C.1
cagagctcaccgtagataggaagaggtggaagtgtgcgatttacgtaccagaaccttgatttgtagtatcgcttatccaccttaatcgtatgaccttttctt

SEQ ID NO: 4051 - DNA, 470 bp, Zea mays
  Clone ID: MRT4577_103697C.1
tcgggacatgtgcatctcagcagcactagcagtgacaaactcgaagcttgccttctagcttgtttacaccccaaaactaaaactagagtcggcgagtgcaccagctggtcgggcgtgtggacctgcgacgacctcctcaccaagtgcgccgccacctgcaagaactgcgtccccgtctccacggacaagggcgccaccaagtacagatgccgcgacttcctccccgaaaactgcggctgcaagatccactagagactcatccaatcaaccatggccacagccgatggacccttcttccatatgcatgctctcctccgtccgtccgcctagcttgctacaagcaggcgctaataagctagcaagctgttgttgttgttttgcatgtttgattgggtgtcccttcccagtagagatggcaatggggaaatttcttcccccacggggatgtagacggggaaaatttctccccc

SEQ ID NO: 4052 - DNA, 684 bp, Zea mays
  Clone ID: MRT4577_103698C.1
ctgtgcggcgctcgagccggccgggtcgggagcacatgtgcatctcagcagcactagcagtgacaaactcgaagcttgccttcttgtttacaccctaaaactaaaactagagtcgtcggcggcaacaagcggtacgtacgtagaggatgaagagcaggagcagcactctgttggtgatcctagttctccaggcccttctgctctctgcggctgtggccaaaggacctgcagggccgaagaagcagtgctggtgcggcgagtgcaccagctggtcgggcgtgtggacctgcgacgacctcctcaccaagtgcgccgccacctgcaagaactgcgtccccgtgtccacgggcaagggcgccaccaagtacaggtgccgcgacttcctccccgaaaactgcgggtgcaagatccactaaactcatccaattccaccatggccacagcagccgatggatccttcttccatatgcatgttctcctccgtccgtccgcctagctttgctacaagcaggcgctaataagcaagctgctgttgttgttttgcatgtttgattaggtgaccctttccactcgagatggaataaaataaacgtcaggcgcacgtactgacgtgttattacgatatttctcccctaagataaaggctctgttagattctaaaaaaaaaaaaaaaaaaggccccta

SEQ ID NO: 4053 - DNA, 398 bp, Zea mays
  Clone ID: MRT4577_103699C.1
ctaagaaaacttagagtgcattgcgtgtcgagtaacgcatggagaaaaaccggacaaaatttttgatacataatctaacaggtggggctggcacatcatgcgggggggaaagggcatggggccgaaaaagcaaagctaacttcctgcttggcctgcacccactaggagacggcgagatcctgcttggcgaggggaaccaaaatctgggggatgttgaatacaaacatggaaatccccgccaggaagggccaggtgtgcttccggggcacatacttgaacaccgaagggagctgaaacgtcttaatttcacctgccaacggcttgttcataaatctcccgaccagggttgcgggaaccccaaaccgggaattgtaggcggaccacctttccctttgggg

SEQ ID NO: 4054 - DNA, 333 bp, Zea mays
  Clone ID: MRT4577_10369C.1
tgggaccctcgggccggccgggcaacccgcccccaagccatccctcccgcccgcaggtcccgcgagatcttacagccccctagatccgctcccctcgccgcggcgcgctcggctgctttcgacgccgccgctgtcgacaaccacggcgacacgagcccgttcaccctctggccactcgctgggccagaagagacagccgccgtcacctctggggctgtcggaccgtcggctgccctgtgctgctatgctggcacgcccccctgcgagcgctggggggctactacccggttgctgctaggacagagcggcgcggggggtggtcactcgccaagc

SEQ ID NO: 4055 - DNA, 2011 bp, Zea mays
  Clone ID: MRT4577_1036C.1
ttgggtacctcgaggccggccggtcccaggtccagtgaaatgcttgcccacgaacagaaacagcaagaaccaccacaaggcgagtccgattctagatcaagcgagtcctcccgtttcatcgcctcggaaaaaggcgagaaatctgcaacagaagaagcagcagcgacagcgattccttcctcgtacctttcgttgcgctcgcgcactcggatcgacccctctagggttttgcatcggcctcccgccagctcctatccctcccctctccctccgccgcgcgcccgcgcggggagccaccaaaccctaggacggcaaatccggtgcgatcacccacggtggaggcctcgtcggcggccgagaggagccgctcagggctcgggtcagggttccggtacctcgccggcgccgcctctggctggtgggaccggtggatggtcatgggagccagcggctccaagcttgagaaggccctcggagaccagttcccggaaggcgagcgctacttcggcctcgagaacttcggcaacacctgctactgcaacagtgtccttcaggcactttatttttgcattccattcagggagcagttactggaatattatgcaaataacaaaactccaggagacgctgaggaaaatcttctgacttgtttggccgacctttttatgcagataagccaagcaaagaaaaagaccggtgttattgctccaaaacgttttgttcagagagtgaagaaacagaatgagttgtttcgcagctacatgcaccaggatgcacatgagttcttaaatttccttttgaatgaacttgttgatattctggaaaaagagtcaagtgctgctaaggactcaccccaatcgtcgtctcctgaaaaagctccaaatggcccagttcaacctttagccaatggagttaaaaaagaaccaccagttaccctggtccataaaagttttcagggcatattgaccaacgaaacaagatgcttaagatgtgaaacagtaactgcaagggatgaaacatttcttgatcttagtgttgatcacaagctgcctgaaaaatttctgttctacagagactttaaacgcagaggataaattcttctgtgacaaatgctgcagttaagctgaaaatcatgcagtttgcaagaagcacagaagagaatcaagattaagaaggctccccacatattggtgatccatctaaagcgtttcaagtacattgagcagcttggccggtataagaagctttcatacagggttgtattccccatggaactgaagctcagtaattcatccgacgatgtagacactgagtactccctctttgctgtcgtggtccatgtcggaagtggcccgaaccatgggcattatgtaagccttgtcaaaagccacaaccactggttgttcttcgacgatgaaaatgtcgagatggttgaagagcagaccctacaaacattcttcggtacttcacatgaatactcaggcaacacggaccatgggtatatcttgttttacgaggggcttggtgggaagagttagattggtctattaacctttcctgttcctttttttccttctctttggagcttgcaagttccactcttgtacctacacagctactatatcattacctccatggaaaacggtcaatccaagaggttgtatgaggcgacgatgccagattttgggtggtttcagtgtacaggggataatggaatctagctcccaacgatgaaataaggtgtaattttgaagttcgcctgaccagttccttctcagggctaacatcttctgttaaagtgtgggactttactattgggcacactgtaaaaaaattcaagttcaaaaaaaaaaacgcaccttccggtgcgctccacgttcgtgctgtactcgttgctctggcgcaccttcgctcttcgctctaattcattctgtggaaccttcgaaagaatttttttacttctcaaaaaaaaaaaaaaaaaaaaaaaaaaaaaaaaaactccaaaaagggg

SEQ ID NO: 4056 - DNA, 909 bp, Zea mays
  Clone ID: MRT4577_103700C.1
gccggccgggcttcgtaatcttctttggtgatcttggtactgttctgtggcactggttgggtagtcaaatgcagattgatccaaaaaaaaaaaaaaaaaaaaaaaaacatgtgcatctcagcagcactagcagtgacaaactcgaagcttgccttctagcttgtttacaccccaaaactaaaactagagtcggcggcggcaacaagcggtacgtagaggatgaagagcaggagcagcactctgttggtgatcctagttctccaggcccttctgctctctgcggctgtggccaaaggacctgcagggccgaagaagcagtgctggtgcggcgagtgcaccagctggtcgggcgtgtggacctgcgacgacctcctcaccaagtgcgccgccacctgcaagaactgcgtccccgtctccacggacaagggcgccaccaagtacagatgccgcgacttcctccccgaaaactgcggctgcaagatccactagagactcatccaatcaaccatggccacagccgatggacccttcttccatatgcatgctctcctccgtccgtccgcctagcttgctacaagcaggcgctaataagctagcaagctgttgttgttgttttgcatgtttgattgggtgtcccttcccagtagagatggcaatggggacccgatccccgattccccgcggggaattcctctattaggggacggggatgggggaaatttcttcccccacggggatgtaaacggggaaaatttctcccccgacggtaaaacggggatagggatggggaagcattccccatccccgttccccgcgtggacccgttaaacttacatgtgacgatgttttcatataatagttaatgataaaaaataaataattatcttgccaagagatcactagttgtac

SEQ ID NO: 4057 - DNA, 281 bp, Zea mays
  Clone ID: MRT4577_103701C.1
gtggggcccccgggggggtatttataaacttcgcccgggggttttaacccacacctgtacccgttccacaagggttcgctggggacggcaaaacaggatgccaacgaacgtcaacgtttggaccattcagctggcctcgatcctatagctcctgtggccccgcgtagacccgctcctcgcccagagcaaccggtccgcacctggaggaatgcgaccccgaactgcaactgaagtggggcccccctgtcactcgaagctctgccacgggcgaattacccctg

SEQ ID NO: 4058 - DNA, 859 bp, Zea mays
  Clone ID: MRT4577_103702C.1
gtcgatcccacgcgtccgcccacctccgcgatgccctcagcccccttccgctctcagatttcggcatctcccggactccctggcgtccttccctcctcccgcgcagatgctttgcgccggcggcgaaccggatccggccgctcgcgccttctgcgacgcaccggcctcgcgcgcggatgcgggggccaacgggacgcccagcccgcaggatcacgccgagaaggatccgcccaatgtgctagacgttgctatcgttggtggaggcatgatgggcttggctgttgcttgtgcaatgtgtagggattgctgttcgtgtgctctgacctgttttaagccaatatgccgttaacgaaacaccttagagtcgctattatcgatagcaatccagcgctgaagtcaagaagttacctgggcaaaaacagtatacccgattctagggtcagcaccgttacccctgcaaccatttccttcttcaagggttgcagcagcccccaactgacttttttctatgctctgctagcgggagatatacagttttgcttgcttgtgtcactatgaaatttaaaattctagaggaaccgaagctggggagagcatggaagtttttatcaccaatgtctgaaatagtcgacttgaagaagctctttgctccatcaaccattgcagtgtatatgggctcatcgtgacacaatacggagacctggaagaccccatcagtctcctgcgaaaccgcgaaagcaagcagacgattagctactcaaagcacatataccaattaaccacttcagaccaaagtacataatgcgctcgaccacattaatgttgaagttaagagtcgaacaaggtttgggttttatct

SEQ ID NO: 4059 - DNA, 1524 bp, Zea mays
  Clone ID: MRT4577_103703C.1
ggtacctctcgagggcggtgcggccctcgacgctgtcccggccacacagtctctctgctccacgctcgccgcttttccgctccacccctcctctctttctccctccctctctttctctctcctgccccaaccaaccaatggaggctctcgcgggcgccgcatcctcctccgttctccccgcgcgccacccgccctcccgcgtggccgcgcagtccctcgcgctccgccctagccgctgcggtcccctccgcgcggttggcgccggcggtgtcagtggcaaggacgacgcccacgccgccaacgggtctcccgtcctcaagctgaatagcgattccagtctaaatggagtcctaccgattgcagctgacaagtcacagaaggcttcatcaactaacgttagtactgactctagtggatctagagctggcctgtttagaacacccatatcaggtggtgtgcagagtgcaactttcgcccacggtctacctccgccggctttggctgttcgcaatttgatggaacaggcgcggtttgcccacctgtgctctgtcatgtctggcatgcaccaccgccgtactggatatccgtttggttcacttgtcgactttgctaacgattcaatgggccacccaattttttcgctgtcacccttggcaatccatacgaggaacttactcgctgacccaagatgcacgcttgttgtccaggtgcctggatggagtggactgtcgaacgcgcgagtcaccatatttggtgatgtttaccctttgccagctgaacaacaggaatgggcacataagcaatatgtagcaaaacatcagcagtgggcatcacagcagtggggaaacttttactattacaggatgcacaacataagtgacatatacttcatcgggggcttcggaactgtcgcatggatagatgttaaggagtatgaaacgattcaacctgacaagatagcagttgatggtggtgacttgcaaagtttaaaggagttgaacgctattttctctaaaccacttcgggaggtcctatcatcagaaggggaggttgatgatgctgcgcttatatcagtagatagcaaagggatagatatacgggttcgacagggtgcacagttcaatattcagaggctagcatttgatgtccctcataaggttgagactctggaggaagccaagaaagcactccacaagataatcaaagacaagcagcaaataaagtgaagttgcaggagctggctctacccatttttctggtggtgtaaggtttcattgcaaccggaccaaggattacgtaatggtagcaggtagcatgatacaagtgaaaacgatggctgtttttttttaaaataatgagagtctcgctctccagctgtggtgaagattgtatatatgctcgtgttgccatattaataattattattgtgcggttgcttcttgaggaaaacggaccttcttgttctctaaaaaaaaaaaaaaaaaaaaaaaccaaaaaaaaaataaaaaaccccccccccccccc

SEQ ID NO: 4060 - DNA, 739 bp, Zea mays
  Clone ID: MRT4577_103704C.1
gacccccgaggcctggccggaaaaaaaccaccacagtctctctgtccacgctcgccgcttttccgctccacccctcctctctttctccctccctctctttctctctcctgccccaaccaaccaatggaggctctcgcgggcgccgcatcctcctccgttctccccgcgcgccacccgccctcccgcgtggccgcgcagtccctcgcgctccgccctagccgctgcggtcccctccgcgcagttagcgccggcggtgtcagtggcaaggacgacgcccacgccgccaacgggtctcccgtcctcaagacccaattttttcgctgtcacccttggcaatccatacgaggaacttactcgctgacccaagatgcacgcttgttgtccaggtgcctggatggagtggactgtcgaacgcgcgagtcaccatatttggtgatgtttaccctttgccagctgaacaacagtgacatatacttcatcgggggcttcggaactgtcgcatggatagatgttaaggagtatgaaacgattcaacctgacaagatagcagttgatggtggtgacttgcaaagtttaaaggagttgaacgctattttctctaaaccacttcgggaggtcctatcatcagaaggggaggttgatgatgctgcgcttatatcagtagatagcaaagggatagatatacgggttcgacagggtgcacagttcaatattcagaggctagcatttgatgtccctc

SEQ ID NO: 4061 - DNA, 186 bp, Zea mays
  Clone ID: MRT4577_103705C.1
agacgctcgagaagctggccatggacgcggcgaagaataaggaccccatcgacgacctcaacatgctgaagcagagcaaggactactacgagcgcgtggggtaagccgagcgaagcggaggtatctcctgtacgggccgacgggcaccggaaagaccaccaatggacgccgacgatggcacaacca

SEQ ID NO: 4062 - DNA, 460 bp, Zea mays
  Clone ID: MRT4577_103706C.1
ccacgccgtccgacataagcaatatgtagcaaaacatcagcagtgggcatcacagcagtggggaaacttttactattacaggatgcacaacataaggtctggacttctgattggttatgtcccttcatcatcctgtgttttgctatccgtttatcatttgagttcagctctgtggtttaaaatacgtgcttccctgatcatcaagagcaggattatgcttgtcactagccttgtgggaattaggatctttgacaaactatctcactaattacagtgacatatatttcatcgggggcttcggaactgtcgcatggatagatgttaaggagtatgaaacgattcaacctgacaagatagcagttgatggtggtgacttgcaaagtttaaaggaggtgaacgctattttctctaaaccacttggggagggtctatcatcacaaggcgaggccgatgatgctgc

SEQ ID NO: 4063 - DNA, 256 bp, Zea mays
  Clone ID: MRT4577_103707C.1
attcccgcgagccgtcccccttccctcttcatccgctcgctccgtctcccgcgctcctgccatccagtccggccactccgaccttccgtggagggagattccttgcccggtgggaatctcagggctgatttgaagactgccggcaaagatccatcgaggaggcggcgattccatcccgaatcacgacatccggcctaagcgaaggagctgaataggcgcgcatcaccctcgtcgtcctagccgtcaccggctccgt

SEQ ID NO: 4064 - DNA, 305 bp, Zea mays
  Clone ID: MRT4577_103708C.1
cgggtcgacccacgacgtccgcccacgcgtccggcaggagctggctctacccatttttctggtggtgtaaggtttcattgcaaccggaccaaggattacgtaatggtagcaggtagcatgatacaagtgaaaacgatggctgtttttttaaatagggagagtctcgctctccagctgtggtgaagattgtatatatgctcgtgttgccttattaataattattattgtgcggttgcttcttgaggaaaaaaacaacaaaaagaaacaaagttcataaataaaaaacgggaagcttatcaacaagc

SEQ ID NO: 4065 - DNA, 594 bp, Zea mays
  unsure (1)..(594): unsure at all n locations
  Clone ID: MRT4577_103709C.1
tttttaatttctttttttttttttttttttttttttgtttttttttttttttggggggggggggggggcgaaaaaactccttatataccgacctggaaatgaacagggggaaaaaccgaaatatacagttttttgcccccccgtttgaaacaaaacatactttttccaataaacaagggaaagcatttcagtttgacaaactttaaaaaccggggggggggtttaaaactttttttttttccatccttccctnaaatccaaaaaaaagaaggtgaaatcggcggaaaccccctctttttcaagggggggcaggcgaccctttttttggacaatatttgtttaaaaaaaaagtttgggaattgtttccccaaagctaacatcaaaagcaacagagggctgggtttcaaattcaaaggctccaacggggggaaactcaacgacagacttgaaattttcccaggggttcacccaaacctttggtttggacacacttttttttccacgcatagctgcctccagaataagggaatgggggggcccgggcaccacctgccggtggggtttgggccccctataaaaccccaaagcgggccc

SEQ ID NO: 4066 - DNA, 383 bp, Zea mays
  Clone ID: MRT4577_10370C.1
gagagtgtttacacctaatgtaaaaaaccaagggagtggatttactaggcagaagacaaaggatctatccttattttataaagatatacatggcatatactgcaaatacacattagcacacattgctttcttccaatttttctgcacaccatgatcacgagaataaaatgtgtcatgaatgacaaatatatgtcatgacatattaattgttaatgggaaaaagtatgggtagacaattggataggataagtctaggcctaaacactaagatcccatttgtcatcactgaagggaatagacttccttttgttactatgcaaactgctatgctttcatcaaaaaaaagaattgttattaggcaacatatgccaatcctaacacac

SEQ ID NO: 4067 - DNA, 454 bp, Zea mays
  unsure (1)..(454): unsure at all n locations
  Clone ID: MRT4577_103710C.1
acatacaacaacaacaactgcttgcatctagcccgctcagctgtgggcaatgcacctacatacctgcaacaacaattgttggaacagattggaccagctctgactcagctagctgtggcgaaccctgctgcctacttacaacagttgcttccattcaaccaactggttgtgagaaactctgctgcgtacctacaacagcaacaacagaaacttaaagcattgacaagggctaacccatttggtcgttaccttcctatagcagcaacaacaattgctgtcatacaaccagatttttttaatgaacccctgcttgcagcatcccatcattgaaggggccattttttatattacatatgaaatgtactcacaattgggcccttataccgacatgtagtagctagaaaaaataatatattgattggagatttatttctttaanaaataaaaanaaaaa

SEQ ID NO: 4068 - DNA, 589 bp, Zea mays
  Clone ID: MRT4577_103711C.1
ttttatatccctaagggccttggagccgttacctcctccaaatggaagcttgaaaacttccctgtctatgggtgcaccagaccgtccggtggaccgtccccagtaatggtttatagaagatctgattagtgttgaaagtcgcctagagggggtgaatagagaatacctgaaaattataaactttgaacacaaacttcacccgaggttagcattagaactagtagtaatgaaatcagagtgcggaagagaaattcttcttgcttagagttgctcaatcaattgtggattactttgggagccaattcaaatcgattgcaagcaagagaactagagagaggagagagtaagaatcaaatctcaaagcaagattaacacaaagacacgagcgatttgtttcctgaggttcagttccgaagaacctactctctattgaggaggccacgtaggccaggtctcttttaaccctttccctctcccaaacggtcacttagaccggttgagtgcttcttcttaatctcgagggtcacttagaccctgcaaggatcaccacatagttaggtgtgtcttgctagctttacaagtcaatggg

SEQ ID NO: 4069 - DNA, 826 bp, Zea mays
  Clone ID: MRT4577_103712C.1
gggccctttccccgtccacgtcctctagccgcctcgccgaactctctctacacacacacagtatctctgctccacgctcgccgcttttccgctccacccctcctctctttctccctccctctctttctctctcctgccccaaccaaccaatggaggctctcgcgggcgccgcatcctcctccgttctccccgcgcgccacccgccctcccgcgtggccgcgcagtccctcgcgctccgccctagccgctgcggtccactccgcgcggttggcgccggcggtgtcagtggcaaggacgacgcccacgccgccaacgggtctcccgtcctcaagcagctgaatagcgattccagtctaaatggagtcctaccgattgcagctgacaagtcacagaaggcttcatcaactaacgttagtactgactctagtggatctagagctggcctgtttagaacacccatatcaggtggtgtgcagagtgcaactttcgcccacggtctacctccgccggctttggctgttcgcaatttgatggaacaggcgcggtttgcccacctgtgctctgtcatgtctggcatgcaccaccgccgtactggatatccgtttggttcacttgtcgactttgctaacgattcaatgggccacccaattttttcgctgtcacccttggcaatccatacgaggaacttactcgctgacccaagatgcacgcttgttgtccaggtgcctggatggagtggactgtcgaacgcgcgagtcaccatatttgggtgatgtttaccctttgccagctgaacaaacagaatgggcacataagccatatgtag

SEQ ID NO: 4070 - DNA, 275 bp, Zea mays
  Clone ID: MRT4577_103713C.1
cctatgtaacagacataattagtacagctcgtggcttgaatctgacactttgattgcaggaagcatgtgatcagttcagggttatgaacgactacctgaaacctcatgttctccctttgtccctatctactcatcatcaataaattttttgagtggtggattttagcatgtttgctgcctattttggattttattctattctttggtataagacatttttctgattcctttgtatccactgtcatttataggtagtttctttgagctttgtatga

SEQ ID NO: 4071 - DNA, 465 bp, Zea mays
  Clone ID: MRT4577_103714C.1
attccgtgctgtcgcggagagcgtggcggccgacgcgtaggggggtactgggcgaagagcggcgccggacgtggtggccggcgaagagcgcgcccgcgtcgcggctgacggccgggccggagaggagcatggcggccgcggctgaggtggtcttggccatcgcggcggcctgcggcggcagctggtggctgtgggtgccctcgtacgtggtgatcagcaccgccttgtcctccgcgcaccgttgcacctgcacagtacacgcattatttatgcttatttcttgcatgcatgcatgcatctcgaccgaccatgcatggcgtgtctagaagccaaacacgtatatatagcagcacattattattaaaattgaagtcgttaaaggcaaaaacacgtagcgagttaagtttgagcaatactcctatatatttttagatggattgatagtccgtctggtgagatgtcata

SEQ ID NO: 4072 - DNA, 478 bp, Zea mays
  Clone ID: MRT4577_103715C.1
ttgcatttgggcatcttgcacctgggacctgcctcgcactgtctgcagacagtagctatcttgttacagggtctcgtgacacaacagttatactttggaggatacgtcaggtgggttctgcacataagaaaaatgctccagaacctccaccatctacaccgacaacacctactagtcctctagccactggtagtagcagcgacagtagtccaagcaaaactctagaaacctacaggaggcgacgaattgaaggccctatgcatgtactaagaggacatctcggagaagtaacctgctgttctgttagttctgatttggggcttgttggttcatcttcgagtgtgtctggtgtcctattacattccttgagaacaggtcggctaataaagaagctcgatgtgccagaagcccattccatatgcttttcttctcaaggcattgtattggtttggaatgaagttgagaacagactgtccac

SEQ ID NO: 4073 - DNA, 585 bp, Zea mays
  unsure (1)..(585): unsure at all n locations
  Clone ID: MRT4577_103716C.1
ctcgaggccggccgggctccgctacgaagggaagagctcgctggttcacactatactaacggggtcaggaagagtatgcatgaatctggagagcaagaaggtgtatatatatgtaagggaggactgccctcccagttggttcggcatggacgcggttttttcacaggacctcggccccgcggataccgtgcatggtccaatgcaatcgcgagagcgagggcgggggggatgataatgatgctgtcacagatgctgtagatgcatccgccgtccaagggcgcaaggattctcggtgtccngatacctctccagcctccagaagcctccatgcttcgtttgccgcattatctgcttggacatcatcgcctgattggtcatcgtgaatggtgtggacattacaaagtattatacgnatagtcatgattgtgaccgggatctttcttcgttatgcacgtgtgaatgtacatacatacatgctcagcacgagggctttaccagtgtgtcagggagtatctctttgtatcagtactgctgctgggtgactactaagcaagtgtttataaaaaaaaaaaaaaaaaagcggcc

SEQ ID NO: 4074 - DNA, 367 bp, Zea mays
  Clone ID: MRT4577_103717C.1
aaagaatccctataataatagtcccttcagtgcggtcttggtcagagaagggaaaatgggcgttgtactaactaacatgccttctttttgttttgttttgttggcgaagtgccttaagcaccttcctttttgtccgctgctctggttcgttccattccagctgttgattcttattcggagttcacacacactgcacttggactagtgcatctataaagttatcagggttcagtagaaatgcaatcactggctgcatttacctgtgttgtttatagtatgattacatagggaataagaaaataataataaaaaaagagagtagcatttgcttaattgtatttccttggcacccaagcttccttctgaa

SEQ ID NO: 4075 - DNA, 135 bp, Zea mays
  Clone ID: MRT4577_103718C.1
acgcaagggagggggcgtgcgcctattgatgcaccattagatgcagggctccgagcaaggagtaacagagcctcccgatcaagactgcaccaggagagcactcctgcacagagataaagaaatgggcgggggaat

SEQ ID NO: 4076 - DNA, 1031 bp, Zea mays
  Clone ID: MRT4577_103719C.1
aattgaactatgtatatcagcgtaatctgtataatttgaccattctttctcttctggccatggctttataaacaagaaatctgaaattatgttgcttttcaaagtcattgttgtttgcccttttctttttccaataattctttgtaaactttgagtgtttgattagtctagtgtgtacattaacagttattcatcatgatatgaaaaggcaagatgttcctccactaatacatattaactcaaaccacactgatatatatcggtgctggtgctgccacagcccacaggctgattctgttccttgttgcatagcaatgtttttcgtagccatgcacaaaaatatatctatctgttagattattgtattgacatacaatttagagaagagaacaaaaaatatctacaatcctagtaaacttatgtgcttgtggattgctgttataacagcctgcagataaatatccaagtatattctctcagacgtccatatttgggaggtttccatactttcttccgtgcctgtgtatatcaatccttgcagttattgctctaattgcctgcatctggtttccgttgaaaccgtagaagaatctcttgctggcaccgacactgaagaaaatggaggtggcggatgtctaaaattatttacaaactggccgttgatgtcagctattactttatattgtatcttctctcttcaggatgtggcttatgcagagacattctctctttgggctgtcagtgacagatcgtttggtggattaagctttactaccacagatgtgggcaatgtccttgcgatgtcaggtatgtcaaaataagcacaaaaacaaaatccattgaaactggtgttgaactaggcccacatgaagccctttacaccttaccttgattgctggcaattggtgtgaaaatagcgtattatgattgggcgagtggtctcagagataggttttaacatctctgtctgatggaaactagcgcttcaaggcctgctctcttgtgctcctcctatatatcagatgtacttc

SEQ ID NO: 4077 - DNA, 308 bp, Zea mays
  Clone ID: MRT4577_10371C.1
gggttgccttatcctaccccacctgttcgtgttcaggttctgtttcttgggccagggggaagacataatctcttccgactttgagtccgttgcttcgttggcggactctcctgggccaccgacgaccactctcttaacaacgccttcagcacctacggtgagttccttgagtcgaagatcatcctggatcgggagacgcataggttccgcgttttcggcttaatcaccttctccactgaggacacgattcgcatttccatcgagggcattaacttctaggatcttgacggccgtaacattacccttaa

SEQ ID NO: 4078 - DNA, 446 bp, Zea mays
  unsure (1)..(446): unsure at all n locations
  Clone ID: MRT4577_103720C.1
ggnaaaactgtccatggtcgtagctcgctgagacagcggggagggacgggtgttggtcgagttcatggagatagttccaagatgttgactcggaggagctcatgtggagagcgaacctttgtctgttgcatacaaaaacgttattggagccctccgcgcctcatggcgcatcatctgctacatcgtgcatatagaggagggccgtggcaatgtggatccgctaacactcatcaaggattatcggggccagtattgagactgagctgaccaagatctgtgatggaatcctaatgctgtttgagaccactcttgagccagttctctatggctgcaaacgctaagccttctatataaggatggagggagatggctacatataccttgatgagttcaagactggggctgaaagaaaggacgccgattgaaaacaccatggtgaaattcaa

SEQ ID NO: 4079 - DNA, 705 bp, Zea mays
  Clone ID: MRT4577_103721C.1
tttttttttttttttttcgaaaatgagtgagaataaggtcacaatatttacagacgggtaaggacttgtttggtgtggaactgcctatttgttttaaattacagtctattcagatcagattttccttctgttggttcgagaaacccgtcaccctaactagggtagagactgatataaatttattgatagatgttgggcctgcctcattacacaaggtgtgagcagcctgggacgtggaagtggaaacaggaagacgagtgtgacgcccgagctgagaagcatgacagaagcgctaagatgggcctcgggtataggcgatatctgagcggctggaaagctgggacatcacgtcaggtctagggtgttcgagacgacgatgccaaacgacggaggtggtggtagtagcaagagcaagggggctatggtggtgggggaagtggatggcaagtgaagagagtagaggggaccggagctgtcacagcgagcaagcacgacacgagtgggaaggtggcgtatggtgagcccccagggatccgtagaacaatggttgtcactagtgaagcgacgaaccgagagaaggggatgagttaaaccgggagcaacaaggacgtcgttgaggtagaaagacacacctactgaggtgaccgagagggtggaaccgttatccacaacgatcgatagaggatgtgaggggtgtggtggatg

SEQ ID NO: 4080 - DNA, 365 bp, Zea mays
  Clone ID: MRT4577_103722C.1
ggctcggcaagactctccaggcgattgctatagcatgctgtttcaaggacgagggctctatattgatagtatgtccagctgtattgcgttattcttgggcagaggaattggaacgctggcatccttcatttatgccaaaagatattcatattgtatttggtcgtcaagacagtcttgaacatctaaatgctactccaagggcagtgattatatcttaccagatgctaagtcgccttagagaaagtatggtgaatagaacatgggcactgatgattgttgatgaatcacataacatacgctgcacgaagaaactagaagaaaaaatatgagacaaaaagctgtgctacatctagctttaaaaactg

SEQ ID NO: 4081 - DNA, 284 bp, Zea mays
  unsure (1)..(284): unsure at all n locations
  Clone ID: MRT4577_103723C.1
tctgactcttgttctgactcttggtctggggtagatatgggtctctcctttgggaagctgtgancgctttcttcgccaataaggagatgaggattctcatggtcgagctcgatgcctcctgtaagaccaccatcctctacaagctcaagctcgtctagatcgtcaccaccatcctcactatcggattcaatgttgaaactgtttaatataagaacattatcttcactgtttgctatttttgttgccatgacatgatcatgccccttttgaagcactacttttat

SEQ ID NO: 4082 - DNA, 482 bp, Zea mays
  Clone ID: MRT4577_103724C.1
cccacaaacaaacaaagggggtgggaaaaatgggccccaggggaaaatccgggggaacccaaattaaaaaggcctgggtttttttaaacaaaaaacccctatcccaaggggcaaaaaaggggggcccttttaaccaataaagcgggacttttaaaaacccaatttggaaatggctaaagcttaaaaagaaccctttccacccccggggccaaaataaccctttcctgggggggggagccccccccccccctggggaccgacataaaggagccccttctccggcacttgggggaggatgttccgaaaaaggccccccctgcttttgaaaaagggggggggggggaaccctttccttggggggccaccataatttttggggaaccccccaaccccaaggcctggtctaaaaaaaatcttctttggtaaaaaggcacccctgtgggagcccccgccggggccataaggggggaccccctggaacc

SEQ ID NO: 4083 - DNA, 263 bp, Zea mays
  Clone ID: MRT4577_103725C.1
atcgatcaataccaacgaccttcaccgctcgctagtcagattctgcccgccacgacctctccggccacactcggagttcgccctcgctcctacgcctagccggcgaggccttctgccttttcgcgccctctatctgatgcgatctttggagcatagttctcttttctcactagtgatccaaacccctaaaccctagagctcgccgatttcgctctctcgttccgcgctggcggcgacaatggaggacgaggagatggagaaga

SEQ ID NO: 4084 - DNA, 1024 bp, Zea mays
  unsure (1)..(1024): unsure at all n locations
  Clone ID: MRT4577_103726C.1
ctgatctcaggagngaggaattggaaactgctttgatggagatggtcgagcatgacaacagacgtatgttgagtgctaaggttgagaagctggaagcagaggtatatgaactgcgaaaagcnnnnncatacaagcaagagcaagagcaaataacgcttcagatcttgttaagaatggagcaagaacagaaagtggcagaagatgcccgcatagtcgctgagcgagatgctgctgaacaaacatgcgctgcccatttgcttcaggagaagtatgaagctacaatggcagcactttcacaaatggagaagagagctgtaatggcagaaacaatgctggaagctacaaagcaataccaggctgggcaggttaaagccaaccaatctttcacttcaagttcacctcgtgcagaacatgttcttgggaagataaatcaagaaccaaaccaagatacgtctaacaggagaatcggcctgctttctaggggactnnnnnnnnnnnnnnnnnncaagggaatgcaaaattccactgaaacatctggaggctaaactcatctagagttcaggatgaagtcatagctcccaacaagatctggattgttcattaatgcttggattgcctgatcacgacaacaacgtgttgaaatcaacttatatgttttatcgggagattgagattcagatggtattttccatgaagttttgcaggaagtgtatcttgtaccatattgagttcagatgtcagataaagttttgttgacggcaatgcgacaccacttagttggggattgaaggaaacaggcgagcttgagagctgtagacattcaacaaatatggcgctacacaaactctacaagacataatgatcgagtccctcttcatggtcggagaaattnnnnncactgactacaacctacctctcgtctncagagtgccgattgaaaagacggtcattcacaccaagtgcattgcaaagttcttcacaacaccgngacgctatgtcatttatatgtgtgtgtgtgactgct

SEQ ID NO: 4085 - DNA, 220 bp, Zea mays
  Clone ID: MRT4577_103727C.1
gcggtggaccctcatacaaaacttgcgtcgactgtcgagacctgacactaatcgaaatcagaatgggcatcatgatgcgttatgactaatttataggaggcatgctgctcggcaggtctatggatgatgtatcccatacacggatgacgcgccaaaaggctttcgtctgacctgcagctgcttgaggaatctgcatctgtacaaatgaaccaatgctacc

SEQ ID NO: 4086 - DNA, 1338 bp, Zea mays
  Clone ID: MRT4577_103728C.1
caggagtatgaagcaacagtggctacactttcacaaatggagaagagagctgtaatgacagaaacaatgctggaagctacaaagcaataccagactgttgcttcaagttattcttttggctacattttacttccactttccaagcatctatatcacttacgagctattattggaagtctattacttcaaccgcggcatgactacttttcatgtgtcccgctaactattccttgagttggtttcttttcctctccaattattatatttttttcatgtacactactaacattttctcgatattcctacttttaatttaataagcttgaaatctaatttcatactacaatacttcatttacttgtaaccttctatagttcaattcacctcgtgcataccatgttcttgggaagataaatcaagaaccaaaccaatatacgtcaacaagagaatcaacctgctttctaggggacttggatggcttgacaagagcatgttttctagaaagattatacaaagttgaggttcagtggagtcacatatttgaattcatagtttttagcagggaatgcaagattctactgaaacatcttgaggctaaactcatctagagtccaagatgaagtcatagctcccaacaagatctggatttttcattgatgcttggattgcctgatcacgataagaatgtgttgaaatcaacagctatgttttctcggggagattcagctggtattttctatgaagttttgcaggaagtgtatcttgtaccatattgagttcagttgtcggataaagttttgttggtaggtcagaaaggctgctgcaagtcatcggtgtaaattttcttttattagtttcattaaggtcgtcaatagtcagtgtttccaagtaggagaaagaaaagaacccaacttcagacacacatggaaagaggaaaaattgtgttagattagttacagtatcatggggttgctttggtgaagagctcatgtatcttcccaaacacggcaatgcgacaccacttagttggggattgaaggaaacaggcgagcttgagagctgtagacattcaacaaagatggcgctacacaaactctacaaggttaaaccaaactgcgttgtactgatcacatgggacgacacatgctaaaatcaatataacagtaacttgatgggactaacagtgcctaatcactagaaatgttatagttctgtcacttcaaacattttttgttgtaattttacatggtaattcagaactctgtttatggcacatgttgctcaaacataatgatcgagtccctcttcatggtcggagaaattgggggcaatgactac

SEQ ID NO: 4087 - DNA, 567 bp, Zea mays
  Clone ID: MRT4577_103729C.1
cccacgcgtccgggcttgacaagagcaagggaaggcaaaattcccctgaaagcaggccaggctaaactcatctagagttcaggatgaagtcatagctcccaacaagatctggattgttcattgatgcttggattgcctgatcacgataagaatgtgttgaaatcagcagctatgttttctcggggagattcagctggcattttccatgaagttttgcaggaagtgtatcttgtaccatattgagttcagttgtcggataaagttttgttggtaggtcagaaaggctgctgcaagtcatcggtgtaaattttcttttattagtttcattaaggtcgtcaatagtcggtgtttccaagtaggagaaagaaaagaacccaacttcatatacacatggaaagaggaaaaattgtgttagattagttacagtatcatggggttgttttgttgaagagcgtatatctcttccgaaatgtctgaaccactgaagagattatctctgtttttttttcttttgagacatgtggctctaacatattcttcagtcactgttgacatgcctgatgtacg

SEQ ID NO: 4088 - DNA, 1145 bp, Zea mays
  Clone ID: MRT4577_10372C.1
cattgctcgaggccggccgggagaaaaagaaaggcaagtggagaaggaaaagacaattttctcgtaaccttccgggctcctcttcctctcctcgcgttcccccaccaaaccctaatccgagcacccagcccctacccgcttccgctcgcgccggcctttggggctctcaccctgagcggtaggaatccgcagggctccggttgggtgccagaagcatccaagtcgttggcgggagaccgggaaatggcggaaaaagagggggcgaaggttggggcggaagagatggaagagcgggagcaggaaggggaggcggaggaggtggaggtgaagtttcgtctcttcgacggctccgacatcggccccgtgcgctgcaacgccgccaccaccaccgtcgccgctctcaaggatcgcgtcgtcgccgactggcccaaagataaacaaattatcccaaagactgctagtgatgtaaaactaataagtggcggcaaaattctagaaaatgacaagaatgttgcacagtgcagagctccttttggcgatcttcccagtagtgctatcacgatgcacgttgttgttcaaccatcatcagccaaatcaaaaccagataagaaggcgaacaagttgcccaaaaccactcgttgctcatgtaccatactgtgaactatatgaaggtcaagtccctacgagaccaacaataatttgtacgtccacaaaaatattctgcagagaatttgagaacaaagattcaagatgtccatgccattctctgccaacgggtggcaatggcgaaagacaacgtccacatgttgtaagctatatgtaattgtaacttaggtacaaagagtcgtccctgtgctgtgcggtcagggaaaatagtctggtggttgcgctgttttactctacaagatgtcttatatgatgtacaagatacagacacttctgggtgtagtgaccttgttcccacctcaccttttaaagtttgtggcgctgagtcaatatggatctaagtcaattgattgaagaaacattttcgactaaaaaaaaaaaaaaaaaaaaaaaaaaaaaaaaaaaaaaattgttaccattttctcatttaggttaaggatcaagttacgagcggcaggacgtcaattttatagttcact

SEQ ID NO: 4089 - DNA, 588 bp, Zea mays
  Clone ID: MRT4577_103730C.1
atggggagtgaggaattggaaactgctttgatggagatggtcgagcatgacaacagacgtatgttgagtgcaaaggttgagaagcttgaaacagaggcatatgaactgcgcaaagctttttcagacaagcaagagcaagagcaaatcttgttaagaatggagcaagaacagaaagtggcagaagatgcccgcatagccgctgagcgagatgctgctgaacaaaaacacgctgctcacttgctccaggagaagtatgaagcagcaatgacagcactttcacaaatggagaagagagctgtaatggcagaaacaatgctggaagctacaaagcaataccaggttgggcaggttaaagccaaccaatctttcacttcaagttcacctcgtgcagaccatgttcctgcgaagataaatcaagaaccaaaccaaactgcacctatcaggagaatcggcctgctttctaggggacttggatggcttgacaagggcaaggccctacgcccctacatgtcattatcagagaccttgtttcttactagctttaattttacttctaaaatatctgatgtgcttggacataatgtgtga

SEQ ID NO: 4090 - DNA, 359 bp, Zea mays
  Clone ID: MRT4577_103731C.1
tccttcccacaacgaaccgagctgcaagaaccttcactaatacaattaccttcaagagcctcacatcaactatcacatctctgccctctccccactacaacaagaatgctttacaagataataagaatattacacttatctccattccaccaactatcctcgaacaatacactacgcttgagtctttactctcgcatacaataaatacaccatgccatgctataacttaactatctttattacctcctcaacaacaccgtatacgacctcctactgatgaacaacacctaatattctttactttcttgtattaagcaacatacactacattttgattaataacaatatacattcaaagt

SEQ ID NO: 4091 - DNA, 804 bp, Zea mays
  unsure (1)..(804): unsure at all n locations
  Clone ID: MRT4577_103732C.1
cgccaccaccaccaattcgcaacccctcctcccccgttctcctcattgtcctcgcgccccgccccgctccgctccgacggccaaccgctccacacaccactagcctgcctgcctgcctgcctgcctgccgccaaggcaagatggtgaagatctgctgccttggggctggctatgtaggtggcccaacaatggcggtcattgccctcaagtgccctgacattcaggtggttgtggtagatatcaccaagtcccggattgatgcctggaacagtgacacactgccaatctatgagcctggccttgatgaagtcgtgaagcagtgccgtggaaagaacctcttcttcagcaatgacattgagaagcatgttagcgaggctgacatcatctttgtgtcggtaaacaccccaaccaagacccgtggtcttggagctggtaaggctgctgatctcacttactgggagagtgcagctcgcatgattgctgatgtggccaaatcagacaagatcgtggtcgagaagtccactgttccagtcaagactgctgaggcaattgagaagatcttgacccacaacagcaatggcatcaacttccagatcctctccaacccggagttccttgctgagggtactgctatccaagacctatttaaccctgaccgtgttcttattggaggacgtgagaccccagaaggtcagaaggctgttcagacgctgaaggctgtgtatgcgcattgngttcctgaggatcagattctgacaaccaacttatgtcctgcggagctgtcgaagctggcagccaatgcgt

SEQ ID NO: 4092 - DNA, 327 bp, Zea mays
  Clone ID: MRT4577_103733C.1
tttcttagaccaacaagcatcatattttgttgtatccagcagcaacaatagagcagcaggggcgatcaatatatttaccctccttatgctccatgctctttttgcatgtgttgctaactcgacaatatttcctcaatgctcacaagctcctatagctttccttctttccccataccttccattaatgatagcttcagtatgcgaaaacccagctctttaactcttataggctccaacatagcaatctcataatgcaacatacctttttcacccttgtttcaacaattgtcagccctatttttggtgcattcattgttacataccatt

SEQ ID NO: 4093 - DNA, 302 bp, Zea mays
  Clone ID: MRT4577_103734C.1
cggacggtgggcgagacgcgtgggatcaataccatactcaacaagtgaagaagcgaaagcggtgggtatagcttagtctgtctcagaagttacagtgatactgttgtcttgaggttgacattagtatgatgtgaattgatcttaattagcatccgtttcttctatgcttgttgttaatgtaatcatttcttggagtctaagcgagccttccctagcagctaatactttctcgtggaacttcaaacaatagggttgacatgattacttggcctacctttttagaaacactgaatgaagtgtcc

SEQ ID NO: 4094 - DNA, 434 bp, Zea mays
  Clone ID: MRT4577_103735C.1
tctgtagtatttatgtcgccgccgccgccgcccagccggaggaaacaggaggaagatgccggcttttcaccgacttcggtcacggacccgcgacctgttcgtgcggacgattcttaagaagggttacattccgatcactacgtactttttctcctactagaactgctacttctttgatctttaatgttatctgttccttactttctggttttgttttattttctttactttcatttattttttttctctttattaatttttcttctaatttcctctatttttcttttttgacgggggggtggtggctttttatttttctctaattattttttttttatatatatctttttattattttcttttatattttttttcttttttttttattatcttctttccattttttcttcttattctattataatattcatttt

SEQ ID NO: 4095 - DNA, 840 bp, Zea mays
  Clone ID: MRT4577_103736C.1
aattcggcagaggaaaaccctcaccttcctccgtgggggcgatggcggcgccggaatcggaatgcggcgggagtgacggctaccgcgacctccgcggcgtgcgcgtcgacctggacacgggagcggcccgagccgatgggggaggaggcttcgccgtctccttctggctctacctgtccgtctccgccagaccgtcctcggtgatcctccaccagatcacagcgggagatgacaccaagttgccgtttcttgctttaggtgaaggaaacaaactgcttctcttcccgttgatgaggctgcacagggaagctcctactccttctagttcctacccatggactgacacaaccaatctatcatctacgagtggatgccctcttgagaaatggttccacattgggtgtgaggttactgaaaatgttatgtgtcttcacgttgatggtttcctaactgctgaggcccccctttgttcactgtttgatgagccagacagtcaggatgattcaaaccaaattagcttagttggaaatgatggcaagcttgaaggctatatctataatattgaggtttcatatgtactaggagctactaaagtaccaatacccaaagaactcaccttttaagttatctattgactattcatgctctgatggaatcgaagagggtgatgatggcatttggagcatcgttggtgggaaggcatcttgccggagaaatttcatcttggaagtagtactaaccaacacttttggtgaacctgtgaaggataaagaggtcgttgcttcacttgtctatgctgatgatggaacagtagttgcaaaatcaagggatgattctgag

SEQ ID NO: 4096 - DNA, 153 bp, Zea mays
  Clone ID: MRT4577_103737C.1
ccgggccggaatctcggcacggcagcaaggccgcgaaaaaaggagccccggacggagccacgccaaaagaaaagaaaggcccaccacaggccacaaaggcagggcacaggcagggggaagaggagaccggaaacgaaggaaaggaaccaccca

SEQ ID NO: 4097 - DNA, 310 bp, Zea mays
  Clone ID: MRT4577_103738C.1
tggggggggggggtgggtttttattttttttttttggaggaccctggatcttttatttacggttttattcggttgcgtattgcggtgatttgtacataacaaagggggacacacttgttgttgcatgggaatagctagggcgttcattttagcttggggggggggggctggcaggtaagcagcatggttactggtattgctcgcttgccgaggatccgttccattaattcagccaattagtgggggttcacgtagagccctttcttgtccagggattctcctaaggggccaaagaagccagagtcggggc

SEQ ID NO: 4098 - DNA, 425 bp, Zea mays
  unsure (1)..(425): unsure at all n locations
  Clone ID: MRT4577_103739C.1
cggcaagcttttcagcaagncgngggcggtttgttgttactccatcaaggccngccaaggagcccgagaagaaggaggagaagaaggacggcggcggcgagaagaaggacggcggcggtggcgagggcaagaaggaggaaggggacgggaagaaggacggcggcngcttttttcnacggcaatagttgtggcnannncaatattgatgaccgcnnacacaanaancannacnncnannncaaaaangangatggcgatggcaagaaggacgacaagaaggacggcggcggcggcggcccaaaggagaagaagcccgcccccccggtgcccccgattttgccgttcccgccggtggaccagctgccgccccatttattctcatgatcaccaacgactacatgagccagtaccaccaccggcccccg

SEQ ID NO: 4099 - DNA, 334 bp, Zea mays
  unsure (1)..(334): unsure at all n locations
  Clone ID: MRT4577_10373C.1
gaattngnnnttaagaaagtggtaacaacgcagagtacttttttttttttttttttttttttttttttttgggggtttactacgttcgctatcggtcacccaggagtatttagccttgcaagggggtccttgctgattcacacgggattccacgtgccccatgctactcgggtcagagcgtaagctagtgatgctttcggctactggactttagccatctagggtgcggcactcaaccgcttcgcctagcagcacaacgcttgccccgtcctctgcgttgtttcccctgtctttgggcggtttatggcgctctccctcccgctggcggccgctc

SEQ ID NO: 4100 - DNA, 340 bp, Zea mays
  Clone ID: MRT4577_103740C.1
gcgcgacgtcgcgctggaacctgcgtacctcttgagccgtcacctcacggttgtggtcgtgtgtggtggcacggggtttaccacgctctgtattctcaatcacgttaaccctgagaacgtcacgctgatctaccagtccgagaaggagatcgacatggcccggttttaggtggcacttaaaggggtcaccatcatggatggcgactcctaagacctctcgttcctcaccgactttttttaccgatacatatctcacagcatgatgttgtactggccttacccacagcgcgggatcaaggaagcctacagggtcctgagatttgatgggcttgcttttgtg

SEQ ID NO: 4101 - DNA, 630 bp, Zea mays
  unsure (1)..(630): unsure at all n locations
  Clone ID: MRT4577_103741C.1
caccncagnncccgnccnccggccccccgccgccgtttgcccccaccgcgggggccccggcncgcaggcggggcagagcagcaaccgggcaccgggcgcgcccggcagcggcccgccgacgcggcccccacccggccccggcaccggcggcggccacagcaagccgcccaagcaccaccacggcaagccgcccaagcgcccgccgcgcaccccaccgaacgngccaccgacgccccgcccgacaccgccgaacgngccaccanangncccgccgacgcctcggtcatcaccaccaccggacgggccaccanacggccccggcccgccgacgccncggcccncaccgcccgacgggccaccagacggccccggccccccgacgccncggccgncaccgccgaacgnncccccgacgccacggccgccgacgccgcccgacggcccaccgacgccgcccnacggcccaccgacgccncggccancaccgccgnaggggccacccnacgnccccccgacgccncgggcancaccacccgacgagccaccgnacgngccgccgacgccgccggcggagcggacgagcccgaacgacacgcggaagccgaacgcgcgcgggggaccaggcggagc

SEQ ID NO: 4102 - DNA, 2206 bp, Zea mays
  unsure (1)..(2206): unsure at all n locations
  Clone ID: MRT4577_103742C.1
gattcgctccctcctaccgcaaagataggaataatcacctatgggagaactgtctcagtgtatgatttctcagagggagcagcagtgtcagcggatgtgctacctggaaacaagtcgcctacccatgagtctttgaaggccctaatctatgggacaggtgtttacctgtctcctatacatgcttcgctacctgttgcacacacaatattctcatctctgagaccctatcagctgagcgtgccagaagtgttaagggatcggtgtgttggagcagcagtagaggttgcccttggtattattcaagggccatcagtggagttgtctcgtggaatcatcaagagatctggtggaaactgtaggatcttggtgtgtgctggtggccctagcacctttggaccaggatcggtgcctcattcagctaaacatcccaactatgcttatctggagaagacagctatgaagtggatggagagtcttggtcatgaagcacagagacacagtactgttgttgatatcttttgtgctggacagtgtcctgtgagggtccctgttctgcaaccattggcaaagtgttctggaggtgtgctcttagctcatgatgactttggagaggcctttggggtcaatttgcaaagggcatcaactagagcagctggttcccatggcttatttgagatcaggtgttcagataacatgtatgttactcaagttattggccctggtgaagaggcttctcctgattctcatgaaacgttcaagcatggtagttccttctgtatccagatgcatagtgttgaggaaacacagagtttttctgtgtctatggagacaaaggctgatatcaaaagtgattttgttttctttcagtttgctgtccattattccaatatatatcaaacagaaatcactcgggtgatcactatgaggctgcagactgatgatggtttgtctgcatatctggcaagtgtgcaggaggatgttgcggcagttatcattggtaaaagaactgtattgcgtgccaggactgcctctgatgctattgatatgaggctctcaattgatgaaagagtaaaggacatagctctaaaatttggtagtcaggctcccaaatcaaagctttaccgcttcccaaaagaactagcatcactcccagagtgcttgtttcatctgaaaaggggaccacttttaggtagcataatcggacatgaagatgaaagatccgtacttaggaatttgttcctgaatgcttcgtttgacctttcgctccgtatgttggcacctcggtgcataatgcatcgtgaaggtggtacatttgaggagctgccagcatatgatcttgtcatgcaatctaatgctgcagtggtactggaccatggaacagatattttcatttggttgggtgctgagctagcagcccaagaaggacaaagtgcagcagctttagcagcatgccgtactctggcagaagagctcagcgagaaacgttttccagctcccaggatactttcattcaaacaaggaagctctcaggctagatattttgtctcacgcctgatcccagctcacaaggaccctacatatgagcaggagtcaaggtttcctcaattgcggacactcactcctgagcaaagggctaggctaaagagcagcttcatccagttcgatgactatagtttttgcgagtggatgcgcagcctcaaattggtcccaccagaaccaagctaacacaactagtctggggggtacacttccgaacggtggatagcaacagaatctatggcgtggcatctgatagagctttccctctaagatagatgtgatcttcatgaaccaaattatggcatcgccagatattcgtgagccgatcatacgtttggtttggtgggcagccatttaggtgcggtggaactgtatgattttgcataattcattttcttctccttttgaccatgatgtagtagagtaagttcataaacagttccttgtcaattgtcatacaggtggagaaatctacacaataagtttgtcaattgtcccaaatgttacatgtatacaacctttgtttgaagaggtctcactatattatttgaaattcaaaaaaaaaaaaaaaaaaaaaaaaaaaaaaaaaaaacccggccgaagncccccaaaaccaagcgcaaaagcaaaagaaacccggagcagccgaagnccaaccgaccccgcc

SEQ ID NO: 4103 - DNA, 1548 bp, Zea mays
  Clone ID: MRT4577_103743C.1
cattgggtacctcgaggccggccgggcgtcgccgccgcgcgccaaaaaccctaacccctcctcgcctccgcccctgccgcgtgacggccccagagatggggcgagacaagagccgtcgtctatacggcagccgccacttccggcagcggctggtgctggcgacgctcacctctaccgctgtcaccatcgaggacatccgctcaggggacgcttcgccggggctccgcccttacgaggtctccctcctccgcctcctcgacaagatctcagaccatcacaccattgacctcaacgagacaggaacgaagctgaggtaccggccgggggtgattatagggggaaagggccttgagcacgactgcggggtgcaccggggtattggctactttcttgagccactcatactgcttggtctattttcgagggcccctatatcgattcggcttaaaggaatcactaatgatacaaaggatccttctgtggatactttccggacaacaaccttgcatatgctcaagcactttggtgttcctctggatggtttcgatctaaatattgacagccgtggatctcctcctcttggtggtggtgaggtgtttctccgggttcgcaatataaatagcacattgacggcagcaaattgggtagatgaaggtatggtgaagaggataaggggtgtttcgttctccactagagtatctccacagttggaaaaccgcatcatttatgctgcacgtggaatcttcaatcgtttcattcctgatgttcatatacacacggatcatagatctggttctgctggtgggaggtcaccaggctatggtgtatcgttagttgctgagaccactacgggatgcctgctctctgtagatgtcactgtgagttatcctagtgttgatgaaataaatgaagaatctgagaagcctgagctgacttctccggaggatcttggtgttcaagctgcatcaatgctactagaagaggtggctcaaggaggtgttgttgattctacacatcagggcctcctatttattctgtgtgctttatgcccaccggatgtatcaaaggttcgtgtgggacagttgactccatatggtatagagacacttcgaaacatcagagattttcttgacgtcaagttcatcatcaagcctgatcccaattcaaacaccgttactttaaaatgtgttggcgcgggagtgaagaatcttgctcggaagatttcataagcaacatgaccattaatctgatgaaggattcatgccacatcaagagactactatgagaccctatttgtaactgcaaacaacagtgtaggagtttcccttagctgttactgctgaaattctattcgaggtccatgatgtcttagacatcaccgatgtacatcagtattagaatggattgttctgatcatgatgccctgtattgtcgacatatttttgcatcacattgcttgtcgacacattttgcatcacattgcttcaccaactatgccatgacatggtgatatatagaaatgaagaaaaggtggcaaacgtccagact

SEQ ID NO: 4104 - DNA, 312 bp, Zea mays
  Clone ID: MRT4577_103744C.1
tcgtgtgacttgaggatctgttcactggacgcgcgcaccggatgcatgcagacgcagtatatgtgcccatctaaggggaccgcattgacagcacgcgcttgaaggacatgatagagggcatgaggactgatttcaggaagacaaagcatatcaacggcaaatagcgaataatacaatgagactatgtgaatcgaaacgatgcattaatgggacgctcagtgaccggcatcagatcaaagtagaaagctatcaactgaaagcgtgcacattgctgactgggctggaaaagtagcgatccaacatacaagcata

SEQ ID NO: 4105 - DNA, 591 bp, Zea mays
  Clone ID: MRT4577_103745C.1
ggccgggccgggctctcttccccgttcctcttttgagagtcgaccagggttgcccggcccgatccaacgcctcgtccgacggcgctgccggccggcgatggatatggagaggagctcgggtcttccttgtgtatattagggcagcagtagttttagtttgtcttggcttcatgccgtggtctggcgttatgccgtggggatgcaaaccactggagctctcgagcggcgtctggtggtggcctccgtcgttttctttcttgccaccatggtggtggaaagtggaagacgccggatctggcaagatccccttgaataagctcgttctggtgttgtggtgttccctgatctggagggcatccaactgctactgcttgttttctcaggctaccatggtggtggatgagaagcaggatagttgcagaatcctgaagtttataggtcgagttcgagcatatcagcagaggtccctttggtggagcgacggcgcccatcgatggctgccggtcttcgtaggtgccctgtttcttctagccgaatggcggctgactatattcctcccggcttgcgtgcctgatgggaggcagttccagt

SEQ ID NO: 4106 - DNA, 235 bp, Zea mays
  Clone ID: MRT4577_103746C.1
aaaaaaagcttgtacaagctttttttttttttttttttttttttttttctttttttttttttctttttccttttgtttcgtgttccgtttttattttctttgtgtgcgcgctactgctcccagtgaaccctcaatcaaaggccggggggccctggggagtcggagtcgggagtagctgaagctagtaacaaggttggcgaaatattattttctggcctgactgcctatatatgtt

SEQ ID NO: 4107 - DNA, 574 bp, Zea mays
  Clone ID: MRT4577_103747C.1
cccacgcgtccgcccacgcgtccgtccacgcgtccgcccacgcgtccgcaacgaggaaaaatgtggagctattcccggagaaacgaacatggcctcaatcctcttcaatccatttgctcccaaacaagccaacgggtgtttggtgcaggagctatgtgctcgaacaatttaatcaacaggttcttctgctgcagttacggcattttctgtgctcatttatctatgctgtctgttctaaattataagacgctttgttatgtctatatttgtggcttgtattatgtatcaaacacaatatatatataccggtgttataaaagatacagatgtagaaaagctaaactatacggatgaaggtataggttgcaaaggatgatgcttagcagatacagtttagtctgtgtgcatcaaagagagttgtgtggaaacgattgttctgcaggcctgtgatagacatcaagaatttggctccggtcgcttctgcttcagctttgactgcacacagcttcacctgccgcatgctggaatctggatagtagcttgccctaatataaatcataatcaccttatcaag

SEQ ID NO: 4108 - DNA, 304 bp, Zea mays
  Clone ID: MRT4577_103748C.1
attcggctcgagctctgtagagccgctcatttgttttagggccgcgcgtttctgttgttgcatgcgatgaacgtagttgtgggggcgaaggaggatagacacctgatgacggggctacacacagtcgatgatatctactgtactgactgccgcgaggagtatggctggaagaatgggagagcatacgaagagccgcagaactacaaggagggaaaactcatattccagaagttaaagatagttaaggaaaactggttgagcccataagttgccaatcacaaaaagttctggtgaagatgaaatg

SEQ ID NO: 4109 - DNA, 373 bp, Zea mays
  Clone ID: MRT4577_103749C.1
gcccgcgcccgcgcccgcgccggacgcggagccggccccggcccgcggccgtgggcgtgggcggtcgccgcggtcggtcgtacggacgtcctcctcctcctcctcctccggcggcggtggcggcgggaagttgacgccgacggacgcaaagtgtaaggtccgcatcaagatctggatttggtcgttttgatttgatggatgggcggattccatttggggctttggggggcggcggcggcggggtagagagaaaattttcctcctattttttttccccttcttgcttcttctcttgacaacagtgtatgtggatttattggagtagtctgtaaatggttttcattttcgatacccttgtccatcatcacagcac

SEQ ID NO: 4110 - DNA, 180 bp, Zea mays
  Clone ID: MRT4577_10374C.1
acgttcatgttctggtctgtttccccaccgcagatcggcagatgtgtgtagaaccgtccgagcggcgacaacactttcagccgctgcgtgacagatgcttcagaagcgggaaagcactttttttgtttttcaccagccggccggttcttgggacgggcacatttttttttttttccaagc

SEQ ID NO: 4111 - DNA, 174 bp, Zea mays
  Clone ID: MRT4577_103750C.1
tgcgttgcaacggcatacaaaatattcgacaaaatattagtgcatttcctcgactgaaaaagctaaatgacgctattttacttttcctcataaatagtacaatgtagaggagcgtttttacatctgtaaggtaacacaaagtatgaaaaacaaaagcaagataacacaaagtat

SEQ ID NO: 4112 - DNA, 303 bp, Zea mays
  unsure (1)..(303): unsure at all n locations
  Clone ID: MRT4577_103751C.1
ggccgcccggggggggggggggcggccaaccgaacaagaagaggaggcacaaagggggcggagcaaaggacccgagcagggcaaccggaaagaaacagcggagaggggcaaacaaancaaaggagcaggcgggcgaccagggccgggcaacaaaggaaacaacaaaccgggcacagcgggcaacgggcaacaacccgcaacaggcggggcgggagcgcggaacacacaccaagccgaggggacgggccacgacggcagacgcagcggggaagaacacgcgggcacagggccccgggagaacag

SEQ ID NO: 4113 - DNA, 432 bp, Zea mays
  Clone ID: MRT4577_103752C.1
ctagccatttggtggaccatcggcgcggaaaacaacggagaggccacgcacgtgggatccagctgcgttccgagacttcgggcttcgtgttttgtgaatttgtcacgactcaccttcttaggctatctgtaaccattacccttaatttttttctccctatatcactttccccctattttctctcttattttttcatctctcgcagcggttccctctaaataccccatataccctactacaactataaaatattattttctatatcaactatcaattttttatttactaacaattacttgtggactcacaagtcacaacacagtgtttaagggatgaacagtgacacgctatatctagagtagcgctgcggccgtagaatgccccctacatagggctggaaacgagccgagctcggctcggctcggctcggtg

SEQ ID NO: 4114 - DNA, 226 bp, Zea mays
  Clone ID: MRT4577_103753C.1
ttggacaaaattaagactgccttagtgatacatctggaagaacctctgcgcctccaaagaatggatcatatcatgacagtataacactttgacaaaaactggtctccaagaataaagaactaatgtttttggaggggggtggaagactatggcgacacccattggacaccataaatgactatgagggcagtgccattctataaacaaagcccgggccgtgttaccc

SEQ ID NO: 4115 - DNA, 774 bp, Zea mays
  Clone ID: MRT4577_103754C.1
cgtccccctgcggcgatgctgcggcggcagccgagctcaccagcctgcgcatcagcgaaggagctgggatccctccgcttcccggacggcgaagcgtcggcggcaatgcagctgagggagaagaggagggtgataagaacaagaaggcgaggaagggtaaggctggtacgcagcggatcgccgggtgggggctccgcgagttcagcaagatagtttctaaaaaggttgagaccaaaggacggactacttacagtgaggttgcagatgaaatttgtggagagctgaagttgactcttattggtcaagagtttgatgagaagaatatcaggaggagagtgtatgatgcttttaatgtgctaattgcactacgtgttatcacaaaagatgaaaaagagataaaatggatgggcttgtctaatttccaatatgaaaagattcagttggaggaaactcgcaaagaactcatgatcaggattaagaacaagaaaaaacttctccaggaaattgaaagaccagcgtgatgacctccagaatatcaagtttcgcaaccagtttctacagaggccagcagagagtgtgaatggtatctgccttccattcttattggtcaaggcatccagaaaagcaagggtggagattgagatctcagaaaactcaaagtttgctggtttggacttcaactgcgtaccattcaccttgcacgacgatgtatcaatccttgaagccatcaggtgtaatagcgtgaaaaaaagctagctacttgggcacgcttca

SEQ ID NO: 4116 - DNA, 331 bp, Zea mays
  Clone ID: MRT4577_103755C.1
accccggggcggatggaatttccaacacaaccaactagccggtcctggggcttgtgttaattgcacgtcctcttagtgttacttagaaagggccattaacgaccgcagaacattggtaatgcacttggccgctagacttggaaggaatggctacaagacacaactgacgagaatcagactacagagctttctcacataatgcggaagatccccttgatgaccatatccttagccttacgcatataatccgacgacttattgaaggtcacgcacgctaagtcactgtacttttcaacacggtttatcagattcccggccactctagacccga

SEQ ID NO: 4117 - DNA, 652 bp, Zea mays
  Clone ID: MRT4577_103756C.1
cctcgaggccggccgggccggggatccgagtgcgcctatcttgtaagcccaacgactcctacgcccgctcctaggaagatctcggagattgatgacggccttcaccaccctgtcgccggatttcattgacgaagaaatgcccctcttctatggtgaacgaggtcaaccacctcttccgcgacaatgagatgaggcatagttatgcctcggctcgcagtgccgccgaaaggcaccagcatcctctataatctccagctcgaggaggatctgtcaccaccatccccaccattggattcacatgtgtgaaactgttgagcatcatcaacatctagcttcgccgtttgatatgttggtggacaggaaaagatgaggcccctcgcggaggcactactttcagaacacgcgaggacttatttttgttgtagaaagcaatgatagggaacgagttgatgatgctagagatgagctccacgggatgctgaatgaagatgatgtgcgagatgacgagctgcttgaatttgtctacaaacgagatcttcctcatgcctataaatgactgctgaaaatactgacaaaattggtctgcattctcttcgccagcggcactggtacatccagagcacttgtgctacatctggtgaagggttgtatg

SEQ ID NO: 4118 - DNA, 569 bp, Zea mays
  Clone ID: MRT4577_103757C.1
cacccacgtaagctcggaattcggctcgagcaagagcgaagcccagaaacagagcgatgagcttgccctggtcaggcagcagttgagtgaaatgaagagccacgtagaggatggtgacatagctggggccccagcttcctccccagaggcgcccccagccgagcaggaccccgttcagctgaagacgcagctggagtggacagaagccatcctggaggatgagcagacacagcggcagaagctcacggccgagtttgaggaggctcagacctcggcatgtcggttacaagaagaattggagaagctccgcacagccggccccctagagtcttcagaaacagaggaggcctcacagctgaaggagagactagaaaaagagaagaagttaacaagtgacctggggcgcgccgccacgagactgcaggagcttctgaagacgacccaggagcagctggcaagggagaaggacacggtgaagaagctgcaggaacagctggaaaaggcagaagacggcagcagctaaaggaaggcacctctgtctgagtttcctctctggaaaaagaagtact

SEQ ID NO: 4119 - DNA, 735 bp, Zea mays
  Clone ID: MRT4577_103758C.1
tcgttcgctgtcccgcctgtccgccgagcgcccgacgacccgagcaggcgagcagctccgcgccgcgcgacgtcccgagcagctcctgttcggtatccctgtttctcgcttggaggctgcctgaagcggccagcagccatggcgactcgcgccggacgaccgcccactccggcgcccgctcttctgctcctcctcaccttcctgtttctgttgcggggagttcttccgtcgcgagccggggacaccgtcgccgccggccgcccgctgtccgatgcgcagagcctcgtgtccaagcgtggcaagttcaagctcgaattcttccgtccaggtactgtcgcccctaattaaggtacacaatgtttgctaacgtcatcgactcgagccaggggagggttcagcgtggaggttcgtcgaggtctgctgctcgtagctcccgtcgctccactcaagatccaacaaaagtggagcaactgcgagaagaacttaggcgaaaccctcttcgctagtggaggtatcgaccatcacttgtcaatgtaactcgatgctgatcggcgaccgtgagcttccatgttattgtgttctgatacttgagacttttattatgactatgtatgagatattgtctcttattagtactggatgatgagatgtgtcttattatgactatggatgagacttttgtgatgtaattgatgagactatggatttaaatattgctatgtgaatgatagccac

SEQ ID NO: 4120 - DNA, 583 bp, Zea mays
  Clone ID: MRT4577_103759C.1
gctgcagagctcctacgcgcgcgctccttcccttgcctctctgctccccggcaagctctcctacgcgcgctactccttcctgccccagacgggcccggcctgcctccctgcgcgtggtggcgctccagcccggctgctcagcgtccatcttcctgcgccttgctttagctaatggcgcgtccctgccccttccatgatacgctccctagcttgggcatctcctccctagccgccggactaccttcggattatggccgccggtgccaagcgtccggcgccgtccagctctcttctctggcgcccctgtctgagctccctcccatggcgctaggccgcccgggtgcctagcccagcttctctggtccccttactgctctccctgttcgccggctgaaccgaccagccggagcttcactgctggcgtgctggcttcctatcccctgcacgcgcgatctgactgctgcagctcggcgtgccacgcggacctttatctaccctgctcatgctcggtctacagctcggagacatgggcaccgtacctttttaccctagcgacatccagcaggtcggcgctcacctcaca

SEQ ID NO: 4121 - DNA, 575 bp, Zea mays
  unsure (1)..(575): unsure at all n locations
  Clone ID: MRT4577_10375C.1
tgggtacctcgaggccggccgggacccattctctcgcctgcgctccctcggcgccccagttccccaccccctgttgacccagccgtcccctcctgctcgctcatgcctcccatcgctgtcggcgacgtcctccccgacggccagctcgcctggctccacgagaacgatcaactgcagcatgtctccgagcactctgtctgcgccgggaaaaacgacatcctcttcgacgacaccggcgccttcaccccgaacggctccaaccagcatgtgccaagcttcgtcaacacaggctgagcaactcaaagccaaggattggangacaagaacctgatgatcatagtgaacgaccccgacgacatgtaagcgagacttgagacctaccccaataaccactacgaagatgtccactccgacgggtcgggaacatacaccatggggatacacctcaatgtcgatgacacggcagaatcgatggttcgtgctgcatcgaagatcaactgtctccgggccgaatacatcacgttcatcgcaaatcacatcacagaatggatctctatcacgatctgctacgctga

SEQ ID NO: 4122 - DNA, 814 bp, Zea mays
  Clone ID: MRT4577_103760C.1
tcggcctggatctaaccctactcactgccgctccgagcgaccgcgcctccgctcgccgtccgccgccctcatcattgccgacctgccgtccgctcagccggccaggcggccagccgctgtcccgcctgtccgccgagcgcccgacgacccgagcaggcgagcagctccgcgccgcgcgacgtcccgagcagctcctgttcggtatccctgtttctcgcttggaggctgcctgaagcggccagcagccatggcgactcgcgccggacgaccgcccactccggcgcccgctcttctgctcctcctcaccttcctgtttctgttgcggggagttcttccgtcgcgagccggggacaccgtcgccgccggccgcccgctgtccgatgcgcagagcctcgtgtccaagcgtggcaagttcaagctcgaattcttccgtccaggtacacaatgtttgctaacgtcatcgactcgagccaggggagggttcagcgtggaggttcgtcgaggtctgctgctcgtagctcccgtcgctccactcaagatccaacaaaagtggagcaactgcgagaagaacttatgcgaaaccctcttcggttgtggaggtatcgaccatcacttgtcaatgtaactcgatgctgatcggcgaccgtgagcttccatgttattgtgttctgatacttgagacttttattatgactatgtatgagatattgtctcttattagtactggatgatgagatgtgtcttattatgactatggatgagacttttgtgatgtaattgatgagactatggatttaaatattgttatgtgatt

SEQ ID NO: 4123 - DNA, 221 bp, Zea mays
  Clone ID: MRT4577_103761C.1
tcgagcggccgcccgggcaggttaagcttttctttttctatgttttttttttatcttggaaacgaaacttcttatttatgggtggtcacattcttcagccaaaaaaccttattactttgtttaccacctatctgcaccctgacggggggcccccccaacacagtggcgggggctggatgcctaccggcttgtccaaactaaatccacaaacggctaacatt

SEQ ID NO: 4124 - DNA, 303 bp, Zea mays
  Clone ID: MRT4577_103762C.1
cgggcagacccactcgtccgcccacgcatacttttctacatactctattatctaatacctgcaacactgataccagggcgggcttcttttaaaaagatgaaacacaccccaattcagtctaacattatctttgctcatcaaatacctccaaatattaacacacacaacatcatttgcacatacaacctcaccatctacccaaaaaataatatcttccacaactatgtgaaatcacacatccacttacatttatctcttcctctaatctaccatacacatattcatcaaattaagatcttcaaa

SEQ ID NO: 4125 - DNA, 307 bp, Zea mays
  Clone ID: MRT4577_103763C.1
actaatgttactcggaagaccacaggacctgcaggatttttgagtccgggctggccaagtctgcatccaaacaatgacaagcgccctttaactatgtcccttacaggtatcccatctgcttcacaaaaccctgttaacgagaattgggcctgcggacacagcttacccttcttgggcctgcttatgcgatcttgggcttcattctccgaagagtggcccgccaattgaggagtataggacgtaacattcgtcgggacatcactgcctcactggagagaccatgcctgttgctatgctcatgccgccg

SEQ ID NO: 4126 - DNA, 449 bp, Zea mays
  Clone ID: MRT4577_103764C.1
cccacgcgtacgcccacgcgtgcagccacgcgttctcccacacctacggttgcgaggcgagcgctcgatcctagcttatcttccaagaagcgcagcgcccatggtcatggccacacaagactacggcggcacgcgccacctgctggacggcgactgggcgccggaggcgaagccgcggcagctgacctcgcagctagcgctgtcgtcttcgtcctcccgcgggccggccccggtccgcgcgtgcaccgaggaggctgtggaggcgcctaaggggttcccggcccctcagctggaccccagcacgccgttccacatcttccgaggaagcacgggcggacagctccccaaggcgcaggcggaggaggtctacgtcatcacgtggacgtgccccaaggagacacgtgtgccagatgcccaccagggagcgctgcatcatgcgcgggggcccc

SEQ ID NO: 4127 - DNA, 363 bp, Zea mays
  unsure (1)..(363): unsure at all n locations
  Clone ID: MRT4577_103765C.1
cgcgccagcgccaggacgggaggnncgnccccgcggcccgcgggcccgccaggcgaaccgcgccgacgagcgacgacaacggcngcngcanncgncaacggcgacggggccagccaacccaaaacccgnccggaacaaccngacggggaagccgggaangggcaaacncaagnggggcanggagnacaaaggnnagcggggggggaggggacnccnanaggaagcnccagcgcgccaanaccgaggagnacanngangggcaanncncnggaaaccngggagaganncngaccaggngcaacaacgnnangnancnccgaggcgcgccagaggacgcagaganagaggacgcagagggagaag

SEQ ID NO: 4128 - DNA, 468 bp, Zea mays
  Clone ID: MRT4577_103766C.1
gctattgaaccacatgacggactaggccatggaggatttatttgtttcgtctttgacctgagcatctaaaagacggaaattgttttatagtcatacaaatgccacggcttatttgttggagagtccatttttctgtgtttgtgaagggtgttcactctgtagctgcagctttgctgatccttcaccaattgtgtgacctgattccagatctttctgagggtaaaaccttccactcccatggacgagatcctttattgcttttgtgaggtctttatcattaagcaaggactccattgtcacgtgtacacgatatcgccaataatgttttgggtttgttggatcattgatagtctcttccactgcaggccgtgtcgtgtaatcttctttaagtgctagcaaatcctggaggggaaatattgaccacattgatggggcttcaacatgctgtcgcaagacaaagtgcacaat

SEQ ID NO: 4129 - DNA, 262 bp, Zea mays
  Clone ID: MRT4577_103767C.1
ggaatttcctgctagtacggtaaacacgcctattggtctgaccctaggatatcgtgggggaggaatagtaaagagggccgattcatctgagataacgaagtcatgtatcacaaggaggctgggtgctagacccctgagggacctatcctgtgcatgaataactgtggcttctatagcagcgcggaaaccatgataatgtgcttcaagtgccacaaggagatgataacgaatcagggtcaggccaagctggctggctactcta

SEQ ID NO: 4130 - DNA, 508 bp, Zea mays
  Clone ID: MRT4577_103768C.1
cctagttctagatcgcgagcggcctgcttttttttcttggaaaatggtttcttttgcactttaaaggtggcggtattcatgggtaccccaactttttattatgggaggggctgaagaataaaaccccttttggttaacttttggcaagggggggggacctttcccattttctggcaaaaattctgataggtggggggccgggcctggaccaaaatggatgggccgaaaaggaattcgggcttcaacccggggataataatataaggcatgccagaaggccaaaatggaaaacaatctttcaaaacaattgggtggggataataaatctcttcttcgcaccttttcaataccttcaagggatggtcccatggtttaataaaacataaggattttaatggcaatggggcggcggcacttggcaacgaagcaaggacattattattccgaaactggaaactatttaacaaccaatgcaactggtattaaataaagacaagcctaacctggg

SEQ ID NO: 4131 - DNA, 320 bp, Zea mays
  Clone ID: MRT4577_103769C.1
gcactgtcccggtgagcgctgctggctcggctaatgaaactcccgaaataccggacaacgtgggagattggcttcggggcgtctaccgctttgccactgataggaatgacttccggaggaacttgatactaaatttgggactcgctgctgcgggagtttggctggccaggaacttgagtgacattgacctcatggcacctcagccaggggtgtagccaagtagttctaatgccacctgtcgtcttatcatctgattgcagacaaatggaatcctgtgctgaacccgaatcttccaaaaaacagcctacaatctgtgacca

SEQ ID NO: 4132 - DNA, 152 bp, Zea mays
  Clone ID: MRT4577_10376C.1
gttggttatatgtgtgtgtagtatattgtgtaggtttcttaaagagatgggaagaagaaaaaaacattctccgtacctttaatagatctcgctccccccttcggttcttgcgacaggtcccccctccctatttagatctgtttgggactgtt

SEQ ID NO: 4133 - DNA, 2149 bp, Zea mays
  Clone ID: MRT4577_103770C.1
ggggaccggtcgagatggaggcaaccggcacccgccgatcgctcgctggtgggatgaagaaatgctccggcgtgctcttcatcctcacactcgccgtcgtgctcttcctcctctcgccgtcgccctcccccactccaccccccaacaccgcacccaatggcccgatcaccgacctcctccccaccctccccggcctttcggacctctaccctcccgctcccaactccactgcacatctctcctggggcctcctccgcccgctcctctgccgctccgacgcgctcccgggaacctctgcaggcgtcctcgaggcagccgaagcctggcggaatctcaccctggctgtcaccgccgcggcaagcgaggaggaggcgcgtctccaaggactccgctgctcatcgtccgtgggaggggatctacgcacgggacgtgccacactcccctgcgggctctcggagggcgcggcattgacggtggtcggggttctcagggagggggcggccaagttctgggtggaaatgctgggtgcgaacggtgaggttgtgctgcacgtcaatgtgagcctgggagccgcgggggtggtggtggagcagaattcctggacgccagaggaggggtggggggagtgggagcggtgcccgcctgttggtgatgtgggcagcagcaatagcagcttgcagctaagtccagtggacggccttgttcattgcaatgagaaagtgggtgcaaggatcgtccaggagagtaataatactgtggtaaatattactgggaaccaacctgaagattggcagagtcaaacaggacatggtcagttaagtggacgtttctcaattgttgaaggagagccttttacagtaacactgtgggctggtgtagaggggttccatatgacagtaaatgggcggcatgagacatcatttgcctatagagagaggtcagagccatggttggtagcagaagtcatgttttctggtgatttggagctcttgtcattcttggctaatgagttaccagtatcagaagatatagacatggaaaatgttgcagttttgaaggccccacctctgccaaagaagcaaacttttctgctggttggtgttttctctactggaaacaacttcaagcggcggatggctttgaggcgaacatggatgcaatatgaggctgttcgctcaggcgatgtagtagtccgttttttcactggtcttcacaagaatgagcaagtcaatatggagttatggagagaggctcaattatatggtgatatccaattgatgcccttcgttgactactatactttgatcactttgaagaccatatcaatttgcattttcggaacaaaaattgttcctgcaaagtacatcatgaaaacggatgacgatgcttttgttaggatcgatgaagtgatctcgagcctaaagaagagcaattccaatggccttctttatggtctcatttctttccaatcttccccccacagagacaagggtagcaaatggttcatcagtcggaaggaatggcccttcgacatgtacccgccatgggctcatggccctggatacgtaatctcacgtgacatcgctaagtttgtagtccaaggccaccaggaactgactcttcagcttttcaaacttgaagacgtggcaatgggtatttggatccaacagtacaagaacagtgggcagcaagtaaacattgtgactgatgaccggttctacaatgaaggatgcgaagctgactacgtccttgcccactaccagaccccgaggcttatgatgtgtctgtgggagaagctgaagacggaatatcatgctatatgctgtgaatagcatccgaattgcaagtaggaggcgatagaggaatggatagatagaggaatggataggttagccttggttttgaagaagacatttgctccgattttgacgctgtgtggaaaattgttgggactatgcgcaaaaagcctgtaacattgggttctcacttctgttctgtggcctgtgggttcatgttctttgtttttgggtagaaaatgttaatccgtgcaacttgatggatgttgtaaaaagagtgttgtaggacatttgagagagtttatctggcacaacctctcaagttattggatccatatacacctgcactcgtc

SEQ ID NO: 4134 - DNA, 241 bp, Zea mays
  Clone ID: MRT4577_103771C.1
gttcctaagcttgggattctttaaaatcggccgccttttttttttttttttttgtaaataaaaatttccttggttgttattttttgaccggttaaaacccggggggaaccttaggcctacaccacctgtggccccatttaaacagggctggtggcctgatgggggacccgaacttaaaagggtttgtcgttgtacaaaattccaaattgtgccccttggcaggttaagcaaccttaagttt

SEQ ID NO: 4135 - DNA, 401 bp, Zea mays
  Clone ID: MRT4577_103772C.1
acgcctggcaaagtcaaccagaaatatggacttgccacttcaactaaacataactaaaacaaggaaagagataacaaaactgtacaaaaaacccataaaaaactaaaaattaaaaatgtaacaaaaggatcatgactataatgctcaaaaaaaaagaagaaccaaaaatctttcacaaatggctctgccctacttagcaaacacttttatcgcattgtcctcgtgcattatcaggcaaacatcatgaggaaactgccttaccaccttctcatgtacaatctaaaatttcagaactgcctaaactcaatatgacccattacacctcctctacagatacatcctcttttcatactgagctatcttcttatgctgctcctgcaccataacatatccactcaaat

SEQ ID NO: 4136 - DNA, 459 bp, Zea mays
  Clone ID: MRT4577_103773C.1
cacctaaaacttaagcattattccaccatgatacaaatatgcaccacgtcctaaatacctgggatatctcatactccatatatattgagagcgccagatctaccataccaccagccaaaaccaatgtgtcttaagctccactaatttatttcaacaaacatcgaaaatgaacacgactttgctccccacctttacgtataaaaaccagaccatgcactctacattctcaccagcaaaactggcctacacataatcaaataacctggcacacggagagacactgatccaatccacccctggctggaattacttagaaagcaggatcactggcatcatcccatgaccctgtggatggcaactaacacaacccccaccatggaatgctaggccaacccatgaccaataagacagagccttcctcctcttcaggatcccaccaggaaggggccacttgatcat

SEQ ID NO: 4137 - DNA, 198 bp, Zea mays
  Clone ID: MRT4577_103774C.1
cgcttatgaccactctcatcttcatccaaaagcataaaagaaagcagtgcgagctgaagcatccagcctctggaatgcatcgccaggatgcctgtgccagcgtgagcccatgtgcctgacactatactaacctgatgagagctgcttgtatagtgctttgcctcaactatctgcatgatatctgtgctcgcttggccg

SEQ ID NO: 4138 - DNA, 2019 bp, Zea mays
  Clone ID: MRT4577_103775C.1
cctcgaggccggccgggccgggagctacctacctacggacacacgcgattcacgcaagcacacgcagccgctccttccgtcctcaaaccacaggcggaccctgacgagacgtacaagaacctccaccaggccattgagcccttgaccgtgtacgcaaacgaacacgaagcctagctcctccccaatggcctcccatcctcctcctgcggagccgtcttctaagtcaaacaaggggcagagcgagcacgaggagatccacgtctcctcgggcggcgttctggcttacaccgacgacgatgactgcgagagcaggcgccccttgctgctcaggactcccgcctccgccgagtgctactccgtctccgccgccgtcttcccgtttctctttccagctttgggaggccttctgtatggctatgacattggggcaacatccggtgcaaccatatcgctcaagtcgtcgacattcagtggtactacttggtacaatttgtcatctgtgcaaacgggtcttgtggtcagtggctcactgtatggtgctttgatcggctccgtcttggcatatacaattgcagattttttaggacgacgtaaagagcttatccttgcttctatctcatattttattggagcctttctgacagcagtagcacccaatttcgctatcatggtggttggccgctttttatatggcataggaattggattggctatgcatgctgctccaatgtatattgcagagactgcaccgagccagataagaggcatgctcatttctctaaaggagttctttattgttcttgggatgcttcttggttatatagcaggaaatctctatgttgaagtggtttctggttggcgttacatgtatgcctccagtacaccattatgtctcataatgggagttggaatgtgctggttaccctcatcacctaggtggctcctgttatgtgccatacaagggaaggggaatctgccagagacaaaagaaaatgcaacccggtgcttatgtcggttgcggggtcaagcttcacctgatttggtctcagagcagattgacttgattctagaggaactttcatatattgatcaagagaagcaagctagcttcggtgagatctttcaaggaaaatgtcttacagcactgataattggatgtggtttggtgttctttcagcaggtcactggtcaacctagcgttctatactatgctgctacaatttttcagagtgctggattctctggggcatctgatgccactcgtgtgtcaattcttcttggcttactgaagctaatcatgaccggagtagcagtccttgtggtcgacagacttggcaggagaccattgcttattggaggtgtcagtggaattactgttgccttatttttgctgtcctcctactacactttactgaaagatgcctcctatgtggctgtaatagcgcttctactatatgttggttgttatcagctctcatttggtcctattggctggcttatgatctcagaggttttcccgctgaggctgcgagggcgtggactgggcgttgctgttcttgtcaattttgcgtccaacgctctggtcacctttgctttctctccactggaggatttgattggaacgggagcgctcttctctggattcggggtgattgcagtggcatctcttgcattcatattctggatcgtccctgagacaaaaggactcaccctggaagagattgaagcgagtttgtagttgactgatccagacgtcacgttcttccgtcctagtttcactgaactgaagggacttctggtatccttctgtagtttgctgccgtagttagccttctataaacgttctacaagctgttgtagcaataatacttctttccttccgggtataaaccgagatggtcggttgctgcaaagtgtgttctttaccgcagttcatccgattagtcacaattaattttcctgatcgccccctgcacttaactaggcaccatgactcaatcagagcgacgttgattattc

SEQ ID NO: 4139 - DNA, 838 bp, Zea mays
  unsure (1)..(838): unsure at all n locations
  Clone ID: MRT4577_103776C.1
ccggccggggtcctcatctgcctcactctcgccggcacataccaactcctctaacctctacaatatcattataattgcccatcatggctcgcaagttcttcgtcggcggcaacttcaagatgaacggctccaagtcgtccatcaaggagattgtcgagaacctcaacaacgctgaccttgacaagaacgctgaggtcgttgtctcccctcctgccctctacctcccccttgtccgcgagactctccgcaaggaaatcgaggttgccgcccagaacgtctacgacaagcccaacggtgctttcactggcgagatctccgtctcccagctcaaggatagcgatatcaactgggctatcctcggccactctgagcgtcgaaccatcatcggcgagtctgatgaggtcatctcctccaagaccaagtacgccaccgagaacggcctcaaggtcatctggtgctgcggcgagtccctcgagacccgtgaggctggcaagaccatcgagttcgtctctgcccagatcgagtctctcaagtctcagatctccgactggtccaacattgtcatcgcctacgagcccatctgggccattggcactggcaaggttgctaccactgagcaggcccaggaggtccacaaggccatccgtgacctcctccgcagcatcagcgacaaggttgctgatgagacccgcatcctttacggaggcagtgtcaacgagaagaactgcggcgagctctccaagcaggccgacattgacggttccctcgttggcgngcttctctcagcctgctttcgtcgacatcatcacgctaccagcagtaactattaattcaaagt

SEQ ID NO: 4140 - DNA, 555 bp, Zea mays
  Clone ID: MRT4577_103777C.1
ctcgaggccggccgggataattgttacaaaaaaaggctagctctccctctcctttcccaagaccgcatcagccatcgcctcccgcgcgaagatctctgacgtgtgaggctatcggagaaggcgcttctagtgccgtccaagattctgagcaccgaggtaaacttcgccgagtactcccactagcctctgctgcagcccaccgctgctgctcagaagatcgtctccctctaccatgaaaaagcaggccaaaaccacgagaccgctgcgtcgtcgtcctcttctccggacgtcagggacgagttcggcaagtggttgccgccggacaggaggatctgcctggagaacgagaatctttgtttggtgggaggtccgtcagtacctccgcggatagggccctgcagagtatgcgtactaaccttttgctctgtcgaacaatcggaggcattgacctcgcagcatacctactcgctgatccatgcctcatgaggcatgctccgtgacgctggtgctgacgtcccagagcgctgcaaacactgtcgggctaactgcacgccc

SEQ ID NO: 4141 - DNA, 595 bp, Zea mays
  Clone ID: MRT4577_103778C.1
acgcaaatccacgaccagaatccacagaccaagatcgagggcagggaggaaggacagacagacagacagacagacagatggaccggatgatctcgccggtgcactcctgggtggaggaacacaagctctagcacatcgtatccgtcatggcaaccgcggtggccacgtcggtggcctacagccgggggaagacgccggcgcgggccacgagcctgcgcctcatccacgccatgatgcacgcccagacgctcacgctcgccctgctcctcggagccgtgctcgcacaccggttttaccgcagctattacaggaggcagaggcggaaggacctgcactacgacttgtactaccagttgtagtcggacatcgacgccgacggcaacgagaacgagcgctagaactagcactggcactgcaaactagcagtgagagaccagtgagccaaccacttacgccttcacatgcatacatcagatcatacatcaggtacagagaggggcaataaataggataattagtactagtagcagtactagtaattgctagcctgattgccaatcaatgatacatgacgtggtgcctgatcctgttcctg

SEQ ID NO: 4142 - DNA, 375 bp, Zea mays
  Clone ID: MRT4577_103779C.1
tcccgttcgacccacgcatccctcctcctcctccacccataccttattttccccctactcttcccgctaccagagtctcttataaaaaagacgatacccctccctttcctgattaaccacctactcttcatctcccttcttctctatacctccgcaattcccccttccatatcaaaatccaactccactaccaaaatccccttcactaacaatctctcgcatcaaaattcctttcttatcctttatcattcaattatcacccatcctttctttgtctccagccttatctcaaccctctatttcctacaaactcctgtcaactcttctaccttttattcattcactacctgtagacaaccttttttctttttttcc

SEQ ID NO: 4143 - DNA, 310 bp, Zea mays
  Clone ID: MRT4577_10377C.1
tttatattgacctctgctaaaggtacttgatgtgcattcttcagtacaggggggattgctaccaatatctctattgctgaaaccagaaaatgcagacagcctttgatcaaaagaactactgataggtatgttctcaaggattgcgccacagtttgctgcatttcaattttattatagattcatctatcagaagggcagctctggtgtagaggtgagagttgacatacttaatacctaagtccaaggatttgaatcaacctctctttattttgagggggaaagtctcgcctcgattaaaaaaaaaaataaa

SEQ ID NO: 4144 - DNA, 501 bp, Zea mays
  Clone ID: MRT4577_103780C.1
cttttcttatgattgatcttcctttttttacagttttttgacgttttgatcaatcatactgtctcgttcggtggaaacatcagcgcccgttctcttgctaacaacaccaaacaaataggcggtctaaaaggaagactcctactcgcgccgcgagcgaaccttctatacaccatgggtccctgtgcacacacctgaaagcaacttgagatttttggtgtgtttggcaccggctgctctaaaacaaccgggcccccccaagcccttaactagggggtgaaaggtttccccccgcgtaaccaaacacccacttgataaggccctaggggcgccccggcgttttaggaagccgtgcgcccaacatccaaaaaatatgaagtaactttaatgggtgtatctatggacacatgatataatgaaaatgaaatattgcatcgcttatgtaatctttatttagaacgcattatttttgtgggtgttctttaaaataaaatcggcgatgat

SEQ ID NO: 4145 - DNA, 526 bp, Zea mays
  Clone ID: MRT4577_103781C.1
gagaaaactgtctacatatagagagatggggcaccacagttacagtatcatatgaatacgatacatcaatcctgctgaatatttcagaagctacagtacagagtcgaaatgggggcaaatagaaagaaagaggctgtcgaccaaactcgttaatagatacctgattaccccataataatgctgggtgctgccaagccaaattgtacccaatcacttatccgcactggaatgggttgtcactttgagcggcgattgtcaaatgccttcattatccttctatgcgttcatattctatggagctagaggcattacactgataaaacacacacatgcagcaggagctatgcttgcaggtaacagcacagccagatgaaagtacaactaatgttcacagagacacttccaacacttaaatcgatgccttggcgaacttgagggagcttcaccacctcccatgtgaattcggtgatgacacggaccaaacggacgtaggccgctgccttgatgaaactgatgccaacctttt

SEQ ID NO: 4146 - DNA, 239 bp, Zea mays
  Clone ID: MRT4577_103782C.1
gaaaagtagtaaaccccaatggggagccaaaagaaagaggtactaaagggaaacaaaatgttggtcatgcagaacttatatcaccaaaaggttcatgtgctgactttttaaaaactaatggtattacttatgcttctgaatcttccactggaattactacccggatgtcaactgtggagttgaaaagttctgaccaagataaggagattcatggaggtgccatgcctcaagctacagca

SEQ ID NO: 4147 - DNA, 469 bp, Zea mays
  unsure (1)..(469): unsure at all n locations
  Clone ID: MRT4577_103783C.1
gacctttgggctggtctatgtgcttgtttatgtgcttgtttatgtgcttggtttgaacaagggttattggaaggtgcgtttgttgttcgtgctctttttgatgtttatgttgatgtttatgttgcttctggataagcgttttactgatgtgtcgaagtctggtgtgcgtgcggatacctctgggaatgaggcgtatactggtgatgttaatgctaagcgtcgtttgtctgcgaagggtactgttgggtctcttgtggtggtgcgttcgcgtattgttactaaggttaaggcgtcggatactcttgctcatgcgtttactgtgtcggaggcgtctgctaatcgtggtcgtgaggctttgttaggtcataaacgtatccaaatgatcttaccttaccctactttactctattacgtgcgtatagtgaggctcntccccgtttctttgaacgtanagcccgaaaggtctgct

SEQ ID NO: 4148 - DNA, 1442 bp, Zea mays
  Clone ID: MRT4577_103784C.1
gattgctgcctcgagccggcgggaagagtggtcggcgcgtcgggccgtcggtttgcaggctggacaacgaacggcacgggatccgggaaggaaacgcggaacgggcaggggccacgcgctgatcagccgcaggtccaccttgggtttgggttgggctggacccctcttttccgttcctttttaactcctcggccatcccgagcgcacgcgggtcgcccggctggctgcccccgctgctctcctctcctccgagatcccggcaccgtcctgtcccgccgcgccgacagctccccgcccagactgctgcacgcgcggatctagcgtcgccttccgctccgctgcgatgcatatacgcgccgtcgccgccgccgccgcacttgtcctcctcctcgccctctccgtccccgcccccgtctccgccgccgaccaggatgctaatggcgctgccgggaatggcactggcgtcggcgccgaccgcctggaccgccgcaccaagatgttcctccaccacacggtgcgcggggccgcggccggggcgcacgacacggggctggggctcctcgacgccttcttcgccagcctgtccatgatcgtcgtcagcgagattggcgatgagacgttcatcatcgcggcgctgatggcgatgcggcaccccaagtcgacggtgctctcgggcgcactgtcggcgcttgtagttatgacggtgctgtctactggactaggcaggattgttccgaatttgatatcgaggaagcacactaacagcgcggcgacagtcctctatgcattttttgggctacggctcctgtacatcgcttggaggtcagattccaaggcatcacagaagaaggaaatagacgaggtagaggaaaagctggaagcaggccaagggaagtcaacatttagacgtgttttctcgagattctgcactcctattttcctggagtcatttgtgttgaccttcttggcggagtggggcgaccgaagtcagatagctacaatagcgctggcgacccacaagaacgcggtcggagtcgctacgggagcgaccttggggcacaccatctgcacgtcgatcgcggtggtgggcggcagcatgctggcctccaagatatctcagggcacggtcgccaccgtcggaggcctcctcttccttgggttctctctttcgtcgtatttctacccgccattgtagtaccaccctgtcatgcgagccccctatttgtttcttggccagcttcctcattgatccagtgacccttgtcctgcggcatttttttttcctgtactagtaaagcatacatggatatgtgtagtaggtagggatatatacgatcattgccaatgtataccatacaagtcatgtcatggattcaaaaacagacggaagagctttttgtcacgaattcaaaaacagacggaagagcctttgtcacgaattc

SEQ ID NO: 4149 - DNA, 508 bp, Zea mays
  Clone ID: MRT4577_103785C.1
ctcctaacaacgaccagctgcaggtaattgcagggtgattatccgggtactataaacagacacgacagacaggttacggatctggggcagaggataccccggcacgtattgccgtgctgtctgcatgtatgtattataacaaaagcaggtattactttcagagccggaatacacacattatacactactaaaaatgccttattttgatgcaacccgtttgtgacttgggtcttcccgagccactaagaattgctgtaccccaatccagacctatttagagtggacaaggtcaagcaataaagaccgatccttttccggacatgtcaaatctccgtcacttgcagctgaatagtggaacgccccatcctgagcgatcagtctttagctatcgtcagtgtcattagaccgtcgcggatagaacgtgatagttacggattgagacgaatggccttcctctccactaactctggatctgcgccaagctgggtttacatgctaaacatgcggg

SEQ ID NO: 4150 - DNA, 314 bp, Zea mays
  Clone ID: MRT4577_103786C.1
cacttgatgaattatattcgcgtacctacccagggaacccggctgatacaaacaatggcgtgcaagcaggcctgaagtagaacggacagactggccaccacagccagcaggtctagcaccctgaccatacaccgccttcggggaccgaacacggtcatggtgaggcataaaatgcatatgatacatttgacttcagaatagtgggagtccagacaaggaccagcacacagcgacgggccttatacgatggcgctcaggaactgcccgctacccttggaagaactggttggggcgcgatggcccgacaaagaccg

SEQ ID NO: 4151 - DNA, 429 bp, Zea mays
  unsure (1)..(429): unsure at all n locations
  Clone ID: MRT4577_103787C.1
aaagacggccacgaaacccccgcagcngccggacgaccgagcgcaccagggcgcacgaggccaagcaggccgaccgagagaaacccaggagcgcccacggcgccgacaccgccacaccggcggccggcgaaccgagacggggcgccgacagacgcggaacggccgccgaggaccccacaaggagagccaaggacacgggacccgggggccacacacaaaacacagacccagaaccgggcacgcaagagcacggccggacccgcagagaacagcncaagcccaaccagacagaaaaggaaccggagcccgcacagcaaaccaaggagcacgaaagccagcaccacgaacacgaacgcaaggccggagaacgaggaaaagaagagcgccggaaggagggagagagagaaaaaacaaggccaagaagcccac

SEQ ID NO: 4152 - DNA, 1062 bp, Zea mays
  Clone ID: MRT4577_103788C.1
attgggtacctcggggcccgcgcgtccgcgcatccatcaactgctaccgagttaagtatattctgagctcgtctgcagccaaaagcttccatttgcattgcgatgggggctctacctcgtggcctgctagctggcatctgcgccgtcttgttagcagcagtggttgcccttgcccatggtgcggaacaggaaacagcgtcaatggtggtcggcttggccaagtgcgccgactgcaccaggaagaacatgaaagctgatgcggcattcaacggccttcaagtggctgtcaagtgcaagaacgccgacggcgtcttcgagaccaaggccctcggtgaggttgacaagtccggcagcttcagcgttcccctcccggctgacctcctccgcgaggacggcgagctgaagcaagactgcttcgcgcagctccacagcgcggccaacaagccatgccccggacaggagccgtcttggatcgtccggccaaccaccgacaacgacgacgacgataagatgaagaataccttcgtcgcagtcgccggcaaggtgcactacccatcaaaggagtgcgcctctgctttcctcttctaccatttgttcaagaagcacctgttgcacaagaagcccatgttgatcatccctcacatccacaagaagcccatggtgccgatgtaccgccactcgcccgtgccggagtacaagccacctcacccgacgcccaccccgatctaccatgctgcagctgagcacaagacacagaaccccgagacggaccctgagaagttcaagaagctgctccccttcataaaaaagaaccccttctttcccaagttccccaagtttcctcccggcaaggaggagaacaaggcgtaaaaatatgagggcgagagaccaagtgtacccctttcctctgcatccactcttacgtagtgtctgttgcatcttgcatggaccgtcattacctcctgtttcttgacagtgtttgtcacctctcaccggccagggctcccactaatagaaataaaacttttgttctaagcaaaaaaaaaaaaaaaaaggccccta

SEQ ID NO: 4153 - DNA, 805 bp, Zea mays
  Clone ID: MRT4577_103789C.1
ccgctgtaaagcagcccctgcgccggcagttcgtaccggagcgcagccatgagggacagctcgtcccgctccaggcagtggaacctcccagcctcaaggtaccggatgaaatgcaggccgacacgaagcgtaccacatccgatttcaaggacctgctccgttggcgtcagcacggaggcgttagcgaggaactcgaagacgtcacggccaccggcccagggctcgccgtagttgctgtggtgctcttccacaaggagctcgccggggcacggcagcgcggtgtggttggttgcctcttcgtccggatagtgagagatcccatggtgtctgttgatgtcgaagagctgctgctctcgtgtgcgggggttgatgcccttgcgcaggcggtgccaggcgtcgtggccgccgccggcggcgaggaggagggagttggacgcgagctgggacttcagccaggcgacgtccgcgggggaggtggtgacgggcgcaggggaggcggtgatggtggtggtggtgacggtggtggtcgtgtgggtggcgggggacgagcaggcgcagaggtgcccggaggcagcggaggaggaggctgaggagggggagagcgaggggaggacgaggaagacgagcagcgcggcggaggacagcagcagaagcagcgccggcacggtgagcagccgcagccgcgacgaatgggaggcgctcgacggcagcgccatcggcggcggaaggggaggggcgactcggagtggatcgcgaggttgggatctcgtcttgtgcgatactacctggtctggtgcacaccgtc

SEQ ID NO: 4154 - DNA, 284 bp, Zea mays
  Clone ID: MRT4577_10378C.1
cttaaagattgaagtttgatgtgaagttcttttattgaattgcaggttaaaccatcttacttcctactgcttgaaatctaaatccagagagatttgtggctcaaggatatcttcaaataaaagttttattgctaaaatgtcagttaaaattatgcctaggtaggtgctgaagtaggagaggctttgacgtagcagagtgacttccagtgaattttgtgggtaccttgtgatgagtcttattatcagttacaaatggtcaaaacatgcctaagccttcagcctta

SEQ ID NO: 4155 - DNA, 329 bp, Zea mays
  Clone ID: MRT4577_103790C.1
ttgtacgcgcgcaagcgcagaccgcgagggggggggacacggaagacctgagggcgatcggagagcgacccggcaccgccacgctagggcgcgagccgagaagagcgcccggccgggagaccggacgattatggatccgcagcagagccgctaacggcggatacggcggacatggagcggaggcggaaccgagccgacagcaaccgggacagtaagagctagctgtcggagcggacggaggcgctacagacgctgcggtgcacctgtgccgaccaggcgcaacgcatgaagggccggagcgacaccgaccgcgacggccgcaccgactg

SEQ ID NO: 4156 - DNA, 195 bp, Zea mays
  Clone ID: MRT4577_103791C.1
gcttaagtcaaatacaagctggagaggagcataccggtacaggagaagcagattcaaaggagcaagccggaacctgctcagcgcagagcaaaagagacagaccacacatgcggagataagaaaaatccaccaaaagactagcgcataaaggaaggggagtaaaaaagagaacaggcaccaaccaacaaagggaag

SEQ ID NO: 4157 - DNA, 240 bp, Zea mays
  Clone ID: MRT4577_103792C.1
atggcatgccttaccatgggcttgagttatgacatgacatgatgtaagatgctctgacttatcagaagcccaccatttgctcacgtgccagacacgagaatggttaagctctaccatggagagaggcgctgactactactgcaacgcagaatatatcgtgcgccagacctcacatatcttgcgtagacgcgtgctcatgagccacttaactatggactgtgcgccgacaacgatggctca

SEQ ID NO: 4158 - DNA, 403 bp, Zea mays
  Clone ID: MRT4577_103793C.1
gctatgacggcacagtcgcacgctgtagcctcggaattcggctcgagcttgcagccgagcgaaggcggtcgtccgtcggccccttcgtatgcccccgccgccgacgccggcgccggcgccatcggagtaggaggagcgggcgacgagatagagcaggacgggatccagcctgcggttgtgttgcagttgcaggtgcctgcggcgatgcccctggtggcagtgaaggccgcgggcgtcgctgctgtcgaggagcgggagcctgtggtggaggtccacactacagaggtggcgccggtgccgccagacgaggtggacgaggactactcgatttcaaggtcgacctggacgccgcgtcggaggggcgaggagcccgaggtggccgcggatgtagagactgatgtgc

SEQ ID NO: 4159 - DNA, 2580 bp, Zea mays
  unsure (1)..(2580): unsure at all n locations
  Clone ID: MRT4577_103794C.1
atactcagcatggttgcggggacagtgcagataccatttgggagaggtcagtcgacttctctttatgccgatgtggtgatgttgattgtattgaggtctgtgatatcagggagtggctgccaaaatcaaaaatggaccataagctgtggaagcttgttcttttgctaggagaatcttatttggcacttggagaggcatacaagaatgatgggcagcttcagcgcacccttaaagttgttgaattagcttgtttggtatatgggtctatgcctggacatattgatggcgacgagttcatctcatccatgtccaacagttcattgagtcgagaagatcttgccctaaaaactaaacttgtactggacgaggcagactattgcaataacaaaagatgcttcagttatgaagtttcttcccaccaattgccaccaaattatttgttctgggcaaaggcatggatgcttgttggtgacgtctatgcagaatatcacagattgaatagtcatcaagcaaagttggcaccagaacagaagtctcatggcgaagttagaatgtcaaatgaagttgcattggaggtcaaacgccttaagagaaaactgggaaaggataagcagaattgtgacacatgctctttgataaactgtagctgccaaagtgacagggcaagtagtggcagcagtgcaagcagcagtagttctgaggcctctaaactttacagccgaaagaaaaacaaaaaatcacttggtaagaaccttcaacttcaatcacaatatagagaagccagcaagaaccccaatgcacaagaagctacacaaggttctgaaaataaacagcatgatgtgaatgatacttgtattgagaacaactcagtattaaatgatgatattggtcactacngtcaggccagggaaaatcagtcaagaaatgttgatggtgttcctgataaatctcaagcaagtgttcctactgtgagggatggtggtatcttcaagttccttggtggtccaaaaccaggagatgttgagtacaacttgtcttctgctattcactgctatggtgcagccaagggagcattgttcgcatttcctgtgcattcagtagaaacttccatggttcttaagaaaagaggctggggatttaatgaactgggccgttgtagacttgagaatagaaatctggttagcgccgagattgcttttgcggatgctattaaagcatttgaagaggtgtttgaccacacaaatgttatactgatcaactgtaacttaggtcatggtaggagagctttagcagaggaatgtgtatccaggattgatgaatttcagaaacatgatcttcctgaaggcacatatatgcaatcctttaagtcggccaagtcagaatattttcaagcaataaactactattccgcagctaagaggcaactgaagtatgtcaatactgaggccgataaagtactataccatgaggtttacacacagtatgcccatacctacctgaggcttggcttttggcaagggaaagcttcttaactgacagttatgaaggtggacttgtcaatgagtcatctaacagaacagctgtagagatttcagcgagtgatgcttttcgggaggctttgtctacgtatgaatcccttggtgaacatcgcaaacaggaagctgcttttggtcattttcagcttgcttgttatcagagggatctgtgcttaaggtttctggatttagttgacaaggaggttaaacagaaaaacgaggataaatatcgtcagaaaagtaagtggtatggttcactagctgagaagaactggcagaaggctttagaattttatgggccgaagacacatcctactatgtttcttaacatccttatggcgcagtctgccctttctattaatatttctaattccttccactcaaccgcgatgcttgacaccgctctgactcacttgttggaaggccggcatgtggttgaagcaaatgaagacaactccaacgatatggatctggacataaaaccgaagttctggtgccagctgcagagcctgctgaagaggatgctggcgggatccctgcctagcagcacgggcagagcagcctctgtcagccaagccagcactagcagcagaacagaaacttctaagctgaaagagatgtatcgtttgtcgctcaaatcttctaccctgggccagctgcatgcgttgtacaagctttgggtatcttaacacctttattttacaaatggttgctgctcatgttttatgtcgtcggcatctatatcttgaattacatagttcttatttggtgttcacggcacattttttttttgttttgatttccagccaacttttaaaacttaatattaagtgtaaccatggaatgtcatggacgggacacactagctactacagtctacaactgttttgtagacttatataaacagcaaataatggcattctatgtgaagacattgtattatatgtattgtatcatagagagccaatgccaaaaaaaaaaaaaaagtgtgccctgttatctgaatgtatgtgccctgcttcaccgggaatggataaatgtttgg

SEQ ID NO: 4160 - DNA, 292 bp, Zea mays
  Clone ID: MRT4577_103795C.1
ttttgttttcaattattcctcgacgacggaggggtggggtacattatggtacaaaccgaaaaccagagtgcgctcacatgcattcggacacctaaaggtcaccggcggcgcctccctcacttgccggggacgaagatggaggcgtaggcccaagcgttgttgttgacggggtcggcaatgtggtcagcgaggttctcgagcgggcccttaccggtgacgagggcctggacaaacaatccgaacatggagaacatggcgaggcggccgttcttgagctccttcagacgcgtgg

SEQ ID NO: 4161 - DNA, 307 bp, Zea mays
  Clone ID: MRT4577_103796C.1
gacacactagcatgcagcctgcgagctacgggctactggtagcatctacaacgtctgcgatctaactaaatgtccgcactgaaccgcggtgccttatttgcagcagcaaatgctactaccacttagccagctagctacagcaagccgtgcttccttcgggacacaacatcaggtgctgacggtctaccagcagtatgcggctaacctcgcttccctattacaactacaacaattggtgccctttgtcaaaattgatgtgacagacccaggagccttctaccaacagcacattattggtggtgccctc

SEQ ID NO: 4162 - DNA, 146 bp, Zea mays
  Clone ID: MRT4577_103797C.1
agctcaattatcttttaactggacctgtccaaattgatatccctaaaacacatctaaataataggaccgttggccatgatatacagcaggctgaaacgtatatcaatatcagatacatcacaatcaacacatgcttaacagcctat

SEQ ID NO: 4163 - DNA, 251 bp, Zea mays
  Clone ID: MRT4577_103798C.1
gaaatgcatacgtgtagacatctacgccacatcttgatgggttagtacataaacaggtctaaaatctctcattgtcaacttgtacatgtcgatcatggcgtaaactaatcgtataagggctatttcatcatgataaattatcccattaaaatatggccacttgttacttagcacaagtggctactgacacaagttaaatcacatatcttgctggcatctgcggatacacgcattatcgtacagcgctgata

SEQ ID NO: 4164 - DNA, 529 bp, Zea mays
  Clone ID: MRT4577_103799C.1
ccggccgggaccggcaccacaccacatcgaccggaaaaccagccaaccaaaccaagcagctcgatcatctcagctccgtccggagtcccggaccaggtgcgtgcctgccaaaagaacccgagccagcaaggaggaggagaagcgcacgcgcaaagcgcgatgggcagttgcttctcttccatgggcgaggacgcggccggctatggcgacgagaggagggtcaggagggtgtggcccagcgacgacgacggcggcgagtgggacgtcgacaacagggccgccatctacatcgccacgttccacagccaccagaagaacgaccagcatcagcagcagcaggcgccggccgccactgccgcccagtgacaagacttgttggcttttgcagcatggaatgaaaatccgcgcgagatgaagacagttctgtagtcgatcgtgtcttgtttttggtggatccaaatccaatcggtttatgcgtgactgccatcccttccacttttcaaaaaaaaaaaaaaaaaaaaaagcggcc

SEQ ID NO: 4165 - DNA, 299 bp, Zea mays
  Clone ID: MRT4577_10379C.1
aggctccggcccgtgcggggcttgccaccgtcggtgccgatctgcctctcgctcgcctccacgccaccggctgcgcttatgccagtacacaccccagggcgcctgaatatcctaaccctattccttgcgggcgacgtttgaagaaaggccgttttctatgccgctggtagcgtggactcctagcttctctgcacctacttcgatcgtctgtgtccatcatcacaacccctcgacagatgctacgggcgctctcctaatggatcacaagacctgagggcctacacaaactacactatcta

SEQ ID NO: 4166 - DNA, 2417 bp, Zea mays
  Clone ID: MRT4577_1037C.1
cgggccggggtagggaaacagcaagaaccaccaagcgaccaagcctgcaagtcaccaagggagcccgatctgagtcaagcgagtcttcccgtttcatcgcctggaaaaaggcgagaaaccccaaagcgaaggaacagcagcgcgagtgctagcagcagcagcgattccttcgccataccgttcgctgcgctcgctcactcggatcgaaaccccctagggttcgcatcgtcctcccgccaactcctacccctcccctctccctccgccgcgcgcgcgcgtggagctaccaaaccctaggacggcaaatccggtgcgatcgcccacggtggaggcctctcggccgccgagaggagccgctcggggctcggatcagggttccggtacttcgccggtgccgcctctgggtggtgggaccggtggatggtcatgggagccagcggctccaagcttgagaaggccctcggagaccagttcccggaaggccagcgctacttcggcctcgagaacttcggcaacacctgctactgcaacagtgtccttcaggtatgggtacatgcctctgaaactaacagctaatagatttgatgcttggttatgcttggcttgatactggtaagtgcggcagtgtagtgaaacggcctggttcggtttttttaggtagtaggtgtgtatatgctagatattataatgttctagcacttgttcgccagtttcgagatatgccacctattggtatgggctattcatatcgagcacaagtctttaggagtttggacctttttttcgaaaactctaatttgtttttttaattcctaatctgatctcgaagttttgaccttttggagtttaagttttgggaatagtcttgaatcctccctatgtaactatggtcaatgtttatctcaatctctagaaatctggccaaacagcaatatcgtgcatagggagcagcactgctagaccacaacactatcgggatgagaagttgcactgtcaggctgagaagtggcaccgtcgtgctgctccgagagatttcagatttggcttccttcagatatttgggtatctttttggtctgattgcttcctctagagactcttttagagaattcaatcaagagttgattgaggtgttcttaattttggatcattttttaggttttgatgtcttagaggtttacgtgaagttttggaagataagccaagattgtccaaagcaatatttttattggctctcattcatcccctttggtaacctaatctaatgattccaatatagttagaaaatcagcttatggctatatatattctacatattactattgtattgatcattattgtcattcactctactcccatttacctacaaaaaaggaaattttaatctagctgtagcttggacgaacaaaattgttggtgataagatctccactcaaaggtccgaattgatgaaatccatgtttaggtagttttgtaggatatggttgtcagccaaagccaaaggaaaaacactttgaagagcttagaagcatacaaacaagccaaaaataaatgaagacgaagatacgaaaagcctaagttttgttatataatgtagatatttatgaactttaacagtgttttgttaaaatatttataaattttatcagggtcaactaacctcgataaatacccctaaattagctcctggtgatgggtccttagcggaatcaaaggttgagatatctccaccgtaacgaatctttgtcaacgccctagtgtacaagctttacacctagtcagcgggcgacactgaatgaccctcatcttttttctttactttggtcaacttgattttctacgcctctttgtgtttcttagccaactcatccaccttcgacaaggaaaatataaggactcaatactagaagaataatgcaaaaataaatgaaaggtgaataaccaacttgttggggccttggtcttttaaaggtccttaaaaacacgtttaaccattggttgccaagtattataggagcttcggcactagaacaccttcgatgcaggacattagaggggcgacgaagctaactttgtcatagcgacacagggagacgatgcaaggaagagtcatcctgaatgctaaaagcaaaagacaatgttgcccttgcattatttgtaaatcatgtgtgtagtccttgtgggtgtaaatgtaatttcgtacgaagttgtacgattctctataaatagatgaatagtgtcctgcataaattaccttttggagggcaggacaattgttgtgtaatcttttctctaaagcaccttcgctcttcgctctaattcattctgtggaaccttcgaaagaggagaaatacgatattatatttatgcaattaagtcatgacttgtctggctaaaaaaaaaaaaaaaaaagcggcc

SEQ ID NO: 4167 - DNA, 908 bp, Zea mays
  Clone ID: MRT4577_103800C.1
tttttttttttttttttgtgttagttaattcattagtatagtacatgcgcctgcaggatcaaacgcatgcagagaagagtacaagggaagggccaacaacaaagagacaaaactggaaatctatcgaagaggaagcacaagcacagcacccctgcagggctagctagatagctacctaatctacgaacaactatactgtccctcgctctacacacaccaccagacaccaccatccagcacacacgcgtaggaaagccgaggtcgtcggtcgatcacgaggtgacccttgcgcgggtgcacggggaggagagggagtagtggccgccgtgggaccccccgccggcgtggacgcggtggtggtgcgaggacgacgacgagggcgcctgcacctcccgctcgacgagcgcgcgcaggcggaggaactcgtcggcggagcagggcaggcgcagcggccccgcggagtagtcgtagccgtaggcgtcgcgcgcggcctccagcaggcgccggaactgcgggtggtacaggtacgcgatggggatgacgaagcgctgctgggagccgtcgccctccgccgccccgacgcgcaccgccagccaccccttcttcaccttccccttcttctcctcgccgtgctgcagcatggctctgagtggtgatcctccggtcctccttgcaccaacggatcgatgctccggcttgccgtctctgtccctgtacgcacgctgagcccggcttctcggcttcctcagacctcagctcgcctcttcccaggctgtgcgcgaccggtgcaggtgcagcaagcgagcactagagcgccccaagcaagcaagcagaatgcctagtttttttttctttctttcttctaatccctcggtgtcccggccggcccgcctcgagcgccgcacagg

SEQ ID NO: 4168 - DNA, 241 bp, Zea mays
  unsure (1)..(241): unsure at all n locations
  Clone ID: MRT4577_103801C.1
attgctataatctgctaaagagttcggttgcagncgaggtacacaatttacacattantaagaaagagccattctgtggtcatgagtgagatttnttaatatccgttgatgccatctccagaaattttcagctgcacaggnnnctncttcagcaatgtgtcggttcacagtattntgtctntgttagtggagagaatagttacatagatgaaaaacctatagtcaaagagtagaaggaact

SEQ ID NO: 4169 - DNA, 670 bp, Zea mays
  unsure (1)..(670): unsure at all n locations
  Clone ID: MRT4577_103802C.1
ccggccgggaacacctctcgaccgactgtcaattgctatcgggacacaccatcatggcttctcagcgcattttccagctcggcctgcgacgcgcagctgcgccaggcctgagggtgcagcctgcaggacgcatggttcagcggagactcgcagcgaccgaacatgcttcccagtctcaagctgctgagatcctggccaagcagcgcatcaaccgtccagtctcgccccaccttgccatctacaggccccaaatcacctggattgcctcagggctcaaccgtatcactggtctcaccctgtctggctctctttacctcttcggaatcgcatacctcattgcgccctacactggatggcacctcgaaacacagtcaatggtcgcggccgttgctgcttggcccgccgtggtcaaggctggtgttaagactttcttcgcactccccttcttcttccattgcctcaatggtggtcagcatttggcttgggatatgggtgttggcttcaagaaccagcaggtcatccgtaccggctggggtggttgtgggattgacagccgtctcgaccctttactatgctttcctggcataaacgagctgcgactggnttagaccaaaattggttttgaaaagaaaggtcgattaaaaaaagtcgggatggttgggaatgcgaa

SEQ ID NO: 4170 - DNA, 236 bp, Zea mays
  Clone ID: MRT4577_103803C.1
gaatactccccttatccctgactgactgcgcgcgctctctgcgtcccgggggcgacaacactccttctccagttgtgccagggcatcgtcgaatcgcatttctcgtacccttatccggagatgagcacccataactaaaaggctcatggctgtggagggcagatgtccaaccctcgacggagccatttgcttctgcctgctggacaaggccagccgagatgacatctacaagtgga

SEQ ID NO: 4171 - DNA, 664 bp, Zea mays
  Clone ID: MRT4577_103804C.1
aacagcattgatgtctatttaacactacacacttctgtgacaatggacattctcaccactattattggagtcaccacatactacctatgacaaataaacactaactaccgactgaatcataatgtcactgaaggactaaaatgatgaaccgtatttagcatactcaccacgtgcccctagatcactatcaaagacacttgcttgatcaacatagcacccaccctagcaaggactacttgactacttgctctctaaaattcatgcagctcaataccacagcagcactcagctgcgatcatgcagttctcttcgcccccaactattgcatatttagcttaatcatgaagcaatgctgatatctattctatacctcattatataatggatttctaagtagactactaatgatataggatataatctgtgcaatgacgtatgtcctagacgtagaaagaacacttgcttactccatgatcacaatatcaatgagatacgcgtgtgtacgactatggatgctacaacaatacagatcatgactccttttggatgcactgcagctagatattgtagatatgtattgtctccgaaacaaaaatctgcaagtgacttaaaaaaattgtgaaaccaacatgtgcatgtactagctagtatctttaagctttca

SEQ ID NO: 4172 - DNA, 525 bp, Zea mays
  Clone ID: MRT4577_103805C.1
gcggtggataagctcctcaccaggggcagcatgctccagctcgtccatgtgagggttgaagcaaacaaagatgagggtgacgcagagataacacagctatttatatcatatagagggtattgtgctcgtaaagggatgcatctgaaggagttgatcttggatggcactgacatctccaaagcaataattgactatgccactagcaatgccatcacagacattgtcgtcggcgcatcaactaagaacacattcatcagaaggtttagaaatcccgatgtcccaacgtgtttgatgaagatggcgcctgattattgcacggtacatgtcatccacaaggcaaaagccatccaggtgaaggcagccaaagctcctgcaccctttgctactctccctccaaagcaacactcgcaaccaaacatagagtctgatgcttcaagggcctcaagaggagactggaagaagactcctcctacatcgtctccattggcaagtagaaattcagtggacccgttatctgcctatgca

SEQ ID NO: 4173 - DNA, 494 bp, Zea mays
  Clone ID: MRT4577_103806C.1
gggaaaaacagaattggattcttttgttaacggagtgagtacagtatactcatgtttttttttaaagaaaatgcagtgtcatgagcaaactaaaaactacatgcttgattgtgaggcttattcacatttggccagatattgttatgtgaacaaaatgtacatgccggtttgcatgcacattaccattttcatgtaactaatgtacgcatttgaacactctttacttaactaataaaatgtttgtgttctccaaacgttactacattgactttagtagatttgattccaggcttggagttacacatacatgatacgacttattatatttgaacgaactaaaataaaacaccttgtatgctttactaatttataaacagatcaccttgcggttgcaaaaaataagtagagcttatattcttaggtggactttggaggtgcttgattagaaaggacaaaaaagaatcgagtgctcttgtgtttttaccagcgatgta

SEQ ID NO: 4174 - DNA, 335 bp, Zea mays
  Clone ID: MRT4577_103807C.1
ttttggtttttttttgaaacgaatgtcacatcttcaatgtataatggagtagcgtacaaaataattaaatagttacatcatacaaagacaacgatccaacaacccaaagttgactgggagacgacctaaacctgtcacgaactcatcacaacatccttcacgcgcctcatcctgtggtagctgttcttgacttggagggatgtgagtatagcaagggtgaactcacatacgttcatctctcaacaagttgtggggaatcatgtgcatgaactctccaaaggtgggagctcatgtgaagtgtaaggcttaccaaaggagatggttaaagctgagca

SEQ ID NO: 4175 - DNA, 533 bp, Zea mays
  Clone ID: MRT4577_103808C.1
ttttttttttttttttcctcaacagaataaattatttcatcgtcgcacgaactgcttgccttcttgtacggggcttctgcctcgcgcgccacaggtgggatagcggacaccgagtgacccaccagctatagcatgcgtgctagtagtccgctactttagactggctgcagcgccgcactctagccctcctttttcctattcctattcattgcttgggctacaggtgacctctactttccgcagcgcagccccctaccgtgcccccttggtagcggaccgcttctctctcacgccagatcgagaggagcgctgttcaccccctcgcggctttcttttctccctttcgcgcgcgcatcggaaggagccggggacgacgagccggatggggagggcgccggctgctgcggtggaggagccggttgtggaggcgccggctgctgcggtggaggtgccggctgtggaggcgcaggccgaggagtccccgaaggtggcggaggagttgaatcagcagccctcgcctctgctgtcgcaac

SEQ ID NO: 4176 - DNA, 155 bp, Zea mays
  Clone ID: MRT4577_103809C.1
ggcatcatcaatcagggcattccaagcttggtgattaataaactacaggcgtcacatgaaaataaatgtgccaacctcgttctttaaacaggaatgcaacaaacattgcacccaaatgtgcgttatactcgtaacattccaaacattcaaccccc

SEQ ID NO: 4177 - DNA, 161 bp, Zea mays
  Clone ID: MRT4577_10380C.1
gaaaatacccccgtcgccatgccccaaattttttcatccgccttgagcaggcagccacacaagatgatcgtgatacttttatccttactgtacacgattgctcacgacacactcaacttcagtttccaacccgctgctgccatgcccacaccacgccccct

SEQ ID NO: 4178 - DNA, 367 bp, Zea mays
  Clone ID: MRT4577_103810C.1
cgacccacgcatccgaagacgcttgctgatctagctatgaatagctgatagctccttcaaagagcaggacagcattgatctgaccctagactacgcgaacactatagcactttctattattaagcaaattatagaggataagatcacccctatcaacgtcgatatctccaaggttgcttccaagtaccacctctacacccatgccgacgtcgaatcctagatctctaagctgtgaaacgctttcgtagctcgcgatatacatgtcatcaatcacctatagacgaaccttttacaaatcgtagacatcctatgatcttgattatacctgtcatcttactctgttgttaactcctcaatgacaatctat

SEQ ID NO: 4179 - DNA, 245 bp, Zea mays
  Clone ID: MRT4577_103811C.1
tggaaagtaagggagaagatgaggaacaacttagatagaagaacagtgagtgaatccttgctacaagatcccatcgcttctgcgcagtttggggcactgcagacagatgccgtaagtctgtccatgtggatgggaaagagttgtgaagcaaaggctatctgggaagacagcaggaagatttgagtgtactttatcagcccacaaggactgaagttcagatccaaaagttcacttgctaattatct

SEQ ID NO: 4180 - DNA, 404 bp, Zea mays
  Clone ID: MRT4577_103812C.1
tcgagaaaaaagatcattaagttcgcgcccttcctctcctacggattggtgtagccttaacaattctacaaagccttttttgagaacaggattcagaactgtgcgtcaaacatggtcaacaacacatagagggagaagatattttttgccagccagtataaattccacgccgacacaaacaagctgtactggaaattagatattcgatattatcccacatgaaattgccaccatctagaagcggtggaagaaagacaaggtcaagatgccatccatcacatttgtccagtgccccaagccttgaaagcccacctacctttctcagatgcgccatatcttggtgatgctgaagcatgctccgtcgtcacatatgatgcaaccttcactcacatcaccttgctttt

SEQ ID NO: 4181 - DNA, 363 bp, Zea mays
  Clone ID: MRT4577_103813C.1
agccgtcggactgatggggttggaattttattaaaatcaagccaccacaatacagaggaatgggtggattacttgacccccacaaacataaaaggccggacaatccaagttagaccgacttaacattggtgaaaaacagcccaaaaagcgcaaagtaaacaaaacaccatcaccagtccaagcctgtgaaaaaagggtcaaagaggcccaacacactgaaggggatgagggaaccacagaagaagcttctcaatggaacccttgaaaccctgtataggtgggttaagatggttaccctaattacgggacacggaacaagcaataaccggtcttgcacaccacaaacacggccaaaagctggct

SEQ ID NO: 4182 - DNA, 415 bp, Zea mays
  Clone ID: MRT4577_103814C.1
gggtatgagcaaggggaataattaatctgagtgcgggtaagtcacaaatttgaatttaaatggagatgttgaatctgaaattcaaaatgagaaaagaaaacagaaaagctaaaagaaaaaggaaaacagccgagttgggccaaaaccgtgggattcggcccactcgactctcacgtgcgcctgggcccatttcttgtcccggcccatctacctccatcatccgtgcagcccaactgcacccacgctggtgccatttacagacggggcccactggacagtccttctgcccagctcttgtcaacacacctcaggccacttccgctcgggcccgctttggcatatccatccttcttccttccaactgattaccgcgcatggcgggcatggccgtcgcggtcaccgtgtcgttttgact

SEQ ID NO: 4183 - DNA, 544 bp, Zea mays
  Clone ID: MRT4577_103815C.1
cccaccccaaaaaacccaaaaggggcctaaaagttacccgggaattttttttcccaccctgggggtgggcacccccaccaacccaattttttaaaacccccccccactcttttgtgggggtaaaggttccccaaaaaaaacctaaacccgcccctcctttttttttaaacccaagggggggaaactttcacaaaggggggttttggttccaaatttttttcccggggcccaccccagaggccgttatacctaaggttgggcccgaaattttacccgggaaattttttttggaggggaacccacaccgccctttttttttttttccggggcccccggtttgtaaagggaaaaccaaccaaggggcccctcctaacccttggccgaaaaaatggcttcttttttccaaaaaaaaagggggaaccctaaaaaaagggggggcccccccccggtttggaaaaaagaaaaaccttttggattggaaaccccctttattaaaaaaccctggaatttcaggggtttttctttaacgaggggttttttgaaa

SEQ ID NO: 4184 - DNA, 156 bp, Zea mays
  Clone ID: MRT4577_103816C.1
attcaagagagcaaaatggtgttttctcttctcttttcgacgaccaacgtgccaaagcacgtgtttgcgtttcttaagaggatttacaatgggcttttaatattaaacaagaggccggggccggtacagtatcaatacttatattgttgtgataca

SEQ ID NO: 4185 - DNA, 291 bp, Zea mays
  unsure (1)..(291): unsure at all n locations
  Clone ID: MRT4577_103817C.1
tccgacagatgcacgctttgacagcgctcgcggcagccgagcgacgcacgctgtagcaagcgagcaaagttatcgatcctgcgcctggtctactgtatggtcatagcatgcggggctgtgctgctggtnatgcctgctgttatcaggcactcagtggagatgtgcgtgcatgtgcacgtatatctacttattagatgccctctctggaatgccaactacacatatggcagctcgatttataggcgcgaagactacttactggtacatgcctccagatggcgctaccttact

SEQ ID NO: 4186 - DNA, 204 bp, Zea mays
  Clone ID: MRT4577_103818C.1
ctcgcgtcgaaacttcccgcctaatccccaatccggcaattccccctccacctcaaagctctccccttacctcacctaaatcctggcagatggctccggcgatgccgaagcagcgcgcggtgcatctccccgacaacgaggaggttgcgcgcctcctcctggagaagcaccggtcgatgctgtaaaaagacatcccagacaacc

SEQ ID NO: 4187 - DNA, 532 bp, Zea mays
  unsure (1)..(532): unsure at all n locations
  Clone ID: MRT4577_103819C.1
tttccaaaagctgcaccaggaacacaaacacaatcaagcactgctgaaacaattgcgagcgctcgttggtggtgtacagcaggaggccaaggacatatctttcttgactcagagcccggccgcgcaagcattgaatgtggcaggaaaccccgatcaacagttattgaccacaaacaccaaatttgcagtctcacaattacctgccctccaatctttactcgccgacctcagaccaaaactggaggcactcaaatcttcgcgtgggaatgttgcagtaaccagcgcaaaagaggaaattaaggaagagcggcgtggctacatcgaacaacggacacggtcacatctagagcgcaacggcatcaatccagcagaaaactctagcctgctttttgcaaaacgagtcgatgaagaggaggtccaggccctcgagaaggtcgcatcgatatttgaccagacttgaagacatgaaacgtttgcgatcatacacgcacgttcatgagcanactgatgtaccccgaactgcacgagccta

SEQ ID NO: 4188 - DNA, 260 bp, Zea mays
  Clone ID: MRT4577_10381C.1
cagcctgaactatctgaacctaattcacctgtctgccttgtttcaccatgtacaggctgttcaccaaacacaaccgaagaggacgacaaaagcaccataccatgttcagaaattaacactgacaagaacattgcaactaaaaatggtggttcaagcctgaggtcagatttggagccatgccttctgagttctgaacaagagtttatttccaaagaagtgcagtctagcaagcatgagaagagcaacatcacattccaaag

SEQ ID NO: 4189 - DNA, 525 bp, Zea mays
  Clone ID: MRT4577_103820C.1
aataataataccgacttgtctcaacaagattcaatttcctcaaaaagaatcagataaccgaatttaggcattagaaactaatacactttcttccagtttgtaccataattctagcgtagattgtgaacaacaattttagcgtagaaattggagcaaacagtctcaaacgccggcattcttgccactctccttgccgttgtcttgtgtgtgtcgcggggcccagaacctgagcctgagctcccggcgctcgagcatcttctccacctcctcgatcgggagacccttggtttccgagttgacgatccacggcaccgtgcccatgccgggggagaagaagatgatgtagagcgccaggcccagcagcgccagccagccgtaccggctcgggcacccgcgggtgtaccacagccggccctcgccgtggcacgcgtcgcgcaccgtgttgttggacaccaggcacgcgcccgggaggagcctgccggcgcccgacgcgcaaaagccgtactcgctcggccacgcgttcgg

SEQ ID NO: 4190 - DNA, 240 bp, Zea mays
  Clone ID: MRT4577_103821C.1
acgatcgatctcgtttcaaatccatgcatgctcgtttcctgcgtaccagctcatcttatccccaatggccttaacaatatgcggaatcatgggtttggctggatccggaggctggtggccatggtggccctgctgagtgacgatttcgagctcgtcgccttgaacgtcccctttatcaggaccgactacatgacctacatgttttagttcgacactgcgcactgacagttttgcaccatg

SEQ ID NO: 4191 - DNA, 681 bp, Zea mays
  Clone ID: MRT4577_103822C.1
gcgagtgcggcttctgcgcgtcgggcgccggcaggctcctcccgggcgcgtgcctggtgtccaacaacacggtgcgcgacgcgtgccacggcgagggccggctgtggtacacccgcgggtgcccgagccggtacggctggctggcgctgctgggcctggcgctctacatcttcttcttctcccccggcatgggcaccgtgccgtggatcgtcaactcggagatctacccgctgcggtaccccggcgtgtgtggcggcgcggcggccaccgccaactgggtgtccaacctggccgtggcgcagtcgttcctgtcgctgacggaggccatcgggacgtcgtggacgttcctcatcttcgggggcctgtccgtggccgcgctcgccttcgtgctcgtttgcgtgccggaaaccaagggtctcccgatcgaggaggtggagaaaatgctcgagcgccgggagctcaggctcaggttttgggccccgcgacacacccaagacaacggcaaggagagtggcaagaatgccggcgtttgagactgtttgctccaatttttacgctaaaattgttgttcccaatctacgctagaattatggtacaaactggaaggaaagtgtattagtttttaaaaaaaaaaaaaaaaaaaaaaaaaaaaaaaaaaactcgagaagggggcccggtacc

SEQ ID NO: 4192 - DNA, 1667 bp, Zea mays
  Clone ID: MRT4577_103823C.1
cttcttcctcctcctcctcttcttggtcttggagctggaccttcctcttcccctcgttgatcgttcgcggttgccgattcgccatcccctccaaatcaagacaagattgagtgggtcttgggcccctgtccctagctgcattgcgaattgaggcgccaatttgggagacgactgcattgatgaatgccggaggccacagcactcactgatttagggattcgatgtcacgggcacccggatgtcattgccgatcgcccttgtagtcggcattgccggtggcgccaccttgctcgcggtggcggccgtgctgctcgcgctctggtgcgctgcgcggatgagggcgcggcgtaaccgcaactccgacactggctcctccgacccctcgacgctagtggagtggggaaaaggggggcgcagctcgttggcaccggacctggagcatcaggttgcgaggcaattctcgctggaggacctggtgcaggccaccaagaacttcagcgacacgaacatcatcggcgcggggagcttcggattggtgtacatgggcctgcttctcgatggcactgttgtcgcgatcaagaggcgcgtgggggcagcgacgcaggtgtttgctgatgaggttaggttgctttcagagattcgtcaccgaaacattgtaactctcattggttactgtcaagaagggggtctacaaatgctggtgtatgagtacctgcccaatggcagtgtctgtggccatctgtatgataacaggaaaggctctgcaacacggcttgagttcaaacaaaggctctcaatagctattggggcagctaaaggtttgaatcatctgcacagtcttgatcctcctttgatacacaaggacttcaagacaaacaatgtgctggttgatgaaaatttcattgcaaaggtggctgatgctggacttgttaggttaattagaggatctgacgatgccggcccatcgcgtgggttcagtaacagtgtttaccaagatccagaggtacagtcgatgactcagttctctgaaagcagtgatgtttacagctttggagtttttcttttggagctaattactggcagggaagcagcttccttgatacctacagagtccagagaatatttggcacactggatggaagcgcatttcagttcaaatgaactgattgacccaagattagccggcaacttcactgcagaaggtatgaaggagcttgttggtctggccttccaatgcttgaacccatcatcaagacgccgaccgaggatgaggcttgttgcgactgaactagaccggattctagagacggagatgtccatgacaacgttcatgggcgacggaaccaccattgtcacgctcgggagtcaattgttctcgtcgtgaagcgacgttgggattgatttcatgtctgctatttgatgacatgatgattgtgtgtgagagcctaacaacagctattgtttctgccatgctgttcaggctctgcattgttatgaaatgccatgtatggtcatttttaagcttgtcatggttgataggtaggagtgagaagaaatagagctgtatgtatgtctcttttttcttctttttgttgcatgggagaagaattgtatgtaaatcttttagattgttaactatccttcaatgtatttgcagattgttcttc

SEQ ID NO: 4193 - DNA, 581 bp, Zea mays
  Clone ID: MRT4577_103824C.1
gcttgaccgcccgcaggtcgactctagaggatctgatttgtttcgatgagcgctcccttttttcggcaagatttgctggtatttcagcatacatactattaccctaacactttgtttgcttgttagtaataatattataattgatttgcttgtgttttgatgcacttaaaggtgatgagttaagaaagtggataagaattttatttctgtactttgtgtcataccttgcaatctgataggaccatgtcgatgtgttgcaagggaccattttcagcggcgccatggaaagaccattttcttgagacatggacctggatcatcgcatgtttttatacgatgttaaatatggtagaagtgtgtagtccatcgacctgtaacaattgttataaattgttagaatggtaaaagaacattcttatttgatgttaaagatgtagacactggaaaaatatagttgagaaactaagtcactataacaaataaagatgttgcagtttttaaatgcacatacctcagagaagccattatagaacttaacgtaagccctgtgaacatatgtatagatatatacccatatatat

SEQ ID NO: 4194 - DNA, 1306 bp, Zea mays
  unsure (1)..(1306): unsure at all n locations
  Clone ID: MRT4577_103825C.1
cttcacagtaacatgtccagttgagttttcagtgaaagcgacatttttttggtattttagtgttatggatttgtaatgctattgagtcttaaatctctgcagtcatggacgattttctttgctcatcctgtgataattttgcaacccattctgcatgcttatatgcagggtacagtcgatgactcagttctctgaaagcagtgatgtttacagctttggagtttttcttttggagcttattactggcagggaagcagcttccttgatacctacagagtccagagaatatttggcacactgggtaatttctactgacatgtagctgtaagttatctagaaaggaaagttatggagttctgcttaatctccagcaaaatatcattctggtgtttagtgtacctaactgtgaagtcaggccacacatttccaaaacttgaaaacagctagagcataaactgttttcatagttattaggagtgagaagtgtttgtcatgttgtaggatcacataaattcttattaggatatattattgaatactgaaagtccttgttgatgtttgataatggatacaactaattgtaccttagttgagacactttttaagaggaaaataacaatttgaaaaaagtgctgcaattctcgtgcataaggatatttcttttacgcgaaagggccactaccgtaaaggatatttcttttactcactgcttactgaaaaaacattttcttgtcacattgaatgatcgaaagatggaagcgcatttcagttcaaatgaactgattgacccaagattagccggcaacttcactgcagaaggtatgaaggagcttgttggtctggccttccaatgcttgaacccatcatcaagacgccgaccgaggatgaggcttgttgcgactgaactagaccggattctagagacggagatgtccatgacaacgttcatgggcgacggaaccaccattgtcacgctcgggagtcaattgttctcgtcgtgaagcgacgttgggattgatttcatgtctgctatttgatgacatgatgattgtgtgtgagagcctaacaacagctattgtttctgccatgctgttcaggctctgcattgttatgaaatgccatgtatggtcatttttaagcttgtcatggttgataggtaggagtgagaagaaatagagctgtatgtatgtctcttttttcttctttttgttgcatgggagaagaattgtatgtaaatcttttagattgttaactatccttcaatgtatttgcagattgttcttccaaaaaaggnnngagggcggcc

SEQ ID NO: 4195 - DNA, 810 bp, Zea mays
  unsure (1)..(810): unsure at all n locations
  Clone ID: MRT4577_103826C.1
gatcccctcccattcccccaaccccccgactcgagccctagccagtagcgactgttgcgccgccgctcgccgctccgtgcggctccaccgcctgctgctccgcgccgctgctgtatgctgcgcgccgctggctgttgcctgctgcgccacctcctgctgctccgcgccgctgctgcctgctgagccaccgcccgacgttgagaaggtcgtagctttggcggcagcgttgctacctccggccccggctaagggtgaataatggcgtcgcggcaggccgccggtctcaccgactacgaacgcctccgcgaggagaacatccgccgcaacgaggccatcctcgccaccctccgccgcaaggccgacgagctctcggccgccatcaagtcctcgtctaaacgaggacgaggacgcctcagtaatcagccccgcaagaagcccgccgccaagacaagccccggcgagctccgccgctccctccgactctcccaactccccccctcctactccccagacgccgagcccacgcccgggccccctccggtgccgcgcagcaccagcttctcctccttgctcgcgtcctccatcatcgagtccgcctcgcttgcgccacctgccaaggctcgggcggacggtttcgatgccgggaaggagctcgtgctgacgcctgcgaacgttcggaaggtggtgcccgacagngatacttggggttcgggtcctgccgctggtcgaccggaccgtggttgcggcggggaaacagttggggaatattgggttctgggttgtggacggcatggtggaagatgaggatga

SEQ ID NO: 4196 - DNA, 270 bp, Zea mays
  Clone ID: MRT4577_103827C.1
atgccgcgtacgtgctgaattcgtggggattctcacacctcactccgagctcgactttttgatgctcttcttcaccaaagccaaaaaggcatataaaaagacgatcaagcccgagctctctgagagtgaaggaagttttacaccctctggtttcttacttagagctcctaatcacatccctattgtaaccgaagtacaccagcaagggactatgcacgtgtgcctggtcgcggagtcatggcgtcgacaaggggtgcaaactataaggta

SEQ ID NO: 4197 - DNA, 121 bp, Zea mays
  unsure (1)..(121): unsure at all n locations
  Clone ID: MRT4577_103828C.1
gaaaaattgctcgagatgtaaatggcgccnccggagtaccagcagtacctcgtgcaggtgaccaaagttccaggctcttacaaaactgcaagttgataatagttttgcatgaactattggt

SEQ ID NO: 4198 - DNA, 533 bp, Zea mays
  Clone ID: MRT4577_103829C.1
actctgttgcatcaactgttggtgcaggtatgtaggtgcattacccacagcgagagggctagatgaaagcagatgttgctgctgttagaggcggcaggcttcaccatggctagctgactgagcgctggcagaaactgctgcacatgatgttgttgttggtatgcagctacgtttgccagagcaagcgggttggatgcaagcagctgctgtagcaagtaagcgacagggttcaccacatctagttggctcagtgctgttaggaactgtagttgctgatgcgctgcgatggttcgtatggttagatgtgccaaggattgttgatgcaattggttaattgcttgttgtcacgcactcgccgcatgcgcttgttagaacctgtaggcttgcacagctaggtgatgcaagcccattgaagaaactggcggggaggaaactgtgtatatatgctctaggagcatgcgagcattgcggaataatgaactcatttgttacgctcacaaaaagggcaagaagcgtcaagaagggctaatatc

SEQ ID NO: 4199 - DNA, 408 bp, Zea mays
  Clone ID: MRT4577_10382C.1
aatgttaaggacttatcattcaaaggtgagagaaaaaacagcttatacaccgggtgatgacaatgctacatgcaacataagggcacccttgttaccaagccaaccttctatacttaacgcttgcatccaacgcggcgttggacatatctttgctgccttcgatacatatacagctaaatcggatcactatacaccatcatggccgaacaatatatggagtcacgattatcacagctaaacagagtctactacttagatgctaggactgcggacacgagagataccacggaatcgtcgcctcactcgtagcaaacgttggagcacatgcctatcttgttgtatgagatctgcgcccacttatcgccccaatagccttagatgagccagtcaggcttgtccttcatgcga

SEQ ID NO: 4200 - DNA, 691 bp, Zea mays
  Clone ID: MRT4577_103830C.1
gaagacgaggtgcttgcctctgtcggatcactccccttttcgtctcttctctgtctttcctccgcaatcacagagcgcaagaggacagagagagatagtgaggggggagtacataggtgtagggatttgtgtgccccatgcctcacgcattgaatcgcgagccgggttggtgttggctgcgaatcgccggcggcgcttgggctgtgatattcacttgcaatggcatctgaaactgatgacacaagttaacatggtcagtttgacatctggtgcagactttgtggaggtcggcattcacgatgtatgccacatttgccttgatgcttcttggtgagtgacccttctgaacatcaacccgaatggatggttctgcacgtgattcaggacaatgcacctacccaatcccaactcggcatgcactcttatactgtatacttacatcgctgaatactctggtacatcacgatatactttcaacaggccgctatgacattgttctcccttgggagatgcatataacgataggtctgatgacacatgcctccactttttctgagtacctcaagaggatgggtgaaatatctctggaactgttgcctgtgctattgttattagcgtgcattgaagagaggaatttggtgtctatgaacaaaaacgagaggcaaaaactcatcttggagaggaagaatct

SEQ ID NO: 4201 - DNA, 262 bp, Zea mays
  Clone ID: MRT4577_103831C.1
acccataatcgtgatgcctactgccggaattatacaatccacatgtccgttacattgcagctctatctgtctgtatctcctgctcctgatcaggattaaacgaatccatctgcttactgaatcctctgacatcagacctcctagactttttacgacaggacgcactcatcttcatgacaattgtcatgatccataccaactagtcctacgatccacgcattggagcattcatgcaccagttggaaaatattatcctcttaca

SEQ ID NO: 4202 - DNA, 300 bp, Zea mays
  Clone ID: MRT4577_103832C.1
aatgggaatcccgtgttggagcgatcgaatcgcgttccgccgattcgactcgcgccatgtccgatttctcctctgctcttcactccgacgtggaagcgcacctcacagcagctgacgccgccaccgactccaaccttctccagatcgaagccgagctggacccccgcgtgtcggcgctcgaatcctcagtgcacgccctcgatctgtggtgtcctcgcgtggattcatcgatcgaggggctccacgcgtcggtggatttcatcagcaccgaagtgtccaagatggggattctatggaacc

SEQ ID NO: 4203 - DNA, 1325 bp, Zea mays
  Clone ID: MRT4577_103833C.1
cattgggtacctcgaggccggccggggtttagctcgtaattactgaacagatcagatctggagaaactgcgagagccggctgaagttgacgtcgctcctgttcaggccatcacgtcaagcaaccggtcacagatctatctgacaaaatggtgaagatctgctgcatcggtgctggctatgtcggtggcccaaccatggccgtcattgccctcaagtgcccagacattgaggtcgtcgtcgtcgacatctccaagccccgcattgaggcctggaacagtgacaccctgccgatctacgagcctggtctcgatgatgttgtgaagcagtgcaggggcaggaacctcttcttcagcactgatgttgagaagcacgtcgctgaggctgacattatctttgtctcggtgaacacccccaccaagacccgtgggcttggagctggcaaggctgccgacctcacctactgggagagcgctgcccgcatgattgccgatgtctccaagtctgacaagattgttgttgagaagtccactgtccctgtcaagaccgctgaggctattgagaagatcttgacccacaacagcaagggcatcaactaccagatcctttccaacccagagttccttgcggagggtactgccattgaggacctgttcaagcctgacagagtgctcatcggtggccgggagacccctgagggcaggaaggccgtccaggctctcaaggatgtgtacgctcactgggttcccgaggacaggatcctcaccaccaacctgtggtctgctgagctctccaagctcgctgccaacgcgttcctggcacagaggatctcctctgtgaacgccatctccgccctctgcgaggccaccggcgcgaatgtgactgaggtggcttacgccgtgggcaaggacacgaggattggccccaagttcctgaacgccagtgttgggttcggtgggtcttgcttccagaaggacatcctgaacctggtgtacatctgcgagtgcaatggcctgcccgaggtggccaactactggaagcaggtgatcaagatcaacgactaccagaagagccggttcgtgaaccgcgtcgtgtcgtccatgttcaacaccgttgccggcaagaagatcgccgtcctcggcttcgccttcaagaaggacaccggcgacaccagggagaccccggccatcgatgtctgcaagggctgctagtattccctgctgtttggtgttttcgtatcggaggacgtctgtagatgtacaattcctcaggccccttgtgttcggcttgaggaagtttccgttgtaccctggacctgctatagccgg

SEQ ID NO: 4204 - DNA, 1691 bp, Zea mays
  Clone ID: MRT4577_103834C.1
actgaacagatcagatctggagaaactgcgagagccggctgaagttgacgtcgctcctgttcaggccatcacgtcaagcaaccggtcacagatctatctgacaaaatggtgaagatctgctgcatcggtgctggctatgtcggtggcccaaccatggccgtcattgccctcaagtgcccagacattgaggtcgtcgtcgttgacatctccaagccccgcattgaggcctggaacagtgacaccctgccaatctacgagcctggtctcgatgatgttgtgaagcagtgcaggggcaggaacctcttcttcagcactgatgttgagaagcacgtcgctgaggctgacattatctttgtctcggtgaacacccccaccaagacccgtgggcttggagctggcaaggctgccgacctcacctactgggagagcgctgcccgcatgattgcggatgtctccaagtctgacaagattgttgttgagaagtccactgtccctgtcaagaccgctgaggctattgagaagatcttgacccacaacagcaagggcatcaactaccagatcctcaccaccaacctgtggtctgctgagctctccaagctcgctgccaacgcgttcctggcacagaggatctcctctgtgaacgccatctccgccctctgcgaggccaccggcgcgaatgtgactgaggtggcttacgccgtgggcaaggacacgaggattggccccaagttcctgaacgccagtgttgggttcggtgggtcttgcttccagaaggacatcctgaacctggtgtacatctgcgagtgcaatggcctgcccgaggtggccaactactggaagcaggtgatcaagatcaacgactaccagaagagccggttcgtgaaccgcgtcgtgtcgtccatgttcaacaccgttgccggcaagaagatcgccgtcctcggcttcgccttcaagaaggacaccggcgacaccagggagaccccggccatcgatgtctgcaagggcctgctgggtgacaaggcccagatcagcatctacgacccccaggtgacggaggaccagatccagcgggacctagccatgaacaagttcgactgggaccacccgatgcacctgcagccgacgagcccgacggccgtgaagcaggtgagctgcgtgtgggacgcgtacgaggccaccaagggcgcccacgggctgtgcatcctgaccgagtgggacgagttcaagaccctggactaccagaagatcttcgacaacatgcagaagcccgccttcgtcttcgacggccgcaacatcgtcgactccgagaagctgagggagatcggcttcatcgtctactccatcggcaagccgctcgacgcctggctcaaggacatgcccgcggtcgcctaatcccacccccctcacccatggattggattccgggaaggaagaggagagaagctggttgaccgttctttattacagtttgtttttgcaggctacgctaccgattttctcttgtgtcaggcataaaaaaaggttggacgggctgctagtattccctgctgtttggtgttttcgtatcggaggacgtctgtagatgtacaattcctcaggccccttgtgttcggcttgaggaagtttccgttgtaccctggacctgctatagccggttgattcttcaattgtattcctaaaagttactacac

SEQ ID NO: 4205 - DNA, 261 bp, Zea mays
  Clone ID: MRT4577_103835C.1
cctaggctggcctaactatcaggggaacatttggcaggacggctcagtgcactggaatctattggtggtggacctgatcctggagaactttcagtgttctgccgcatcaccctgagtgctcgacgaaaaggactgctgccgaatgagcctcctaactctaactgctcacgctccatgtttcagtgccacgggctcagtttttggcagcacggccaccggtccatgtgtaggcgcactccttgaagaaatttgacggctgtc

SEQ ID NO: 4206 - DNA, 409 bp, Zea mays
  Clone ID: MRT4577_103836C.1
ttttttttttttttttttttttttttttttttttgtgtgtttttttttttttttttttttttttttttttttttttttttttttttttaaaacccccttgacttccaattttacaggcgtttttgttttaacccaaagggaaccatgggaatttgttttcttgactggaaaagagtttttccacagtttttacaaccatgggttggctgaaaaaaccccaaggggggtttcaaaaattggaacctggccttcctttgggaccttttttaaaggtcccccccccggggggggcgactggcttacaacacaatttggagctacaaaacccttgtatatggtcgggggggttttttcttgacgttttaaaaggaggtatttttggcttccgccctcggggtttttttgggtt

SEQ ID NO: 4207 - DNA, 842 bp, Zea mays
  unsure (1)..(842): unsure at all n locations
  Clone ID: MRT4577_103837C.1
cggccgggccgtttagctcgtaattactgaacagatcagaatctggagaaactgcgagagccggctgaagttgacgtcgctcctgttcaggccatcacgtcaagcaaccggtcacagatctatccgacaagatggtgaagatctgctgcatcggtgctggctatgtcggtggcccaaccatggctgtcattgccctaaagtgcccagacattgaggttgtcgttgttgacatctccaagccccgcattgaggcatggaacagcgacaccctcccgatctacgagcccggcctcgatgatgttgtgaagcagtgcaggggcaggaacctcttcttcagcactgatgttgagaagcacgtcgctgaggctgacatcatcttcgtctcggtgaacacccccaccaagacccgtgggcttggagctggcaaggctgccgacctcacctactgggagagcgctgctcgtatgatcgccgatgtctccaagtctgacaagatcgttgtcgagaagtccaccgtccctgtcaagaccgctgaggctattgagaagatcttgacccacaacagcaagggcatcaactaccagatcctttccaacccggagttccttgcagagggcactgctattgaggacctgttcaagcctgacagagtgctcatcggtggccgngagacccccgagggcaggaaagccgtccaggctctcaaggatgtgtatgctcactgngttcccgaggacaggatcctcaccaccaacctgtggtccgctgagctctccaagctcgccgncaatgcgntcttgggcacagagatctcctctgtcatgccatctccgctctctgcg

SEQ ID NO: 4208 - DNA, 397 bp, Zea mays
  unsure (1)..(397): unsure at all n locations
  Clone ID: MRT4577_103838C.1
tttctccacatggtctcctcacactaaggacgacatatactcatgaatgagtacaggctgctgcttttactgggtcatgaagtgcaccttcctgggtgaaccattggaaagctgacaactgacctgaacggcttgactggatcaaaatgagagtactaagcgcattggcggatgcttgtcgctattgatgaccaacctgtgtgcttactttacgtgcctgataccatcccatcaatggattgactaangctggcacagacgatctcatacttatacattaccaggagtcattctgctaccaactggctttggagcttctagtgacagctcaatgtccactcgatgatgcatacttgatgaacagtgaacctcgcattctgatgatatatcttgctct

SEQ ID NO: 4209 - DNA, 171 bp, Zea mays
  Clone ID: MRT4577_103839C.1
aatttcagggtcgacccacgcgttcggtctactgtcctcctcaacgttgtcctagatggaagtcttctattatgggttaatcgtatggccactgttatggtcggacgtggggtttctttcattatggtagccggcataacgctaccgttcctctgtttatatttactatcc

SEQ ID NO: 4210 - DNA, 513 bp, Zea mays
  unsure (1)..(513): unsure at all n locations
  Clone ID: MRT4577_10383C.1
attccgtcagccaccgatgctgcattccccggctcgctgtctctgaatcgcgggcccgcggtgccagtccatcctcttcccacgcgcgtccgactccgtggagctcggagcaccagcgcgagatgcgggagccgttgctggcactcggaaccgaccttgggaggctataaagaaatgggccaaggaccagcgcccttcttcccctcctaacctagccgtcgttagcaccaagggtgaggagaagaagtgtgtcggccgccgctgctgtggtattcgactgggcaccgtctcgggatcgaaattctgcccgggaggtgggcgccgcctcgtggaaatggnttccggcaacaatacggcgcgccccgcagtgaaactgaaggaatntctcgccgggggtagcgggccgccccgaaatcacgtattacccggggcaggcttccgcgcggagaatttttaacgaaccaangacccgagagccaagtgggcagcaggaagaagatggtgaggcagaag

SEQ ID NO: 4211 - DNA, 367 bp, Zea mays
  Clone ID: MRT4577_103840C.1
tgtcaagctaggctcggctcggttcttcagcgagctccgaaaatgctgctcggctcgggctcggctcaagttggcttgcgagccaaactgtacacagcgatgcaggcaacccaagttcatctctgtaaaagcagaaccacaacaatcaacactcaacagtctgcaaaagcataaccacaagagaatagaatagtagtacactaccgaaattccaaatttacaagaacaatcgttactttttgccttgccttcctttatgttcatgttgtgtcgctagctctgcgagctgaaccacatggcaccagttgacatactttcacctttaccttgccatcataagaaggccgagccaccgagcacgggaagg

SEQ ID NO: 4212 - DNA, 2301 bp, Zea mays
  Clone ID: MRT4577_103841C.1
attaatttgttctcgttatattatcatagagagacagaaacaatactgaattataaatgtaccttcggcttgatagaaggcaaaagtacaagcgtgacgcacaagtgaatacaagtcaatgtgaacagtacgggggtactgttcatctatttataggcacaggacgcagcctgtgtaaaattacattcatgcccctcatattcactattgacttaagaacaaactgtcgaggactagatagccttttcctccttaagtcggttcctctttccgttactgagccgaagctttcacgcgcgcaccttctacactggttcaatccttcgttccaatcctgctttccattccgtatatgcttttaacccgagaccgaaggtacctgttcatatgttacacttggaaaacattgttaaatcatgtttttaaggacattcggaggacgaaggcccccaacactatcctcgcattcctaaacgcgcttccctactttcggtacccctaggcaaaccaccatattttgatggtaaatattattgtatgtggagtgataaaatgaggcaccatctaacctcactccacgaaagcatttgggatattgttgagtttggagcgcaggcaccacaggtgggcgacaaagactacgactcggatgaggccacccaaattaggcattttaattcccaagcaacttctatactcctcgcttccttgtgtcgagaggagtataataaggtgcaagggttgaaaaatgccaaagaaagttgggacgtcctcaaaacggcgcacgaaggggacgaggtgaccaagatcaccaaacgcgagacgatcgagggagagctcgatcgattcgtcctcaacaaaggagaggaaccacaagcaatgtacaaccggctcagaacaatagtcaaccaagtgcggaacctcaggagcaccaagtgggatgaccataagatggtcaaggttattcttagatctcttgtttttcgtaatcccactcaagtgcaactaatccgtggagaccctagatacaaacagatgtctctagaggaggtaattggcaagtttgtgagctttgaacttatgatcaaagactccaaacatattgtcaacttgaagcaaggtgccacctccacacccgaggtgcaacccgttgcattcaaagcaatagaagagaagaaggaagagtctacaccaagtagactcctaatcgatgcctccaagctcgacaacgaggagatggctcttatcattaagagctttcgacaaatcctcaaacaaaggaaggggaaggactacaagccccgttccaagagagtgtgctacaggtgtggtaagttcggtcacttcacagctaaatgtccatatataagtgacagggatagggacgacgacaagaaggggaagaaaaagatggaaaagaagaagtattacaagaagaagggtggcgaggcgcacatgggacaggaatgggactccgacgagagctccaccgacgaggacgccaccaacatcgccatcaacaaaggtctcctcttccccaacgtcggccacaaatgcctaatggctaaggatggcatcaagaagaagctacattctagagataccccaaaatatactacattcgatgatgagggtagctctagtgaaaatgaagatgatttaacctctctttttgccaaccttactaaagatcaaaataagaaaataaatgaattgatagaatccattaacgagaaggatgatctcttagaaatccaagaggacttgctcgttaaggaaaataagaaatttgttaaattgaaaaatgcttatgctctagaggtagaaaaatgtgaaaatttatctaaagagcttaacatgtgcaatgattcaatttcttgtcttagaattgagaatgacaatttaactgctaagtttgaagaattgaatgtttgcaaaccctctacatctactgttgagcatgtcactatttgtactagatgtaaaaatgataatattgaagctattgatgatcaccttgctataattaaagaacaaaatgatcacatagctaaattaaatgctaaaattgttgagcatgaattagaaaatgaaaaatttaaatttgttcgaagcatgctttataatgggagacgtcctggcattaaggatggtattggtttccaacgagggagccaaagcaacaccaaacttaatgcccctaagaacaaactctctaattttgttaagggtaaggctcccatggttcaggatagagagggttacattttatatcctgaaaactatcctgagcataagtga

SEQ ID NO: 4213 - DNA, 160 bp, Zea mays
  unsure (1)..(160): unsure at all n locations
  Clone ID: MRT4577_103842C.1
acacacagnncaatnccgacacaagncacttttcgtacgtcanncacgggcgcgtgcgcagcagagcacaccnnnagcgtcggcacccaatggggcttacgtgaccaggagnggtggactnnnctgctcnnggaggaggtnngaggtcggtnnggccccg

SEQ ID NO: 4214 - DNA, 417 bp, Zea mays
  Clone ID: MRT4577_103843C.1
ccccccaatcagttttgccgcattaaaacctgaattttttttttgcccattggccgaaaaaaaaaaattgtttctacaggggctgggcgggttgccaaccttaatttacagttacccaatacccccccttttgtccatgaaaaccctcaaattttccccccaaaaaaaatgggctggaaacaaaagtcccgatgctgtttccttataaacaaacttcctaggagttgggttgggtaacctttcccccccctttttaaggggggggtgccctcaatttttttgggaaccgaaaaaacccgccccgcaactttggtgcctttgacatcggtttaaggaaaatcatgttcactgggccaccttcttttggtgaattcccatgggacccccggaaaaaaggcaccttttcccggggggggg

SEQ ID NO: 4215 - DNA, 602 bp, Zea mays
  Clone ID: MRT4577_103844C.1
gaaactgcaccagtgcacaccagtgcgagtgtgtgacacgccaccatgaggtctctgcaggctgtgctcgtggcggtcctcgtcctgctcgccgtcgccgcgacgacggacgctgcctgggcgccgataccggaccgcgacctgaacggcatggtggtgcagcaggcgggccggttcgccgtgctcgtgcatgacatcacgcgccggacgaccctggtgttcgtcaaggtggagcgcggcgagatggagcggccggcgggcggcggcctcggtaccaactaccggctcgtggtgaccgcggcgagggcgcccggcgggagcaggggccggtacgagtgcgtcgtgtggggcgtgcccggctcgcgcaccagcacctggaagctcctcggcttcaaggcgctctagccacatgcatggccaccgagcactcgtacgtgtgagtgtgacggtccgcggcaaagccgcgcgcgtactccgctgaataatctacgttacccaggcatatagtatgtgcatgggttttttaagtactagtacacgtcgtctaatttgttacgcgagtaaggcacggcaaatacctgtctgcgtgcagttcgcacaca

SEQ ID NO: 4216 - DNA, 896 bp, Zea mays
  Clone ID: MRT4577_103845C.1
acttcctctcttgatggtcatcgggggtcctcggtcggcggcccgttgccttcgccagtgtttaccccggccaagcccgcattgccaccttgtcgggcgttgctggaggtatgccgtctccttccctgcctcttcgtgcctgtatttgcttgtcaagctgcagtctcaagtgctgtggggatgctgctgctgcccccggttcgtctgagggcccaaggacttgtctctcctggttagtcccctttcgcctctgcagcgccccgaattttggtcgacatgaagaaacggggtctctctcttaaacaatgcatctcgaaggctaatcaattgatattgtctcttcaaaactgcaatcagaattgacaaatttggaatcgcgacatgattgtcctcacatgaatggcactcttagcctaggtctttcctcagcgagagcagcagttgttcttcctctcaaaatggacaaaggtggacctcggactgcactttttaggctatgcaagagtttacagtggccaattccagaatttgaatttatggaacaaaggtttaggactcctattgttctggatggggttacaactacaaacttcaatagcttcgtttcaactatcaccttgcacatacctgatgtgacggtcattacacttcaaggtgagccccggactgacaagaagaggtctcaagactcagcgtctctgctaatgcttaagaaattcgaagaactcggagtctgcatatgcgagacgcagccaagcaacatggataataataataatgccagttaatggacaacactgattaatgttggggttactatctccctcccaatgtgatttctgttgaaaatgtctgtgagacactcgatactacgtaaagtattaatttgctggtcc

SEQ ID NO: 4217 - DNA, 349 bp, Zea mays
  Clone ID: MRT4577_103846C.1
gcatgctcccgtccgtacaggcatgttaattctgctcgtggtgtgctggcttcttttcccctccggttcggtttcggttccaagaggacctctgtagatcgctttcttggatggaccgatctcgatggcatctttggatagtgaatcccgatgcttcgttgacagactctccttgtccactgactaccagctgctccacaatcgccttaagtacctacggggaggtcctaaagtacatgatcacactagatcacgagacgcagaggtcccgcggcttctgcttcctaaccttctccactgtggagacgatgcggaacgccatcgaaggcatgaacggcaaggagctgga

SEQ ID NO: 4218 - DNA, 460 bp, Zea mays
  Clone ID: MRT4577_103847C.1
gcctcccaaccatttttttaacttccaaaggtataactgaaaccatttgtaaaaaaaaggggataaaaaaggaaacccctcaaaaaagccttgccccaaaaaataaaaaaagtttggtttttcccaaatacaaaattataaatttctcccccctttaaattaatggggcccccccttttaatacaaccccccgtttgggccttccacaggcgccacccattaagaccaaaaccctttaaaaacattaaaaccccgccccgtgttaatcaaactaaacaggctaatttccactaggggagtacccggaaaaaccaaaaccccacccttttaaaatggggcgccccctgtttgtcccccacaaaaaacccaaatgggtaccaacaaaggggcatgggaacaattttggggatatacccctaaaaaaaagaataagccaaacccgcgtttaaaaaacaaaggg

SEQ ID NO: 4219 - DNA, 317 bp, Zea mays
  Clone ID: MRT4577_103848C.1
caagccacgactggcttgggctctccggccgtggcggacgacgcttctcctcgctgtgattgggtggacaaacccagccagaattatcgtgaatccgagctcgtttcggccaaaagaaaagccgcccgctcttttgtgtctgcacgagttaggtattatagctatgctgccgacgcttaatccaggctttcccgtctctcctcttctgtcgaacgagacagaccgggttatgtagcctgccttgctttcggcaagagaggaagaggcggatgagatcagggcaatgggcgaggctaacgcgcttggccagcctgacg

SEQ ID NO: 4220 - DNA, 751 bp, Zea mays
  Clone ID: MRT4577_103849C.1
accgtccgaaatcccggtcgaccagcctccgtagcttcattcatggctccactccaatcatgcgccggagacgggacacgcttcaacggaggagcagccgcagcccaaggcatcctggaacggatgcacaagtacctcctcctgcttgccatcctcgccgccacggtcacctacaacgctggcctgagcccccccggcggagtctgggctgacgacgccgatggccacctcgccggcgaccccgtgctgcaggctcactacgccgcgcggtacaatgtgttcttctactgcaatgcaacggcgttcgcggcgtcgctggtgatcatcatgctgctgctgagcagcaccttcagcttccacggataccgcgtccgcgcgctgcaggcggccatggtgctggacctactggggctcatgggcgccttcgtggcggggagctgccggaaggtgaggacgtcggcgtacgtcgtggcgctcgccgccgccagcgtcgcgtacctcgtcgcgcacctgctgctgcacttctgggtccggagcaaccgctgcccgtccacccgccgggaggtctcggagctgctcaacctgcaccgtctgtgccactgctgctgttgctgtggccggagggacgatggggctgccgcgcaagatgcacccagagggacacgcgcacgcgtgtgattttttatcaaggttgtggtccggtgtttgtaaggtgtgcgagtgaaatatgccatgagacgacgtttgctcc

SEQ ID NO: 4221 - DNA, 265 bp, Zea mays
  unsure (1)..(265): unsure at all n locations
  Clone ID: MRT4577_10384C.1
gaaccatattttccatgaacaacaccaccagggcgcgcaaacacccttctttttcatatnaacacaacaactactcacataacaccttctcaagaccacatccacatcacacatcaaacacctctacaaactaccatcctacaaaaaatataatactctctgacatctttaccgacaaaaaatcaaaaaatattctttttttcacttacaacactcactcacacttccccctataacaaaaactaacacctaattacctttctac

SEQ ID NO: 4222 - DNA, 165 bp, Zea mays
  Clone ID: MRT4577_103850C.1
gttatttgtagggctaagaggaagatcattgtaagagctattaatgttgtctaaatgagctttgtgaacaaagaagttgagggttggacgatagaactgtttgtggaggataatttggtgcagattgagatcgattagaaaaatgtagtaggagatgattgatat

SEQ ID NO: 4223 - DNA, 403 bp, Zea mays
  Clone ID: MRT4577_103851C.1
aaccatctactggaagaagaagctcataatgttgccctattataagcactccccacatactccgtacataatacactcgacgtatgcatctatatacacgtgacaacgcatgcagctaactgctgcgtccggtcggcaatgaaagttgcaaggtcgatcgtctgatcagaggcagctcggcggcagcacgaggccgagcgcggtcccctgcacgttccggcagtaggacttggcggcggcccggttctggtacgtcagcgccacgtcctgcaggctgatgccgctgcaggggtagctccggctgcagtcgaagttgacggccaccggcgtggccgacgagccccggatgcccacgtaccgcacgtcgctgatcctgatgctggagctccggccggcgcggggc

SEQ ID NO: 4224 - DNA, 218 bp, Zea mays
  Clone ID: MRT4577_103852C.1
agcggccgtcttggtggtccttgaggtatgcggctactgaggccgggacggatactttgtggtggtctgcaccaccacgcaaggggagcgcaccatgcccatcacgccgggaagtcggtggttaacacagttctgcacacgtttatgggagatgtccacccgcatgatgaacacggtgccgattaactgctgtaccgctttcggtacgtgcgtaccca

SEQ ID NO: 4225 - DNA, 274 bp, Zea mays
  Clone ID: MRT4577_103853C.1
gtgggagggggggcgggggggtttatacagaatacatggggggggtgatttattcggtgcagctcgagatccgtatactgcgtgcgtgtttggcgagaagaggcgagactgcgcttcaactttggtcttccggcctctctcgttcatcacggactggtgggtggggggggcggttgccgagaggaatgtggtcgttgttctacttatctgtaggcatctggggccgaggtggtgggcttggcctctgggccgtgcggttcgccacgtcggggcc

SEQ ID NO: 4226 - DNA, 313 bp, Zea mays
  Clone ID: MRT4577_103854C.1
atcggtaggggctggcctttgggattcgagaacgagtctttccacgggttgcaagaaatcaccaagaagggaggggtgttttaaattgcgattccccatcttttaacttccttcctggacaatccaaaacagaactttatcctccttagttaatgaccacgtgagtcccgctttccattcccgttcctttgatccttgcaagcaagcttctcctttattttaatttgaggtggagggtttgagcttcagaaagagggggatggattcgaactgaaatcagtcgagacgccggggcgagtcgattatttccaac

SEQ ID NO: 4227 - DNA, 370 bp, Zea mays
  unsure (1)..(370): unsure at all n locations
  Clone ID: MRT4577_103855C.1
gccgggctcggatccttctcggcgctctcccaggaagactacagccagggtccaattttgtgaaaggatgcttttgctccccttgccttttcggatcaaaatcttggtgttgactgctaatgcagttttggattgttggtagggtccaattttgtgaaaggaatgttgaactgttgatgagtgatgaggggcgatgatgctcagccttttccaaaatgcatggcactgagcaatgaaggctgctacaagtgtctactttgagctaaccctctccccacatgaagcctattttaatcacccctttttggtttgtgcctgcgcctaggatgcncattcccatatcgacccccaacactgtcccacttacatt

SEQ ID NO: 4228 - DNA, 142 bp, Zea mays
  Clone ID: MRT4577_103856C.1
acatagcgagaccgggaagttagtaaagtggataatagcctgcgcggtagccctaatccgagctgaagctatacgtcacagttcaatgtgcggttagcagctactactgcgcccgcatttccagttccgcgacaatgctgta

SEQ ID NO: 4229 - DNA, 220 bp, Zea mays
  Clone ID: MRT4577_103857C.1
tatggatcatctgttgaacggagccttaactgaggcaaaagcaaatgatctcaacctcgtgctagtgtgtacctggcctactccccatgcttactgtcatgatcctctagctgctcgagctgatagattatggcacctaattttaatcggacatctgcatcgcatctgggattattgtactattactttggcttattacaaccaacgcataactggtact

SEQ ID NO: 4230 - DNA, 1064 bp, Zea mays
  unsure (1)..(1064): unsure at all n locations
  Clone ID: MRT4577_103858C.1
gtagcctgacaaagtgcaccgaagtttcaaatgcagacttgtctaacgtggcatcgtacactgcaccagacatgtgtcccaaaaaaaaaaaagttgttttcggggatgttgggctcttatactcttgacagtagtagaaaactgatgtatactcttcacacgaagttcgattgccctcatcagagaacaatagtagcccatcaggttgcacagccacagactagtcagtcgttgtatatatcttgactaagcgtagaaaactgagatgtggggatcactttcagagtcgccataaaaatcccggtagtagcaagtttttcttcattcttgagtattggccatagagacgaccaactcattgtctttcccaccatgcatcctgctgtaaagctcctcatcctccacatcttggccgccgcgttcctgacatccaattctctgcagcttcggcggccaaccggagatggagatgcagcttctgcaagctgcataccgcacgaacgggacgccttgctggcctttaagcatggcataagcagtgaccctatgggcctccttgcctcttggcatcaaaagggctacggagactgctgccggtggagaggtgtccgctgcagcaaccggaccggccatgttctcaagcttcgacttcgtaatgtccatggccggtaccatctggacagcaacttgacaccctctacgcagagtacccgtctatgtacagtggcaatagtggtctatgtgggcatacgattgggaagatctgttcaggaggcaattcatcaaggcaacatgtccatgaacatggttttgagctagtgtcattttattttggacttagtttgggatttattttgggtctttggcttgtgttttgtgtcctgttgttcaagaaagcatggagggttgcttattgctgcctcatcgacaagatatacgatcagatgtatcatgcacatgcttggtaaggaagggattctacgttgcggtgatatggatacatgacacgtcgataccctgatatagcaatttctcanaaaaaataggatgcatgaatatattta

SEQ ID NO: 4231 - DNA, 268 bp, Zea mays
  Clone ID: MRT4577_103859C.1
atcttgtgagggcctgagatgcaggatttcttcacgcctcccctttgtgacttcaagagcctctggcatctctttctgcaaaggcacctgaatgtgtctgcgtccctgttaggttaatgtgaggaggtggagagacagcccacccttgtgtccactgtgacccctgttcccatgctgacctgtgtttcctccccagtcatctttcttgttccagagaggtggggctggatgtctccatctctgtctcaactttatgtgcactgagctg

SEQ ID NO: 4232 - DNA, 583 bp, Zea mays
  Clone ID: MRT4577_10385C.1
taggggccttttttttttttccttttcttttttttttttttttttttttttttttttttttttttttttttggggaaattctatcttttattggggccggtgagattacaactacatggaagggacaatttgccttgaaagggtaacaaaaaaaaaaagggagggagaaaggaggaactcctaaaaaaaacagacaaatccccctccgggaaaaagagagagagagagaaaccggggatcccaggggctaacactggtttttatatttggccccccccccctctggccagggggcacaggttggtgagcatccgcctcggcttcccgggggggaaggggcaaaaagccctgaaacccaacgacgcgctgggcggtaacccggccttgggcgcgaaatcctcgggggcacgggcctcggcctcggcctccgccaggtttatccgcaagggggggattttggacgccccgcgaaggaggccctccacgctccaatcgtcgccgggggaagcgccgggggccaacgcccggagccgctggtcgtcgaagcgggccgcctcgtcgtcctcggaagacccggacttgg

SEQ ID NO: 4233 - DNA, 332 bp, Zea mays
  Clone ID: MRT4577_103860C.1
ttttaataaatttttattctgtttaccatataaactgtgtatttgtagtgttattcaacgatcactcgcgggggtcaaatgccaaggattctttgattatttaaatagcactattgagcagacatggttatttcgcacgtactttttaatagaatgagattagaaacctataaacatttctaatgggggtgctagacagatagacctcccgaacttttcggggtgtgaagacgacaccgcacctggtgggaccaaaaaggctggacaacatgggggtgggaaagcccttgggatgcccgtatgaaaacagggtactggcgggtgtggtttcc

SEQ ID NO: 4234 - DNA, 607 bp, Zea mays
  Clone ID: MRT4577_103861C.1
ctcgaggccggccgggtgcgcctctcagctctctcgcttgcgtttccttctctccgcttccgagatgtccaactcagtacgtgtacgtccgcgtggtaacaactccccgatgtctctgaatctacccccgacagctactgcgacctgttgctataccgctgaagccaacaacctgtacatcatttctgccaccgcaatctccggtcccctaagcaggcttccttctgcctgtgttgatgacatgcatatgtggacagtgaagaagggaaagcctgaccttagacataaggcgatgccatctggtattgggatgaagcgcaagccatgtcgccgaaaggatgctggctacatgtactctgaatactatgctggagtgatctgtgaacccaaagggatagatgaaaggttctgccatcactgttcccatcgtaaaggagtgcgctgatctctgacccaagattgctaccgcgctacatgcgatcgtctaaaggaagcacgtctgtcgaagtgtcatttacaatgctgactcgagaaggaagctcttatttacacgaccttttgattgccctgaatatgattacacggctaatgcttgagctgctgcacc

SEQ ID NO: 4235 - DNA, 766 bp, Zea mays
  Clone ID: MRT4577_103862C.1
ggcgattggtttccctcgagccggccgggaggcacgactccatccccctctctctttctctctctctcttcgacgactccgccgctgtcttccactcgggggccgccgtccctgtcgtcttccgcccatcactgtcttcttcgctccaccacacttgggaaacgcagcgatggatggccagccaggtgctgctgcgttgtcgagtcctggtccgagagtaaaagcaagcctggttctgggatccgaatcgttcgctatcaactccgagttcggtaccctgtcggagcagctggccgcggtgaaggagaagagcatggcggtcctcaaggaacacatcgccaggcacaatgctccgaacgaggtccccgacgaggccgccgagggcgagtctgacagtgagggcgaagcgccgcttgtcgacaacccgccgaagaaacctaagaagcagaagtgaccgtctctagtcatgcacttgactttttttttttttgccatgcgttgcttgtgtaacgccagactgttgtcagtcacaatagcaatatgcaggtgttagcactcacttgctgttcgtaccactatcattagttctgcttctctgtcatgtgttcatatttttcttcccatacacttgcaagggtgttcttgtctgtcggtgtgctgcacgctccgtatatctgtagcagaaacacaattcactaacagcttggtttgaggaatgggttagcctatcatcttctcagacaaaaaaaaaaaaaaaaaagcggcc

SEQ ID NO: 4236 - DNA, 236 bp, Zea mays
  Clone ID: MRT4577_103863C.1
agtaagcacagatctctaccaacactgtctagacgaaccatgctgcacttcctctgctccgcgacctttctagcatgtgctatatacggacactcattttaccgcactgctcgcaagctcccatcgttatccttcttaccccgtacctctcaccaaccgtgacttcggtatgtgaaatcccaattctccaaccctacaggatccaacaagacgtcgcacctgacatcttaccttta

SEQ ID NO: 4237 - DNA, 490 bp, Zea mays
  Clone ID: MRT4577_103864C.1
tcgagccggccggccccatctttctttctctctctctcttcgacgactccgccgctgtcttccactcgggggccgtcgtcttctctgcctccatctactcgggggccgccgtccctgtcgtcttccgcccatcactgtcttcttcgttccaccacacttgggaaacgcagcgatggatggccagccaggtgctgcggcgtcgtctagtcctggtcggagagtaaaagcaagcctggtcctaggatccgaatcgttcactatcaactccgagtccggtaccctgtcggagcagctggccacggtgaaggagaagagcatggcggtcctcaaggaacacatcgccaggcacaatgctccgaacgaggtccccgacgaggtcgccgagggcgagtctggcatcgaggacgaagcggcgcttgtcgacaacccgccgcaaaaacctaagaagcagaagtgaccgtctctaattatgcacttgagttgttttttt

SEQ ID NO: 4238 - DNA, 743 bp, Zea mays
  Clone ID: MRT4577_103865C.1
ccgggccgggccgccgttgttttccactcgggggctgcctccatctgttcgggggccgccgtccctgtcgtcttccacccatcactgtctcctccgctccgccatagccgccgtctcgcacttgggaaacgcagcgatggatggccagccaggtgctgcggcgtcgtctagtcctggtcggagagtaaaagcaagcctggtcctaggatccgaatcgttcactatcaactccgagtccggtaccctgtcggagcagctggccacggtgaaggagaagagcatggcggtcctcaaggaacacatcgccaggcacaatgctccgaacgaggtccccgacgaggccgccgagggcgagtctgacagcgaggacgaagcggcgcttgtcgacaacccgccgaagaaacctaaaaagcagaagtgaccgtctctagttatgcagttgactttttttttttgccatgcgttgcttgtgtaacgccaggctgttgtcagtcacaatagcaatatgcaggtgttagcactcacttgctgtccgtaccactatcattagttctgcttctctgtcatgggttcatatttttcttcctatacctttgcaagggtgttcttggtctgtcggtgtgctgcacgctccgtatatctgtagcagaaacacaattcactaacagcttggtttgagggaatgggttagtctatcatcttcttaatcaaaagaaaaaaaaaaaaaaaaaagggccctaggg

SEQ ID NO: 4239 - DNA, 918 bp, Zea mays
  Clone ID: MRT4577_103866C.1
cctcgaggcctgccgggactcctgcgaaaaaaaaactgtgcggaaacgaaataaaagcaggagagagcatcttgtgtcgtctgcgagagaaagaacactcggggttaggagatctgacccaatggccgcgaccaaggtgtgcaacgttaggttcgagggcaacgtgatcaccaccaccgtgacggcctccggcgcggccgtggagagctggctcgacgagatcctctccgtccaccgccgccgcctgcacaagctcgtcgtcgggctggacgtcgagtggcgccccagcttcagccgcgcctacagcaaaacagccatcgtccagctctgcgtcgggcgccgctgcctcatcttccagcttctccacgccgactacgtccccaacacgctggatgagttcctcagcgaccccgactacacattcgtcggcgtgggcgtggctgcggacgtcgagcggctcgagaacgactacgacctggaggtggcgaacgcggaggacctggccgaactcgcggcgaaggagatggggcgcccggacctccgcaacgcgggcctgcagggcatcgcgagagccgtcatggacgcccacgtcgagaagccgcagtgggtgaggacgggcccctgggacgcgtcatccctctccgacgagcagatcgagtacgccaccatcgacgcttttgtctctttcgaggttggccggatgctgctcagcggctactattgatcgatcgagccgttaatgcaggcaaacgccgagagttccgcgttcttgaagtgcttttgattcgtcatgcatgtcctagtagattgcttcctagcgcattagatgctctctcttaatcggtaaaagcaggttttaggggtttcggccctcctgggatggaagaaaataatcaccagagtaccagacaatacaat

SEQ ID NO: 4240 - DNA, 304 bp, Zea mays
  Clone ID: MRT4577_103867C.1
gggaccaaacaactgactgacaactgaatgacataaattttagggtggcattacattttttagttgtacaaacaagtgatggaaaaattactttaacaactaaaatgatgggaaaactaccattgaattaccttggagggggccttttgacatttcaattacccttttaatgttgacgggacaaaattttgaaaatgttttaattttacattgagacccaaatttcacaaaaagagttcattggtgaagggcgtccttttacttttaccaaacagtggttgtttttttacactcacccaaaccc

SEQ ID NO: 4241 - DNA, 275 bp, Zea mays
  unsure (1)..(275): unsure at all n locations
  Clone ID: MRT4577_103868C.1
ggttnaaaacaagggggggatcaaacatcataaccaaacttgattaaggtgcggctacacccatcaaagtttcaaattggaccaggaagttcagctttacagtacaaaatcgaaaaatacctgcggtagtgtttttttggcccggatattttgctctccaatgtgattacataatacataggtcctatttttaccagaaaaaaaatgccgcttttttgcacttgaaaaggcggtacatattcaacataatttggttgaaggttgagcgaacccca

SEQ ID NO: 4242 - DNA, 225 bp, Zea mays
  Clone ID: MRT4577_103869C.1
gggcaaattggatggatggacatgggaatatgcggttggagggggataataggtcctatggggaatggttcgaactaggggaacgcatggggtccgtaaacacaggacttaggggggaaaaaatcctaggtaacttaaaacaccggaaatttgttttaatataatgggaagatcctccaacaggggtggaaccatgttgattttgccaggaagactacccggaag

SEQ ID NO: 4243 - DNA, 316 bp, Zea mays
  Clone ID: MRT4577_10386C.1
cccacgcgtccgattgtgcttatctggaaataatgccatggaaattttcgtctttctgaggaagtaattctttttcatcagaaagacgaaatctgagctgaggataccgaggtttttctctatataatcgtagaagagcaaactcaactcaacatgaggtcatgtttaattttcggatctgagatgttccattacgggatgcagttcccacaaacagtcattttatttaaaaaaaaaaaaaaaaaaaaaaaaaaaaaaaaaaaaaaaaaaaaagaaaaaaaaataaaaaaataaaaaaaaaaaaaaatacaaaata

SEQ ID NO: 4244 - DNA, 279 bp, Zea mays
  unsure (1)..(279): unsure at all n locations
  Clone ID: MRT4577_103870C.1
ttcacgccctcgccctttttttctttttttttttttttnaaaagaaaaagaacatatccattgtgttgaaactcccaggaacacagctggagaataaagcctttctaggaaggtcggaatccacccaacgcctgataaatacgaacccacggagccacaggccctgtaacgccgcgccagtagagcgattagtactcgtcacccttggggccatcctaaccctggtaaaactcactaccgacctcctagtagcccttttaaagcgcagccagatcctca

SEQ ID NO: 4245 - DNA, 215 bp, Zea mays
  unsure (1)..(215): unsure at all n locations
  Clone ID: MRT4577_103871C.1
tcgcgaccctgcatcttcgccgcggtctagagccgcagccgccggtggcgcccggttcaggttgcgtgcgaaaaggttgtaagcatcgacctggggaccacaaattccgcggtggcagttnttgagggcggcaaggccacgatcggttccaactcccatggggcgcgggacacgccctcggtggtggcttaaaccaactccnncgagcttcttgt

SEQ ID NO: 4246 - DNA, 961 bp, Zea mays
  Clone ID: MRT4577_103872C.1
cttgggacctcgcggccgcgggacgcaccccagagaaactcccctttccctatcgcacgagacgaaaccgccgccacgcccatggctgactccggctccatcgtcgtcacggaggcgcggaagcagcacccgctgagccagatcgcggcgagcgggacgcaccggctgctgctcaagcagtgggtcaaggaggaggacctgctggcgcgccgcgtcgcgctgcgggaggcccgcctcgacggcgcgcgcaaggagatcgccttcctctactgcgccttcttcgcgttccacgccgcctccgtcctgctcctcttcctctcctcctccaccgccggccccgcctcagcgtgcaggcggtcctggatcccctgcctcgtctcgctgctctcctcgctcgccatgctctgggcgctgcggtacaagtccgacacggaggccgtcctggagcgcctgctggcgcgggagcgcgaggacgcgctgctcctcgccaggtgcgtctccgagctcaagcgcaagggcctccacttcgacctgctcaaggaggtggacgcgctgcgcagggccaagagcctccgcgtcgaggccaagggcgccgacaggcccaggaggtggcaggccagggacctcgccgtcttcgcgctcttcgccgtcgcctgcggggtgctcgtgctcaccaggttcctgctctgcaattagccaacatcgcattgcattgcaggtggaggtgttcattgccttgccttcttggcatctccttgataatcgtcatgacgaagagcactgttcgttttgggcagaactgtctgttctgccaattttggtgttgggtcttgtcgtttgtatacaacaataaatctgattcttggtagacctagggattccccagtttattttgcggatggattcagtggaacaattaaacaagctcaaaaaaaaaaagtgacaaatcaaaaaagcggcc

SEQ ID NO: 4247 - DNA, 330 bp, Zea mays
  unsure (1)..(330): unsure at all n locations
  Clone ID: MRT4577_103873C.1
cgggacgaccacgcgtccgatcaatcanaccaaacagattaagctattgattttatcaaaaccaccgatgccagtcatgaacgggtcctatcataggcttccaggtataactccaaacacagatactcagaccattcatatgtattgctcacaatgctcctaaacttctcattgctcacagctacgctaacaacatgggattctatgtagagcaaacctactctttcaacattacatgataaaacacccatttaaatgttacgtttgaaagtcatctcaaacttgtcatcaagcctattcattcaaaccatactattcatcgtgcctcta

SEQ ID NO: 4248 - DNA, 859 bp, Zea mays
  Clone ID: MRT4577_103874C.1
ttgggtacctcggggccggccgggacctcgaggaaaaaccgccgccggcgtcacgaggatggctgctcctaccgatgaggctgccggctcagggacgccgggatctaccgattcgttcctcgccgactggagggaacggatcattctgccggccgtcgcggctggtgtgcttggagccgcgttcgggctgctgtcgcggcaccgggcgcgccttggcgccgcccgcgccgctgtcacctacgccgcgaacctcgccatcgttgctggatgctacggaggtgcacgtgaacttgcaagagatgctcgagccacaacacctgatgaccccatgaattctgttgttggtgggctagcaagtggagctgtccttggtcgaatacaaggtggacactttggagccgtgaagtatgcggtcacctttgcagctgccggtaccgcattagactacgctgcactgaagttggcccctgaatggcattcgctgaaagaacaactgtctgaaaagaaagactggtttacactacccgagtggtcacctatccaggtgttggatgaggaagctttggctaagaaaaaagctcgagaagagaagttgtttgcccaacgagcactaggtaaacttgacaaggaggatccctagctatacggccttttggacgactgcgcactaacagagatacgatgatttttatcgaggcgcttatctgcgggtctctggaagcatagtgttagaaagcatcgagatgtatttttttttctgtactttgcggcgaacctagatgattgtacttccaagttttgacggctaaaaacatctctaaaagtgtaagagtcgaaaaaaaaaaaaaaaaaagcggcc

SEQ ID NO: 4249 - DNA, 176 bp, Zea mays
  unsure (1)..(176): unsure at all n locations
  Clone ID: MRT4577_103875C.1
tctccacccggatttatcttccctcctttntttaccnttgttatatgcccnacggtcttccctaacggccatnaagcctcctttccggtgctncaaacccggcggcaattgaataaaggatcaatgggnctatccnntcaaattcccggtttttgccggccctaagttttccttcc

SEQ ID NO: 4250 - DNA, 396 bp, Zea mays
  Clone ID: MRT4577_103876C.1
gcatgatccctaccgccatgggcgcgggataccgcgtgatcagcgccctgcccatccagcaccaggactggactggaggaaaggagttcaagtgcaaggtcaacaacaaaggcctctcggcccccatcgtgaggatcatctccaggagcaaagggccggcccgggagccgcaggtgtatgtcctggacccacccaaggaagagctcagcaaaagcacgctcagcgtcacctgcatggtcaccggcttctacccagaagatgtagccgtggagtggcagagaaaccggcagactgagtcggaggacaagtacatttctaatttgtaacatacaaccatagtctgcaaaactattctgtgtatcactgacgcacatcccaaactgtttagttccagtc

SEQ ID NO: 4251 - DNA, 801 bp, Zea mays
  Clone ID: MRT4577_103877C.1
atggccacttatgcagaattatacattgcccgtattctcagtttgcacggtattccgaagactatagtgtcagatcgtggacctcaatttgtagccaagttttgggaagcacttcacaaatccttgggtactaagttgctccatagttcggcctatcgtccgcaaaccagtgggcaaactaagagggtaaatcaaatacttgaagatatgttacgggcttgtgctttggacttcccacagaaatgggatgattgtttaccattagcggagttctcatataataatagctatcaagaaagcattaagatggcacccttcgaagctttatatggacgacgatgtcgtactccgttaaactggtctgaaccagttggagattatgtctacctgaaagtttcaccaatgaagggtatatatcgtttcgggattaaagggaagcttgcaccccggtatattggtcattttcccgttcttgaacaatatggaccagtggcataccgacttcagttacccgaaaccttgtttgcagtgcataatgtgttccatgtgtcacaattgaagaagtgtcttcgggttcctgatcgaaccattgaagtaacggatattgccctagaaccagacttgacatattctgagcaccctattcgagtcttggatcaaaaggacagaattacccgaagaaaaactctcaagttttacaagatacaatggaaccagcattcagaaaatgaggctacatgggaaactcaagactttttagaaaagaatttcctaggctttttagcctcatgtaatttgtaa

SEQ ID NO: 4252 - DNA, 349 bp, Zea mays
  unsure (1)..(349): unsure at all n locations
  Clone ID: MRT4577_103878C.1
gaaaaaaaaaaacnnagagggccctagnaacggngagcgaaccgggagcagcccagcttgagaatcgggcggcctcgccgcccgaanngnagncnggagaggcgncctcagcgacgttttttttcccaagnntctcttatttggtctgctgggattttttattttttttttccnncccnnaccctntcncaccacaaagcaccntcaaccantcnnnttnttccccactccancccaaatcnnncnntaaactccntctaannctaaatacanncnanaaaccnatancnaacaantaccttcccnnncnncccctcnaaannncnatttcttcanatatccatcacac

SEQ ID NO: 4253 - DNA, 517 bp, Zea mays
  Clone ID: MRT4577_103879C.1
tctcccgcgccgatcattacaatattgtgctccctctcttccctcgcactccgtaggacgcaagaccaccacaccagcatcctcaaccccggatctcctcccactgcgcatcgaaggatctgcatatcgaccgcagcgaaaccatccagagaacaggaatggaggtggccagcgacctcaaatccgagctcaccctcctccgggcccacatcgcatactcctaagccgagcgcgcccatcaggacaccagggtcttcaagtaccatgacgccgaggccaacgcgaacgaaataaaggatccagaggctatgatggatgaagcatgctactatgaaaggtgcagtatgcctcacagtagataaatataaaacattggacaaatgttaatgatgagattaactttatagggataagttcaaacaaggagtcggtctgctactcaattaataaaggaattgccatcgtccaaaaaatcaaaacgtggaacggtataagactgaatatgtgatggcgctgg

SEQ ID NO: 4254 - DNA, 242 bp, Zea mays
  Clone ID: MRT4577_10387C.1
gcggcacagacaggaaggccggtagaggcggtcacggttggttatttataaatagcagcgtcgggtggggggtgttagcaagcaggaggcggtcagtggtgtcctgtacgtaggaggtgagtgcatgtatattatacacatagagtttggccacttgttcgtgtgcacatgagagtcgattctcgtggcggcgagactcgtcaggacggcccgtcgagattgagattggattattcttggtg

SEQ ID NO: 4255 - DNA, 2177 bp, Zea mays
  unsure (1)..(2177): unsure at all n locations
  Clone ID: MRT4577_103880C.1
atttccggtccaccatcagcagacttgcgtcgtcgcggagggctcgcgtcggggtccatctgaacatccgccagaccgccgccaccatgccgcaacctaccgccgattcgagcaccatggtcgccggcgagcatcagcaacaacagcaacctgccaccgcgcggatctcctcctcctcaaccagctccggaaggctcgtcactccgttctggaaagtatgagagggacgcgaggaggtactgggacatcttctacaggcgccacgaggacaagttcttcaaggatcgacactacctggataaagaatgggggaaatactttaagggacgagatggagaaaagaaggtggttctagaggttggttgtggagctgggaacacaatctatccattgctttctacatacccagatatttttgtccacgcctgcgatttttctccacgagctgtcaatttggtcaagaaacacaaggacttcaaagctgaccggataaatgcatttgtttgtgatattgcatcagaacaactaaccgagaatgtggaaccttcttctgctgacattgtaacgatgatctttatgctctctgcagttgcaccagataaaatgcctatagttctggagaatgttagaagtgtcttaaaacatggtggccgtgttctttttcgggactatgcctttggtgatcctgcacaggaaagactgatgtcaaagggccaacaaataagtgagaacttctatgtcagaggtgatggtacgcgtgcatattacttttcaaatgaatatctggtagatttattttcaaaatgtggacttactcttgaggagatatgtgtgcacaacaagcaagttgaaaaccgttcactggagctggtgatgaacaggaattggatccaagctactttcaccctaaattcagctagtcctcaaggtccaaatggtcaacacgatctccttgcttacgaaggagaggatgataaggtagttactgacacatctaagaagaaaagcagcggtgaagaaatcgatctttctgaagatttttgcaacatgtttgggacatcacacagccttgatgaggtacaaatcattggggtgaaagcaaaaggccacgacttcaaaataagaatgctcaggaaggaataccagcacacctgcagatcaactggcttaatgctctgggaatctgctcaattcatgtgctgtcttttagcagagaacccttcgatcgttgcaagcaaaagggtcctggagttgggctgtggctcagctggcatctgctcgatggttgctgcaagtttcactccctttgttttagctacagatggggatgaagaatcactggacctccttagacaaaatatctcctcgaacatggagcctaatttgctgagcagaatcatggttaggaagttattctggggcaacgaagatgatatgaaggcagtccgagagcttcatggtaacggcgtgggttttgattgcataataggcaccgacgtgacatacaatcctgatgctatactccctctcttcaagactgctaggggagtgatttctgagaaagctaacgaggactcggtccctgctctcattctttgctacatccagcgacgagttgatgaggactccatcctttctaatgcaacgtcccagggtttcaggcttgtggacaaatggataaatggagttcacgagagtaacggtaccatcagttcttggttctctggtaatgatgtctgcagtgctttccggcatacagtactttcagtattgtacttcgagctgtgaatgctgctatgcatgtgcaaggttactgtgtaacctgaaggatttttgtagcagctgtatcaagcaacggcaaaccaactttgaatatttaggccttgtttggttatttcaattttatgtgaatcggactgtactggaatggattgagatgaattttgacttctatggatttaaattgactcagtgccacccaatccatatggattaacggtgcttccaatctgtcctatttgaacttaatttttnaaacttaaacantgagcttacgacgaattctttgcgggcttggtngttgagtctgaagctgcaacagaaattggaaagataatcgtcccaaggaaattggtcggaatggaaagatctgttcgnactttctttttggtcatctg

SEQ ID NO: 4256 - DNA, 382 bp, Zea mays
  Clone ID: MRT4577_103881C.1
cccatttgtccggagatctggtcggatgagccagccaagacgcgcaccaaagagattgccagcatcccctgcctgatccctatgggcattgaccaggacccttatttccgtctgttgagggacaatgctcataggatgcggttcccgtcgccgaagcctgctctcatccactccaagttcctgactgctttgcaaggtgctggcggcaagatgtcctcctcaaaccccaactcggccatcttcatgaccgacaccgccaaacagatcaagaccaagatcaacaaacatgctttcagtggtggccaggagactcttgagcttcagcgtgaactgggtggtaaccctgatgtcgatgtctcatacatttacctgacctattttg

SEQ ID NO: 4257 - DNA, 407 bp, Zea mays
  Clone ID: MRT4577_103882C.1
aaaaaaaacagccgtttttaagggaaagagataggggcaaactaacaaaagttttaaggggcacatagggggaggacccgcgccccccctttttttgaaaaaacaagccccaaaacccaaacggggcctaaaagctgaaagggggatgggtaaggatctttttttttcgttttgacgacccggaacaaaaccttatgttgggggcccaacggaaacaattccttgggggggggctcccaaggatgccccttttttgggggggggcacaaccggaaccgtttgaccccccagggttactatgggactcggggcctccacctttagaatatccccggcctccaccaatgaaaggggcacggcctcccctctttccaccttttattcccctatttggccggacccgtggg

SEQ ID NO: 4258 - DNA, 683 bp, Zea mays
  Clone ID: MRT4577_103883C.1
gggtacctcgaggccggccgggagtcctatgcttttcccactcccgggtctccagcattcctatcctctccccgtccgcccgtgccgccgccgccgccgccgcctcgcgttcccttcctctcccgagccgagatgaatgattgatgagctcaagagtatgccaggtgactgtgcgcaccgggcggaacgtccgcgtgcgcagcaacaagaaggccgtccacgatactcactatcacacatgacggacgtcttcattgcacctttgcaagaagatgagtgtgcagcattcctgatattgcagaggtctgcatctttagagatgatgttgttattacggttgaaaatcctgaactcgtatgcgtctgttggctgctactacttggagtgcttcgagctcctcctcatacaaagaacctgctggatctgcttccgacgattatcactcctccttggtcctgacaacctgcatgatctgcggaggctcgtgaagcatctccttgatcaggcctctgtcggttctggagaacaggctgtatggctccgctggccgctgggcaagatcaccgtcgatgtgcgatcctgactgcgttcctgaagagacgagtatggatcacgagcagatgaccatgaaccccacatgtttgttgaccatgctgtgtgcctaccacctgtcccaagccatc

SEQ ID NO: 4259 - DNA, 787 bp, Zea mays
  unsure (1)..(787): unsure at all n locations
  Clone ID: MRT4577_103884C.1
actgtttccccctgtcgatatctggtaaatgcatcttgagccttaggttcgaattttntaagtaataaacatgttctcctcatatataatgtaactttagtttattcaaaaaaaagatagaataatgtaaactttgagaactttcacatgtaggaagctgagcagagctagctcaggttcaagtcctcgtcgaggcttatctgggtgcctattttcttcgtaataaaatgccacctagttcctcctaggttggtctagtttttacatctattttttatggatatttgatattgatccaatttaaactggatattaacctattaactttagtacatcgctacaacatacacatatgttacatctttacatgtctcaaccaatgtaaagcaacatcccagattcccagtagtcgtttcaagtatacacaagtcctactgggtataaagctggtgtaacgtatgaagtctagaatggtcatccatccaggatcaatataagaaatatgaactagtgcctttgcgccttctttagtaaattgtacttcatcgtcaattttgaattaaaggcaacagcacagtattgcaggtaatcttgctggataccagatatcacagagacccgctattaagtgatggaactattctgggagatccccagtggcagtggctagagagggagcttcatggtccacaatcagagatcaccatcattggatcttcgatccaggtagtgtctaatctttcagccactactgggcctttgttctatgtggagtcctgggcacgct

SEQ ID NO: 4260 - DNA, 353 bp, Zea mays
  unsure (1)..(353): unsure at all n locations
  Clone ID: MRT4577_103885C.1
cgctgtcgtcacaagagagtgcatcttgacattgtatggagtcatggtgaagtgtttgcggtatagagcctagtgccgtgtagccgcgagtgggcagagtcaagacaaccttctagagcttctggagttagttagtttagttagttcttgtagttcttagctttcctcagttgaagctgtagcccagtttagtctctcactttatagcnaagtcagtagagtctagtcttagtagtctagtacctagcttannaagataagctagtgcttttcagagaattaaaaagtctagcagtcttgtgtcaaaaaaaaagaaacaaaaacccaaaaaaaaataaaaaaagaaagccaaa

SEQ ID NO: 4261 - DNA, 773 bp, Zea mays
  Clone ID: MRT4577_103886C.1
tccgaacctagtgaagctcttgggctactgctgggaggacagagaacttcttctcgtgtatgaattcatggccaaagggagcttggaaaaccatctattcaggagaggatgcgccccgttgtcttgggaactgaggctgaagatagccatcggcgcagctcgaggactcgcattcttgcatgcatcagaaaagcaagtgatctaccgtgacttcaaggcgtccaacatacttttagatgcgaactataacgctaagctctctgattttggccttgctaaacttgggccgactggtagcaagtcacatatcacaaccagggtgatgggaacgtatggctatgcagctccagagtacgtagcaaccggccatttgtacgtgaagagcgacgtgtacggcttcggcgtggtgatgctggagatgctgtccgggcagcgcgcgctggacccgaaccggccgaacgggcagctgagcctggccgactgggcgaagccgttcctggccgaccgccggaggctggcccggctcatggacccgcggttcgaggggcagtacaactcgaagcaggcgttccaggcagcgcagctgacgctcaactgcctggccggcgagccccgcagccggccgtcgatgaaggaggtggtggagacgctggagcagatcgagtcggtgaagagcagggcgcgggaggcgcgcggcggctcgtcgcgggaccggcaccacggccgcgccggcgcggcgcaccagcggtcgccgcgcgccggtggcgagccgc

SEQ ID NO: 4262 - DNA, 273 bp, Zea mays
  Clone ID: MRT4577_103887C.1
attataaacacatccgaagcataagtctcatataatggaggagggcggacatagatagtaaaatatatatacggaacgcacactagaacaaaggataacggggaccctactgtaaccacaaggcgcaagaccgaaccatcctgaaggctctattacaatcacagacggggataacccagtatgcacacaacattgcgataaaggtttactgtaagaagtacatataggctagatatctgacagacacaacgatgcgggatggaggacgcaagt

SEQ ID NO: 4263 - DNA, 240 bp, Zea mays
  Clone ID: MRT4577_103888C.1
cccactcatcctgcgccactctatatgccctctaccatttgctccacctcaatgccctaccctacaaccagcccttcctaaacatgctcagcatgtactaccactatcatatcacctaccagttcacatgcaccaccatcacattactacccttcacagctcctcctctctattacatcacactctcctacttctaattcctctccccacactccaacctcaatttctaccacctcttct

SEQ ID NO: 4264 - DNA, 146 bp, Zea mays
  Clone ID: MRT4577_103889C.1
cggaatacccggggttacccacgcagcccggtgacaaccggagcgcccgcgcgagagaacacgaggacacagacgccagcaagcgccgtgataccccaccaaaagggggaccacaacccaaaacaccgggcgaccagaaacaaaaa

SEQ ID NO: 4265 - DNA, 346 bp, Zea mays
  unsure (1)..(346): unsure at all n locations
  Clone ID: MRT4577_10388C.1
cctctcactcgcctcgacgcgcctctgaaaagtcggagccgncggcccgtccgcctccctctccgnctcccgtccccaaggacaatagatttcaagtggcaatggcggaccaggctaaccaacccactgaccttcataagctcggaggccagaaccacctgcgctcgaacatcacagaaggagaaccagaccaaaacaaatgcccatcagacacaacataagaaaggagataagccacaaggaactacaagacccagagccaaagccccccacacaagccagacaccgaagacatcaatgacccagagaagcagaccccgcacagagcaacagcaccagcagacaa

SEQ ID NO: 4266 - DNA, 309 bp, Zea mays
  Clone ID: MRT4577_103890C.1
taacgctaggtcctcgcggcccaacggcgggcgtcgtcgtctaagtcatgcactgccctcagcacctcaggctctcccttacccgcgccctgatccacgcaccattccgatacatatattcgaccccatctctcgtccaaaccctctacccctcagaggcgacgcctcccgccgctgaagcatcggccggtagcgaagctgcggcggcggatgcaggcggacgcgcacacgctgcgtgacttgacgtactcagcggaggtgacgacgcggcagaacccgctgcctaagcccaagtggatgaatgagacc

SEQ ID NO: 4267 - DNA, 579 bp, Zea mays
  Clone ID: MRT4577_103891C.1
ctcgaggccggccggggataaaatcctcacttgcactgggacatgtgcttgctgtggccaccgttgcgataacaaccagtagtgagtgcaggtgtgttactcaggaagcaatctgggtgacgactacgtgctgccaaatgtcatacggcggtgtctccgtcggaagcgatttctacaatctccctcatatatcacatcattgcagcgaagcgtcaaagtgacgaaaaaagccgacaaacgtgtttccctcggatatctccaatgtgcagcccgatttccaggatgacgattcctatgacgggatccagactttccttcccttcctgggactgcatacacccaacgttctgtgaacgacgttccaagagtcatatcccgtcgtggggggtattctagatgacagcggcgttcgaacatcaagagctgcatatttactgcgtgattctgcacaggtggatagaggaactgtcataattgtccgcaaaactgtctactgtgttgggatcccttctttacttctgtcaagattaaaacatggaaaagtcccgtttctatacttggagacgatatcaactgatc

SEQ ID NO: 4268 - DNA, 361 bp, Zea mays
  Clone ID: MRT4577_103892C.1
tgatgagccgagcaagctgtctatgggacgggaggacaaaattctaaattgggggctaaagcaatcttgaaatacatacttgccattgagaagggtcgaaacaggatacatctggtggtagcattcctcattgtgaagggaaaggttgcacttttcaaggaccacaatgtttctcgtgggcacgacatatcgacggcggtggagctcgacataatacttgaatacagactatagaacgctgcaaaggcgtgcaataaagaatcgtatgcagcaccagcctaacgagctataccggtgccaaaggttagctaggcttaagcatccacgctgggaggccctgaaactgtgaaaaagggctgca

SEQ ID NO: 4269 - DNA, 170 bp, Zea mays
  Clone ID: MRT4577_103893C.1
gagcatcggccgcaagaagacagcagtagccgtcgccaacacaaagccggggcgcaggcagatcaaggtgaacagcgtcccgattgaacacatccagccggagatgaaccgcctcaaggccttcgagcccatacagcaggcagagcgcaccaggatcaaggacatcgaca

SEQ ID NO: 4270 - DNA, 3609 bp, Zea mays
  Clone ID: MRT4577_103894C.1
aattccgtaccaggcccaaatcccaaaacctgatcccagctccgccgccgagcaaaaccctaggggcttcctataacgccgccgccgcgatggacgacagcctctacgacgagttcggaaactacataggcccagagctcgccgactccgacgctgatgatgactccgacgccgccggcgcctcaccgtcctccaccgcgtcccgctcgccgtcccccgcggcgcgctcgccgtcgggctccccctcccgccctgcggcgctcatggacgtcgacgaagacgagggcgacccgtcccagcaggccgtggtgctcgccgaggacaagaagtactatcccaccgccgaggaggtgtacgggcctggcgtggaggcgctcgtcatggacgaggacgagcagccgctcgagatgcccatcatcgcgccaccacgcgtcgtgaagttcgaggtcgggacccgcgccgcggccacgtctacctacgcgtccaccgacttcctcctcggtctcgcgggcaaccccgcgctcgtccgcaacgtcactctcgtcggccacctccagcacgggaagacggtgttcatggacatgctcgtagagcagacacacgaagtggacaccttcgactccgagggggagcgtcatgtgcggtttactgacacaagggtggacgagcaggagaggcaggtctccatcaaggctgtgccaatgtcgcttgttctcgaggggggaaacggtaagtcatacctgtgcaatatcatggacacgcccgggcatgtcaacttctctgatgagatgactgcggcacttcgacttgcggatggggctgtgctcattgttgatgctgccgagggagtaatggttaatactgagagggcaattcgtcatgcaatccaagaaaggcttcccatagttgttgtgattaacaaggttgacagattgataacagaactaaagctgcccccaaatgatgcatatttcaagctgcggcatactctagaggcaattaacgatcttatctcatcgtgttctactacagtaggtggcactcagctggtggatcctattgctggaaacgtatgttttgcaagtggtgctgctggctggtcttttaccttacagtcttttgcgcatctttacttaaagattcatggggttcaatttgaccatgagaaatttgcatctcgcctatggggagacctgtattttcaccctgattctagaacctttaaaaagaagccgccaaaggaaggagctaacagatcatttgttgagtttatccttgagcctctgtacaaaatttatagtctggttgttggtgagcaaaaggggaatgtggaatcaaagcttgctgaattgggtgtcacactgagcaatgcagcttataagctaaatgttagacctttgctgcggttagcttgccgctcaatttttggcactggtactggttttactgatatgttagtgaaacatatcccctcggtgaaggatgctgctgcaaggaagatagaccacatatacactggaccacaagattcctctattgtagatgccatgaaaaaatgtgatcccaatggaccccttatggttaacgtaacaaaactatatccaaagtctgattgcagtgtctttgatgtcttcggacgagtttatagtggcacaatacagactggacagaccgtgagggtccttggagaaggctattctccagatgatgaagaggatatgactgtcaaagaggtgaccaaattgtgggtttatcaggcacgataccgtgttgcaattagtaaagcccctgctggctcttgggttcttattgaaggtgtagatgcatcaataatgaaaactgctactatatgtcctatgaatattgatgaagacgtgtacatatttagacctctacgtttcaacaccttgtccgttgtgaaaatagcagctgagcctctcaacccaagtgagcttcctaaaatggttgaaggtcttcgtaaaattagcaagagctatcctcttgctattactaaggttgaggagtctggagagcacactattctggggactggtgaactatatctggattccataatgaaggacctgagagagctttattcagaggtcgaagtgaaggtagcagatcctgttgttacattttgtgaaacagttgttgacacttcttctatgaaatgttttgctgaaacacctaacaagaggaacaaaattactatgcttgctgaaccattagagaagggcttagcagaagatattgagaatggtcttgttagccttgattcaagacagaaagaaattactgacttctttcgccaacgctaccagtgggatgtgcttgcagcaaggtcaatatgggcttttggacctgacaagcagggtcctaacattcttttggatgacacactttcaattgaggttgacaagaacttgctcaatgcagtgaaagattcaattgttcaagggttccagtggggtgctagagaaggtcctttgtgtgatgaaccaattaggaatgtaaaattcaagatcttaaatgcaaacatagctccagaaccattgcaccgtggtggtggtcagataattcccacagcacgtcgtgttgtctactctgcattccttatggctactcctcgccttatggaacctgtgtattatgttgagatccaaacaccaattgattgtgtctctgcaatttatacggtgctatcccggcggcgtggtcatgtaacagctgatgtacccaagccaggcactccaatatacattgttaaggcatttttacctgttatagagtcttttggatttgagacagatctcagataccatacacagggacaagccttttgtctgtcagtattcgatcactgggctatagttcctggtgatcccttagataagagtattgtccttcgccctctggagccagcacctatgcagcaccttgcccgtgagttcatggtaaagaccaggcgaaggaaggtaagggatatagttgatttatggcaaccatatattcgtaacttttatcgtagttgatttataagcaaccatataatttgctcccgtaacttttatcatacagtaaaaatccttgtcagtgttatactagccataatgctaactgtatgcaccatcacacttgcagggcatgagtgaagatgtgagcatcaataaattcttcgacgaggccatgatgaatgagctggcccaacaggctgctgatatccacttgcaaatgatgtagtcaaaaagcgagatgaagtgcacacgtggaagatgcaaatgccctcagcttcttcataccatacatgctgcagatgggactgccggagttccagtcgcacctttatgctggcatttgcccctacctgtttcgttttgattaacacattatgattgctgggtatcatgtagcgaatgtttaaagtgggtaccgtatgcaaatcatgtatgtactgtactagtttttacaccatctgaccaatcagcacccttgaggacagagactatttttaaatgtctttattgaactctgagcggcaatggcatcttcgccggtgtagatttgtagtaagaaaaaacttatttgatcaaaaaaaaaaaggcggcc

SEQ ID NO: 4271 - DNA, 3458 bp, Zea mays
  Clone ID: MRT4577_103895C.1
caaatcccaaaacctgatcccagctccgccgccgagcaaaaccctaggggcttcctataacgccgccgccgcgatggacgacagcctctacgacgagttcggaaactacataggcccagagctcgccgactccgacgctgatgatgactccgacgccgccggcgcctcaccgtcctccaccgcgtcccgctcgccgtcccccgcggcgcgctccccgtcgggctccccctcccgccctgcggcgctcatggacgtcgacgaagacgagggcgacccgtcccagcaggccgtggtgctcgccgaggacaagaagtactatcccaccgccgaggaggtgtacgggcctggcgtggaggcgctcgtcatggacgaggacgagcagccgctcgagatgcccatcatcgcgccaccacgcgtcgtgaagttcgaggtcgggacccgcgccgcggccacgtctacctacgcgtccaccgacttcctcctcggtctcgcgggcaaccccgcgctcgtccgcaacgtcactctcgtcggccacctccagcacgggaagacggtgttcatggacatgctcgtagagcagacacacgaagtggacaccttcgactccgagggggagcgtcatgtgcggtttactgacacaagggtggacgagcaggagaggcaggtctccatcaaggctgtgccaatgtcgcttgttctcgaggggggaaacggtaagtcatacctgtgcaatatcatggacacgcccgggcatgtcaacttctctgatgagatgactgcggcacttcgacttgcggatggggctgtgctcattgttgatgctgccgagggagtaatggttaatactgagagggcaattcgtcatgcaatccaagaaaggcttcccatagttgttgtgattaacaaggttgacagattgataacagaactaaagctgcccccaaatgatgcatatttcaagctgcggcatactctagaggcaattaacgatcttatctcatcgtgttctactacagtaggtggcactcagctggtggatcctattgctggaaacgtatgttttgcaagtggtgctgctggctggtcttttaccttacagtcttttgcgcatctttacttaaagattcatggggttcaatttgaccatgagaaatttgcatctcgcctatggggagacctgtattttcaccctgattctagaacctttaaaaagaagccgccaaaggaaggagctaacagatcatttgttgagtttatccttgagcctctgtacaaaatttatagtctggttgttggtgagcaaaaggggaatgtggaatcaaagcttgctgaattgggtgtcacactgagcaatgcagcttataagctaaatgttagacctttgctgcggttagcttgccgctcaatttttggcactggtactggttttactgatatgttagtgaaacatatcccctcggtgaaggatgctgctgcaaggaagatagaccacatatacactggaccacaagattcctctattgtagatgccatgaaaaaatgtgatcccaatggaccccttatggttaacgtaacaaaactatatccaaagtctgattgcagtgtctttgatgtcttcggacgagtttatagtggcacaatacagactggacagaccgtgagggtccttggagaaggctattctccagatgatgaagaggatatgactgtcaaagaggtgaccaaattgtgggtttatcaggcacgataccgtgttgcaattagtaaagcccctgctggctcttgggttctcattgaaggtgtagatgcatcaataatgaaaactgctactatatgtcctatgaatattgatgaagacgtgtacatatttagacctctacgtttcaacaccttgtccgttgtgaaaatagcagctgagcctctcaacccaagtgagcttcctaaaatggttgaaggtcttcgtaaaattagcaagagctatcctcttgctattactaaggttgaggagtctggagagcacactattctggggactggtgaactatatctggattccataatgaaggacctgagagagctttattcagaggtcgaagtgaaggtagcagatcctgttgttacattttgtgaaacagttgttgacacttcttctatgaaatgttttgctgaaacacctaacaagaggaacaaaattactatgcttgctgaaccattagagaagggcttagcagaagatattgagaatggtcttgttagccttgattcaagacagaaagaaattactgacttctttcgccaacgctaccagtgggatgtgcttgcagcaaggtcaatatgggcttttggacctgacaagcagggtcctaacattcttttggatgacacactttcaattgaggttgacaagaacttgctcaatgcagtgaaagattcaattgttcaagggttccagtggggtgctagagaaggtcctttgtgtgatgaaccaattaggaatgtaaaattcaagatcttaaatgcaaacatagctccagaaccattgcaccgtggtggtggtcagataattcccacagcacgtcgtgttgtctactctgcattccttatggctactcctcgccttatggaacctgtgtattatgttgagatccaaacaccaattgattgtgtctctgcaatttatacggtgctatcccggcggcgtggtcatgtaacagctgatgtacccaagccaggcactccaatatacattgttaaggcatttttacctgttatagagtcttttggatttgagacagatctcagataccatacacagggacaagccttttgtttgtcagtattcgatcactgggctatagttcctggtgatcccttagataagagtattgtccttcgccctctggagccagcacctatgcagcaccttgcccgtgagttcatggtaaagaccaggcgaaggaagggcatgagtgaagatgtgagcatcaataaattcttcgacgaggccatgatgaatgagctggcccaacaggctgctgatatccacttgcaaatgatgtagtcaaaaagcgagatgaagtgcacacgtggaagatgcaaatgccctcagcttcttcataccatacatgctgcagatgggactgccggagttccagtcgcacctttatgctggcatttgcccctacctgtttcgttttgattaacacattatgattgctgggtatcatgtagcgaatgtttaaagtgggtaccgtatgcaaatcatgtatgtactgtactagtttttacaccatctgaccaatcagcacccttgaggacagagactatttttaaatgtctttattgaactccgaaaaaaaaaaaaaaaaaagcggcaatggcatcttcgccggtgtagatttgtagtaagattttacttatttgatcccttttgcttttctgctaaaaccccccaaccc

SEQ ID NO: 4272 - DNA, 337 bp, Zea mays
  Clone ID: MRT4577_103896C.1
acaacaagcagccccacctacaaaagcacgctggaacaggggactgtatgcaaacgctccgatgacagatcatagcccctacctcagctgatagccggtgacaggacgtgtgtcgggctacgataaggagcgcattcgtggcacaagaaaatgctgatgcaacaggatcgccatcggctattattagccaaggcccatattgcgcatgtccctgcttagggcaggggagccgattatgttgatgctagacggcctgacaatactgccgatgatcccgcactcgagagccccttcggcggccaagcgcttgaccctagacagggcctcgtggatcttt

SEQ ID NO: 4273 - DNA, 412 bp, Zea mays
  Clone ID: MRT4577_103897C.1
aagcaagcaaaaacttggacgggccccaaccgcactggactgaaaactttaatttctatatactcattcatttaatttttttgccaccaaaaccaaatagttgttgcctgtttgtccaacactacaatgaatgcccccacagttttttacaaacagatcaccccccccaccccaccaaaaaatttgaccccttcctttgtgtggggggggttttttacacctaaccgattccaatgcaatacaaccataggttttcctatgcgtcctgtcctgggcaaccaaatggtcggtcactttggcccggacagttccttggtttccaggccaagcaaggacttgtttgcagggggaaaatccacttacttgggaggcaggacctccaacaaaacggacttgggggtgtccactttgc

SEQ ID NO: 4274 - DNA, 263 bp, Zea mays
  Clone ID: MRT4577_103898C.1
gagttttgccttttctattagctaagaaattaaaagtgatgccaaaaattgtagaaaaatccaaaaaaatagcaagacaaatttctgttggatatctaaattcatgagctctctggtaaagttggatttaggatttttagggcaattataaaatattaaatgaattaaaggtgctcttggaaaaactattaaaattttagaaataagaattgtgcatcaaaaatcatgaatttctttttgagaagcttgttatcagaagtttg

SEQ ID NO: 4275 - DNA, 306 bp, Zea mays
  Clone ID: MRT4577_103899C.1
ggcagcgagctcccctcctctccccgcatcccgccaaggaagagagagagatcgccgctccccttctcggcgcccccgccgcgcgctgacctccctcctccagcgagacctgtctggtcacacatctatctgacaaaatgccgaagatctgctgcatcggagctgactatgcccacgccccaaccatggccgtcattgccctcaagcgcccacaccttgaggcacgcgtccttgacatcctcccaaccccgccccgagctctgcaacacccacaccctgcccatctaccaccctgctctcccagac

SEQ ID NO: 4276 - DNA, 278 bp, Zea mays
  Clone ID: MRT4577_10389C.1
aacaaaataacatcccagctgaccacacctcataccagattctacaagaaccacgacgatcacgggttcaagcataacatcgaacacctaacaagcgtcacttacgcacttcactacgtacaccatctagctctctatgctaatcacatactgtgattcacacatacaatcacaggaaaaacacagatcactacccatggattcaaacaacgttgatcaacatgttaacttttgaacagcatacctgctactcaaacacggacccgttgatgtagagc

SEQ ID NO: 4277 - DNA, 407 bp, Zea mays
  Clone ID: MRT4577_1038C.1
cctcaaaaaaaaaaaaaaaaaaaaaaaaaaatgagaaaaaaaaaaaaaaaaacaacaaaaaaaaaaaaaaaaaaaaaaaaaaaaaaaaaaaaaaaaaaaaaaaaaaaaaaaaaagggggggccgcccaaggggacccaagctaacgaccccgggcaggcaacgccaaagcccttcaaaagggccaccaaaaacaaaaccacgggccgccgttcaccaaccccgggacgggaaaaacccggggtgaacccaacaaaaacgcccggcaaaaaaccccccttccgccagcgggggaaaaagcaaaaaggcccgcaccgaacgccccccccaacaatggcccacccagaagggcaaaggggacccgcccggaagcggcccacaaaacccggcgggggggggggtaaccccc

SEQ ID NO: 4278 - DNA, 506 bp, Zea mays
  Clone ID: MRT4577_103900C.1
gtaccggccccctttcgagaacggaggcggcgaggctggcggctgttgctgcgtattgcacgagcgagacgccaggtcagcggccgaccatggaggccgtggttcagcagctcagcagcacccagtgagtgagtgagttacaagctgctgccgaggtgtagtgtctagcgaagtagcgagtgagtcgtgtgatgacacggtgatggaatggaagctaggctggctgggtattgcggtcagagatgatggattgtgggagcgatggtagtgaactgatgttttgtaatgacggggcaatgacccagttgccacttacatgctagtggagttttgattattgtagttaaccagtctactgatcgttgtatttgatgacccagttcctaatgtgtattaggttctgaatttgataagcatgtttgtttggctctaatatgtattgccttatataatttttataaaaaaaaaaaaaaaaaaaaaaaaaaaaaaaaccctcgtgccgaatt

SEQ ID NO: 4279 - DNA, 2001 bp, Zea mays
  Clone ID: MRT4577_103901C.1
aacatcaaaagtgctgatttgcaatgccataaattaatttacatagttctctcactacccttttgcagtgttgcagcttggttacaatcagttgacaggcagcatacctccccagctgggcaatctgaataagttaaccgtgctcgcgatgcagtctaatcagcttgctggagccattccggcaacccttggtgagctaacacagctgagacggcttgatttgagcttcaacagcctgtttggttcaatcccgtccaagattgctgaggttccattgcttgaggtctttgatgttcgcaacaacaccctttctgggagtgtccctgttggattgaggagactgaatggtggcttccagtatatgaataacaaagggctttgtggcgctggcttcagtttgctagagctttgcctttcttcagaggatggcctgaagcccagcaagcccgagccttttggaccagacggtactgtcaagacaaggcaggtgcctcaatcagcaaatccagacggctgctcaggcgctagctgctcaaagtccgcaaacgcgtcccaaggagttcttatcgtcgctgttgtcgcggcggtgatcggtgctgcattttgcggtttatttgcgttctcctggtaccgccggcagaaacagaagatcggaagctcgctggaggtttctgatagcaggctcagcaccgaccatttccagcagaaggaagcctgcagaaggagcgcctctcctttgatcagcgtcgagtactcgaacagctgggacccgttgtctgcaggtggggctggtgttggatcacccggtcaagtagttggtgatagcttcagattcaacctagaggaggtagagtgcgcgacgcagtacttctccgacatgaacttgctcgggaagagtggcttcgccgccgcgacgtacaaagggatccttcgggacggatcggtagtcgctgtcaaaagcctcagcaagacgagctgcaagcaagaggagtcggatttcctgcgtggtctgaagatgctcaccctcctacagcacgacaatcttgtcagcctgaggggattctgctgctccagggggagaggggaatgcttcctcgtgtatgacttcatggttaatggctgcctgtcgcggtatctggacgtcaaggatggttcttccggtgctaccgttcttgattggcctacaagagtctccatcatcagaggcattgcgaaaggaattgagtacctccacagcaagaagggcagcaagccaccggtggtgcaccagaacatatcggccgacaagatcctcctcgaccaccaccttgcgccgaggctctcggtgccggggctgcacaagctcctcgcggacgacgtcgtcttctcggccctgaaagccagcgccgccatgggctacctcgcgcccgagtacgccgccacggggcggttcacggacaagagcgacgtcttcgcgttcggggtcgtggtcctccaggtcctcacgggaaggagggacgtctcccagctgaaggtcggcgccgccgccgtcagcgacctcggcggcctggtcgacgcgaacctcgacggcgcgttctcgagaacggaggcggcgaggctggcggctgttgctgcgtattgcacgagcgagacgccaggtcagcggccgaccatggaggccgtggttcagcagctcagcagcacccagtgagtgagttacaagctgctgccgaggtgtagtgtctagcgaagtagcgagtgacacggtgatggaatggaagctaggctggctgggtagaggacgtcgtcttctcggccctgaaagctagcgccgccatggtcagattatgatggattgtgggagcgatggtagtgaactgatgttttgtaatgacggggcaatgacccagttgccactgacatgctagtggagtgttgattattgtagttaaccagtctactgataagcctattcgtttgattttaatctataccagtttctaaaaaaaaaaaaaaaaaaaa

SEQ ID NO: 4280 - DNA, 340 bp, Zea mays
  Clone ID: MRT4577_103902C.1
ggcgcggacaattggtacacagtaacgcatgctctggatgtaggaacacgttgaggattcctgacagcttgtatggccataatggtatgcaccagacggccttgcagtcgtgatcgtacacgatcccgagatcgtggcttattctgctgacaatgtgcagtgaagtgctgtaggtacactactgagggtggcatcgctctttattgatgttacagatggcatgctgggttttccagacagggcacactacgatcctatccatgtttatgtagggctacgctgagatccctaagtgctctgattgatcatataaagcctgggtgtcggttggtgattccgg

SEQ ID NO: 4281 - DNA, 201 bp, Zea mays
  Clone ID: MRT4577_103903C.1
gacgtgtgcccccgcgcgccggccgcgatcgatcgaataaaattgcgtgtgagtacgcacttcgcacggtcgctctgcagccagagtgagtgagtttgctttatgtatttttcggtttcgggcgaggaattcttcatggatctgtgaaagcccatatgtatgcatggtcatggcatgaataaagtagtactgatcttctcg

SEQ ID NO: 4282 - DNA, 442 bp, Zea mays
  Clone ID: MRT4577_103904C.1
cggactcgtggtcggactcgtgggaaaaaaaaaaaaaaaaaaaaaaaaaaaaaaggaagagaaaaaaaaaaaaaaaaaaaaaaaaaaaaaaaaaaaaaaaaaaaaaaagggctcggccgttttaaaggtcccaaccttccttccccttccttccaacttcataccttttttatagtgccccctaatttcatttcactgcccttcttttaacaccttcttacctggaaaacccctgcctttcccaattttattccctttgcatcacttccccttttcccctgttgccttattaccaaatagccccgtacctatcgctcttccaatcattttcccacccttattgtctattgtaccccccctttttcctgcccttatatccctctttttttggttttaactctcattttaccctttttattttcttttctttatttcttttttt

SEQ ID NO: 4283 - DNA, 471 bp, Zea mays
  Clone ID: MRT4577_103905C.1
tcgacccaagcctctacagtaagtcatattatgtctctcctccgcacgcacgcctcgtcgcgacagccccattgccgcatccctcgtccctcgcacactccgtctctcgtggtctctcctttgctgactgcattctcgtttgactcccacggaaacaagagaccattcaacatcagcagagcgagaaagggtctcatcctcgttgggaaagacggcaggtacattgtctcgacagagtggagtggagtgcaggagagacatcagctaggacagcgttaaaggcatgaatcgaagagagcaagagcacccctgctcttccatccaccatccaccacagcaacaacaccaacccctcgcaaggtctattctgagcacactttcgcctccaccagcaccgtctgcaaagcaagcgttcttgcgtcaaagtcgatatgggacaagagcgccagccggtgcaactgaatcacatcg

SEQ ID NO: 4284 - DNA, 396 bp, Zea mays
  Clone ID: MRT4577_103906C.1
aaaaaaaacactaaattctcaacaaaaactaaaatcgcaacatgcctggggggccttggggatctttcatccaaggcctcgcacactttcatgccaccgtatgcctcttcaatggcgtcaactaaaaccaactaagtggccacatcgatacaacgacgaatctgagaaatctcgggcactaccgaagtaagtgccttcccaacagatacatattcgcgtaactagcttaataccgatacaaccctgtacctgcgccgtacgagattacatatatcacatattcacgaaccatacatgccacgaatccgtgcattaactgcgctgatatatctgtacacactcacttgtacacctacacttgtacgaaacctataaccatttcatccaaatacttac

SEQ ID NO: 4285 - DNA, 349 bp, Zea mays
  Clone ID: MRT4577_103907C.1
gccggccgggccgggcttttgtggagtccttcgcctaccctcctcctgcaacagacaacaaccacaactcttataatccatgtagcggttttggtgcctgagtaacattgcatgtttctttgcatttaaacttgtgctttttccgattatgtatgatggtcaatatgaattgaattgaatctctatggtctgttgaatgaaagacttgaatatgtgagatgtgattgtggctttgaaaggatatgtgagctatgacgagcattgatgaaaaaaaaaaaaaaaaaaaaaaaaaaaaaaaaaaaaaaaaaaaaaaaaaaaaaaagaaaaaaaaaaaaaaaaaaggccccta

SEQ ID NO: 4286 - DNA, 376 bp, Zea mays
  Clone ID: MRT4577_103908C.1
tgtatatccatgctactctaatctttctgcctatatgacagcatttttcatttccatcaactgctcttgtctgattaggctccatttgttgtctctttattgatttttggttgcaaaatagacagccttggatattatactgataagagtgtagaggtcacaattgtttcaagtttcaaccatagttgtacatgtcagaatcatctgttaattttgttcttgaatcttgacacgcttagaaaaattcaaggcatgcataaagcaaaacatctttgtgagtttgatcgttccattaacattcactaacaagtcatatttatatttaaatctttttccttgaagccagtccaactttcaacttcttggaatcattttt

SEQ ID NO: 4287 - DNA, 422 bp, Zea mays
  Clone ID: MRT4577_103909C.1
caaccaaacggtgccattaggatccaattgcgttgtaaactaatcccgtgccataaagaccgaaccaaacacgtagttggtttgaagggatctcgtaagtaaggaaggaaaggaaagctactgtgccaaacgaggccttcgtataaaatcgacgaccctttgtacttttgatttatttgtgcgaaataaaaccttatcttccatcttcaactgctcagaagaagaaagttcagtcgggattcttgcagcctctgacacggccaagcacaagaccctcatgaagcacaacagtcaacactgcacacggttcctgcagaaaaaagagagagagaaaggaagcaacaaggtcccaggcgcagtcaggcgccgaacctctccctgtcatgtagagcattgtagtcgatgttgggtccagcggggat

SEQ ID NO: 4288 - DNA, 171 bp, Zea mays
  Clone ID: MRT4577_10390C.1
attctatcgctctctcgttaggttcgtaacgggggggttttttaaggattacgtagcggaccaaggaaaacaagcacaaatacatgctacgtgtgcaacgttgtagtaaccgcccccatgacagaaacacttttgagggagatgtcccgaacaacattgccgctagaagca

SEQ ID NO: 4289 - DNA, 318 bp, Zea mays
  Clone ID: MRT4577_103910C.1
cagactttttgtcggtccccaaacccccaatccgcctgcattctttgggtttgctcacaacgcacacaaagccattttactgctgttaatggtggctggcactattagaggttccggctcttgaatgatctccaacggaattcattggatggtgtaatgctaggacggcaccgagtacatgtgctggtaggatctgttgccgcacaccctggtcctgataatacgcaacctgccgctgttggaagtgctcaccgtactaacctaggtgtgcaagccctgggggcagcaggaggccggcccgtactgctggcaagagat

SEQ ID NO: 4290 - DNA, 1510 bp, Zea mays
  Clone ID: MRT4577_103911C.1
ctggcacagcggaggcatcagcatcacatcgagcatgctggagctcctgctcgtggggtgcagcggcgtggtggtgctcctccacggcgccagcctcttcctccgcgcgctcttcgccccgcgccacgccgtcgccaggcccatcagcttcctcgggttcgtggcctgagcgatcgttcgcgatgggcatcgggcgcggcctgcggagatgatcgtttcgagtcgagtagctgccaccgaagatccatcgactgatgcagctttgtgtgtgcccacaagttctcgttcgtttgtgtgtcagtgggtgtggcatagccgtcggttcagacgttggcactggccagggaagtggagcgccgatgttgttcagtgatataccaaacccacggcagggagtaaaatacaatttcagtccttaaacttatcggactatattattccggttcataaacttgtaaagtatatcttttaaagccttaatcgttattcaggtctatatgaggttcaaatcggattgaaacagctccggtggtgatgggcctgccgcccttcttccacatctacgcatcaccggcatctgctccgccacgctgcggcacaagagatcccctcagctccaggtccgtcatgactcatgacagccgccgcaccgctcgcgtcggacctcgtggcgccgttcaagcggaagttcccgggcgtgcaggtggaggaggcgtacgggctcacggagcacagctgcatcacgctgacgcacgctagcggcggcggcgaggacgtggggtcggcggtgcaggtcgccaagaagaagtcggtcgggttcatcctgcccaacctggaggtgaagttcgtggaccccgacacggggcggtcgctgcccaagaacacgccgggggagatctgcgtgcggagccaggccgtgatgcagggctactacaggaggaaggaggagacggagcgcaccatcgacgccgcggggtggctccacacgggcgacgtcgggtacatcgacgacgacggcgacgtgttcatcgtggaccgcatcaaggagctcatcaagtacaagggcttccaggtcgcccctgccgagctggaggccatcctgctgtctcacccgtccgtcgaggacgccgccgtcttcgggctgccggacgaggaggccggcgaggtcccggcgtcgtgcgtggtgcggcgacgtggcgcgccggagagcgaggcggacatgatggcgtacgtggcggggcgcgttgcgtcgtacaagaagctccggctgctgcgcttcgtggacgccatccccaagtcggtgtccggcaagatcctgcggaggcagctcagggacgagttcggcaagaagacggcagcagcgtaataatgcacatcatcctgtgggtggctgcttgatgaagacaataatacaattagggtacagtcagatgttccaagctactgatacaattgttgtttctgcaaacagtactcccaactagtgcatatacattggcattgtggaccc

SEQ ID NO: 4291 - DNA, 249 bp, Zea mays
  Clone ID: MRT4577_103912C.1
ccgtcagcgactcacctattctcccctctctccccgacgtctcccatttcgtgtacggtgaccttcctcaccctgcaactcagcacgtgtaatggccgtgtttcccgttctctttccccacaccttcacatcctcttgtcttctttgcctctttctcaaacagcactgctccacattcttctattgccgttcccgcacttttttttcctcaatttcactttctcacatctttggttgcctttcctttcc

SEQ ID NO: 4292 - DNA, 1277 bp, Zea mays
  unsure (1)..(1277): unsure at all n locations
  Clone ID: MRT4577_103913C.1
aattcggcacgagagcgacgcgaggttattgagcgggagggaaggaggagcaagaaggccggccaagcggaggcatcagcatcacatcgagcatgctggagctcctgctcgtggggtgcagcggcgtggtggtgctcctccacggcgccagcctcttcctccgcgcgctcttcgccccgcgccacgccgtcgccaggcccatcagcttcctcgggttcgtggcctgatcgttcgcaatggccatcgggcgcggactgcggagatgatcgtttcgagtagctgccaccgaagatccatcgactgatgcagctgtgtgtgtgtgcccacaagttctcgttcgtttgtgtgtcagtgtgtgtggcatagccgtcggttcagacgttggcaccggccagggaaggggagcgccgatgttgttcagtgatataccaaacccacggcagggagtaaaatacaatttcagtccttaaacttatcggactatattattccggttcataaacttgtaaagtatatcttttaaagccttaatcgttattcaggtctatatgaggttcaaatcggattgaaacagctccggtagcaagccttaatccatgcccaattgctatgctcttttacccatccatgaatatctacaaaagctgtccagcctctgctcttccatgttcgtcgtcgggcaggtggtgatgggcctgccgcccttcttccacatctacgcatcaccggcatctgctccgccacgctgcggcacaagagatcccctcagctccaggtccgtcatgactcatgacagccgccgcaccgctcgcgtcggacctcgtggcgccgttcaagcggaagttcccgggcgtgcaggtggaggagacgtacgggctcacggagcacagctgcatcacgctgacacacgccggcggcggcgaggacgtggggtcgacggtgcaggtcgccaagaagaagccggtcggaatcatcctgcctaacctgacctggaggtgaagttcgtggacctcgacacggngcggtcgctgcccaagaacacgccggggggagatctgtgtgcagagccaggccgtgacgcacggctacttacactnacaggagaaggaggagacggagcgcaccatcgatgccgcggggtggcttcacaccagcgacatcggatacatatccaaatatttcttcgtaaatggntaagtcctaaattatttttatttaaaaataaatagaattaggtcacgatattaatctnngatcgatattacgttgtatatgat

SEQ ID NO: 4293 - DNA, 2936 bp, Zea mays
  Clone ID: MRT4577_103914C.1
ggccgcttttttttttttttttttgggggggaattgatatttctttcatttgaagaatttgtgcatgcacttaaccaactattatatcatctgaactctattgcgaactatgatgaacacgacaacgctgctttcacgcgtgtcactgttgaccggtggctctaagctctgtgagctcaaaggacatgagcatgacccagccaagttctacgaggtcaaaggccatgacacaaccgatcctcacctgcacaccacctttcttgacaccacgcaagaattgtgtcgccaccaccaacatgccttcaccttcctcgcgtggcccaatgccaagacctccggtcgtctcttcaaatgccaacgcagcgcccttccttcagctccatacccacaaccaccaccaccagcagcagctgaggatgggcgacgcggccatcgccgccgtgcatttgcatgagtctgaggaggagcacatcttccggagccggttcccgcccgtggccgtaccagacgacgtcaccgtgccggagttcgtgctggcgggcgccgaggcctacgcggacaagacggcgctcgtggaggccgcgccgggtggccggtcctacacctacggcgagctggtccgggacgtggcgcggttcgccaggggcgctgcggtccatcggcgtccgcaggggccacgtcgtggtggtcgcgctcccgaacctggcggtgtaccccgtggtgagcctcgggatcatgtccgccggagcggtcttctccggcgtgaacccgcgcgccgtcgccgccgagatcaagaagcaggtggaggactccgaggccaggctcgtggtcgccgacgcggtggcctacgacaaggtgaaggacgctggcgtgccggtgatcggcatcggggacgtggcgcggcttcccggcgccataggctgggacgagctcctcgccatggcggaccgcgcgggcgcgccggtggtggcgctggagccggcgcagcagtccgacctgtgcgcgctcccctactcgtctggtacgacgggggtgtccaagggcgtgatgctgagccaccggaacctggtgtccagcctctgctcctccatgttcgccgtcgggcaggagctggtcgggcaggtggtcaccctgggcctgatgcccttcttccacatctacggcatcaccggcatctgctgcgccacgctgcggcacaagggcaacggtggtggtgatggaccgcttcgacctgcgcgcgttcctgggcgcgctgctgacgcaccgcgtcatgttcgcgcccgtcgtgccgccggtcatgctggccatggtgaagagccccgtggccgacgagttcgacctgtccggcctggccctcaggtccgtcatgacggccgccgcgccgctcgcgccggacctcctggcggcgttcgagcgcaagttcccgggcgtgcaggtggaggaggcgtacgggctcacggagcacagctgcatcacgctgacgcacgccagcggggcggcgaggacgtggggtcggcggtgcaggtcgccaagaagaagtcggtcgggttcatcctgcccaacctggaggtgaagttcgtggaccccgacacggggcggtcgctgcccaagaacacgccgggggagatctgcgtgcggagccaggccgtgatgcagggctactacaggaagaaggaggagacggagcgcaccatcgacgccgcggggtggctccacacgggcgacgtcgggtacatcgacgacgacggcgacgtgttcatcgtggaccgcatcaaggagctcatcaagtacaagggcttccaagtcgcccctgccgagctggaggccatcctgctgtctcacccgtccgtcgaggacgccgccgtcttcgggctgccggacgaggaggccggcgaggtcccggcgtcgtgcgtggtgcggcgacgtggcgcgccggagagcgaggcggacatgatggcgtacgtggcggggcgcgttgcgtcgtacaagaagctccggctgctgcgcttcgtggacgccatccccaagtcggtgtccggcaagatcctgcggaggcagctcagggacgagttcgtcaagaagacggcagcagcgtaataatgcacatcatcctgtgggtgggtgcttgcttataccagtgcaagatcctgcattcgccacttgatgaagacaataatacaattagggtacagtcagatgttccaggcttttactatacaattgttgtttctgcaaaaagtactcccaactagtgcatatacattggcattgtggaccaacaaaaaaaaacaaactgctgttcctgaataacttgagcttccccccagttcccttccaccttgggtagattctgaattcacctgatgaacataaactagctagaggggttaagcttgttttttggcgggagagggtttctttttccccctgccggatgcaacgtcgtccatgctttggccctggcgccggtagcggccgccggacgcgacgaagccggggcacggccggtacgccttgatgggccaccagccgaagcccgggacggcggctatgccgccctggatccggccttgtccattgcagcccctctgaagctcgtccctgccgcagcccttgcagcccctgaagttggggtcgtctttgtagctaaagatttcgggctcaggagatccttcctcctgctccttggtcaccaccacagaagaagaagaggcgccagatgcagtgcagagaagacggtttcctctccctggggctagcgcgacacgcttcctgtatgctggaggacatgcagaggaagaatggttgcttgggagagagagctgcagacagatgcaggctgctgctgctgctgccatggctccctggacggacggacggtgagtgaatctggggagagaagaggaccggcccggccggcctcgaggagcgcagtg

SEQ ID NO: 4294 - DNA, 690 bp, Zea mays
  Clone ID: MRT4577_103915C.1
gttcatgagcaagtacgtgaaggtcggcacggtcaagaagagcgtccctgtggaaggcggcagcaccgcgagcaccactgaggctgagaaggcaccgacaaccgaagagaagccaagcgaggcggtggttgaggagaagtaagccccggctaatgaaggtgcccaggaaaactagaacttttctgtgcatgcggcaataattcgacatggtcccattcgggtcgtgtcagggccctgctatcctctcgtgtctcgtgtcgtatatcagcagcaatggcccgtgtgattggatacgtccatctgtgccagcgccgtggtgctctataattgctgttagtcccttgtggccttatgtgttcgatcggataatcggtgctcttttaaaaaaaaaaaaaaaaaagggcggccagttattttctttgcagtaccctaaggtcatcaggttccttgtaatgtctcgcgcacgtggggatatgccatgaaaatgtcgtggaagtcatgttattgtttactgcaatgtgattcctgtcaacgtgcgtggcattgagccagagtcatgtgttctttgaggggttgaatggcacgggaaaatcccaagttggcttgtggagtcctgtcatcgttttgaaaacagctgccaccgttttgaaaattgatgttcataatgaagggatcttccccaggtgttcc

SEQ ID NO: 4295 - DNA, 908 bp, Zea mays
  unsure (1)..(908): unsure at all n locations
  Clone ID: MRT4577_103916C.1
ctcctctttcccaataatcccaggcgccgcgatgcaaacaatctcctcttctctccccagattcactcaccgtccgtccgtccagggagccatggcagcagcctgcatctgtctgcagctctctctcccaagcaaccattcttcctctgcatgtcctccagcatacaggaagcgtgtcgcgctagccccagggagaggaaaccgtcttctctgcactgcatctggcgcctcttcttctgtggtggtgaccaaggagcaggaggaaggatctcctgagcccgaaatctttagctacaaagacgaccccaacttcaggtaaacctacttgttcgtcctcaaatctcctagatagcacttacgttttagcgaattgtgcgtcgatgcacacacactcacaccacacacaggggctgcaagggctgcggcagggacgagcttcagaggggctgcaatggacaaggccggatccagggcggcatagccgccgtcccgggcttcggctggtggcccatcaaggcgtaccggccgtgccccggcttcgtcgcgtccggcggccgctaccggcgccagggccaaagcatggacgacgttgcatccggcagggggaaaaagaaaccctctcccgccaaaaacaagcttaccccctctagctagtttctgttcatcaggtgaattctgtgcctgctgcagtatgctgcatacaatgttcctgtctatctgacttttgtacttccaaccagagcagcgactagttattaggctggaacttgatgatgtttcttatcagaaattcagaatctacccaagatgggaaggaactggggggagctcaagttattcagaaacagcactttttttttttgggtcacaatgcncatgtatatgcactagttgngagtaccttttgc

SEQ ID NO: 4296 - DNA, 289 bp, Zea mays
  Clone ID: MRT4577_103917C.1
gtgggggttttttaatggtcatgcccataaaaaccacctaacgatgtatgtgtttaacaatataaaaaaatcctgaccttttcatatcccgttttggctggagttcacatttcgttacataccacagggttaatctagttcgtggctcctgctacggaatcatcaccatggacgttcaatactacattcgaggcctcccccatcagttgcggacatggaacaaccaacttttaaaagatgctcttctggtcaccaatccaagttcaaaaccccccccaagatgtacccc

SEQ ID NO: 4297 - DNA, 302 bp, Zea mays
  unsure (1)..(302): unsure at all n locations
  Clone ID: MRT4577_103918C.1
aaaaannggctcagggcccataccaggtttggaattataataatcttaagttacattctaaaccttttttccagttctcatggcattgcctcactgatgtcatataatctcactaacagtagctactacaggtctggactatgcatacatccttgcattgcacctcaagcatacggcatgcatcatttgcagctgggcctgcctctagttcaagccatgatttttcacaggggtacatacatgaagcagaagaaccatttgcataaattggaatattatggatatcatatattatggaatga

SEQ ID NO: 4298 - DNA, 601 bp, Zea mays
  Clone ID: MRT4577_103919C.1
gccccctctcgagtttttttttttttttttttttttttttttttttttttttttttttttttttttttttttttacgggacaaaaaaataacttattttgaaagagcgcctgttttccgaccaaacagggccgggggcgcccaacctgaacccgatgtttttaaaatctgcaacggacgcaaagaaaattactcattttaaaagagcaccgattatccgatcgaacacaaggccacaagggactaacagcaattataaagcaccacggcgctggcacagatggacgtatccaatcacacgggccatagctgctgatatacgacacgagacacgagaggatagcagggccctgacacgacccgaatgggaccatgtcgaattattgccgcatgcacagaaaagctctagttttcctgggcaccttcattagccggggggggggggggcttccttctcctcaaccaccgccttcgcttggcttctcttcggttgtcggtgccttatcagcctcagtggtgctcgcggtgctgccgccttccacagggacgctcttcttgaccgtgccgaccttcacgtacttgctcatgaacttgtactccca

SEQ ID NO: 4299 - DNA, 1201 bp, Zea mays
  Clone ID: MRT4577_10391C.1
attgggacctcgagccggccgggaatctccagccggggataaatcattgggtacctcgaggccggccgggagaactctcacacacagagaccacccgcgcgctgcgcctcggttttacggcccttccctcaccgccccgcggccatgaagcttgaggtcatgcccaagcagcgggtgctggaggcggagcagagggaggaggccatggagatgagtggcctggacctgtggaagcacgagaagcccccaaggatctgccccttgcccccgtcgctcccgccgccgccgccagcgtgcgacgaggcggcgctcgtgccgccgctcaacttcgccatggtcgacgacggcatattccgctccggcttcccggagaccgccaatttccggttcctcaagtccctcaacctccgctccatcgtgtacctgtgcccggagccgtacccagagacgaacacggagttcctcgagaagaacgggatcaggctccaccagttcggaatcgaggggcgaaaggaaccatttgtcaatatacccgatgacaaaataagggaggcgctcaaagttgtcttagacccaagaaaccaacctctgcttattcattgtaagagaggcaagcaccgaactggctgtttggtcgggtgcttgaggaagctgcagaaatggtgcttgtcttcagtcttcgacgagtaccatcgctttgccgctgcgaaagcgcggatcactgaccagagattcatggagctgttcgacgtctcaagcttgaagcacctgacaccctcacattgttaaccccaaggcgcgtgatcgcttgatcccccccaacttctagtacatctccaaggctatcttcctgcagctactgaaccgattcagccgtgaataattttggaaccccctagagtccatgaggtagtgatgaaaccattgcagaacattcgtgcttgagaggtttagtttcccccctgcttagcgcactggagagcctgagaaccagactgctgcggtcgatttgcgaggggttctcttttttggtagctctcgcgaggaattcgccattgtttttgggtactgaagcagcatgtactcgagcagcttctgaggaggaatgaactactctctaagtgcaaaaaaaaagtgtctcttcttgcacgagtgtggttagggatactgcatattaacaaaaaaaaaaaaaaaagcggcc

SEQ ID NO: 4300 - DNA, 1926 bp, Zea mays
  Clone ID: MRT4577_103920C.1
agacatccctgttgccccgaagtcagagagggagaggaggctagggatagagcagcgtcatcgcaccgctcgccggcgagccagatcatcagtgaggaaggcagcgatggcggtggtggagctgtgggagacgctgaagcaggcgatcgttgcgtacacgggcctgtctccggcggccttcttcacggctgtggcggtggcggccgctttttttttttttggtttgcaaagaaaattactcattttaaaagagcaccgattatccgatcgaacacaaggccacaagggactaacagcaattatagagcaccacggcgctggcacagatggacgtatccaatcacacgggccatagctgctgatatacgacacgagacacgagaggatagcagggccctgacacgacccgaatgggaccatgtcgaattattgccgcatgcacagaaaagctctagttttcctggacaccttcacaagattattagccgcaaaaagcagaccttgttggcaaataattataggaaggaagattcttattgcatctgtacagaaattacgcgctgctttctcttctgaatagtaagtagtagctagatcatatctgaaagctcactgcagatcgtaaacggtggagtcggcggcgtagcatccaagcacgcgcacgaagacggggaacctttccatctcctggatggcctcgcggacgcgcgggtcgtgcgcggcgccctcgcagtccccgtagaggacgtgcgggaaggcgcgcagcgtgggtgcgtcccaggcgcccgtttgccctcttttttttttttttttttttttttttttttttttcggtacaaagaaataactcattttgaaagagcgcctgttttccgaccaaacagggccaggggcgcccaacctgaacccgatgtctttaaaatctgcaacggacgactaataacaacacaaagcaccagctcctcaagggccatggcgctcgtacagatgacgtatatccaattacacaggccacgctgctgatacgatatacgagagggccccgacacgaaccgaatgggaccatgtcgaattattgctgcatactgaaaaatgctctagttttcctgggcaccttcaccagccgcggcggcggcagcggcggcttccttctccttcacagcctccgctggcacttccctcggcttctcttcggtcgtcgtcgtagtcggcgccttctcggcctcggtggcggcctcactggttccaggggctgtgcttgcggcgctgctgcggtcttcaacggtgacgttcttcgtgacagtacccaccttcacgtacttgctcatgaacttgtattcccagtcctgcagggcatcgagctcaaacgggcctaggccagtgatgtcgccggtcagatcctgtggctcgaaggacatcttcgctagggctctgctggcgtctttgccggcgaatagggcgtatggtccaccaggtccatagaacattctgctctgggtgacgtcgtagatctggcccttgatggccatgaggagcggcttcttagggtcggagccgtcgtactggctgagctcctcctctgagacctcccccatctgcacggggggcgggagcggctccgcctcgggctcctcccgcgggcgcggcggcggcgggggcggggctgcgaagagccccgacacgacatggtacagagtgccctccgccaaaaggcttcgggggcaacttgcgttcaaaaacttcatggttcgcggggttttgccattccccccagggatcgcattttgctacgtttttcatcgatgcgaaaacccgagaaatcccgttgcccaaaagtcgcggttttttttttttttttttttttttttttttttttttttttttttttttttttttttttttttttttttttttcacctcaccggc

SEQ ID NO: 4301 - DNA, 454 bp, Zea mays
  unsure (1)..(454): unsure at all n locations
  Clone ID: MRT4577_103921C.1
tgtttgaactcaaaactaattgtgtttgtacagattggtttggatcttacaatcgcttctctctccagtttccactcgacttccgaggcaaaagagcgctgaagcascccgccagccctgaacatgcttacacagagacabgatcgccgcgagagagangccaaaacgcttcctcatcsscccctgattcttagtattcacatcggaagatcgaaagagasggagaaaaaaaaacagagacaagaactcgtgaaccagagctactctgtytctgacggctcytcagctatgytctccagcygcgggcgccacacgccggktcgggcgcygtccgccgycgccggtggctcatcrggctcgcctcccgcttctccgacagggktcgcgcrggtrgttgtcctgtccgcygcgytcatcrgcgaccgcgcyayagaggcgcygccgcycbtctgcb

SEQ ID NO: 4302 - DNA, 374 bp, Zea mays
  Clone ID: MRT4577_103922C.1
tccacgcgtccgacgaggtctagatcgcgggcggccgacatgggggcgtacaagtgtgtggcagcactatggaggaggaagcagtcagacaagatgcgctggacacagggcgtgcgctgctggaatacaggcaaattcgtcatggttcgcataccaggcccacccgtcactacaaggcccggtgcatgcgctgcaaggccaagcatgaatatggtgtctaccgtgagcgctggaagcgacccgattcgaagaggactgtgcgaagggtgatcgactatggcaagccgaagcaccagggaatcacccaggtgaagtttcagagggacatgacgtctgtcgctgatgagagagctggacgtcagcttggaggactg

SEQ ID NO: 4303 - DNA, 314 bp, Zea mays
  Clone ID: MRT4577_103923C.1
attcggctcgaggtgacttgccattccatctggccaaacgcgaataccagcctcgtgcggtcctgatcaaggggtacgggcgcgcagaccctcgggtccgacgattcaacctggctgacgccggccttgctgatcgttctggatgactatggtgtagcgctaggaccctatgtcgtgcccgtgcactctcgtgtcgacctggaggacgtacacaccaagtgcggctccgaagagagcaaaggcaacaccatttgcgactgaaagaactacagagacgggagcaaccctagcatacgcttcgcccaatggcggga

SEQ ID NO: 4304 - DNA, 456 bp, Zea mays
  Clone ID: MRT4577_103924C.1
ggcactggctctgggctttcctggaactaaaatcacacaaaaaaaccctgtttacattttacagcaaacgacccccagtaaaaccttattaagcaggttaaaaaaaccgaccttggtggaagggatgttcatcaaaaaaatctaacaaacagtctttgtaagggacatcgacctacctacacaaatgggggaatccatggactgtttgttaacaaggcatttgggcaacttttttttaaacaccttaaaaaagctcttttgctcccgaaaccgcaaaaagacaaaagcccccctgcaaatactgacaatttaaaggggggaaaaaagggctggattcacaacgggaggggagaaaaaaaacttgggtttttttttgaaaggaaaaattctacaaaatcttccgcaaaaaaaaaaaatttagcatccccttttttaaaacccaggggagggggaatt

SEQ ID NO: 4305 - DNA, 391 bp, Zea mays
  unsure (1)..(391): unsure at all n locations
  Clone ID: MRT4577_103925C.1
tttttttttttttttttttttttctcaaacatatgatgtatagtggcncagggacgaatgtcacaactttatatataacaggagttctatacaaataaatagttacattataaggagacaacagtccagcaacccaaagttgactgggagacgacgacctagacctctcacgaactcatcaccgcatcctccatgagcatcatcctgcagtacctggtcttgaccgtggattatgtaccgatgatcacgggtcacgagcaatggcggctccgccgtgaacctttcgcttcggtgagcaattggggacgccataatgaccgcgccacccagtttcggccatgggcgcattcctaagaacgcggtgaagctcccagacccgcagttgagctcg

SEQ ID NO: 4306 - DNA, 382 bp, Zea mays
  Clone ID: MRT4577_103926C.1
acgcacgacgcttcggcggggtggatccgcgtgaccacatctgtacagatcgaggctcaaggattacatatgcgcgtgctatttactgatgcatagcacaaccacctgatccggatgggaagacagatctgcctgctgaaatcgattccagatcatgtaagaactactactttagcgggggcggtgttagacgaaaaagggcgtctcggtgaataagagaaccagccacacatccatgtgtaaccaataaaggcactacgggaggtacagacctcttaccggctgacccacaattgatgcgcctggtcagaacgcagacgatcagtcttgacgcacggtgaaccgacagctaggaagcttacccatatgcgaggagtgcaag

SEQ ID NO: 4307 - DNA, 439 bp, Zea mays
  Clone ID: MRT4577_103927C.1
aaaaccagaacaccacgttttattctcaacaccaaattttggtttcaggggaacagaaaacgggtttatgacccaacaagcatcgcatttacgagggggcgaacaggttacaagctaaagggagggatcgaaaatcgaacagagggggggccgctcgccggtggggcctactttttgccacctgccttatttttggtgcccggggggggcccggggcccccggccgttgcctggtgggcctttttggccgccttttcctccagggcttttttggccctttaacggggctgttccggggggagcccgtcctggggccccttgccgggggggttccgggccgccgggcgctaaaaaacgcggacaccctggttgccgcgaggaatgtcgcctgtaacactcacgctgaccctggttaccgggcgcgccgccccccttgggc

SEQ ID NO: 4308 - DNA, 337 bp, Zea mays
  Clone ID: MRT4577_103928C.1
gagcgcgtcgtctctttttttttttttttttgcagttttgggggaggggggatcatacagtgtttttcttgccccaatcttcaacatgaacagggttttaagattaatttaaacgccctatgagctttggtcctatcccctgacataaaaccagggatgggagaccctacatggctaaagatgcttgaaacactatgtccctcttgagcttgtagaccgcctcctggagttttgcttataactccgtttccccaatggacttggatgccacaataatctggtggagaaccttctccagccttctgatggccctgatcaggctttctttaaacacttg

SEQ ID NO: 4309 - DNA, 395 bp, Zea mays
  Clone ID: MRT4577_103929C.1
aaaacaaaaagttggatccccggaggaaacggggggccggaaacaaaagattttaacctttaaaccacattttggcccacgccctattaaagaccccgtataaaacaacaggtggcctgggcccagggaaaaaaagcagaggacagaaaccgggtaaatccccgaaccaccaccatggttcggggcaaaaaacccgcccaagggggatccttataaccaagaaagggtttttttcccgcacggggtttgtttttgactaaggctggaaataaccgaccaccccccttggggggacacgcgaaagtaaagcgtcacactggaggggtgttttgattttttggggggggcaaaataggggggtgttcacggtctttacggactccacggggagtttg

SEQ ID NO: 4310 - DNA, 402 bp, Zea mays
  Clone ID: MRT4577_10392C.1
aaaaaaaaaaaaaaaaaaaaaaaaaaaaaattataaaaaaaaaaaaaaaaaaaaatgttaattttttaatttaataaaaaaaattaaaaaatactaaaaaaaaataaaaaattggctctcctttctaaattatcccatttttttttccccaatcttcccccgcctttctctatcttattgttcactaaatttcaattcactccccttcttttaacaccttctatacttataaaacctttccttcccctactttattccctttacatttacatacccctttctctaacttttttattattaattaggccctttccttttccctttccaaattatttccctccttaatacgctaattgtaccctccccttataactcattaaacccccttttttttttttttcc

SEQ ID NO: 4311 - DNA, 167 bp, Zea mays
  Clone ID: MRT4577_103930C.1
gctcgacccacgcatccgatcatacaccatacatctaaccagctttttttcaaccttcatctcctctactcacctgaccctctatatagtctccaatgcctctcacttctatcattttatcttacctcacaaactttcttaatcaaacatttcacaacattcacata

SEQ ID NO: 4312 - DNA, 241 bp, Zea mays
  Clone ID: MRT4577_103931C.1
ttttttttttttttttttttttttaagggcgactttttgccttcaaataacaccgattcgaggcggtctataaccagatgccgaaggtcaaaaaaaaaaaaaactttttgttactatatattgagaggatcataaaacccttcttttaattttgagctgctaaagcattatattcacttggggtaacttcggtttgacctaaaacttcaagtgggtaaatggggattctaattattcttcc

SEQ ID NO: 4313 - DNA, 107 bp, Zea mays
  Clone ID: MRT4577_103932C.1
aaaaacagccgtattgtcccgactcccgaccgctagctagcctcgcctgcttcaacctggcgacctccgcggagctcttcaccgccggcaatccccgccaagtgtac

SEQ ID NO: 4314 - DNA, 423 bp, Zea mays
  Clone ID: MRT4577_103933C.1
aaaactgggtcaaaccagaaaatttggggaaaccaagggggagggcgggggacagatctgccaaaatctagcaggggggttcaaaaaaaaaaaaaaaaaaaccttaccaccgggccccaaatttaattcccccaagcgggcgggtttaattggggcgacctagctgggaggacctggatacttggactgcccccctgggttgggggatgcatgaagactaaaacatcccacgttgcagtcgcatgggcgccattgctaccttttttgccaaacaggggacgagcctgggccacctttttaacagcctgggagaatccttctcctttcggccataatcccccttgaggccccccctggaaagccccctggaactagggggccccttaaaaaagcttttggggcaagagttttgggggggggggg

SEQ ID NO: 4315 - DNA, 2116 bp, Zea mays
  Clone ID: MRT4577_103934C.1
cccactcgtccgcccacgcgtccgcgtgaatctccttcaactttgattcgagatcaacaaaatccacaggaatatatctatcttctccgccggagcctgggaggtcgcaacaatatggaagcaaccgacgaggagaacgctctgcttcttcgtctccatcccactccgcaggtcgtagcttcggagtacgcaagtgatggttcagttgatatcaacaaacaacctgctctcaagcacagaacgggtaactggagggcatgctaccccgtcttaggtgttggattcagtgaaggcatggtgttctctgcaatcgcgacgaatttagtgacgtatctcaccactgtgctccacgagagcaaggtggatgcagcgaaaaatatctccgcctggtccggagtgtgcttcctcacgccacttcttggggctttcgttgcggacagttacttgggaaggtactggaccattgttgtggtcctcccggtctacatcgtggcaatgctcgtcctgatagcttcagcatcactcccggtattgttccagagcgacgtgcaccctgcagtggtttaccttggtctctaccttgccgccattgccagcggtggcgtgaagccctgcatttctgccttcggggctgatcaatttgacagcaatgacccggcggagctggtgaagaagggctccttcttcaactggtacttcttcctgacgaccaccagctccctgctgtctggcaccgtgattgtttggctgcaggacaatgttgggtgggcagtcagctacgtgatcccgaccgtgctcatgctcatctgtttccccgcatttttagctggctccagggtgtacaggtttagggaaatgggagtaagcccccttgtgagcttacttcaagtggttgttgcagctgtcaggaagtggaatgccaaactgccggacgatagctcgctgctatatgagcaggccagttcaccttgtacgactgaagcaagtcataagaacaagcataccaatcagttcaggttctttgacaaggccgccattgtcccaccaggcaacgaatccacggtgcagacgagtccatggaggctctgcacagtgacacaggtcgaggagctaaagatgctgctcttgacgctgcctacctgggcgtcgttcgtgattttctacgcagtcacgtctcagatgcagtcgacgatgattgagcaaggcatgctcatggacaaccacgttggctcgtttgccatcccgccggcatccatgccgatcattggtgtgctcagcttcctcatctgggtcgccgcctatgaaaccgtcctagcgccattggcgcggcgcttcaccgggaacgagaagggcttctcccagtggcagcgcctcgcgatcggccaagccctgtccattctgacaatggcgcttgctgcgctggtggagacaaggaggctggcgatcgcggaagccagcgggctgaggcatcgggaggtgccggtgcccatgagcatcctgtggcagggcccagttttctttgtgcatggtgcggccgaggtcttcggtgccatcggcatgacagagttcttctacgaccaagccccggcgaccatgaagagcctgtgcgccgcgttcgggcagctcgcggtggcttccgggtcgtacctcaacacggccgtgctcagcgtcgttgcgttggccacaacgcgcggcggcgcaaccggatggatttcggacaacctcaatgaaggccatcttgactatttcttctggatgatggccgctcttagcttgctgaacctagctctgtttgtgcgctactcaatgaggcatacagacaggcaacgtaagcaagaccttggtttatcataatttcaggaaaaatatgaacaaagcagactagaagctatatggatagactactcatgaatagtaacattgtatgaagcagctaagtgcaagtgacaacttatttaatataggatctcttaagaagtgtatttagaaggttatttaagaaaaaaatagacgagctcttagcgaatagcttatctctaccagacttcgtacacattgtctattaactgtatttataatctagtggttcagagttatattatacaatatcttagtt

SEQ ID NO: 4316 - DNA, 877 bp, Zea mays
  Clone ID: MRT4577_103935C.1
gctaagtgtcccccatgaggccatgatccatccttgtagccgctactactttgctcaagatccactcccgcctctcagggtcgacgtgaatctccttcaactttgattcgagatcaacaaaatccacaggaatttatctatcttgtactaggtcctcctctgacagagcagctccgccggagccagggaggtcgcaacgcagcgatatggaagcaaccgacgaggagaacgctctgcttcttcgtctccatcccactccgcaggtcgtagcttcggagtacgcaagcgatggttcagttgatatcaacaaacaacctgctctcaagcacagaacgggtaactggagggcatgctaccccgtcttaggtgttggattcagtgaaggcatggtgttctctgcaatcgcgacgaatttagtgacgtatctcaccactgtgctccacgagagcaaggtggatgcagcgaaaaatatctccgcctggtccggagtgtgcttcctcacgccacttcttggggctttcgttgcggacagttacttgggaaggtactggaccattgttgtggtcctcccggtctacatcgtggcaatgctcgtcctgatagcttcagcatcactcccggtattgttccagagcgacgtgcaccctgcagtggtttaccttggtctctaccttgccgccattgccagcggtggcgtgaagccctgcatttctgccttcggggctgatcaatttgacagcaatgacccggcggagctggtgaagaagggctccttcttcaactgctggctccagggtgtacaggtttagggaaatgggagtaagcccccttgtgagcttacttcaagtggttgttgcagctgtcaggaagtggaatg

SEQ ID NO: 4317 - DNA, 907 bp, Zea mays
  Clone ID: MRT4577_103936C.1
gggtacccttggagccggcgggggtggacctgaatctccttcaactttgattcgagatcaacaaaatccacaggaatatatctatcttgtactaggtcctcctgttcgttcccagataccagtacagtaccacttctgaagcctgaaagaaattgtgctgctgaagcctgctttccctgcagctccgccggagccagggaggtcgcaacaatatggaagcaaccgacgaggagaacgctctgcttcttcgtctccatcccactccgcaggtcgtagcttcggagtacgcaagtgatggttcagttgatatcaacaaacaacctgctctcaagcacagaacgggtaactggagggcatgctaccccgtcttaggtgttggattcagtgaaggcatggtgttctctgcaatcgcgacgaatttagtgacgtatctcaccactgtgctccacgagagcaaggtggatgcagcgaaaaatatctccgcctggtccggagtgtgcttcctcacgccacttcttggggctttcgttgcggacagttacttgggaaggtactggaccattgttgtggtcctcccggtctacatcgtggcaatgctcgtcctgatagcttcagcatcactcccggtattgttccagagcgacgtgcaccctgcagtggtttaccttggtctctaccttgccgccattgccagcggtggcgtgaagccctgcatttctgccttcggggctgatcaatttgacagcaatgacccggcggagctggtgaagaagggctccttcttcaactggtacttcttcctgacgaccaccagctccctgctgtctggcaccgtgattgtttggctgcaggacaatgttgggtgggcagtcagctacgtgatcccgaccgtgctcatgctcatctg

SEQ ID NO: 4318 - DNA, 460 bp, Zea mays
  unsure (1)..(460): unsure at all n locations
  Clone ID: MRT4577_103937C.1
cctcgaggccggccgggatctagttccgttggtcgccaaatatgcgtgtcctgggatttccccaatcactgcacaatgcgctcccgtggctgctttcccgtgttttttttgcctcgcgcgccgtagtggtggtggttgaaggcatgagcgcgtgagcctcgatgcaggcggcgatcgcggaggtttttgcatgtgaggagcgagacgctcgatcgtggtggacgagacagcggtagagtcttctgcggtgctagaaaaggctaggggacattgatccgcggaggagacacacggtcgtaccttctgcgctactgacatcggcaggggagagctccatccgaggtgaaggcgcgggcccgtggcttctgcgctagtggccggggctggnnnaanntcnatccacgatggagagccccatctgctacctccctcagtctccggccacgtccgcagcgcctcc

SEQ ID NO: 4319 - DNA, 263 bp, Zea mays
  unsure (1)..(263): unsure at all n locations
  Clone ID: MRT4577_103938C.1
gcggcgagttcagatctcacaatcttcttgtagcacaccactgtcttcgtccaactcggcggcgatgtctgggcgcggcaagggcggcaaggtgcttggtcagggcagcgcgaaacgctaccgtaaggttctccgcgacaacatccagggtatcacgaagctggcaatccgngagcatgcgangacgggcggcgtgagcgtatctccgggcttatctacgacgagagccgcagcgtgctcaagatcttcctcgagaatgtcat

SEQ ID NO: 4320 - DNA, 338 bp, Zea mays
  Clone ID: MRT4577_103939C.1
tttttcattttatttagcattattagaatattttaaaataaactatgggcatggtatcatagaagatgaatatagatcccattgctggagactttagaaacttctgccaaaacggaaaaaactgttaacagtcaaagctagccgcgaaacaagatagcatcgtactctggatgcgtattacatcctgttgcttgcgggaagcgttatgccatacagcttggacaaagcattatcacggaagttcttgtacaggaggccatcctcaaggccattgtactgcaatcccgatcattcatttgccaatatacttcaacttgcaagagcaacgatcccacaaa

SEQ ID NO: 4321 - DNA, 1230 bp, Zea mays
  Clone ID: MRT4577_10393C.1
cattgggtacctcgaggccggccgggaccacccgcgcgccgtgcctcggttttagggcccttccctcaccgccccgcggccatgaagctggaggtcatgcccaagcccaaacagcgggtgctggaggcgcagcagagggaggaggccatggagatgagcggcctggacctgtggaagcacgagaagccgccaaggatctgccccttgcccccgtcgctcccgccgccgccgccagcgttcgacgaggcggcgctcgtgccgccgctcaacttcgccgtggtcgacgacggcatcttccgctccggattcccagggaccgccaacttccggttcctcaagtccctcaacctccgctccatcgtgtacctgtgcccggagccgtacccggggacgaacacggagttcctagaaaagaatgggatcaggctccaccagttcggaatcgaggggcgcaaggaacgatttgtcaacatacccgacgacaaaataagggaggcgctcaaagttgtcttagacccaagaaaccaacctctgcttattcattgtaagagaggcaagcaccgaactggttgtttggtcgggtgcttgaggaagctgcagaaatggtgcttgtcttcagtcttcgacgagtaccatcgctttgccgctgcgaaagcgcgaatcactgaccagagattcatggagctgttcgacgtctcaagcttgaagcacctgacaccctcacattgttaaccccaaggcgcgtgatcgcttgatcccccccaacttctagtacatctccaaggctatcttcctgcagctactgaaccgattcagccgtgaataattttggaaccccctagagtccatgaggtagtgatgaaaccattgcagaacattcgtgcttgagaggtttagtttcccccctgcttagcgcactggagagcctgagaaccagactgctgcggtcgatttgcgaggggttctcttttttggtagctctcgcgaggaattcgccattgtttttgggtactgaagcagcatgtactcgagcagcttctgaggaggaatgaactactctctaagtgcaaaaaaggcgtgtctcttcttgcacgagtgtggttagggatactgcatattaacaagaggttgaaatagcatgataattgcctatttaagcctcaattagccccaaaaaaaaaaaaaaaaattaatcttgcatttcgtaaaaaaaaaaaaaaaaaagcggcc

SEQ ID NO: 4322 - DNA, 431 bp, Zea mays
  Clone ID: MRT4577_103940C.1
cgagtacaagctttttcttttttttttttttttttttttaaatttttttttttttttttttttttttttttttttttttggtttattttcagcacaccggccggggggacccccgaaagcgggcggcccaccaaacggggggccagcacgggcccaaccggggcctgagccaaaccggggcccgttcccgagtcaacacgttccccgggccaaaaagccaaacaccgtaaaaacccgggagccaaaagagggaaccaacaaaaaccaaaagcggggggcacccaacaagaatgccaacccaaaaaccgggcgcgccccccacaggaaacattccgcccacgaaccctgaaaggcccggcgcacatagggagccggcccgcctccgggaagagcgacttgccgattgggggccttctgcctccccgagccaa

SEQ ID NO: 4323 - DNA, 105 bp, Zea mays
  Clone ID: MRT4577_103941C.1
accaagcagcagatgaccatattgtgtgaatcaacggtatcctcttcgtactagtgttgtattactaatcgcggcagcgggcatcagttagggttaaactaacct

SEQ ID NO: 4324 - DNA, 167 bp, Zea mays
  unsure (1)..(167): unsure at all n locations
  Clone ID: MRT4577_103942C.1
ctgtgcagaaatgtttggtgcctgttttatttttcttgcataaaagtcacaagcactganaggtggctcccctatttaaagcttcggaaaagggtttaacccaaccggttttccccatctggtggggaacttccgtgcttattgcgcgttccttacaattttccacc

SEQ ID NO: 4325 - DNA, 594 bp, Zea mays
  Clone ID: MRT4577_103943C.1
gtacacggccccttttcgagtttttttttttttttttttttttttttttttttttttttttttttttttttttttttttttaaaacaaaaaattttatggtttatttagaaaaattaaaaatagtttataaaatttgaaataaaatttgatagttttgggaaaaccctataaaaaaaggtttggcaaaaaaaacaaaaacggtttaagtggttacaggaaaaacctccacccgggggggggggtttggtttttatttgggttatttttaacaggttacaacacccggggcccccacagtaaagggacccccccgcccagaaaaaatcccaggggccctactaaggggcccggaacccccctggggggccccttatttgaactagccggtgaagggggggaacaccttgggcgccccaataacttcgggaagggaccccgttggggggggaacggacccgagggggcccccagcgctgaccattggggggaaaatccagggggggctccacctgggcagggggcgctgaacaatttacattttgaggggaaagaaaacggggagcggccaaaaggaaacggccccaagcaggccg

SEQ ID NO: 4326 - DNA, 242 bp, Zea mays
  Clone ID: MRT4577_103944C.1
ctttggtaagccagtcgtagaattggacggcaaatatgtagcatcgccgattgataggttcaaatatcatgaaccttttgatgctgtttgtgtgtgtatgattgttacttctggttactgcacggtttttacgactcatgatatcgcatcgaagtggctttgcaaaagctaaaatttgcgttccctaaccttgtttcaactagcggctctacaatcacggttggactgttggcttgaccttc

SEQ ID NO: 4327 - DNA, 485 bp, Zea mays
  unsure (1)..(485): unsure at all n locations
  Clone ID: MRT4577_103945C.1
gtcacctctagcctgccatgtgaaaatcccaacggtggtttaggtctatagatcatcttgaggaacctttatggggggttttcttgatgcccgcaattgatttgataattaaagcggtaacaattaaaggggactaaagagctcgcctgaaagacatattaccaggaggctggaatgggtggttttccagagaaaagctgcacattacacacaaagacatatttatggtgcgggtcaccgacatggacatagacacacagaacatcatttgctttctcaaactgtataagtgaggctgcttcttatctctcacatgatttgccacagatatgggctgggacttggtatgcatatcttttaccatagctactgaattgggtcttctgatgctttggcacagtgctatataaacgtgggtccgntcatgctatatgtataaagatgttcttgtcactgctgaggactgctgtggcgaacctgcttgt

SEQ ID NO: 4328 - DNA, 300 bp, Zea mays
  Clone ID: MRT4577_103946C.1
ggccgctgttttctttttttctccggagatgattgcccctcagatcatgacgtaggcatacatgcattatcctagactggagaggggggacactcagatcgatatatatgatgactacgatcgctcctaaaacagctgtggatgtgggacacacgtgcggtgtgctccagagcaccatgcatgggccatggatgatatcataattatcatgggttcatgggatgggaatggatcggagcacgtgcttaaccatgatcagcacacacgtatctctcgcaggggcggcggtataccgggtga

SEQ ID NO: 4329 - DNA, 471 bp, Zea mays
  unsure (1)..(471): unsure at all n locations
  Clone ID: MRT4577_103947C.1
ccggggcaggcatgttgagcagtcactcgcggnggtggcagctcagatcgagtctgtgacggagaagatcataatggaggaggagaaggtgaagaagtggaaagcggagaacctgaggaggaagcataactacgtgcccttcctattcaatttcctcaagattctcgaggagaagcagcagctgaagcccctgatagagaaggcgaaggcgaagcagaagtcccacggccccagctaggtgaaaagccgcaatgcacctacgtactgtctcttttagttggggttccttgtaagattggagttcgcgtatatgctttctgtttttagtttaggacaattgcaccaatagggtgcaactgcagatttatccctgttttttagactttgcgtgtgtgcttataaatgaaactgctgtatgtctctattccgttaaaccgttgtatgtctctacttcggttagtcgtatttagt

SEQ ID NO: 4330 - DNA, 2384 bp, Zea mays
  Clone ID: MRT4577_103948C.1
gctgtagtttgtattagggcggatcaaagaaagttttacctggccggtggagcttccttggtcatcctggcgcaccttgcgccagctgacggaatcagctccatctctggccgatccccatatccactaagatcccttccccagtcccaagccttgctgcgatcaccgctgcgcagtcctaggcgcccacgacatatcaccttttaacttatatacagtaagatcacgagtttgttgaatttgatatatgtttacaccttaccgaagtgagcatacaatccacctttttttgttagtggaatgaattgtaagcaattatccatacactcattagaaccatctggaaatgttttgcttgtttaatactttcattactttgcgacagatgttgcctgatataactcgtgatgattatatgataaaacagccttagtgagttgttaaggtccatttaaacatacaaatgagaatgaccatcattttagtttagcctagctctttagggtgcctgaagccctgaaccatgtagctgcctttttacaagaccacaacagcctttatttaaaacatgctataatctattcaaagcatactcggatagtaaaacagtggcaggtgtttccccttcatctgttgatccatgtagcttgttcttgtgcttttgaagcttttagttgtttctaataataaaactatagatagtatgcggcaacatagaacatatttactttttccaaaacaagagtgaggctctcctattttggtatttcttcctttttgtgaaacttgacatttcttttacataataaaaaatcgggcagatatactctgttatctttttcattatcaggttgatgaactctactcacttgacctggatgctctcaatgatcttcagccaatatatgggctaatattgctatacaaatggcgacctccagaaaaggatgagcgtcctgtcatcaaggatgcaatcccaaaccttttctttgccaaccagataattaacaaagcctgcgcaacccaagctatcgtttcggttctcttgaactctcctggcattacccttagtgatgagcttaaaaagctcaaggaatttgcaaaggatttgccacctgagctcaaaggactggctatagtcaactgcgcaagcattcgtatgttaaacaattcgtttgcgaggtcagaggcctctgaggagcagaaaccacctagcggggatgatgatgtataccatttcataaactacgttccagtggatggtgtcctgtacgagctcgatgggctaaaggaaggaccaataagcctagggaaatgcccaggtggtgttggtgatgcagggtggtggcttaggctagcgcagcctgtgatcaaagagcacatcgaacctgttctctcagaacgagataagattcagcgtgatggcgatcttgaagaaccggaaggagatgttcacggtggagatcaaagaactccagaggaagagggagggcctcttgcagcagatgggcgatcccaacgcaagcaggcatgttgagcagtcactcgcggaggtggcagctcagatcgagtctgtgacggagaagatcataatggaggaggagaaggtgaagaagtggaaagcggagaacctgaggaggaagcataactacgtgcccttcctgttcaatttcctcaagattctcgaggagaagcagcagctgaagcccctgatagagaaggcgaaggcgaagcagaagtcccacggccccagctaggtgaaaagccgcaatgcacctacgtactgtctcttttagttggggttccttgggcatgtttggtacctagcctaagccgccgtcaccagccacacttttcccgccgcagttgtggcggccaattcggccgccacaacttaggcgtggcgtgtggcgccacacaccaaacacaccacttgtaagattggagttcgcgtatatgctttctgtttttagtttacgcctacggcaccaatagggtgcaactgcagatttatccctgtttttttagactttgcgtgcgtgcctttagattttttgaaacgaaactgctgtatgtctcttccgttaaaccgttgtatgtctctacttcggttagtcgtatttagtatttaacggtgtcaagtcttgataatacgtcaagggataattatgttagtgtccctgttttagggtagaactgtatatctacccttgttttttagactttgcgtgtttgcctgtacaattattatgcttaacatgatgaggatgttatgctcttattatgttaaaaacatagttaaattgttgacaaccgaccaaaaaaaccccccccctcaacagcgagggcggccgccgtcatgaaagctcgtcaacccaggaatt

SEQ ID NO: 4331 - DNA, 289 bp, Zea mays
  unsure (1)..(289): unsure at all n locations
  Clone ID: MRT4577_103949C.1
ataggaaactaactgccattttttcctgacagaaaaaagtgctcgccgaagtatataaaatggactgaatgccttcaagatggtgctgcaccaaaccctgaaccacagcctgcacatgttggtcaaactaagcccaatgctcctttgtcggtagccatggacatccttggtgcatacttagtgagcagtgtgcccctagccggtgcgctaaggaatggacagacactnttagcccccgtcacgggggatctacgtgctggcctgacagcagggggctttgcacccaggg

SEQ ID NO: 4332 - DNA, 546 bp, Zea mays
  unsure (1)..(546): unsure at all n locations
  Clone ID: MRT4577_10394C.1
ctccggaattcgccccgaggggcagccgcacgtcttcttcgccacctcgcggcgggcgaccctctccgtctgaggagagcctctgcccgtgtcccgatacatcaggatcgtgcctgcgccagcactgccgatgcccatgctcccgccagttatccttgcgctggcgagatatagtgcagcccatggcgctggatcctagcaatncatcgaaactgccttctcctcccctactcactggcctctatcctacagnctctgtgcctgccagtgccttccgttggctatcgcagcatatagcctccgagaagcaagcactctttgcttttgcctctgcaggctaccactggagcaagctgcaattgcgccaaaatatcccactgcgctcatggcatgcgtgtgacatgctcactggatcgatcatggctatctgcccttaaggtgccaggcgctgggtcgattggccccattcctgctgatactctcggcaagccttggtcccctcccagtttaagcatgaggcccaacccgcgcgcgtggaagccttcc

SEQ ID NO: 4333 - DNA, 526 bp, Zea mays
  unsure (1)..(526): unsure at all n locations
  Clone ID: MRT4577_103950C.1
tctcggnnnnnnnnnnnnnnnnnnnnnnnnnnnnnnnnnnnnnnnnnnnnnnnnnnnnncactgcaaggaaacaactcattcatgnnnnagcagccaaaattaccggcctcttaaaactcgccattttcctttctcccctccgtcagtcccactcccacccaataccaaatgccaataccacctgttcacttcccccccagctgtacagtaccacagggagctggacgaccaaacaattcaaacacatcaccgggttcccgccacctcgttggatctcacgttgcgcctgtccttgcacgccacgtcgcacatgtcacgtttcgtcagcagctcattgccttgcacttaaccgggagagcgcggtcgaacccgccgccgggggaacagcagggttcccaccaccgccatggcgcggnnnnnccannnntggaaaacaggggccgaaaagtcacggccgccgccgccttgggcannnnnnnnnnnnnnnnnnnnnnnnggccttngggcttggtttcggtttcgccg

SEQ ID NO: 4334 - DNA, 1483 bp, Zea mays
  Clone ID: MRT4577_103951C.1
tcgcccacgcgtccgcccacgcgtccgcccacgcgtccgccctcgccggccgcccgcgcgtccggccgggaacaagccaaaaaccctcacgaaattctgagatccatccagaaacgtcgctccatggcgattatctccgacttcaaggaggacgaggccccgcagcagccggcggcggtcggccccggcgtcgaggagaccctggtggcagcgctagagaggaccggcggtgcactcccctttctccaggcggccatcgatgtcgctcaccgcaggtctggcctgttccgcgacccttcggcggtgagcaaggttaccgcgatggcggcggccgtcagggcgcaggtggagaccgaggagagggcagccagagaggtcaagaggaaggcggaggaggccgagaggaaggctgcggccgaggcgcagaaggctgacatggaggcggcgacggcgacggcggaggagaagctggagaaggaccgtatggatgcggataaggcggaggaaggcaacgttagacaaccaaatgctggcaatggtcttgatttggagaagtactcatggactcaacagttgcctgaggttaacatcactattcctgttcctcaaggaacaaaatcaagatttgtggtcgttgatataaagaagaaccatctgaaggttgttctgaagggccagccacctatcattgatggtgagctctataagccagttaaggttgatgattgcttctggagcatagaggatggaaaaactctttccatattgcttacaaagcacaaccaaatggagtggtggaagtctgttataaagggtggccctgaagttgatacccaaaaggtggaacctgagaacagcaaactctctgatttggatcctgagactagacaaactgtggagaagatgatgtttgaccagcgccagaagcagatgggccttccgacaagtgatgaaatgcaaaagcaagaaattctcaagaagttcatgtctgagcacccggagatggacttctctaaagcgaaaatgccttgaggatttgttcgggcagttatttctaccagtctgcttaggttgtctttgagtctggtatcggtgtcaaacaaatcttcatctgtttttttttttgtaatgcgtcaggaatatcaggcttgttctttttcatctcaatccatatgcattggaagcgtttgggtgggtttaaatccatagtaggtcaaaagctttactaaattttccaatgcaatccattccattggtcacgtggcttgaggatttgttcgggcagttatttctaccagtctgcttaggttgtctttgtgtgattgtgtctggtgttagtgtggaacagatgtctttgtgtgattgtgtctggtgttagtgtggaacagatcatctttttttagtagcgtcagaaatatcatttaaaacgtaaaaaaaaaaaaaaaaaaaaaaaaaactcgagactagttctctctcctcgtgc

SEQ ID NO: 4335 - DNA, 1105 bp, Zea mays
  Clone ID: MRT4577_103952C.1
atacgcaccaccgtgagcctcggcgacgggcaggtgttcgacggcgagtcgctgttccagccacggaacaacaccgcggggcgcccgctgccgctcgtcttcccgggccgcaacggcgacccggaagcccgcgactgcagcacgctggtggaggccgaggtgaggggcaaggtggtgctgtgcgagagccgctccatcacggagcacgtcgagcaggggcagatggtgtccgcgtacggcggcgccggcatgatcctcatgaacaagccggcggaggggttcaccaccttcgccgacgcgcacgtcctgccggcgtcgcacgtgagctacgccgcgttttttaagatcgcggcgtgcgtcaggtcgacttccatgcccaccgagtacatcgcctacctctgcgggctgggcatcggggacgacggcgtgaaggagataactgggcgccgcgtcgcctgcgccaagctgaaggccatcaccgaggcggagctcaactacccgtcgctggtggtgaagctgctgtcccatccgatcaccgtccgccgcaccgtgaccaacgtcgggaaggccaactcggtgtacaaggccgtggtggacatgcccagggccgtgtccgtggtggtgcggcccccggtgctgcggttcgccagggcgaacgagaagcagagcttcaccgtgacggtgcggtggaacgggccgccggccgtcgccggcgccgaggggaacctgaagtgggtgtcgagcgagcacgtcgtccggagcccgatcgttataccgccggccaaggccgccgcgtaggcgtagctcccaatccaatctgcttgacggccggcaggaccgttctcagctcgtgtcgtgtctccgaggaagaaggtcatcagtattcagtagctttaggtaatcgtgagtgtgcccggtgtacgtatggcgaaggaagtaggcaggcgactgttgtataggctggtggaggcagggtacccgatcatctgcgacgcagcaagctcagctgcaatggcaatggcgcccgttcgttccgtatgtaaaaaaatggcggaaataattaatcgcatcgaaaacccccaaaaaaaaaaaaaaaaaagcggcc

SEQ ID NO: 4336 - DNA, 117 bp, Zea mays
  Clone ID: MRT4577_103953C.1
cggaggacctggtggccggcgcggacggctcgctgggcaaggcgacggatatcgggcgtcgcgtgttcggcacggtgtaccgtgctcccgacgccgacgggtccgtggcggctgtga

SEQ ID NO: 4337 - DNA, 2814 bp, Zea mays
  Clone ID: MRT4577_103954C.1
tcgaggccggccgggccgggactccacttccatcgccaaacactgcgcaacagcagccgctacctcccttgctaccgagcaccccgggccgaagcatccagcaacagcagccgctacctccctttgtctagctgtctccctcccccggtccagtcctgcattgcctcatgaggacccaaagaaacctccttcccctcctcctgctgctgtccgccgcgctgctcgccgtcgccgacgcgcaggagcgcaagaactacgtggttcatctcgagccgagggacggcggcggcggcgccgcgtcggtggaggagtggcaccggtctttcttgccggaggccacgctggactcggcggcggatgacgggccgaggatcatccactcgtacagccacgtgctgacgggcttcgccgcccgcctcaccgacgcggaggcggagacgctgaggcgcaaggaggggtgcctgcggctgtacccggaggagttcctgccgctggcgaccacccactcgccgggcttcctcggcctccacatgggcaaggacggcttctggagccgctccggattcggccgcggcgtggtgattgggctcctggacacggggatcctgcccagccacccgtccttcggcgacgccgggctgccgccgccgcccaagaagtggaagggcgcctgccagttcaggtccatcgccggcggcgggtgcagcaacaaggtcatcggcgcgcgcgcgttcgggagcgcggccatcaacgacacggcgccgcccgtggacgacgcgggccacggcacgcacacggccagcacggcggcgggcaacttcgtgcagaacgccgacgtgcggggcaacgcgcacggcacggcgtccgggatggcgccgcacgcgcacctggccatctacaaggtgtgcacgcggagccggtgctccatcatggacatcgttgccggcctggacgccgccgtcaaggacggcgtcgacgtgctctccttctccatcagcgccacggacggcgcgcagttcaactacgacctcatcgccatcgccacgttcaaggccatggagcacgggatcttcgtcagcgccgcggcgggcaacgacggccccgccgcgggctccatcaccaacggcgcgccatggatgctgacggtcgcggcgggcaccatggaccgcgcgatacgcaccaccgtcaggctcggcgacgggcaggtgttcgacggcgagtcgctgttccagccccggaacaacaccgcggggcgcccgctgccgctcgtcttcccgggccgcaacggcgacccggaggcccgcgactgcagcacgctggtggaggccgaggtgaggggcaagcccagggccgtgtccgtggtggtgcggcccccggtggtgctgtgcgagagccgctccatcacggagcacgtcgagcaggggcagacggtggccgcgtacggcggcgccgggatgatcctgatgaacaaggcggcgaggggtacaccaccttgccgacgcgcacgtcctgcgggcctcgcacgtgataccgcggggccaagatcgcggcgtacgcatccaatctgctagacgcccaggcccacgggtccatcgcgttccggggcacggtgatggggtcgtccccggcgccgtccgtggccttcttctcgtcgcgcgggcccgaacaaggcgagcccgggcatcctgaagccggacatcacctgggcccggcatgaacatcctggcggcgtgggcgcccagcgagatgcacccggagttcgcggacgacgtgagcctgcccttcttcgtggagtccgggacgtccatgtcgacgccgcacctgagcggcatcgcggccatcatcaagagcctgcacccgagctggtcccccgcggcgatcaagtcggcgatcatgacgtcgtcgggcacggcggaccacgcgggcgtgccgatcaaggacgagcagtacaggcgggcgagcttctacagcatgggcgccgggtacgtgaacccgtcccgcgccgtcgacccggggctggtgtacgacctcggcgccggcgagtacatcgcctacctctgcgggctgggcatcggggacgacggcgtcaaggagataactgggcgccgcgtcgcctgcgccaagctgaaggccatcaccgaggcggagctcaactacccgtcgctggtggtgaagctgctgtcccatccgatcaccgtccgccgcaccgtgaccaatgtcgggaaggccagctccgtgtacagggccgtggtggacatgcccagggccgtgtccgtggtggtgcggcccccgacgctgcggttcgacagggtgaacgagaagcggagcttcaccgtgacggtgcggtggagcgggccgccggccgtcggcggcgtcgagggcaacctgaagtgggtgtcgagggatcacgttgtccgcagcccgatcgtgataccgccggcgaaggccgccgcgtaggcgtagctcccagcccaattgatgagtgccccggcattggtcggcaaacggcatgtatccctccctccaacaaggtcagtaggtattcggtaggtggtaatcttgagtgtgaccggtgtacgtatggcgaaggaagtaggcaggcgactgttgtataggcaggcagaggcagggtaacccatcatctgtgacgcagcaagctcagctgcaatggcaatggcaatggcgcgttggttcctgtatgtaaaaaaatggcggaaataattaatcgcatcgaaaacccccaaaaaaaaaatttataaaaaaggtgtgtcgctcttgagtattctagtttttgtttgcgtgcatgagaagtaa

SEQ ID NO: 4338 - DNA, 2711 bp, Zea mays
  unsure (1)..(2711): unsure at all n locations
  Clone ID: MRT4577_103955C.1
ccggcgaccgcctagcatctgtggcgccgcgccgcctccgctgatggggatgaacaagtcacggtggtgtcgcgccaccctgctgctgctcctgtcccttgctctccgcggcgcggcgttcctgcaggagaggaagaactacatcgtgcacctccggccccgggaagccaccgacggctggggggacgcgtgggggagtctacctcgacagtcgacactcgactgtcgagaccctctcccagcatcaacccgccccgcgctgccctcgtcccgatctccgacccaaatacccgatccaccatggccggaataaggcttacgcccgaggaacccgagatgcccgttggcacgccaccccgcccccagctcccacccttcgtcgccgcggcaggcggtggcggcgnangtctgnaaatggngncggacgacgagcggtcctttgcggcggattcatggtctgtgcggagcgagtacgggagaacgttctacgatgacaaaggctagtgctgaggtgctgaggtgctcgcctcttcgacgtgctgggggagattctgctgcgcaaggaggggtgtctgcggttgtacccagaggagttcctgtcgctggcgaccacccactctgcgggcttcctcgggctccaaattgccttataaggacggcgtcgacgtgctctccttctccatcagcgccacggacggcgcgcagttcaactacgacctcatcgccatcgccacgttcaaggccatggagcacgggatcttcgtcagcgcgggctccatcaccaacggcgcgccatggatgctgacggtcgcggcgggcaccatggaccgcgcgatacgcaccaccgtcaggctcggcgacgggcaggtgttcgacggcgagtcgctgttccagccacggaacaacaccgcggggcgcccgctgccgctcgtcttcccgggccgcaacggcgacccggaggcccgcgactgcagcacgctggtggaggccgaggtgaggggcaaggtggtgctgtgcgagagccgctccatcacggagcacgtcggggcagatggtgtccgcgtacggcggcgccggcatgatccgccggatcaggctcggcgacgggcaccacttcgacggcgagtcgctgtccagccacggaacaacaccgcggggcgcccgctgccgctcgcttccgggccgcaaggcgaccccaggcccgcgactgcagcacgctggtggaggccgaggtgaggggcaaggtggtgctgtgcgagagccgctccatcacggagcacgtcgagcaggggccgaacaaggcgagcccgggcatcctgaagccggacatcaccgggcccggaatgaacatcctggcggcgtgggcgcccagcgagatgcacccggagttcgcggacgacgtgagcctgcccttcttcatggagtccgggacgtccatgtcgacgccgcacctgagcggcatcgcggccatcatcaagagcctgcacccgagctggtcccccgcggcgatcaagtcggcgatcatgacgtcgtcgggcacggcggaccacgcgggcgtgccgatcaaggacgagcagtacaggcgggcgagcttctacagcatgggcgccgggtacgtgaacccgtcccgcgccgtcgacccggggctggtgtacgacctcggcgccggcgagtacatcgcctacctctgcgggctgggcatcggggacgacggcgtcaaggagataactgggcgccgcgtcgcctgcgccaagctgaaggccatcaccgaggcggagctcaactacccgtcgctggtggtgaagctgctgtcccatccgatcaccgtccgccgcaccgtgaccaacgtcgggaaggcgaactcggtgtacaaggccgtggtggacatgcccagggccgtgtccgtggtggtgcggcccccggtgctgcggttcgccagggcgaacgagaagcagagcttcaccgtgacggtgcggtggaacgggccgccggccgtcgccggcgccgaggggaacctgaagtgggtgtcgagcgagcacgtcgtccggagcccgatcgtgataccgccggccaaggccgccgcgtaggcgtagctcccaatccaatctgctagacggccggcaggaccgttctcgtgtcgtgtctccgaggaagaaggtcatcagtattcagtagcggtaggtaatcgtgagtgtgcccggtgtacgtatggcgaaggaagtaggcaggcgactgttgtataggctggtggaggcaggcagggtcccacgcgtccgcccacgcgtccgcccacgcgtccgcccacgcgtccgtgtcgacgccgcacctgagcggcatcgcggccatcatcaagagcctgcacccgagctggtcccccgcggcgatcaagtcggcgatcatgacgtcgtcgggcacggcggaccacgcgggcgtgccgatcaaggacgagcagtacaggcgggcgagcttctacagcatgggcgccgggtacgtgaacccgtcccgcgccgtcgacccggggctggtgtacgacctcggcgccggcgagtacatcgcctacctctgcgggctgggcatcggggacgacggcgtcaaggagataactgggcgccgcgtcgcctgcgccaagctgaaggccatcaccgaggcggactcaactaccgtcgctggtggtgaagctgctgtccatccgatcacgtcgccgcacgtga

SEQ ID NO: 4339 - DNA, 169 bp, Zea mays
  unsure (1)..(169): unsure at all n locations
  Clone ID: MRT4577_103956C.1
tacattatttccttacatgtagtcatgaaatgaagaaaaacatgcaatgtactgtactcttttggcccctaaacactgggccaggagatatatagccttcaaatataattataaagaggaaaacaggactcccaacttatttaccctgttgtaatgctgngccctcccc

SEQ ID NO: 4340 - DNA, 505 bp, Zea mays
  Clone ID: MRT4577_103957C.1
cctacaagaacgcctccccccgtagggcggcccacacatgtccggaagccccggttttgttgggtggaaaaaaggccgggggcccccaggttttagcccccccggccccctcccccagaaccccgacccacgggccgcccccagccccagccgggggccaacccctcaaacgaaattttccccaaaccccgccccaacgcggaaaatcagtttgggccccgggacccccttccccccaaagccccccccgtagcacgccagcatctccccgggccggaagggccccccccccaaaacctcgccgttcacacggcactccccgaaaaaggcctctgtggcgccccccttaaccccccaccccctcagattttggcccggaaacttttcccacaggggttccccaccggacccccccctgttacctcttttccgggcatatccccccccccccctggtccccccgaattcccggccccccccgggcgcccccctttcccctgggggc

SEQ ID NO: 4341 - DNA, 2797 bp, Zea mays
  Clone ID: MRT4577_103958C.1
tccgacacacacacacacacctcgcagcagcctcataaaaactcccgcagatcgcctcgtcgccgggcggggacgggcacgccccaccctcactccccttctgcccttcgcccgcatacacattggcccgcaagctaccggcgaccgcctagcatctgtggcgccgcgccgcgccgcctccgcctccgctgatggggatgaacaagtcacggtggtgtcgcgccaccctgctgctgctcctgtcccttgctctccgcggcgcggcgttcctgcaggagcggaagaactacatcgtgcacctccggccccgggaagccgccgacggctccgtcgacgagtggcaccgctcgttcctgcagcaggcggcggcagggctggactccgcggccgacgacggcccgcagatcatatactcctatagcgacgtcttcaccggcttcgccgcgcggctcacggacgccgaagcagaggcgctgagggccacggacgggtgcgtgcggctgtacccggaggtgttcctgccgctcgccaccacccgctcgccgggcttcctcggcctccacctggggaacgagggcttctggagccgctccgggttcggccgcggcgtggtgattggcctcctcgacacgggcatcctgcccagccacccgtccttcggcgacgccgggctgccgccgccgcccaagaagtggaagggcgcctgccagttccggtcgatcgccggcggcgggtgcagcaacaaggtcatcggcgcgcgcgcgttcgggagcgcggccatcaacgactcggcgccgcccgtggacgacgcgggccacggcacgcacacggccagcacggcggcgggcaacttcgtgcagaacgccgacgtgcggggcaacgcgcacggcacggcgtccgggatggcgccgcacgcgcacctggccatctacaaggtgtgcacgcggagccggtgctccatcatggacatcgttgccggcctggacgccgccgtcaaggacggcgtcgacgtgctctccttctccatcagcgccacggacggcgcgcagttcaactacgacctcatcgccatcgccacgttcaaggccatggagcacgggatcttcgtcagcgccgcggcgggcaacgacggccccgccgcgggctccatcaccaacggcgcgccatggatgctgacggtcgcggcgggcaccatggaccgcgcgatacgcaccaccgtgaggctcggcgacgggcaggtgttcgacggcgagtcgctgttccagccacggaacaacaccgcggggcgcccgctgctgctcgtcttcccgggccgcaacggcgacccggaggcccgcgactgcagcacgctggtggaggccgaggtgaggggcaaggtggtgctgtgcgagagccgcaccatcacggagcacgtcgagcaggggcagatggtgtccgcgtacggcggcgccggcatgatcctcatgaacaaggcggcggaggggttcaccaccttcgccgacgcgcacgtcctgccggcgtcgcacgtgagctacgccgcggggtccaagatcgcggcgtacatcaagtcgacgcccaggcccacggcgaccatcacgttccggggcacggtgatgggctcgtccccggcgccgtccgtggccttcttctcgtcgcgcgggccgaacaaggcgagcccgggcatcctgaagcccgacatcaccgggcccggaatgaacatcctggcggcgtgggcgcccagcgagatgcacccggagttcgcggacgacgtgagcctgcccttcttcatggagtccgggacgtccatgtcgacgccgcacctgagcggcatcgcggccatcatcaagagcctgcacccgagctggtcccccgcggcgatcaagtcggcgatcatgacgtcgtcgggcacggcggaccacgcgggcgtgccgatcaaggacgagcagtacaggcgggcgagcttctacagcatgggcgccggctacgtgaacccgtcccgcgccgtcgacccggggctggtgtacgacctcggcgccggcgagtacatcgcctacctctgcgggctgggcatcggggacgacggcgtgaaggagataactgggcgccgcgtcgcctgcgccaagctgaaggccatcaccgaggcggagctcaactacccgtcgctggtggtgaagctgctgtcccatccgatcaccgtccgtcgcaccgtgaccaacgtcgggaaggccaactcggtgtacaaggccgtggtggacatgcccagggccgtgtccgtggtggtgcggcccccggtgctgcggttcgccagggcgaacgagaagcagagcttcaccgtgacggtgcggtggaacgggccgccggccgtcgccggcgccgaggggaacctgaagtgggtgtcgagcgagcacgtcgtccggagcccgatcgtgataccgccggccaaggccgtcgcgtaggcgtagctcccaatccaatctctgcttgacggtcggcaggaccgttctctgctcgtgtcgtgtctccgaggatgaaggtcatcagtattcagtagctttaggtaatcgtgagtgtgcccggtgtacgtatggcgaaggaagtaggcaggcgactgttgtataggctggtggaggcagggtacccgatcatctgcgacgcagcaagctcagctgcaatggcaatggcgcccgttcgttccgtatgtaaaaaaatggcggaaataattaatcgcatcgaaaacccccaaaaaaaaaaaaaaaaaagcggccaccatcaccctcgagggggggcccggtaccca

SEQ ID NO: 4342 - DNA, 529 bp, Zea mays
  Clone ID: MRT4577_103959C.1
cccccgaataaggccaccagcaaattttatcaatccttgggcctagacccaaaccgttttaaaaaaccagggaccaaaccaggccgaaaaccagggaaaacccctctaaactggaaccaacaacccaaaaaaaggggtcctcatcggaacccccttttgggggcaagacaacccaggaaaaggcttaaagcaacagcgctttggcccttcttccttggaagcttcttaaggaaaaactaaagcttttacccctaaaggaggcccccataagctggccccccctgcccaggggggaaaaaaaggcatgccaacacccgcccacggccaaatggtccctaaaggggggggcaaggggtccgcccctccttgccctttaaaagcttcctggggacaggggggctttttttggttccctaaggggcggcctaaacctttggcccccaaaataacccttttgggcagggggggttttctttttccccccaagggcaaccccatagggggggaggccccccggtttgaggggggc

SEQ ID NO: 4343 - DNA, 298 bp, Zea mays
  Clone ID: MRT4577_10395C.1
gcccacgcgtcgatttatccacgctgtcgtgcttctgtctgctcggcgcgacggttggcctttagggatctagattggcggccggttctccacctgatcttgcagacctggtccttttccagagagcttaattttccccaggatggcggaacggtcggaaaccccacctgaaaatattttcgagcagcttcttggattccatttgctgagaacctcccctaaacagaagggttgggaaattttccccacaccttaaggcttttgaaaaattgaaaaaataagctgtttaggtcgccat

SEQ ID NO: 4344 - DNA, 560 bp, Zea mays
  Clone ID: MRT4577_103960C.1
ggggtccacaaaaatagggggggaatccccttttcccagcaaaaaattttttggtttttttgaaaattttgaccagtaatccgggttccccattccaaacgcgaagccaaaccgaaaggggggggccaaaacctgggtgggaaaaaaagctaggtttttactttcacactggggacctttcgggggacggggacgaagatcctttaaagcaaacatccataccaaacgggattggggggctacaactgggggggggatctaagggggcatcggcctttaaaagcaggggcgagttcttcctggaggggcttaaaaagcaaaatttccttgggggaaaaaattggaaagggaacctttgataagcccttcaagttcctttaaggaaaaattacttttttgattccataacgaggggccgaaaggaccttgtccttaacacccccaacggggaataaagggccccttaaaggcatttcgccagtcataacagaatcgggtttgacttttctggaacaaaaaagggacaccagggccgttaccaagggcacacctggaaaagg

SEQ ID NO: 4345 - DNA, 375 bp, Zea mays
  Clone ID: MRT4577_103961C.1
caaacgcccgcaccggcccaggccccacacgggcgccgggaccccagcatcccaagagagtgagtcgcccaccgctagctgctcgcctgcctgcctgcgcaacagacaaatggaccagctccaccggttgggggtggggcgatgcttagcttgttctaaacaaattatcgcgccctgatattattgcttgtcgcgttcgcgtgcgcaatgctttgctcggcgcaggcaacggaggacgtcctcgccgcacagcgacgggtaccagtggaggaagtacggccagaagaggatcactaagtcgccgtttccgaggtccatatataatatccctcttcctacttattagcatatatagtacttctttgctaccttagc

SEQ ID NO: 4346 - DNA, 1120 bp, Zea mays
  Clone ID: MRT4577_103962C.1
cacacactatttatgtctcatcagcgtgcgcacgcgcctcgctatagaggaacaaccccgccccgccatggcaaataacatgccgtcgtctcaaatccacagccgcctgcgctgcagctgcagctggctgctgcttctcgtcctccatttctctagctcagccagcagggccgccggcggcaaggtgccggcgctgatcgtgttcggggactcgacggtcgacccgggcaacaacaacttcatccccaccgtcgccagggccaacttcccgccgtacgggcgcgacttcgaccggggcgtcgccaccggcaggttctccaatggccgcctcgtcacggacttcctttccgaggcgttcggcttgccgtcgtctgtgccggcctacctcgaccccagctataccatcgaccagctcgccaccggggtcagctttgcctccggtggcaccgggctggatgatctaacggcgaacatcccatcagtcatccccatgagccagcagctggagtacttcagcgagtacaaggcgagactgaaggtcgcgaagggggagtccgcggccaacgagatcatcgccgaggcgttgtacatcttcagcatcggcaccaacgacttcatcgtcaactacctcaccttccctctccggcgagcccagttcaccccgccggagtacgtcgcctacctcgtcggcctcgccgaggcggccgttcgcgacgcctacggcctcggcgcgcgcaagatggagttcaccggcctcgccccgttcgggtgcatccccgcggccaggacgctcaactacgacgaccccgacgagtgcaacgaggagtacaaccggctggcggtgaggttcaacgccgcgctgcaggaggccctgaggaggctcaacgctgagctcgtcggcgcgcgggtggtctacgcggagacgtacagcgtcttgtctgacatcgtcgccaatccgtcggactacggttagtggtggtgatcccacatctatcttcacaacaaatcaacaatatactagttcttgcgttggattggatgaactctagaatagcactgacaccgagtcatgcatgaacattgtccaaaacgttgaaatgactcgagcaaattgttttgc

SEQ ID NO: 4347 - DNA, 361 bp, Zea mays
  Clone ID: MRT4577_103963C.1
tttgtttgtttttttttttgtgtggggttttttattgccaacacataaaaaaaggttaaattggttgattggtttacaacaccatgcaaggggaagaaaaattgggctgaacatgaatggcctcggtcagcttccatttgtatgctcctgccgtccaaatgttatgccattagataacctgcaaactgaccggttctatactagctatctcccgatgaagaaccttaagtgcttgcacataatagccaagaacggaagcctaaaaacttcccgaggagagccggattttcaaggatgttctgaagggcaaaaaagattaacttgagagctacactcgtagttcgatccacaccgggtttca

SEQ ID NO: 4348 - DNA, 289 bp, Zea mays
  Clone ID: MRT4577_103964C.1
aacagttcctcacaagaacagttcttaaagttaacaaccaacatagaagatggtcatcttcaagagaacaaaggtgatgccaatgagcaatcagatgatactccagagggaagccattcagataaatccgagcttcaacaggggaaccaaacacgatagacaaccaggaagccacataagaagaatcagacagcacaagacaggtggagaaccctcaagatgaggccagcaaccacagcagagaaagtaaagtgctggagaaggaaaatgagaaagaaataaatcgtga

SEQ ID NO: 4349 - DNA, 468 bp, Zea mays
  Clone ID: MRT4577_103965C.1
gcggccgggccgacgggcccggtctacataccggaaggcttacgatgcccgtctgcgtgaagtgactaagctagagcactctctaagtgtggatccttatgatgcgccgatcgtacacctatcatattctaaaagaatctctatttgttttcactaaagaaaagagttcaccttattacacactccatttagccgacatccgattatttatgtgcaagatgtaatgcttaaacccacacctgcgttaccggattgccaccttattacatatatcccttacctgcgctgttggatctaaggaaaatatgggaccctttctatgaagaactcttttaacccatcgcattcttactggtacagcttagtgtaatgacgctgggacccactataggaagtgcaaacctaacgtacatagttcattgattacctgtaccatattggcagtgtatttgcataggataagaaaga

SEQ ID NO: 4350 - DNA, 754 bp, Zea mays
  Clone ID: MRT4577_103966C.1
gattctctttataagactatcgttcctctcctctctctcgctatcgtagccgcaacaatgccgtcctacagagatcttccgcatagataacaacatgacgaagattacgcccatcaaccgccccatcccgtactgaccacatatgctcactaatcagacaatccggcagcaaccagaatgcaatcaatgccaccgcaccatattccgctacctacgacctccaattgcgagcgctgctgtgtctactacatagaggccacaagctatctttcctcggcgcgagcatgggctcatgtactctccgaaactgacaccatggacatatgacgcactcgtattcgtacgctcagatcttccgacccgacaacaatgtcttcactactgctggggagcccaacaactgttgcaaggttcactacacaaagggcgaaccacgtctcatctgactcacatgcttgacgttgtcctaaaggaagctgagaactgcgactgtactccaacgcttcctagactgccattcccttgtaggaagcactgaatctgcaatgggcacgcttctcatttcagatatcacatagtgagtaccctgatcgcatgatgctgacattttctgtgattccctcgaccaatgtgtcagaacactgttgttgagccatacaatgaaaccctgcctgttcatcacgtggctgacaacgctcatgtacgcatggttcatgccaacgaagcacttgatgacatttgcttcccaactctg

SEQ ID NO: 4351 - DNA, 578 bp, Zea mays
  Clone ID: MRT4577_103967C.1
atcactagtccatggtctatgtaaggtgggtagataccatatggcatccaaattcttgcggatctgcttgcatgaaggaaacaacgttcttgcatctgcaaagcgcgctgtcatttctgggcttcgtagtgcagggtttaaaaatgatttgaggaaagtccgatcagcattatatatggctaggctgttgcggtcttaatccaaggagaaaagatctgcaatctgattgcatgatcctgtgaaatttacaagtgtggatgagtagatgaccctttatggagatgtatgatcacctaaccactcgatcagtgcatcatgctccacaggaaggaaaccagaactgtgttagctcaagaaaggagctaccctaataaatcattttcctgaggctttatagtttgtcgatgttaaagtgcacaacaagccatgtcactgtcaagcttgaaatgtttattgaacgtcaatgaacaagaaaggctgatgcccacatggtcactaggaacaggatctgcattcatgacatttagtttccagatggtaccagccccaaatgtgcaggaagtgattcctccataact

SEQ ID NO: 4352 - DNA, 372 bp, Zea mays
  Clone ID: MRT4577_103968C.1
taccgaattcccggtccgcccagcccgtccgaaaatctctcgatctctatctgcgaaatttcacggtaggtatttgaaatggcgacagttcgagggcaattgatctgggaaatcgtgaaaaccaccaattgtttcttggtgaagcagttcggtagaggaaactctaaggttcaattcagcaaggaaactaacaacctcaccaacgttcactcttacaagcactctggtcttgcaaacaaaaagactgtgaccatccaggccgctgacaaggaccaagctgttgtgctcgccaccaccaagaccaagaagcagaacaggcctaagctctctgtcaacaagtctttcctcaagaaggaattccccaggatgtca

SEQ ID NO: 4353 - DNA, 218 bp, Zea mays
  Clone ID: MRT4577_103969C.1
tcccccggcattttattatatatcgatttttgccccaaaaaatactttttggaaatttttttacaaaattccacgctttggccggcccatagaaattgggaggaattttgtccacagggttaagaaggtttaaccttacttagaaaacccctcacaaaaaattgttgacccaatgttgtattgtttgtagcctagcatcgggcattaaaacagggggg

SEQ ID NO: 4354 - DNA, 851 bp, Zea mays
  Clone ID: MRT4577_10396C.1
ccgggccctctctcacctcctcatcctcctccaactgtgagcgtacgttccacggccgccgccattagtgttgagagagggagagaagctacagggaccggacgcctccttccttgctgaccggcgagctttattttcaggcccctcgctcgctagggttccatcatcccgcccgctgttccttttcgtccatggatcagaacttcgggaacctcgggaccggagccgggagcagcggcgggtgcgggggctccaactccaactccaaggcggtggcggcggtgtcgtcctcgtccttcctgcagctgccgctgtcgacggcggcggcggcgtcccccgcgtactacggcgcgccgctcgcgctcctgcaccacggcaccaccgcgggcccgtcgtcgtcgcagcagcagcagcaccagtcgccgtacgccaagcacggcgccgagatgtcggcggcggaggccgacgccataaaggccaagatcgtggcgcacccgcagtactcggcgctcctcgccgcctacctcgactgccagaaagtgggcgcgccgccggacctgctggagaggctgacggccatggcggcgaagctggacgcgcgcccgccgggccgccacgggccgcgcgacccggagctggaccagttcatggaggcgtactgcaacatgctcgtcaagtaccgggaggagctgacccggccgatcgacgaggccatggagttcctcaagcgggtggaggcgcagctcgactccatcgccggcggcggctcctcctcctccgcgcgcctctcgctcgccgatggtaagtcatcagaaggggccggctcttcggaagacgacgacatggatccg

SEQ ID NO: 4355 - DNA, 757 bp, Zea mays
  Clone ID: MRT4577_103970C.1
tggtaccgcctgcaggtaccggtccggaattcccgggtcgacccacgcgtccggagaaatgggggttggggggacagtgggtggagcagtcagcaggagggcagccaccaccctctctgcggctgctcctagggaaggaagggctctggggctgggagggccgtgtacagcccttggtctgggatccatgtgttggttgagaaatcattccagagtgtgctttcccctctccctgcccaccttacctcacgtttaataaatatggttgtacttttcttattatgaaataaatgtctgtaactgctgtacactgctataaacttgttaaagaaaaataatctgcatgtgggctcccagccattgagttattgtaatcctatctcagtctgtggaggaggaggtacaagaacatgaaaagccttccttctatttcttccctgctgcttcctcctgtgctttgcagtgctttagcctgaggaccaaagccccactgactgcaagtcatgtatctgttggcgtccagaggcctggctgactgaagaggtccatttctagaagcaggacatgcagctgcttggagtcagtgcagttctaaaaggatctccattttcagacatattgatgaaatagttcataccatgatccacagtgctcatttggatcgggttttccagaacttttaagttgtgggtggccaagcaagaacaggtggtactgatagatacaacagaacttacaggggcatcagtggaggggg

SEQ ID NO: 4356 - DNA, 729 bp, Zea mays
  Clone ID: MRT4577_103971C.1
atgcccggcgatgggaagcgcaaaaggtcgaagcactcgccgactccctcctccgagttctttggtaactcggagtactctgtcgaggagtactctgagtcaaggagtgggtccccatcgagttcattgtccattagtaccgacaactcgatggggctcaccccagtagagagggcctacgccaaggccattgagcacgctagcctcgtcgactataatgagtcagacgaggaagaggagtctagtgacagcgaggacggcgataaggaccaaggcgacgatgatggcaagagcaagggaggaagcagcaagggtgatggcagcagcgagggcgacaacggtggcagcggtgagggtggtgcaatgtgccaccggcgtagttcattctttgtgttcttatcctcccttgtgaagagtgccatggcacccgagaggaagaaattgggttccttgttggatgcaatccctcccatcaatccaaattcccaacttccattttacggtaactatagatctgttgtatctgaatttgaacttttgcgtatggaattcgctatcatcttcgctgtaagtagcactgatctgttcagggtttcgggcaccgttgcgctggcgattgtcgccggggtacatggcgtcgctgtgggtgggctcttgtcgtgggtctgcccaccgagggtggaagaagagccaccgaccgttggatcatatccggatgctccagattag

SEQ ID NO: 4357 - DNA, 451 bp, Zea mays
  Clone ID: MRT4577_103972C.1
cactactaagggcgattgagatctaaagggcggccgggacatcacttccgaacaagaggcatgtggctgggaggaccgaaggaccacaagtgatgctcatggggaggtgatcccgggccgcggtccagccgtcgacgagatatgggtgatcgaacgacccatccgtcatagataaccacggataaagaaaaatggagtgagtaaacatgaccctactggaggttcacagccatctctatgatctccaccaaaatacgacaagaagtgctcacaacgtcctacggcctgcacagatggaaccccgaatcttcatgcccggatctgctgagagactgttgaatataaacagaggtaccgactgatctactccccgtacacagacgtgagatctaacccctaacgatcttaccaatgtagttcgaggcccctcacatgatgcctagcgccttcc

SEQ ID NO: 4358 - DNA, 160 bp, Zea mays
  Clone ID: MRT4577_103973C.1
ctaagatgaagttacttcctcaagatcacatggttcaggacagacacgagattaaaacctggatccacagactgtgttattcagaaggaataatcggtgtattaagaattgctactcgaaggtgccagaatgacactaagtacagaattcctgtcccagt

SEQ ID NO: 4359 - DNA, 159 bp, Zea mays
  Clone ID: MRT4577_103974C.1
ccggccgggctgcttccgctccaatggcgtctctcctcttggtcccgcgcctcacccggagcccatgttccaacccaggacccagtgccggtcacaagcctaggcccgtgtccatcacctgcgggccgcgcgacaaccgcgggcccctccagcgcggcc

SEQ ID NO: 4360 - DNA, 848 bp, Zea mays
  Clone ID: MRT4577_103975C.1
ctcgggccggccggggtaagtgtcaaggtcattggtccgaactaccaccaattaagcttgtgctaagtgatgacaagcaacctgtcttctcgccctattgcttcactaacatagtattccaccagcatcctcgcaagaggggaaaaaacgagacggtttagaggacgtgtatcgcaccaaggaacttgctcgtaactcacgacccgaccaaaattgttttattctggaacgagaactgtctacagcagaactacactctatcattgtcgtgtgcaccttggaggcttctccaaggtcagaaccacacttgaagccatgaatcagaatggcattcctctcaactaagtttacttgtgatgcaccctagctcctctactgacccagcacctagggcttctttccttctctctttgtgtattctttggcaaacagagcacatatcatctatatcgttctgtcctgtacttccttccggtaggcttgaaatcatttctgcataagcacagcaactcccgattgcagcagctttccctcaaaactttttgcgtcgcagcagcctttgcacctcggacagacttgaagctgtcgtccttacagtctcatcgaccgatgccacagcgacacatgcacgaacaagagcacctgcccgactgagcgtgcacgacctcgcgccgatcagggccaagaactcacccccgtcgtttgtgccgatggaggtggaggccgacgggatccaggaagccaccgcatgcgcatgagacggcggcggcgtggacgatgtcttcttctgcgtcgccgcgacgtccaggggcaacaagaacagcatctcctacttccacaccaacgcg

SEQ ID NO: 4361 - DNA, 862 bp, Zea mays
  Clone ID: MRT4577_103976C.1
ccggccggagctggtccgccgatccgggccggccgggagccacgctccccgtaacgaacgacgcagcccaacccgttcccaccaaaccagcggcaccacccatggcttcggcggcggcgagatccggtctccggtcgctggcggtgcgcgccgcccctttgaggcgccgcatgtcctcctccgtccacgacgacgcctatgagacggccaagtgggagaagatcacctacgccgggatcgtgacctgcaccctcctggcggcgtacaacctgtccaagggccacccccacttcgatgagccgccggcatacccctatctgcacatccgcaacaaggagttcccatggggccctgatggcttgtttgagaagaaggaccaccactgagccctgattagcacaccttcaggagctggtggatgcttaaaagagttatatggttgtttcagtgattttccttttcccttgagacctatttgctgcaacaagaaataagaatgaccaaactcttgtattgacagtgaggttttgactgtgttagctgtcttattttctttgccgtccacgtcatatatggtcacctgtaagttggtcttgcccggtgtcaggaaacggcatcacaattatcaaaagctgttgtcatattctgatggcttaagattgcaccctgtgctcgtgataatttcttgtatcaactaccattctatcaaggcagaacgtaatggtttcttttgtttaaaaaaaaaaaaaaaaatggtctggaatgtcaccaaaataaaattcactggccgtcgttttacaacgtcgtgactgacaaaaacaaaaaaccaaaaaaaaaaaaaaaaaaaaaaaaaaaaaaaaaa

SEQ ID NO: 4362 - DNA, 246 bp, Zea mays
  Clone ID: MRT4577_103977C.1
ctcacgcgttcggccaagccttccgggggccgaaaaaacccaggcaggtcatcggttcaggaaaaggcccacttagcaaccaccagcagcagcaggccaaccggttcgacgacatggccggcttcggggccggcgccgtgttggcgctcctagtggcggtcgcggcggtggccgcgttcctggcggtgccggcctcggcgaagtccggggagctgatcgcgatggggttgctggcggcaaagggcg

SEQ ID NO: 4363 - DNA, 381 bp, Zea mays
  Clone ID: MRT4577_103978C.1
atttcattttttaatcgtgccaaggtcgggctcaaacctgatggtttttttgttctgaaagaaaacaattcaagaaaagggtttgtgttagaataaggggaaaacaatggccctagattaaacccctaccttaaggaaccaattaaaaagtgttgaataaaaaaccctaatgttaaagacccaaagaggaatccccaaaggaacaatttccggccaaaatgtatccactggtaacaattcacccaaaaatccaaaatagtggaaagagaacacggcctagaaatacacctcgtaagatccgctcttgaaaaatgcccggtacaaggtgcccattgacctgctgggcctgtcgggccatgtatccccacgggattgcccaaa

SEQ ID NO: 4364 - DNA, 810 bp, Zea mays
  Clone ID: MRT4577_103979C.1
cctggccgggaacacaacggcccaccaaacccgcggattaaagaatgcggcgactccaggcccggcgggggccacgctccccgtaacgaacgacgcagcccaacccgttcccaccaaaccagcggcaccacccatggcttcggcggcggcgagatccggtctccggtcgctggcggtgcgcgccgccccgttgaggcgccgcatgtcctcctccgtccacgacgacgcctatgagacggccaagtgggagaagatcacctacgccgggatcgtgacctgcaccctcctggcggcgtacaacctgtccaagggccacccccacttcgatgagccgccggcgtacccatatctgcacatccgcaacaaggagttcccatggggccctgatggcttgtttgagacgaaggaccaccactgagccctgattagcacaccttcaggagctggtgcatgcttaaaagagttatatggttgtttcagtgattttgcttttcccttgagacctatttgctgcaacaagaaataagaatgaccaaactcttgtattgacagtgaagttttaactgtgttagctgttaccggcttgtctatttttctttgccgtccacgccatatatggtcacctgtaagttggtcttgcccggtgtcaggaaacggcatcacaattatcaaaagctgttattgtattctgatggcttaagattgcaccctgtgctcgtgataatttgcctatcaactatcattgtatcaaggcagaacgtaatggtttcttttgtttaaaaaaaaaaaaaaaaaaaaaaaaaagcggcc

SEQ ID NO: 4365 - DNA, 909 bp, Zea mays
  unsure (1)..(909): unsure at all n locations
  Clone ID: MRT4577_103980C.1
gccggccggttcggaagcacgctcctcggaaggaagtatgcttcccctcccgttcctgctcaacaggcattgggtccctcgaggccggccgggccgggagccacgctccccggaacgaacgacgcagcccaacccgttcccaccaaaccagcggcaccacccatggcttcggcggcggcgagatccggtctccggtcgctggcggtgcgcgccgccccgttgaggcgccgcatgtcctcctccgtccacgacgacgcctatgagacggccaagtgggagaagatcacctacgccgggatcgtgacctgcaccctcctggcggcgtacaacctgtccaagggccacccccacttcgatgagccgccggcgtacccctatctgcacatccgcaacaaggagttcccatggggccctgatggcttgtttgagacgaaggaccaccactgagccctgattagcacaccttcaggagctggtgcatgcttaaaagagttatatggttgtttcagtgattttccttttcccttgagacctatttgctgcaacaagaaataagaatgaccaaactcttgtattgacagtgaggttttaactgtgttagctgttaccggcttgtctatttttctttgccgtccacgctatatatggtcacctgtaagttggtcttgcccggtgtcaggaaacggcatcacaattatcaaaagctgttatcgtattctgatggcttaagattgcaccctgtgctcgtgataatttgccgtatcaactatcattctatcaaggcagaacgtaatggtttcttttgtttattttccagtaaacatgtaggttggacaaggtaatattttaattttctccattgctagtgtttgtgaaaaaaanaanaagaaaaaaaaaaaaaaagcggcc

SEQ ID NO: 4366 - DNA, 459 bp, Zea mays
  Clone ID: MRT4577_103981C.1
caaaaacgcaatcaaaacacaccatctctcagggctgattggctcgttacgagccatactaccaactctgcgaattctgacgtctgggacaagacactcaaaaactacaaaaaaacaacctatcaaaaaaaacaaaaaaacctacaaataaactcactcctcaattcataaacaaaaaccaaacatgccatcaccccctcccaggacttcacccacctcttgcctaacccgacataccttcttctgatctacgttcccacccccacatttcaagctttaacctcttattttactcttccaactttcgaaaaccgagtattctcccctatctacatattttaaacgctatccccaattatcatgagaaaccaacctatgcacccaacataattgatccttctcttcctttaaaaaaacctaaattccaaattgcacccccctttaattcattccaataaa

SEQ ID NO: 4367 - DNA, 319 bp, Zea mays
  Clone ID: MRT4577_103982C.1
tttttcacatttttttgtgtttttgtttttttgtttggcaccgcaactatccaacgcccaaaaaaattggcggggaaaatgtgaacagggaaggaaaagtttcctatgttaaaatataagagacaatcctccacgtaacatccatcatgtcatgggggcaacgcaacaccgtttttcaactaaaacactaaccaactggaaagaaaagaaaaagaaaagaatcccccccccaaagctcatctccgtccacgccacccttggtggccttaaggccccttcctgaagaagaatttgatcaaagggccccaccccgggcccc

SEQ ID NO: 4368 - DNA, 2752 bp, Zea mays
  Clone ID: MRT4577_103983C.1
gggtacctcgaggccggcctggcggtccctcacactcatcaagggcggctcactctcatgtcatgtggcggcgtccttctccctcgctgctccgtctctctcagtctctctcctgccctgtccgtcccactccccgtccagcggagagagaccctgtgggctgtggccgggcagccgtttcccctccccttccctctccgctccctccagagtctactgtagcgcagtgccgtagggtttcgcgtcctatccttcctcgcatcctccatggccgatcctgacgacctcggccgccgcctcgccgcggtcgccgtatccgagtctcctaccgccgccgcggctgcgctggagagcagcaacaacaacctgttccaggtgatgcgcgccgtggaggacgcggaggccaccatccgccagcagctggaggagaacagccggttgaaggacgagctgatgctcaagacgcgggagctccacagaattaggtcagaagccacagaccaagcttcctctcatgggatccgtatccatcaggatcgcgctcttggtgcccacacagacacctcctccactgctcccatcaggactaccgctacagcagcagaggccttcgaatggggagctggggatgccggcatcaaccacaagtaccttgaggccaaccaggctaatggaattccccgtaaatcaccgagcgctcccgatagcgctttcccatctcagctatctaccccgtcttcgcgatccctttcaccaactaggcaccacaaagaaacagactatgattctaggctcaacttatccggacaaggcgcactgcctgtttcagacctcaactcaaacgtcgtcatctggaagcaggatctccttgttaaggtcaaagaacaaggggaggagattgcacagctgagaaggcatctttctgactactctgtcaaggaggcccaaatacttaatgagaaacatgtcctggaaaaacgcattgcatatatgcgcatggcatttgatcagcagcagcaagatctggttgatgctgcatcgaaagctttgtcctacagacaggatattatcgaagaaaacatccgtcttacatatgcattgcaggcagcacatcaagagagatctacattcgtatcttctttattgcctcttctatcagaatataaccttcagcctcctgttcttgatgctcagtctattgttagcaatctgaaggttctgtttaagcatttgcaagaaaaacttattattactgaggagaagctgaaggaatcacaataccagattactccttggcatgctgaatcttcaaataatacaagtgctgctgcacagtcgccttctcatcctcctggaaatgcattgatcaaagccaaccttgacattgtgccccagcaagcatattctcatgtacattctccagtttcttctcctgttcaaactaggcgtgactgggatttgttagggaatgaaaatcgtcaggtcattcgaagtgaggttgccacaacaagtgcagagcatgataatgttgggaggacctctccttcaaccagcagccataatatgaaggatgcccctcaaagaaccgatcatgattcccgtgctgttcgatttaacattgaatccaaggatcaaaacccatcattcaaggaccttattaagagtgatgcctcagaaagtctggagggagctgaggcccaaattccacaagaactttctgcgcagcaggattctggaggctcacctaatttgacatctggtcttgatgacgcaaatccaccatacccttatcttcctactgtccttgaggagcctagttcttctttttccgaagttgcagaggatgatccgcttccagccatagaaggactgcgaatcacaggtgaagcctttcctggaagagaacttcaagcaagtgggtactctatccatggaaccacaagttgtaattttgagtgggtacgccatttggacgatggatcaataaattttatagaaggtgcacggcagcccacctatttagtaactgctgatgatgtggactttgtactagcgattgaagtccagcctctggatgacaaaaaaaggaagggcgagattgtgaaggtttatgctaatgatcaaagaaaaattacatgtgaccctgaaaccaaggagcatattaagaaaattctctctctggggcatgtctcttatgaagttctattacctgttagatttttagatatgtgggaaccagctattttggcaataaagagggaaggttacagcgttaagtgtaatggacagcgcggtgtcgttgtcatggagaaatttcagcaagcgatgaccatcaatatcccatttgggcgtcctactgagttttcaattttgtctgctgatggtgctgagtacaatttaaagcctgcagagaatgccccatcacgagatgccattgttctaatactaaggctattcaggatgaaggctgttgagaagagcaagggaaaaagaaagggcatcttcttcaagtagtttgtagttgtagcagtattactacgtagtgtcatggcaggttgactgtatctgttacctatgttttcgcggttcatgtatgtagaaggaaagagcaagttgtctgcgtgcttatgtaaagttccgattcaattcgattagattcaattggcaccgtacccagttttttgtttgtttttgttctgttgtagggagggatgaattcattttccaattaatgttggtttgtttggccccc

SEQ ID NO: 4369 - DNA, 447 bp, Zea mays
  Clone ID: MRT4577_103984C.1
ggggggaagcaaaaaccccactaaaaggggcttgtttttcagttcagttacagatggaccatacggggctttttgaaatgcttttttgctaggggtgggagaaaacccctaaattaggccccgatcgaaaagccgcaaaagaaaaccccggggaaaacaaacaaacaaacaaacaaacaaacgagaccccccagaccctagttttgggtactcaaataaaaacgcgccccggccggccggccgggttgtgcaccccaacctccggtactggccgttgcctggcactggccgggggcccccccctcggttcaaaaatctcaatcggagagggttaacatgatggccctggggaggtactcttagagggcgccccccttgtcgcggggggggccccggacgggggcgcccaagcgggcggggtgcaaaacaagggcgttttaaaagggg

SEQ ID NO: 4370 - DNA, 272 bp, Zea mays
  Clone ID: MRT4577_103985C.1
gcgcgtgggaaaggcgcgccatcatgtgaggtcgtgggcgcttgcacgaggccccctccccgtaccacagccccagtgctacaacgttacgcgggagtccagaactcccctaccggaaccacccttattttgatctttccatatgtaaaatacttcctgtcctccttctcttgcactaatatctcacttctcatgcgcatcgagataatttctgcttcagactgggagtgtcaagcatattgttttatgcactgattctggacagagcaatc

SEQ ID NO: 4371 - DNA, 420 bp, Zea mays
  Clone ID: MRT4577_103986C.1
tgcaatcgttccaaaaccagtatgtttttgttgacgaagaatatagaacagcagcggattttgttcgtcaaaaactggactcaagcgcggcagacgaggtggatgaatctgcttgtgtgataaaaaaatgttctgaatacgctgaaagatatttcaatgaaactgcacaagatgtggtagtacttgagtcagaaagcactgatgaatctgaagtttgcgactgtgagaccattgcttgcacattctctaaccttgataatcatgctgggaaaattgaaactccaggactgcacagaaagcggctccctagagttttccctggagatacaactactacacatgacatcatcaagcttcatgggaaagagaaactgccagtacaatacctgccacagaggagacgaaatggtgaaaaggaga

SEQ ID NO: 4372 - DNA, 323 bp, Zea mays
  Clone ID: MRT4577_103987C.1
tttttgtggtgaaacatttttttttttatgaacaagcatacggtcataggaatcagggtagggacaggaatgatcatgtgtcacgatgcgacctaaaggcatcagatgggggctatgatcatgaactctacaaatacgtcatgagcgggagaaaaggaacaacaggcgacaattcgaaagaacacggctacaaacatgagacgaaatatacggtatgttgattcccgtaattggaggtctagctcgagagttgggacagtgagaatccccctattagcaactatacaacatgcggtttacagcctgggagctgagattgagac

SEQ ID NO: 4373 - DNA, 749 bp, Zea mays
  Clone ID: MRT4577_103988C.1
gttgcgtgtctctccccctctcttctctcttgctcgcccgctcgcgttcaccacgaagcccaatcgcagcactctgcctcgtcgctcggagcaccgcgccatgcgccacccatggaagcaccccaccgcgcgccacggcgccgccgagctctgcttccgcgaggtcggcgacctcctcccccgccgcttcgctcgccgcgccgccgcctccgaggagcttgtaatgcgcctccagattcataggaagctcaacaagcacacaggatgcgtgaacacggcgggcttcaatgccgctggtgacaccctcatatctgggtcagatgatcagagggtaatgctgtgggattgggacactggtgcagttaaaatgcagttccattcgggccatggcgataatgtgttccaagcacggttcatgccttacacgaatgatcgcaccattgtcacctgcgctgctgatggcgaggtagatgtgttaatttctctttcatatactccctctgttcctaaatgtaagtctttttacagattccaacaagggactacatacggaacaaaatgagtgaatctacactctaaaatatgtctatatacatccgtatgttgtagtccattgaaatctctaaaaagacttatatttaggaacggagggagtacttcacatgatgttcagatggtgatagtaagttcagagggttacatctgttaattcaatcaggtgagagttgccaagaaccagaatggccggg

SEQ ID NO: 4374 - DNA, 332 bp, Zea mays
  Clone ID: MRT4577_103989C.1
taccgacccaacccacccatccactcagtcataaaatatactcctccgttgactttaaaatcaactaacaggtcacaaatagtttagtaacaaatatttgagaacagagacaattaaccaatattcatagatcattgatcatattatccaaaacgttttgatactacaagacagattatatgcacaagcctattcacaagatatgactccctcagaactaccctacccaaacaccaacccctgaaatgaaccaaggaatatttatttaaaaacataaaatctctgactacaacaaatcacagctcacaaaccaacaatgcttcctgctgact

SEQ ID NO: 4375 - DNA, 815 bp, Zea mays
  unsure (1)..(815): unsure at all n locations
  Clone ID: MRT4577_10398C.1
ttcgaactctctcccagacgcttcctcggtctttctgttctccgctgccccgtcccgtagagtggcgctgccgtttctgctgggtgtggattacccctgtgttcgtgctcgtctttgttggggtaggtgttactggtaaagccacatttgtgagatggtctattgctggcgagtttgagatgagatatgagtcgttgattggtgttgttgtttgtcgtctggattttttgtttctgtgttttttggttttttggtgggggtggtgtgtgggggatgggggggtggtggtgggaggggggggtgggaagtgtgntgtaagtatgatgtgagnattgggnngtgatgagtggagatgaatgttatgtgtgaagaagaaaagaaagaatatgagaatgaaagaaaaaaaaaaaaaaatagtgaaaatattgtgaaaagtggagaaagatgaagaaaaaaatgaaaaaaaaaaagaaaaagtgaaaaaaaaaaaaaagaggagagaagaaataaaaaaaataaaaaatgcgaataaaaaaataaaaaaaaaaaaataataaagaaataaaaagaaaaaaagaaaaaatgaataaaaaaaataaaaaaaaaataataaaaaaaatgacanaaataaaaaaataaaaanaaaaaaaaaaatgaaaaaancnnacaaaaaaaataaaagtgaaaataaaaanntaaaanagaataaataataataaaaaaaaaaaaanaaannaaaanaaaataaaananngaaaaaaagaaaaataaaaaaaaaaataaaannnaaataaatgaaaaaaangagannanag

SEQ ID NO: 4376 - DNA, 393 bp, Zea mays
  Clone ID: MRT4577_103990C.1
ttattttttttttttttattaaatttttttttgggtttttttatattttttttgtggttgccccccttccgcgctaaatttattgtctcacagaaaaagacggagcccaaaaacggaccccccaacggaaacggggggaaaaaaaaaaacaacgccgaggagagaaacccccaccccgcagacgggaggaccaggccagacacaagggccgggaacccccccccccgccgagggtaaaaaaacggcaacgcacgcccacgcccaaaccttcgggggggaggggcagacctaacggggccccgaagggggggccccccaagtctaaaagtcgcggaaaaacgcgggaagccctgttcggcccgcagaagacgctgctaggggggggggggggcg

SEQ ID NO: 4377 - DNA, 907 bp, Zea mays
  unsure (1)..(907): unsure at all n locations
  Clone ID: MRT4577_103991C.1
cctcgagggccgtgccgacnngctaacagagcanntcccaggctccccggccgggagacatctatacccccacccacccaaccttcggcagtccccatcctctcctgtgggcgctccctctccccggcccccaaatcaccgcgcctccctcgccacgcctcacagggccggttgcgtaggagaaaggagaaaggaaggaggggaggcggtcgtcgggcgagatgagcgactccttctgccccgactgcaagaagcatacggaggtggcgttcgaccactcggcgggggacatggtgtgcaccgagtgcggcctcgtcctcgaggcgcactccgtcgacgagacctccgagtggcgcaccttcgcgaacgagtccaacgacaacgaccccgtccgtgtcggtggccccaccaacccgctcctcaccgatggcggcctctccaccgtcatcgccaagcccaacggtgcgcagggcgacttcctatcctcctccctcggcaggtggcagaaccgcggctccaaccccgaccgatccctcatcctcgccttccgcaccatcgccaacatggctgaccggctaggtcttgtggctactattaaggaccgagcaaatgaaatctacaagaaagttgaagatctcaaatctatcaggggaagaaatcaagatgccatattagctgcatgcctatatattgcttgtagacaagaagatcggcctagaactgtgaaagaaatatgttcagttgctaatggggccacaaagaaagaaattggcagagcaaaagaatttatagtgaaacaactgggaagttgagatggggcaatctatggagatgggaaccattcacgctgnaattttctgagaagtttctggtcaactcttgggatgaacaatcaagctggtagggc

SEQ ID NO: 4378 - DNA, 1740 bp, Zea mays
  Clone ID: MRT4577_103992C.1
tcccacgcgtccgccctaatggtgtgtttggtttgtggagtcaccatatgcttcatgaggtgatgcatcataagttcttcccataaattttggtggactcaatccactcatcatgtatatactaattattagcttatgaggaataagatgatgatggatcaactcattctattccataaaccaaataaaaaagtgaggagtgagaagaagatgaaccacttcattcttcaaaccaaacacaccctaagtgattcatgttatgtatatgtatggtagccttttttctctttttgaagatagatgacatgtttaacacttccctaaatactcattgagtcattgaacatattgttgcttcctgtgttcgatagaacaataacttatagcttaattcagctaaattactgatatgtagtactccctccattaaaaaatggtaatcatattagaccagagaaaaagtcattcaaaatagattttgaccatcaatttctcttgtaatgtaaagtcgacggtctaaaaataaataccatcttataggcacttttaacacaaatctattgatgcagattatatgctctaaactttaatggaatttgattagttggtcaaaatttatgaagtttgactttttctctggccaaatatgattaccacttctgaacggagggagtaattatttgtttttgtctttactcttcaaggaccgagcaaatgaaatctacaagaaagttgaagatctcaaatctatcaggggaagaaatcaagatgccatattagctgcatgcctatatattgcttgtagacaagaagatcggcctagaactgtgaaagaaatatgttcagttgctaatggggccacaaagaaagaaattggcagagcaaaagaatttatagtgaaacaactggaagttgagatggggcaatctatggagatgggaaccattcacgctggaaattttctgagacgtttctgctcaactcttgggatgaacaatcaagctgttagggcagcccaggatgcagttaagcactcggaggagcttgatataaggaggagcccaatctcaattgcagccgctgtcatttatatgataacccaactctcagaggacaagaagccacttaaagatatatccttggctactggtgtggcagaaggcaccatcagaaattcgtacaaggatctgtatccttatgcctcaaggctcatcccgaatacctacgccaaggaagaagacctgaagaatctctgcacaccttaggaagcttacttttttccccctttctgttactacataattcggaattagatttgtcaaagaggagtgagtgaagttgttcctcgttgtgactgtaccgggcaaggtgtcgtccccgccgtgcttaactttatgatggaatttcttttcagagcacctaccacctgaagatttgtgggatacgtatactcacttcggaaagaatgtagatagcaagcagttggacaagcacaagattttaatttaaaacatgattttgttctccatcttctgaagaaaccatcacttgtccatcttcattcgaagtgccctccttgataccaagagaattgttagttgtctaaaattaggtaaaattatgatatgtttggactggcaaccccaatctagtcccattaactcctatgtattatgaattaataaggtgccgttccgttttcacggaacggagacttggaacaaaaaaaaaaaaacaagg

SEQ ID NO: 4379 - DNA, 1589 bp, Zea mays
  Clone ID: MRT4577_103993C.1
ggcgattgggtttcctcgaggccggccgggctggcctggccggtctgcctcgtccgcttctctctcacccttcctccccctcctctcctgtgggtgctccctccctctccggctctccgcctctcccccgccccccaagcccaaatcaccgcgcctcgccccacagcaccggttgcgtgggaggagggaggaaggaaggaggggaggcggctgtcgggcgagatgagcgactcctactgccccgactgcaagaagcatacggaggtggcgttcgaccattcggcgggggacacggtgtgcaccgagtgcggcctcgtcctcgaggcgcactccgtcgacgagacctccgagtggcgtaccttcgccaacgagtccaacgacaacgaccccgtccgcgtcggcggcccctccaacccgctcctcaccgacggcggcctctccaccgtcatcgccaagcccaacggcgcccagggcgacttcctctcctcctccctcggcaggtggcagaaccgcggctccaaccccgaccgatccctcatcctcgccttccgcaccatcgccaacatggctgacaggctaggtcttgtggctactattaaggaccgagcaaatgaaatcttcaagaaaattgaagatctcaagtctattaggggaagaaatcaagatgccatattagccgcatgtctatatattgcttgtagacaagaagatcgccctagaactgtgaaagaaatatgttcggttgctaatggggccacgaagaaagaaattggcagagccaaagaatttatagtgaaacaactggaagttgagatggggcaatctatggagatgggaaccattcatgctggagattttctgaggcgtttctgttcaactcttggaatgaccaatcaagctgttaacgcagccaaggaggcagttcagcgctcagaggagcttgatataaggaggagcccaatctcaattgcagccgccgtcatttacatgataacccaactctcagaggacaagaagccacttaaagatatatccttggctactggtgtggcagaaggcaccatcagaaattcgtacaaggatctgtatccctacgcctcaaggctcatcccgaatacctacgccaaggaagaagacctgaagaatctctgcacaccttaggaagctttactttttttcccttctgttatataaatcggaattagatttgtcaaagaggagtgagtgaagttgttcctgttgtgaccgactgtactgagcaatgtgtcgtcgccggcgcgcttaactttgtggatggaccaatgagaacataagttgtcatcatcagatcgaatttcttttcagagcacctgccacctgaagatttttttgggatagcaaaggtgtcgttttcgtatactccctttgggaaaggatgtagatagcaagcagtccttggaagtgcacaagattttatttaaaagaacaggattctgttccccatcttcaaaaaaaaaaaacatttatccgccaccgcggtggagtttggatggctgctccattgtgttttcccctgtgactgatatacaggtattgattctggagaatct

SEQ ID NO: 4380 - DNA, 756 bp, Zea mays
  Clone ID: MRT4577_103994C.1
acgtagtccagaccgaaaccctgaaccctaccgcccccacgtcgccggcaaccgcgacagagcagtcgccgccgccaccatggctctcctcctcaagcgcaaccaccacctctccaccacctcccgcccccttctccgccgcctatgcaccaccgaggccaccacagagccggcgcccgcctcgccgccgccgccagctcccgactcgcctccacccatgacgcccgcggaagccaagctcctggaatcgctccacgcggcgatcctcgaccacagccgcgcccacccgtcgacggcgctcaccgcctcgccgccattcgagcccctccccgcgctttcttccaccctcgccggcctcctcccttccccgcccgctccgcacctcgcgctccagctcctcggccgcctcctcgcgctccgccgcggcgtcccgttcccggaggccctcacgttcttccaccacgtcctcccgtcgcatcctgcggactcgctccccgcgctctacgccgctatgattgacctgctcgcgaagcaccaccacttcccgctcgcccgacacctgctcgacgaaatgcgcgagcgctccatccccgtctcgtcgcaggtcatcctcgccataatccgccggtacgtccggggcggggatgtctgccgaggcctccgagctgttccgtcgcatggaggagtatggcgcccgggtccctgaccctgtggtgctcgcgtctctccttggcgcactgtccaagaagcgcctcg

SEQ ID NO: 4381 - DNA, 336 bp, Zea mays
  Clone ID: MRT4577_103995C.1
taggggccttttttttttttttttttttcttaactaacaattaccgtatctcttaatgatagccagcagacatgacaacatggcagctatcgactatcagcgtagggacaaaaaaaatagccgccacaagagcaccataccagcaccaataaagtttcaacgtacattgtgcttcgaccgaataccataagtctcggcaacaactgggcccgacagcagctgcaggacgcttgtgactgactacaaaccgcttagtccagctcctcgatctttgagacaaggccgccggtggctaccagagagacctcgtccgttacgccaggggcggccatgttt

(The sequence listing continues in the following parts.)
